United States Patent Application Publication US 2019/0348154 A1 - sequence listing, part 88

SEQ ID NO: 331938 - DNA, 879 bp, Pseudomonas aeruginosa
gtgcttttggatcaactgacctacgatcaccaacgtctcgcttggatgcatgcggtgctggtgttgtcgaaaaaaataagcattggtagcgcgaaagccaatgacgaactgcgaaaggcattgttccaggctggatcccttaagaatatctacaacgatcacttctccatgataccagtggaggaagatgttgcgctcaaagtgtttgataaaatccagaagtttaaggctaattatgaagtcgtaacctgtttggatgagcattatcccaaagttttgctggagtaccacggtactcctccaatcttgtatttccaaggcgacattgagcttgcttctgtagaaaaaacaattgggttcgtcggcactcgggagcttttcgatgaggctcatcgtgaccacggtcggcgggtggttcgtcgcctggccaagtcaggcttcgaggttgttgtaagtggattggctgaaggctcggataccttagggcatgagaccgctatccaaaacggtgggcgaacgattgctgttctgggtacgccgttgaacatgcactaccccaagagtaattccgccttacaagatgagatcgcagcccaccatctggtcgttacagagtatccggttgggatcggctcatttgggtcattcttcgcgaataggaatagaacaacggttgccttgtccactggtggtatcgtcgtagctcgagccggtgataaaagcggcacccaacatgctattcgtatttgtttagaacaaaataagcctgtgtatgtattggagaacaatatccgggagtcttcatatacatgggttgtaaagaacaaggataggataaaagttattagggagaatttcgatgcgggtgctaatatttga

SEQ ID NO: 331939 - DNA, 1314 bp, Pseudomonas aeruginosa
atgcgggtgctaatatttgatctcgattttactctggctaacacaactgaatgtctcccttacctgaccacaagtggcggtcgaggtcaggttgtcgctgcgcttgatgctggagacatttcagtggaggcctatgacagagtccttgtcagggacttcaatagctcgttcacaaatgatctgtgtgctgtggttgtttctgactctcctaaatcgtactgtgttaaagttctggatgagtgcggctacgatatcgaagagcaatatgtatttggctcccaaggtaagccgatggttgattttgaccagatcattgacttgctggttgaagaacttgatgtggaggctgatgatttagagttcctcgtaattggggatagccctaaagacatttactttgcccataggattgaggcgccctcaatattcgctgcttgggggacgaggcatgatctagaacttgctcggcagtcaatgcctacgagggtggctcaggatcatgacgagttacggtcgcacgtaagatcgtttttggacggccacttgatttatgaaaatcatgacttctatgaacgctttgatttccaggatcctgatgaaattgatcgcatctcattggatgagattgggttcgtcaaagagtatgttccaaatcgggaaaattacagaggcgacaatgacaggtgggcctccagagatttgcattgggtcgtaaagcctgcgaaaaactacgatgaagatcaccatcgatataacagagaaatgcagctttatggtagtgatggtgtttttgatactcgttcgttaaaaagtttggcaggtatctataagagagccttcaaaacatggctggaagagcaaggtgtagaaggaaaggttgtcattgtgcctgttccgccttccgttccgcatgagtgtaatctcagttcccctgtcgagttaatttctgggtggtggagcgtatgggttacggacgaagtcgaaaatatcgaaatgggctcctatgatgtggttcgaagaatactccctaaacatccatctcatgacacgcctggccctcgacacatggatgaccaatttcctacgttaggcttggtgccagattcggagatcgaagaggatatcgattatgttgtcatttttgatgacgtcgtaacatcgggctcacacatgaatgcggtagcttctattttgagctctgcagaaattattcccggaaacccgacgtatttgggctttgccttgttcaagacagtacatccggaaaatgacattcttaatctgggtaggctgaacttcggaaatttgcgctag

SEQ ID NO: 331940 - DNA, 783 bp, Pseudomonas aeruginosa
atgaatacggctatacagggcagtaagacggtgtatatgggtgatgccaacaagggaggtgttgttgtcagtaaggatctagcaagccacgaagttggtacgctagaggagctggttttaattttgcttattcttgggcatgaatcagctcaccttataaatgttcataacggttatcgggatcagaccaatgatgatacaagagcgattgaagtatgggcagatttcttcggtacaaaaattgccgttgtaatgttgacattcggtgagaaaattcttgatctagttacgtcttttcctggtggcgctgagactggggcgcggattgacgcaatcggagccgctataggaaggctagcggtttcctattttgaaactaatgatggacgctatgaacccgcgcctgtacgcgtagctacgtgtgtcgccggggtgatgtcggcgctggataccttctgggctatgcaagggaagggaaggagtgtggcgcgctccttgagtattcaaaaaagactgtacgcatcacctgtcatgaccggacagttgcttagagcagatgctagagcgccagaccgttctcagcttccgttgctgcgtcagattcataaagtaattcagggtgataaggattcgattacacctggtatgcgtgatcttcctaagcaatggctcggaacagattacagagggagcgaagaagctcgactggccaatgtgaagcttcagaatgagattcttatggctgagctaaaaaaattagggctggaaattcctccggaatga

SEQ ID NO: 331941 - DNA, 294 bp, Pseudomonas aeruginosa
atgaactacctggcgccgttcaaggacgaagggctgatgtggtgctcctggggtgactacgatgccaaacagttggctatggatgcagtgcggaatcgctgcgaatccatgctcgccgaccttagccacactaatgctaagaaatggcactggaaaatcctagcctgccgtgccatggctctccggcccgccgtcgaacactggggccttgaatggtctggtcaatatcatagagggatcgacgacgctcgaaacctgggcgcgctggtgggtgaaatcctgcgcgctagttga

SEQ ID NO: 331942 - DNA, 1008 bp, Pseudomonas aeruginosa
atgccacacctgctaaaactgcccaagaacctatctggccgtgactttgtcgtgggtgatattcacttcaaaaccagagagctccacagaggactccaagcgctcggtttcgaccggtctgtcgacaggttgatcgcggttggcgaccttattgatcgcgggcctggcatgcttgacggactcaaactgttgggggaaccctggttctacacagtcagaggcaatcacgaacagatgctcatcgacgcttaccgtgccaatccacacctcccttactcggctcacggtgctcggtggtggatgaccattgatgacgactcaaaaccagtgatcatcgacaagctagatagtttgccgatggctatcgaggtggagacagctcaggggttggtcggtgtagtacacgcagatgtacccgtgggattggcctggaatgatttcacccagagcctcgaaaacacgcagatccaggatgttgcattgtggggtcgcgagcggatcaagaagcatcatcgaggtggtgtgctgggcgcatggcgtgtctgtgtcggccacacttggattccgcatgcactgcgtctcgggaacgtccttgccctagacattactggtggcgggaatgggcccctggcgatctactcactacaggacgacgtcgtttacgtgaatggtgaggcgtcggggctcgatcaggcagaacgcctcggtgagcaactgaaagagcttgagcaatcgctcacctcgctgaaaactctggcgcatgccaacaagctcatcgaaactcagatcgcgagccgtgaggctgaggcctgtgctcagcagatcaattccacctggctgaatctagctgacgatatcgctagcacgcagcaactgtttaatgccctacacgggttgagtttgctgtccggggagcggcgctctgccaagctacaagagctgcaggaacggtacgctggcacacctacgggcgaactgctcattcggctcttcgactctgctttgtaa

SEQ ID NO: 331943 - DNA, 987 bp, Pseudomonas aeruginosa
atgcgcgttcccgtttaccctgaagatttgctccgcaccggcggtttcaaaagactggccaagactctgcaaaagaagtggtgcggttcaaagcatctgacgctctcacttgctcaagagctgatggcacaaggacttggataccaagatcttcatgatctccagagaagctcaaaggagtgccaagtggacgactcatgcccgctaattgctgatctccagcgtaacgtcatgtcggttctggaaggtgtaacaggagcggaacagagggacgtggtagggctggttgagctggagttgatgatacgctccttgccgttttcatcccttacggcattgaagcccactcacaccgctccagtgcaaacaacacaccttgctgccacccgttcatggcttgcttctcacagagagggaatgcggagagcagccgatgtaaatagcaggtcagaccgcccaagcctcacgctggatcaacttgaatcaatcgtcggtgtcgtctcagaatctgagagtttgagggatcaagcgttgctgggctgcgtcctgtcgggattgcggttaacggagcttcaatctgccagagtcaatgacttgcgcatagttaacggggtcttgttcaaccgtcgcccccatagacgagcgttgcacctcgctgatgtcacggtcattcaacagtacattaaattctcaggacttaagggtgacgactacctgtttccaaatgccggtaaccaaagatcgcccttgacctcctggagcttcgacaagattttgtcctcgtgggcgatcaaggcgggcctagcgccctccctcgtgaaagtcacgcaaatccgtcacctagtagcaaagttgattgaggcgcagattccccaaatagctgaaaggatggggacttcaagcaccgattttgtacgcgttttgatgagctcgcattggaagggacttttgcccaaccgtccaggtaaaagcatgcgatctgcgtaa

SEQ ID NO: 331944 - DNA, 693 bp, Pseudomonas aeruginosa
atggatatcgttaagttcccgtttttgggaaacggtgaaaacaaacacatcatgccttactcagaaatgactaagagcgactccaccaccaaatacactgtttacgatagcaaaggaaaaaaagatcgtactattgtaattcacatggaggagctgcggtttctagaagagaactacatcaagccttattactatgatcggcgagcgctatacaaaaagcgttttagtcacgattgcccacctagcattctatttttgaacaaagaaggcattcccgtaacgcccatcaaaatcgccaagcgcactaatgcggcgaaggccaaagcgatggccatgaaccctgagttccgacctcacatcgacttctatcaggctaggcattggtggcctacccagtatttgattgcaacgtatggtgacatgctgcttactcagacgaccgatgccttggtgctggccgtttcacaggtcatcaccagtcagcttggccatgaagacatcgaaaccacctacaagcattacatcgatatggcccgggtgatcatgctgtcctataaagggcaatcgctcgacctggttcagagccatgatcgtgtggcgcttcacttcacgaaactgctggagaggccgggcatgtacgatcagattgagctggaggatgacgaggcggcggctccggacgtgcctgcttga

SEQ ID NO: 331945 - DNA, 1041 bp, Pseudomonas aeruginosa
atgtctaaattagtcgagaacaatgggcagcatcgggttgacattgaggctaaacccggcacaggcgcggaagatcgtcggcagtttataatcgatataattgttcagcactacctatcaggcactaaaaagaagcttaagttagtagatttagcagagcgcgcaggcattagccggcaagcgctagatcgatactatggcgacctgaagccgtatatcagcggcgagaaagacgtcactcagctggctaaatctgaagatgacaagcttcaaatgcagatcaataatgcagttggccaggcggagcaacagtatgctgctgaagtagaaagactcgaaaaggctcacggaattattcttaaagagactttgaacaggcacatcaccactcttatgaatgacgatttggttatacaccatagccatacgattaggacttcactagagaagcagaccctgcataacgacaagctaaaaaagcagctggcagcagcggagttgcagattgctcttggtgcaacatctcgccccccagcatcgaagggaagccagaatgaaaatcataaactcatattcaatgtggatatcgaagggatatgcactaaactaggcagaaagccggatatagatgacctagaagatgccaaggacgaagaaattcgcaaaattcgagataaactcaataccttttcaacggtagagaacgtcagggtagttattttttctgaaaggtacctatcaagattcagtacgtttgcggaaaaccttgaaggctccgaacatgaaacatctctaatagttagacttccacttttcagcagaaatgagatcttgaatttcatcaagcatttgccgaagcaattcaaaatctctgtctatgtcccctactgcccatcggagcttgaaaaaagggctcaacgtgagttcatgttcagaaatttagcaaccgaggaagccaaatcagccgataacgctgacgccataagtatttcctggggcttcgacgaagtcattcacttcaagatcaaccagggcgactaa

SEQ ID NO: 331946 - DNA, 2085 bp, Pseudomonas aeruginosa
atgaccaagaaatccaacgcatttcgaaaccgtgaaaaaacacaaaatacatcttcaatccatgatgatgactacattggagatgagctggagcaagattctctagctgacgaaatcgaagccgagcttgatgactcacgtggagagcttgaagaagaattcaatgaggcgtttggtgatacgtaccacactcccgcgctttctcttcgaagcaggttggcagcgggtggcggcgatttcgctatggtcgagggaaacacatatctgagtcatgtctggacgttccctcgaacagcaggttcagcgaataacgtccattttaactccgcttcagaagaattcaacaccttgaagcgtgcactaattttttattcggtaaaggattattgccctacagggcgtattcgcagctatagcactgcaaagctggctggattcgaacatcgaaagttggagcaatatatctttctggacaatcatctgacggcgtcccctcaggacatcaagctcatttccatgcctcttattcaaacaattttggaaaaggctcgaaatgaccctgccaggtcgatgtttatcaagatttgcaaaatgcttcgccattggatcttgctctccgacaacaagctgatacccgaagagctgtgcctggaagttactatatctgagttctatacgcctgagttacgccaagaaatcatgggccgcatgttcagtggctcgcttagctcctggattccttactcagaagaagacttagaaatactgacagagtattcactattttggattgaaagtgcgggcccaaaacttgccaaactgagaaatggtttaattgaaagcggttattctgagcgtgcagatggcattatcaacagctttaagcgactaccagaatttgaggcgttaacggacattgaaatcaacggcacactggtaatgaagacgcatgtccgcaaatacaaaaaggacgaaaagcctgcttttggctactcttggatcaagcaatacagcttggccctagaccacatccgcaatgcggtctttgttttggtcgctcttattactggagctcgtaggtcagagcttgcgacgcttaagttcagcgacttgacccaggcagctaatggtgagtattggttacgaattctgcgcaccaaaacctccgacaaccctacaataggcgatgaagaccatctgcctattccacaatttgtcggcgatgcaattcgtcagttggaaacgttacgtgatgtaggcccattcaaaaaaggcggttggattttccaatctaatgctccacataattcaataaaacgggcaacccctgaaattataataccgataattgcggcgttgcgaaaagctctacccatcgaccgccttcattgccaccgtttccggaaaaccatcgcagaaattctgatcaaccgggatgagcgaaacatcgacatcatccgggccttgtttggccaccgaagctactccatgacgcttcagtacatctctcgcaaccccttgatggtgaggacggtagccttagctatcgagcagaactacacccgaagcttccacgagatcgtagccggcattaagtacggtggccattcgggtgaggcggccaaaaggatcagggctcagatggaagagcgacctgaggcattcacgggcaagcagctcaaagtctccctcatgtcctacatcagccacctgcttgcttctggtgagaaaatcttcgttcgcaggacagccgtgggcactttctgcttatcgggagagagctatagctcagagaacgttcccccctgcttggttgggcgaccagtcgccaatgacaattacatgccagatgcatccaactgtcagccagactgcaaaaaggttgtggtgattgagtcggccaaacaagcactgatcgacaacatcaccttttactccacgcttctcgatgcctcgcgaggcaagctttcgccagttgccgaacgcgagttgaatcgcaggatcgctgccacccggatgcatctgaacaatatcgttgccactggccgagctgaaaataatttgatcgaggtcacccatgtctaa

SEQ ID NO: 331947 - DNA, 2244 bp, Pseudomonas aeruginosa
atgacggcacctatcaaaactaccatccctgcatcggacattgatcacctgctgggcctgccagacgtcgacgtcacagaggtgaagaaagtaacctgctccaagggcaggaatatcacctgcaggtatctaaagctcccttacttcagtatgaccaatgaattgtgcaaatctttgcacatgatgttcgtctcatgttctgtggacgcgattagcaccaacatctactctcttcgtggcggcatcgaactgcttctggagttcatttccggcgtaaacgcccgcaaccctcaccaactgcaaatcaagaattacaccgacatcaataccgaggtattccgaggctaccaagactttatcgcacgcgagaagcactctcctaacaacgtagtaagtctaaaggctgcttttaataaagctgccaacatgggcattctcccgcgcctaatcctaccgatcattgacattgtccccaagaacaagacagaaccactttataaagatggttttgaaacacttcagacagcatgctcgacccacattactggactttataataagttgctattcagagatgaggtcgagaaggctaaaccgtatttagctagtgaggtgatggaggagatccgtcccgctcccacacgcaagcgcctgctagaatggcaaaaacacgttgaggtgatgaaacgagccgctcaccgtccaacctatcaatccaaattttccaagtgccccgaccccgaaatcagagccttagcgacggatcctgatggcgtaaataaattcaaaaaaatttatgaagcagagagtgcgcatatagagttcgatggcttaacagatccctttgacaagggggttaggagctggacaccggattatacaagaacaattaaaaccttacttgcaaacaacttcccatttggcagaagttacgaagaagttacccaaaagtacgcaaacacccaattccaggggcttgaggacgattgcgacgacatcgtaaaaattattttgcatcgggtttctaccgccaatcaaaaaaatagagtagaaccacagatactgaaaatcgatgaaatcctgggcttctactaccccactattgaagacatgactgctcttctcaccttcatgatgtttcagtcaggctggaacaaagaaacagtgctgtcattggatgaaaacaactacgaacaccctctcacaggtgtaatcgaagaagcaattaaggttgtgtactccgaaaaaaatagatctcaaaacaacgacaagccatttgaaaaacctaagcgaattcaccttccctcaagaaacgacgacccacttagcttttacaaccttgtcggattatgccagcgcttagccgaaccactagccattcatccgttggatcgaatacctgcagcggcggaagaagacaagatgaatccgctattttattgcatccgcgcgaaaggggactgggctaaaggtggtagatacacgtcgattgcctacacaccgtattttttggttggaatcaaaagtctactcaagaggtacgaggtagttgataacggcaagcgtttacagagcgcgagcgagttgaccaggcgattgaggccaacatggttgctacacaagaaaaaaaacaaccccatttcgctattatcgacgacgatgggacatagcgaccgagataccaccgacattttctatgacgattcgggcgctgctcggcaagaacgattgcagcgtctgcgctcggaacttgaggaaattatccgtttgctgagggctcgtcagttcaaggggatgctgagcaagcatgctcaagctcaagctagtgctcaattaaaggtgtttcacttacctggacacgacagaccattgtggggatgtgcgaaccagaatggagcagactggcctggagcggaacttatcgcatcaacagataaaaaatgttattccatcccaaattgttttttttgcagtcaaatgagggtatttcaggacaccttaccattcttgatcgaaagggctgcccacctgcaagaaattcttgacgaaggtgacgtcggcgaaatcggctttgacaccatattcacaaagcagttggaagctattcattatgtccttgataactggggcgacgaagatgacatcaaagcggcagcacgctatcgccgtcgtcgcacgccattgttacctcgcgatctaaagattctcgaaatcatcttcgaaagcgaagattacaacatttaa

SEQ ID NO: 331948 - DNA, 870 bp, Pseudomonas aeruginosa
gtgagaacaatcatcggcttggcggcactggcacgatccggcaaagacaccgtagcgtccatgctgctcgcccatcccaacgtggcagcgtttgccctggctgaccccctcaaggtggggtgccaggccctcttcgggctcactgattccgaaacctgggacgataccctcaaggagcaaaaaatctcgctgtgggggaaatcgcctcgtgaattcttccagacagtcggaactgaatggatgaggcatcataacccagagcactggttgatgagagctgagcgggagattaatcgctctggctcatcactctcaggtggggagcagatccctcaagaagccggtgcggatgaccctttcatcctggcagcccgagccttcttcgacttcacggtggggcagctcagcaacacagaagagctgaacacctatgacgctgcttggggcctctccccccaggaggctatcgatctcatcaagcgctatgcctatgagatgttccctgactatgaccagttgcgctcccagcgcccgttggaagccctgaaaccccatggccaggtgcctcacgattcaaaggtcatcatcatcaaggacatccgtttcgagaacgaggcagccttcctgcgtcgacacaacgggaagatctggcacatcaagcggcaggatctgcagaaggtaaatgcacactcctctgaacacggcattcttcaagccccagaggacatgctcatcctcaacgatggcagtctggatgaccttcgccaaaaagtagaagcggcttggaatgcacatggcgcttcgctccaacaaggcactgcagcagtagatgcacagggcacgtccgaacaagagaatggcaaggtttga

SEQ ID NO: 331949 - DNA, 213 bp, Pseudomonas aeruginosa
atggccgccgtcgcgatcgcccaccagaacgacaccgtcgaggcgctgtgctggcggcactacggccgcaccgccggcgtgaccgaggcagtcctcgaggcgaaccacggcctggccgaccacggccccaccctcccccctggcctcaaggtcaccatgccggacattccgacggccgccccggaacggcagatggtgaacctatgggactga

SEQ ID NO: 331950 - DNA, 807 bp, Pseudomonas aeruginosa
atgacccttcgatatggtgaccgttctcaagaggtcctccagcttcagcgtcgactgaacacctgggccggcgccaacctctacgaggacggccacttcggcgccgccaccgaggacgcggtgcgtgccttccagcgttcgcatggactggtcgccgatggcatcgctggcccgaagaccctgtccgccctcggcggcgctgactgctcgcacctgctgcagaacgccgacctcgtcgccgccggagctcgcctcggcctgccgatggcgacgatctatgcagtcaaccaggtcgagtcgaacggccaggggttcctgggcaacggcaagccggcaatcctgttcgaacgccacatcatgtaccgccgtctcgccgcccacgatcaggtcaccgccgaccaactggccgcacagttccccgcgctggtgaaccctcgcccgggcggctatgccggtggaaccgcagagcaccagcgcctggcgaacgcgcgccagatcgacgataccgccgccctggagtcggccagttggggcgccttccagatcatgggtttccactggcaacgcctgggctacgtcagcgtgcaggccttcgccgagtccatggggcgcagcgagtcggcccagttcgaagcgttcgtccgcttcatcgacaccgacccggcgctacacaaggcgctgaaggctcgcaaatgggccgacttcgcccgcctctacaacggccccgactacaagcggaacctctacgacaccaagctcgcgcgggcctacgagcaacacgccaactgcgccgaggccagcgcgtga

SEQ ID NO: 331951 - DNA, 339 bp, Pseudomonas aeruginosa
atgaaaaacgaaaaaaacaccgcaacgccggccgaagaccagaccaccaccgacaacttcgtagtcctcgaccagcacatcaagcgcggggagcaaatcatcaacatcctcactctgcgcaagccctcctctggcgaactgcgcggcctgcacctgctcgacctgctgcagttcgatgtggccgcgaccatcaaaatcctgccgcgcatcagccagccgaccatcaccgagcccgaggccgccggcatggacccggccgacctgctcgcctgcggccaggtgatcgccggttttttgctgcagaagcgggcgaaggcggcagcctccctgatcgcgtag

SEQ ID NO: 331952 - DNA, 534 bp, Pseudomonas aeruginosa
atgactactgcagaaagcttcatcaaaaacttcattgatgacaattttgaaaaccctgaggtacaacaactctacaaggaagctaagctaggagaggattctttcaaagacaaacttgcagagtcttatctgcagctttacagccacaagcaatcgcaggaggtgttctacagcagcgagaagcaaagttatatcactggcggaggtggatccagtctatttccaatcaccaaggatattaacttcggaatagcatcattccacatcgttgtgaaccaaacaagcagcgacggatactctgtcgatgtcacctcaaagattctgggttttagtgtcggcacatcccgaatgtcgttcgagaatggaactcttcatcgcgcagaagagattggaggcagctctctcggagcaagttacgatgtgaacttgaaagttattggtggatttggactccagcttgaagcgcacgtatgggttaagattcccatcgcaggcagaaagtccattgatttcggcccaacctgggttatttag

SEQ ID NO: 331953 - DNA, 1965 bp, Pseudomonas aeruginosa
atgagtcgacacaaattaccggtcggagtcattgatttttttgatcgaacaactagaaaaataaatcatatatacagacctgcatggcttcttaatgagctggaaagttctacatgggtcgtagactcaggggtggttgttcggaatgtagacggcaccattaaaggtggtgttcgtctaaattggaacaggcttttgccaagcggaagcttcacaagccctgtttatgcggttcctttggaacaggcaaaaatgatagtggtgtgcgcctatgatggagctcttaaagtcgctagatcgttaagaggcattcttcactttcatttatatctgttgtggctagctgagtttcttgctgttcgatatggaaacaagttttctgaagaggggttttctatttttggggtggatgacgtagttgagtttcttggagtggcagaggtaggaggtgttagtggaacaggggctttcatacagcgctgggaagattatctagcaaattccaaggatggaattgagccaatatcactttccgagcatttgggaaaactaggagcactggatggtaacggtaatctaaatttgcgcttcgctgcggctgctttgggggttgactacaaacggttatctcaatctaccgagttcagaagatacttgacgcatgggtttgattgtgaggctggaggtaagtccagcgagaacggggcatcaagagccacaactgctctatcaaactggatggttaatttctgtgaactgctatcttctctgcctattcaatcgcatgtagaaataggtaatccttatttaatatcggatattgtgcggcctttccgcatcggaggaaacggtagaacaagaaccttgcctctttctacgggaagaagtcttatgttcggttgcggcaaatggatgattgatacgtatccggcactcaactattactgcaatgaagttgttcctctttcacggtcgataatggatgagtcgaatgtttcagtgtttacggcgttatccatatcagaagaaattgttccgattccagatggactggtctctgcttttgatgcttacagacgaatgcaggtggatcctcttatctctgaggcaaaaattagaactcagtttccattctcgattttcttgttgaggcttcatacggccgtctgcttctgcttgatcggtgtcctgactagttgtcgcagaaatgaactggttgatctggataaaagcgctagttatgaggttgacggtagattctatctttctgttttactgaggaaaactgggtttgataatatgcgtgagccgatggaaaagccggttccgcgccttgtttatgagtgtttattatctttaaatgcgctaaaaaaactttggcaaatcatagtgccttcaagtgatattttatttaagtcgcaggcgttttttaaagttaacgtcagaggtgcctctccattcaatgtggctgatgcttatgtttttctaaaggagcttagtgagtacctaaaacttgttgataactcgggagaacgatgggtggtgctcccacatcaacttcgccgctattttgctatgacattttttcacttcggaggattggagaattccttgccggcgctttcttggtttatggggcatgaagatattggggaaacctggcgctacattaaagaaagcttaacaggaaaagagctcagtgcatccgaagctgcgttggctacttctgcagtttgctctgatgatcaatctcatggcgttcagcaactcaggaatatccttattaagcattttggcactgaaaaaatcaacgtcatgcatgaggatgagttaagagattacctagaattattgtcggaaaaaggtgtatacaccgctaccccaattcaaattaatgctggaaaaagaaagaggtatacggtggcagtttcagttagggagggtgccgatgcctcgacttggtaa

SEQ ID NO: 331954 - DNA, 138 bp, Pseudomonas aeruginosa
atgagttaccaagtgtggtggcccattcccttcgtggctctgctacttagtctcgacatggatagtcttgcctgcgtcgtttcggatttcttatttgcaagtagtcacaataacctgatttctttctgctatgactga

SEQ ID NO: 331955 - DNA, 1713 bp, Pseudomonas aeruginosa
atgactgaagtgtggagcgatcagaagcgcggcttcctggcgtgcaccgggcacgccctagcgctgggtggtcctggtggaggcaaaacacacgtcgcgctggtgaaggctcgcgatgagattcgctcaggagtactcaagccaggccagaagattctcttcttgagcttcgccaggcctaccgtagcgcgcatcatcgaaaaggcttctgagctgatttctcgtgaggacctgaagcaactggaggttagtacgtaccacggttttgcatggagcattctccggagccatgcctatttgctgaatggcaggcgaagcctgcagctcctgccaccgccagaagcagcagcgcatttgactgatatcgataaggcccaacacgaaaatgagaagcggcgccttttcgagcaggaaggccgtctgcatttcgatttgttcgcaagcttggtcagcgacctgcttcgtcgaagtgatcggctaaacaccatcttctccgacacctatcccataatcatcctcgacgagtttcaggacacaaacagtgatgaatgggcgctgattcagcagcttggaagacgcagtcgcctcattgcactggcagaccccgaacagcgaatctacgagtttcgaggcgctgaccccaggcgggtgggcgactttctggagagcttcagcgccgctcacttcgatttcgccggtgaaaaccatcgcagcggcggtaccgatatcgcaacctatgggaacgaccttctcaccggggcgaacaagggcaggacctatcaacaggtcaaaatcattcgctacggcttcttatatggaaagagctcgcacttcagcgccaagaccgcagtttactcggcattggaacggctcaagaaagtaccggacaagtcgatcgcggttctggtgccatccaaacggctaatgcttgagctttctgactatttctcatccacgtctgatggtctgccggagctatatcacgacgttgcaatggatgcagagccgccggctctagccgctggcgttatcgccacgctactggagggaggtacggctagcgatgtggcaagccgcatgctcggcgcacttcactcgcacattcgcggacggcgcggaggcaagcctacacctcagacggagcttgacctggcaggcgctcttagcggtttcctttccacgggaaagatccgcggtgccaagcgccagttgattgtcagcgaagttcaacggatctcagagttgcggcaacgactggaattcacaggtgacccttcggaggactggctatatctgcgcggcctgttggcatcctccaccgcggaagccttgaggcaagtagcaacggatgcccgctacttacgacttcttcatcgaggctcggtactgcgcaccagcttgggtgccctgtggcgtgcccagggtgggtacagaggtgctgaagaggcagtccgcagtgccttgatgcaggagcatttcgctgctgctcaaaaagactggcgcggcatccatctcatgacaattcataagtccaaaggcaaagagttcgacgaggtcatcatctacgaaggcctataccagcgcatcgccaaagccccgcaggacccaaagacctgcgctcaagacctgttagctctacgggtaggagtgactagagcggtacgccgtactaccgttgtgacgccgaagcgcgaaccttgtcctttcctgtga

SEQ ID NO: 331956 - DNA, 1857 bp, Pseudomonas aeruginosa
atgcatatgctcggccaggagttggtcaggaggaatgcaatcgggtggccaagtcagtgcaattgcgcaggtgacaacaatgccggcaagtcaacattgctggaagcagtggacctggtgcttggcccagaacgcctcagtcgccgccccgtaatagacgagcacgatttctatgccgggacgtatgtagacccggtcaaaaaagaggtggttccgatccagatcgaggttattgtcgccggcctctccgatgagcagcagcggcatttccgcgaccacatcgaatggtgggatgcgcaggccaaaacgttacttgtgggggctcccccggaaaggacagacgcccctcacgttggtgcagcaatgcgcgtcttcttcaacggctggtatgacgtagaagaggatgacttctctggggatacctattacgccactcctgaaacaccggatggttcctacctgcgcttctctgcacccgacaagcgaaagtgcggttttctctatttgcgcaccctgcgaaccggcacccgtgcactcagcttggagcgaggctctttgttggacgtgatccttcgactgaaggagacacgactgacaatgtgggaggacctgctcgaccagctaagggcactgccagttggagagaccgaagacatcggcgagctgcttgccgcagtccaagatgccgtgcggcactacgtaccatccgactgggcagaagaccctcacatgcgtgtctcggatctcacccgagacacgctccgccgaacactgaccgtcttcatgggtacgggcgcaaagaggccggacggttccgtctactctgcgccatatcagcaccaaggcactggcacgattaacacgctggtgttggctctgctgtccatcatcgccgaactcaagcaaagtgtaatcttcgcgatggaagagccagagatcgcgcttccgccgcacacccagaagcgaatcatcaattctctgcgccagaagtcagcacaagccatcttcacctctcactcaccctacgtgctggaggagttcgagcctgcccaggtggtggttctcaagcgagtggccggtgtcatgaccggaatccctgctacatacccaccatcagtcaagcccaaggcttatcgcaccgaatttagaactcgattctgcgaagccctactggcccgttatgtactcgttcttgagggtcgtacggagtacgacgcattggctgccgccgcccgccggcttggcgagttggatcccacacgattcaaatcactcgaaaaccttggggtagccatcgtcgacgctcgcggggagaccaatgtcgctccgctgggtgcattcttccggtcactcggtaagaccgtgtttgcggtgttcgacaagcaatcgccggaggcactcgcagccatcaaggcctcagtcgatcatccttacgagtctgcgagcgcaggcttcgaagacctggtgctgcagggcgcatctgaggccgcactccgcagctatgccgctgctgtagttgccggaggcgattggccgcagcatctcgcggcatggacaccagcagccgcaacgccgttggctgatctgcaggctgctctgtcgagttatttcagctgggctaagggtggtggcgacgccggcgacttgctcgcctcctgtcaaaccgccgacgacatgcctgaatacgtgagaaccacgttggcagccatcaagaacgtcattgagccaccacggctgcctccattacctccccaggcagccggcatgccccttctcccagaaactgcagccaagccggcaccattggcagccgcctatggaaggtttcaaccgtccccgccccagccttcgacatga

SEQ ID NO: 331957 - DNA, 816 bp, Pseudomonas aeruginosa
atgccacatctggacacctgggctgtcagcggccttctggttttactgggaagcttcgagttgcttgccggacgcatgctgaacaggcgccaatccgacgagcttgccgttgacgcgatcagccttgcccagttcgcattgctgattaaaccagcagtcatcgccggagctgcgttgatcctggcccaactggcacctggcgcagctggtcagctgggctcgcttccactttggcaggcggttctgctggtcataatccctgctgacttcatgcactactggtaccaccgactaggccacaccattcctttcatgtggcacatgcaccgtacccaccacaccgcaacggcaatgagcatcagcgttgcctaccgggagaactggcgttggttcttgttcatgccggacatctggtacgccggggctctcgtctatctcggcctaggcgaggcggtgctcatcgctcacctgattttcggttgcgccaacgtattggtgcacagcgcgttcgcctgggacaaggtgctctacaaatggcgctggctggcgcccgctacctggctgctagagcggctggttcagctgcctagcacgcaccgcgcgcatcacgccgagcttgatgagcacggcaagccgccccatcacaacttcgcccagttgctgttcatctgggacacgctgttcggaaccgcgaacttcactcgcgaccgatacccagagcgatatggaatcccgaatgatcctggtgatccgtggtgtgcccagctgtggtggcccttctgcagatcgcggaaagcagatagtgaatacaggtga

SEQ ID NO: 331958 - DNA, 1488 bp, Pseudomonas aeruginosa
atgttgcagacaatcaaccagaattggttttcgaacctgagaggcgatgtgctcgccggtctcgtcgttgcgcttgctctgattccagaggccatcgccttctccatcatcgcgggtgtcgatcccaaggtcggcctgtatgcgtcgttctgtatcgccgttgtgatcgctttcgttggcggtcggcccggcatgatttcggcggcgaccggtgccatggctctgctgatggtcaccttggtgaaaaaccatggcctggagtacctgttggcagccacgctgctgtgtggcgtgcttcagatcgccgccgggtacctgaagctcggctcgttgatgcgcttcgtgtctcgttcggtggtgaccggattcgtcaatgcgctggcgatcctgatcttcatggcacagctacctgaactgaccaatgtcacctggcacgtttacgccatgacggctgccggcctcggcatcatctacctgtttccctatgtacccaagctcggcaaggtgattccgtcaccgttggtgtgcatcctggtcttgaccgcagttgccatctatctcgggctggaaatccgcaccgtcggcgacatgggtcaactaccggataccttgccgatattcctctggcctgacgtgccactaaccttcgagaccctggcgatcatcttcccttactcggcagcactggctgtggtcggtctgctggaatcaatgatgacagcgaccatcgtcgatgacctgaccgataccaccagcgacaagaaccgcgagtgcaaaggtcaaggcgttgccaacattgcttcgggccttatgggcggcatggccggttgcgccatgatcggacagtcggtgatcaacgtgaaatccggtggccgaacccgcctgtccaccttgatcgcgggcgtcgtgctgctattgatggtggtgttcctcagtgactgggtcagccagattcccatggccgcgctggtggcggtgatgatcatggtgtccatcggtaccttcagctgggactcgctgcgcaatctgcgaaaattcccgctttccaccaacatcgtgatggtggcaaccgtggtcgtggtggtcttcacccacaacctcgcctatggcgttctggttggggttctgctggctgcgatgttcttcgccaacaaggtcggtcattacatggcgatcagctccgacttgaatgaagtcaccgaccaccgcacctacaaggtgatcggccaagtgttcttcagctcagccgacaagttcgttgcggcgttcgatttcaaggaagcgattagcaaggtgaccatcgacctgagtcgcgctcacttctgggatatcactgccgtcgctgctctggacaaggtggtggtcaagctgcgccgcgaaggcaccgaggtcgaggtgctgggcctaaatgaggccagcgccactatcgtcgaccgttttggtgtgcacgacaaacccgatgccatcgaccaactcatgggccactga

SEQ ID NO: 331959 - DNA, 852 bp, Pseudomonas aeruginosa
atgacctacgttaccgcttgcattgacggctctgcctccgcccctgctgtttgcgactatgcggcctgggctagccagcgcctggatgccccgctcaccttcctgcatgtattggatcaacgccagtatccggtgtccgccgatttgagcggcaacatcggtttgggcagtcgagagcatctgctggatgaactcgccgcgttggacgagcaacgcaacaagctggctctggaacaaggcctcgtcatgctcgctgccgcgaaggaacgggccatcgccgacggcgtgagttcgccagaatccaagcagcgccatggcgatctgctggaaagcctgcgcgagcttgaaaatgacatccgcctgctggtgatcggtcgccagggcgagtccagtgacggtgccgaactgcacgtcggcagccagttggaaagtgtcattcgcatcatgcaccgccccgtactggtgacgccggccagcttcaagcagccggaaagcgcgatgctggccttcgatggcggcgccaccacgcgcaagggagtagaaatactggctgcaagccctttgctgaaaggcctacctatccatctggtgatggtcggagccgagacgggagaaagttgggcacagctggatgcagcctgttccactcttgcagcggcagggtacagggtgcataccgccatccgcgacggcgaggttgagcccactttgcatgcctatcaggccgaacacggcattgatctactggtgatgggcgcctatggacattcccgaatccggcagttcctggtggggagcaccactgcccacatgctgcgcaccacaaccactgcgctgcttctattgcgctag

SEQ ID NO: 331960 - DNA, 312 bp, Pseudomonas aeruginosa
ttgagcctctacaccagctacaagttcaagggcgccctggacaagctcacggtcggcggcggcgcccgctggcagggcaagagctggcagatggtctacaacaatccccgcagccgctgggaaaagttctcccaggaagactactggctggtggacctgatggcccgctaccagatcaccgacaagctgtcggccagcgtcaacgtcaacaacgtcttcgacaagacctactacaccaacatcggtttctacacctcggcatcctatggcgatccacggaacctgatgttcagcactcgctgggacttctga

SEQ ID NO: 331961 - DNA, 204 bp, Pseudomonas aeruginosa
atgaagcaaggagccgtgtttcagaataactgtagccaggctgtgtgtttgtccaaagcagctgcgttgtcaggtgaggtgaagcgtgtcgacatcgttgtggttggcaggaccaagatcatcataccggcaggtgaggtctgggaaagttggttcgatgataagggcgtgacggctggtttatgcctgaacgagatcaattag

SEQ ID NO: 331962 - DNA, 591 bp, Pseudomonas aeruginosa
atgaattacgggtttatctactgcctgggcaatcaggctatgccggggatctacaagatcggcatgacagaacgggctccgactcagcgctgtattgagctttcaaatgctacggcggcgcctcttcctttcgaacttctgttttacggcgaggtggaagacccgcgtgaagtggaacgcaagatccacgaacagttcgatctcgaacggctctcctgtagtcgcgaattcttccgcggccgcgccctgacctacaagctggcaattgaagagtggtgcaactcgatagctgttaccagcgacggcgattattacctgtccgtcgaagatttgttggatcagttggaggcatgcgtagatgacgaagggcgcgtcgaggtcttcatgcgctacgcctccctggatggaattcgcatgtgggccgagggtggaagcgtgcgattcagcgtgccaaatctcgacatgatcccgcgctggattctggcggcatcgtctatctgcaaaggagtccttttgcagcatctgccgactgaacacccgatcaagtccagccgcgctctttccctgattgccgcggaggatagctggtga

SEQ ID NO: 331963 - DNA, 207 bp, Pseudomonas aeruginosa
atgaatgaaaaggccttactggctttacgtcagtctcttcgaatcatccgcagggagaacgacgtacaccgagcgcgcatcgagtactacgaaacggtcggaatgctgcgcggattgcactacggcggagcgatcgactcctggcagctattagctctaaccgagctagcaggaagcgcatacatcaacgccgggaaaccctggtaa

SEQ ID NO: 331964 - DNA, 207 bp, Pseudomonas aeruginosa
atggctcaattcaatatcgattcccacctgagcgacggaaagagcctgcaatggcttgccctgccggacgccggtgaacagcctctggacgttgaggtgaaggttcgccaggcggcaatgaagaagttcggacagtccgtcttcttcaattgctgggagcacgtagttgcaagcaacggctacatcaccgtgcggatgcatgcgtga

SEQ ID NO: 331965 - DNA, 492 bp, Pseudomonas aeruginosa
atgagcacttccatccccgattcgattaacccgagtgacctgcccgaaatcggccagcctctggctgatggagccttctttgcccgccattggctcaatggcaaggaatacgcatacatcgatctcggcaaaagcgccgagttcactggagaatggggcgagtatgggcaggacgtggacggcgccgtcagctatcgagacggagcttcgaacacggtcgccatgactgaagctggcagcccgattgccaagcaagctatggagatcggagaaggcgtattcattccttctgttctggaactggctcttctgttctccgccaagcaagcaggcgagctgtctgatttcgcagatcactgttactggtcgagttcgcagtactccgcctactacgccttcggcacggacttctacggcggcggcacgctcaacggcgtcaagctcgacgacttccgtgtccgccccgtccgcaagattctcatccttcagtaa

SEQ ID NO: 331966 - DNA, 585 bp, Pseudomonas aeruginosa
atgaccaccatcaccgttaatgcaggaagtacaagccttaccaccgacaacccgcagtttgccgcagtggttcttcagatgatcagcgaagagaccggggatgcatccttggctcaagttgatggaatccccgctattggcgcggaatggcccggccagggcggtatctatgctggcctcatgcgcggtcgtgacgggcaccctgactaccacctgatcgtcgcctccgcagaaagtgatggcgagcttcaatggggcggttacggaagcaagtcctcagcgaccagtaagtgggatggtcttgccaacaccaaggttctcgtcgaggaaggctgccaccctgcggcggagttcgcagccagcgtcaccatcagtggccataatgacttctatctcccggcccaggctgaactgatgctcgcctgggcaaacgtcccggaggtcttcgcagaaggatggcactggagcagcacgcagttctccgcccactacgccttcaccacgcacttcaacgacggcgacacggacgacttcgacaaggacatcgccttccgtgtccgccccgtccgcagattgcttcgctaa

SEQ ID NO: 331967 - DNA, 357 bp, Pseudomonas aeruginosa
atggccatgcacaccgagttgcagatccacaagaccgccgaagagttgctcggccttactcttagcttggtgcgcaatatccctcgcgatctgaagcaggtcatcggctcgaagcttcgcgatgaagcgcttcaaattctggtgctcatcggtcgagccaatatggcgcggaacaagctggagcacctgaatcagttgctcgaaagcatctggatggtgaactacctgctccgcgctctggccaaccaaaggctaatcagcctcaagcaacactcctccgcgatgcaactcactgcctctataggcaaacaggcaaacgcctggaaaggaaagttcgcaaccgcgcccgttgggtga

SEQ ID NO: 331968 - DNA, 1110 bp, Pseudomonas aeruginosa
atgttccctttcgaagatttggtaaaggcctactacgactgtcgccggcacaagagaaacactgccagcgcgatgaagttcgcagagcgcctcgaggaaaacctgctggacctttacgaggaacttcaggatggaagttacactcccgggcgatcaatctgcttcgtcgtcaccaggccgaagcacagagaggtgtgggcggcggactttcgggaccgcatcgtccaccaccttctctacaaccacgccggatccggcatcgaagcgcaattcattgccgacagctgcgcttgcatcccaggacgaggaaccctgtacgccgcagagcggctggaaagcaaggttcggagcgtgacgcagaactggagccgcccggctcactacctgaaatgcgatctggcgaacttcttcgtcaccatcgacaagcgggttctttccggccaactgaaacgccttattgtcgatccctggtggcggaacctggcgctccagattctctggcacgatccgcgtaccgactttgaggttcgcagcccaaggagcatcttcaacaaagtgccgcagcacaagcggttgaccgcgcaagctgcccaccttgggctgccgataggcaacctgagcagccagttcttcgcgaacatctacctgaacgacctggaccagttcgcaaagcaccagctgcgggcaaggcactacatccgctacgtagacgacttcctcctgctgcacgagtcaccgcagcagttgaacacgtggcttgccgagattgaggccttcctaccagggctgggcgccaagctcaacccgagcaagacgatccttcagccggtagatcgcggtgttgactttgtcgggcatgtgatcaagccatggcggcgaaccacccgaaagcgaactgtcgcagaagctcaccgacgaatcgccgcggcgccagatgatgagcttcgtaccctcgccaacagctatctcggcctttttcggcaggcgagccactcccacaaagaccgcgcaggtatcgcaaatgccctgctgcgcaggggcttctcggtggatcgagcgctgacaaaaacattccccccaaggagaagaatccatgccaaccctttttga

SEQ ID NO: 331969 - DNA, 300 bp, Pseudomonas aeruginosa
atgagcaagcaatcgcatacgccggggccttgggtgtctcgaaataacatggtcttctgtggaaaaaagtgtatctgttcaaacgtcaatgccgcatcgccgaaccagcaaaacatagcggaagacgttgctatgtcgattgcaaacgcccgcctgatggctgcggcgccggagatgcttggcgctcttcaacacatcgaagagtactggaatcgcgattcgaacgagcaagcgatgactgacgcactctggcacatcatcgaaacggctcaggccgcaatcgccaaggccaccgcctaa

SEQ ID NO: 331970 - DNA, 252 bp, Pseudomonas aeruginosa
atgagtttctggcaaagcattgctaccgcgccgaaggacggaacagaaatcatccttcgtcgtggagatcgcgtcacttcaggggcctggattgtgtggagcaactctgaatcggagttcaccagcaccggcgtatacctcggaatggtcgagtacgacagcgggacatcatggtcatcttgggatggcggcttcacagatgaagagccgcctactcactggcagccccttccgaaagcccatgccgactga

SEQ ID NO: 331971 - DNA, 366 bp, Pseudomonas aeruginosa
atgaacaccgcattgaaatacgcccaggaacgctgggacaacgcgctaccgcccgatgatgacggcgaccgcgagtatgtcactgagcaagtcggcaagcttctgaactgcgaggacggtgattgcgtgccgttccatgacaagcggcagcgggccttttccgggcctgacttcaccgtctacggattcgccggattcgtgcctgagtggctagcggaagtcgacggcaaagagtgcccgatgactcagctactcctagccgtccgccgaggagacctggaactggcgcaacgcatctggttccgcgcattcgaagcaacgctgatcgagaacgttgagcgattggttagggagagacgcacatga

SEQ ID NO: 331972 - DNA, 1062 bp, Pseudomonas aeruginosa
atgtccgcagaaaatcaactggtcgaagtaccagccaaagaaaccgctctgcaagtctactcggcagccaatggcctggatcctttcctagccaagattcgcgaagagatcgacggcttcgtgccggatgtgaccactcgcaagggccgagaggcaatcgcttccatcgcctacaaggtagcccgctccaagacggcgctggacaacgtgggcaaagaactggtcgctgagctgaaggaagttccgaagaagatcgatgccgagcgcaagcgcatgcgcgacctgctggacggctggcaggaagaggtgcgccgacctctgactgagtgggaagaggccgagaaggcgcgcgtagccgagcatgaacgccgcatcagcgagttgcgatgcgtggatgttgaaggccgcagcgccgccgaaattgcttcggccatcagcctcattgaagagtatgagattgatggaagctgggaagagttcgaagccgaggcgcatcgcgtcaagtcggcatcgctgtccaccctgcgcgaagccctggccaagcgtcagcagtacgaagccgagcaggccgaactggaacgcctgcgcgccgaagcagcagcacgcgagcagaaagagcgcgaggagcgcattgcccgggaagctgctgaagctgagcgcctcgccgccgaacgccgtgcccaggaggagcgcgacgccgccactcgccgtgaagccgaagccaaggctgctgctgagcgccgcgagctggaactgaagctgcaggccgagcacgccgagcgcgagaaggttgaggctcagcgccgcgccgaacaggcagagcgtgacgcacaggcccgtgcagaggccgccgctgcggccgaacgccagcgccaggccgacgagcaggcccgcatcgagcgtgaagcagctgcccgcgaagccgacaaggcccacaagaaagccatcaacaacgaagccctggcggcactcatcgccggcggcatgcccgaggaatgcgccaagcaggcgatcaccctgatcgctcagcgcaaggttcctcacatcacgatcaactattga

SEQ ID NO: 331973 - DNA, 204 bp, Pseudomonas aeruginosa
atgcaccagctaacagcgaatcaccgcccttgcggtgtgacggtcaccggctggcctgaagaaagccagctcatgaccccagacgacattctgctattcgcgagagcggtgaggcagatagcgatcaaccaggcccagggcgccgagggcgttcaggtctacccggaggtggatgatggaagtcaaggcgaagaccaagcgtga

SEQ ID NO: 331974 - DNA, 171 bp, Pseudomonas aeruginosa
atggaagtcaaggcgaagaccaagcgtgactccggcctgcgcacggcggtgctccttctgaagcgagcaaaccgctacgtaggggtccacaacagcattggcgccatggacctcagcacagagattgtcgaattcatcgccgctattgagcggcaggagaagggattgtga

SEQ ID NO: 331975 - DNA, 1761 bp, Pseudomonas aeruginosa
gtgagcaacgaattgaccgatgtgcgctgcccttgcggcgccgagttccaagccgacagctatgacgcagggttcattgccggctccggcatgtgccagaactgtgacgctgcactgcccccgaaagatatttgcacctgcccttccggcaacggctccctccgccatccctgtccggcacatcctgcggtagagcaggcaggcggggatgagcgcgacttccaggcagagggcgcacaggaggttccatcgccagtctcacaagagtatgaccgacatttgatcagtcttttgcgtaaaggtgaggcacttcctggccaccaggaggaggccgctgacgagatcgagcgcctgcgcgattggaatgatcacctgaacaacaccgttctacccaacatactcaatccaactttcctgatgctcatgaagggcggcgagaggctgcttgacctgtgcacgaaggacggcgaattcattggcgtatcgctgaatgacatgaaggacgtgtttgattggatggtcacgcacgctcgaattgcacctgatcacgccgccctggcgcaaccctccccggcacaggccgagcagcactggccaaagctggaaaagcctgtccaggtcggagccattcgcttccacgccgggctttcatctcgcctcgtagtcgaagccgcccagcggctgtacgagttcgagtccactccggagaaagaggcggagcgcatcgagcggctccaagcgtttcgcgagcagctcgacccgctcaacctcgccccgcatgcggaagcgttcaacgaagcgcccgctgaagcactgaagcctgaacaggcagaggcggagctggacttttcaaggccgctggaaaccgagaacggcgagcctgtgaaatggatatgcgccgacgtcatcgaatacaagagtgcgcgtgtatgcgtcgctaaagacactgggcttgtctatagctcgccatacatcggtctgaagattcgcaatgtgatgccagagcaggcagaggcggagcggccggaggtggtggcgtatcggactgtcgggcgacatgcaaagcaccagcatccccacttcgcactgaactactacaagcagaatgccgaagatcaggctgctcactggcgcgagcgcggttgcgaggtgagcgaggacgagctgatgaccgtcgcccagcatgagcgcatcaccgcccagcttcatgacgccctcgacgagagcgatggagaccgctggaagctgcgatccgagcgcgacgctgccaacgcccgtctgcacgaagtagcaacggcctgcgcaacggcagagcaagagcgcgacgccgccctggccagggtcgcggagctggagaagcaggagccggtggctcacctgcgtgcatctgaccttgaacggctgaatcagcctgggattgcaggaagcgcaggttccctgtggaacggtccgcgcgaaggtttcgtaccgctctacgtcgcccctgtagcccaggctcagcacagcgtgccgggaaatgctgccgctctggtacgggccgaaggaaagaaatactcgctcaacgctgccggcatgcttgactccggcgccccggaacacgcccagacctttgccatcgttcagttgctgtccgagttcgatgacgaagaagcggaaagccactgggaagcgatcatggcctattccgattttcgcaccagtgacgctctgttccatgcagccgagctgctcgccgccgcgcccggcaaggaggggttgtga

SEQ ID NO: 331976 - DNA, 501 bp, Pseudomonas aeruginosa
atgagcgttcgcgttctagacccatgctgcggtgggcgcatgatgtggttcgacaagcagaaccagctggcactcttcggagatcagcggaatgagacgatcaccgtcaccgaccgctctcattcagatgacggcaccagggtgctctcgatccacccgcaagcaattatcgacttccggcgcttaccttttgccgatgagtctttccccttggtcgttttcgacccgccgcatcttgttcgtgcaggccgaaaaagctggctggcagctaagtacgggaagctgggcgccgactggcgtgatgaccttcgcgctggattctccgagtgcttccgcgtgctgcgaaccgatggcgtgcttatcttcaaatggtccgaagtccaggtggccaccagtgatgtgctggcccttacgcccgagaaaccgctgttcggacacccttcgggaaagcgctcaggcacgcactggatcacgttcatgaaaactggaggtaggtcatga

SEQ ID NO: 331977 - DNA, 585 bp, Pseudomonas aeruginosa
atgagtgaggtgaagcggttcgacgtgcctagcatgcgctctttgatccagggcgagcaggcagtaatggggtatgaggtcgtcctggcctccgactacgacgccctcgccgccgaggcccaggcgctcagggaggaagtcgcggcactgcgcgccaaactagccatggccgaggacgcagcggcaaagggagatgctgcccgccagcagtgcggcggcatggagatggagatcgaggaacttcgcgccgaactcgagacactgcgcgcaagggtggtggttccggatgggtacgcgctcatgccgctggagccataccccgaaatgcgacttgcgagccaccggtacaagcgcaagaacaaagtctcgaccggacctggattctggcgcgcaatggccgaggctgctccgcgcctcaacggcaagacggtcagcgaggggctgttgcgcgaagtagcgcgccaccttggaaactggctggaactccacgaatgcgagtgcgacggcggattccactactgcggccgcgaccaggtggcaaagaccaaccgcgaactccgcgccctgctgagcgagcaggaataa

SEQ ID NO: 331978 - DNA, 486 bp, Pseudomonas aeruginosa
atggagcaagcaatgaacaggcgggaggtgacattcctctccgccgtggatgccagcaaggtcgagataccgagcaacgtcatcagcatcggcagcaagggcgattggtacgcctttgcctgcgatcacaagcgcgttctgcggatggagtttgatgacgtagacggatacgtgggaagcgatggctttcgagtgttcagccacattgacgccaagcagatccacgacttcgtgaacgagtgcggcgacgagtcgatcattgttcactgccaagcaggcatgagccgatccgctgcggtcgccaagttcctggccgacaagcgcggatacacgctgaacctgtccaagccttgcctcggcacgacgcaattctacaaccgccacgtctacggaacgctgaatatcaacgacgccgaaagcatgagcgcctattacgcagagatggagctagccgaccggctgcgcggccatccaaaggagtcctga

SEQ ID NO: 331979 - DNA, 279 bp, Pseudomonas aeruginosa
gtgcctgacatgagagaagagtttgaagcgtgggcaaccaagcacaggatgccgattcatcgtgacggtgttgtcaccgactacgccgccagatgcacagatgagtgctggcaggcatggaaagccagccgcgcggctctgaaggtggagcttccggagaagatcggcccgcacaacatggtcggtcgtcacgtgctaccagaagccgcgggctacgacgatgccatcgacgactgccgtgaagccctccagcaagccggaatagagttgaagccatga

SEQ ID NO: 331980 - DNA, 465 bp, Pseudomonas aeruginosa
atgaccgatatcaacaagctgaaggaattggcggagcggtacatcgccaatccatccggagccggcggcgaagactccgcattccgtgccgccgccaatccacaagccatcctcaagctgattgccgaggttgatctgctgagcgctcggctcaaggcggagaactgcgcccacaaggacacgcagaaacactgcgagttgttggagcagtacttgaaggagtgcgcaagcgccctgcctggcacctactacatggaccctccagacggcggcaatgtcagcataccagagcagattcggcgcatggcgaaggatgccgctcgctaccggtggctgcgagagcgagacctcgaaacgatcagacaaggcggcgtattcgccgggatgaccccggagaacatcgtactcaaccaggaagacctagacgctgaaatcgacgcagccctggaaggagaaacgcaatga

SEQ ID NO: 331981 - DNA, 393 bp, Pseudomonas aeruginosa
atgaacgaccgcgagctactcgaactggcggcgcgggcggctggaattcctgatgcattgtatttggactgtgtggcacaggatatgtaccacccgagagacggagaagcaggcattgaagtaaaccatcgggacacgcgatggagttgtttggctattgacggcgtatggaacccgctcaccgacgacggcgacgcgcttaggctggcggtgaagcttcgcctggacattacgttctacaacggttttcaggaggtggccgccgagccatcaaatggtgacgggatgaacccttgccaggaagtgttcacagaaaacccgtatgcggcaactcggcgagccatcgtccgcgccgccgccgagatcggcaagtctatgggaggtggggagtga

SEQ ID NO: 331982 - DNA, 333 bp, Pseudomonas aeruginosa
atggtctacgacgacaaggagcgccgcatctggtgcagcgactgtgaaacggaggtcgagccgtttgatgccttcatgcacctggtacaggtattcgacggcggcttgaaggacttgaacaggcgccgacgtgagcttcatgaggcagagcagtttgcaatccgcagccgtgcggccaaggtgatcgacgaggcgtggcgcagcacgaagatggctccgctttgcccacactgcaatgaggcgcttctcccggaggacgttgtaaagggagttgccacggcgtccaagcaactgatcatcgctcgccgcaacaagcagaaacgaccgaagtaa

SEQ ID NO: 331983 - DNA, 1110 bp, Pseudomonas aeruginosa
atgccgtacaagagaaacgactccgcctactggtggatctctttcaaatcagcaacaggaaagcttgttagacgctcttctggaactgccgactactcggcggcgaaagcactagagcaacaggagcgcgcgaaagcgtggaaggaaaaggaaatgggcgtgaatccgcccaggacctttgaggaggtgatcattccgtacctgcaacacgctcgccagcatcagcgcagctacgaaacgaccgtgcaccgcataaagccgctgcgcgagtattttgccggacgcgtggtcaacgatctagggggccaggacatacggggatacggagagcacaggctggatgccggcgcatccccggcaactatcaaccgagaactcgcagcactgtccgcggcgatcaaccactgcaacacggaactggagtgggatcttcctaacccggtgaaggggcggaagatgcgcgaggcggagggacgtgatcgttggctgaccagggcagaggtcgaggccctgtgccgcgccgcgcgcgtccagaagtttggcccgatgctcgaggatttcatccgcctagcggtaaacaccggatgccggcgggaggaaatgcttggcctggagtggcgcagagtggatttcgccaatcgactgatctacttggaggcatcccacacgaaggcaggcaagcgccggagcataccgatcaacgaaggtgcgatggcagcgttaaagcgacgaatggcattcagatccgagaccagtccggaatgcccctgggtttttgccagagccaacggagatcgagtggtttcgctatcagccggcttcaagcaggcctgccaggcagcgaagattgtggactttacgattcacgacctgcgccacacctgcgcggcatggctggtaagcgccggcgttccgttggcggatgttcgggatctgctcggacactcgacagtcgcgatgactgaacgatatgcccaccttgctccggccagagtaagggatgctgtaggggttcttgatcaagtccgtgaaggccgcatttcacgttctgttcacgctgataatccagcgcatctacatggagggccgctgaagctcgtaaacacttga

SEQ ID NO: 331984 - DNA, 891 bp, Pseudomonas aeruginosa
ttgcgccgacggcgcatctggcagcgcaccggactgcgccacagcctgttgctgtcgggctgcatccgaacgtgcctgggcgttggcggtatagaggttgtcgctgtagccaggcgccactcctggctgaagattcgcggcatcagcagtgcgctgccgatgcacagccattgcttgccgttcagcatcgatattggcctgcgcccttgccatggtggggtctgcactgtagccgctggtggctacgggagccgatgcctccggcacaacgccagcagcacgctgggcggcgggcgtgttggtgatgtcgaaacgggtctgctttttgcgctctccatcaacaaccccgccgtcggcgaagaacaattctggcttctcggcgccattccctccccttttacgcggagagaacccttttgcctgctgggctaccggcacatgagtggcattcttcacagcgtccagcgcctgcacgccaacggcgtgaacctgctcgggaggcatctggtactcgccgttactcaggctgaccgggaccggcgcccccataccctgcaacgccgcttccccaatctgctcggtcgagtcggccggcatgatgtagctgcccgcaggtacctcggtgtcgatgtcgtcggaggtgccagtgcctggaccacgcacccgcccaccatctgcaaatcgttgcttgggcttggcgcccttcttgaacccgtacatgtgaagcccctaaagaaacggcctggataccggttcaatattccggtccaggccgcttcggagctaaccctacggggggcggagcgtttggctatgtgtttacccggtaatcttcttccaaatccagataagaccaaaaattataatagccccgacaactacgtctcttaa

SEQ ID NO: 331985 - DNA, 336 bp, Pseudomonas aeruginosa
atgactggcacaactgagcaggccgtgaagccaccgacgcagggcatcggcgcgcaaggtatcgagcccaaaccgatcgaactgacgccgactcaagacctacatgtcaactggcaggccgtcggcgcgctcccgcccttccagatgttcgttcacgagcaagctccatgtccgcccggccgctgccagcagcagtgggctatcgactacggtgtgcgctacggcgcccaggtcggagacaaggtgctgctggagcgctatgcccagtggcaccaggcgaaaggctactggcccaacgaaacgttcctcggtcaaccggttgagagagcgaattaa

SEQ ID NO: 331986 - DNA, 396 bp, Pseudomonas aeruginosa
atgctcaaacgcaagaataccgacaccaccacgcttgagattgaacagctccgcatcgaacttgctcgctctaaggctcgtgagcagggcctgctgatcgaacgggagatgtgggtggagcaggggcgccagctccagaaccaggtccagacctggcagcgtatgtacgccagcctgttcgaccagctcggccgcggtgtggtgacggacaaggacatccaggacaacctagcgctcgccgccgaggccatgcgtcagcctatcaccgccgtggaagccgttcgcgccgccttcgccatgtgccaggaggggacgcaaggccggtacaccagcgtcgggcgccgcaataagccgcgccgggtagctaaggaggacagcgatgactggcacaactga

SEQ ID NO: 331987 - DNA, 201 bp, Pseudomonas aeruginosa
atgcagatcattcccattaacgaatttgtggccgagcaggggcaggcgaaggcagcggagctgctcggcgtgacccagggggccatcagtaaggcgcttcgagcggggaggaagatcaatgtctaccgctgcgaagatggttcgtactctgctgaggaggtgcgcgccttcccggcccaaaaggtgcgcatggcttcgtga

SEQ ID NO: 331988 - DNA, 798 bp, Pseudomonas aeruginosa
atgaaatcgaagaagcggccgctcacggccgaagaaaagcaggagtgccaagctctcaatgccatttacaaggcgaagaaaagagaactcggcatcactcaagagaagatcgccctcgaggggcttggcgccaccacccagagtgcggcaagtcattacctcactgggaagaacgcgctgaacgcagaggcagcagcggttttcgctcgctatcttgagattcaggtcagggacttcagcccgcgcctggccgaggagatagagcgcatggcaacgacggtacgccccaagccggttgcaaataccaggggcgacctcgaaccgatccccgtctgggatgacggcgatccactggataccgatgaagtcgagattccctatttcaacgaaattcagatcgcagcgggggatggtcgcttgcctgatctggagcaggcgaagcgcaaaattcggttccctcgcacagtcctccgggagtcgggagtagaccccaagaactcggtctgcgtgaacgttacagggaattctatggaaccgctgatcgcagacggcgcgatcatcggagtcgatctatcagtcagcacaatcactgacggcgagatctatgccctgaagcatgacgatatgctgcgagtgaagttcgtctatcgcctacccggcggtggcatccgcctgcgcagctttaaccgtgacgaatatccagacgaggagtacaccagggaccaaatgcgtgagagtaacctcagcatcatcggctgggtcttctggtggtccgtcatgagacgtagaaaacactga

SEQ ID NO: 331989 - DNA, 267 bp, Pseudomonas aeruginosa
atggccaagcaaaagaaaaagcaggaagcccaggttctcaccgcgggtgagaagctagggttgcgggtgacccagatgatcaactcgccgaaggcccaagagcttcggacagtaactattcaccgtctggacacggatgcagacgaggcctgggaagggattatggaagtgttggccgagacggacggcattgatctgactttcaacgatgacggcagcgtcacgttgaggtgggaggagcaggagaggggcgagcaggcctggtag

SEQ ID NO: 331990 - DNA, 225 bp, Pseudomonas aeruginosa
atgacaatcattcacgaatgcgaccggtgcaacgcgaccggtcgcgtgatcgagacgtccgacggattccgctgcgagggttgctacgaggaggcgcaggagcaggtgcgcagcgatgcgagctgccccgagtgtgggcgcctgggggtgacggctaccggaatttgttacgcctgtgagaacactgccccggttcgccggagcatcaccgaggaaaggacatga

SEQ ID NO: 331991 - DNA, 159 bp, Pseudomonas aeruginosa; identical to SEQ ID NO: 326795

SEQ ID NO: 331992 - DNA, 492 bp, Pseudomonas aeruginosa; identical to SEQ ID NO: 331965

SEQ ID NO: 331993 - DNA, 585 bp, Pseudomonas aeruginosa; identical to SEQ ID NO: 331966

SEQ ID NO: 331994 - DNA, 357 bp, Pseudomonas aeruginosa; identical to SEQ ID NO: 331967

SEQ ID NO: 331995 - DNA, 1110 bp, Pseudomonas aeruginosa; identical to SEQ ID NO: 331968

SEQ ID NO: 331996 - DNA, 300 bp, Pseudomonas aeruginosa; identical to SEQ ID NO: 331969

SEQ ID NO: 331997 - DNA, 252 bp, Pseudomonas aeruginosa; identical to SEQ ID NO: 331970

SEQ ID NO: 331998 - DNA, 366 bp, Pseudomonas aeruginosa; identical to SEQ ID NO: 331971

SEQ ID NO: 331999 - DNA, 1062 bp, Pseudomonas aeruginosa; identical to SEQ ID NO: 331972

SEQ ID NO: 332000 - DNA, 747 bp, Pseudomonas aeruginosa
atgggaactgcactcaccccactgctgacgaagttcgccacgcgctacgagatgggcaccacaccggaagaagtggcgaacacgctcaagcagacctgcttcaaagggcaggtcaatgactcgcagatggtcgccctgctgatcgtggccgaccagtacaagctgaacccattcacgaaggagctctacgccttccccgacaagaacaacggcatcgtgccggttgttggcgtggacggctgggctcggatcatcaacgagaacccccagttcgatggcatggagttctcaatggaccagcagggcaccgaatgcacctgcaagatctaccggaaggaccgcagccacgccattagcgcgactgagtacatggccgagtgcaagcggaacacccagccttggcagtcccatccgcgccggatgctgcgccacaaggcaatgattcagtgcgcccgcctcgctttcggcttcgccggcatctacgaccaggacgaggccgagcggatcgttgaacgagacgtcactcccgcagaacagtacgaggacgtcagcgaggcggtctgcctcatcaaggactccccaacaatggaagacttgcagtcagcattcagcaatgcctggaaggcctacaagtccaagggtgcacgtgaccaactgacagttgcgaaagaccagcggaagaaagaactgttggaggcacctatcgacgttgaattcgaggagaccggcgatgatcgagcagcgtag

SEQ ID NO: 332001 - DNA, 621 bp, Pseudomonas aeruginosa
atgatcgagcagcgtagtgatgaatggttcgcacagcgcctggggcgggtgacggccagcaaggtcaaggatgtgatggcaaaggggcgcagcggcgccccttctgctactcgccagaactacatgatgcaactgctgtgcgagaggctgactgggaaacgcgaggaaggctttaccagcgcggcaatgcagcgcggaactgatctagagccaatcgctcgttctgcctacgagttcaacgccggcgtcatgacagtagaaactggcctgatcatccatccgcgaatcgatggcttcggcgcgtcgccagatggcttggcaggcgctgacggccttctcgagatcaagtgcccgaacacctccgcgcatatcgccgtcatccaatccggcaagcacgacgcccagtacgaatggcagatgctcgcgcaaatggcttgcagcggtcgcgagtgggtcgacttcgtttccttcgacgaccgccttcccgaggaactgcagtacgtctgcttccgctaccacagggacgaggcgcgcattcgcgagatggaatccgaggtgaaggcattcctggaagagctcgccgaactggaagccgacatgcgcgggaggatggcagcatga

SEQ ID NO: 332002 - DNA, 336 bp, Pseudomonas aeruginosa
atgagaaccatgctcaaagccacctgcggcaagcactccaaggaaatctccgtctcgcagatcacccacttcgtcgccgaagacaagtacgtcatcgcgtactacccagatggcgtacttgtcttgaacgaaacgcttaaggctctggagacagagttcaccgacgagttcatccgcgcccaccggaaagccctggtccgacgctcgctgatcagcatgttcaaaacccgacctgatgacagccaagccggcgaggtactactgctcggaaccgagaactggatacccgtcagccgcagccactcagcgcagatcaaatcggcgatgggtgcgtga

SEQ ID NO: 332003 - DNA, 159 bp, Pseudomonas aeruginosa
atgtacatcaaaaaagatgtcatcgaggtcatcaagtacgcggcgatgatggcggcctgctctcgccagtcctggggaatctaccccatgaatcagggttacaaagccatgcccttccgcggcgactatcaccgcgtcgtcgaagtctgccatccctga

SEQ ID NO: 332004 - DNA, 204 bp, Pseudomonas aeruginosa; identical to SEQ ID NO: 331973

SEQ ID NO: 332005 - DNA, 171 bp, Pseudomonas aeruginosa; identical to SEQ ID NO: 331974

SEQ ID NO: 332006 - DNA, 1761 bp, Pseudomonas aeruginosa; identical to SEQ ID NO: 331975

SEQ ID NO: 332007 - DNA, 501 bp, Pseudomonas aeruginosa; identical to SEQ ID NO: 331976

SEQ ID NO: 332008 - DNA, 585 bp, Pseudomonas aeruginosa; identical to SEQ ID NO: 331977

SEQ ID NO: 332009 - DNA, 486 bp, Pseudomonas aeruginosa; identical to SEQ ID NO: 331978

SEQ ID NO: 332010 - DNA, 279 bp, Pseudomonas aeruginosa; identical to SEQ ID NO: 331979

SEQ ID NO: 332011 - DNA, 210 bp, Pseudomonas aeruginosa; identical to SEQ ID NO: 329937

SEQ ID NO: 332012 - DNA, 444 bp, Pseudomonas aeruginosa
atgacagaccacgcagagctgcggaggctggctaaggcggcaacgccggggccgtggcgtgtgcaaaccgggtgcagttggcgccgcatcggaaccgacagcggtgatggagatgtacttcgtccatgcacgcgcccgaatgatggctggcctgacatagtagcgcccgcagagaatttgaagtacatcgcatccgccaaccccaagaccatcctcgccctgctggacgagatcgaccagctcaaggcggagagcgacaggctgcgtcaaggcatgaaaggcgactacgacattgacgcatggctggaatggacgcgagagaaagaccagatcaaggcggagaacgaggttctgcgtggggcactgaagcagttcgccgagatgctgaaaagcatcaatgtgccaatcgatcttgacgaaatcatcaaaggaaccaagccatga

SEQ ID NO: 332013 - DNA, 465 bp, Pseudomonas aeruginosa; identical to SEQ ID NO: 331980

SEQ ID NO: 332014 - DNA, 393 bp, Pseudomonas aeruginosa; identical to SEQ ID NO: 331981

SEQ ID NO: 332015 - DNA, 333 bp, Pseudomonas aeruginosa; identical to SEQ ID NO: 331982

SEQ ID NO: 332016 - DNA, 1110 bp, Pseudomonas aeruginosa; identical to SEQ ID NO: 331983

SEQ ID NO: 332017 - DNA, 2649 bp, Pseudomonas aeruginosa
atggccctttctctcaagatctaccagaagcgtgccttgtccagcctggaaagctacctggatgacgcgcggttaaaaggcccagcccaggcgtttgagggcaacgtcgacaaggggctgctgggtcaatacaagcctatgcccggccagccggacattccttatgtgtgcctgcgtatccccaccggcggtggcaagactgtgatgggcgcgcacattattaaggccgccggccagacgattctggagcgtgaatacccgctggtcctctggatggtgcccaccacccagattaagtcccagacgctggacgctttccgcaacccgcgccacccttaccgccaggagctggccgagacgtttggggggcaggtggccatctttgacgtggccgacttcgcccagattcgccccgccgacctgggtaccaaggtgtgtgtggtcatcggcacggtggcggcgctgcgcgtgaccgacaaggaaggtcgcaaggtctacgaacaccatgaggacctcgagccacacttcgccggttcgacttctgatttggactacctagacaaggggcagaacggaaaggctttggcgtcgtttgccaacctgctcaagcttcacggtccgctagtcatcatggacgaggcgcacaacgccaccacgaagttgtcctatgaagtctatgagcggctcggccccaaggccgtggtagagcttaccgctacgccggatatcaagagttccaacgtcttagtgagcgtgtcggcttttgagctcaaggacgagaagatgatcaagttcccggtggtgctcaaggagcattctggtcaatgggaggtggcggtcaacagtgccgtggcacggcgcaacgcccttgccaaaacagcactgagcgagccggactatattcgccccatcctgctcatccaagccgagaatgccaagggtacggccactgtggagcaggtgaagaagcacctgatggaggtcgagaagatccccgagacttccatcgccattgccaccggtgaccaacgcgagatcgatggggtcgatttgttcgccaaggactgcccaatcgaaatcattatcaccaagcaggcactgaaagaaggatgggattgctccttcgcgtacgtgttctgttcggtggcccatgttaagagcgacaaggacatccagcaactgctgggccgagtgctgcgcatgccgtatgccacggtgcgcaagcaggaggcgatgagcaaggcctacgcccacgtgacgactgagcgtttcggagcagtggctggggagttgaccgacgcactagtgaacctaggcttcaaccctatggaggccgctagcggcatccggattgactccaagcctggcgacggtctggatctccagggtggttccagcaacccgaggcctaccccggtggtccgagtgctggtggccaaggaacccgacctgagcgacgcgccggcccgcgaccaggagcgggtggtcttcgtacccaacgaggacggcaagggcggcgtggtggaagttacaggtgaggtggacgccgctactaatgaagccatcgtagaggcagcccccgccaaggagcgcgaagagacggaagagaaactgcggcggcaccagatggtggccgtggcggccaaggcgcccagcgagaatggggccgttttcactgtgccgcgtttgtgcatggtggagcagggcgagctggagttcatcgaccgaggcgtggtcgcggcggacttcgagtgggatctgctggccagcctgcccgacctgtcaagtttccgcttcaacgatgagagtaagacgttcgaagtggatttggacggcaagggagtgagctaccacctcatcaaggatgacgtggccacgtacctgccgggcttcgcgcaagacaggactgctatcgaccttatcgggtggctggatcaggagattcgcgaccacactatcaagcagccagtgctgcgcgagtggttgcggcgatccgtcaatggactgctggagcgtgggttctcgctggagcaactgctcaaaggccagttcgtcctccgccgcaagctctccgagcaattagcggcagccaaaacgtctgcatacaagcagggcttccagcaggcgcttttcggcggtgggctggaggtcgtgactagcgatggccccggccacgcctacatctaccccgcggacatgactgcctatcccgcgaattactattatcagggcccgtatcgcttcaagaagcattactacccagtgcccggcgatctgaactggaagacgggaaagggtaaggtgaccgaagaattcgactgtgccctagccatcgacatgctcgaccaggtggagttctgggtacgcaatctcgttcacccgtcccagttctggatgccaacctccaagcagcgcacctacccggacttcgttgctcgtctgactgatggtcggctactggtggtcgagtacaagggcggtgaccgcatcacggcagatcaagagaaggagaagaagttggtcggtgagttgtgggctgcccggagcaatggcaagggactatatgttatggcccaattgaaagatgacaaagggaacaacgtcagtgagcagttaaaggccgctatcggcagagaggtgagcgtctag

SEQ ID NO: 332018 - DNA, 1617 bp, Pseudomonas aeruginosa
atgccattgctttcttggttcaatcgcgacgaggacctgacccgcgccgcccttgctccctaccgactcttggagccggtgtccgagcattcttacggggacccggattcctcaaacctgctagtaaaaggggacaaccttgcggcccttaaggccttgttgccttactacgctggtcaaattaagtgcgtttacgccgatcctccgtttaatacggggcaggcttttgatgactatgacgacaacctggagcactccatttggttgtcaatgatgtatccggccatggagctgacaagagatctccttgctgaggatggaacgcttttcgtccacatcgatgataacgagcttgcctacctgaccgtgattctggacgagatcatgggccggaagaacagggtggccatggtgacgttcaagcagggcgcaccaaccggacacaaggcaatcaatccgggcacggtcaataccacgaattacatcctgatctatgccaagaacaaagcaaaatggaggccaaagcgtgttttcaccgggcgcgagcgcgacaagcgctatggcaagttcctggtgaaccctgagtcgccgcatgctcaatggaagttcattaccttggcatcggcggtagccgagaaagccggcaagaaaatgtccgagctgaaaaaggagcttggcgagggtttggaagcgtacttgaacgagttcgtgattgcgcattccaaccaggtgtgccgttctgcgcgacctgactatgaagcagtggggcaggacgttcggcaggctattgacgcatctatcgctagtccaaaggaggtcgtgctcctagagagggctaagcactccgacatgtatttcatagcgggtgaaagactgctgttctattcctctaagttgaaggaagtagatggagaattggtcgcaggtgagccgctgaccacgttatgggatgacctgctgtccaacaaccttcacaaagagggaggagtggagtttccaaagagcaagaagcccgaggcgctgatcaagcgttgtttggacttggcgaccaacgaaggggactgggtgctggattcttacttaggctcgggaaccactgctgccgtagctcataaaatgggacggcgatggattggtgtagagcaaggagatcatgctgaggagaaatgcttacctcggctaaaaggggtagtggacggtgagcaatcggggatatccaagtcagttggctggagtggtggaggtggtttccgcttctataagctgggcgttcccgccttcgatgagaacggacacatccacgagggcattcgcttcgagcacttagctgcccacgtctggtttgccgaaaccggcactgcccgttccagccgcgcccccaaagaggccttcttgggtgagcacaacggagtgggctactacctgctcttcaatggcatcttgggcgacctgagcaagatgggggggaacgtactcacccgcacattgctgcgcaagctacccaagttcgacgggcccaaagtgatctacggagaggcgtgtgcgctgcccgatgaacaactacgcgagctcggcattacctttaagcaaaccccttacgacatcaaggcgcgctaa

SEQ ID NO: 332019 - DNA, 1224 bp, Pseudomonas aeruginosa
ttgagcgaattaactgagccggatagcgcaatctcctcatggagtgggtttgtatatcagggaaaggtcgccctttaccactgtttaaaattaatcactgagggcgaaagagaattcgagctgcagttagacagcaccgatgactttgcaatatataaagatggaaagctttttagcgcccatcaagtcaaagcaaaggttggttcaaccagaggctgctacactaaagcgctaaaaaaatccgcagagattgatgatcacagaaaggccgggaccaaacggtatttccacgtatcagtaaaaatagatgacacatcggactacacgccagggaacggcgagaccgtaagcttttataagtataacgaccaaaaatactgcgagctcggtcaaatagaagggatcaccaaagatcttataaaaaccatatttaatgacgccaagggcttcccaccaagcgaacgtctcaccgaccaaaattattgcttaatttcggaaagcatcagtagcaaggccatagaaatccataaaatcaatcaaatcgatggagtccctgagaataaggcagcttttgagaaccgcataaacgcttccaaacttctagccgctctattatccgaaggcctgcaaaatgatgtcgaatactttgcaacagagctaagaaagaatctcttcaactacctcgaaaaaacactggacgatctactaccggaaataaatgacaagcagtatctaagagctcaagatctattcaaacacctgcacgacttaaattcagaggatctccaacgtctctgccaggtcatgaaaccttccgaaagcttttcgaagatccaacacgaagacatcggaagatactctgagttaattcaggacttctgtatcgatcctattctccagcgcctgccccactacatggactccgagtcaagtttctacctacctacagcactaacgttattaagcgatcgcgaatgccgcgcatgcgtagataggatcagggaggagatgaagaacaatagaagactccaacccattctgtttgaataccgcaacttgattgcattttccgccttaaactcattccgcgtcgagacaaagattacagagaatgatggctcagacccaaaatacgaagcggaaaatcaagacaacaagatcactcgcgagctaagcatcaatgtcataacaaaactggatgcagaaggaaagttaaatgcttaa

SEQ ID NO: 332020 - DNA, 675 bp, Pseudomonas aeruginosa
atgcttaaaggaataatcagcagcgcattaactgagcaggaattctctttggttcatgagtcggagcaatcctcttactttcttcgcctgaatggcgaagcagcccgcttcgcgattgtgcacgaaatgacggagttgcagtctccagaatcactaaatgaggcggcctctcttggcgccccgaaagaattcgtcgagcaccctgccttcaagaaaaactgcgacttaatttgtctactacgactagagaaactctcagagttcaaagagctagaaaatagaatttttgcgattgaagaagacgcgtaccactacaagaaatacgtcctttactacacaaaagaggaggtggattgcttagctggattcgagttttcagacctcctacgcaccatatcagacaagagccaatttgactcttacaaagactctcctctttcctcatccacctacagcattgccgcaaaaatattcataaagatcccattcctcatactgaaccatgaaaagcgcgaactcgttccattaaagattcaggcagaggctgcggtagcagagtcagagctaacagagctttataaaaaagtacaagatatacccgaaagcgatgacattgccacagacgatctaatcaaggaattgattaaaaatgaactggaaaatatcccgaattga

SEQ ID NO: 332021 - DNA, 2328 bp, Pseudomonas aeruginosa
atgaactggaaaatatcccgaattgagattaccagctttaaggcattcaaaaatatatctctggatttagagtccgcctcactcttaacgttggatggcccaaacggcttcgggaagaccagtgtttttgatgctatcgaacttctcctcacagggaagatagcgagaatccagcgcctttttgataatgtgatgattggaacgaagaagaaatatgaggacaaccttttttggaatgtgcgatcccaaggcaaagacctccacataaaaattgagttcaagtcaagcgatgaaaaaatagtcctcgctagatatgcgccgagcgagagcctctggacaaaagaaagaaacaaggcgaatgacttctcgctattcaagctatacaagttagacagctttgaatctactgacttctctgatgcaaatctgagaaaagaaaatttcatagccgatctcttcggacaaaacttccaagacaattactcctttctaaactacctagagcaaggtcaaaacgagtatcttttttcgactaacctaaacaaccgaaagaaggcgcttgaaagcctaatccaatcaggtgctatagtttcagaaatcagcaagtgcaagcgactggaaaggaagttagctcaaaagctcagcaaagagcgccaagatgaagagtctcgactggatagagaaggccaagcgctccgcgcaatgctagagagtgggctggaaggtgccgcgtacgaaaagcttagcactgccgacattcagccgagctgggacaaggaagtattattctctgggtattcaaaagaaattcacgacgaatatatcgcagatgtacgcaacataattgacttattgcctcttaaacaagccatcaaggtcagaatttctaacgagaaaattgaggcctacatttccaaaaacagcaatcttttacgagctctcatccaagttggcaagaccactggagagctcaccgcactatccgtaacaaaatccaatatcgacactttatcattatctctttcaactctggaaaagggggcggcgagcattgggtttgatgagatccgtaaaatccatggctggcaacctgacgaatttgtcgaccttgaagagcagattaagaatcgcgacctactaaactcttcctcagcagcgaacgccgcagctattgccgaaatcagcagactaaaaaccgagcttctcgagaagcacttcaaaatctaccccaatgacaatacctgcccactttgctcgcaggattggaagacgcacgaggggttactgtttgcgatagagaaaagggccgaaaatctatctgaaaatctaagcgcggacggtaagaaacttgtacaggtcatcgaatcaatagcaaaggtgctatcagttttgaccgcgcgtgtaactagcaacctgaagctcgaaagatcaaactatgacccagaccttcacaagctgcttagtaggcataaagagataattcaacgaattcaagatctcggcgaccagcttaccaaaagagggattccctacccagacacgtacacagtagatcctgaggaagaggagaagcggctagcggatctaatttctttgttccgagcgcaaaagcaagaagaaactgcagatattccagatcaatggaggtctgtagtattcgctgcattcaaagacgaggcagacttctacgtgcttgagcgtgatgcgctagagataaaactaaagtacatttcacttaaagcaaacgaagcaaagagcgcaacactggcaggcatcgcccaaagactggagactatccgaaaggaaaatacagcgattacaaaaatcaagggccgagttgtatctttgcgcgaaaccttggagagcgtagaaaaagcttactccgaccacaccatatcggaaatcgaattaatattccacatatatagcggaagactaattcaaaattatcagcgaggacttggactgttcatcgaaagcaaagagggcaatcaacttaggtttgcgactgcggaatactcagatcacgacgcaatgctatccatgagctctggccaaatttcagcattgagcctcgcttttttcctctcattaaatagagtctactcaggcgtccccatcattatgattgacgatccgtctcaatctctggacgaggtaaacattgcatctctaacggatcttctacgctgcgaactcaaagaccggcaattaattgtctcgtctcacgaggatgacatttcctcttatatgaggtatcgattcacaagggcaggactacttcctcttacattcaatatgcaagctctggctaggaatgcggggtaa

SEQ ID NO: 332022 - DNA, 477 bp, Pseudomonas aeruginosa
atgagttctttagggctacaatctatagtgttcattgtccggagctacggcatgttcagaacacatctgcacgcagaggtgaaaggagccgttgcgttcggcgatggtcttcgcgtctggcgttacgtcgagcaggcgattcactgcccatggctctatgtctgctgtacagagaagagtggcgagctaaccttcagcagcatgctgatggtcgcagacatgtcgttgttcgaagagatgttggcccagcagaccgagaggctgcgcgtggagaatgtgctgcttgttagcccaggacatctcaatcgaagcgctggctggctgatggaggggctagtggagttatgcgaggcgatcagccctgcgtccgagcacctggcttacgtctataagctggaaggtggcagtagctactgggacggatatgtacaggatccgcagcatactccgcttcgagtgatttactcgcggagctga

SEQ ID NO: 332023 - DNA, 276 bp, Pseudomonas aeruginosa
atggaactgaaaaaagccttcggacaggcgctgaagcagctaagaacgagtaaaggactcactcaggaggatttttccgacgtaagcagcagaacctatctcagcacgctcgaacgaggccttaagagcccgacgatcgataagctcgacgaaattgcatctgctatggacgttcatcccatgtccattctcgtcctctgttacttacagtgcgatagctcgcagacccttgaacaaatcttcgaacgcatccgaaaagaacttgaagggctataa

SEQ ID NO: 332024 - DNA, 126 bp, Pseudomonas aeruginosa
atgtgcgttataggcccacgtcatgaattgctcgagcaagcgttcattctcaactttgagtcgagcattctctgcttccaaacgctcaaggcgctgtataagcactccaatttccgcgccagttaa

SEQ ID NO: 332025 - DNA, 2040 bp, Pseudomonas aeruginosa
atgcctgacagcctcgtggtgttcacccctagggcagagcgggatgctgcagaaaacttgggcgagtttatcgcgatgagtcgttctcaactgaccattttcggtgctggtcttcgttttaacgatatgacatgggatgtcaccgacaccacgcagctgaaggcgcatggtaagaaccgaatccgcatctgcttctctactcaagaaacagtagacgacacactgccaactcagatggctgagccgtttgtgtcttttgccaaagcttacgtccgctacatgcagggtatgcggccaacgaagaatcctgcttttcgagtcactgcgctgcgcgcccttgatgccgcttttaggaagagcggtcatttgatcccggtgatgatggatggcgacacgtttaatcgagctgcgcgaattatcgctgagcgcctctcaggatctacggcttatcgagtaggctctcagctcgagttgattgccaggtttatgtcagagcaccgtctcacagcgattccgctatcgtggcgtagtccgatcaatcgaccgctcgatacggttcgtgtggggcaggagtttgacaagcgccggaacgaaaagatgccatctcaagctgcattggaagcgcttcccaagacgttctacatggcgacccaacctaatgacgttatgttctcgtcgattgccgcgattctctgctctgcgcctgatcgcatcaatgaggtgttactgcttaccgagaactgtgaggtttatgaaaaaacgtcaggtggtaaagatgcctacggcctgcgatggcatccggcaaagggggctgatccaatggttaaatggatcattccctcaatggctctcgttgtcgctgaggctgttgccaaaatcaggcgtttgacggaaggcgctcgacgtattgctcaatggtacgagttgaacccagaaaagctttatctacctcagcatttggagtacctgagaagccaagagcttttaacaatggatgaagttcagcaggtaattttgctggatgagggcgcgccttcatttgctcgactttggtgcaccgcaaatgatgtgctgttaataaaaattggccgcagggtatgtgcgcgatttgctgatgtcgaaagggccgcaatagctctacttccagcgggattcccgctgctaaacgcggaagtgggccttaagttttcagaagcgctcatcgtagtgcggcgtaatgaactgcattctgccaaaggtacttttagctgtgtcattgaaccggtcaccatcaatcaggtgaacacagcactcggcaccagaagtgaacatggctttgagtcgatgtttggacgtcttggtttcactgagccagacggcagccatatccgagtatctacccatcagtttcgtcactacttaaataccttggcgcaggcgggggggatgagtcagttagacatagcgaagtggtcggggcgagtggatgtccggcagaacgaggtttatgaccatgtgagcgcagatcaaatggtggcgaagatccgcgagtctattggcgatgagtcccatatgttcggcccgctggcaaaactgccaaaaaatatcccgattacacgagatgagtttgcacggctcaagattccgactgcccatacgactgactttggcttttgcgtccatgattacacaatgatgccatgcgagcggcatgccgactgcatcaactgcagcgagcatgtttgtgtgaagggagatgaaggcaaggccctgatggtgaagcgtcggctacaggatgcgcaggaattgctggcgcatgctgaagttgcgactgtgaagggctactacggagcggatcgctggatggagcatcacaagaaaacggtattacgtctaacccagcttacagaagttctcgataatccagcggttccaaccggctctgtaattcagctcgctgatgttcccgttgtttcatggggcattgaacaggcgttagaggatcgagttgcattggacgactattcggcgcagaggcggctcccaccggggcaacggtaa

SEQ ID NO: 332026 - DNA, 1563 bp, Pseudomonas aeruginosa
atgactgaaaaacgagcaattacccatcagtcgttgggcggcctgactctgccgcctactgtgagggcgctcagcggagcggtgttcgatccgagcgccaaacgatgggcattccatgatggccttcactcaatcagtgtgaatttcgaaagactgagaggatgtgcgagtgatgagttaatcacggcagcaaagtttcccttgctttggtatgccgaaaacacggaagcgacgactgtcgtctcattgtttgaccatttgaggcgattactcgaatcgatttcggatgtccaggggcagccagtcagcgtcattgatgcgccgctgctcgctaactttcgagcttccttggtatgggataccgagtggaagttgggggctttgagtgcctttctcaaaaaatgggacagcttgggcgtgccgggcgtgacgaacgctgccgtgcgctttctgaaaagtattcgcctcaaagggaaccgcaagggcgcagcagtcctgactatggacccgctcaaggggccgcttactgacattgaacgctcggccacacaagcagcactgaacgatgcctttgccgccaagaaaatcgccttggatgactatcttttgacttggctttgtttgctgttggggcagaggaacatccagttcgcaatgttgaaggtctgcgatgtcaaagagattgcgaaagcggatgggagccacgagtacgtattgcgagtgcctagggtcaagcaagttagtgccgaggctcgacgggagcaattcaaggagcgattgataactcccagcgtcggaaaaatgcttataggctacgcaagtagtgttcgcaaacgattcgaacgtgagggcaaattctccggcgaactatcgcaagcgccactgtttcctcaaaggaaggcgacgaaaaaggctcgtccagattttcactatcacacgtcacctgcgcaaattggcaatagaataagttcggtatttgaagctttacaggtgtattcggagcgaaccggtgaacccattaaggttacctctaaaaggctgcgacatacgatggctacgtccgcggcaagagagggacatggcgagctgatcatcgctgaattgctcgatcatagcgacactcaaaatgtcgggatttatgtgaaggccacaccggaaatcattgaacggatcgaccgtgcagtggcgcttcgaatggcgccccttgctcatgcgtttgccggtgtcgtcattagtgaggagtcggcggcgatccgtggcagtgacccaacgagtcggattgtcgatcctcgctttgacgaaacgatgaagccgatggggaactgtggtcgcggcggaccttgtggttttatggcgcctatcgcgtgctacacctgtaaaaacttccaagcctgggtcgatggtcctcatgaagcggtgctggactacctgctggtcgagcgtgaacgtctgatcgcagccgcagatgcccgcatcgcagcagtgaatgaccgaacgattctggccgttgccgaggtgattgagctcactcgtaagaagcgtggggagacgaaggatgcctga

SEQ ID NO: 332027 - DNA, 1110 bp, Pseudomonas aeruginosa
atggtgttgcagctgttcctcgactcgagtcggattgatattcagcagcggatccgagatggcggtgtttttcgtgtaagcgaacttgacgagcttgtccggcactgcaggcgacctgtcgctgatcaactgaagtacgattcaatttccccttcccatcactccgctcgtagaagcgccgctgaacgtgtgcgcctttttcaacgaaaacttgcaccaacagaggtggcgggccataccgcagctaaccgtattcgggtcatccgggactatcttgaatggctcgtgagataccacatggctcgctatcacctgggtgcaacggagacagagcggctttggaatgagtggacgtattgcaagggcgcgttgagcgcgcgactgccgcgccacaaaggtcggaatactattgggcagcgggaaggacttcaaccagaggtggtggagagactcctcaatgttacgtcgccaacatcacctgagaatccctggaagggggagaaaacgcgcattcgaaacgctctcctagtgcgctggttctacgagcttggcctacggcgtggcgaagctttgaacgtaaagattcccgacattaactttcagtcggaggagctgacggttgtcaggcgagcagacgatccgcaagacccccgaaaggatcagccactggtcaagacgcgtgaccgaaagattccattatccccaggcctttgcaagctgactcacgaatacataaccatcacacgccgagccactgaaggtgcaagacgacacccatacctattcatagccatcggcaccggggcgcctctttcgctcagtgctgtgaatgctgttttcgccgagcttcggaataccttcaatggcgagttcgatgctgtaactccgcatgttttgcgccacacgtggaacgatcgcttctcggacattatggacagtgcgcaagtctctgaaaccgaagaagagcggatgcgatctttcttgatggggtgggcaccgacctcaaagacttctgtcaattacacccggcggcacatccgactgaaagctcagcaagtgtctttggcgatgcaagcgaagcaagtagacggtgtgtcgagtgatgactga

SEQ ID NO: 332028 - DNA, 306 bp, Pseudomonas aeruginosa
atggacgacctggcgctggagattgctcgactccaccacgtcaaagtcaaccagcccgatggtgcccactcctgctgcggccagataaaggcaagcgggcgaacccaggccgcccgttccgattatcagcaccctggcctgcttcaggcgctgctggccttccctgccaacgcctggcaacgtgatgtggcgaacgtagcgttgaacttcttcgtcgctcaacgcttcaacgccagaaccgccagatgtcgcgagcatgacttcgacttcatctccatcggaaagctcgccatccagattgactag

SEQ ID NO: 332029 - DNA, 459 bp, Pseudomonas aeruginosa
atgaatacgaacgtgttgaccgagcatgcattgagcgtgatctacagacacgcctgcaggacctatccaagggaatgctgcggattcgttctcgccgatgcaaaagtgaaagagggtacgaacatccaggatgaactgcacatggctgacccccggaggtacccacgcacggccgccaacgggtacacgttttccgtgacggataccgtattcctcaacagcagcttcaagacgtgcagcccggtatccgtcatctaccactcccacccggacgtcggtgcctacttcagccgggaggatatcgacaaggcattgtatgccggggagccaatgctgccggtcgactacctggttgttgatgtggccgccggcaacgttcgcggcgcaaaactgtttgcctggcgcaacggacgctttgaatgcacacgagggttcgggccatcgagccaggacgagtag

SEQ ID NO: 332030 - DNA, 303 bp, Pseudomonas aeruginosa
atgcaggtctgcggcggctcgcagtcgttcaacgtggtcaaccagttgcgcgtgctgggtcgctggatgcgcatgttcaccatccccaaccagtcctcggttcccaaggcctacctggagttcgacgaagcgggccggatgaagccatcgccctactacgaccgggtggtcgacgtgatggaggagttgttcaagttcaccctgctcctgcgcgagcgcacggacttcctggtggaccgctattcggagcgcaaggaaagcgccgagcagctttccgcgcgggtcgaccagcgttcgctctga

SEQ ID NO: 332031 - DNA, 288 bp, Pseudomonas aeruginosa
atgcatcagtgcaactacctacgtcaaacccacgccccggactgcgcctgctctgtgtgctggtccgcaaggcaggccatcccattgcacagcccgtcgccgtgtccggactgccggccccctgggctgccctatctggaagatggccgctggttctgccgtccccgttccttctgcgcgaaacacgacccgtcccggcgtccgccgaagtactggcacgttgtgtacgacagcgggaaaccgacgcccttcgtgcctgtgcgcgaagcattccaactggagggctga

SEQ ID NO: 332032 - DNA, 267 bp, Pseudomonas aeruginosa
atgagcacatcagccgatagagcaaggctattaatcaagaagatcggccccaaaaaggtcagccttcacgggggggattacgagagatggaagagcgtcagcaaaggtgccatccgcgtgagcacggaagaaatcgacgtcttagtaaagattttccctagctacgcattatggattgcaagcggctccatcgccccagaagtcggccagaccagccccgactatgacgaagccaatcgaaacttgcccaatcaaaacgcgggatag

SEQ ID NO: 332033 - DNA, 1482 bp, Pseudomonas aeruginosa
ttgaagataagaatagagaactttggcccagtaaaagacttttcatttgacaccgacaagtcctttcacctaatagttggcgacaataacgtaggaaaatcctacgtccttaccgcatattattttataataaaaagcattttagaactaagcgccccaaaaacatataataggcaggtttttcttttcagccaaatggtctcgcatgaagactacgaacttatccttgatacaaacgaagtaaaaaagttccaagcaaaagtaatcgaaaaaaaaagcactgacatagatgcaacaagtttctttgagcatctatcaagcagcttccttcaaagttcactagcagacgaattctctaaaaaaatcaagagctcctatagcgagctcggttctattgttaacagcttttccgactcaaaattagccaaaattacgataacggtaccgtcatttgagatagttctagaggggaatgttgaagagttccatgtaaccaaggctacatttggaaaagatgttgttttaagaacctcaaagcaaaatcgctccccagccttaattggaggcaagattgtcgtatacaaacacacttcagaaacagtagagaattcaattctctccctctatcggacgtgcgtagttcgatggatgggacacatagaggaggcagccggactcattgttgatgtaaactatcttccagcatcgagatccggcttatatcaagcactttctgctttcggtcaaataatcgcagagctatctaagagccgttcattcctcagttcaagaattgaactacctggaatttcaggtcagcttagcgactactttataaaactatccaatatagcccctactgaagtttccgaagacgcagaaagcaaagagttcgaagaagtagctgcaaacatcgagcataccgtactcaaagggagaatcgagtacgacttcaaagagaaaaaactttactatcgcccagcaggtacggatttaagattagacctttcagcgacctcctctatggtttcggaaacggccccaattgttgcttatattcgacacattatttcttggaactcaaaaaacttacaaaactcagtacgcatcagaagacgaattagagcctcatccccgaaaactttaaagaaaatattgataattgaagagccagaagctcaccttcatcctaagaaccaagtaaagatgacccagttttatgctgacctagccaacctaggagtcaacataatcatgacatcgcatagcaactatgtattcaataaagttagcaacttagtcattgagaagcgcttaccaatagaaaaggtccattgtgatcttttcaaaatgactccccaaggaagtatcggagaagcccagcttgtcgatatttttggaattgatgacaagaacttctctgatgcttcggaagatctagcaaacgaacggttcgacctcctagaaaaaatggagttttaa

SEQ ID NO: 332034 - DNA, 606 bp, Pseudomonas aeruginosa
ttgataagaacaatatataacgataccaaggccttccctattctagctcattcactagaagaagaaggggtgtctatagaatttgagggaagtttgctagatagcagtggggatcttaatcacgataaagtagtaatcctaaagccagacagattttacaacacgagagactttgccacccccccaaaatcagtagatggcgtgattgttgtacaagaaaacaatgaaacctacatatacattgccgagttaaaatcctcaagatcaaagcatataaaaagattagaaattcaagagaaatttgatacaatatttcaaaatttctttacagtagatttttcgcacatatttgaagagaccacctatgaaataaaaacactacgcctttggcttgtctgcgatcccctacagattcgtcaaaggtcaagagaccagcgggaatacattgaaaaagcaaaaaaaataaaagaaaggttaaaaggcttgctttcagaaatcacatcggggctcagaccttataaatataaaggagtgcaagcagcaattgagcctatgctatcaccgcctagcattcataaccaaggttatacagacatccttgcatag

SEQ ID NO: 332035 - DNA, 240 bp, Pseudomonas aeruginosa; identical to SEQ ID NO: 324359

SEQ ID NO: 332036 - DNA, 222 bp, Pseudomonas aeruginosa
atgagaagtccagatatcaaggttgtgaagctcgagggggacgcggttccctggtctatacgcgatgccggccatgaggtctgtttcgtggttatgcatggcctaacgctgaggagcgatttcttgtattccgaggaagaggctgaggcagtggccgatgcggcacaccaagaaatcatcgcagagatgagttcaatgctggaatctgctcgcagacgctga

SEQ ID NO: 332037 - DNA, 165 bp, Pseudomonas aeruginosa
atggtgcgatcactagccggcccagacagtcttgatactgtctgggtggtgttctatcaggggcgagtgttcggcgcctatccagaggtggatcaggcgcttgagaaggtctcagaaattgaacactacatcagcgttgatgaagtcccgacaccgcaggtctag

SEQ ID NO: 332038 - DNA, 2250 bp, Pseudomonas aeruginosa
atgaacgctctgacccaaccggccgccctggccgcctcccccctgaacatcaacctgaccgacttcatcgacgagttcggcgacgagctcctggagtcgctcaatcgctccacccccccggtctataccggctccgacaacgctcaccgccagttggtgatggaccgactcaagcgcaagcccttcgcggcccaggccgaggtcgtccaggccatcaccgccctgctgctggaccgtaacgagcaggccggaatcatcaacgccgagatgggcaccgggaaaaccatgatggctatcgctgtcgcagcggtcatgcacgcggccggctatcgccggaccctagtcgtctctccgccgcacctggtctacaagtggcgccgcgagatcctggagaccatcccagccgcccgagtctgggtactcaatggcccagatactctactcaagctgctcaagctgcgagatcagatgggcgacgcctacgacggacgccaggagttcttcatcctcggccgcgtgcggatgcggatgggtttccactggcggctcgcctgctggaagaaacgcgccgccggcggccaactgctcgctgcgtgcccggattgcggccaggtcctcgaggacctggaaggcaacctggtcacggtggaggagttcgagcgtggtgatcgtcgacgtacctgctcctcctgccgtggggcgctctggacgctgatccggccaggcaagcccgacggcggaaaccggcgcgcaacgatcctcaagtcgatgtgccggataccaaccatcggcccggtcagggcggagcgcctgctgaacgacttcggcgaggacttcctggccacgatgttggtggacaacgtctcggagttcatcaacctgatggacgccaagggcaacttcgtcttcagtgatcggcaggccaaacgcatggagcgatcgatggcgaacatcgagttcggcttcggtgaaggcggctaccaaccgactgagttcataaaaaggcagcttcccaacggctacttcgacctgctggtggtagatgagggacatgagtacaagaacatcggctcggcccagggccaggccatgggtgttctcgcagccaaggcacggaaaaccgtgctgctgaccggaacgctcatgggcggctacgccgacgatctgttctatctcctgttccgcatcctcacccagcgcatgatcgaggacggctatcggcccaacgcgcgcggcagcatggctcccgcagccatgtcgttcatgcgcgaccacggtgtgctcaaggatatctacaccgagcgcgatggtgattcgcacaagacagcgcggggcaagaagctctcggtacgcacggtgaaggctcccggcttcggcccgaagggcatccaccgcttcgtattgccgttcaccgtgttcctgaagctcaaggatatcggtggcaacgtactgcccgactaccaggaggagttcgtcgacgtgccgatggcgcctgatcaggcttcggcctatcagcgcctggcggccacgctgacagctgagctccgccaggctctggcgcgacgagataccacgctcctgggcgtggtcctcaacgtgctgctggcttggccggactgctgtttccgaccggagatcgtcaagcatccgcgaagccgggacacactggccttcgtgccagcgatcttcggcgacgagcagttgatgcccaaggagcaggcgctggtggacctctgcctcgaggagaaagcgaagggccgcaaggttctggcatacaccgtctacagcgggacgcgcgacaccacgtccaggctgaagaaagtgctcgagcaatccgggctgaaggtggcagtgctacgtgcttcggtcgataccgctcgacgcgaggattggatcctcgaccaggtcgatcgcggcatcgatgtgctgatcaccaacccggagctggtgaagaccgggttggacctgctggacttcccgaccatcgcgttcctgcagacggggtacaacgtgtacaccttgcagcaggccgcgcggcggtcgtggcggatcgggcagaagcacccggtgcgggtggtgttcttcggctacgccggcagctcgcagatcacctgcttacagctgatggccaagaagatcgctgtggctcagagcacgtcgggagacgttcccgagtcaggtctcgactcgttgaaccaggatggggactcggtggagatggcgttggcacgacaactcattgcagcatga

SEQ ID NO: 332039 - DNA, 255 bp, Pseudomonas aeruginosa
atgaacccattgttcaccaacctcacccaggaaaccctcgcctacctcgaggaccaactgtccaacaacgacgtcgccggcaatgacgagctcatcgacctgttcatcgaggagctgtcgctgaccttggagcaggccgaagcggctgtcgcgctacgcgatcagtacctctgccaggtcttcctgatcggccaagggccgctgcaccaagccgatgggctcagcttcgaccctcacaccaagagcgttcggtag

SEQ ID NO: 332040 - DNA, 198 bp, Pseudomonas aeruginosa
atgcaatacggaaagcgggcactcgcccatcttcatctcgaactgccgctgcaggttcttatgtccaacgccggcttctatatcggcacccttgatgaagaaggaccagcctcgcgcgagtcggttgaatattacccctcacgcgaacttgcccaacaggcattagacaacggcacttggacgcaacgggaatattaa

SEQ ID NO: 332041 - DNA, 231 bp, Pseudomonas aeruginosa
atggaacaaggttctgtttttcagagcaatcgtagccaggccgtaagactgcccaaggcagtcgcgcttcccgatgacgttaagcgtgtggatgtggtcgttgtggggcgcgccagaatcatcacgcctgccggcgagtcttgggatagctggttcgatggcgagggcgttactgccgactttatggcagagcgtgaacagcctgccgatcaggagcgcgagactttctga

SEQ ID NO: 332042 - DNA, 183 bp, Pseudomonas aeruginosa
atgatgcccgagatcgatggcctgttttggtacttcgagaacggtgtctccgagccgcgcccggtgctgctcaaccaggcgaggtgggtaaggaaattcaaatcattcaacggtgctgagcagtcctggcttcgtgacggggagtatctggttggaccgcagcccacttcggctgctcagtaa

SEQ ID NO: 332043 - DNA, 840 bp, Pseudomonas aeruginosa
atgatcaagaaatgtcttttcccggccgccggttacggcactcgtttcctcccggccaccaaggccatgcccaaggaaatgctgccggtggtgaacaagccgctgatccagtacgcggtggaggaggcgctggaagccggcctttccgagatcggcatcgtcaccggccgcggcaagcgttcgctggaagaccacttcgacatcagctacgagctggaacaccagatccgcaacaccgacaaggaaaagtacctggtcggcatccgtcggctgatcgacgagtgcaccttcgcctacacccgccaggtggagatgaagggcctcggccacgccatcctcaccggtcgtccgctgatcggcgacgagccgttcgccgtggtcctggccgacgacctgtgcctgaacctcgaaggcgacagcgtgctgaagcagatggtcaagctgtacaaccagttccgctgctccatcgtggcgatccaggaagtgccgccggaagagaccaacaagtacggcgtgatcgccggcgagatgatccgcgacgatatcttccgggtgaacaccatggtcgagaagccgaagccggaagaggcgccgtcgaacctggcgatcatcggccgctacatcctgaccccggacatcttcgacctgatcgagcagactgaaccgggcaagggcggcgagatccagatcaccgatgccctgatgaagcaggcccaggacggctgcgtgctggcctacaagttcaagggcaagcgtttcgactgcggcagcgccgagggttacatcgaggcgaccaacttctgctacgaaaacctctacaagaccggcaaggctcactga

SEQ ID NO: 332044 - DNA, 330 bp, Pseudomonas aeruginosa
gtgcagcgggtgctggagatcctctacctcaagtgcgaacgcagcgacgagaacgagccgctgttgcgccgccgcgagctgctcgagaagcaggggcaacgcttcggcctccggcagatccgccgggcggtggagcgcggcgaactgccggcgcggctggacgtcgagctggccagcatctatctgcaatcgctctgggacggcatctgcggcaccctggcctggaccgagcgcctgcgcgacgatccctggaaccgcgccgaacgcatgtttcgcgccggactcgacagcctgcgcagttctccctacctgttgctggcggacgcctga

SEQ ID NO: 332045 - DNA, 285 bp, Pseudomonas aeruginosa
gtggccaggaaaaccaaagaggaatcccagaaaacccgcgacggcatactcgatgccgccgagcgggttttcctggaaaagggcgtgggcaccactgccatggccgacctggcggacgccgccggggtttctcgcggtgcggtctacggccactacaagaacaagatcgaggtctgcctggcgatgtgcgaccgcgccttcggccagatcgaggtacccgacgaaaacgccagggtgccggcgctggatatcctcctgcgctccggcatgggctttctccgctag

SEQ ID NO: 332046 - DNA, 2757 bp, Pseudomonas aeruginosa
atggctcgtttcttcattgaccggccggtcttcgcctgggtgatctccctgctgatcgtgctcgccggggtcctggcgatccgcttcctgccggtcgcccagtacccggacatcgcgccgccggtggtcaacgtcagcgccagctatcccggcgcctcggccaaggtggtcgaggaagcggtgaccgcgatcatcgagcgcgagatgaacggcgcgcccggcctgctctacaccaaggccaccagcagcaccggccaggcctcgctgaccctgaccttccgccagggcgtgaacgccgacctcgccgcggtggaagtgcagaaccgcctgaagatcgtcgagtcgcgcctgcccgaatcggtgcggcgcgacggcatctacgtggagaaggcggcggacagcatccagctgatcgttacccttacctcctccagcggccgctacgacgccatggagctgggcgagatcgcctcgtccaacgtgttgcaggcgctgcgccgggtggagggcgtgggcaaggtcgagacctggggcgccgagtacgccatgcgcatctggcccgacccggccaagctgacctcgatgaacctcagcgccagcgacctggtcaacgccgtgcgccggcacaacgcccgcctcaccgtgggcgacatcggcaacctcggggtccccgactcggcgccgatcagcgccacggtgaaggtcgacgacaccctggtgacgcccgagcagttcggcgaaattccgctgcgcatccgcgccgacggcggcgcgatccgcctgcgcgacgtggcccgcgtcgagttcggccagagcgagtacggcttcgtctcgcgggtcaaccagatgaccgccaccggcctggcggtgaagatggcgcccggctccaacgcggtggccaccgccaagcgcatccgcgccaccctcgacgagctgtcgcgctacttcccggagggcgtgagctacaacatcccctatgacacctcggcgttcgtcgagatctcgatcaggaaggtggtcagcaccctgctcgaggcgatgctgctggtgttcgccgtgatgtacctgttcatgcagaacttccgcgccaccctgatcccgacactggtggtgccggtggccctgctgggcaccttcacggtgatgctcggcctgggcttctcgatcaacgtgctgaccatgttcggcatggtcctggcgatcggcatcctggtggacgacgcgatcatcgtggtggagaacgtcgagcggctgatggccgaggaaggcctgtcgccgcacgacgccacggtcaaggcgatgcgccagatcagcggggccatcgtcggcatcaccgtagtgctggtctcggtgttcgtgccgatggcgttcttcagcggcgcggtgggcaacatctaccgccagttcgcggtgaccctggcggtctccatcggcttctcggcgttcctcgcgctgtcgctgaccccggccctgtgcgccaccctgctgcgcccgatcgacgccgaccaccatgagaagcgcggcttcttcggctggttcaaccgcgccttcctgcgcctgaccggacgctaccgcaacgcggtggccggcatcctcgcccggccgatccgctggatgctggtctacgccctggtcatcggcgtggtcgccctgctcttcgtgcgcctgccgcaggcgttcctgccggaagaggaccagggcgacttcatgatcatggtgatgcagcccgaaggcacgccgatggcggagaccatggccaacgtcggcgacgtcgagcgctacctggcggagcacgaaccggtggcctacgcctatgcggtcggcggcttcagcctgtacggcgacggcaccagctcggcgatgatcttcgccaccctgaaggactggtcggaacgccgggaggccagccagcacgtcggcgccatcgtcgagcgcatcaaccagcgctttgccggcctgcccaaccgtacggtgtatgcgatgaactcgccgccgctgccggacctgggttccaccagcggcttcgacttccgcctgcaggaccgtggcggggttggctacgaggccctggtcaaggcccgcgaccagttgctggcgcgcgccgccgaggacccgcgtctggccaacgtgatgttcgccggccagggcgaggcgccgcagatccgcctggacatcgaccggcgcaaggcggagaccctcggcgtgagcatggacgagatcaacaccaccctggcggtgatgttcggctcggactacatcggcgacttcatgcacggcagccaggtgcgcaaggtggtggtccaggccgacggcgccaagcgcctgggcatcgacgacatcggccggcttcacgtgcgcaacgagcagggcgagatggtgccgctggcgacgttcgccaaggccgcctggaccctcggcccgccgcaactgacccgctacaacggctatccctcgttcaacctcgagggccaggccgcgccgggctacagcagcggcgaagccatgcaggcgatggaggaattgatgcagggcctgcccgagggcatcgcccacgagtggtccggccagtccttcgaagaacgcctgtccggcgcccaggtcgccatcggcaccggggtgctcggcgggatcgtcaccgccacggtactcgcggtgttcctggtaccgctgttcttcctggtggtcgggcgcctgttccggttgcgcaaggcgccgcgcaccggcaactcgccccagatccccacggagcaagcctga

SEQ ID NO: 332047 - DNA, 930 bp, Pseudomonas aeruginosa
atgagtcggctgatgacctacaggacgctgctggcttgcctgctcgccgcgttgcttgcgctgctggtggcgggccagcagcagcgcgcgttcgagcgaatctggttcaagctggagcagcgctacggcggcgatgttgcgcgcgagaacgccctgcgcctggccgactatcgagtcgatatcgaagcccgcgtgctgggcgcggagtccaacgtctcggcgctgtccttcgaccccagccggcgcagcctggtcagcgtgaccaaccaggacccgcatttcctcgagctgtcgctggacggcgaattgctgcgacgcatccccctgcgcggtttccaggatccggaggctatcgagtacatccggcccggcgtctacgtggtcgccgaggagcgtcgccaacgcctggtggagatccatgtcgacgccgacacccgggtgatcgacatcgacgatccgcgcaacgcccggaagttctccctgggcagtgcaaacaagcgcaacaagggcttcgaggggttggcctacgacccgctgcgcgagcgcctgttcgtggcccgggaaaaggcgccggtgggcatcatcgaggtaaacggcttcttcaacgaccgcggcgaggcgctcgacctgagcgtcggcggcgacccgcagcgcgatcgcgggttgttcctcaccgatctgtcgagcctctactacgacaaggcccgcgatcacctgctggtgctttccgacgagtcgcgggtggtcatcgaactggatcgcgccggggatccgctcggcagcctgaccctgcgtggcggcaaccatggcctgacggacgacgtgccgcaggccgaagggttggcgatggacgaccggggcagcctgtacgtggtcagcgagccgaacctgttctaccgcttcagccgagcgctgccagcggccgactag

SEQ ID NO: 332048 - DNA, 843 bp, Pseudomonas aeruginosa
atgaccgacttgccactacccgctggccctgtgatcaggacaacttgcttcgcttcgatggcttcaaaaactttctggataatcccggcacgctgcaggtggaaagtcggcccaatcgttttgcggatcttccgcaggacaaaatccgtatggtttcgcaaggccgccagtacacgcttctcatgcgtccctacctcgctgtatgactggacaagagcgtctggaaggtcggcgcgtttcagttttcgagcgcctggattggcgtcactggtaaaggccaggagtgtgttccagtctgccgatgcgctggcgagtggatctggggcggtagacttgagagcaagcagcgtcttgatatgtgcttcggtctgccgggtggaagtgtgcaggtctagactcaggacatgtaacacgcaaaggaagggccaaatatctctggcagtaatggcccccctttccagttcgccgacgattttgcagagttcgctgcactgcgtgatggacttcttggagatgaagccgtcaagagatagtcgcctctcgaactcttcgccatcggatgcgcctctggcgcagtcgagcagccctgcgaaattttcgagaagggtgttcgtgccacgctgcgtgacaagtacaaatcggtcgtgctggggattgaaagggtcagctttcttgaagtctttccagaaatcaccaacagctttcttgcactcatcgtcggcagcactgattgtgaggctgcgcttcacttgccctacaagttttgctggtgctgcgcctgccagctcgcagacgacgaggaagtcatctgtgttgaagccgagatgctctgtctggaaatga

SEQ ID NO: 332049 - DNA, 4074 bp, Pseudomonas aeruginosa
gtgtcttttctttcccgcgaattcttcgcctttggcttccgggttgaggagttcgccgtagcccacattgatgaaacactgcacaacggtcagattcctgcacgcaccacagagctacaagccattatcggtgcgcaggaccgcaaggtactcgtcatcgagagcgtcgaacgcctgctcgaaaaacccacacgcgatgcgttcagcgatctgatgacgcttgctcagggtgacgacggcctgggcatcatcatgacctgtcgcgactactccgtagcgcaggttcaggcaagctttcttctacctgcaggaattgatcacgctgtcatcgaagtaccaccactcgacgactccgagctagaagagatccagacgacgtttccgtcactgacgatcccgctgggcaatccagctctgcgcaagatcctgcgcaatccgtactttatcgacaaagcactccacattcactgggatgcgggacgcccacttcccgagagcgagcgagagttccggtctgtcttttggcggcagatcgtgtgtaaggatgacagccccgccaacggcatgccgcgtctacgcgaagaggccttgcaagagctggctgtacgcagggcacgggccctttcagatcatgtgactgcttctgggctcgaccctgtcgccatcgctctgctgaaacaggattccctcgttgtgtcgccagacggcaaacctctgctggttgcaatagcacacgacgtgcttgaagactgggccatcctccaatggatcgaggagcagcacctcacagatgaaacagcattcaaggcgctgtcctccgcgattggtccgcatcccgcactgcgccgctcttaccggaagtgggttgccgaactggtcgaccgcgatgcacccactgcagaccggatcttccgagcggccatttcgcaagccgatgtgcccgcccaattccgcgacgacacactggtttcgctcctgaaggcaccttctgcacccgaattcctggcccgacacgaggctggcttgctcgccaatgatcgagccattctcaggcgggtgatccacctcctgcgcgttgcctgcatgacatcgccagcctggcttgccgacgtgcgcggtcacagctcaactcttagcgagccggatggcccggtttgggcgaccgttacagggctggttcatcgcagcattggcagttttagttcggaagactctccactgcttcttgcattgatcgaggatgccgtacgcggcgtgagttggtgggcaccggatatcgagggagccgaagacatcgccgggattgctcattggctcctcccacgcgttgacagctacagaaggggcgatgcacgtaaacgcgtactcaaggtcattgccaagatcccgaaagccgcctcccagcgattcgaaaacgttctgcgcgggcaggttaaggaaggataccgccgtgaccccatcgccgaagaattccgccaaatcattcttactggtctcgatggcgcgcatgcagcccgcgacctaccggatctgttgacttccatcgcacagggtactttcctcgtttccgaggagtctctgcgcgaagagcccttcagccactcatccctagacatcggcctttactttggcatcaaggaatatctgcaccatgattacttccctgccagtgcctttcggggtccgtggatcaacctgctcacgcgccacccagataaaggcctcgatttcctgatccaagtcgtcaaccacagcgcagactggtatgcgcatccacgtctccacgatccgctcgagcccgcttgggaagttgcgctgacgttcgcagatgggctggtgcggaaacaatgggtgaaccaacgtctctggagtatatatcgcggtttgggcgtcagcccctatgtgcttcagtctctactgatggccctggagaaatggctgctcggctacgcaaaatcccatcccgaaaggctagatgcggtgttgttcgagatcctgcagcgcagcgattcggcttcgctcgcagccgtcgtcgcaagcgtggcgacagctcatccccaccaatccggagaggcccttctggtgctgctttcagtacaggactacatccttatcgaccgcagccgcatggccagcgagcaccagacatcgatgcttacgggaatgttccccaccctgaacgtcgagcacaaaatctacgaagaggagaggaagcagtcgaacgagctaccgcatcgtcaacatgacctcgaagtagctatcgcaaacctgcaactcggccctcttgctccacgggttcacgtgatcatcgacaagtacctggctgaactgcccgcatcggacaagcgtaatgaggatgacctcatatggcaacttgcccttcatcggatggacttgcgtcaatatgtcgtagccgaagcccaaccagcattgagcacgacatccacagtggacggcgaagagccaacgaaaaactacatcagcctggaacccaaaccagcggctccggaagtgcagcaattcattgaggagagtgcaaaagggacggaagaaacgaatgccaggctaggcatctacaactgggggctccagatctttcagtacaagccagattctgctgaccctgctcaatggagggaaaaactgtcaggtgcgcaggaaatggaccgtacggctgagcatccggacagcagccgaaacgcccccggcttcgtcgccgcagtctgtgtccgcgatcactgggaagagatgtcaccgcaagggcagaactggtgcattaatgtcatctgctcggaaatctccaggcacgcggacgcatggggaaccataaaccgcatgcaacggttctcgatgctcgcagatcgtccgtgcgcttctgtggtaccgctgcttctatccaagcccctgacccaaagccaaacaccacaggtgaaactggcctttatcactgcgctaacccacccgattgacgaagtccgctggtatgccaccagaggcattgacgaccagttctggacagcaaatccagctctcgccctccgcgctgtcaatgccgttgctacagaggctgctatttctgattgtgattggaccgccgaagagaagaagcgttaccacaagcggaaaccgctggaagcaatcgtcgctgccgcagcctcacaggttcgcgagagtttctggactgacggagccattaccgaagattcgcacatccggctcgacatcaccgagacattcggtgccgaggcattcgcaaaagtcctcgtgattctcggccaggcacccaacgaacctcttgctgtggctgcgtacaggcgcgctagtgaatacttggtcgactgctggaaccgcgagtacgaccgctctcacagtcgtcgtgaccgaaacttcgaaagtgaacaggcgatatcctactgcatacaagaatttgtcatgcgtgtggcagatttcgatgccaggcaggttctgcagcctatcttggatgccactgacaggcatccacgcgagatacatagcgtcatccaaggattgaccagcagcgaggatcgcagctcccacaccaaccagtactggtttttgtggaacctgtttgccgagaggattaagcacgccaagtggcttgcccatctggatggagagcacccatacggcagtgaggtactctcgacgatcttcctgaccgcgttttggaaggacaatgtccggcactggcgtagcctggaaggctacgcccataacgtcgactcgctgttcaatgctctaccgccggtctcgatcgtgctggacagctacacccgttttctctaccacatcggcgagcgctccatgccagcagcttttgtacacatcgcaaatgcgctcagacggggaaataacgccgatatgctgcgcgagtccaacaccgttttcatactcgaaaacctgctccagcggcatgtctactcacgtccactggaactcaagcgcgatctcaccctacgcgaggcgattctgtatgtgctcgacgcgcttgtcgaaaacggatcttccgcagcgttcagaatgagggacgactttgtgacaccggctacctga

SEQ ID NO: 332050 - DNA, 981 bp, Pseudomonas aeruginosa
atggaatttgaggtaggatcaagaactgttgagattaaaaaaaggcgtattctcaccgccagcgtgaaacggcaggtagctatattgagtggctatcgatgctcgttcccaggctgtgaccaagacctcatgctcgatggctcgtcatttatcggggaaatatcttcgatcgaagccgttcattctcacggcccaagacacaacccgtctaaggatggagacgagctacttgaaatagacaactatcttctcttatgccctaatcatcatgcggttattgataggcagcctgaaatatattcgactgagtggctaaaaaaggctagggaagatcatctaagtaaagtgtcagaagcactgtctgcctcgaactttgtagacgagataaaactagatgagcaggttgaagtttccttagaggaagcaataggtgtttggaaagtaaatcgtgaaaactcatccgaggagttctggcaaactcttctgcaaaaatgtccagctgtattgtcacagatatttccgcaaagtatgtttcagctaggtaataaatgctacgttggtggaaaatctataacaaactcgggtggaaatctcgtcgactttatctacgcaagcaggctgactggcaatatagcattggtcgaaataaaaaccccgaagactaaattgcttggaaaaaagtatagatctaatgcctattcaattagcgaggagatgtccggatcatttattcaggtgttaaattacaaagaccaactgatgaaagagtattacaagctaagcgagggcgacgaaggtagttccttttctgcattcaacccaaaatgcttaattgttattggcacgcttgaatcagagcttaaagatgggaatcaatacaaatcttttgagctattcagaaatagtatgacgaatgtagagattgtcacttacgatgagctttttcaaaaggctcaagacattttagatatggtcaaataa

SEQ ID NO: 332051 - DNA, 231 bp, Pseudomonas aeruginosa
gtggtcttgatcaacaaagatcggaagtcgaaggtgcaggctcgctggaatgacagcgaagtccatcaggaccttggcttctggagagattacttcgagaccgttcgcgccagtgatttcctgatggggagggtgtcgggtcgcgacgggaaagtgtttcgctgctgcttcgactggctgattgctccctccaacttcgtcaaggttgtggagggcaattaccatgcgtga

SEQ ID NO: 332052 - DNA, 1386 bp, Pseudomonas aeruginosa
atgcgtgatccctacagcctcgaagccgagcatggggttcttggcgcgatgatgcagcgtcctgagctgatcgacgttcttgccgatgaactgaccccggagtcgttctatttcgcagacaacgctgaggtgttccgggcggtcatggcggtgcgctctgccaacaaagcggtcgacttcctgaccgtggctgagcagcttgggacgctccctagcgagaccccggcactggcttactgctgcgagatcgtgaagaacaccccgagtattgccagcgcctcgacctatgcccgtatcgtccgtgagcgggctgttgatcgggcgctgcatgtcgctgcccaggacatttccgagattgccagttcgagtcaggagaccgccgaaaaggtctctgctgcgcatgccgcaatcatggcggtggatgccggcgaaactagcgttgacgttcagaaggcttcagatgtcctggcaacccaggttgaggtctggcagcagcgccacgaccgctatcggagcggacaaaccctgatgggtatctcttctgggctgactgatcttgacgccaagatcggcgggttcctgccgggacaactgattgtcgttgctggccgaccagctatgggcaagacaaccttcgcaatgtcctgctcgatccatgcggcgctcaaggagcggaagtcagtactggcgcttagccttgagatgagcaatggacagctcattgaccgcgccgttgcttcagtcggaaagattccgctgaacatgatcagaaacggtaccgcatgcgaggagtacggtaccgagttgggcgccgcatcgcggactatcagcatgtccagcctgtacctcgcggacaagccggccctgaatacgatcggcagagttcgtgccatggcacggcgccacaagatgcgctatggactcgacatgctgatggtcgactacctgcaactcatggacggggagggggagaaccgcgtcaacgtcatcagctcaatcagtcgcggcttcaagctcctggcaaacgaacttggcgttcctgtgattctcctaagccagctttcccgaaagtgtgaggagcgccccaacaagcgtccgatccaatccgacctccgcgaatccggcgctattgagcaggacgcagacatcatcctctttgtctaccgggatgaggtctacaacgagcataccgagttcaaaggggtggccgagatcatcgtcgcaaaggggcgcgacgttgaaacggggacggtacgtgctgcgttcttgggtcagtacaaccgctttgaaaacctatccgctgaatggcggcctgctgaggccgataggccgcagaaagtaactcggctgtctgaccgctatggcagcaaaggagcgggccaatga

SEQ ID NO: 332053 - DNA, 687 bp, Pseudomonas aeruginosa
atgaatctgaacagtgcacgtatcgcctggcacgatgcgttctataccccttggaacagcggcatggctgaggcggcagagcgagctgctcttggaattgtcgaagctggcggatatgtccggcgccgtatcaccgagatcgatgatgatggggaggctgtctcctacagccagcacaccttcgtgccaggaatccaccagaccagaactgagcgcgacattagcactcctcgggctgttcatcaggcgctcgccggcgtgattcaaaaggcgatcgataccctcccggcgcatctgaaggtgttcggcaatcacatgtacagcccgatggctgacgaagacgacaaggaggctgcggaagagatcgtgttcagggtcgcgtacgaaactggcccaaggatgtacacgaagaaattcgagaaggcgcgctatgtcgctgcgggagtcttgttccggtaccgccgcatgcatcagggcgggcagagtgaaggtgttgatccttgcccaagccctgagtcgttccgcgcatggctgctccagattcacggacttgagctgtcgtcagagcaatggaccagggagtgggagggattcattcagtcctgttttgatgcctgcaatgacctcgacaaggcagcgcttgtgcctgtctcctcagcgataaaaatgatgaaaaatgctgcttga

SEQ ID NO: 332054 - DNA, 351 bp, Pseudomonas aeruginosa
atgagttcagcagaaaagacatatatgattctcattcgtcttgcaaatgagaatgtcacaccaaaacacttaagggagaacggccccctaattaaagctgtgatcgagaaatactcacagaaagactgtcagctggtattcaccagcccagacgggtcaacttttggctggctattaaacacagaacaaccgctcggaaagctcaaagcagctctctacggtaaaaccaaggacaccgatacctctccgctgttcaatggagactccttccttggaatggaactcggtaaggactttgagggtaccggattcagcaacggatggacgtggttacagcaccaccagagataa

SEQ ID NO: 332055 - DNA, 234 bp, Pseudomonas aeruginosa
atggatgctccgcttctactgaagaacacaggcacgagcctgatcttgtgtgacgccaacgggaagccgctccctggccagctttccttgagcatcagcaacgatggtctcgtgccagcggtcacggtcacgttcgcactcgacaatgagcgcgtgaggctttgcggggaaggggtggagtcgaaataccagcatcgactcgtcgcctgtctacgcgggaaagggcaaatctga

SEQ ID NO: 332056 - DNA, 315 bp, Pseudomonas aeruginosa
atgcctgacctccctcagcgtcacaccaagccaaaggccaagggagtgactaagcacgaggtagaggacaaagcatgggggaatgggcgcggtggcaggccgtggcgccgcaagcgtgatcgcatcctcaagcgggatggctacatgtgccagtgtgcagagtgcaagggagtgaagaggatcgccacagaggtggaccacatcatcccgctgagccaaggcggcactgatgatgactcgaacctgatggctattgctggatacccctgccatgcgaggaagacggcaagggagtcggcggcatctaggagatag

SEQ ID NO: 332057 - DNA, 1848 bp, Pseudomonas aeruginosa
atggactacgataccagcggtttcccgctcggctcgaaagaccctcgcgtcttgtacaaaaacgccaagaatttcgacgcggcgatgaacggactatctctgtcttggcttgaccggcttggccgaatgagaaagtcttggaggggaattgagaacgagtggaataccttccttgccactactgggttcgaacttcccccactaatttatgcagacggtgcacctctggttgttgagagatcaacccaactggtgcagcgaaacggattgctctacagcatcaggcttcctgcagactttccggttgagctttcgggaaactgggatgatgatcagccccttatggtctatcgcaatgaccaaccgcttcgccaggacctagctgaccaagatggcggaaagctggttggatggacgcgtactgagctctcggagcagataaaagatgtaaactctgccttggacggcagtagtatcaatgtctgggagtacgcatcgcttgtatccagtaagcctaaccctgaagacccgaccacgtgggactgggcaccagccgtgcaggccgcagtcgatttctgcaatgcggagtttcccgcgaaagagcttgttgttccgacaatgctcactcttgagtcacccgtgaacattgatagacctgttgatggggtaaatcagaaagatacattcagaatccgagggatcaatgggggcggttttaaggtaaaaaccgatatccctatgttcagcacctcgcttccgcaggcgtttgatgaaactggtgcgcgaatgccttcctcccagaatatccgactggagaacctaactcttacggcgagtgatgcctctctatcagcatatgtgcttgatagtaacaagctgcttcgtgtcttcattcaaggttgcgcaatcagtaaccttaagcttgtgaaaaccactggatatctacagtccatctatttggggcctaacaacaatatccgaggctggaatgggattttccttgaggccaacggaggcgcatacgatgttcgcgcgcacggctgccagatcgagcatggagggaacttctggctcacgatagataacacaggaaacaagtctgtttcctgttgcggagtcgataactgccttgttgagggtctttctgggtatggaatcctttactctcacagtaggggattctatgtgtcgaactgctactttgaaggaaatgcggacccggacattatcgcagatagcttcccggagaaggcaaatctcggggttctgcatatcggtaatttccactccgttctttccacaaacaagtcaaatccggcattctgggctgtacgttggggctatacgtttggaggcactagtcttagcaacttctgcgattggaggttgaattttatccggcctgatactcaagttaccatgaatgacgccgcccaagaggctgcgtctaactctgataacaggctggtactaaatgatgttgtgcttggaatcgtgcgccctagtgatgatcctgcggcatatggtgggaggtattggcgggccgggagtatcgtgatcaacagagatcatggtagtaaaggatatgctgggtgggtatgcgctacatccggcactccaggcatctggtatccgttcggaacaactagcgacggtgcaagttggaacttcactaatcaagaaggcacaagcgtgatggcgaaaattagtgtaaccgaaccgaaccagggacagactgttctgtaccttaggtacagcaacggaaacacaataaagcttgggcaggtactgattggttctgctgactctggaggggttggctataggatgctgagggtggagaactag

SEQ ID NO: 332058 - DNA, 1161 bp, Pseudomonas aeruginosa
atggaagaaatttacatacttgtcattttcgttacttcggttcttattatcggttccgcggtaaagctaacgggagtaactgccaacgaaacgataaataggcactcccctatagatgcgctgcgcggatggcttgcaacatcagttgcatgccatcacgcactaattacatatacatggaagaccgaaggggagtggagagactctgcaagtcactttattagcaatatgggatctattcccgtatcgattttcttcatgatcactgcatttttgttttttggtaaaatctacagaaagacgccggtttggaaagatataattacatcacggctaacgagaatactcccactatattatactctagttggagttgtgataataataagcatagcttccacagacttccatataatcgacgcaaagtcactgagcatccaaatactcaaatggctcctattcttaggcgttccaataaatggattcgatgacagcaggaacatattagccggcgttcaatggacactaatatacgaatcaatcttttacatctcactaccagtaattgcagcattctcaagtaagcaaacctctcgaactgcgttccttacgtcactagcttttatctctttgatttttacagtaggcgtcgcaaaagaaataatcagacctggcctttttgcactattcgccataggagcaatacctgttttcttaaaaagaaactacgagcatttgcatgatgcaatgcgctcaaaggtggcgtcttctatttctgcggcatccatgattattgccttcacagcaactgagaaatatagcccgacgcaaatggtgctttgcggaattgcttttttccctattgctctgggaaatgagatgtttggtattctgcgctcacgaggtgctaaatctcttggagaaataagctatagcatctacttgacacatggcattgttctgtatgcgctattctccataattgaactatcaatacacgaaataagcatctatgttttcgccctatacatacctctcgtaatagccttaacatcggctatttctgtatttacatacaagaaaattgaacgaccgtggattgagttcgcaaagcgaaaatcaatcagtcgcggggaagaaaaattcaaaggtgcggcgtag

SEQ ID NO: 332059 - DNA, 435 bp, Pseudomonas aeruginosa
atgcgtacttcccaacgaggcatagacctcatcaaatcgttcgagggcctgcgcttgtccgcctatcaggactcggtgggtgtctggaccatcggctatggcactacgcggggcgtgacccgctacatgacgatcaccgttgagcaggccgagcggatgttggccaatgacattcagcgcttcgagcctgaactggacaagctggtgaaagtgccactgaaccagaaccagtgggatgccctgatgagcttcgtgtacaacctgggcgcggccaatctggcgtcgtccacgctgctcaagctgctgaacaagggggactaccagggagcagcggaccagttccctcgctgggtgaatgcgggtggtaagcgcttggagggtctggtcaagcgtcgagcggcggagcgcgcgctgttcctggagccgctgtcgtga

SEQ ID NO: 332060 - DNA, 318 bp, Pseudomonas aeruginosa
atgaaaccagtccaattccttctcagagggtatgcggagcacaaggatggcgtatggcaagcgttctgcatcgatctgtgtctggcagtacagggtgagtctcgtgaagaggtgatccgtaaactccacgagcaaacctacgattacctgaaagacatcttcgagggtgaagactacccatacgccgctcagctcctcgcccgcaaagcaccgctggtgcaacgcctgaagtatcactacctagcatacagggagcaggtcagccgactgcgcgatgtgttcaccttcaaagacgccatgcctcttaagctggcgtaa

SEQ ID NO: 332061 - DNA, 276 bp, Pseudomonas aeruginosa
atgagaggtgaatcaggttttgctctattgtgggttgcggtcgcgctggcgggatgcgccgccaggcaggaagccgagccgcgcacggtgcgcgtagaagtgccagtggcggtgccgtgccgggtgccggcggtggaggtgccggcttgggcaactactgggctgcgaaaaggcgacgacttgcagaccaaggtccgcgcgttgctcgccgaacgcttgcagcggatcggttacgaggcgcagctcctggctgcgaaccgggcctgtcaggattag

SEQ ID NO: 332062 - DNA, 1212 bp, Pseudomonas aeruginosa
atgtcgaaaaagtcccgctccagactctggttcctcgtccatagctggctggccctgcccatctggttcttcgtcctgatcgtctgcgtcaccggcaccctggcggtggtcagccaggagatcgtctggctggccaaccctgacgtccgggccagcaagccctacgaagatgccgagccgctcagcttcagccaggtcctgaaggcgatcaacgaagcccaaccggacctcctggtcgaatccatccagcgccccgacgaagagcatttcgcccttactgccgaggtcagctatcccggcggcagcgaggcgaccctgtacatcaacccctacaccggcgccatccagggcgaaagcccctccttcgactttcgtcagttcacccgtgccctgcacggatggtggctggttccgttcaacaacggctacagctggggctggtacatggtctcgctgctcggcctccccatgctggcatcgctcatcaccgggctggtggtctataaacgattctggaagggctttctcaaacccagattacgcatcaaccagggcgcccggatcttctggggcgacttccatcgcctgagcggcatctggtcgatctggttcatcgccctgatttccatcaccggcacctggttcctgatccaggccatccttgccgacaaccacgtcaccctgaccaacgacggcatccctccggtcatcgcacgcgccgacgtgccccgcgccgcacccggtcagaaggttccatacatcgagctggacgaggcggtgcggctcgtcaccgggcgtatccccagcctggaggccagcgcggtgttcctgcccggcaacgcctacagcccgatgttcgtggccggacgcggctggtatccgctcatgttccagtcggccgcgctgaacccttataccggcaagatcgaaaccacccgcctgctcagcgaccgtacccccctgcagttcgtcaccgaatccatgcgccccctgcacaccggcgatttcggcggtatctgggtcaagctgatctggttcgtcttcggcctgctgctgagcatgatggtgctcagcggcctgctgatctggagcaagcgcaccgcacaggccaccgccgcgctggtcaagcgcggcaagcgcccggcgcgccagccgaaaccggccaagccggcgccggtaatggccaaccagaccgcggagggacagccatga

SEQ ID NO: 332063 - DNA, 279 bp, Pseudomonas aeruginosa
atgcgttcgctgaccacgctgccgagcagcgcgccggcgccgatgccgacgttgtacaggccggagaacagcgccatggccacgtcggtggcgtccgaggcgaggcgcaggacgcgggactgctgggccaggccgaagcacatgatcgacatgccccagagcaggctgagcgccatcagccaggtcggctgcgcggacagcggcaacagcagcgccaggctgctgcccaaggcgaggatcgcggccagcaggaagcctcgcgggaaagcctcgctgtag

SEQ ID NO: 332064 - DNA, 351 bp, Pseudomonas aeruginosa
atggccatgaaggtggtacgccagcccagggcctcgccaaccacccgccccagcgggatgcccaggaccatcgccagggtggtgccggtggccagcagccctagcgccttggcctgctgtcccggcggcgccacgcgcaccgccagcgaagcggtgatggcccagaacaccgcgtgggcgaaggcaatgccgatccggctgagcatcagcacctggaagctccaggccagcccggacagcacgtggctggcgatgaacagcaggaataccccgaccagcagcttgcgccgctcgatattgcgggtcagcagcatcatcggcaacgaggccagcgacaccacccaggcatag

SEQ ID NO: 332065 - DNA, 960 bp, Pseudomonas aeruginosa
atgctgttattagtcacaaatcgccgcgacatcacggtcgattacgtcgtggccgagctgaagcgccggcagacttccttcttccgtctgaacaccgaagagctatcgacggcccgctgcacaatgactgcatttcccagaaacgcctggtcactgtccttcgagggaccagtgcttcagggatccgatgtcaaagcggcatatttccgacgtccagccccccctactggcaacgtcagcatcaccgataacggcgaacgggagtacgcggaagcagaatggggcgccttcctgaagagcttgtatgcacgcctggaaggtctttggctcaacgcgccgatggatattttcgcggctgaagacaagccaaggcagttgatgctcgcgagcgagattggcttcaacgtaccgcaagcagtgatcacgaacgatatcgcctcggtacgtgaggtagtccaggcagggcctgctatcggaaagccacttaggcaagcgctgatcaacggcgagcaggagcgggtgatttttaccactcgactggaggatcttcgcgacagcgacgaagacgccatttcgctggcccccttcattgcccagaccgagatcaaaaagcagtacgacgtccgagtgacagtcgtaggaagccaacttttcgcaaccgcgatcaggtcgcaggagtacgaagaaaccacggtggattggcgccagggtagccggtcagatcttaagcatgagcgcattgagcttcctagcgaagttgaggagcaatgcactgtgctcatgaagcacctgaacctacgttatggggcgatcgacctagtgtgcgaccaacagggcaaactgtggttcttggagatcaacccgaatggacaatgggcctggatcgagaacctcaccgggtacccaattgccgccgcgatcgttgatgagcttgaggacatcgcccgatgccaaagctaa

SEQ ID NO: 332066 - DNA, 336 bp, Pseudomonas aeruginosa
atgtgggtggtcgacacagagcaaggcacacagcccattatcaatgagcaggcgctctcgcagttgctgaccaagacgcgagcgcacgaagaggaagatgacgattcctaccttgcgcttgaactgatgaccaagacccatcagcaaatcgagagtgacgatgacacccggcccacggggtacagcaacctcttacagctagtgaccaaaactgaatcggttcaagaggttgatgacaattactcagcaagccaactgctggagctggtcaccaagaccaaggttcaacaggaagcagacgatgacggcttccagtcctttgggtttcattgctga

SEQ ID NO: 332067 - DNA, 315 bp, Pseudomonas aeruginosa
atggtgcgcatgctggtcgtcggctactgctatggcatccgttccgagcggagattgtgcgaagaggtacatctaaacctggcctatcgctggttctgccggctgggtctggaagacgaagtacccaatcactcgaccttttcgaagaatcgccacggccgtttccgtgacagcgatctgttccgctggttgttcaatgaggtgctgcggcgctgcatggcggccggcctggtaaagggggaaggtttcgccgtcgacgccagcatcatcaaggctgatgccagccggcaaacgccgaaaggcaacttgaagtag

SEQ ID NO: 332068 - DNA, 930 bp, Pseudomonas aeruginosa
atgaacggagcgatcccggtatcgaccattcaagacattcttgcggacgaattaacagagctgccgtctggctttctaattgagcgggatctgttgcggcacacgccgtgtcagtcactggcgtcatacctgaccccttggcaagtgttgcggctctttcctaaaaaacgcgaaaacctggatcgtctttcccttgcagtcgtcacgagtctcgcggagaacaatgtgcgctttgtggagctccgaagcagcgttttgtaccttgctactctgcaaaattgctcacccacacaagccctggaacgcctcatagaatcgtccagagccgcgtcggacctcttcggcatgcgtctcggcttgatcctcacggtgacgcgcggcgattacagctcggttggtttgtctgcacttctgcaagcgtatcaaaacctcggtgaaccggatgaagtggtggggcttgatctggcaggtgacgaggaaattgcgcatccagctgaattaccgtcactgtttcggaaggcgaaagatcggttcggactcgggatcaccatacatgcaggcgaaaccggtcgcgtggacaacgttcgagcagccgtggaattgtttggcgcagatcgtattggccatggaacagcagccagcaaggatcctcatttgctagacctcttggcaaagcaggatatctgcgtcgaagtatgcccaattagcaaccggctcaccggagctgttcctgtcgacgaggcccatcctctgctggagtttcggcgtcaccaagtcccctttgtaatttgctcggacaacccggcgattcatcagcgaggcctagcggatgatcatacgacggcgatgattgagggactctccgctagtgatatttacgagcagttcgacgtcgccaaacggtattcattcatagagggtctagattga

SEQ ID NO: 332069 - DNA, 795 bp, Pseudomonas aeruginosa
atgaacgctgagttactacgtgcatatcaaaccggcaagctgatgctttttgtaggtgctggggtgtctgccaatcttagcctgcctacttggggtgaactaatcgcgcgcattgctcaggacttgggctatgacccaaagatcttctccacttatggaacgccgctagcgcttgcggagtactacaagaggaaaaaaggtagtttggggccgcttcggagttggatggaccgcgaatggcacaagtccagtacagatatcgctgcatccgagattcatcgtttgattgctcttggacgattctcgcggatctacactaccaactacgatcgatggctggaaatggcccacgacaagtacgaggtgccatacgacaagattgcaagcgttgccgacctcgtatctgctactgagggtcggcgtcagattgtgaaattccatggagatttcgatgacgaggcatcaatcgtacttgatgaaaccagttactttcagcgattgaattatgactctccgctggacatcaagctcagcaacgacgtcttgggaaattccgttctcttcatcggatacagcatttcggatatcaacattcgactcctgttttatcgcttgactgaaatgtgggggcgctcggttctgccatctgccagaccgaagtcctacgtcttcatgaatcgaccaaaccctgtggcacgggaagtattgggtcaatggggaattgagatgatcgtctcggaggaggatgaccccaagaaggcgctcacggactttcttcaggaattggtgagctag

SEQ ID NO: 332070 - DNA, 285 bp, Pseudomonas aeruginosa
atgagtcgtgatggccaacggcaggtcgatcatcaatcggcctaccactcctgctatcgcacggtcctagacactgtggatgcgcgttacgacgttcgcggttctgtgctggcagaaatggtgaaggcctgtctggcgcaccgcgccatactgcccgcagcgcaacgggcgtatttcacgcagcacgcaccagaggaagcggtggcttatttggaaaagttcactgccacgctgttgtttggtccccagggacgcttttcgccgcaagagtaccgctactcatga

SEQ ID NO: 332071 - DNA, 258 bp, Pseudomonas aeruginosa
atgccaagaaaaaagcgccttaccgaacgcgagattcggaatcttgaagacgagattccagcagtcgccgcagatgcgactcgcgcggcctatctgcgagcgctcgcagccgggcataccgtcatgaaggtgcagggcagctacctcgttgaaaccaaagccgacggatccgcgattgtcgtgggcaacgccaagccccgccgcaaggtgagcgttggccatgctatccaggttcggcgggtaagtgccagcgcctag

SEQ ID NO: 332072 - DNA, 222 bp, Pseudomonas aeruginosa
atgggtatttcgtactaccttgcatgtttggagacgcggcaatacgtctgggtaggcaagcttgccccgcacggggtagtgccggcggcggatgccgacggctccatcgccatgttcgcgctggagaatcggaacaagccgttaatcgtcgtgagcgaaagccatccgatcctcgaagagggcgtagagtggtcgccgccgataacgccggggcaacaatga

SEQ ID NO: 332073 - DNA, 156 bp, Pseudomonas aeruginosa
atgaacgacctcacgatttgcctggactgcggtctgccttttggaccagtggaatggagcgcggacctctccggcatcggtgatgactgctccaactgggcaaccttcgtagacgatgaggtgtgccaatgcgccgtcgaggatcacgatgattga

SEQ ID NO: 332074 - DNA, 645 bp, Pseudomonas aeruginosa
atggcctaccgattcagcaagctcccaaccggatggacgcggaccactggttgcgatctgggggcattcaaggccggcggacaagcgggaacaagcattgctgcgctgaagtgcttactcgcggtttcgctgcaggccgatttccacacccgcgcggctgctgtgtcctataacgattttgagctgctcaccggcctttcgcggcccatgatctcgaagggacttcgaatgcttgcggacatgcagatccttacgatcgctggcgatcacgcgcaccgctatacggtgaatgaggtgggcgacaattactgggcgaagcttcccttcgacctcctccgtcttcgccttaaagagttggggaatcgtggtgcaatacgcttggccgctttgaagatctatgtgattttgattgcgcgccggagcaacaaatttgactggactgctctgacctacgagcaaatcgtggagcacacgggagttcgacgggcggacgttcgagccggcttgtcggaactctattcgatcgggctgctgcacgccgatatggtccatcccgaggacggaaagcctgcgttcagggcctacttcatccgaggcctgacggtcgccgatcctcgtctaggcaaagttcctgatgcggtatag

SEQ ID NO: 332075 - DNA, 135 bp, Pseudomonas aeruginosa
atggattccatttccaaacttgcaagtaccctttcccatgccgatccggctgtcttggtgtcttgcgtttctattgttgccctggtggtgatctaccaggttgtacgtcatctcaccggctcgaagaaggactga

SEQ ID NO: 332076 - DNA, 1197 bp, Pseudomonas aeruginosa
gtgactcagctcgaatcacacgttccagccgcccctaatcgtctgcggttggtgtccgcactcggcataacgcagatcttcgcgtggggttccaccttctacctgccggcagtgctggcgagcccaattgcacgggacactggttggtctctatcggccgttgtcggtggtctgtcctgggggatgttagtagcagggctctgctcgcctgttgctggccgcctgcttgatcggcacggagggcgtgtcgtactcgccttcagttcgttgatgctgagcgtgggtctcttggtgatgtccacggcaagcagtttgtgggtttactacttggcctggtcgattcttgggttggggatggccactggtttgtacgattcggccttcgccacactaggtacgcttctgggagagcgagctcgtggggcgatcacgggactcaccctaattggcgggttcgcgagcactgccgggtggcccgccatggctgcacttgaatcctggtgcgggtggcgggagacctgctgggtgctcgcagcagtacatgcagtgatcggcctgccgatccattggctggcagtccccaagcccgtcaacgctgtgagagaggtgcctaagcagaggcagaccgccctcgctgaggatcgatctactcggcggctcttctggttggtggctggcctgctgacggtcattgcattcgttatggcaagcctttcggttcacctactggcgtcattgcagcagcttgggattccgaccgtaacagtgctggcaatcggcatggttatcggcccggcccaagtggtggcgagggtgttggagttctcccttgcgcgacatctccatccgacctggtctgctcgtgctggcgtgctgataagcctgctcggtatctgcctactcatcccaggaacgccctggctggcattcgtcgctgctgcgctctatggggcgggcgttggaattctgactatcgcgagagggacactgccgctggtacttttcggcgccgagggctacggggcgagaatgggcgttttagcacgaccaatgcttctggcgcaggccgccgggccatttgcggtagcgtttgtgctgagtgggcaaggagcgtcggtaatgctcgagctgatggcggtactggtcgccatcgcattgttcgcaagcctcaagctaccgacaagatcgttggtttga

SEQ ID NO: 332077 - DNA, 498 bp, Pseudomonas aeruginosa
atgccgaacaagcgtaccgacgacctgagccaggatgccgaagccctgtatgaagcgctgaaccaactggtgcgggtctaccagttcagagaccgcgaccgtatttgctgctacgacgtttcagtgactcagtgctacgccgttgagaccttggtgaagcaggggccgctccgcctccaggcactcgctgaggagatgttcctggacaagagcactgcgagccgggtggtcgataccctcgagcgcaagggctacgtgtcgcgcgttgaagatccagaagaccgccgtgcagtacgagttcaagctactgaagccggcgcagatttgtacgaacgcattcgagccgacctgatcgccgaagagaaggaaatgatcagcggcatgccagccgaggttcgccagggtgcgctgactttactgcgtcagctcactcgagctgccgagattcgttgtggccttgtcagtgaatgctgcccaggccagaccaaggacaagtga

SEQ ID NO: 332078 - DNA, 516 bp, Pseudomonas aeruginosa
atgctagtccgcctcgcaaagctcagtgatagccaagccatcaccgatatctacaaccaaggcatcgaagatcgcagctccacattcgagacccagccgcgcaccgtcgaggacatgcagcccaaggtagccgatatgtcgcgctacccggttctcgtggtcgagctcgatggcgaggtggttgcctgggcgaacttgagcagctatcgcgcgcgctcctgctatgacggtatcgctgatttctcgatctacctgcgccgggatgcgcgaggtcgtggtatcgggaaagtactcttgaatgctctgttggcggaggcagaagcacgcggattctggaaagtcctttctcggattttcaccttcaacgaggctagcctcgcgctctgccgctcctgcgggttcagacaggttggcgtctacgagaaacacgcttgcctggaaggccgctggctggactgcgccatcgtcgagcgggtcatctcttcgaatcaacctgtctctggagaatcagcatga

SEQ ID NO: 332079 - DNA, 1365 bp, Pseudomonas aeruginosa
atgagcctgactgaccttcccgttgtcgttattggcgccggcccagttggactggccgctgctgcccacctcctggctcgtgatctgaatccgctagtcattgaggcaggaaatcaggctggagcaagcatcagccagtgggggcacgtcagcatgttttcgccctgggaatacaacgtggacaaggaggcggccaagcttctggccgcgactggctgggaagctccgcgtcctgacacatatcccaccgggcgcgagctgttggatcgctatctccttccgctcgctgctcttccggtgatccgggagcggacacgtctgaatactcgcgtcctcgcggtgaccaagtcgggggctgatgcgctgaaaaccaagggtcgtactgcttcaccgttcctggtgcgcattgctggccccaatggtgagcaggacatcctcgctcgcgccgtgatcgatgcctccggtacctatgaaactccgaactggatgggcgcctcgggtattcccgcattgggcgagctggaagcaagctcgcatattgcctatggcattcccgatgtaaccggcggtgcacgtgagcgctatgagagccgccgtgtactggtcgtgggtggcggccactccgccttcaatgccttgcaggatctggttggactgcccggcaccaaggtgttctggggcatccgtggacactctctggagagaattctgggcggtggtgccaacgataagctcgccgagcgcggcaacctgggccttcgcatccgagcgttgctcgaacaggaaaagatcactctgttccaaggcatatcgatcaaccgggttgataccactggccaaggactcgtcgtccacagcaatggcgaaacactgccggaagtcgacgaaatcatcgtagccacgggcttccggcccaaccttcagctgctgggcgagctaaggctggcaattgatcctgccactcaaagcccaacccaactggccccgctgattgatccgaacgagcacagctgcgggacggttcgcccacatggcatcgatgaactctctcatcctgacgaggggatttttattgtcggaatgaagagctacgggcgggcccctaccttcctaatgctaacgggctacgagcaagttcgctctgtagcggcagggctcgcgggcgactgggaagctgctcggcgtgtcgagctcgaactacccgaaacgggagtctgcagccttcagttcgaagagcaggagcagtcgtcgagttgctgtgcacccgcagcaccggcgcaggccagttgctgtggtacgcaagagtctcccgctgcagttgtggcccagaaatcgacctgctgcacaccaacgagtcgctcataa

SEQ ID NO: 332080 - DNA, 1035 bp, Pseudomonas aeruginosa
atgcaatttcttcaatccccaccccgcttcctctttttcactggtaagggtggcgtgggcaagacttctatcgcctgcgctgctgccgtccaactggccggcgagaacaagcgcgtcctattggtcagcactgatccggcgtccaatgtgggccaagtattcagtacggaaatcggcaacaaggtcaccgagatccgggaagtcgcccgactggctgcgctggaaatcgatccccagcaggctgctcaggcataccgcgacaaaattgtcgggccagtgaaaggtgtgctgcccgaagacgtggtgaaaggtatcgaggagcaactttccggggcctgcaccaccgagatcgcggccttcgatgagttcacctcactgctcaccgatgacgcgctgatcgctgaattcgaccacatcatttttgatactgcgccaactggccacaccatccgcctcctgcagcttcctggagcctggagcggctttttagagagcggtaagggcgacgcctcgtgcctcgggccactcgccgggctggaaaagcatcgcgcccagtacaaagcggctgtagcagcgctggctgatcccgtacgtactcgcctgatactcgttgcacgagcccaaaatgctgcgcttcgcgaagttgcgcgcacccatgaggagcttgccgatatcggcttgaagcagcagtacctggtggtgaatggcgtgttgccggccgccgctgcagaaggcgacgagcttgccgccgccatctaccagcgggagcaacaggttctagcgaaaataccggaggtacttcgtagccttccgctcgatcaggtggcactcaaacccttcaacctggtggggctcgatgcactgaagcacctgttccttgatgtggccattgggccagtcacggagaccgaaacgaacaccgagctgcacctaccgaagctgtcgcctctcgttgatgaaatcgccgccgaagggcacggtctgatcatgctgatgggcaaaggtgttgccgctgaccgaaaactgacccagtag

SEQ ID NO: 332081 - DNA, 3651 bp, Pseudomonas aeruginosa
atggtgaaaaatgcaggcgtggatagtgggctcccctcatctatagggcaggaaaatcgtgtcgtaaagtatgagacattagaagaggcaagtgttgctgcgagaatacttgggataaccggttggaagagttataactctttgtacaaactcgataaaaaattacctgcagcgccacatcaaaaatatcgtaaagcctggagggggtgggcggagttcctaagagttgagaaggcagttgagaaatacgaaagtctctccgaggcatctcttgctgctatagcccttggtataaatagcagtactaagtatcgtaaagactatcagaaagaccagcgactcccttcctgtcctgagttgacttattcgcaagagtggatttcttggccaaatttctttggcaagaagaaaagagcggcaaagtataaggagctggctgaggcagcagttgctgctcgaagattgaggattatgacattcaccgaatatgggaaaagatatagcgaagatcccaagcttccgaaatatcctgaaaccgtctataaaaaagagtggaggggttactatgattttttagacgtggaaccacccataaaatcatactcaaccctggcagaggccagttgtgccgctcgtgctctaggattcaaatcgagtcttgactacaagaatggacgtcaccaagaccctcgcttaccgaaaaacccagcgcgaacctataaaagtaaatgggagaactggtatgttttcttagggagttcagttctcaataataagtacccctcaattgaggaggctggggcggcggcgagaaagctgggggtgttcagtagttttgagtatgctgcacgctataaagaagatccccgcctgcctgcgacgccaaataagcagtacgaaggcaattggatagattttcagagattcctgttgcctgataagtatggttctctgggtgacgtaaagtatgcaattaaagtgcttaaaataaaaaatagcagggagtatcgtgatgtgtataagggctaccctccattaccagctcaccctgagcgcgtttttgcttcggaatggattgattggtatgagctttgcgatgtagtaaggcactacgattactctcaggcaagtaaagtcgctatcgaaaacgggatagccaatcaggctgcgtatattaatttcattaaagagactggtgatgttcggcttccgcggactcctgatgaagtctataaagaggtctggattaattggcatgtttttcttgggaaggaagagccgtttactattaaatatattcgtaagccttattgtgagtgggcggaaagtatacgcagctttatgaagaaggcgcgtggtggcgaaagtaaggagtcatatttgtgtcgatttgtgcgtcagtatgttcagaagtatgagttgggatatagtccagaagcttttttgactgctcagggggtcagtttaaagccatttaaggagttgcttgagcagcaggcttctgatgtcataaaacgtggaatattggtggctgttaatgagttcttgaatgatgttttaagaaagaagctttctatagaggatgaggaaactggagagttggtcgtcattgaaggtgccaataatccgcttgcaaatttttctgttgatattgagaggaaatcttctggtcttgatgagagtaataagccggcactcgcttatcaatatgtcgattcactcagaaggtggattattcctgagggtgcttcaagcttctctgatctacagcatttgcatgcttttgaggctgactgggctgagattgatgcggagcttattgatgataaagacccagattgcattatcaaaaaagagttcggtaagaccaagatctggtttccagtttactggattcatacttatgctttgacgtcggtgcccgcaagggggcggcaaattgcttacaatgattcgggggagggggatgtcgatgttgctgagattgaaggggggaggatagtttggaagaagaacacttcaccattagcaggttctacgcagagacaagggttcataaaacgttatcctgatgatcagcttggcatgtggtttacgactaataagaccagtaatcagggggctggttacagtgtaccgtggattcctcatgaattggcttattggctgacgcgcttaagatgttggcagcaaaaatataatcctatcagccggccaatgccttggctggaatgcgttagaactaaattaaatgaaacgcagcgcaagaataaaggcgttaattgttttttgtttcgggattttggatatgaagagccgggcaatttcacagcgaggctcacggatcgacttgcagcagcgctgtattacagtcagccgaaagggatctgcttagctgagttgaatggtaactctcagcatttaagtaattatgtttcgcggtacactccgcacagtatgagggttagtctcataactgcgtatattgtggagttcggtttgccaatagaggtggtgatgaagattgccggccactcctctattgttatgtcaatttactatgtaaagattgctccggctgggcttcgtcatcgcttttcggagggggagaaaattgctttaaaagataaagcctatgcagctcaatggatgattgagcaagggaggattgatacagtaaagagtgagttaatttcgaattcagtgcaggcgcttaatcaattggatggtgggctgcctgcaggaagttttttatttcgtgattatggcttctgcccgttcgcgggaactcgatgtgatgatggaggatgcgctatagattcgaagaaatatcttcccacacccagcggttatatggggtcgcagaattgtattcgttgtcggcattttgtgactggcccggcgtttatgggggggctgctttccttgggaaatgagatttcattaagcgcaaatcaccaatttcgccattacgatgagattgagagtggtgttcgtggtgttctggagaaaattaatatcatggatgaagaggaatacttggcactgaaggagggaagaagatttgatgagggcgctagaaaccaacttgaagcaaaattgaggaagttgaggtcggaatcagaggcggcagccaagaagttggatgttttgatgtgtgatatccagtcctgtgcgaaattaattaagcagtgtcatgctttggctaatgaaaagtgcgagggggaagatggggagcagagagctcagcttatagttcaatctggtcatgagttggtttttgatgtcgctgagacttcgtattttcaccagctgagtgaggtttgtgagaacgcggaaatttacgagtcggcctctgctgatgcagcagtaatgccgaggactcaaattatagatagaatggttgctttgaatgatttgaagcacaggcttttctatcttgataggcgtcagcaacttgttgtgggtaatcagtttacaaggcttttacttgatcgcttgaaaagctgggacagggtcgatgcattgatgtctggacgtatccttattaaggatttgcttggtgcggaaaagatcacgcgccgggatttagattctatttttaattcacgggttaaatctattggactggaggtggttgatggatcctaa

SEQ ID NO: 332082 - DNA, 1380 bp, Pseudomonas aeruginosa
atggggtatgcgttgaaggtcagggcgcggtatcgaaatgacgcaactggtagagagttaagatttcccgtgatcctgacggaagggggtgttcttatttctcatgtcagatatttggcctctagcccattcatctataaaagtgcgtcttggcgtgaacgatccgttttttctgtgattcaactcgtcaagttcattaatgccaatgaaggcttgttcacaaaaactaccgagctgttggaaggcttttcactggcattggtgactggaactattaaccagtcaacgcttgaagatccaagtggcttgttctgggaaccacgacgacttgaggacgcaagaacattgctcggtcacatcacaagctatacagactggttgtcagagcaaagtaatcaagaaattatgagggccaatccatttcggaaagcgacgtcagttgagcagaggatgagttggtgcgcttattaccataagcaagcaggagtttttctgaatcatctttcggataactctatggccagaaagcaggcggagcgtgttagaaaaatcaagacgccccagccagagaaatacaatgtaaatcttgtcaagcgcttccctgaggataggtttaatgatctgattgatcgcggatttattcgcgcggatgcgagaagtgatactcctgataactttaaattcgattataaaagccaagctataaccctgcttttgcactatggtgggttaaggaagtgtgaagcgttgcatttgtatcttgtcgatattgaacccgcgtctaagggtggggtgcgtgtgagggtgcatcatccggtatatggaaactcccctagtgaaaagtataagaatagggtggagtatttgatgaaagagtttaggcttcgcccgagggttgaatatctaaaaacggaaaggttacaccttggttggaaggctccgttgctagaagataaaagaggtttttttgaagttcatttttttcctccagagaaggctaatgagtttgcgctggcatggactaaatatttgaaatatcaacgtgtagatcctccagacggagagtggcacccctatgcgtttacaaataattttggtcgcccggagacgttgaagaattttcaaaggctgcacaccaatgctgtaataagaataggtatggagtgtcgaaaatatttgggtacgactgaacatggtcatcggcatagttatggttatcgattggctgcacatggctttagtcaagttgagattcaaaaagcaatgcatcaaaagagtccagactcttgcctggtctatatccagccaactgatgatgatgtaagaaatatgatgaggaagactgagttgtatggaacaagaacactctgcaataattaa

SEQ ID NO: 332083 - DNA, 360 bp, Pseudomonas aeruginosa
atgatgcgtcccgacgccaaggtccaaaaggtttatctgtatcccaagcctgtcgacttccgcaaatccatcaacggactggctgcgctggtcgagctggacatcaaggtggaagtgttcaacccggtgctgttcgtgttcctcaatcgcacccgcagccaggtcaagattctctactgggagcgcaatggcttctgcctgtggctcaagcgtctggaagccgagcgcttcaagaccaaacccgatggcggtgacgaggccattgagctgacggtcgacgaactgaactggctgctcgacggcatcgacctgtggcgtaaccgcccgcaccagatactgacgccgcgcttcgtgacctga

SEQ ID NO: 332084 - DNA, 1554 bp, Pseudomonas aeruginosa
atgatcgccgtgcccgaatcccttcctgacgacccaatcctgctcaagcatttactgctgctggccagtgaacaggcggctgcgaaagatgctcgcatagaacaacttcaagaacaggtcgccctgctgcgccacaagctgttctcgcccaagtccgagcgcagccctgaagatgccgactcaccgcagttggccatgttcaacgaggccgaagagctgatcgaagcgctggccgccgagccagccgaagccgaagccgaagaagtcgttgcgccggtcaagcgccgtggcaaacgcaagccgctgccggccaacctgccgcgtgtggaggtcatccatgagctgcccgagcatgagcgcacctgcgtctgcggtgcctgcaagcaggtgatcggcgaggagaccagcgagcagctggagatcatcccgatgcaggtgcgggtcatccgccacatccgcaagacctatgcctgcaaggcctgcgaagctgcgccggtcatcgccgacaagccggcccaactgatcgagaagagcctggccagccccagcgtattggcgatgctgctgaccaccaagtacgccgacggcatcccgctgtaccgcttcgagaggatgctcagccgccacggcgtcgacatcccacggcagacgctggcgcgttgggtgatccaaagtggcgagcaactgcaaccgctgctcaacctgatgcgcgacaaactgttcgaataccccgtgttgcactgcgacgaaacgcgtctgcaggtgctgcatgaaccgggacgcgacccctcggcacaatcctggatgtgggtgcaaagcggtgggccgccggacaagccggtgatccttttcgactacacagccagccgtgcgcaggaggtgccgctacgcctgctcgatggctaccgcggctacctgatgaccgacgactacgccggctacaacgccgtggccgtgcaagagggcatcgagcggttggcctgctgggcgcatgcgcggcgcaagttcgtcgaggcgcagaaagtgcagcccaagggcaagaccggccgtgccgacatggcgctgaacctgatcaacaagctttacggcatcgagcgcgatcttaaagaggtcgacgacagcgaacgcctggccgtccgccagcaacgcagccagccgctgctcgaccaactcaaggcctggctggacaaaacccagccgcaggtcgctgggcagacggccttgggcaaggcggtgaactacctggccagcaactggagcaggctggtgcgctacatcgaaggtgggcatctaccgatcgacaacaaccgcgccgagaacgccatccgaccgttcgtcatcggccgcaagaattggctgttcagcgacacgcccaagggtgccacggccagcgcgcagatctacagcctgatcgaaaccgcgaaagccaacgggcaggagccctacgcctggctgcgccacatccttgaacacctgcctgcggcacagagcgtcgaagactacgaagcgctgctgccgtggaactgctcgccagcttctgcctctgcttcctga

SEQ ID NO: 332085 - DNA, 3693 bp, Pseudomonas aeruginosa
gtgatctatcatcttttacgcggcatctgtagtcgtgttcggggcattttctgttccgaacaggggcctgccaaggaggtgtggaagctggttccgcttacccctgagtacctagttgaagagcatagtggctatgtcgctgctatcgaagctgccctcgcgaacgatcagatccgcaatatagcgttgtccggcaattacggggtcggtaagagcagtatcatgcaggaggtcgctcggcggcagggcaatcgtatcgtggagttatctctctcgacgcttgcacctatcgaggcttcccagcttgatgactcggtgcctatccaggccacaaccccgaccaaccgtatccagcaggagatcgtcaagcaactgctctatcgagaatacccgagcaaaactcctggctcacgatttcggcgtattgagcgtttccgatggtggcggacgatcggaacttcggtactgttgggctttatcgttggtgtagtcttcctgctgactggatggacgttaaagattacttctgtgctcacagcatatgtggatattggtgttttggcccaccctgtcgtttggggttctgcgtccttgactatcctgctggtgaactggttgttctatgggaaactgcatatacagcagctctccgcaggggcggcaaccgttacgctcaacgaaagctccgtttcgtactttgatcaatacctcgacgaaatcgtctacttctttgaggtttcagggcgcgacgtagttctattcgaggacatcgaccggttcaacgactcgcatatcttcgaaacgcttcgggcgctgaacactttgctcaacgcttcaccccagatagagaaaccgatccgattcatctatgccatcaaagatagcattttcgatcgcatcggcctggaaactgaggggcgagtgcgtaatacagaagtgcttacgactgacgatcctgcacaggtcgaggctatacgtgccaaccgcacgaaattcttcgaccttgtaatcccagtggttccctttattacgcaccggagcgctcgcaacttggctctgcagttgcttagtcaagtcgagcacaaggtggctccggagctactcgacctagcggcgcagtatgtgccagatatgcggctgctaaagaatgttcgcaacgaattcatagtctttcgcgaccggatcttctccggggacggcaagcagctcaatctgaatgaaacggacctatttgcgatgatgctctacaagagcacgcacctagcagatttcgagactatccggctcggacatagcaagcttgacatactttacaaggtcagccgtgagctggtgactgagaacatcaagcgtttcgagagcgaacggcgtgtgcttctccagcagatagcacggatcaacggagctgccacccgcagtactcggttgggcgagcgcctgctggcgcacgtgcagcgaacagttcaggctgcggcctacaggccccaaagagcaacatacttttatgcgggcaaaagtaagtctccggatgacctccggggagcggagttctggacaagtttcgtctcggcagacggcgactcgccgcttcaatggcgtaatgacttcggtcagacgctgtcgttcagtcgtgacaatcttgaagattcgcttggtgatccgttggacgccgagagttgggacaactcggatcgtgaggctctgactgaacagatcgatgagaagactgaggacatcaagttcctgcggagcgctgatcttggtgaccttatcaagcgaccggagttcatagtccagcataaggggagcaaccagtcctttgatgtaatcgcgaagatgattttaacgcctggcttggcataccaaatcgtccgtgccgggtatatcaaccgaaacttcacactctacacgtcgaccttccacggagatcgcgtgggttccgctgcaacaaacttcatcatccaccatgtcgaacgtgacctgatggacgagcacttcgagcttgacgccgatgacgtggatgcagttgttcgcgagcgaggcaagagcgcgctgaaggaccctgccctttacaacatcgctatcctcgaccgccttttggccaccgatgtcgacgcggcagacatcatgatccgctccttagttggtctcggggagcgtcagtcgagatttttgaaggcgtaccttaccgcagggaacgagcgcctacggttcattgagcggttcacggtcgcgtctccacgagtgctcacttatcttgtgggggaagcggacctagatgacgcttcacgactagagatggtagatgtggcactggcatgccttacgtcttctaaacagcggacagattctgttgtgtcgtcgtacctggcggcacactatgcggagttcaaggcgcttacgtctaacgcgactgtgccgctccaggccgaacgtatcggtgtgcttttcggggatgcgggcattatcgtgcctcgtttggaaccgctatgccagcatactcgtacgtcgtttgtgtcacgcaatttatatgacgtcacgtaccagaatctcgcgattgccatagacaacactgcaaccttggcgctcgatattatccgtgcgagtaaccagaaggtgtacggctatgtactcagtcatttgaccaggtacctggatgctatagacggcacttcggcgacaatagataagaaggagaactttcttgtggtggttgaagatgtgctctcgatagaagcacctcgtctaagagatgtgattgagcgtgcggcctcaggttgtgaggttatagaccttacttatatttctgagggcgcctggccagccttggctgaatataggcgtttccccccaacttttagcaacgttagtaattatgtcatggctcgcggggaggtcgatgagcacctagctaaaatcttgacgtctactacaaagattgctgacgctaacaccgctgatgagaagtctaaaacagcgttggcggtcgcaatcctggcgacagcgaatcacctcccatctgcggcactacgtgcggagctagtcgacagcttaggcctggaagactatctctctgttgacaacatccctgctgaagctggcgatcttttcgcgcagttggtcaagtacaacctcattgctgatgacgcagtgtcttatgggcacctagccggcacggactggccgacgcgcaaagcgtttattcgagagtcgcagaacttttcgagctacatgacaccagcgttgcttagggaggacctggcggcgcttctagagagcagtgaaattgtttcggcggtcaagaatatagttgtcgagcaagctgaaaattatgcagaggtagccgattctcgagggctgaacgagttggcgcgatttgctaccaaatccgggtacgaactctctcctagcgttgtacagaagatggcacaacaaaatgtctcagcgcagcagatcattctgctactaaaaccacatctagatgtgattagtcgtgaccagctcttcactatcctgcaattacttggtggagattaccctaagctcacagtggttggccgcagtaggctacgtgtgccagatacgcttgctgatcgcgagctcctgaagcgccttcaacgggaaatgactgtaagtagctacgacgtcagaaagggtatgattgaggtaaataggaaacgtaaacaaggctga

SEQ ID NO: 332086 - DNA, 339 bp, Pseudomonas aeruginosa
atgctgatcaaacttcccgactttgacgacgatctggccgagcggctgaagagtcgtactggccagaacactggctccaaggctgtgctgcgtgctgctgaggagtatttgcctcttctgctgaagctggaacatcgcgaccggcagattgccgagcttgaagagcggttgcgagtggcaagtcaggtgatcgagggcgctcgctcggctgctgcgctgctgcttgaaaagaccgctcagggcgatctgctcgccgctccggcatcgagcaagccgcgcatgaccggtgaagagatgttgaacgaactgcgccgcagtgcgggcttgcgtcagcgttga

SEQ ID NO: 332087 - DNA, 372 bp, Pseudomonas aeruginosa; identical to SEQ ID NO: 324747

SEQ ID NO: 332088 - DNA, 1020 bp, Pseudomonas aeruginosa
atgatcgaactgcaccacgcgcctttgagcagtggggcggtggtctgtatcgaggctgacggcacggttgcttgggaaaccccgcgcaagatgctggtccgtggctcccatgactcgacgatccatatccggagcgtaggcggggacgggcagggcaacgcgactcatctgtacatcgacggcaacccaagcaagtggttgcaaggacataaccttgttggttcctgtgatctcgttgccctcgtctgggatgcttttcaacgcctctgcgccctggtgggccttgagccgactgactttgagcgtcagaaggtcagggcagggcagtaccgcgtcactcgcgtcgattacaaccgaatgttcgaacttccaagccgggccgatgttcgagcctggctgcgtgcgggcgagttcaaatgtaagtcacgccatggtcgtccggtaaacaatcgcgggactctaactttcggcaaaggctcaagtcattggtcgattgtttgttattgcaaggccgatgaaataacttccggtggttcgcacaagttgccggaagagtttcaccagtatcccgaaatctatcagtggatagataacaagcttcgcgttgaacttcggttgcgctcaaagaaactcaaggcgctgaaccttgaatatgcctctcaactcacccccacggttctttggaagctctaccgtgatttcatcggggaactggatatgtcagagcaaatagaacttaattccgagcaaatgatgaaaataccgagcaaggtgctcggcacttacatgctctggaagcaggggcatgacatttcaaatttggtagcgaaggctacttattatcgtcatcgtcaggttcttcttggttatggcatagatatcaatattcgttgtgatcgccgcgacgatagcaatgttgtgccgatgattcggattcttgaggctaagcctgcggccattccgaacttcttctttgaaagggggctgattcataaatcggcccgtcaggtggctgtatga

SEQ ID NO: 332089 - DNA, 237 bp, Pseudomonas aeruginosa
atgaagtctggcttcgatttttacttcggcggtcgagttagctcccgccaggagatgcaacagcgtctgcgcaatctcagaaccgagggtagcgttatgaatgatctggagaaagttctttcatccagaactccggctgagcaagtgcaggccgctgaggatttcaataaggcgaatcgttctaagttgatcagcagcaagaaaggcactctttatttgggggatgtattcgaatga

SEQ ID NO: 332090 - DNA, 1434 bp, Pseudomonas aeruginosa
atgaggattaagaaatgtatatcagccctgaagatatcgctttttatggcgtgcttattgccatcgttattctttgctcagggcgctagggctgaatattattattggtacatgggtcattttgataagaaagtttcgtcgccctcggcgggttgcgatctttatttcactggtatatctcgcgatccagggcgggtttttgttatggagccttcttcaaatccaagtgaggcgggcgaggttttctattgtgtggttcgttctggtgattgggttctttttaatacgactgttgttttgaaaggcgataggtgtcccgaagggcagtctctcgatttaaaagatggcttgtgcaagcctccgcctcccgagtgcgaatctggagtgccgaacttgttcaggagttctaactatccaattatcgtaattaatggaaagaacacagttcctagttctccgccgtctggctgtttgaatgggtgcgcttatgaggctgatagttctcggccaacatcttgttatcgcactccaggctccacaactgaggggttctgcaactacacgctcaagagcaacggccagaactgctcggcagattccggcaacctgggcggcaccggtccttcgctcagcgaaccgaatcagccgccagtgaccgacccgccttcggacccgaatgacccgggctgtccgaagggctacagctggtcaggcaccacgtgcgtgaagacgccgaccgatcccacagacccgaccgacccgaaagaccctggtggtgatggtggtggaactggtggtggcgatggtggcgggactggtggcggtacaggcggtggcggtgatggcggaacgggcggcggcgatggcggcaccggcgggggagacggaaacggtggaactggcggcggtgatggcgatggcggcggcacgggtggtggtggtgatggcgggggagacgggcagtgcgatccggccaaggacccgaacaaatgcggcagtggctcctcgatctccggcgacggtgactgcaaggtggcgattcagtgcaacggcgacgcaatccagtgcgccattgttcgccaggaaaagctcgcacgctgcgcggatgaagagttccgtacggtcgatgacaagaagattcaggacctgaagaacacgctggccggtgagttctccgggcctgagtacgaacccatcaaggccaccggcgagaacacccatgacctgtcgaagctgctcgacactagcgggcgcttctccaaggcctgcccggttattcctgacgtctcgttcccctggttcggcagtactcagacggtgtcgctcagtagcgtgtcgtccgatctgtgcacgtatctccagtggttcgggtatctgcttgtcgcgttcgccatgcgcgccgcggctgaaatcattgcgcgagggttgaactga

SEQ ID NO: 332091 - DNA, 231 bp, Pseudomonas aeruginosa; identical to SEQ ID NO: 324752

SEQ ID NO: 332092 - DNA, 1233 bp, Pseudomonas aeruginosa
atgctcgacaagttgcacctcttcgttccgttccgcctcgagcacatcgaactgctcggggtggaagggcgtgcggatccggtgcacgtcgtggatctggaaagcctgggcgtgccgctccaagggcagatcagccgaggggagggcggagagctacaggcggattacttgcggcacacctgggagtcactgagtacgggcttcacgcctttggcgttcaaggtgtttcaccagtccttgggtaagcgcctgatgcccggtgtagagctgaaggccagcccggcgaagttgctccaggggcacaacgtgtttggcccaacctgcatccagaagggggccgaggtgatgttcaagtggctagccggaagctacccggacctcttcgcgaagctcgatgtgtcagcgacgcaggtctacaccctggactgcacgtattccagccggctgccggacgaacgcacggcgctccaggtcatccaggcgctgaccaacgtcagcaacggccacaccaagagtcgcggcgacaactaccagacgtccgcgtactggggcgcgaaagaatcccgcctaaagcgcctgaaggcgtatctcaagcacaccgagtttcaggcccagttggacgaattgaagcgggcagggcgggccgatctgtcggctgctcggtctgctcgggtcatgtctgacccacggttgcaggagtgggtgcgctacctgctccgcatggaggccacggtaatgcaccggtggctggaacgccggggcatcccgtctcggcttgttgatctgatcgcctaccagcagcggctccaagaagaggggcgctgcctgattcaggagtgctggcaagcggttacagcggaccttttcgcggcctttgagggtatccagatgcgtgtgattgatgatgaaaaagtgctggccgcactgactgagcgacacctgaagtacgaccgtaagggcaagcccaacgatagccacgctcgaaacctgtttcggacgtaccgcagcctcaaggactacgggtggcaggaaacgatggactccatgtctcgcccgacgttctaccggcatatcaaggaaatctgcgaggccggcctgtcgaaagccgccctgcagaagctccacgaagcggaccgggcgaacaacgtcgtaccgctgctgcggttcgtccaggtcgatttcagcgcccagcgccccgactggtacgtcgagccgaccgtggaggccgcgtga

SEQ ID NO: 332093 - DNA, 357 bp, Pseudomonas aeruginosa
atgagcaccaccaaccaggaacgagccatgaccattgccctcaacctgaagcgtttcagggaagcgaagaagctcacccagcgggaagtgtgggaagccgcaggtatcagcaagtccagctacacctcatacgaagccggccgctcagaccctacaggcgagatcatcgtgcgccttgcaaaagcgcttggggtgagcacggacgagttgctgcttaccgagcaagaaaggacggtatccgaagacctggcgcctatcctgcgccgctttgacgccttaccgccggatatcaggaaccaggcacgcattgccttgaaaggcgttctcttcggttacgagcaggaagcacttcgataa

SEQ ID NO: 332094 - DNA, 459 bp, Pseudomonas aeruginosa
atgattgacccaaccgacaagcaaacccaacccctccccctggagcagccgaagcgcggacgcggtcggccagccaccggcaaagccctgacggacgcagagcgagcgcggcgctaccgggcgaacaagaaaaagcgtgacgatcaaccgtcacgaaaacatgccccatcgatccccgccgatggcgtaaaggaaatcctcgacggctggcagcgcacccaagaggagctcgaccaggcactgcaacgaattgccgagctggaagccgaattagcgtcacgcgtcacgaaaaaagaagaggccgaggcgaagacttgggcaattcaagagcgcaagggcaaggcgcgctggcagaccatcagcaagggcctgacccggaaggccggagaacgccagttcgacaagctgctgtcgggcctgacagatccgcgctacacctaccgcatgattgaagaataa

SEQ ID NO: 332095 - DNA, 645 bp, Pseudomonas aeruginosa
atgggcgtcaacgcgaacatttccgagtccctcaccgggaccatcgaagcccctttcccggagttcgaggcgccgccggcgaaccccatggaggtgctgcgcaactggctggaacgcgcccgccgctatggcgtgcgcgagccgcgggcactggccctggccacggtcgacgggcagggccggccgtcgacgcggatcgtggtgatcgccgagctgggcgagcgcggggtggtgttcgccacccacgccgatagccagaagggccgcgaactggcgcagaacccctgggcctcgggggtgctgtactggcgcgagagcagccagcagatcatcctcaacggccgcgccgaacgcctgcccgacgagcgcgccgacgcccagtggctgagccgcccgtaccagacccacccgatgtcgatcgcctcgcggcagagcgaaaccctcgccgacatccacgccctgcgcgccgaagcccggcgcctggcggaaaccgacggcccgctgccgcgcccgccgggctactgcctgttcgaactgtgcctggagtcggtggagttctggggcaacggcaccgagcggctgcacgagcgcctgcgctacgaccgcgacgaaggaggctggaagcaccgctacctgcaaccgtga

SEQ ID NO: 332096 - DNA, 1509 bp, Pseudomonas aeruginosa
gtgatcagtatggaaatgatgggcaaaattcgccggatgtatttccgcgacaagctgtcgctgcatgagatagccaagcgcaccgggctggcgcgcaacacgattcgcaagtgggtcagagcacctgaggccaagccgccggtctaccaacgccgcgcgatcttcaacaaactcagcccttttcacgccacgctggagcaggcgctaaaagccgattcgctgcggcccaagcaacagcggcgcagtgccaaggcgctgttggcgcaaatcaaagccgaaggttatgacggtggctacagccagctcaccgcgtttatccgtgcctggcgagggggacagggcaaggcgtcgcaggcctttgtgccgctgacctttgctcttggcgaggcgtttcagtttgactggagcgaggaaggcttgctggtcggcggcatttaccggcgtatgcaggtggcacatctgaagctgtgtgccagccgtgcgttctggcttgtggcgtatccgagccagggccatgagatgttatttgacgcccatacacgctcgttcggcgccttgggcggcgtgccgcgccggggcatctacgacaacatgaagaccgccgtcgacaaggtcaataagggcaaaggccgggcggtgaatgcgcgctttgcggtgatgtgcgcgcattacctgttcgatccggacttctgcaacgtcgccgctggttgggaaaagggcatcgttgaaaagaacgtgcaagacagccgcaggcgtatctggctagacgcccaggactgccagtttcactccttcgaggaactcaatgcctggctgggccagcgctgccgcgcgctttggaacgagctgacgcaccctcaatacagcgggctgagtgtggccgaagtgctggagttggagcgcgctgaactgatgcctgtgccagcgccattcgacggttacgtcgagcggcctgcgcgggtctccagcacctgcctggtcagcgtcgggcgcaaccgctactcggtgccgtgtgagtacgcgggtaagtgggtcagcagccgtttgtatccgacgcgaatcgaggtggtggctgacgacgcgctgatcgccagccatgtccgcttgctggatcgcgaccaggtcagctatgactggcagcactacctcccgctgatcgaacgcaagcccggtgcgctgcgcaacggcgcgccctttgctgatctgccggcgccgctgcgtcagcttaagcacggtctggggcgtcatgccggcggtgaccggatcatggcgcaagttctggctgccgtaccggtcgccgggctcgatgcggtgctggtggctgttgagctggtactggaaagcggcagcctgagcgccgaacacatcctcaatgtcgtggcgcgcctggccgcgaccgaaccaccacccagcgtcgaaacccacttgtcgctcaaggaagcccccgtcgctaacacggcgcgctacgaccgcctgcgtggccaggccgaggaggtcggtcatgcgtga

SEQ ID NO: 332097 - DNA, 804 bp, Pseudomonas aeruginosa
atgcgtgatttgatggcggaactcaaggagctgcgcctgcacggcatggccacggcctgggcggagttaactgcacagggtgagtcgaacacagcctcgtccaagtggctgctcgaacacctgctggaacaagagcacacggatcgtgccatgcgctcggtgagccaccagatgaacatggccaagctgccgatgcaccgcgatctggccggcttcgacttcagcgcctccagcgccgacgctcgcttgatcagcgagctggccaatctgagctttaccgacaccgcgcagaacgtggtgctgatcggcggcccaggcaccggcaaaacccacctggccaccgcactggccgtgtccggcatcacccggcatggcaagcgcgtgcgcttctactccacggtcgatctggtcaatctgctggagcgcgaaaaacacgacggcaaagccgggcggatcgcccaggcactgctgcgcatggatctggtcatcctcgacgaactgggttatctgccgttcagccaggctggcggtgcgttgctgtttcacctgctgtccaagctgtacgaacacaccagcgtggtgatcaccaccaacctgagcttcgccgaatggtcgagcgtgttcggcgacgccaagatgaccaccgccctgctggatcggctgacccaccactgccacatcgtcgaaaccggtaacgagtcctatcgcctgcaacacagtagcttggcggcccaggccaagatcaaatcacgggagcgaaagcgtaagggcggccaggaaccggaggacgatgagccgttctga

SEQ ID NO: 332098 - DNA, 606 bp, Pseudomonas aeruginosa
atgactcagtggcaactgttagctgatgatttgtggggtggtgaaaaaaatatatgcttttttgttcattcgggtgcgtgcttctgggttgtggatgataaattcaacttcagcttggatgcggagaaggattatcgtgcataccttgataagggtcatataactcaggagcaatatgcgtcggcatgcatgacgtttagaggtggggttcttaaacttactgctgagaattttttgaaatatttgagggcggaggagcggtgggtgttatcgcggcaagacctaaaagatatgtttgtgtgcgggcttgatttgagcgagtctttgcatggaagagttgaagattactatctttctggtgttgagttgagtgaaagctactttcatgatgctaatgctgttgcctctaggcttccaatgttctatgtgaatttcgatcgcaaaatttacatgcatatggactgtaatcgggcgcatgaagaattggcttactcagactggcttgctaagtgttcggatttttgccatttagtacccgatagggagaggtattgggttttagagggtatggattattggaagtatagatttttgcaatcggcataa

SEQ ID NO: 332099 - DNA, 666 bp, Pseudomonas aeruginosa
atgcagcccacctcgtccacccgcaagccccgcgccagcagccaggcccggatcgccgcgatcctcgacgccgcccgcggcctgctcgccgacgaaggcatcggcggcctgaccatctatagcgtggccgaacgcgcggaaatgccgccatcgtcggtctaccacttcttccccagcgtgccggccctgctccaggggctgaccggcgaggtccacgccgccttccgcgcgtgcctcgaacagccggtggaccatgcaggcctgcgctgctggcgcgacctgtcgcggatcgtcgaggagcgcatgctggcggtctacgcccgcgacgcggcggcccgccaactgattctcgccagccacggcctggccgaagtcacccaggccgatcgccagcatgacgtgcaactcggccaggccatgcgcgccctgttcgagcggcatttcctgctgccaccgctgccgaccgatatcgagatcttcagcctggccatggagctaggcgatcgcgtctacgcattgtcggtacagcgtcacgggatcatcgacgcacgcctggcggaagaaggcatgcgggtgttcgacgcctacctggggctctacctgccgccgatcctggaaaagcgtagcgaaccattatccggatttatatccgatttaaatcgatag

SEQ ID NO: 332100 - DNA, 1062 bp, Pseudomonas aeruginosa
atgccccgcctttccgccctgctgttcctcgccctcgcaccctggctggcccaggccgaggagaccctgcgcgtctacaactggaacgactacatcgacccgcaggtgctcgagtccttccagaaggacaccggcatccgcgtcgagtaccacaccttcgccaccgccgaggaactggacaaggcgctgcgcagtggcgaggcgatcgacgtcgccgtcccctcccacgacaccctgccggccctgctgaaggacaacctgctgcggccgctggacttcacccagctgcccaaccgcagccatctcgaccgtcaattgctgagcaaactggccgcggtcgatcctgacaatcgccacgccgtcccctatctatggggtgccgtaggcctggccatcaataccccgcaggccgaagccgcctatggcgggccgctgcccaacagctggagcctgctgttcgacgccagccagagccagcgcctgaaaagctgcggcatcagcctgctggacgcgccggacgaaaccctggcgatcctcctcaactaccagggccgcaacctcggtcgtactgcgccgagccaggtacgccgcgccgccgaggcgctgcacggactgcgaccgaacctgcgctacgtcgacagcgagcgctacatcgccgacctcgaaggcggtcgcctctgcctggccatggcctgggtcggcgacgccctgcgcgcggccaaggcgggccagccggtaagtttcgaggtaccgcaggaaggctcggtgctgttcatcgacaacctggtgatcccggccggcgcccagcatccacgcgaggcgcaccgtttcatcgactacctgatgcaaccgaagatcgccgcacagatcaccgccgccaccctctaccccagcggcaacgccgacgccgccggcttcctcgatcccgccctgcgccagcaaccgggcctgtatccggaccgcgacaccagccgccgcctgttcgccctggaaacgccgccggaaaaactccggccggtggtcgacgagatctggaaggccttccgcggcgccagccactga

SEQ ID NO: 332101 - DNA, 288 bp, Pseudomonas aeruginosa
gtgttggaccagcaccagtacatggtcgtcctcggccagttgcaacaggttcacccgcagcagcggcccccgttccaggtcgaatggctgcacaacgatggcctgtatccgttcgatcaggccttcttcaccgaactgttcccgctcgatggaaacgctaaccgcaggttgtacctgctggtacgaacgccctccctccagccggaagcgggtacgcaaggtttcatgccgcgcgaccaggctgtcgaagctgcgttgcaaggcatccacgtccagccgcccgcgtag

SEQ ID NO: 332102 - DNA, 861 bp, Pseudomonas aeruginosa
gtgatccagcgctgtcgcaacgagtacccggtacgactgatgtgccgttgcctgaaggtttctgctagtggctattacgcctggcaggatcgcgaaccaagcctgcgggctcaagaaaatgcgcgcctggtgaggcgcattcgggagattcacgaggacagccgtggcgtgatcggagcgccccggatgcacgaggatcttctcgatgagggcgaaaccgtcagcctgaaccgagttgctcgcctgatggcggctgagcgaattcaaggctggccacgccggaaacgacgtggctttggaagagccgtcagtggccgcccagcaggcgtgaaaaacctgctggagcgcgatttcaccgcgcaggagccggagcgcaagtgggtcacggacatcacggaaatagccacactggaaggcaagcttttcctatgtgtggtgctcgacttgtacagcaagctggtgatcggttggtcgatgcatcaccgccaggatcggcagatggtgattcgagcagtggagatggcgatttggcagcgccagggtgactggtcagtaatcctgcattcggatcgcggtagccaattcaccagcaccgactaccagcgctttctgaatcgcaacacgctggtttgcagcatgagtgccgtcgggcattgcggcgacaacgctgcctgtgaaggcttcttcggtcagctcaaacgggagcgcgttgtccatcagtcgtatcgaactcgtgatgaagcacgggcggatctattcgactacatcgagcggtttcataacccacgaatgcgtcgtagagtcgcccggcaagatctgaagttttcagcccttttcaaaccgtccgtggaaatggggtag

SEQ ID NO: 332103 - DNA, 297 bp, Pseudomonas aeruginosa
atgaaacgcaagaaatacagtcccgaattcaagcgggaagccgttgaactggctcgtcgttcagagaccagttgccgccaaattgcccaagagattggggtggccccgagcttgctaaaccgctgggttcgggaagcacaaccggggatggagaaagccttcccaggaacgggaagtccgcgggatgaggagcttgcccgcctcaagcgcgagctggcccgagtgaccaaggaacgcgattttttaagagacgcggcagcgtactttgccaaggagtcatcgagcggtacacggtga

SEQ ID NO: 332104 - DNA, 276 bp, Pseudomonas aeruginosa; identical to SEQ ID NO: 330452

SEQ ID NO: 332105 - DNA, 648 bp, Pseudomonas aeruginosa
atgagacttcccttgaattggcggctcactgccaccaatctgctccgatgcatgccgaccacggagcgcaacatggcaggaaaccaaaaatcccaacatgacccagcttctcatgccggctcttggtcgctaggcaagaccattgcggctttagtagcggcagtacctttacttggtttgaccggtgcgggtgtatggaaattggtcgagttcggaaagacccaggcgacggtggaactgcaggcaaagcaaatcgacgagttgcgagcggacaaactcacgctgcagacaagagtcgactcgcttgaatcgaggtcacgctcactcgagataaagctcgctttggctgaggacagtctggcttataccaagaaacagcttactgaaactacggcactcctttctcagtccaggactgtggcagctgagttgggtgagtcgatcaagagcaatagcccctgcgtatcaattcaaaaggccatcagtgagctggagcaaaggctcgatagggatcaagcatggctaagctcgctttccggaccgcggcgtgaggaggcaatggcccagttagagcagcgccagcagtcccttaggacttgcctcacggcgaatttgaaagggctgacatcaaggctacctaaaccctga

SEQ ID NO: 332106 - DNA, 294 bp, Pseudomonas aeruginosa
atgtctgctctcgacttcctcaccgaacgcggtttcgccgcccgcatcagcggcaacaaggtcagcatttcacccggtagccggctcaccgaagaggtccgccagtacgtccgccggcaccgcctcgaactgctcgccgaactgggctcgatggatggcaaaacgcgccgcatgcactgggcgatcacgctgggcggcaagccgctctgcacgatgatcacgccgcccctgacattcgaagaggccctgatcgaagcgcgctggcgctggcccggtgccgagatcactgagtaa

SEQ ID NO: 332107 - DNA, 1278 bp, Pseudomonas aeruginosa
atgaaactggaaaccctggccgtccacgccggctacagccctgacccgaccacccgcgcggtggcggtgccgatctaccagaccacctcctacgctttcgacgacacccagcatggcgccgacctgttcgacctgaaggtaccgggcaacatctacacacggatcatgaaccccaccaacgatgtactggaacagcgcgtcgcggcgctggaaggcggggtcggggcgctggcggtggcctcggggatggcggccatcacctacgcgatccagaccgtcgccgaagccggcgacaacatcgtctcggtggccaagctctacggcggcacctacaacctgctggcccacaccctgccacgcatcggcatccaggcgcgcttcgccgcccacgacgacatcgccgccctggaagcgctgatcgacgagcggaccaaggccgtgttctgcgaaaccatcggcaacccggcgggcaacatcatcgacctgcaggcactggccgacgccgctcaccgccacggcgtaccgctgatcgtcgacaacacggtagccaccccggtgctctgccggccgttcgagcacggtgccgacatcatcgtgcactcgctgaccaagtacatgggcggccacggcaccagcatcggcgggatcgtggtcgactccggcaaattcgactgggcggcgaacaagtcgcgcttcccgttgctgaacacgcccgatccgtcctaccacggcgtcacctacaccgaggccttcggacccgccgccttcatcggccgctgccgggtggtaccgctgcgcaacatgggcgcggcgctctcgccgttcaacgccttcctcatcctccaaggcctggagaccctggcgctgcgcatggagcgccactgcgacaacgccctcgccgtagcccgctacctgcaacaacatccgcaggtggcctgggtgaaatacgccggcctcgccgacaaccccgagcacgccctggcccggcgctacctggggggccgcccggcggcgatcctgtccttcggcatccagggcggcagcgccgccggcgcgcgcttcatcgacgccttgaagctggtggtgcggctggtcaacatcggcgacgccaagtccctggcctgccacccggcgagcaccacccaccgccagttgaacgcggaggaactggcccgcgccggagtctccgacgacatggtgcggctgtcgatcggcatcgagcacatcgacgacatcctcgccgacctcgaccaggccctggccgccgccgcacgctga

SEQ ID NO: 332108 - DNA, 1398 bp, Pseudomonas aeruginosa
ttgtcgctgtcgaaggtctacgacgatctcggcgagctgacccactacatcggcatctacgaagacatcacgcagaacaagctggcccagcagcacatcgagaaactcgcctaccgcgacaacctcaccggcctggccaaccggcactatttcatcggcgccctcgaggaacgcctggaaagcagcggcgaccgcccgctcagcctgctgctggtggacatcgacaacttcaagcggatcaatgacagcctcggccaccagaccggcgacaagctgctggtcagcctggcccggcgcttgcgcagttgcctcggcgacggcgccaccctggcgcgcttcgccagcaacgagttcgccgtgctgctcgacgacaccgcggtggaaaagggcgaaagcattgccgcgcaggtcctgcacatgctcgacaagccgctgttcgtcgacaaccagttgatcaacatcaccggctccatcggcctggccagcgccccgcagcacggctgcgacccgcagaccctgatgaagtacgccggcctggcgctgcacaaggccaaggccaacggcaagcaccaggtccaggtgttcaccgaggcgctgaccgccgaggccagctacaagctgttcgtcgagagcaacctgcgccgcgccctggcgcagaacgaactggcggtgcactaccagcccaagctgtgcctgcgcagcggccagttgctcggcctggaagccctgctgcgctggcagcatccggaaaaaggcatgatccgcccggaccgcttcatcagcgtggccgaggaaaccgggctgatcgtgccgatcggcaagtgggtgatccgcgaagcctgtcgccaggcccgcgagctggccgaggccgggctgggcgagctgcagatcgccatcaacctgtcgcccaagcagttcaccgacccggacctggtcggctcgatcgcggcgatcctccacgaagagaacatcccggccagccagctggaactggagctcaccgaaagcctgctgctggacgccaccgacgatacccgccagcaactcgaacgcctgaagagcctcggcctgaccctggcgatggacgacttcggcaccggctactcgtcactgagctacctgaagaaattccccatcgacgtgatcaagatcgaccgcagcttcatcaaggacatcccggacagccaggacgacatggaaatcacctcggcggtgatcgccatggcccacaacctcaagctcaaggtagtcgccgaaggcgtggagagcgccgagcaactggccttcctccggcgcaaccgctgcgacatcggccagggctacctgttcgaccggccgatccccagcgacctgctcaataccagtctgctgcgctatccctgccgcaccctgcactga

SEQ ID NO: 332109 - DNA, 2949 bp, Pseudomonas aeruginosa
atgagcctgccttcgctggcgaatctgccggccaccctgctgcccgccgccgaacgcgccgggactgccctccgctccgctgtcgccgccctcgatgccgccgccctggcccgcctggaggcctggcccgaggagcgcctggaggatttccgacgggtcgccgcggccagcgatttcgtcgccgagcaggcagtgcgcgactcggcgatgctgctggaactggccgaacgcggcgagctggagaacccccacgcgcccggcgaactgcgcagtcagttgcaggcgcggctggaggattgcgccgacgaggacgaactcggtcggcgcctgcgacgtttccgcacacgccagcaactgcgcatcatctggcgcgacctgacccgccgcgccgcgctggcggaaacctgtcgcgacctgtcggccctggccgacgcctgcatcgacctggcttgcgagtggctccatcggcgccagtgcgagcagttcggcacgccgatcggccggcgctccggcgaaccgcagcggatggtggtcctcggcatgggcaagctgggcgcggtggaactcaacctgtcgtcggacatcgacctgatcttcggttacccggagggcggcgagaccgagggggcgaagcgttcgctggacaaccaggagttcttcacccgcttggggcagaagctgatcaaggcgctggatgcgatcaccgtcgacggcttcgtcttccgcgtcgacatgcgcctgcgtccctacggctccagcggaccgctggtctacagcttcgccgcgctggagcagtactaccaggaccaggggcgcgactgggagcgctacgcgatgatcaaggcgcgggtggtcggcggcgaccagcaggcaggcgagcaactgctcggcatgctgcggccgttcgtctatcggcgctacctggacttttccgccatcgaggcgctgcgcaccatgaagcagctgatccagcaggaggtccggcgcaaggggatgtcggaaaacatcaagctgggcgaaggcggtatccgcgaggtggagttcatcgcccaggccttccagttgatccatggcgggcgcgacctgagcttgcagcaacggccgctgctgaaggtgctggcgaccctggaggggcagggctacctgccgccggcggtggtcgaggagctgcgcggcggctacgagttcctgcgctacgccgagcatgccatccaggcgctggccgaccggcagacgcaaatgctgcccagcgacgaatacgaccgcatccgcgtggccttcatcatgggcttcgccagttgggccgcattccacgagcgcctgagccactggcgggcgcgcatcgactggcacttccgccaggtgatcgccgacccggacgaggacgaaagcggcgaggcggcctgcggcagcgtcggcgccgagtggatcccgctgtgggaggaggcgctggacgaggagtcggccagccggcaactggccgacgccggcttcgtcgatgccgaggcggcctggaagcgtctcagcgatctgcgccacggcccccaggtacgagcgatgcagcgtctcggccgggagcgcctggatgccttcgttccgcgcctgctggcgatgaccgtggaaaacccccagccggacctggtgctggagcgggtcctgccgctggtggaagcggtggcgcggcgttccgcctacctggtgttgctgaccgagaaccccggcgcgctggagcgcctgctgaccctctgcgcggccagcccgatggttgccgagcagatcgcgcggttcccgattctgctcgacgagctgctcaacgaggggcgcctgttccgtcctccacaggccgccgagctggccgccgagctgcgcgaacggctgatgcggattcccgaggacgacctcgagcagcagatggagacccttcgtcacttcaagctggcccacgggctgcgggtggcggcctcggagatcgccggcacgctgccgttgatgaaggtcagcgactacctgacctggctggccgaggcgatcctcgtcgaggtcctcgaactggcctggcggcagttggtgcagcgtcacggccggccgttgcgcgccgacggcacgccgtgcgatccggacttcgtcatcgtcggctacggcaaggtcggcgggctggagttcggccatggctcggacctcgacctggtgttcatccatgacggcgacccccagtgcgagaccgatggcggcaaatccatcgatggcgcgcagttctttacccgcctggggcagaagatcatccatttcctcaccgcgcagacgccatccggcaccctctacgaggtcgacatgcgcctgcgtccgagcggcgcggccggcctgctggtgagttcgctgggcgccttccagcgctaccaggagcaggaggcctggacctgggagcaccaggcgttggtccgcgcccgggtgctggccggttgccggcgggtgcaggcgagcttcgaggcggtacgtgccgaggtgctggcgaggccgcgcgatctcgacgcgttgcgcaccgaagtcagcgaaatgcgcgccaagatgcgcgacaacctgggaacccgcgcgaccgccgccggtaccgcctcgaatgccttcgaggccacggcagccttcgatctcaagcacgatgccggtggtatcgtcgatatcgaatttatggtgcaatatgcggttctagcttggtccggagaacacccggcgctgctcgaattcaccgataacatccgcattctggaaggactggaacgggctggcctgatcgccagcgaggacgtccgtctcctgcaggaggcctacaaggcctatcgcgcagccgcacaccgcctggcactacagaaggaggccggggtcgtgagcggcgagcacttccagacggagcggcgagaagtgatcaggatctggcgcgagctgcggctcggctga

SEQ ID NO: 332110 - DNA, 309 bp, Pseudomonas aeruginosa
atgagcaagcaacgacgtacgttttccgccgagttcaaacgagaggccgcggccctggtgttggaccaaggctacagccatatcgacgcctgccgttcgctgggggtggtggattcggccttgcgccgttgggtgaaacagctccaggcggaacgccaaggcgtgaccccgaagagcaaggcgctgacgcccgaacagcagaagatccaggaactggaagcccggatcaaccggctggagcgggagaaagcgatcctaaaaaaggctaccgctctcttgatgtcggacgaactcgatcgtacgcgctga

SEQ ID NO: 332111 - DNA, 342 bp, Pseudomonas aeruginosa
atgcaaacaaatgccgattttgtagagcttcatgtcatcgttaccaccgagctgccccagggcgcgctgcatcaactcgatcacgatgtcgctgggatctactcggtgagcgtagattcgggcctctcgcagggcatccaaagcggggcagccctggacgtgttccatgacaacctgccaatcaaggtgctggatgacttcaacatcacggtgatcgaccccgtaaccggcatggagctgagcgaagctcatgactatgagcatgggtcacagcgcagtgctggccgctacaacggcaaggtcgacaacggagagatgggcctcaacggccctcaattctga

SEQ ID NO: 332112 - DNA, 951 bp, Pseudomonas aeruginosa
atgtcggtattccggttcccatctggggccaccctggcccaggtcaagaaggatgcgaagaggatcgcaagagcggaaggtgcgcccttgcatcgtgcgctcgatgtcgcctcactccgtcacggtatacgtcgctatacaggcccgtggacggatgttccagatgagatccgcggccgtcacgaaccattctttcgactgcctctacctacgacctctgggttggtcggtgtacagctgtctgccgccaggcgtcacgcctacttcctgggcgctgatatcgcgtccaagcgatcggtgattcttcaggttctgcgtctggccctgtcgctgggcctgcggcgggtcgtttggtgtttgggtgccgatggttgggatgatggctttcaggagttatggctagcggtgtccagcgagtttcctgggaagctgcagcgctgttcaccaacagacgctgctggtctccggcttggtgccggcacggtggtggtcattgatggggcgcatcctgacgccgttcacctggtgatcccgccgcgggtagcggtgattgcccttctggctgaggagcatgctcctgatgaggatcgcctcgcgttcacgctgggccaatggccaggagagcctgatcgatctctgcgcttccttttgtcggaggctgacggtcgtgtgcaatgcgtcgatttcgagcgttggcagggctggctggatcaggcggttgagcattgcattctgagaggcggatgcggcctggaagatgtcgcgcaacggtggggtgggcaagccgccctcggcttttcgccggcgccggcgccgctggtaggcagtgaccggtggcccgaatatgcggcctggttggcgagggtgggggccgttggccatgatgatctgctctcgccggagtccctctccgcgcagaagcagttcctctcctgtggatccggcgcgtag

SEQ ID NO: 332113 - DNA, 639 bp, Pseudomonas aeruginosa
atgtaccgatcagaagtgcgcctcaccgggcgcgatgtcttcctgctgctctgcgctgctgacgtgatcacgtcggtgtctgtgcgaggtcaggtttatgaccagacctcgccagatctaggtatccgtgcaaacctcctgctggattatcaatctccagtgttcgctggttgcccgcacggcaccgttgtcgctgcatcgtgcctgtttgatgggctgactgatgaggtgtatcaggaggttatcgcccgtgctttggccgatgttcatcctcagattgcagcaggggcttcggcgcgcgaggccttgtcgatggctgaaagccaggccttcgatgagttgatcttcagaccagaggcaagaaccctcacagtcgatgagcacctgatggcggtggcagcaaaccatgggctgctgccgcgagtgagcgctcgggtgcatgagttgccgtctgtcgatagccaggcggtgctccgcaccccacgccgctcagcaggactcattgataattctgtgatccgctcggcgattgcgctggactgccgcgagtcacccttcactgaagctgctctcgcttcgctgatcggtgtgctgccacaagccccggttgtggagtttccggcgcctgcgatgcgctaa

SEQ ID NO: 332114 - DNA, 498 bp, Pseudomonas aeruginosa
atgcgatcgccatcgatgatccccaagagcgaaagccagaagctgagcgagctcttcgcgaaacccaatgcatttttgatccaagcctatccgctccagtccatgctccggctgccgatggatcttcgtctggaagtcatgcggcgtcaggtctcctacaaagagccgcaaccccacccgcgccctgcgcaagtgaaggtatcgggcatggtcgtcagcccggagaagctggtggctgagcgccgacaggcagagcgtatccagcgcgaactgaatgacctcaaccctctgaagatggggctcgacgccgcggaggaatacctccaggaaacggtagccgaggagatccgcgaggcgctgcatctctccgatgcggtatctgccgagggggcggtggtggctctgttcgaggacgttgcggagcgtaccctggtgagcgccggcgaagccgtcgttgacctggccactgaggtcgagtaccaactcgggcggctctag

SEQ ID NO: 332115 - DNA, 576 bp, Pseudomonas aeruginosa
atgcgcaagcttcaaatgtctgaccagccgatgttgctgggcgaggaggatctactgaggatccttgtcgggttggttcgctcgccggcggcgatgggcgaggggtgggatcagcagcgacatcgatcttttttggcgcgcctggcccaggttgttgcggatgaatgtggtggtgaagttgaaccgacgaatgatgggcagctgctggtcaggctcaacgaatcatcaccagaaggcggcggcatctgggtgcaagctgagtcggagacgaagccttctgcccttggtgccctgcaggggctcctgaatgtgctcgttcgggacggtgacggtgggttcttcatcaaccaggaggcgatcgccgaggtcaatcatgcttcggccgttgccggccagtgtccgatccttttgcagggggaggtgcccgatgatgcggagatttcagaatatccccgcagtgagtggctggcttctggggtcgatgagccttatgaggcgtgggtcgacgagcagcttgccagtcacttccacgagctccaggttctggctcctggcgccgctgcgaatatatcctaa

SEQ ID NO: 332116 - DNA, 330 bp, Pseudomonas aeruginosa
gtgttcgtacctaatcagtatgcgccggccgagaggatcattttcctggtcattggtgtggcgctcacatggtgggctcttgatggcttcctggacggtgagatgtatctgcctggccgcaaggaaggcatatacctgcgggacggcttggcggtggttctgggtgtcgtcggcgcgctcacgggtggagttgcatgcttcagcgcgctgatcgatcactacgatcggcgcgataacgagaagaaatatcgagagttcttcgtcttttgcaaatatgtcgccatagctgccatcacctccgcggtggtgctgcagctgcgtgcaggttag

SEQ ID NO: 332117 - DNA, 651 bp, Pseudomonas aeruginosa
atgacaagaggtggtgacgatccttatggcttcgagctgcgtgccgcgagtcctacgcggccggttcgtggccgtttgagtgatggccgcctttatgtggatctcgtacccacttcggcttggctgtcgaacctgcaggcggagctgaccgggcttgagtggcggtcttgttccgcttttgtggccgccagagcggctcatcaatgcgaagtttgcggttctcgtagcgggcgtctggaatgccacgagcgctggtcatttgacgaggtgactggcattcaacggctgacctcgttgcaggcgctgtgtacgtggtgtcacctggcgactcacgtaggtactgcgcgcagcaaggccgagtttcggttcgcggcgtcgcacatgtgcagggtgaacggttggggtgctgcgcagtttcgcgagcacctgcagcatgccctcgatgtgagtcagcgcaggagcgggcgagcttggatggtcgacgcgaggcatctgcaggcgctgccgatcaattggagtgaaaaaacgcgagagtttgtcgagcggcacgccacgctgcttcagcgtgtcggtacaggtgatgggcggcagcagtgcatcagtttgctttcgggcttggacagccggttatctgaaaagaagggggaatag

SEQ ID NO: 332118 - DNA, 483 bp, Pseudomonas aeruginosa
atgagcgttttcgcctaccgcgaacagctcaagctactgcgcgagcacgaagctacggcaagccgcgcccctgcactggaccttaacccgctcgggacagaaccaatcgcgcacgaagcgcagagacgctatgagcagctgcagcaggagacctacgaggccctgactaaagcgctctactgcctcggcatggcctccgttgaatggatagcgccacgcccagaccttgggcgattcaagggggtaatccaaccagcgttcgcagccgccagcacctatcgaaccatgaatatcgacggtatcagcgtcctaacctctgatggccccttcatcagcggccttgcaaaacgcctgggcatcacttccgccgagatctatcaagaaccggtgaagcgagtttctgcctttgagaaagccttttggctgatcaccgagcgaatgcacgagaccaacaaggaggcgtctttccaagacgggagatag

SEQ ID NO: 332119 - DNA, 561 bp, Pseudomonas aeruginosa
atgctgaccagacgaagcttcatccaactcgccctatcctcttccactgccctggccttcccaggtctggccgaatcgcaagagaccgactggcgcctaaaggcactggatcgtgatcgatatctgagcctggtgcgaccagacagcggtgagcgcgtgacggcttgctactggcgacggaatagcggctggaacctggaaggctaccgacaggcgtgctggctgctgcgcgacgtgaagtacaagcaggcagtagccatggataccggcctactggacacgcttttcatcatgcaaatgtggctggccacatacggcaaacaacacgatatccacgtcctctctggctaccgaactgctcagcacaacgcgacactggagggagctgccaagaattcgatgcacctctacggcagagctgcagacatccatatgccaggggtatcacccgtcctcctctcgaacatggggaagatgctaggcctcggcggtgtcggcctttatgcgaaaagaggattcatccacgttgaccgcggctccgtaaggagttggtcaagctga

SEQ ID NO: 332120 - DNA, 297 bp, Pseudomonas aeruginosa
atgcccgacctgcataacaccgcgaatcctgagatccagaacccattcaagccagatgagaagattcggctctctgagctcatgggcatcattgatgaaaaaaacgaagcgttcgtggcggccgatgccgcatctgagcacggcaccgaccctacgggggacttgaatcgactcctgaaccaactcaccgccgctttcaccaacgagaccgacaaggcgatcttcaccgccgaagcgatctggcgctacatcggcgaacaggatgacatcgagatcagcttcgccccaggaatgtag

SEQ ID NO: 332121 - DNA, 276 bp, Pseudomonas aeruginosa
atgaccaaatcggatatcgtcaacgctgttgctgatcgagcgggtctctcgaaggccgacgccggccgagccttggcggcggtactggataccctcaccgacacgctcaagcgtggcgaaagcgtatccctggtcggcttcggcacgttcgccgtcaagactcgtgcggcccgtaccgggcgcaacccgcagagcgggaagtcgatggacatcccggccagccgtatcccgagcttcaagcctggcaaggccttgaaagattcggtgaacgagtaa

SEQ ID NO: 332122 - DNA, 204 bp, Pseudomonas aeruginosa
atgcgctccgatgccctggccgaccagtacgggctgatcacacctcctgcgctcctggtcacccatcaaggcatccggattgaagcgcgcctctgcgagagcggagaggccgtgttcagcccagagatcagccacgaccaactgcttgccgcaacgcagcacgacatcgccaccgcactcatcacagaggggccgcacccgtga

SEQ ID NO: 332123 - DNA, 603 bp, Pseudomonas aeruginosa
gtgagaaagggactttccgccaccgccattacccaagtgcttgatgagtgcttccagcaagagtacggacgccccgccaacgaccggatgagggataaattcgtcaatgcaattctcaccagggacgccgtggcgctggagttcatttcaaacggactcaacgaggcttccaaacgcgcgttctgcagagtgaccggcatcgccctaccaccccagcagggccttacctggaaagccatcagggcctggggcggcataagcgatgagcaagagcgactgcgagttgccactgatcgacttgaagcgcaaatggaacggcttcaaggaaagatggatgtcgaacagtcaatggcagcgctgaacggccttctcgaccagggctacaaccgcgttgtacacagcgaccgcaagtacctgctggtcaacgaagaaggccgcggttacaacctaagccagcgcggaaccctgctccctcaggcgcgccacctgcttgaagcaatgatcgaggagcgagaggcgcgcgctgcgctagcagcaagtaccgcgccggcggccaccggcgatcacaccgagctctgcgctgcccccgacttcaggatgtag

SEQ ID NO: 332124 - DNA, 492 bp, Pseudomonas aeruginosa
gtgagacccccgcacaccctcgaaatagccgccttccacggcaccaagcatcacttcgaaacctttgaggcatcgccgcgcggtcattttggctcgggaatctacatggcagatcgcaaggcagccgaggaatatgccggcccagacgggatcgtcatgagcctggcggtgaccctggccaggccctatcactatgcagcgacatttgaccacgatctggattttgactccgcagcggtagaccttgtgcgccaggtgctccctgaccaggctgacgcactgatccgcgcatccatgcattctgacggcttgctgggcgacagcatccagaccgccctgcagctgctcggattcgacggactcatcgtcacgtacgaggatggctcgcaagagatcgttgcatacagcccgcatcagattgaggtgctgcactcgacaggcgagccgtacagctcacctcacatcgaagcctcaggcgccatctccaggtga

SEQ ID NO: 332125 - DNA, 648 bp, Pseudomonas aeruginosa
atgagcatccggaaaaccttcgccgattttcacaatgcttcgacgctgatcgatgcgatgcgttgggccaggggggcgggtcacgagatcgccgagggcattccctactggagcgagttggccgggccgatgggggtcaacgtgacgcttatggccgagcccggaacgcctgaagaggtcattgaggcggccgcgcgcgaggttgtccagaatcgagatgtcgtcaatctggccgtcatggattattccgaggagcctcatgcgcattcgttggtgttccacttcgacggcgggcgcgagtgcctcgttgaggcaaataccgcaggtgtatgctggctcgtcggtggtggccactggatgaattttggcgatcgcccgcggctgctgcagactgactgggaaggcgtcgccattgagtgcccgcaaggggcggttgctcgcgcaaccttcgggtctggcgaggtagccctggttggagtcgaggggtttgtgaaaggtgacgagcgccagttcgcgctggtgatcgaagctgacggccgccagttgaggtcagcaccggttacttttgagcatctccttgagatggcgcgtgcgccgcttcctgtcgctgggtatcacctggagatggcgcctgaggcttcgatgtga

SEQ ID NO: 332126 - DNA, 771 bp, Pseudomonas aeruginosa
atgcgatctaccggcagcccaaccaacattaacttcggcgcccacatcaaaccaggatctccagaaacgctgcaggcgcagcggattgaaatcgaaggcgtaaagcgcgtgcatacgcccggccacggctggggcattgaagttgacaacgagacgcccgaatttttctctgtctacttgcgatccaaggagaccggcctcgccacctgcgccggcgactttcagcactatcgcgaggcgcacgagcatgctgaagagactcgatactgggcagcccagaagacggtcacgctcgatctccatgatggctacttcagccatctgcgtagtggcttcgacggatccatcaggcaccgcgcgctggcgatggccaccgccaatttctattcggtcgacacccccaacaccgagacactctacgccgcctaccaatgccacctcgcggccgatgatgcagatgaactgccgcaatggcttcaactgagctcggcccacgaaagcacatccctggaggtgatcaatgaaatgattgaggccaacgccgacttcattgaggaacaccttcacgccgttacagcccaggccattcaccagctgcgcctcgaagggcatgcgatcgtccgcttccagcccagcgagcttcatggtgtagaaccgcgcttgctgcagaacagacttgtcgaactcggcaaccaggcgattgaagacctgcgtgatgacagtccggccacccaactggacgagggcggagaggcacccgcctaccgttga

SEQ ID NO: 332127 - DNA, 321 bp, Pseudomonas aeruginosa
atgaccaatgacaccgtttcgactccgccggtgctgttgatggctggtggcgcggatattgatttccagatcagcaatacgggtgtggccatcaccaagaaggtgtgtacggctccggcagtgctggaggtctacgcgacgcctgtatcgatgtgcgacagtggtgtggccaacaacattcaggggttctacgtcgatgcagcccagactgctacgacgttcactcccaggctgtgggtgttagtaggtggttcgagttggaagcaggtcgccgcaaaccacgcgtgtggccggcttgaggtcaagcagctctgcaagtga

SEQ ID NO: 332128 - DNA, 1806 bp, Pseudomonas aeruginosa
atgaagatgctgaacggcgcagtacggaaaggggtggctatgacgctgatggccctgcagctggtgggctgcgcgtccatggggcaggtgtccggcgggcttggcggtttgttgccgaccagtccggatcacaagggggcattgtctgacgcccaacaaactgaggcacgcattgcgcgatcgatctcccagagcgtggtcaccggcaaagtcggctattcccagccggagtatcagcgccgcctcgcccgtttcaatagtgcccgcaacgctgtcgaattggctggcacgaactacacccgcgaacagttcattgagctttccacctcgttgacagagctgctgcagtacgtcgacctgattgagtccggttccgtccgttcagcgcaaggcatgaagcctcagcggatccagtcctcgtatcagattcagccggggcagacagcctacttgagcttcaacggctattgcctgaaggcaggtcctgatcgtccttacgctggcgaagcgatgcagctgatcgcccctgatgctgtttggtcgccagaatacgagaccatttaccgcaacctcatccagcagaaccggctgggggagcctaccccgacaaagcgctatcaaggtgagcagggtgatttgcagattgccatatggacgctgcaaggtctgaacgatggcctgctcaacccgaacctgtccaaggcgctctccgacaagcagaagcagatgctgtttcaggcgggtttgccgccacagaagctggctgtacagcagctgggtacatcgttggtagagaccgccctgccaggctttggagccagcatgcaggggcagggtattggtggcgctgtcaacgccatcagtagcacgctcggccgccaagccatgagccaggccggcggctccgatctaatgagaagtacccaaggctttatcgacattcccaggttgctcaccaaccctcaggtgctgggtaatcccgctgctctggcttccaacctgaatagctgggcatccgcgccatccgaacagcaggttcgaactacgccagatgccctggatcaatacagcttgttggctcccggcgtcgccgcccagacgatctcaacaggccaactcgcggggaagatccaggtcacgaacctatccggaaaggtgttcacgatggctcccggtcagtacgtcgccaatgccaggtcgaacactcagccagtaggtctatccaactgggctctggataagatggccaatgccgttgaggtggtgaagaaccctggggacagtgcgattcgccaagcgctgtttgaggatctgcggggcttcgcggcggataaggcattccaggctttcgccaaccccaacggcaatctgctgggttttgcaaaggggctcttcaagtcgaaggtcacccaggatctggtaaccagcgtcccggttctgggcaatgtggtgagcctgggcatgattctgtctggcaagaacctggatggttcggacatgaatggctacgactatgcatcggctgccattggtatggttccggttgccggcaacattgccaaagcgcttggtggaagcgcgcgcattgcagcgcacgagatttctcgtctcggggggcgtctcccctccggtgccgtcgatgcagtcgatgctggcctgcaggtctatggctccaacacctccgaagcgatcgccgagagcactccggggtggcttaccagggagttcgatgcgatcgcccgggaggccattgcccagttgcccgaaacctctcgggccgtggcagcgcgcggaacgattctgtga

SEQ ID NO: 332129 - DNA, 783 bp, Pseudomonas aeruginosa
atgaagaaaatcctgatggctgcgctgttgagcaccgcagcaagcgcccacctggtgcaggccgccgaacccgcttgcggaaccgccagcgagtacacctggctcaccgcggcgctgagcgcaagcaccggccaggccagcgaggtctcctccatcgcaccggccggggaacttaacctgtgcgagatccgcctgaatagcggaacgatcgtgtacagccgcccgggcacccaagccatcctgctcggtcgacttttctctgtcgccggcacggagattaccgacaagacccaggtatccatggatcgggcgaacctggaacagctcggcaagatccagcccaacgactacatcacttacgccacggccgagccggccaagagttacatctacgtcatgactgacgtggactgcacctactgccagaagcttcataccgaggtcagcaaactgaatgccgccggcattgaagttcgctatctacctttcgtacgcggcggccgacaaggcagcgcctggaacacgatgagcaatatctggtgctccaccggtgaccggaagaagtcgctcgatgaggctattgcaggcaagaaactggaaaaagctgagtgcggtgaagagatcctggatcgctatcagatcttcggccgcgacgtacagctacaaggcacaccacacatcctctttgccgacgggacctctcaatccggaagctctgacgatctgatcgataaagcactgaaagcagcaagccgtggtgcgccccatgcgcagacccattga

SEQ ID NO: 332130 - DNA, 1515 bp, Pseudomonas aeruginosa
atgaaagtgaattggggcttagatgccggcgcgttgagcagaaaaccctcccagcaggtggaggtgacgctggatacgttgcttgcggtgaatgggcatacgctgctggtgggcatgtccggtgctggcaagacgttccagctgaagaagatggtgcgacagatgtcgcgttcggctgagcaggccggtgagccgatcccaaagttctatgtcttcgatgtccatggcgatatcgatatcgctgacgcatcgacggttctgttcagcgagcagaccaagtggggcctgaacccgttgagggtcaatccagacccccatttcgggggcatccgcaagcgcgtgcaagggttcgtctcgacggtgaaccgcgtcatgcgaacgcttggcccgaagcaagaggcggcgctgcgtaatatcctgcacgatgtgtacgccaagcacggcttcaaccaggatgatcccaccacctggacgatcaaggatgacgccaagcagctggtctctgagggtggggataatcgcttctacatcgatgtgccgatcgatgagaaggatgaggcgaaagccctcggcgctcgttgggacggcacagccaagtcatggttcatcccgtctggtgaatacaccggagctatcactcgctggccgccgaagatgaccgacagggttcatccctcgatcacggacgtgctcaggatggctcgcaacgttctgcagcagcttttcctcggcaccgggatgaaggcgatcaccaacctggaggttgctaaccgcgcagcagctgcttatcagcgcaagctacttgaggcccttcgccgcggtgagaaggccttcgaagatgagaagctgaaggctgaccttgaaaaggcgaaggccaaggcgatcgagactttcagcgagtacgcggagtcaatcgtgaccgggcgcgagttggattgcgtgatgaagtacgacagcacggacgtgctgaagtcggtcgtcgatcgcctggagaatctcgatagcatcgggatcttcaaggcggagccgccaccttttgacccgaatgcgaatgtctggcgctacaacatcaagccgctgtcgatggaagagcggaaactgtttgtcctgttccgcctggaggagttgtttctccaggctgttcagcgaggcgagacgaagtacatccacgacgtgctcatcatcgacgaggcccacatctacgcggacgatgatcccgacaacatcatcaacacgatcgcgaaggaggccaggaagtttggcgttgcgatggtgtgcgccagtcaatcgcctacgcacttcccggatgacttcattgcgtcagtggcgaccaaggtgattctcggcatcgacgagatgtactggcgtagctcggcgacgaagatgcgcgtatccgaggacgcgctgaagtgggtgaagcctaagagatccatgctggtacagatgaagacttcgggtgaaaccaagaatgactggcgttgggttgtgattcccccagaggccgcggcggcttag

SEQ ID NO: 332131 - DNA, 732 bp, Pseudomonas aeruginosa
gtgagtaagcagccacgcaacctgcgtgatcgatccgatatcgccgtcgatgcggtgtccaaactggtcgaggcgctacagcacaaccagaacgtggccctggcggagcttcgactgtcggccattgacgcccgccgcggcgatgtcgaaaaggatgtcgagcgtacggccgagatgatcgaggctctgcagcagcgcctggtggaaatgcagggtgagatggaaaggctggccgcctctcgtgaggaggtgcattcgtggctggaagcaaatcctcgcttcgacagcgctccgctggaggtttccctgaactctgccgttgctgcctctgcgagcgccggcggccacgaggccgcgatcaatgccgagcctgtgcctgaggccctgagcgctacagaggagttgcggcaggtctttgagcgcgccgatgttgaaagccccctcacgtcctctgctgttcttcccactgcagcccaggagactgcccctgcctcgctggatgtgcctcaacctttggccgcggatgatcttgatgacatgcctggttttggcgaccccgagctgatttacgggggcgtcgatgaggttgaagggttcgacaccttgagcgctgggaacgaccaggttgtcgacgggttggatggccaggtgccgggctttgatgatgatcttccgagtgcgcaggaaactcccaaacaagcggccggaggtgaattcaacttcgggttctga

SEQ ID NO: 332132 - DNA, 2202 bp, Pseudomonas aeruginosa
atgagcgaacctcggcaagagcatccttggctgggaggtttttctgacgagcaagttcaggccgccacgcatagccaagggcatgccctggtgtcggctgcgccaggctctggtaaaaccaagatggtcatcggttactgtggtgtcctcctgtcgcgaggcgtgaaggcggacgaggttctggggcttgccttcaacgtcgatgcagctcgcgaagtgaacgcgcgcctggctgccctcccggttcccggggctaacaagctgaagttccggacgatccattctttctgcaaagaagtgctgcaggtcgccgaggaggagggtcttctcccggcgcgccaactggtcgctgaggactggaaggccgccgcgctcgctcggcgagccctggctggtggcgatgagaacgccgtcgacgtggacgagttgaaggttggagccctgcgtcaggccctcaccctggccaaggcgagcatggttcccctggagcaaatcgacaatcacgaggtgctgctggagttcgccgaaggcgacgaagaggtggctcgtgcaatgctcattcacgaaaacgttcgtcgtgaagaggggctgcgtaccttcgatgacctcatctacgaccttgcttgcctctttcagaattcggccgaggccaggcaatgggctgcgaacgaattcgctcacatcatcgtcgacgaataccaggacgtggacgacgcccagcagctggtggttctgaccctgctcggaacccgtggccgcctcttcgttgtgggcgatgaagatcagtgcatttacgggtggcgcggtgcgaacctggcctacatgatgagtgggctggaagagcgcctcggtgccggtaacgtcacccgttatcagctgagccttacgtttcgctacggtcatgaagtggctgttgcagccaacagcctcatccgtaacaacgccgaccgccccatgaaactctgcgtgtcccatgaggccacgccgaaatcgacggttcagatgcgcatggcctcgtctcgcacgggggatcggtactggccccaggcgatcatgcaggacctcaaggagtggaaggacgaagggcgccatatgcgtgaggccgcaatcctcgtgcggacctacgagttggcggcaccgctggagatgcacctgatccgtgagcggatcccctatgtcattgaggggcgcggcatcatggcgatgccggaggtgaaggcaatcaacgcgtacgcggtgatgagcgatgccgagatgtttgaggcctgcggagaggaaggccgggaggagatgatcgcctccgttctcggggccccagggatgttcctccctcgcaagtacatccagaaggtatcgaaggagctcgccggcggtgagttgagcgaaatcccgaagcttctgcgtgcggcgagtgaatcggatgggctccgccctggccagctgtccagcctgcgtcggcgagcgactgtactggagcgcctggccgagcctggtcgctcgatggccgacctcgcagccatgatctggaacgatctcgattggcgtgcggatgtgcagcgtcagatcactgacccgctgaagcaggcggaccggttgaacgtcatcaacctgatggcgcgagaggtctcccgctacgagaacgtcgaggccatgctcgatgcgttctccgagcgcatggagcagcaggaccagccggaaaccatgcgtgacccactgctgatcacgtccatccacaaatccaagggccttgagtggccgctggtgatcatcccgggtatggtcgagggtcagttccctcaccagctgcccgatcgccctgccgacatggaagctgagcgccgtcttgcgtacgtcgggattacccgcgggaaggagcgggtgattcttgtggcccccaatgacctggagctcgccaatcgctggaagatcccggtcaaccccaaggaatcaaggggtcgcgaagaggccaatgggatcaccagccggttcctggaggagttggagcctgaggcgattcgcgctgcgcgcacctggttctatggcgagggtaaccatccggtggtggagtccttgcacgactactcgatcaaggtgggtcggcctcttccagggtacgagcctccagcgccgcctgcagcgctggagatgccggtggagcctgagcctgagttggccccgatctatgattttgacttcagctga

SEQ ID NO: 332133 - DNA, 2142 bp, Pseudomonas aeruginosa
atgccacacattgacgtagcggttttctgtccgctcgaccagaccttcacgtatgagtggcccgagtcgcttggggaaatgccttcccccggctgccgagtgaaggttccatttggcaaacgaacggtaaccggcctggtcgtaaggccaactctcgcagccccctgtgaagaggccgccaagaagattcgccctgtagaagaactcatcgatcgcgagccactctgggattcgcagagctgggcgacttggctgtggatggcggactactaccaacatcctatcggagatgctctcgccacaacgctccctgcaggcctggctaagggtggccaacctgagccggcgaaagggcgcctgcttgatatgtctggcgatacccgctacgcccccagcgatatggccgccgcgacgacctccagccagaaagccgtaatgcgcgcggccgcagcgcactctgacggtgtgactcgcctggccctgattgaggagaccgaagctcctcgcgttgtggatctgctcatccgcaccggtgccctgcaaccggttagaggcggccatcaaaggcacaccctcaacgccgcccagagtgaagccgccggccagatcaaggacgcactcaacggattctccgtgacccttctggatggcgtaaccggatccggaaagaccgaggtctacatggaggccattgaggaggtgatcgcccaaggtaagcaggttctctacctggtgcccgagatcggcctgacaccgcaaacctgcggacgcctcgaacaacgatttgaggtatgcgtgctgcactcgaaattgtccgagaaagatcgcctcctggcgtgggagctggccaggaccggggcggcatcggtcattgttggaacacggtctgccctgttcaccccgatgccgaaccttggcctcatcgtaatcgatgaagaacacgactcatccttcaagcaggatacgcatctgcgctatcacgcccgggatgtcgcgatctacctggccaacaaacgaggcgtgcccgttgtactgggttcagccaccccatcagcggaaagctatcgaaacgccacggcaggtcgctaccgacacctgcagcttacagagcgcgcgactggtgctcagatgccgaagatggaagttatcgatgccaagagccttcctcacccagacgggatctcccagcccgcactgcatgccattcgccgcaccttggccgccggcggccaggccctggtctacttgccgcgccgcggcttttcgcacgccctgttctgcaccacttgcggttgggcgtctgagtgcccgaactgcagcgctcggatggtcttccatcgcgggagaggaaagctgatctgccatcactgcaccgaaagcagccaccagcctggcgcatgcccaaagtgcctcgccgaagtgatccccctcggtgccggcaccgagcgcgcggaggcggcactgtctgaagccctgggcgaagactatgtgctgcgcctggacaccgacgtgctctcctcgaccactgcgatgcacgaagccttcacccgcattcgcaagggtgatcctctctgcattgtcggaacgcagctcctggccaaggggcacgacttcccgaacgtcaccctggtggtggttaccggaaccgactcagcgctgttctcggcagatgccagggcgtcggagcgagtcattcagcagatcacccaagtagcgggcaggagcggccggtccaagcctggacgggtgttgatccagacctcacaggcggagaaccctgtcatccagcagctgatcaatgagggctaccacgcaacgcttgcgggcctggtgaaagcgtacgaagagaccatgctcccgccagtctgcgcgcatgcgctgctgacggtggaaacgacggacagggatgaaggcaagctgctgctggaacaggtgatcgaccgcatcgacgatcctgcactggtcggcccgttcccggcgatcatggagcgccgcgccggcgcccaccgatatcaggcagtagttcttgccgagacacgcaaagaaaggcatgcactgctgaagcgcatgcggctggaatggcagatgctgaagacaagatacccgctgatgattgatgtggacccttgtcaggccagctaa

SEQ ID NO: 332134 - DNA, 642 bp, Pseudomonas aeruginosa
atgcacgacaaaacccacacgatgatcgtgaaagatgaaattctaacccgtgtggctgaccttattgagagcagccccgccgaagcggcaggcgggctggccctcgcttccgttgacgcatttgccaagacctaccctgccaaactgactgtcgcagtcaagaaaatcatcaggaaaaactacccagacgcgactgatgaattgattgctgagcgtgcaatgtccgatctgggcacgagtttgagcattgcctcttccatcgtgactgctcaaatcgcaatggattactcacccttatcctatgtgatggatcaattagcctccgacgaggctctgccaagtgtgaaaatggaagaggcgcaagcagcagtcgtgcgtgcatttgaagaggtgcgagcaattggcctgacaccatttggggcagcgtcaatgatgattactatttctgccgacttggctagagaagatggcgcgtcggcttaccagctgctgcgaccactcttggaaacagctcagcacggcctcgaaagcgagcgttcgccccagatgcagaaggaaattgatgacttggcgctggatgctatcagcaagcaactgggcatttcgcgtgcggcagccaagcagatgctgaaaggccagtag

SEQ ID NO: 332135 - DNA, 291 bp, Pseudomonas aeruginosa
atgaagaagaccaatcttgtggtgagtattttaggtgtgctcggcctcgcggtcatcggcctgtctaacgggctctttctgaaaagccacccgtatgtttcaagtcaaaccgtcaccacaacggcaggcggcaaggaaagggtggaccgtgagtatgcggaagttcgcagcggtctgaagctcgactggtcgggcggcgtaacgctgagctacaccactgtcgacatggtgcagagcgacgggattggtctgccaagtgtcaggcagcgtagctggcgtcttggcctctga

SEQ ID NO: 332136 - DNA, 1209 bp, Pseudomonas aeruginosa
atgaacagcatggcaaatttatggctaccggcgttttcgatgcctggcagtggcggccgtgctgcgcttgtcgacttccggcgccgcgccccgggaagccttcgcggttggagtgtggcctgtatcgacctgtcaaatttccgcttgctcaacaaacttctcgggcctgagggtggagacctgatacttcaggtcgttggtgccacactcagggatgatggccggcatcactggttccacatctccggtgatgtctggctgggggtatgcgagcgtcgcgacccgcacctgatggagcgccaattcaatgagctccgtctgaagcttcgagaaaatgtgggggcggcgctctcaaagccgatccgcattgacgcggtgttcggcctggcgtcctgccaggagctctcgcatgcaatcgaccgggcggaaggtgcgtgccgccaggcaaagctcgccggccggcgcctgcaggtggtggattcagtgaaggatgactgggaggctaccgatctgatcgaccagttcatcaccggcggcacgcttgagcacctggttgaactgtaccgccagcgcatccgttatctcgacggcagaagccactacgagattctctcccgcatcggcggtgaatcggtggggaccgcgatgatgatgattgagcagctcggcctggtccgcgattacgacctgatgctgctcaggatggcagtcaaggctgtgccggaagatgcccctgtgcacaccgtgaatttctccagcctgactgcttgtgattccggtgcgatgctggaagctgtctccatactccgggggcgccacaacattgccatcgagatcactgaaacggccgaggtgcaaaatctcgcgcaggtgcgtcgaactgtagagatgctggccggcgccggcgtggctgtctacctggatgacttcggcgagggcgcagcatcgcttggaatgatcgacctgccctggcaggcagtgaagctcagccggagtgtttgcggtgaacaagctccccgagatgtcctggttgcggtcgtgaagctcgcaaagagccgcggtatgaaggtgattgccgagtgcattgagaccaaggggcacatggagtacctgatcgggtgcggcgtggacgcatttcaggggtactacatccaccgtccggagtgtttcgctggtactgccccaagggcggcaggcgcgcaggggtag

SEQ ID NO: 332137 - DNA, 855 bp, Pseudomonas aeruginosa
atgacttcaagtcaagcagaagaggcatccaagtccaccgaggaatcggcgtttggcttgaaaattctgagccctgagcagttggtgcccgggcgctatcagcctcgatcccattttgatcagaagagccttctagagctcggccagagttttctggaaaacggcatcgggatcattgagccgatcgtcgtgaggccgaagcccggtgccggagatctgtacgagatcgttgctggcgaacgccggtggcgcgcagcgcagttggtctcgatggatcgcgttccctgcctggtccgcaactacacggatctgcaggccctgcaggctgcgcttgtggagaacgaccagcgtaaggacctgaacagcgttgaacgtgccaaggcctatcagatggccattgaggagttcgaactcacccatgaagccctcggccagatgctcggtgcaagtcgcgaggtcatcacaaaccacttacgcctgtttaccttgcccctcgctgtgcaggagctcctcggcgaggggcgtttaaccgagtccaaggtgcgctgtctctacgggctctctgcggccgacgcagtgcgtattgcacgtcaagctgcggaagaaggacttggctatcgccagatcgaggcgctggccaaggctgccaagcgcccagagcgcgcgacagccttggccgagcgtgaggatcccgatgagcgccggtggcttcaggcagtaagtgaaaagctgggtcacgaggcgttgctcgaaagagcgaagaaggggcagaagggcggctatctgaagatccgctacttgtcgatggacgatctcagctcaatcaccaagaagcttctccgcggaagggagtag

SEQ ID NO: 332138 - DNA, 318 bp, Pseudomonas aeruginosa
atgaagaagctccttctgatcatcgccgtaacggcactggcacagccggcgctggcgagcagctggaacgtttctggcctgttcgacgcagtggctccgacagccaatacgacggtagcgaccacgaacagcaacgcgctgcctccgatgaacaccacctacagcacgccgggcttcaaccccgatgctcaggtaacgcgcgcctacaagacccaaccgaccgccagcggtggcatgcctgtatgcccaaaccgcaatgctgcttcgcagcaaagcgctagcggttaccagatgcaacgagtttcgagggcctactga

SEQ ID NO: 332139 - DNA, 573 bp, Pseudomonas aeruginosa
atgccactccccctcatcccgctcctggcaggacaagctattcgcgtcctgggcccgcaagccatacggcatatagccgcaaaagaagcttttggtctggctgaaagcgcactggccaagcgagctatgccgctgcttggagaggcgctcaccaaaggcgagaacttcatccctggaaccggcaccatcggcaaggttctgggaagcacccccggcgcgctcggccagctgctgggcaaggccgacatcatcagcgatgtcgcgggcaaagcccttaccgaaatcggaccgaagattgctggcatggcgatccccggcctgggcgccgccctgcaggcggtcgacctgaccaagaaggcagcagacgcgttcggcagcaaccagaatgctgggcagttcctctcgacaatgagcaagctcgatctgccaagcatgctcagtgctggcgaagcactcgggtccaagctgctgccccagttggtgcaggctatcagcgaactactgaaaagcgccgcgacctatctcgatcgggcccaggagagcctggcgcccaatgatatggccccccgctga

SEQ ID NO: 332140 - DNA, 921 bp, Pseudomonas aeruginosa
atgtccgcgggggtgtcctactctcctcattggagcccgaactatctggtcgtgccccacgcgcggtttgacgaccgcgcaagggcagcgttgccgcacctcccgatgatgggtcgttacttctccgacgaacagtgggcagcctgcccactgagccccgccgcacacgatatgcgcacctggaccatgatcagcgaaccggcctgggtggcccgtaacgctctgcgcatgctcggccagaaagcacgagaggttgcagagcgggagttcatctctgacctatcccgcgatcaagacgccatccttctcagccagaagacgctttcccgtagcgggcccgaggccctatgggcccttgccctcactgtcatcgcgcgggcagcgtcctcgaagggatacgccatcctcgaccatgcgctcgaacacgccccgaaggacgcaccagagcttggcagttggagcaactacgccgccctgttcggcgaaatgtcgaccctggccgctgcctcgaacggcaacctccccggtctgtttcaacgcctgaagaaagccgagatgcctcagcaggtactcgccaggctgttgatcgacatccagacgaagctggatagttcccaccagacccaagggatcattcaatctgccggcctcgcctccctccgatgggtgtggaccgctccaggatcggcacccattgaagttctgttccacgacgcccagtcggctgtcgaatggctatgcgaaagcttcctcccaccggggctcgaagaggcgaccctgcgcgccaagctatctccccttcgtgacgtgctgcgcaagacagcgatcgtgctgacagatctcgatcgcgacgacatcgccgagcctcttgagctcatcaagatggtcgaccagctggcaatgcacggcgccattcgctaa

SEQ ID NO: 332141 - DNA, 375 bp, Pseudomonas aeruginosa
atgtcgccccaagttgaccaactgatcattctgatcgagcagctccaagctagcgctcgaaaagcagagagccaggacactgcgctgattgtcgatggcgcactcttagagcaagctgccaagcaggcagccgccctgcgcgcgcctcaacaaccatccccggaggatttcgtatcccgcgtcgccggcctttcaatctgggactacgaccagaatgacggaacgccataccaagagtgcgaggaacccaccgacggttacctggattcgcatacagccctcatggatctgattgaagaagccaggcggctggaaactcagggacccgaggccgccgcgctgtatcaattccctgatcagtcgccggggatttag

SEQ ID NO: 332142 - DNA, 249 bp, Pseudomonas aeruginosa
atgcccactgtgatcactacaaccacgctcgccaacggccacaccatggaaatcacccaggatccgggtggcatgtttccgttcacgcttgattgtggctggcagggaaacggcttcaaacagttcattgagttgcctcgcgtgtacaagacagctcgcggtgcacgacaagcagctgcattgctggccggcgagccactgacttgggaggcgccgcgcagtgaacaaattcaaaccaaaggccggtga

SEQ ID NO: 332143 - DNA, 261 bp, Pseudomonas aeruginosa
atgcgcaagatcagcagcaaagagcgcaaaaacggaatgcgctactgcactttctgtaagcccgcgcgtcagcgggccacctatcgtaatcaatatctgaacatcgatgttccagtatcgcttgcatgcgaagagcataaggccatgctggtggatggcaccttcaaaccaatgcctccggatccggagatggatcgccggatgaacgaggaagaccacagcgaagcttggttctccatatcgaatacttacaacgtctag

SEQ ID NO: 332144 - DNA, 714 bp, Pseudomonas aeruginosa
atgcggaagcttctacaacatgctggcctttcatcaccgtttgccacaacgctacttcctggcctgctcattgggcctgcggtcttctacctctaccgctgcctggttgacctactgaagagctccgtaacgcccgccacattccttgcctacgatgttctgatcgcctatctgctgccggcggcgttcttgatgggcgccctactgctgcaccgagccctcatatcggacattggcctgctcggacgattcacccggacgcaagtgtgcgtcggattggccgccgtcttttcagcctatctggccagcatcggcgtggcggagctaaccgggcttggacgcgagatggggatggtccttctcggatttggaaagaccgaatttcagttccagatcttcattgtcacggtactgatcctcccgccgatcgtggaggaaatcgcctttcggcacttcatcctcagcactcttccgttcaatcgacatcgacttgtagcggtggcggcagtgatcggctccgcaatctttttcatgtacgcccatttcggcgcctataacttctggccgacgcatgccctcatattcaccctgggggtgatctttgcagtagcccgcctggtaaccggagggctcctacttccgataatgctccactgcttcgccgtagccaccggactgtcactgaactatgtctgggcagccctaggcggatag

SEQ ID NO: 332145 - DNA, 219 bp, Pseudomonas aeruginosa
atgaacaaccaagccagtttccgctcgctgatcgagaagacggacatcactcaggcggaagccgccaagatgatcgccgaggagaccaagcgcccgtgtagcgttcgcagtgttcgcgcctggctcgccgaggctgagctgcaaagcgccagaccctgcccagaatgggccgtgcaggcgctggagagtcgattgcgtactctcggaaaaattgaatag

SEQ ID NO: 332146 - DNA, 969 bp, Pseudomonas aeruginosa
atgagagccactattaaaccaggcgctaacctggatcaggtctcgatggttaagcagatctggatggagtccggacagcggcttcaagatgcgctggctgaggcgctgaaacacaagggtgaagtcgtcgacttccaactcaccccgtctgcaggctacgcagcagtgaaaacgcccgaagggcgggtcgaggctttcgtcgtcccgtattcggtggacttccgccaggccgcaccgcgcgctgtgcgtttcgggatccagagcgagcgcgacaatccgcgccaggcggcggcgccgcagtcgtttgtagagcgactgtcgccggcagtcgctgacggcgatgctacttggcgtcagcgctgctgggccggcatggtcgatcgccatgtggccctgagcgtgttgcgcccgggcgatgtcgtcatgctcgcgaaggagatcgaaagcaaccatggacggctgcgcccggactactacgccgtgcgcgcttctgatcatggtttcacggtcctggagtcgcttcgtacgggcaagtcgtccctggtgcacaacgttgcgtctgacgtggtgaacgtcaatctcgacccggatccgatgatgcgcctgagccagcatcccgcggtggtccgcttcggcatgcagcgggttgcacgcaatgacgagcaggagcattacgtgcttctggggcgatcggcttccggtgctctggtgcccctggcaaaggctacggggacggaagatcgcgacttcatgctgcagcgcatctgggaggtctctcagctgcgtcaggagagcctgcgtaacctcaatggctctccggtctacgcctacatggctgaccgtggcctggctgatgcagtcgtcgagcagggccgtggcgaagagcctgttctgctccaggatctgcagatcgaggtcacgccgctcaacccggagcaggaggttgtctacgacggcccccgggtctga

SEQ ID NO: 332147 - DNA, 945 bp, Pseudomonas aeruginosa
atgcgcgttacgcgagaggaactggatcaggcgttgaatcaggtgcgggcggtgttcacgccggaaaccgttgaccgcctgcgggagaacgatctgtttccggaggcgctgcatacgctgcagacgcaggccggtaatgatatgcgcatgctcggaatcttccaccaggtgatcgccggcgcagtcgcggtcgtgaacatcgctatccgtaaggatcgcgaagctggcctggtcacgtccttcgtttcccaggcgaacctgattcgcgcgggccatgtgcggggtaacctccacaatcaggaggcgttgcgtgatctgttcccggcgctggacgaacagtatggtcctgcggatgccgagacgctgcgtgcgggcattgcaatgcatctggcgagccgcttcttccggccggaaggcgaggaaagccccctgcatgagcaattgctgcgcactgcagtcttgcgtgctgccgaggtcgaaggtgaactcatccaggcctttcaggcgcccgcggtggcgcgtgaggaggtgggcgtcgacgagatgctgatcgccgtgaacgcgctgcaggaagtcactgacggggctgacctgtctctggtgcctgggctcatgatgattgctcagggtgcctgcgaattcaatgtgggcctgactccgatccagcaggtgatccgaggcctgtacccggaaatcgatacggccggcctgaatgcaatcaccgagcgcacactggcctacctgcaccagttcaacggccaggtggtgaaccaggtgtttcaggaaatcggcaacgactggctacagcataatgcgctggagtacctgaacgcccgtgacggacacgagctcgattatgatggggacgatgatctcgatcacgatgagccggactaccaggagccggcggcgatcgctcaagaactctatgacttcaagatgtaa

SEQ ID NO: 332148 - DNA, 1107 bp, Pseudomonas aeruginosa
atgaagggccaagccattttcaagctgatgagccaatccccgcggctgcctaagccgtgggaggcttcctaccaggaggctcaggacttcattgcttgggccgatgcgattccggacagcacttcgcgcgcattgctgccgatggtatgggcggtgaaagacaagctggcctaccaggatggtggtggcctcaacggctacctgaaagagcgcggcatgtccaagaaggggtggaaagcgctcaacagcctttcggttgagcagaccgccgacgcgttctcctatttccgcgcccggggagagcaggcctggccacttcgcctggtgcgacctgcagagaccgctcgggatgctgcagtggacgtttccgcggcgctgctgatcgtgcttgcggatgctgaagtctctttggaaggcattcatgcgccctacgacgaggactggaagttgatgatccgcgcactggcggccgaggtcgctggaaaggcgctcgcgtgctgccctgctgtggcggctgatgcgatcctggttcgcgattacctcaccggtggcgatgccgacatctctccttcgaccagctggtcggagatggttgacctcgctcgtgagtggctggtcgagttgcagcacgaagaggccggctacgtcccggagccagctgcgcaggttccggtcagtcgagcagttccaacacctggtggagaggatcggttgctggatgcgcagaccggtgtggcggtagtccgcctgctgcagttctccgagttcaggcaggagtcggacctgatgaaccactgtatcgggcgtagcaaccactatttcaacaagcatatggagggcaccggagccttctacagcttccgtgagcctggtgttgagcgtcccctggcgactctggagttgtccgtctcggacggggaatggcggatctgccaatgccgcggcccgttcaatggtgacccgggccccgagtgccacgatctggcgaatcgcctgctcgaagcacatcagctcggtggagaaatccgcaaggccagttacgaggtcgttgcgcaggctgtcggacagcacctggagctggagcagacctctacccgctatttctga

SEQ ID NO: 332149 - DNA, 3786 bp, Pseudomonas aeruginosa
atggatctcaacttcgaggagacctctggccgtgtgaattatctgccgcgcagcgcgctgcgcgagcaaggcacgatggttcctgcaaacatggccagcgctatcggttctgcgcttgaccgcctggtccagcgtcatggtgaccttgatgcattcgttgctcggcagcttggctttgattcgtctgctgatctcgatggtcggctgtacgcggagcaggtagacgcggttgcgctggccctggacgctttctcgcgtgaccgtaacatggtgctcggcgacctgaccggtatcggcaaggggcgtgttctggcgagcgtgctgcgctacgcctacctcaacgatatgccgacggtcttcatcaccaaggatcagacgctctacaactccatggcgcgcgagatggccgtgcttgggatgagcgagttggtcgacagaagccgcatgctgatcacgaccactggggttggcatcgagaatgatcaaggtgagcagatgttccccggccgcagcggggatgagctcacccaggtctacgaatctggcgcgcttcctgcgggtatccgcgtggtgttcacctgccactcccagctgatgacaccggccgacgcgccgcgggtggagtggctgcgtgcaatcgctcacgacgcgcttgtgcttgttgatgaatcgcacctctctgcaggcgtcgacagcctttgcgggcagaacctgcgcgctatccgcgatgcagcccgccacacgctgttcagctccgcgacttccgccaaggaagggaagaacctgagcctgtatgccggcaccgatctgtcgctgttgggtagttcccatcacatcgaagagatcctgcgtaaaggcggggcggcggcgatggaagcggtgccgatgatgctggcccaggaggggcagtacatccgtcgcgaacacgacatgtcgcgtgccgagtatcgcgctccggaagtaccccaggagtatgtgcctgccattcgccagaacatggatgccctgtccgcagcgctccgtgcgctgcttgagcttcaggttgtagtgacgggttacacccaggacatcaaccagaatgactacttcgtgcgtcagcgcgaagctcaggagcgccgccgccgcggtcgcgagcagatggggctgagcagcatgcatttcagctccacgttgcaccatttcagccagcaagccctcctggcggtgcatgcggacttctatgccgacctggcaattcaatctgcccgagagggcaacaagcctacgctcgtcctgcagagcacgatggagtccatcctggccgaagtcgtcaaggttctggtcgacaacaacgtgcagcccgacggggctgaagtggagatgagcttcgccagtgtgctccgccgcatggccaagaagatcaccgagatcaacgttgcatacggtggtggcaatcatgcgttcaacctgcaagagccccgtgtgaatctgcagggccgcgggcttcccgaacagatgcagatcctgcttgccggtcgccacctggagaccaacgtgaatgttcgaggtgtcctgcaggagtttgaagctgctctggcgcgcatcccgaacgagatccctgtgtcgccgatcgattacatctgcgacaagctgcgtgctgccggatacgagatgggcgaattgaccggccgacgctggaaagtcaaccaggtgcgtccgggcgtttatcaggttcagcgccgccgggattcttcgaagcgcgatcgccagcgcgtgatgaacgcgttcaacggcggcgagacgaccgggatcatcatcaataaggccggggcaaccggtattgatctgcatgccgaccatcgctttgctgaccagcgcccgcgcgacatgattgttctgcaggccgacgacgacatctatgtcttccagcaatcgttggggcgcgttttccgggcgaacatggtcgtgccgccgcgctataccctgccgggctctgcagtccctgtagcagtgcgctcgatggcaatcatgcgtcgtcggttgagcaacatgatgtcgctgacccgcggctcgcgtgatgccgaggtcggcggtggtatgccggacctcttcaactgggtgggctgcgaagcggccatgagctatctgcaggacaaccagggcgtggccgacgtgatcggcatcaatcttggggttgaggccgcgaagctgcaggatcaaggcggcgataccggtttggctgcccgcgtcaccgcgatgggtttgctgctgccctgcgatgttcaggacgccatgatggatggtctgattcgggcgtacgagagcaagctggaggatctggagcgccgcgggatcaacccattccgcagccgccacctggatatcaaggcgcgcgtggtgaacgaagtcgttctccacccggctaccggcgactctgtgttcgagggggctgtctacctgaaagagttggcctacaacgaagaactgccgccgctcacgcctgagaccgtgaacaccatgatcatcgctggtcgagaggccctgagcttggagcacggagccacccggaactggtctcgcttcccgctggccgaggtcatgcctgaggtcacccagcgcatggaaacgcgcatgaacaacctgcgcgacctgttcgccgatcgcggggacggggagaccattgaggatctcgcgaacgctcgccacgagtcattcaccagtcgtgcggcccgtgactacatggggcttcgttcgctggctggacgcatcaagctgggtgcacatctgagcttgcgactcgattcggacgctgcgatcgatttccacatcgtcggaattgagcctcctacctgggcgcaggacatgcacagcccgtatgaatggcgcctgatgttgatcagcaaggaccagaacatgcgtcaggcgcgggttcccttgagcctgctgctcaatgaggcgcgcgaagtgcagagagcggcgttcctggctgagcctgacgccgacccgcaagagttcgttgtcggctgggaatctctggccgcagcaatcagcgatcctgcccgtgatctcattgacgaccagggacagatccagcctgaggcactggctgagtacgagaacctgccacgcggcagcatcgagatgcggcgccatgttctctctgggaacctgctgaaagccatcatgatggccggtgagttgcacaagggactgccggccacctacacgctggccaacggtgcgcgtgagtttggcgtggtgatgccgtcgaatttcgacgagatcaagttgctgcggatgccgctgaccatgaccgccaccgatgatgttcaggactacctggcccaccggttgcagtcccatgtgcgtgtcagcgtctacatgaatctcaaggacgtaaatctgccgggtgtcccgagcaaggatgccgaacaggctcggacagatctgaacagcaactactacctggaggcaacgcgcgggagagggggagccgaggtgaagatcgtggttccgcgcgccaaagggcgctccggctggttggtagcagatgagggtatccgtgagctgacccaaggacgtgaatgggttcgggtttccaacgacctcgcgatgacctttacggtgcgcgacggccagttccctgccgagttgcgagctgtcgttgaccgcttgctggaggtgggcgtgacattccgcaccccgagcaccgatagccgggcccgcgagtgggtattggagcgcgccgcggcccaggagcaggcgcggcgcatcgacaaccagtttgatgggagggctctggcatga

SEQ ID NO: 332150 - DNA, 504 bp, Pseudomonas aeruginosa
atggccaagaagacgaagttgttctggttgctgccagtgtttcagaaccaggaaatgctcctgacgttcggcctggtgctcaacgagacggagcacaacgagttcatggagcgcccgagctgggggcggtggaaggagctgctgcagcgggatctggcggcgcagctggagcgcgcgctgtcgcagggcctgatgaggcccagcgatctggaggagttcgcggcgcagagcctcgggcggagcagcctggcgttcatgccgggcagccagatgacgccggcgatgctggccgagctcctgctggctcgcgacctgtcgccggagagcccggcggcgttgatcgagagttggctgtacgcggcgatgaacggggactcggcgcagatggcgcagatcgtggaagccgcgctggaacgctacccgcaggacgagatggacatcgagaagctgaccagcctgtcgccggtggaacgcctgcagcggctggaggcggcgatgagctga

SEQ ID NO: 332151 - DNA, 675 bp, Pseudomonas aeruginosa
gtgccgatccggcgggagagtggcatcaacaaacagaaccaggcgatggctatcgcccttggaacttccccagacagcagaaatcaaggggaaccccggattctctgccaagaattgatttgcactcgccatgaggcgatcgcgcgacgcgccgagcaagaaaaggaccgcctgggagtcttcaggcatccgattgaggacttcgcggaacacatccaaccaaggcgacatgataatggcggcagacggccccatttcctcgatccgggcaaactcagcggcgtcgggcatagagggatagccaccctgcagaacaggacggtcatcgccggcatggatagcgtctacaaattgctcgacggccgacttggccggtacgggagtcgctgcaggctgggactcggcaggcgccggcgcgggatcttcgacttgctgctcgacttggacctcggcgacaacctcttcagccggctgagaagcaacagccgccgccggggcagccgcaacaggaacatcatcagcgaaacccggcagatcgaaatcttcgttcgccacatcgagcgcttcctgggcttccagctccaaggcgcgctcggaccaactcttgtagcgttcgacagcggccgccttcgcggcttcgctgaatgtgccatccgggcccgggctcaccaatag

SEQ ID NO: 332152 - DNA, 978 bp, Pseudomonas aeruginosa
atgcggatcaaacaacttctagtcgcaaccatattcgcgtcggtgcccctctttgcgccggtgaaggcttacgccatgacggacactgcggctctcctggcgattctccagcaggccatcatgcagctcctgcagcagcagatcctcacctcaacaactgaggaaggcctgggcaatgtcgaagaggccgtcaaatcgaccgaggagaccattaaggtcgagtccgaggcaaacgccagggccatcatgaacggccaggtcgacatctataaccagcagaaccaaaaggatcagcaggcgtccaccttctgccaggaagatcaggttctcgcgacgcaaatcggcaaagctgtcactcagaagacgtacagccgacaaacgaacatgtacaacaagtacaactcggccgaggccatccgcgagcccgctaaattcactgcccgtcacaaccgccaggtgaaggaaaacatcactccgtcctgcgacccgcggatgctccccccggtaggcaagaaagacctggacaacggctccacccccatgagctgcactgagactcaaatcgagttggcaaccgcagtcgccagtggccgcaagccagcccctcagcctcctgagtcaatcaagaacaccgatgtcggcgaagttctgcagcaggagatcgacacttacaacttccgcatgtctgccgtagaaggggccattggttcctcgatcagcgaggagatggatgcgcagatcacggcctaccagcgcctgttcgcctctcccaccatcgaagagatcaacgccatgtccggcaccgggggcatctcgcgcgacgccctggtccagcagcagatacagaaccagctgctcctgaacatcttcaaggaaatggtcgagacccgccgcctcctggcaatccaggtggcacagcgtgaagaagatcaccgcaagcagatcggcgctctcatcagcaactctggccggcagtaa

SEQ ID NO: 332153 - DNA, 612 bp, Pseudomonas aeruginosa
atgagcaactcgaacgtaaatgaggcaaccgctaacgcgccctcccccgccaaaccgaaatccaagaccctcaaggctctcgggtggatcagcgggttcactcctaccaagatggcagcacaagaagtggcatccatggcgtcggtttcgggctgggcgctgaaaaacttcaagggcatgctgagcttcaatcggacccaggccaaagaagacctgaagattgcgtcaaccgatccggagcgcttctgggacgagctcatcaccacagccaagatcaccgaagagtcggtacgggtccgctacaccctcgcctactggttcagctatgtcctgttcatgggcctggcaataggcatagggatggtggcagccaactacaccatccccatggccctcatcggcaacatcatgctgctcaacgtcctgctgatggtctacatcaccaatctccacaagttgtacaccgctcgtgagcagcgtgtggtcaccatcccagcgttcgtgaaaatcatgctgaagcagcccgccctgctgctgccgatcccgctcccgaaaaactacaagctgcgtgaagggcgggcgcctgccacgactgaaggagatccggcatga

SEQ ID NO: 332154 - DNA, 2202 bp, Pseudomonas aeruginosa
atgaactcgttttctaccctggtcctgctctggctcttcggctcatggatgttcgacccgtccgagatcgccggcatggccggactccgaaccaccgaggtcacccccctcacaatcttcgccagctacttctccatcgtcggcctgaccggcttcggcattctggcgtcctgggcaatgttcctgggcatcttccggctccgccagaacggtaacttcttcggcgcccgagacggcaatgaagcgttcttctacccgcttcgagtggtggtagccctgactctctgcgccccagtgatcccggtatcgagcgccggcggccaggctatcgtgctcacgcctggccaccacctcatagcgagtatcgccaagagcggcagcggatggggcgatgatgcccagactcaaagcttcaagctcatgcacacctacaacctgttcaatgagcctcgatacgaaatttcagtgaacaagccagaagccaaggccatgatcggcaactggctgaccctggccaccacagcaaccggatactacgtccacaagaacccccaggatcgcctccctggcatcagcgctaccgagctggccacgcgcctcgcggaaggcgcctggcgccgtcagtacaccgacagcggagcacctggttaccatggcccatccagtgccacggatccgttcatcaacgagatcctgaaccataccgctatcccgctgatcccccccaccgacgccattgctgccgctatcaaacacaccgataccagcattgaggaagacgccggcgaaggcaccgttggtggcgagatggcttcggagaacttcctctgcaagtggggcggaacctcaggcttcgccgcctcaattgtttgctctgatgagcagatggcactgcgtgtaaccaacgacaagtccatctctcaaggactcgccgcggcacagcgtcagatgtggcaacgcctcgtacaaacgcagctcagccggcacctgggggtcaagaacaaccagagcgccacggaggaggcggccctcgcggccgcagcgcaaacctatctgcagaaggaagtggagtggtacaccgctaccgcgagaaacgtcatcaagcagacgatcgcctccaacctgctagccgagtcggaacaattcttcgcctcgctggaggaatggggctggatgatgggtggcaccttcgtgcttcgcgcagcgaacgacttcacccgggcgcagagttacgcctctgaaggcacgtccaagctttaccccaccagtagcctcgctgatctgaccgtcggcgacgatctcacaaaactgaccatgaacaaggtcgagcgcgaactggaggacaagggcgactctacagacctgatcgatctcctgggcctggacatcctcggcaaagatccatccgaggccaacctctatacggtctcggcgttcggccgagagctcgcaggcactggcctgatgttcatcagcggcagcgggctctcctggctcgcaagcaaggcgaccaagggcaacggtggcatgaccaaggccttgttcatgatcggcgttgtcttgctgatcgccggcgccatgattggctacgtcctgccggtcgtattcgccatcttcggcctcatgggcgtcatcagctggctgacctttgtcgcctctgcgttcttcggggtaaccctatggggggccgcccaggcagcgccaaagggcgaagagcacacgtcccaaatggcaggcaagggttggaacacgctcatcttcatcggcttctacccagcgctggccgtgggtggcctggccgctgcagtgaccatcaccagcatcggcctgccgatcgtcaacaccatgatggcaggcctgtggggattgatggacaacggcgccgcagatctgagccagccctttgatgcgatcgcaggtctgctcattggctcggtcatgatggttctgctcacctgcatgctgttctggtcggtgtgcatgacctctgcatccctgatcaccaacttcccacgcaccgtgctgaacatgatctcgttctccgagcctggtctgaacccgtacgaaaacacagcgcaaggcgttatgggcggtgtcagcagtatggtgaaggcaccgctgtcgatcgcaacccagtcgctaattcgccgagtagtgagccctggcccatctcctcggcagcctccagagggtggcggctga

SEQ ID NO: 332155 - DNA, 129 bp, Pseudomonas aeruginosa
atgcgcaagctcttgcacgacgcagccgctatcgcggctatcctggccctggccttggccatctacaaccaagtgcatccatccaacacgccagaacataccccggcaacgctttacgccaggcgctga

SEQ ID NO: 332156 - DNA, 438 bp, Pseudomonas aeruginosa
atgaaaaagatgaagctgattgcgctggtaggggctctggtcgtgtctgtcgccgctgtgctgggttgcaccggtcagaaaaccaacgaggtctggcctgagaagtgggatgccgaggctaccgcttacttcaatgcgaatgtgcctccgctgaagaatctgcctggcaaggtctaccacttccaggtcgtgaagtacgagaaagggaagggcgagttctttgccaattcgctctacatcgatggcaagctcgttgaaaacgatctgccgaacgccagccacaaagtgggcggtgtctctgccggtcagctcgaaggcgtgcacatagtctttactgcagatgagggttacaaggtggctaccaagtacgagtttgctgactcgatacacaaggccgtcgcaaacactctcccagttttctttaaggactatctgtaa

SEQ ID NO: 332157 - DNA, 666 bp, Pseudomonas aeruginosa
atgagtcagcgaagccgagaggtcctggtcaacatcttgtgtggttcgatgtccggcatgcgtccggctaccgagcaggagcgcgagcagtatcagcgcaacacgcaaacgaattttgacctgctggttgtaggtaatacgccagcgctgcaggatgcgcatgtgtcgcgagctgggcatgcgggcgctttcgattttgatcgagtcaagcgttacgaatctgcttggcacgagatgaaagggcgtgaccttcaaggtggcacgtcgctcagcgagttgtacccaggtcgtgcagtcagtgatccgttcgttgcgaaagctgttgatgttattcgccagcatgctccgcagtacgccggcaagctgatgctccacggttcggcgtttccttcgatggccatcgacatggcctcggactacatcgatcgagcgaccttcgatgacaagacgctttcggtcgaggcggctaagaacattcagatgttcctgaccgccatgagtgtgagcaatgagcaggagcatgtgcgcgatttcgtggcatcgtctccgactcagctgcgtgagatgcgatccgcattggatcgcgagttttcagcctttgagtcatctacgattcaaacgctggtggaagaaatcgatctgtctcagactcccttgccaggctag

SEQ ID NO: 332158 - DNA, 2160 bp, Pseudomonas aeruginosa
atgtcgacggtcgttctctgtgaaaagccggatcagtccaaggctcatgcctcgcttttcggcatcgctgaaagcggcagagggtattacaaggccaagaacggctgggtattcacccattcgatcggtcacatggttgaaatgcttgagccgagtaagctggatccgcgctgggataaatggtccctcgaagacctgcctatcattcctcagtcttggaaggtcgcggctgtcagcggcaaggcggaccaactgcgcactgtgctcggtttcttgaaaacggccgatgagatcatcatcgctaccgactgcgggcgagaaggcgagctgatcgggcgggagctgattgagctatccgggaaccgcaaacaccggcttatgcggttctggtcgtctgccctggacgaagccagcctccgtaacgcctggaaagcactcaaggacggacgcgatttcgatacgctctacgcggccgcgctgattcgtcagcggttcgactacatgtgggggatgactaacagccgcggcgcgacgcttacgcttgcaccgcccaaggtagtctttccagtcgggcgagttcagactccggtgcttaacctggtggtgatgcgacacctggccatcgtcaactttaccccgaagattttcttcaccttagctgcagacgtttcgacagctgttggcaatctgacgatgacctttgcgcccaaaggtgacgaacaccgtttatgggaaaagtccaaggctgatgctttggcagcagcagtgaacggaacccgaggcccactggtggtcaagtcggccgaccagaaggagtcccctccgaaattcccaagtctttctgatcttcagaaggactgcagtaggcgttggaaatggacgctcgatcagacgctggaagtctgccaggcgctgtacgacgccaagtatgtctcctatccccgcacctcctgcaacattatgccggaggagcagattcctgatgtccctgggatcttgtcggccctggagtcggccggctgggcaccttccttggcggtctgtggcagcgcgcagccggtgttcagaaaggatcgcatcaagccggaggctgagattcaaaaggatttcgatcaccacgccattctgcccaccgcatcagtaccgagcgggcttgcgggcgacgaaaagaagctctatcaactcatcgtgctgtactacatgcgcgcttttgcgccggactatgagttcaaccaggtcgacgtgaccatgcctgcaggcggcattctcctgaaagccaccggcatcacgccgttgaagcaaggctttaaagcgcttgaggcgaagccagaagaggcagatgacgacgagcctgttgagaagatcgatgggaagcaaaaactacccccgcttaccgatggcatggaggctttggtcgataaggtcgatgtgaagcaaggtcaaacccaggcgcctccttactacactgaaggtacgctgctggaagacatgatcagcgtccacaagttcgtgaccaaccaggatcagcgagctcgcctgaaggaaacgtccggtcttgggaccgaagcgactcgcgcatccatcatcaaagagttgcgcaaccgaaaactgatcgtcccggggccggggaaaggcaagatcgattgttccgacaatgcgatcatgcttatccagtctctgccggatatcttgcgtgatccagggcaaaccgccatctgggaagattacatggatcacgtacggcataagcgcatcaccttcgaggccgccatgaaggctgccgaagatgcagtgcgcaaatgcgctgcctattttcagcagcgtggggtgaatcaggagcgggcagaagcatccaagccgatcttggagttcaacgggcacgcggccaattgcccggcctgcgcgaagcctatggcctacatcaagaccggccgattcggcccgtactggggctgcacggacagagatgcttgcaagacaagccttcgagctgctgctgatggaaagcccattccgaaagcagaggtcgttaaaggcgacatctgtcccaagtgccagaagagccatcttgtgatccgccaaggagcgaagggcccgttttgggcttgctcgggattcccgaagtgcaagcacacggtgaacatcgaaaacccggcgtaa

SEQ ID NO: 332159 - DNA, 1008 bp, Pseudomonas aeruginosa
atgccaaaagtaacaaggcgcctgggggttgatcgggcagctgaggctgtcgtgcctgatgcgcatctgccgccaacgcatctccagggtgttcgagctccggataagattccagaggcaaatcttgaagtgacgcttgaggatatcgtggcacagcaagaagcttcgtctgcgatccctgtcgcgccagtggcgccggtcgcggtcgaagcagttgatcctgcgttcgaaatcaagaagatcccagtagggatgattgacgtttccccataccagccgcggcttgttatcagtgaggaggctctcggtcgcttggccgatgcaatccaggcggcaggaggcttgcgtcagccaattcttgtaaggcccaaagctggcggccggtacgagttggtcggcggcgaacggcgttggagggctcatcagctccttcattggtcggatatcgaggcgcgcatccgggagatgtcggatgaggaggctgagatcaatgccgtggctgacaaccagggtgatgaggatctgtcggatttcgagctggctaaggcgtacagcaagatcctggataaagggcttgagccttctatgagcgcccttgctcggcgcgtcggcgttaaccagtcgacgatcagtcgctgccttggttatttgaagctgccgcaaagtgttcaggcgctactggagaaaaagccggacttgattggcacgaagcaggtgctcaagttcgtagagctttcgcaggctcacgaggaagttgtgcttgaggcggttgccggcattggcgagggccgatttacccaggagggcgcagtacggtgggttcaggccaccattagcggtggtcgaggcgctggaaaggagagtcggacgttgttttctaaagggaaaccacttggaagcattaaggtagctgggagtaaggtcgagctttcgtgtgtgaaaggagtcgaccctgctaagctcgccgagttggtttccagttacttggagacgatcgagctggactaa

SEQ ID NO: 332160 - DNA, 1113 bp, Pseudomonas aeruginosa
atggccgatgctcaaacgcaagaaagctatccgtttaccgatttcgattccctttacctccctccgcagtttgcagctgatgccctgggcgtcagtctgcagacgctgaaggctgcagagcctgacctgggcgttgatattcggcgtgtgctgcgtggtactgtttccgcccgggtttacacccctgcggatatcttcaagatcgcggcgcttcgtcgggagaaaggtctgaccaagaatctctccaggccgattactgtgtcgacttttgttcaaaagggcggcactggtaaaacaacctgctctgtgaatctggcgctctcctttgcttttgcgggctaccgcactctcctcattgataacgatccccaggccgatgcgtccagcatgctcgggtacgatcctgatctgacccccgctgagctcgaagaggtgggcgtgcctgctgaccgcgctatcgatggccactttggcaatctcttgggagtcagcaacatgttccctccccttccgctagataaagtgatcaagaagcccttcggtgaatacggtcctcatctgattccggctgaggaatcgcttgatgacttggatgttgcgctcggagccgctaacaattccgacttccgttacgcctcccacatcgtgaaggctcgcgcgggtcagttgccggcctgcgactttagcggctatgacgtgatcatcttcgacaatgcgccatccgggtcgttgctgactcgcaacagtatggttgcaagtgacttcctggtttgccccatccgaatggataagttctctttcagggcgcttactcgccttgccggtaagctggccgctttccaggaagacttccagcgatcgccagaaatcgtcgcgatcccgacgatgttcatcaagaatcgcccgaggatcatgaccaacctggcgcgactctccgagctctttcctgggaaagtcacggacagcaagcttttcttctcggaagactattccaaggcgcttgaggatggcgtgcctatcctggcgtggaaagctggttcggataactcgcttggggcgatgcgtcaggttttcgctgaggtgttgcagcggattcgcgaaaccctccattga

SEQ ID NO: 332161 - DNA, 891 bp, Pseudomonas aeruginosa
atgactgattcagctagggccaacaagagccttcacgataccgacgatgatctgccagcgatcgacatggtgatcgatggtgtgcccatcaatccccaggatcttctgggcgacgatcttggcgacgactacccaagcacctggaatcgtgtgattggccagtcaaatgccctggtcacatcgtcctatcacctatcgctttctgagattcgacttcttcgtctctgcatgtcggctatcgactccaggcgccctctgcggccgaaggtgtttgtgattcgggcctctgattacgcggagactttcaacgttaccctcgatgccgcctatctcgcgttgcgcgacgcgagcaataccctgttcgatcgtgagatacggatcggtacgaacaagagcggccggagaatccggtgggtcagtgaggtcaagtatcaccagggtatgggtgaggtagaagttcacttcacagaccaggtaatgcctcaactcaccgcgcttgagcgccagtacacggcttatcgtgctggcgagatcgttaatctcaacagcgtgtacagcgtcaggatctatgagtggctctgccagtttcgctccactggttggatgaaaatcactgtgcaggagttgcgtgatcgtctccagctccaggagacctacagtcagttcagagatttgcgccggcgcgtgattgagcatgccgtggaggagatcaaccgcaccgctgatctcgacgtgaaggtcacctaccagaagaaggggcgctcggtcgaaatgatctgcttcacgttctccgttaagccgcaggtgcagcagccgctcgatctggagccttcgcttgaggatattcatgcagacttgcctgcagcgcaggccgctggcgtcagtcgctaa

SEQ ID NO: 332162 - DNA, 852 bp, Pseudomonas aeruginosa
atgcgaaagcccgaaaccgcttcccagcaaagtgcagcgcctgcgcctctctgggcccaaaccgatgacgacatctccgccttgctgctgcagggtgccaatgccggtgtacaggacatcccggcacctgcagagcagctagaagtgatcgacgatgcaccggttgcccccgcagctgaagaagcactttttgaagcgggtggcgccccgctttcggatgaagtggtcgagcaggtgttcgaagccggcggcgttgttgatgaaatggcggtgagccagtcagctcaagtccagcgcgcagagtctgaagcgcgtaagcgtgtagagaagctcaaggccttgttggcagaggcgttctgggatgatgctcaggcgcttctgcttcgcccggagtccaagggtggtcttcgtgcagtgttcgcatcttctggtgacgaaatcaccttcaagagcaagggcgggatgctccgctcaagcgtggtgaccatgaacattgcgacaggaaatctctcgtgcaagatgcgcggcacctcgatgaatgaagtggccgctgcttttattgagtgcggtaaggctgccggttggtctcagatgtggttcaacggttcgcctgaatttatgcagatcgtcaccgcgctggcgaaagccgaaggcatccaggtggtgagcaagagtgacatctcgaaactcaagaagcatgccgagccatcgttgctcagcgggattaccgacggacttacttcgttcttccgccgcggtggtgaggcttctgcgccacgccaagagccttctgtccaacaagtccctgagcctgacgatctctctgacggtccaggtctctataaccggtag

SEQ ID NO: 332163 - DNA, 2991 bp, Pseudomonas aeruginosa
atgacccttttctactcgctgaatgagctcttcgggaagttcagctcttcccgtcttccgattatctcggtggtagatccccgcacgatccagctgcaggctgggctggggtatatgagcgggctaaggatgtcgggcgcttaccgcatgttcggcaatgctgagcgcggagcggcgttgaagtcgctctttactctgctatcaagtcagcttcagcagccgggctgtcagattcagtgggtgaccgaggttaaccctgaccaggcgaaacaagacctccacctccttaccgatgtttcgcgcgaaacatggcggcgtttgaacgtggacatggccacggtagaggccctgatcacctctcgtgaggatatgctcgccaagaaggcggtaagggaaaacaacatcgcgacggttacaacgtccatgcaatcactgggtgatcccaagcaggttgcgctggacgcccagggcgctcaacgcctgcttggcggcctgccgcgaagcctgagtgcgtacacgcagatcctgggcagcaagatgcagacgctataccagcgtcatcacagcaatacggacgcctttgcaaaggccatgcgatcccaggatgtgacccagatctgcgagccgatcgaaagcgacgcgttgattcgagaaatccggcgcctgtaccttccggacgccacgccggccaattgggtccctgcggtgcagggcgatcgccgctacttcaacgtcaacagtgctgccgacgaccatacccgcctcccccacatccgcgatcaaatactgcccgagcctttaaccgtttacgacgatggcgttgtgcggataggcaaccgcggcggccgcttcttcgcggttgcctacatgtatgtccatccgcttacctggctcgactcggaccagctggttaacacgatgccgcgtgatttccactggtggacatcgatgtgcttcctttcgggggcggagaagtggcgcaactacgtcaatacccataagggcgtcgcccagtccgtgaagatcctgtcgagccgtaacgcggatatctccagtcacgcagaggctcttctggaaattgcgaagaccgaaaacctttgcggtttccggatgcaggtgtgcacagaggcgaagacccaagagcaggcccgccaccagatctacaccctgattagccagctgcaggcatggggcggcagccagtggcggcaggacgcagatgatcccgacgagttgctcaaacacgctgttcctggttgtgatcgcgcaacaacctatgcggctacgacattcgctgtccccgtcaaggatgcaatgatcgccctgcccttctctcgaccaggttcgatctggcagcggcacatgcagggtgcgctgttgatgctcacagaagcgaagcgcctatacccgttcaagcatcaggcagccgggatccaaaaattcgtttccgacgtgcttatcgcacccatgggcggcggtaagtctgtgctcctccaggccattagggccgcttacatcgaggcatacgcgtcagacgatctgctgccgcggatggttacgctcgacatcggtccctcctccagtggcgtgatccttctcttggaatcgatcctgcccaaagagcatcagtggcaggtcagctatcgtcggatcaccgagtcgcccgactgttgcatgaaccccttcgatactcagcttggtgtctggcatcccaccacggtggagcggatgttcctgacgaactttctcactcagttgttcacctcggccggtaaagaggctcctccggaaggtgttacgaccatcgtgccgatgctgatcgagaacgcctacaagctgtacctgtccgatacgagctcgcggctgaaggtgtatacgccaggcctctcaggttatgaagagatcgatgagatcgtcacgcgcgagcgctggaatgacgcaggtgatatgagctggaaagccttgacgatgaagcttttccgtcagcgcaagatgatcctcgcagagcttgcgcaatggcgcgccatgccttcgataccagacctcgctgacgtgctcgcctccagccaggagatcaacgatttctatggctcgcagcaggtgccaggcttgggcatttccctggtccagtacctgaaaagcgtgctgcagagctggacgcggcagcagattttcagtggcccaaccactttcaagacgaacgcccgggtgttggcgttgaacctggaagacgtggtgaagggaggcggggtttccggcgagcagcagggtgcgctgatcatgctgctcgcgcggcatgcgaccacgcgcaagtggtggatcaacaacgatgtcctcgacgagttggtatgcgatccggatgtaaaagaattccatcgtcgggtgatggatcgtgagaagagcatgccctctcgattggacgttgacgaatatcatcgaaccaagcccttccctgctgtcagggcacagtttgcgcaggatcgccgcgagatccgtaagttcaacatccattacggaatggcttctcagagtgatgaggacttcggtcctgatgatattgagttagcgagttcgatctttttcctgggttcaccaggcgagcaaggcatcgttcggtgtcagaagcgctttggcttaccaccttctgcagtcgacgcccttcggagcaaggttcgaggggcagactccgaaggcgcgcacatgctgctgatcgccgaaacctccaaagggcggctgatccagtatctgacctacccgcttccgagcatgtacctttgggccttctcatcgacgccgaatgacgtttcagtgcgtcgtaaggtctcgctcgaactgggctacctctcggcactgaagatcctggtcaagctctttcctggaggttcgatcgagaagcgaatcgatgaactgaagcaagtccgcccggacctgccgttggacggggttgtgaatcttctggtgcaggagatcgttgaggccgcgaaggcctga

SEQ ID NO: 332164 - DNA, 213 bp, Pseudomonas aeruginosa
atggctgttgcttcggaaatcgcccctacagcggggcttgaacgagcgatgagggagtggatttcggctacctcgctgcaggccaactttctgtcgaaggtaaaaggcatgcgcgatcatcagctgctcctgcgtttcaatgcgctcacaaacgagccggcagatgtggcgctcgccaagacagagcagatcgtccaggaggtggagggatga

SEQ ID NO: 332165 - DNA, 1167 bp, Pseudomonas aeruginosa
atgccaatccctgcgctgggtgtcgttatcctggatgacaaccgctatcccgcgacctcggctgggtacgcagtgaccgccgaaggggggcgccgcatcaatcggctttctgatctcgcctcaggtgtcgtttggtacaccagcgtgggctacaaagagttcaagagcggccagctttacaagcagtcgaatctgcgcggcgaccagctgctccggtgcagcatgtccagcatcattcacgagatcgggctgcagtacgcccctatcccggatcaggcgtccgcggtgttccagatctttcaagagattgcgcgctacctcgaaggtaatctcggctggaacggaaaggttttcggtcggcttgactggtatctgaacaactttctgggcgtggccagtcgccagcctgcgggctctcccttgattcttgctgcgcgcaacgcgcacgagtacatgacgcctgcgatggtccagtccaacccggatgcaacctctcgaacctacattgcaccgcgcatcccgtatctccaggccttaatggagttgcctgtacctcatctgcgcgctgactggactttccaccccctctcgggtcaggcggatagcaatcgactgatggctgaaggcgggctcggttccctcttcgaagtgagcatcagcgacctcgatccggatttggcggtggttgcgccgttcgcggcacgacaatccgcagactctgatccgcgtgtctggtgcgccctgcctgaggcgatgttctacgcagatcgatccaacctggtagtccgtggtgtatggaggccaagtcgcgtagagagtctgggtgaccagctctccgggccttctacgggcggagtgcgtctcgtgcctgatcgtgactactcatactccgccgcgctggttgctgaggcccttctttacgcgcttctgggcacgacttctggcgacaagccggccactggccgggagccggttgctgcatttgtggctgcttacgatcggctgatgatgattcgtcacgcgcagaaggtttacgacgccgggtacacgcccatgtcgagcgcatgcggtgggcgcctggttgtttctctgccagcgatggcgatcgctgacctggacagcttgtgtcaggagatgggtcttgaaccgccgatgacgggttcctga

SEQ ID NO: 332166 - DNA, 1209 bp, Pseudomonas aeruginosa
atggtggataaagcagagccaaccatcggccagcttggggaaagccaatccctggaagatctcgaccgggctcaggtgccggccgaggaaggcgtgcgtaccaaacgctcctggggtggggtggcctctgcgctaggtcagaacaggccggccctggtgatcggtgcggcaatcctgctggccgttgggacctgggcgtatcgcaagaacgcggtagtgccggtcactgataccaacacggcgatcgctatcactccgccggctccggcggaagggcgcgggtcgaatgacgtgcgggtgcagggcctggagtcgaaggtcgaggaggccgccctggcggaggccgagaaaaccagtggcacttacgtgccgccgctcgcgccgctggcaccgcctgagccgccgaaggttgaccgggctccaccgccgccggttgctccggaggtgagctctgcggcgaacaaccaggcgaacaatcagcaggcgcagcgcgcccagaaagaagctgaggcgatcgagaaggccatcaccatccagctcgacgcgctttcagcgcgagtggatggagcggggaaaattgagtcgacggctgtcactcttgatcttgatggtctgagcaaatcgctgactggcgcagggcaggcagcaactgctgcaggcggcagttccgaaacccgtcttggctacccgatgggcactgtctggacggcgaccttgaaaaccggggcagacactgatcgtccaggcacggtgcaagcaatcatcgagcagggcccgttcgccgggcgcacagctctgtgcaacttcacctggcctacccgcgaatacatcaaccttgaatgcttcgctatccggctcgataaagagtcgctgcctatcaagatggtcgctgttggccctgacgaaatgccgaacctgaaggctgagtacaacggccggtatatccagcgtctcggttctcagttcctggtcgccttcccggctgcctacgcagaaggtcttggtcgcggaggcactaccgtggttaccaatggaggcaccacctccacccaagacaagttgagcggtgctgacctcgctatctatgccgcgggcaaggcgactgagccgctcatgaaagaggcccaggccatcgctggcgagatcaagccacaggccaaaatcccaccgatgcagctgatcggtctgatgctcgccgaggacatttaa

SEQ ID NO: 332167 - DNA, 1302 bp, Pseudomonas aeruginosa
atgagcggtaacgacaacttcttcgatgatctgccagtcagcacccgtcgcgaaaaaaccgatgatgctggaactgccacgccgagcggcatggacgatttcgttcttcctccttccgctgaagccctcaacgttgacgagctcctggccggccttacgccgccaccagttgagcaagtcgagcagcaggtaaatcccgcgccaacagttccgagcgaaccagcacctcaaagtgatgtgctcgacatggacctggttgagttcccggctgaaccggttacccagagcccgccatcggttacgccgtccctggagccagttcgtgacatcgatggtttcggtgagagcctgagcatttccgattctgatcccctctcgcacggatcgaatgcagacgtagcggtaggcgtcgcgactgctgctgtcgcagcagagggggaaaaggctgactcgttcttccagaagcacaaggcgaagattgttttggttgttctcctcgcggtagtaggcgggtggaactaccacaagaagcagaaagcagcggagctggaggctgcccagtccgcaatcagtcaaccggttgccccttacgaagctgctatccagcagctgcagcagggcgaccagaatatttcgcacctggatccgaatgctgcactgccgtttgacatgcaggcgccggcagacgacgttgctgctccatctgtcgacccgtttggcggggctgaagatccgttcggttcttcctcgacacccgaagtcgcacagcctgcgatcgatcctgtccagcaacagtccgaggctcagcagcaaacagctgtggcacctgttgaaacggtcgagccgccggttacccctgcagccgaacctgctccggttattgcggctccgcaggatctgcaaccagtcgtagacgaactgacggctaaggtcacttcgctagagaaagagcgtgacgactggaaagagcgtgcgctcaaggccgaagggagtggcaaacccactcaagctgcccaggcacaaaagccagccgccgctcctcggaaggagcctgtccgcactcagcaggcgcgggtcgtctcttcgcgccctgcggcgcagccggctcaacccaaagcgactgtgaccagcaagcccgaagttcaatggcttggttcattcatggtcggcaatgcctggcatgcgcacgcgatcatcgctggcagcgtgtatgaactgagcccgggccagcgcattgcaggcctgcgcgtcgatagcgtcactgccactggagtgaagatcaatggccatgaattccgttaa

SEQ ID NO: 332168 - DNA, 444 bp, Pseudomonas aeruginosa
atggccatgaattccgttaagcaagcggtcgtaaaccactactcggccctgcttggtgccgtcttccttgcgttgatgcctttgtatgccgtcgcagggatggacgatgtgctgaacggcggatcgatgggcggcggaagctctggttcgtctgcaagtgctgcgcgtatggctgctgaactcgggcggcttttcgaatcactggttctgatcttcggaatctactacgccctgaagtcggtgctcatctactcacgagttgtctcggggcgaggagctggccagcaagagaacatgggaagcgttgcctcccattttgttgcgggggtcgttgcttaccactcgcgcgcattcttcaacatggttcacaacacgattccaatgatccccgactttggccggctcgtttatgacgctgagctgatgatgggcttgatgtcctaa

SEQ ID NO: 332169 - DNA, 375 bp, Pseudomonas aeruginosa
atgaaaaagctgaaagacatgtccatcaacctgtactggaaaactcaggtcgccgccggctcgatgatgatgagcgccatggcctcggccagttcgaacccgatcaacgccaacaccagcaaccagttcggtgacagcgttagcaacgtgaatcagaacatcggcggcctgcccctgctgctgctgaacggttcgcagatcgccggcatcttctttgcctacaaggcctgggacaactggtccaaggtgcagaagggtaatgaccctgaagcaaagcccggcaagaccttcggttatggtatcgcgggcgtgggcgcttacttcctgccgtccttcctcggcatgggtggcgcgaccctgctcccgggcgtgtga

SEQ ID NO: 332170 - DNA, 657 bp, Pseudomonas aeruginosa
atggctttgctcttgggcgtaaaacgaggcaactggcgtgaagaagagattcacaacgacaaggtgtatctcgacgcccggagcaaagccgtttccagggatcactccacttgtcaggagtgcacctggcaggctgatcgcttccaggaaggtcatcacaaagatgatgaccataccaacaacgatccggccaacatcatcaccctgtgtgcatggtgccaccgctcacatcacataggcctcgcgggcgtctatgaactcggctacgccgggatatcgacagatcgatccaaaccgatgccgccacaggccttcctgaatcaggccacccgtttctatgactgggtgactgctcatggagctaacgccaagccccacttcatacagtgggcatacaacttcgaagagtacctgaccaactgcatcgcaactgctgagcgagtctttggctcgtctgagttgagcgatatggccgagatactcgcctccatgaacaacgaggagtacgccaagcgcggcgacctcattgggggcgtacgactcattcatcgtcgaatgcaagacctcaatccggcgaacgcggccgaggcacatgagcttgagcgccgcaaatactgggtttctgtcatgaaacaacgtctagggagtccagcatga

SEQ ID NO: 332171 - DNA, 483 bp, Pseudomonas aeruginosa
atgatggatcgaaaatattcgtcgttcgcagacctgtgcatgatgaccagcgcaggtcagccatgggctctcgatatgcgcacgcgatcgggtaatcccgcactgctggcgtacctggtaaacagcatctgcaatctgctggtggaatcgaatgcgatctccgacggtttcaagcgggtggaccagggactcacggttgtccagggcgacggtgcggcgcagccacttgcgcccgccccgctcgtgttgctcgccctgcgttacgccaagagcaaaatgattgatggcggccagtggcgagcagatgcacgcgaggttgtcatggcttgctgccccgaggtagccaaagccgaagtagggcagatgatcgagcccgaagctgcagctcactgggctatgcctctgatgagtgatacctggttgaagtcgccgcaagtcgatcgcgaagtggcaccggaggcagcatatgctccagcgcgatga

SEQ ID NO: 332172 - DNA, 858 bp, Pseudomonas aeruginosa
atgctccagcgcgatgactacgccggtcaggcaaatgaacaacagctgagcgaagcaaacctgcagaagtgtgtggccagcttaaagctggtcgagccgctgatgctggcttcgttgatcaggcctggcctgggcgaggacgtatccggtgaggaaatcgtcaaggcgcaatccaagctgctgttcaggacactcgatctcgctgaccggatactgaaaaatctgaatgtcgaagcgccgctcacgccaacaaaccgctacctggtagcccgggagatcgtggggctcgtagcgatgcactggcggcatggaagcgacctttcggccgcggatatggcagccctggccgaacatgcagtcgccggcggcttacagttgatggatgccttgaacgccgaaccgttcacccaaggcgaagatcaatctgagcgactgaacaatgcggtggcagcaacaaccggcatcatgctggcgatgcgcgaaaaagcgtctcttggtcaccagacagtggcgttgtgccgcgagatgaccaatcacctggccaaggtggtcggcgagcaggctgctcgcttacgggtgcagaatcacacccccgcgattaaaacgctgatccgcgtgtgctctgactactaccccatcctttgggactccgagataaccgcagcaacgaaacttttcgcgtcactgagctcagatcccgcgaaattccgctctgaagctgagcgcctgcgcacctggccactggaagctttctttaagcgtgtggaggaggcggtaaacctctgcattggcatggccgccaacatgcagcagctgctcgactctcagtccgagctcgacagcactctgaacccataa

SEQ ID NO: 332173 - DNA, 1107 bp, Pseudomonas aeruginosa
atgaacggcaatagtggcagcgatgacgccggcgcgatctcgatcatgatcaccctggcggctgtattgtttctcatcttccacttctcggatcgcattctttcagtctggcaagcgctcatagttccagtcagtcacggttgggcgtggctcgctgcaactgaccttggccagcagctgatgccgatgatgaagcgcgacccgcagatcattgccaagatccctgcctacttggaaagcctctcgccggagcaactgaaatcgctgggttacacagaggcgaagcgctatggcgactatgtgcatcggctgacgacagctattgcggggcctctcttcatttacttcgggtttcgctgtttcaagcactctcgcatggaagatcccgagatgtttcgtgtgatcaaggggattccggcgatcgtgcaaaccctgaagcgcatccccgggcgcgagtggatgaacgacatcattgatgcgagcaagcttgacctgttcaacgggaagattgcacttcaggcgccgctcacgccttggcgcatggccgagatctaccagctgttcgagcttgacgagcagaagaaaatcaaacgcttcgacacagagaaggccgcggctattttcaatcagaccctgggccaagagttcacgacggtcgaagctttggagaagggtaagtacggccgagtttggaaagcgctcatcaaccagctccccgcccaggatcgcaaagccgcctctcaggccgcaaccaagggtcacctttatgagaagaccgtgatcattggtcttatccgaatgatggggcgggtcatgatcgtcgactacggtccactcgctttccttcgctatcaggatgtcgccttctttgatgccgtcagttcttgcggccgacgcacgagcttcgtggccggctccggaatcatggggcagttccgtcatgaggttgagattttcaatgcctcgaaggggaccatgaaaccggagaaggatgcgggcggaaagtgggccgcagactggctggaagaagctctcaagactgatccctacgagcgcccctgggtcgagagtgacgacatctgggcatcctttgatccttggctgtaa

SEQ ID NO: 332174 - DNA, 2751 bp, Pseudomonas aeruginosa
atggctattgcacgcaagccgaacaatcgctatagcgaaacggccaaagagctcgactacaaccgctatatccgcgagaacctcactgccgcggagcggatgaactatgccatccaggaatacgccccgcccctgatgatgggcgccggcctcatctcgctggccgcgcctggattattcgaggtcactgcaggtgtaggcgctgctgcctatggcgcgtttgtggcgacgaagcagcctcaccaatggcctctctgtacgccgtcctacgtctgcaaggcttcaccgctgcacaagaagctgttcaaggtccagcaggcaccattggtgaaagatgccctgggggtcgttagaaaggtgaacatgctgaagacgattccagtcgtcggcagcctgcttttcctcaaggatcctaccgagatgatgggggacggcatcctctatctcggctccgatatggataacggtggcgcgcagatctggacatccatggatctgctggttcgccacattctgcttatcggcaccacaggctccggtaagactcaggccattctcggcatgatcgcgcagctgatggctcagggcagcggcgggatcttctgcgacggtaaggcggacatcaccacctggttcatgctctatacgctcgcgcgccactttggtcttgagcgtcaactgctggtgatcaactacctgacatctggtggagccaacaccaagcgctcgaacacaacgaacattttcgagatcgcctctgcagatagcctgtctgaaatgaccagctcgatgatgggcggcggttctggcggtggtaacgacgatatgtggagggggcgcgccgaagctctcttcaacgtgattatccgggctgcctgtgaagatcgcgatttgcgcggcgaaacaatcgtcgccgacgacctgcgccggcggatgacactgcagaaactgcttgagcttccgcagaacacgatctattcccagcgtgtccgtgacgaggcgcagttgttcctcaacgacctgccaggttactcggcttggcagaaggcgactcagcctcaggcgaaagagcagtgcatgggccgcatgtcggagcagctgggcttcctgcagatgcagttcacccgggtgctgtcgctgctatccggcacctacgggtacatcaccggcaccgacatctcggagatcgattggatcgacgttatcaaccagcgtcgtaccgtctacatcatgctgcctgcgttggaaaagtcgcctgagtcgctgaaacagctcggtcggatggtggttaccagcatgcgtaacgccatgcttccgatcatcggcggtggccagctgaccggcctcaagaagatcctcattgatggccggccgatcggcaaacgagtcccctacggactgttcctggacgaatatggcagctactgcgtggaaggcttcggggacgtggtagcccagattcgctccatgggcgtgttcgcttgcttcagcggccaggactgggcgtcgttcaagaagggctctgaagtggaggctgatcgagttaacgcgaacaccagtacgaaaattttcttgaaaacgtttgaccctaacaccgtgaagctcctggtagacacctgcggcaagaagcttgtgtcggttgcaggtacatggggtgaccgcccgagtggggggcgcgcggacatgcgcactggcttccagtctgttgatgcgttgcaggttcaagaagtcgatcgcgcgcgaattgaccagctggctagccaagaccctggtatggcccatatctacttcggcggtaagctctggaccaaggctaagatgttctatccagacatccagcagaacgcccaaagccaggtgaacagcttcgtacggatgcgcacgccagtgggggtgagtgggattgtcgaagacgccgagcggctcatcgccatgcgtaagcatctggacaagatccaggaggcggtgcggtcttatgccccgaccaccgaggaagccgtgatagaccttggcgatgaattccacctctggtgccaaaacgcaatggaaggcagcaaagcgagaggaggggagatcttcagtgctatgcagaaagcagcggagcagatcttcaaggaagagcgcaaatctgtacctggtctggctgttcctgaaccggcgaagaaggccgcgtcaacaaccacgccggcgattaagccagcgacaaccgcggcacaacccgcagcagcccgtcctgcaggcgatgcactcagcctgctcgaccaggcggttcgccaacaaaagccagccgctgcggaattcaatgaatcgcttctgccggacatcgctccgcctgacctggttatcgatcacgctgattcggctggccgcaccgacaagcagccagagccgctcgtgcatcctgcgaatatttcgttcagcatggatgatcacgcaccggatactgccacccaaaacatgatcgctcgcaccgcggtgagcgcggcagtgatgcaggaggtcaagcagatgcaacaaaacggtagcgatcctgattgggcgggaacgctaccggaggcgcgcctagccgcaaacactgcggttaagaacgcgaatccggaagatccacagaacgcataccccgagagcccggttcccaaaaacttttcggccaactcgcttcggggcgcgctatcagatctgaagggcaagatgaccgattcgctgaaggcaacgagccctgcagcgagcgagaaggaggagcagcaatga

SEQ ID NO: 332175 - DNA, 1074 bp, Pseudomonas aeruginosa
atgttcaagcgcaaatctcaagacaagtcgaagcccgtcaacagcctgatgctgcaagttcaggagtacgttgcctccgagggcagcaaggagatcgataccgtcatcggcgtcgatctggagggcaagcaatactccgtcatcctcaccacttccggtgacgcggccgagaacgacaagcgcaacaccctggcctcgttcgccaactcgaaatccaaccaccacgtcccggtcggcggcatgatgctgctcagcaccgtctggctccgtgagccggagaaggaaggcgccccgaccaccggtatcgctcgctggtccgagttcttcggcaacagccgcgaagagctctccatcggtaacgcgatgtatcgcgccggcaccaatgccgacggcaagggcaaggaaaccaactggggcgccctggatcgtcttggcaagccgctgaccctgaccgccgagcagttcccgggtgccgttgcggccctggccgacaaatgcgctgctgatcgctcccgcgcccgcccgatcgttcgactgctgagcgaaagcggccaggtgctggacttcaccaccatcaagcagggcactgccgaaatcgaagaagacggcgagaaagttcgccgcgccgagaacggtgcccaggtggtcgagggcatgaagaagaacacccgcctggccaaaatgctgcaggccgccgaggccggtcagggtgtcctggaaatgatcccggtgatgtccatcgagatgtccaagaagatgatgaactcgccgcgcggccacaactacgtggccctggcgaagcgcttccaggacgagaaccaggtctacgccgccgagtgctacatccgtcgcgctccgtcggacgacttcaactacatcagccacctctcggtcaccaacaaggatcgcttcgatccgctgctgctgccgtctgatcgcttcccgcagccggcctacagcgccgagttgctggcagaggtcggcgtagaccctgagaaagtgaagggcaagggtccgcaggctgagccggagcccgagcctcagtacgaaaacgcccccggcttcgataactaa

SEQ ID NO: 332176 - DNA, 1041 bp, Pseudomonas aeruginosa
atgaaaaatttcgctgttggcgccgacattggctgcaactacgccaagctgtatgccggtaaaggcgcgcagatcgcgatccgtagcaccgtgtcgaccaagcctcagatcggcgtcagcatgggtggcaatggcccagatgaaatcgtcatccagatcgaagacagcatctacgcggtcggcccgaaagtcgctgatcccatcgatactcgcttcgccagctattacacctccgatatcaacgccgcactggcgatggctgttctccttcgccaattcggtgatctgtcggatgcgtccattgacgcggtgttcggcatgccgctgaacgtgttctacaactcgcgcggcgagatcaattcgaaactcatcgaggagcgcgtcaaggcctggcggcgccctgcagctgtccagcctggcagcaaggagatgcgcctaccgaagaacggttcggtattcggcaatctgaatggcgcctccgagggcgtggccgtttatctcgactacatgatgaatgaggacggagagttccagcacgcatccgaagagctcgtggtcgtcgccgacgtaggcggtaacaccaccgatgttgctctgctggaaaatggcaacctcctcttcaacggaacctcgaattccttcgaagcaggcgctctgcatctctacgagcgcgtcgccaccagtgcacgggatctcatgggcctgatgcgcaccccgccgctccatgctgtggagaaggcaattcgtgaagagggcggctggctcaacatcggcaacaacaaggcgaacatccgcgacatcgttgctgccgagcgccgcgccctggtcaacgagatcgttcctcgcatcgagaagatcgtcactaagcgcgtcgacgagctcggcaccattctgttcgccggcggcgcagcgaagctcctggaggaggacctgcgccatgtgcaggtaggcaacgccaaggttgtcgttgtcgaagatccccagttcgccaatgcgcgcggctactacaagctggctcgccacctcgctgctcaggagtaa

SEQ ID NO: 332177 - DNA, 654 bp, Pseudomonas aeruginosa
atgcgtgatgtcaacgacgaccagctggtcggcagcattgttttttcgaaccgggtgctcttgtacatcctgggcatttgcgtggtgatcattgcggcgctggccacaacgaatttcctgacgttcatgtatgcgaagaacaagatcgagagcatccagcgggaatacttcgcgaccactcacaacggctctctgttccagctaacaccgatcgatgagcccatcggcggcgaagagcgggctctgaacttcagctcggcctgcgtcatccgcatgttccagctggatttcgtcaactacatccggcagcagaacgaggcacagcttcgctgcttcaccgacgatggctacaagacctatctgaatgcgttcgaacgtgccggactgaccgctcaactcaaagatccccgtatccgcctcgtgctctccgccacgccgggcccgggcgtgttcctgaacaaggatgtaaaggtcttcagcggagtagcccgccagacttacaccatccagcaccccatcgagatcatcttcaacggcaacgtgaatcagccccgccgcggattgattgaggtcgatctcctaagagtccagcaggaaagtcgtcctgacggtctcgctgttcatgcaatccgagtgaaggtctccaagtcatga

SEQ ID NO: 332178 - DNA, 1605 bp, Pseudomonas aeruginosa
atgagaaaggtcaccctcatcccaagcatcctgttgctttctctcttctctctgcaggcagctgcagaacctgcagagcaggacgtgcggtccagcgatcccctggtgaacacgctcctgaagcgcaagtacccactcaccatcgagcaacaagccgtcatcgagcagtacatgatcgatgatcgcaaaggtcttgccccgcagattccattgggcgcaacaagcactgaacctgagcagatcatcgacctcacagatggtggaaagaccaagagcatcacactgcagctgggatacctcacttcagtgatggtggtcggcgagaacggtgcaccatggccagttcgacgtgctcgcgcaggcgacgacagcgtggtgaacgttgatctggtagaggactccggggctgtagagatgcacccgcaaaagccctgggtcaacacgaatgtcatcctgtacctggtcgatcgcaacgagccgatcaagctctacgtgaaggtttcctccgacccctccgatggcgtgaaggacagcctgaagctgattgttgatggcgtgcccactgggagtgctccgttgctgcagccgaaccgggttgcgatcgatcaccaactcatgaacgcattggggcaatcgcctgggcggaactggaccagcctgaaggtcaaggataccgagagcgttccattcagtatcagctactggctttcccccaaccgcgaagacgcgatcatccgtctgcgcggggcctccatggtaggcccggactggttgaccgagacccgtgatgtcgacggtgttacccgcgtctatcgctaccgcgcgccgatccctctgatgatccgcacgcgagacagtgccggcattgagtaccaggtacatctcgaaaatccggcggacatccttgccgggcgcgagggatcgaggacgatgaccgtcaagcggacctcccccgagcgaccgcccatggattcggccctgcctttcgaagaaccgctgggtctcgtcggtcgtgatcgagttcaacgtatcgcccctgcaagcaatggcgctcaggagtcggtgaagacgtatgaatcgttcgacggtaagggcgttcggaccaaccgtgttcagatcgtcagcgacctcactatcaatcgcgacacagctgcgcgcctgattgaggaaactcaccgcaaccggccgatcccagttcccgcagcaagcgccgaaaaggcctccgacgttcaggtcagtgctgtagcggctgagaaacccctcgtggccaagaccgtatcgacggccggcacgactacagctgcaacagcagccaccaccgttctaccgagcgtaatggccaccgcggcgcccgctgcaaacggcgtcacgttcagcgttcgtaacggaggcctgtacgagaaccttttccgcttgacccaggaagcgaagtggaacacgcccatctgggatctgggcgagcaggacaaagttgtgcagggaggctatgtgatcaacgccccgacccctgaagaggcgatcgcgaagttcctggagccctatgccgactcctaccgcttcaacgtccaaatcagcccgctcgaaaagaaagtttggctccactaa

SEQ ID NO: 332179 - DNA, 1869 bp, Pseudomonas aeruginosa
atgaacactatcgcgaaattggtactgacaagcgtcatcggtgcggccctctcgggctgcctgcagaacatcccgaaaggggaggatggcggtaactacgccaaactgatggaggagttgaatcagctcaaggcacagagcgaggattctcagcgcaaccaacgcatccagatcaccaatggccctctgatcaccggtaaaaccatgccgctcaaacgcgcgccgtggctgtccgagcgtcgggtcaccatgaaagtcagcgctccgctgaacggccatgaggtcgtcaagatgctgcaggcccagggcctcaacatcaccagttccatgccgctggatggcttcacctatgcaggctacgggttcactagcgtggatgccgagacggccatgcgtctcatcttccctgcgatggggctcgattacgcggtagataacgaccgtcgcatcatcaccatcgtcccgatgcgcccgaagcagtggacgttgaacatcaactcgcagcgctccaccaactactcctcggcgtccttgagtggcaccctcgatgtcggtgcgtcgctggccagctctctgaactcggcttccggcgccggcggcgtcaatggtggttcaatgggggggctgacatcgagcagcacgtctaccggtgaaggcgagggcgatcgcgaaggcagttcgaaactggagtcgaaatctgacttctggaaatccatgaaggaagaactcgaatcccgagtttctgtgctggttccggttgccagcggttccgttgttcctggagtgatcaactccggcgcaggcatgcccatcaatggaatgccccctctcccggtcggtggcatggatcagatggctgcagccatgccagccgcggggggtgacatgtaccgctcgcagaagctgggtacggtaagcgtcaacccggacaccggcacaatcactgttcaagcacccaagtggctgcaggcagagatcgatgagtacatcaagggtgtcgagcgcgagttcaacaccgccatccacttcgaaggtcgcctgatcctggtgtccactaccaaggacaaatcggaaggcctggatctcacggcgttcgcctcgttcgcaaacggcgaactcggcatgatcatcaacaacaacccggccggtggcattaccatttctccgagcctgcctggcaccataggtaacccgcctgtgatgacccccggtggtagtgtaatcggtagtgccggcattggattctccaagctcaagggcaacccggcgaaccttttcgtcaactacctttcctctatcggcgacgttacggtaacccagcgccctgcactggccaccacctctggtgctcccgcagagttccgtcgtatcgaaaccgacctcttcagccaggtaagccagagcgcggtagctggtactgacagcagctcggttgccaccaccaacacccagatcccgattcgcttcggcaccctgctgcgagtgaacccgaagatcgacctggacagcggtatcatccgcacccagctgacgctgaacgtcgcggtacgctcgcaggtcaagaccatcgaccagtatctgactgacgccaacggcacaaccaaggtccccaccaccatcacgctgcctgccaacatcgactacaacggtgaggcactgctgcgcgacggtgacaccatcatcatcggcggccagatggagaccgatgaaaccaattccggttctggtgtgacgggctatgaaaaggccggtccgtttggcggcctgattggctccaccaagagccagaagcgtgtctcgacctattacttcgtgctgactgcccgtgtttatgagcgcagcagcgaacatcgagtgcctggcgcatga

SEQ ID NO: 332180 - DNA, 465 bp, Pseudomonas aeruginosa
atgagcagcgctcggcgaattgacctaacgcctggatctgtccaggcgttctggaaagagcgggagcccaagttgctctcgttcttcgagcagatggataacaaggagcactgggccctgcgtgacatcgacgcagagttcagcgccctgtacgctgaggttgctaatctcctgcaggtgtatgagcaaagtagggggttagaggagcctctggtggcagaagcggtttctcaactaaccgcagcggccgccgctcttccatgttcagcgtcatcgagattcttcgagtggattggcgagcagtccctggaactgccctatatccttctcgaacgcgcccatcagaacagcaagctagatcccaactgcagtgtcatctggcagcgagctcgaatgatcgcgcgctaccagatactcaaggacatcgtggcggagattaccggtaacggaggcattccagcgtga

SEQ ID NO: 332181 - DNA, 366 bp, Pseudomonas aeruginosa
gtgaacacctacgagtcgcttcgcctttggacgaacgatccgcttattggatctcctgctcaggagatcctgtcgatcgcagaacgccataagacgccggcgacaccaacccgggtgaggccggaagagttcgacattccattcccgtatcgctatgaccaggaggatgagcagcgagtacaactcttccggcgcatcggtgtgttgttcgcggcactggatattcactgctactggaacgacggtcgccaggtaatcggcgtggcattgtcgcccgaggatccgatcagcaaagcctggtgcgcattcaatgaggatgcgatggaggtactcctcgccttcgttctgtcaaaggacctgtcgtag

SEQ ID NO: 332182 - DNA, 1638 bp, Pseudomonas aeruginosa
atgccaaacacggttttcgttattgaagccccaggcaagatccgctctctgaggaaaattctatcggagctcaggatcaatgctcaggtcgtcgctacagggggcgctctttacgacatgccaaaggatcagctgggtctcaacccaaacgatctgacgcctgaacgctggacacctacctcccaacgcaccatcagccacctcacgaaaaagttcaaagatgcggaccagatctacgtcatgacagacgctgatcgagaaggggaactgatagcggcacaggtcaacagcgtgcttgtctcttcaggatcaaaagcgagtattcagagggtggtgacttcagcactgaacgctgacggaatatctcaggcgcttcagagaccgcgccccatcaatcgacaaacctgcgtagctgtgatggctcgacgcggtatcgatcgagcaatcggctttctttgcagcaatcgaaacgtagctgggcagatcgctgggcggatcagcagcaagatcgtccagtctgtcagccggcagcccttgccaacctgcaaagttgcgggaacacacccagatcagcccggctggcgaatctgggggaaaggttcgtcggggaaagaggcatcacttgccgccatcaacgaagcttttcgtcgactggatccggccctgatggaccacaccagagaggttttcaccaccaagccggcgccggcgatgatgacgggtgctgacgccctgatcctggttgctaaccaactcaacgtaagcctttctgaagcagagaaactgattcagacggcgtacgaaagaggcgctatcagctatccacggacggactccaggaacatctcgcctcctacgcaagtcatgctggagagcgcgatgaggaaactaggaaaacgattacgtgtttcccgactgcctccatcgacgcccagggaggccgcaggagctcacgaagcgatttacccttgtgacccccttcatttcaatgcaaatagcctggaagggctctcgcagctcgacgcagccataggtttgcttaccaggcgtgctttcgcctccctatcgcccgatgcgaaggtaaaatcgatcgaggtcgagcagtcagcgatctcatcattcttggccaagcaggggttgccagacatcaaggtgaaaatctggcgcgatatccccgacaccgccggctggctggttgtagagaaggagttcatcaagcctgtaaagcttgtgaggatccctcttgatacagcggtcatggagaggatggttgaacaaggaataggtcgaccctcgaccatcgtgggccacatcgacaaagcccttgcacggggatggatccaggagaacggtactctttccaacaaaggccaggctgttctgacgtatttgcagcagaactaccccggcctattgggcccagaagatctggaccactttttcgatggggttccatttgaacgggtttccgctgccgtctacgaagggatcaatcggctcaatctggattaccaggcgcttcgtgttcttgcgcgagaggcctctgcggatctgtcgagggagcaagctcaagacgagagtggcctccccctgtatgaaccaaccgcggacatggaagtggatgtagccggcccatag

SEQ ID NO: 332183 - DNA, 1134 bp, Pseudomonas aeruginosa
atgcccgaagagcatcccgaggtcggccacctggtggtcagcgggttgatgatcatcggtcgagcgaaccccgccattttccttctcgaaaacgtggtcccttattcgaactcggcaagtgcggcgattctccggagtcaattgcgcgacttggggtacgaggttcacgaaaaagttctgcgcggaagtgatttcaatgctctcgaaaatcgagagcggtggtgccttgttgcggttacagaagggttgcatttcagttgggacatgctgcagatcccggagaaggtcgacctgcgtttgtctgatgtcctggatgacattccgctggatgaccccctttggagcgagatgcgcggtctcaaggccaagcaggagagggacctaaaggcaggcaaggggttcgtcatgcaggtgtacgacgaagactctcagcgcgtaggcaccatgagaaaaggctatgcacgctgtgggtcgactgacccgaagttgcggcaccctacgaaccccgatttgctgcgccctttcacggtgggggagcatgctcgactgaagcaggttcccgaagagttggtggaagggctttctcgcaccgttgcacatgaggtcctgggccagagtgtcaactatgagcccttccgcgctgttggcgccgcggtcgcccaatgcattgaggaattcgcgcagtctctggagaaccgtccggccaatcgcgacgagcttgcccaggcagtggcttcggagttgctggagactgcaggtctggtactcagcgagatccgcaagcccgtgcgaggagttcgctaccaggggccaatcactgtcctggatctgggggtggccatccaggacattggcaacaacgtcggaatcatctaccgagtagatcaactcatcacgccagaggggcgcgttccgtcgctcggggatgtcgtggaggtcgtccagaaactgggcaagagaatggatgttcggtggctcaccgaccaagagttaacccctgcgccctgtgtcgatcttcaggcccgactaggagagcttgggtatccgccaatccagacgcaggcgccgcgcatggatgtggagttagagacgggtcacgttcagtccggccagagttacagctttgagtggtag

SEQ ID NO: 332184 - DNA, 1881 bp, Pseudomonas aeruginosa
atgcaaacgtctcaaatcatcccagtccatcagttgcagcccgtcccaacaccggcggccggaggtcgttttgcacgtatcgtggcccgtgctgaagcgtgcatcgagcgaatcggcgaactgatcgatcagggttatacctgctgcagcgcaacatcgttcggcaaggactcatcagtcgtcctggtgctcatgctcgaagccatccggcgccgagttgatgctggggggtacgtgccgccggctttcgtgaccaacgcgaataccggtactgaaaatccagcaatggatacatacgccgaggcgatgatcaccgagcttgaggcgtactgtgcccggcattcgctgccgatcactgtcgtcaaagtacagccttcgattacctcgtcgtttgcctacggcaccatcggccgcgggaagctccccgtgttcgctggagcatcccgaagctgctccgtggactggaagctgcgcccgcagcagaaagccatcaagcaactgctctcgacgctccagtctcctggtgagctggtgacgttcgtgggcacccgtctttccgagtcggcagcccgtgaagccaacatgcgctcacgaggcgaggaagaggcagggcggctggtcatcaacgatcatggctcctacaactgctcggtcatcgccgactgggagatggaggaggtttgggagttcctgatggcatgcgatgcgaagcgcggcggtccgtatcgaacatacgtggataacttcgactggtgcttggaactctacaaagaggcgaacgagggcgtgtgcgcgatcatcaccggcgacggcggtaataaggcagcctgcggatctcgcttcgggtgcgcaacgtgcacggtgaccggggagcgagacaagtccatggaggccatgatcgcttcggctcccgagaaacatgggcatatggaagggatcaacgctttcaggaaccatctcatcaacacccgctgggacatggggcgtagagactggattggccgcacccattccgaggccaactacatcaacgtcacagggacagcctacagcgcagaaatgcgccgcgagctgctgcgatacttgctgacgttggatgtgctggaggaggagagggcggaggagcacgatgccatgatgttccgcggcgagttggatgcaacggattctaacgaaacacttcgtgggaccaccttccaattcatcacgccaaagaacctgctttccatcgacttcgcctggtcactgagttacggcttcgatcacgccttcccggcgctgactgagtggtacgagatccgcgtcttgggcaagcgttacccgataaaggctgtcactccagtggagaagggcagcattccagaacagcgttggttcaagttcgagagttggcaaagccctgcgctggaaatggggctgcaggacgcttaccttgaggcgaccaacaaggagcgctaccctgggcgaccggcgatgcgaacgatccgtgaccgctacgcgggcaaggaacgcagcatcgtgtattacgaagaggccgatgagatggaaatcgattcggctgaagccatgtgtctcgtggatgacttcgatgaagccttttacgagctggccaaaagcctggatccgattgacagcgccaagttctacttgaacaagggtgtcgtcaaattggccagaggcaaagctgctgactacgacgagatggcgcgccgggcgcaattctggcggcgcatgcagcgcgatctaggcggaacagatctgcgctcctacatccgacaccagtcgatcagtaacgccgaacatgaagcaatccttgagtcgctgagggctgagcctgctgaggttgacgtgccaaatggcaccatggatatgttcggttga

SEQ ID NO: 332185 - DNA, 648 bp, Pseudomonas aeruginosa
atgaagggagagatcgtcgagcaaggcgacggaatgacaatcaagttcacagggatgcaactcgaccagtctgaccttgatgtttgggaaaccctgatccacatctcgcggcacaccccaaaaggcgagaagttctatttccacgccggggcagtgctgagctacctgggacgcccgcgtggtggtgatcactatcgttggctcaacgaatcgatcaatcgcatgatctccggagcagtgtcgatcacattcgatgatcgatacacctactcctccaacatgctgaaagcttggaaagatgagatcacccaggactacatcatccagctggatgagcagctcctttccctctactccctaggatggacccagatcaactgggctcagcgtgacgccctgcggggcaagcccatcgcgctctggctgcatggctggtactgcagtcacaccaacccagaagacatcagcatcgaccgaatccagcagctatgcggatccagcaacaaaaaccgtgattccttcaaggccaaggtgaaagccgccctggaggagatcaaggagatcggagccattgcgaactacagcgtctctcgcaacggcatcgttcatgtcgaacgcaacccgttcaacaccctccccggcttctag

SEQ ID NO: 332186 - DNA, 630 bp, Pseudomonas aeruginosa
atgcgagtttcaacctttctacagctgatgattctggtctctctggggggtgtgaactatcagctgttcacggctgcaagtagcttgccggctcagcttgagcagctggcaaaggtctctggtggcgttgagctgccggctgatgtgcagcgcaagctggatgagattgagcgccttcgtgcgaccaacgccgctctgcaggcgattgtggcaaatgtgaatttcggcactgggaaagaaagcgacccggcgatggtggagtccttccttccgccgctgcctactcctgaagtgagcagctctttcactccaatgcccgcgacgctgcaggcatttttctcgggtgagaaggccagtgctgagccggccacggctcctgtagaaaacctccaggaagagaagaaacaaggcgaggcggctggacggatgctgatcacccccattcgcttccgggagaacggtgccctggtttatctggcttccgacagcattgtcagggtggtgggggtgaacggccaggtgtatggcgtcaacgggcgctacctgggcgaaaaggatggaatggcggaattcgaaatgctcggcaggcggttcactctgcccctgatcgttgctcaaagttcaagttag

SEQ ID NO: 332187 - DNA, 489 bp, Pseudomonas aeruginosa
atgaaaaacacttttaccctggcgcttgcgcttacgttggctggttgcgctactccgccgccgccggcggagaatctgaacaacgacccctctgttggccggttggccgcggcggctgagttggctcagcgcgacctggagcggctctcgcgagcggaaaatgctttggcagagcagaagcgtacatcgctcgatcgccagcgcgaagcgacagcccgtgcagcggtggttcctgggtttgatcgcgtaacaagcgaggtgttcaccctcccatatcccaaggctattgagcgcatcgcggtgttggccggttacaagttcgtgcctgcagtgaccctccccagtaacccggcgatggtgaacatcgaaggaaaggggcgaacgctcaaagaggtcatggggcaagtgatggaccaggttccatctgatatgcgtgtccatgtttatgcggctaccaagacggttgtcttggctgcacgccagccgtga

SEQ ID NO: 332188 - DNA, 864 bp, Pseudomonas aeruginosa
atgaagtggttagcgatccatctcgcggttgtcatgacgctgctcgcagggcaggtccaggctgccgattcgagccagagcgaggttgtttctccggagcaagcgctgctggatgttcagaaaaaggcccgagaagcgcctgatccatccatggacgaggacgagcggcaggaaatcgcccgcttgcagctgatgacagaagcggggcgcaattacggtgtccagatggggcggtataaccgctggcttgcgcaggttgagtttctcaaccagcagtctatgaagctcgaccagggctttccatttgggcggctttatctgcggtctgggacccttcagccgcctatcctcgactcagccgaagactaccgtgcgattgaggatgacggccgtcttcgtcgcctcgtgtccaagaactaccggacactggttcaggctcgattccgtaacagcccgctgtcatggcgtgactttctcttgcccgacgacgcaggccgtccgccgctcccgcgcgaaaccctgctgcctcgaagtgccaaagaaacagagctctgggagaaagccatgcgcgagggctggagcgaaggccgggccatggctatcgacgagttcgatctgaggctggaggccttgcagagaggcttccgagggatggttctttaccgtcttctcgccctacacggaatgatcgatcctccgaaagtgattgagcggcggccgggtgatgtcgttacctcagaatctggcgatgagttgctgatcggtgtgcgcgaggaattgatctcccaggatgcgtatttcgtttctgagccaggtcgttggaaggcgctcgactacggctttactgcttcaggtgaaaaatga

SEQ ID NO: 332189 - DNA, 1311 bp, Pseudomonas aeruginosa
atgaacgagacgactgagcctggcctcaatttcgatgaaagagaccgtcgccggtttttcgaagagttggcggaccgtgatcccacagccgtggaggggcttagccacctcattgatgacgatatgcagcggcagcaagaccgcatgcggcgcgctcctgacatgttcactccgccgaccggcgtcaaggagtaccacccgccggagtcgtatcgcgttaaggatcagctcgatgaattgttgacctacgctgcgtctgtggaggtgaacgacatcaaatttggcgacggtgagccggtcaccgtgcgcgttcacggacagatctttcgattgacgcaccgcacgctgacgaacgatgagctccgcaatctgatgacggagctctacgactcctcttcgattgtcacctccgtccttggtggcgagcgcatggacttcgcctatacctgccgaaaaggtgggcggatgggctcgcggtggcgggtgtgcgtaaaccttcgtggcacttacgatgggattggctttcgtgtcgtatgccggcagatcaccatactccctcctacgatccagcaggtttacatgccgcaagacatcgtggatgcggttatgaagctcgatcgtgggatcatgctggttactgggccaactggctctggtaagtcaacgacgctagcggcgttgctacgacatcggatggagtcaatcgaccatagcgaccatctgatcaccattgaaagccctattgagtatctccattcggagtacgcccgcccctattcggaggtgactcagtgggaagtccctcgaatgcttacaagcttcgcctacgcagtggagacatctctgcgctgcgacccggatctcgttctggtcggtgagatgcgtgatcgtgcaacgatgaaagcaggccttgaggtctcactcaccggtcacggctgcttctccaccatgcacaccacatcagctgtgcagaccgttactcgctttctgcaggccttcgataaggaagaagttggcgcagtgcaatacgacctggtggacagcctacacatgatcgtcagccagctcctgcgagtggggccagacgggcgacgtgtcgctctgcgggaacgcctcgaatttgatgggcagatcaaagagcagctccgctcggcaaagaacctgacgcatgagcttcgcaaggtcatggaagcgcacgggcgtctgatggtcgatgaggctcgggatttgttcaaggaaggcaggctcggtaaggcagaactcgaccgcattgagttcatggatgctaaagagaggagcgaagtcctatga

SEQ ID NO: 332190 - DNA, 267 bp, Pseudomonas aeruginosa
atgagtgatctcccgccggttgctgccgatgcctccagttacgtgcgggcatgcggtgagccggaagcctttggttaccacccaggctggattgtcctggttctggtcgctgtgttcctaaaccactggtccatccagatcctatgtgcgctgggtatcggcttcatcatctatgccaaacgacagaacgccacgcttttcgacatggttcggcgaattcgtcgatggatatccggcaacgtccgtaagccattcaggagttactaa

SEQ ID NO: 332191 - DNA, 417 bp, Pseudomonas aeruginosa
atgagcagaaaaactttttcagcactgatcgttctggcgatcttccagtcgttggcgatgtcgacctgggcgggcgagttggtagtgcacgacgctgttgtcgtcactgatggctcgactcggctggtgaattgtcagaacacaagggggctctttgtgctcaaccgggcgttggcgcctgcagacgcatacgtcgtgaacgccgacgtgcggaattcctcgctcagtgatgcgctcgcccgcattctccctgctggctgggctgttcgctactcgtcgccgaacgtcgagaacgagcaaatcaacctggtcgtacaaacctactgggcggacgctctcaagatactggccagtgattacaacctcttcgtgatcgttgatggagagcgtgaggaggtcgtgattgggcgcctctga

SEQ ID NO: 332192 - DNA, 393 bp, Pseudomonas aeruginosa
ttgggcgcctctgagattccggcctatctgggagtcgagtcgtcagttgagccccctcagatccatttcgtgcggcgcccacggatggatgcagacgacgcgatctgtattttgagcctgatccctgaggcgcaggcgcacttcgcctttgtcaccctgctggagcgtgagggttgcctgctgttctggaacgagttcgccgctgttcagttgaagctcacccggggcattttcttcaagcttcgtcggcacctgctctggcgcaagtacatgttcgtcacgccggctggcgtggtccccatgcttgaagatctggatgcagctgtgttcgtcccgtactcaactttcgagtcacggtacaggctgagaattattgaaagtgcgtcagcataa

SEQ ID NO: 332193 - DNA, 801 bp, Pseudomonas aeruginosa
atgactgcaactcagccctgggcaggcagccccgcatcctctgcgccttggccgccagaggatcgtgcggttactggtggggacgtgcaggagttcctgaatcgttaccacctcgacatcaacctgatggaggcggttttcgcgattccttctcgccggtcttggtacgacatgacgaccaagcaggccgatgtgcccgtgaacattccgaaggcggtcctggttcgtttcttttcggcatacccgcagatgctcccgttctacaccaccgagactgctgaagagctccgtgagcgtttgaatttgtcgccggcagcatttggtctgttggtaggccgccaggaaatcagtgttcgccagtggagcgctgaacgtgagccgcacaaggtggtggtgcatcttctctggctgatccgcaagtcgctgaacatcatcgacaatgcggagccggtgctgaatggtgaggagatgcttgctgaccttgtgcgcttcagcttccttgagtggacgttgcgcggtgagaccccttcccagcggcgcacggacacagcatccacgaacgcgatgctcttctcggaggttctgagcttagttcctcagaacagcctggcgcgcgccacgaagggattcgatctgagcggcgtgatgaaagcattgccgccgagcccggattcgaaaagcgagggtcatggtgaccttgctgtttcgccagaagagcgccatcgtgccaccaaaagtgtccgggagcgtcgtaaggcgaatgcgtcgctggaacaaatgggcggcacgttcaagatttga

SEQ ID NO: 332194 - DNA, 186 bp, Pseudomonas aeruginosa
atgcaatcaaaagagccagttctgaacatcacaatgcacacgaaggatgccgatggcgtgtggtggccggtgatcgttgacccgatgagcgattctgcgttggaaaatcaagcaacgcagcttctcgcaacccagaaaactgagcggcaagccctgatccgtcaggacgaggccgttgctggctga

SEQ ID NO: 332195 - DNA, 270 bp, Pseudomonas aeruginosa
atgaacgatgagaacacccgctatgcgatagcgttccgtagtaacgatggtcaggatcactctgtcgccactggtgacttggcggatgcagagaagaaggcgaagggctaccggactcctgccaactacatggtctgcatcactaaggatgaagagcgaattttacgctgggatcgtgaccatatgatgggagagaaccgttggcgagcggttgatgtcgatgagtttgaaactctaggggccattcgatcaatcgtccgatctgtatag

SEQ ID NO: 332196 - DNA, 180 bp, Pseudomonas aeruginosa
atgcggggctcctcggatggtcgcgccgagttgcaagcgaagctagttgatctagcggatcggatgaagatgcacaccgaccttggcaatgaacctcctgccggcatgtttgaagaaaaggccatgtgggacagctacctaagcaagctcggtgatacgccgaccatgcaagccaactga

SEQ ID NO: 332197 - DNA, 252 bp, Pseudomonas aeruginosa
atgagcaacattaagaacacgctcgcccagctcgatgacgccttgctttcagagttgctgttggccgcccagctcgcgctgaacgacacacgcactgcaaagcgcgtagcgggcgagatggatattcctgtggctcgcgcgaaggggctggcttacatcgcggtacagctatccatggagccgggcgtattgccggacgtatccaccgtagcccaactcgacgctttccaggcagagcttgccggagcatag

SEQ ID NO: 332198 - DNA, 843 bp, Pseudomonas aeruginosa
atgaacagacctgcgcgatcatcccccctcataacgaaaaagttcgaccgcaatctggccgggcgcgacttcgttgttggtgatatccatggcgcctacgatctggtcatccaggggatgaaggcggcgaaattcaacccggcgtgcgatcgacttttcgcagtaggcgatctcattgatcggggcccaggctcacaccgcaccgctcggtttctgaggcaaccctacgtccatgccgtcaggggcaatcacgaggacatgctgctgcagctctattcggaaggtgaaccgcctgtcgaagtcctccagtgggcggcgaaacggaatggcttctcctggtggctggataccccaaacgatacgcgcgaggcaatcctgtccgccgtccgggacctcccccttgtcatagagatcgatactccccgcggcacggtagggctcgtccacgctgaagttccgatcggcatgaaatggagcaccttcctgcagaagctggacgcgggcgatgaaagggtcatcgagtctgcactctgggggcgcacaagactgaactcgggggacaccacaggggtgatagggatcggccggctttttgtcgggcatacccctcagtgggaaggactgaggcgcctggccaacatctatgcagtggacaccggagcaacgtttgccgaactcggccgcgaagatctacctggtgcacgcttgacgatggccaacctcgcgatgcagaccgtcgacctaacccagcatctcccggcaagcccaggcaacgttgacctgcgagacgggaacatcggtgacaatccgtttgggcagtacgctacggggatagagcgctga

SEQ ID NO: 332199 - DNA, 360 bp, Pseudomonas aeruginosa
gtgaccactccatatgtactcgacaccctctacaacgaacgctacagcaagagcgatctataccgtttcctgaagtcccaggcagaaaaccgagcccgcggcgtgatcatcccgctgaacgagaccggctccaaatcttgcatgatgctcgactcccctacccgtcgggagcagctggtcagcacgggctggtcaaaccagttcctggtcatgcccgccttccattggcggctcatggcgaccaagttcaagctcgacatcatagaaagcgatgagatacccccatctcttcagccggcccgtctctatcaagtggccaggaatacctggaagaaacaggaaaaggccatcccggcatag

SEQ ID NO: 332200 - DNA, 1167 bp, Pseudomonas aeruginosa
atgcagatcaaccccgtcgacctgatagccgacgagctccttgcgggcgctgaagccctaccaatcgaggcgctccccgaggtcgacgcacgcaccgcaaacgagatcgccgcgataaaagcgtttctctccaagtggtcgcggtctccgcatacgctacgccgctacagggtcgagatagccaggctgtggctttgggctactgaaaagggccgcatgatctccgagttgacctatgaggacctgaacgcttatcgcgacttcctgcaggatcctcaaccgtacgagcgctggtgttccggcaagaagtaccgccgcgattcaccaaactggaggcccttcgtttctgccctgtcgctaagctcagtccatcatgcgttcagcgcaattggcgccctgtacagcgtctggcttcgctccgggcacatcacctgtgacccgatggccaacgtcacaaagatccgggaggtacttgccgacgggattaccccctttgcagagaccacggtcgactcaaccgaaaaatggttcgacgatcgcatggcctcagcaatccgcgaggccctctctgtgatgcctgcggaaacgcccgcagaagagcagcaacgcgctcagtacaccctgatcatccgcacgctcacggtcaccggtgcccgggtaagcgaggtcgtccatgcgaaacagtcgcagatttatgaggatcgctccggctggtgggtaaagctgcgcgggaaaggcggcaagatccgcactgtgccgttgccaaacgactacatcaccgacgtgctcatgccgtggcgcatcgatcacgagctacccgcgattcctgaggcggacgaaggcacccctctgtgcccaccccgggtctggagacaaggcaaacccggcatcagcagtaggatggtcctcaacatcgtgaaggatattgcagcgcgcgccgccggccttctgccggctgatgcgcagcgcgcctcgcgacttctgcccagggcaagcaatcactggtttcggcacaccttcatcactgcgctgatcgaccagaacgtaccgaccaagaccatcctgacgaccgtagggcagaactccgagaagaccctgcgcatatacgatcacaaacaagaccatgaccgacacgtcgatgtaacgcgtgtcgcatcgaagttatga

SEQ ID NO: 332201 - DNA, 1686 bp, Pseudomonas aeruginosa
atgcaatccaaattcagtctgaatgacaatgatgtgcgtcgcctcgtcgccgacgccgaaagcagcgctgacatcaacctgctgcgaagccatctgtatcgactggtgaacctgcggaaggagatgggcatcgccatcagagagcaggcacagaaccgtaacgacctggcccggattgttcagactgcacagcaggtgctagcggaagatcgcagcaccggtctgctgagccttttggatcgcaaaggcctcatcagcggctatcgcaccaagctcaaagcccaactcgaagccaaccaggctctcgccaataccaacgcggatttgcgcaacaagatctccagcgcagcgcaggcggtcgctagcacccaagcactacgtgatcaggtcggcacgctgacccgccaactcgctgacctgcaggctgccaaccagcaagccctgcagcagctcgaattcgcgcgccaggacgccgcaagccgtcccgaggcgctggcagcggaaaccccgcaaaacgggcctgacgaggccctgctcctgaccatccagcagcaggaagccaccattgcggaactccaacggcagctggatcaggcacagtcgacactgcaagatcgtcaccaggcgcaggctgcagcagctacccaagaggcagccgccagcacccccgagatcgaccagatccgcgatatgttcgcgcagcaagtgagcggctacatggccgacaacctgcggcttacacgcgagcttcgcaccacccaggaaactgtcgaccagctcaaaggaagcctgggccaggtcgaagaactgctggcgactgccaaccaagagaacgccgatggcaaggaactcgctgcggcgctgcagcagcaactggacgcggcagtagaacagcgcgcagggatcgagcagatgctctctcagcgcgaagaggccatcaccctcctccaacagcagctggaggatgcgcgctcggcgcttcaatcaagcgagcagaatgccgctgccatccagaccaaactcgaaggcgcaatggctgacatcacgcgccaagctgaaaccatcagcagcctgacccaggataaagatcaacttctggagcaggtcgccgagctgggaaagcagaacggcctgagccaggcgcaggtcgctgagctgcaagagaacattcggaaccacatcggtcagatcgaagccattcagcacgagctggatacgaccatccagaactggcaggaaagccaaaccctggaccgccagaagatccaggatcagtcgcaagaaatcagccgtcaaagcactcagttggagcagctgtccgcgaccaacctccaccttgagcgccaccttggtatgctggaaaatcgcacagagcgactgctcagcatcaagcaaggcctggaggcttccctgaaagccggtgccgaaaagcgtcagcgccttaccgcgctggccaaggacacgtcctacgaattgctggccgcacagcggcagaacaaagccttggaggccactgttcagcagcagcaatcgctgatcaacgatctaagctcgcgcctgcaaaccgaaaagaaagtgattcacctggctgggcctacagctcgccgggctgcggaggtcgaagaagaggttcccgagtttgaactgcctcaccagcaggacgaaacacccggccaccagatgtga

SEQ ID NO: 332202 - DNA, 1044 bp, Pseudomonas aeruginosa
atgatgggtcgtagaatggcgaagcagggtggtttcacaatcgtcgaactgctgatcgctgtggtgatcctcggggtcatcgcaacggctctggctgcgctctttccgatgatgggggcgctgggtcagatggagtaccgcgagcggcaaaagagcaccaacgcttccatcgctgctgcgatggaagggtgggcggcctctgagagtgcattggggaatttgcccgcgccgtataccggcggagggctcaccagcgcgccgctgaatcccgcgagcgccgcggcagcagatgtggccttgatggatctgattcgtcgtggtcgggtcgatcctgccagtttcgttgatgacgcctcggtactgcgcaacgtgcgggtttatcagcgggtcacgggcctgactgagacagtcccgctttttcgctcaacagggcctgccgccacactgacttatcagttgggggtcatctacacgactgcatgcgcccgctccggcagtacctgcaaccccaacgcttccctgggcatccccggtcagagcccggtgctcaccgcggctaaccggcagacatggaatgtggtggatccagatctcggggcggtctttgtttcgaacctcgggctgcagcgcagccgtctggatatgaccgcagaacgcatgcgaaagatttcgaatgagttggtgcgctacttcaacctgatgaggatcagcgcggcccctacggccacgaccaacttctatcccaccgctaccgcagtgaacctcgctggcggtaaccccgcgacgaacatgggctgccgtgatggttggtacaacctcgacgcggccaacgttgatgtgctgagcaagcttgcgcttccgcaggcccagtacggcgtcacaccatggggtggccggatccaatactgcagagattatgacccgctgggcacgaacggtgccaacgtggagccgcactacggcgcgctccgaatcaatgggtcggtgagtcttggcgctgcgccgacaggggtggctgccaatgatctgatcatcacgttctag

SEQ ID NO: 332203 - DNA, 615 bp, Pseudomonas aeruginosa
atgattcagaagcatcgccgtcgtaaccagaagggtttcaccctggtggaagtgctcatcaccatcatcctgatcggtgtgattgcagccatcgtctatccgctgatcaacaacttcgtttcctcgaaggcaaacgcccaggaaatgatgtccgtcgctcagaacatcgtgcgttcggcgtccatgatgaaccagacgatgcgtgcccctacgaccgtcacctcgaacccattgaccgcctccggcaacaacctcctggatgcggtgatcatgggtgacaaggtgaccggcatcatctcttcgacctacgcaccgcgctacgccacttccggtattcgccccatgtccgacgcggtgacgactatcactcagccgtccgctggtacgcctggagtttatcgggtgggcgacagcacgatcagcctgaccaacatcagcagccgtcagatgggggttcagttcaccaacgtacccaccgagttggttcaggagatcttcctgagtcgcgaaggcgggactttcaacggcgctactgcccgcaccactggcgtggttcgttacaccgcggtttccggcggtacgcactcgactgtaaccctggtgtacgacctgtaa

SEQ ID NO: 332204 - DNA, 810 bp, Pseudomonas aeruginosa
atgttggttctggtgatcgttttcctgtttgctgccctgggcgccggcatggctggcgtggctttcatgctccaggaaagcctgtacgagcaccgggcccgtgttgatgcctattacgtgggagttgcctctgagtccctccggatgcgcatggcgcgcaccggtgggctcggtactgtaacgatggccgatctggcatctactgatgaaggtttcaagctcaaaggagcgaacgcggatcgggtctatctggcttctgcgcctaacgtttcggatggggtttggcgcttcgaccgtgcccttgtttatgcgctggatgatcttggggatcgcacctgggatcccttggcggtcagcagcaattcatgctctgcgacggctggtttcgcgactgcgccttcctggtgcggtccggtcagcggcgtggttttcgatctgatcgaaacgcgagagacctacctggcattactgacagacgaggcgatgcgtatgcagatcacgttgcagaagcttgctcggggctactccgttgtggagaaggacacattcccgagaggaccaattgccattggcaatgcaaataccgtttgtgccgccggcggcggcacttgtgtaaacaccgcttgctcgtcaccggtggtctttcagcagaccccgcttgactgctcggatcaattttcccgctggggtggggccgtggttttcaacctggtctcggccaagcatgtggcactcgtttctaacgcgactacggtacggcgcgcagccggaacgtcgcggcaaattgcacgcgaattgagggttccttga

SEQ ID NO: 332205 - DNA, 1878 bp, Pseudomonas aeruginosa
atgacggaagggcaaaacgaagatctcgctcgcgagttcctcactaactggggttggggcggcgatgcgccggagccggtccgccagttcgcgttgaaggtcgcgaaggtcaaccccaagggcgacgttcgtgttggggatatcgtcgtcgctctcggctatctaacgaaagagcaggtggagaatccgaaggatagcccccagcctcgtgagccattcttccagttcctggcacgcgtttaccctcaggtacgcaagcacgaagctgaggtcatggcgatcaaggatcgcctgccgtattacgccaaactgcccgaaacccttgcagtgcatccgctggtggcatccgagccgattcgcaatgagtgcgaggcgatcgctggcttgcttgtcagcatgccaaccggcgacaactgcctagtcttctccagctacgaagaaatgcttcgctaccgccagcgcggcgcctcagaatcggccgccagcgctctggccaaaggcttgcacaccgaggcgcgtgcgcttcgctttggctttgcccctcgtgtggaggtcgcaacgccactgcgcgccgcgcggaaggataatgggggtagtgagggcggtcacaacgtcggccgactcttctatgcagaccggacgcgcgggactgaacgcaacatcgcagtcgacatgttggagaccggcgtggctcgtaaagccaccgacctctcgctgcgcgttctcgaaacgggcgagggcgagatcttttaccgcgaaaatggcgtgcgcctgcatagctaccgcatcagcctgcaggagcgtatcgaggtcacgaatttcctgctgcaaaccaccggtgcgaatgcctcgggcacacggttgatgaagccttctaccggtcgccttttctaccgcggtcagaccaacacctatgagatgcgttgctcgttcatcccaggtgacatgcgcagcgcattcaacgatgacgatcagatggtgtcgatctctgctcgttacctggagcaggaggacggtgatgggttcgtcgatatcgacaagctcagctttgtcccaaaggtcaaagagcatctgatctctgccctgaatgttaagcgcggcatcattctgctggtcggtcctaccaactcgggtaagtcgaccacgcttgcagcattcctgggccagcactacctcatcttcggggacacggttaaaaggctttcgctcgaagaccccaaggagcgcagcctgataggtgtggagcagttcagtctccccagtgcggatgtgtatgaaccctacttggaaggcttcttgcggcatgaccccgatgtgatcctgctttccgaaatccgttctcgtgcaagcgctgaagtcgcgacccgggcggcactgacgggccacctggtgttgtcgacgttccacgcctctgagcctgtggaagggtacacctcactcgcgcacctgctgagcgaggagcgtcagcatgacctgctgcaggccctggtgatgatcatcacccagcggcttgtccccaaactctgtcccgtttgttctgtccagcgcgcgccggagccatccgagtgggcgaagttccgttacagcatggcgctgcgtgggatgaatgtggatgagatgtcgatcgacaagtccaagatccggttcccggtgaccacgcgcgaaaaacctgatcacaagtgtgatcgctgtgcgggcacggggtacgtgggcgtctatccggtgcacggcattctcgacttcaccaaggatgtgaaagcgctgctgcgtgcgggtgaattcgacaaggctgctgaaaggcaggcgttcaccctggagggtcaggcgatcgatgcgcttcatgaaggtttgattgatctgacgggagtgagcacctga

SEQ ID NO: 332206 - DNA, 1089 bp, Pseudomonas aeruginosa
atgagcggaaaggtaaagatgctctccctgagagagcagatcatgttcacgcgtaacctcggggcgctgctgagtgcaggaatcgatctggatgcggcgctgcgccgattgtccagtttgctgccgaagcagagcgagaagctcgccgagatggcgactcagatcgcctccgggcgatacctgtcgcaaacgtgtgccggcctgctgcctgaggaaatcattgcggccatcgttgttggcgagcagtcgggcaagatggcgccagtcatgttcgagatccgcgacacgctgatcatgaaggagcgcatgcgcaagactgcaaagtccttgctcaagccggcgatgatgttcctggcagggatcatcatcttcatcggtttcgtcgtggcggtgattcccaccctggcagagacttcttcgaagcttcagccgagaggccggccgatcgagcgtggagctctgatggagttcatggtcgcactgtcggatctgttccggaccagcgggccttacatgttggccctgctggtcgtgctggtcggggcggtgatcttctacgcgcggactccccagggccggatgggcgtctactcggtggtgctccgcattccattccttggggatgccatcaagaacatctccttcgcgctgtgggctcgctaccttgccctcatgtggcgcgcgggctactcggatatgccgaaagcgatcggtatcacagtgaaatccgtaccggaagtattccgagagggcattgagcgttaccaagcggacctcaacctcggcaaaggcctgggcgctgcctgtgacccatcgaggctcgaccccagcgacccgcgttgccaatggccgatcttcctgcaggtagcgctgcagatttccgagcagacgatggagacggatgatcagctgacgacggccagcaattacttgctggaggatgcggaggctaccgtcaacgcaatggtcgagttttccaagatggcggtgttggttctggtggcatcttccgcagccctccccatcgtggcctacctgtttgaggtggtcaccatggtcgggaacacgctatcgagcagtatgagataa

SEQ ID NO: 332207 - DNA, 1137 bp, Pseudomonas aeruginosa
atgcgcgtcgtttctgaagcacgagcacttctcacggaggactatcgtcctggtgaggccatctatctggcaggggaggcggcctatgtcaccctggacgccgcttcgccggtgttcgccgacatgcagatccagccgccccgcccggccagcttcaagatgctgggtgatggcggcagcctgcacgtcggtgtccccaattccatcatggcagaggtcacagctcagccccgggtgaagttctacctgttggccgatgcttacctccactacatgcgtaagcttcgcggggacttcctgttcgtagggggggcgtccaacgacacggatacgaaccttgagtttttcatggtcaatgacggtcgggtcacccaggtggtggacaaacgtcttccggccatgagttcgagtgatttcccgtctcagttcctgctggccctcaacgatgtcttgaaccgcagcggtatcacggatgacctgccggtttattgggcatatccgttagagctcccagaccgcctgatgaacgcttacaagatcatcccggtgcctgaagagaagctgaatctcaagcgtcttcggctgcgcgccttgcgggcgggcggagcaagtgagagccccttgcgctctctggctggcccgctggcagggttgttggtgggtgggctggtcgcggcggcgctggtcggcttccaatggatccgatacacggatctgcagaaggactttgatcaggaggtgcagggagtaagtagcgtgtatgagcagggctcctcaatgctcaatacgctctccagtcagcagcgcatgcttgacatggcgcccgcccagggagacctgatcaagcgctggactactttggcgtccagctcggtgaagagcgatgccgaggtccgtcgcatcgctgtttttggcgaaggctccaagggaaatggcctgggtggccgcaccactgatttcgaaatggacctggctgtgccggtggacaaatccgtgcccgatcgcgtgtttgccaagcagctgctgaccaggctcgttgaggcctccggttacgagatgtggttgaggcctggcgaaattcggactacggatggggtgcggatcgtagagatcgagggggtgtggaatgtccaatga

SEQ ID NO: 332208 - DNA, 537 bp, Pseudomonas aeruginosa
atgtccaatgagcgcgtcgtagccgttgtctcaggcatcgtggttgcggtggccattgccgccggcggctggaaggtttcaacgggcattggtgaggcagtcggcgcccaggccaaggcattggacaacctgcgcacctggaaggctgcttatcaggcgctgctacctgttcaggcgcgttggaaagagtcgttccaagtcgctgccgagcatggccgccaggatctggtcggaatcggccagtcgcttcgtttgagcaacagcgggttgaagttcgacatcaacacgcttcgcagtgatcgcgtagaggcggttgtcttcgaaggtgccccggtgggcctgctgcggacatgcgtcgccggcggcgatcagtctggactgcaggtcagtgctgagaccatgcggggaatgatcaaaggcatcaccagcatggtgcggcatgacatcgagctcaaccggctggatatttcctccaaagatgggaagccggtggcaaccctcggcggtctttgcgtgctggcacggaaggaggcttga

SEQ ID NO: 332209 - DNA, 549 bp, Pseudomonas aeruginosa
atgggcactaaaatggcaacggccggcaacagaatctcgtccaaccaggtggtactcctgaatggagccatcatggcggcagcattgttgctcgccgtgtatggatctccttccctggcaagcaagttctcccagctgccgatcaagggcttcgttaacgaaatcgcgcccagcgtttcagtcccggataacccgcaggcgctcccgggcgcgatggcgtccccagcccagtcgacggatcccgcagagcccgacctggcgctgctggacgaaatctttgtaccggcagcgccggtggtcgatgacggggcaatcaaggcggtcgaggccgagcagcagctgcgcaaccaactcgcatcagttcaactgaccggcctcgcgaccggtggtgccttcatcaatgggcgatttgtccaatccggccagcccattggcatgatcgtctccagtccggaaggccagccgctggaggtgtttgttcagctgcgcaacaacggcgccttgcttgtagcaggggcatattcgcaccttcttgagttgaagcaatga

SEQ ID NO: 332210 - DNA, 591 bp, Pseudomonas aeruginosa
atgaacttcaactgggctctcctcgggctgctcaatccgtttgaggaggggagcaagaaacagcgaattgtgctaatcgtcgcgcttgttggggttctcgggggcggctgctggtggcttgccgataccggatttggcaaggcctctggccttgccgagacgaagtaccgcatcgagatgatggggaaggctttgttctgggaataccgggctaacatgggcaagactgttgccggggaggtcggccagacgttccgcggttacatcgacaaggggcagaagtcgtacctgctcgtgtatctctacgacgggcaggggcgccggcggcaggttgtcaccctggcgaatgtgaacaacgaaaccgtcgagttgacggcgttcgctgatcgccaccggggccgccagctccggttcgatctgttcattctcccgactgagagatacccgcgggcgctgatatgggacattgaggtcccgctgaatctaagtgtcatcgaggagggtggtggccctgacatcaacccgccgaccaacgttgtcgaccggatcttcgccaattactactggcggctcgtgcagaaggggcactaa

SEQ ID NO: 332211 - DNA, 291 bp, Pseudomonas aeruginosa
ttggaattcccggtaaacaaacatggcgtgccgcagtaccccaaggggcacgtcggccggcttcttgtcgtgctcgccgcgatcgacaagttgcgccccgcaacagcgacaaccgtcgctgagttgaccggcctgagcaagggcaacatcgatagctatgtggcatctcttaatgccgagttgggcgtttcgatcgtcaagagcggtccggagtatcttctcgaatcctggggcgatctgctcaagaaggccggcgtaaagaaagcgttgtcggcctcgactgcgagttga

SEQ ID NO: 332212 - DNA, 384 bp, Pseudomonas aeruginosa
atggcattgatcactgggttcgcaattgacgaagctgctgagatggatctcgcggacggaggccgcttcggcgacacgctgtttggcagccaggttatcgaggccgcccgtgagctcctgcagcagtccgagcaagtagatgattcgttgcctctctgcgagttcttcgagcggcgcgaggacatggggagcggccggctgcgcctgatcctggacggggattccgacgtgtgcgtagcggtcatcagcgacgagggggatatggcagatgtagagttctgcgttcccttttcaggtggcggccgatcgccgaaggtgcgccaggcgctactcgacctctgtcgtgcgattcgggatgagaacgcaagcaatccgattgattaa

SEQ ID NO: 332213 - DNA, 648 bp, Pseudomonas aeruginosa
atgaagaacccggcaagcatctggtcgttcccctttgagaagggaaacgctctaccaaaagaccgagatatgcacccggttgatttcgagatcccgcacgggcatcagtcgctgttccccgtagtcgaagagtcacgtcactggtatctgtctgtccgcctgcaggatgccgcgacctacttccttagccccagggccggaagccccgtcgaactcgacactgcagcagctgaaaagcaactcctggccggactactcaacaacctgccgccacgcgtcaactccatcacgctcttcggccggatcatggcgctgccggagtaccttcatgcgccggcgatcgattacctggagcatcgtcgcgtcgacagcatccatgaaagccagagcgagctcatttccgctcttcgcagcttaaaccaaagcatgggtgcgccggtgcaacgcggcatgagcgtttccaagatggcgcgggaagtcgctcaggcagcacctggcgagcgtcacaggctcctcaaggcctaccggaaagagcatcctgaacactggatcgaggacgcgagaaaagccgccgagggcatgatcgagcgggcccagaagaagcttcgtgaaaatccgccagacagcgacttcgattttcgcttctga

SEQ ID NO: 332214 - DNA, 123 bp, Pseudomonas aeruginosa
atgcgggttccggtgcagcttgactgccggcgcgacttccagcgcaacatactcttccaggaggttgagttgctcgacgatcttttcgagggtcagggcgagccgactatcgccccgaagtga

SEQ ID NO: 332215 - DNA, 1158 bp, Pseudomonas aeruginosa
atgcgtaaacctcaaaagagcatactgcaaaccctgggggtgacttcggtcgtaagctactggcatggcgatatctcgctatcgcgcgccatccaggcagcggtagtcgcggggctgaccggcctgaccatcagccacttcaaccccgaccactcttccgacttgctgcaggctcagcaggcgcccggccacctgacatttcacgatgcagagatcagccggatcgccaatatcaacctcaccgtggacactgagcgcggcaagaccggttatttccagcgggataccttcgcgcttgagagcagcttcaagaaagatctcgaaaacgagatcgacacgctcactgcacaggccgaagttgccggttcgtgggatctctatatcgccgctcgcctgacccctctctacctctccgaggatccacatgagcggcaggtcgccaacgcaaccctgaactacatccagaagcatcagggctgtgcagctggcgagctgcccaaggccagctactacacccgggcgaaagcgaccgagatcgaggcggaccgtcagatcttcgccatggcggatcagatggctgaagccctccgcaacgccggtaagaccccgatcaccaggcgctcggccgagctcgcactgcattcctttgcacccgagccggatcgcctgctggctgctttcaacgtagcgaaaggtgccgaggaaggcgctcccggcatccgcaacatactccccctggtgcagaccgccattcaggttgagacaacccgcctatcgctcaccagcatggccggccagatgctgcgcgtcaccgaggtggccaccaaccccgcgatccaggcgctgacgctcagccggcgcctgaacattccggtggctgttcgctcgtactcgggcgagttctccgaccactacaaccagggcaacttcgagcccacggaagaaaccctgaactccaagatcagaaccggtttcgacctgagcgacggcctggcgatcaccggccgtggagtgatcctgagccaagtacccttggagcacgagcaaaccatcaacgtgcctgagctgcgctactcggttcatcaggtggtcgagcggaacaacatcctcgaccaggatgagccagtgttcgccgcggacttccgcgtctcgatgtag

SEQ ID NO: 332216 - DNA, 282 bp, Pseudomonas aeruginosa
atgaatatcagcagctacacagcccaactaggcctgaatgacagccaggtgccggtttgcgtcatgctgattattgacggaatcgctgccacggctcctgaaaaggatcaagccgttagcgctcgcctgaccggcgaccagctgaccatcacttacggcagcgaaaccctgaatttcacaaagctcgcacctgaactctgcaaagagcttcatgcgggaaaacccttagtcctgaaacacgaagcttccagctatgaagccctcgtgccagtaactctgtaa

SEQ ID NO: 332217 - DNA, 228 bp, Pseudomonas aeruginosa
atgtcctcgaaaaaccttgcggacgccgacgatatcggcgtttcgtccaaggtaaacaacaagcccgtgctcatctacgccgctcaggcgagacagggcccggacgttaaatacccaaaccccctttgtcgcgaaggcgtccaaagccttcagcaccgcggtgcgcgtggattgtctcattcgatgtattcgccagaatttatgcggttacagtatcgcaatggttaa

SEQ ID NO: 332218 - DNA, 930 bp, Pseudomonas aeruginosa
ttgagcccgtacacactgaaggaccatgttacgaaagcgatgagcttgactgacaaccagctggctcagccggttgttctcaaggaaatcttgcattacgaaatcctgaatgccttatcgaacagcgatcttggcgatcgactggtcttccagggaggtactgcgttgcgggcctgttatgacggcacgcgtctgtcggaggacctcgatttcgtgtgcggctctggctccccagagccgcttgatgttgggcacctggcttctgtcctgcagaaggctatgcagacccggtacggcattgagttcgatgccgtcgcagggcccaataccgatctcggtgatggcgttggggtcaagcgttggacgttcaagatcaaggtgccttgggagtcgcagatgcagcgcatcaacttcgaggtatgcaacgtgccctcgctcgatgccgtcccggttgtgttgcgcagcccctacgagcatcagcagggcctgcaggggatcgttgtcctggccgagagccaggaagaaatctactcggacaaactcgtcgcgcttgggcttcgctctcacctgaaggcaagggacgtatgggatgtgcacttcctggcgcagaagggaatccagccgaactacgactgggtagcgcagaaagtagcgtcctacggacgttccgatgatgagtttctcgcagggctcgatgcagctattgagcgcatgcaggcgccggacgctgctgaaaaattctgctcggagatggttcggttcgtagacagccggatggcgacgatgtttaccaacaagccggcattcgcaggctcgtggcttcgccatgcagttgccgacctggtgaaactcaaggaagcctacccggatttcgcgcaggggcgggatgagctgctgtccctcgcggggactggatgtgacggcccatga

SEQ ID NO: 332219 - DNA, 693 bp, Pseudomonas aeruginosa
atgaaggtcagagccggcctagcccttgccattgcatggccattcatcgcactcgccgcccctgtggatgaaggagccggcctgccaggcctgcacgtcatgctcatcagcacggagagcaatgcagcagaaactgaggcggcccttacgctgcatagcacggccggggaagacaacgcatttctattccccgttgagcaatccagtccagaaagccttattgcggcccttggctcaacccacccatccatttttgccgagagaactctgcctccatcgcgagaggcgaatacggctttggaagcctacattgctggcgaaggggtgctgatccgcaccaagaccacaagcatccaaggcgatcgagtcaaagtgtgggtgggcgttcaggtttcaagcgcaggcactggaccggcaaagcccataagcagaaccagcttccccgctgaaatcgccaacggcgaagccttccttgcccgcgtgaacgccaaaatgctcgttgcggttacgcctgagccgttcactcctgccgagactctgcccggagagttgcaaacggctcatcaaccggccgcactgagcacgccaagctcctcggcggccagcagcgagccacggatcatctgggataccgctcctggaggagcagtgccggacgaagaagcacttcagcggattcttcagcagccctga

SEQ ID NO: 332220 - DNA, 579 bp, Pseudomonas aeruginosa
atgaccctgcgcatgacacccacgcgtttcaacctgctctacatggccgccgccatcctgacggctgttctgcttgcccgtcagttcggaacgattttcgcgctgggcggcatcctggcctacggcatcttcgtgctgctggaaatcttgtacgtcaagctgcctcgcggtttgcagccgtttgctccatggctggttctcgccggatccttcgcagcggttgcactggggatgatcattgccggctccgcttttgcagagaatgcgcccctggagaccccgccgcctccgaaggaggcgactgctcagatcgagcctgctgatgaggccgccgccggcgcagaagcgatcgcccgcatctacctactgtttcaacaggaattggcagagcgcgccaagaacaaggacttcgatcagctgaagtggatgcagtccatgcaaggctgcctcagtgatgtgagcgcaccgagcattacgccggacacgatgacttccatcgcggagtgcgcggataagcgcttggccacggcgcagatccaagttaatcaagcaccgaccgaggaagtacgaaagcaatga

SEQ ID NO: 332221 - DNA, 837 bp, Pseudomonas aeruginosa
atgagtgagttaaaactgccgaactggcttgaggcttatcgttctggggccagacagggctacgcgcaagcgatgctggcgtatgccgattactactgcctggacggttcggcagatggtgaaccctcaattgaggagcggctcggccatcaggccccggcaatggcggcctacgccagtcgcaccggcacgcggagaaatctcgatgccatgcgtgccgctggatggcggctgcttgtgtcggccgcgggagttctgcgcactgagggtttcagccgctatgcgcttgataacggcgcctggtctgccttccagcaggggcggccattttgtgaaatcgcgttctgtcgggccgtagacaagcttggggagggtgcggactgggtagttctgccggatatcgtcgccggcggccaggcctccctggatttcagcttgaggtggttggagcgactgaagggattcccgcgcacgctgctgatcgccgttcaagacgggatgcacccggatgagattcgcgactacctcaatccgtccgtgggaatcttcctgggtggcagtaccgagtggaagctgcagacgatggaggcctggggaatcctggcgcgccgtcggaactgctacttccacgttggacgcgtgaatagtgccaggcgcatcgcgatgtgcgccgcggcgagtgcgagttcgttcgatggcacgagtgtcacccggtttgctaacacactgcccaggcttgatggggcactgaagcatcgcatcgatcaggccgatctgtactctctgtccagggcctcgattgaagatacgccctacgactgtcgttggccgctttga

SEQ ID NO: 332222 - DNA, 717 bp, Pseudomonas aeruginosa
atggacactcgaaacaatgtcgcccttcatatgatgcggtatcatctaaagatcgacggagggacagccatggcaactgatctgaaaaacctactgagtagcgcatctgactcggtgacaatcaacaagccgacgttcactgatgcggtagatatcgccgcggccgccgtctcaggcaaaggccatctcgcatccgccatagcgtcagaaggtcttgagatggtgtcgccagcagctgcagatcacttctccgcagcagtgcgcggtggggatcttcgcgtgggcgcagtcggcgcaatcgttggtgccgtgaaaccagcatccaagcatgacgctgatagcctcgccgtcatggcgaaccttgcaacaaaccctggcgcagcagcaattggctacgcagccgttcagctcggcggagaccatattggagatcgcggcgttggggcgctgaaagttggaaccgcccttgccgggctggccgccggcgctccgccgcttctggctgcctggggggtttatgaaggcggtcgccagatcttcaatgccttctcgaataacgaacaggcacaggatggcaccaaagcgcttgctccagccccacatcaagttactgcggacactccggtcgttattcaggggaacgactatgagccgacccctgaagaagttgcggaatacgactacagcatgaacgagttaggctggggcccacgctga

SEQ ID NO: 332223 - DNA, 1269 bp, Pseudomonas aeruginosa
atggaaaaccagagcgcagtcagtcagttgaatcttttccagcatgtggaagaggtctacaaagcaactccagacgcagctctcgataacgagagtctgtacaagctcgtcgcaaggcgcgcaggcatcaacgacgcaacgcttaatcaccgcatgccgattggcactgcggggaaactgcgcagcaaggcgaaaagggctattcgctggcagcagcagcaactcaagcatctccaggtcatcgagcgtgtaccgggcgagcgaggggtctggcggctcacagaaaaaatgcgcagtggccttcacaaggcgcggccaggaatgacactactggccttcagcaccgatcttgggatggctctctggggcacaagcccgcactcgctggcaaagctggaggagcccattgagttgctgctcacctcggcgccctatcccctgcgcaaccccagggcctatggaaatccgcgctgcgaggagtacgtcgatttcatctgcgaagttctggagccgatcgtgccgaagatcgccgcaacaggctcgctagtcctgaatctatcgaacgatgtcttccttgagaaatctccggcgcgatcgacctatctcgaacgggttaccattgctctggaagatcggcttgggttgtacctgatggatcgcgtggtttgggccaatcgctcgaaggcgccgggcccggttgcctgggcaagcaaggcgcggaatcagctgaacgtgtgttgggagccgtgtctgtggatggcaccggatccgctgaggtgtaaagccgacaatcgccgtgtgctgttgccgcatacggagcgacaccaaaagctgatggcggccggcggagagcggcgcgatgcggagtatggcgatggtgcctacaggattcgtcctggcagctatgggaacctcacccctggacggatccctcgaaatgtccttgaaatggggcacgcttgttcgatcggcagggcgcaccgtcgcgtgctgcaggcgctggatctgccgacacacggcgccgggtggccactatcggttcccgatttcttcattcggtttctgaccgagccgggtgatctggtggttgatttgttcggcggccgttgcatgacgggcctggcggcggaactcaacgagcgccgctggctgtgcctggagctgatgtttgagtacatccgtggcggcgcggaacttttccggccgttcaaggggttctggatcaatccctctctgggtggccctggtgagcttcaccctcaggggtga

SEQ ID NO: 332224 - DNA, 393 bp, Pseudomonas aeruginosa
atgaagtcaatcaagcagccctcgccgatccctttcaggctaccctgcgtcgtcaatgtgcgagatttgccacgcgagcagatcgatgcgttggtcgattccatggcccaggaccttggcgccaagttctttcgcgacaaagaacttttcatggccgtgctcgacgactacttcgaggctgctcgacagccgcgcgcctttctctatggccccttcatcaagctcacgaaggtgccgtctggcgatctgcgaattactgcctgcgacgctatggttggtggtgatgcctgttatgcgatcgaccagcttcgagagttcatggactcgggcctggccggcgagcaactcggatacgactcgtcgtccagccttgggccgagccctggctgctga

SEQ ID NO: 332225 - DNA, 795 bp, Pseudomonas aeruginosa
atgcctatgtcgcgagtccacctcaccccggcggaagcggccgctaaaggcctgcggtgtcgaacgcatctcaaggccgagcgcctgatgcctaggccaggtgccatccctgctggaaccgtatggcaggggaggggagcctaccctgtttatcacccggccgactgcatcgcatgggcgtgccagccggggccggctcaaattcgtcgtcaggctgttgctgctcgtgcccaggatctcatcaaggcaggctgccttgtcctcgacctagagaccaccggcgtcggggtgggtgatgagatttgcgagatcacgattcttgacgcaaccggcacaccactgctcgacaccctgatacggcccactcggcctattcctgcagaggcagctgctatccatcgaatcaccgacgacatggtggcctctgcgccaacctgggccgaggtggcagagcagtacgctttcatcgtcggaggacggacggttgttgcttacaacgccgattttgatgagcgcctgctgttgcagactcatcgcctgcacaacttggttgccccatctctatcgaaagcgtgcgtcatgcggctgtacgcctcgtggaatggtgaatgggacagagggcgtgagtgctgggtgtggcgaaagctaattgatgcggctaccgagtgcggtttagaacaggatggcgcgcatcgagctcatgcagatgctcgaatggccctcggtgttctgctttatctgcagcagcgcacgaatgggcgtaagcctcgacgcttgcctggggcggagcgatag

SEQ ID NO: 332226 - DNA, 255 bp, Pseudomonas aeruginosa
atggccaaccaggccgagcgcaagcggctcgccgagtggttccgggcgatcgcacagcacatcgaggggaacgaaatagagcggcctcccctcgccgccatgatcgtcctctctggcgctgagggagacgaggttctacacgtcggctatcagcaacagaaagtcagcctggcccaggccggcacagccgcacagcgcctggcgacggcgccataccctcgccggggcggtaatttcttcgacagaaggcgctga

SEQ ID NO: 332227 - DNA, 378 bp, Pseudomonas aeruginosa
atggaccagcagataaaaatccagcagttgagcaaggccctggaagggatatgtgatgctctaaacctcagcccttcctacctgaagcgagtagagcctcttgaaccgcgagatgaccatatccacctcacgtttacgtttgaagaggaagaactggccgaccagctgattcgcgcagcacggcgcaaactggcgagcttcggcccggagtattggttgcccgactaccacccaaatgccgctcagttctcccaaaccgagcacatgcagttcaaagttcgaaagagccttatagtgagccacctgtactggggggtctccttcatcctatgtgcgccgaacgaaggctattcgctgcttgaagacacccaatcctaa

SEQ ID NO: 332228 - DNA, 270 bp, Pseudomonas aeruginosa
atgagcaagaaccgccgcgaccagttcgcctacctacttcccagcgatgcgccgccgaagacggccaagctgctggcgaaggtgtacatggatattcagctgatcgggatgcagccaacgattggcatggccggcacccagcactcgatgacgctgggctatgtcaccgcgctgcacgacgcagggctgatcgacatggagacatggcgggggctgctggacgatatagtcgcggcgagcgaagcgcgcaagcgtgccgactgcgcataa

SEQ ID NO: 332229 - DNA, 678 bp, Pseudomonas aeruginosa
atgagcgctcaagataattcgctggaaaccctctcccaatccggggtggagagtcaggatacccaaggtgccgcacaacccgagccgctccttggcaattggcatcaagaagccatgcagatgcgctatacgcagctaggctccggggaatacttcaacatctgcgacctggatcagctgcgtagcggcctgagtgaatgtaggcgggccctgaatctgccgatttcccagggtagtgagcaggtcaactacggcgtgctccgcgcgctccattgcgtgaactttacagagatgagctcgccagttcggatgggcattcagagtgctgtacagggcgcgctcggacttgatcaagagactggggttgcgctttttggtcaagaacgctggctggtggcaaaccagctcctggaacaaaatctcgctgcgcatgagccttcacgaggacctcaatcaggtgcacttggcgagaaaaacaacactggcctttcgccatggctcagcttcccaagcttgctccttgcattcctattggggctcgcgctggccacggccgggtctattgtcattgcgcacaagagcaagccttctttcgaggcgatctatccgccaggcgttgaaccagcaatgccagctgctccgcccgtgatgatggaaattccgaggccgaagagctag

SEQ ID NO: 332230 - DNA, 237 bp, Pseudomonas aeruginosa
atgagcaaattcgttacctacgttatccggctgccggaagaccaagaagccacgcgcgaaatcgtcaatggcgtgcgagcactggtagagaaaaacggtggcgaagtcaccggcgcatccaatgaggatgaaatgaccattctcgaaatgatcgaacagcacgaggacttccgcgagtacatcgcagatgaagctcgcgcacaggccaaagaacttggcgcgaaagcggctcactga

SEQ ID NO: 332231 - DNA, 357 bp, Pseudomonas aeruginosa
atggctcgaaacctaatgatcaccgtcctgttgatcgccatgtctgcaccggcgatcgccagttcctaccagccgtctgccgagcgcgatgcgctcacgacgaagttcattgagtaccgctgcagcgaggtccagaacccgacccagcccgcacgggccgacaacaaccagaagctgtactgtcagtacctgctggagatgatcgcgtccaagtgcagcgaaacgtcctgtccgagctatcaggcctgggggaaagggctcaacccgccgattgatgtcaattcgaaagagttcgatgcgcttctgaaacagcgcgggaaagagtttcggcgatcgctttcgccatccgcgcagtag

SEQ ID NO: 332232 - DNA, 276 bp, Pseudomonas aeruginosa
atgacggtcgtgcggatccgcgcaggcatcaccaagattcggatcgatccggagtcattgttccagcagaatctgaaccgccgcgagctcggtcaaccacttctacaccggtgcagcgtctgccactactgcgcagaatgggggccatcgtggatctggtacggcagctaccgcgaccatgacgatggaaccatcgcgaaattctgcagcgccgagtgcttcgcagtcgaacctgcagatgtggtactgcagcgctgccggcggcgccccacatga

SEQ ID NO: 332233 - DNA, 474 bp, Pseudomonas aeruginosa
atgacctcgacgcacctcagaatgcccaccccgaccgccctgatgctcaccgcagagaacgacggaaaagtgagcctccaccttcttgagcccggcactaccgaagccgaaatcgcgcagctgaagagcagctgcagcgaatgctgcgagctcgtaaaggctgaagagatcctggagatgaatccgggcgatctcgcgcagcgcgctcgcgccgaagccttcgccaccgccgccgagtatcacgaagaactgcgccgcggctacctggcgcacgccgagaacatcaggcaaggaaagatgggcgagcaggcttactcgaccgccatggcggccgccgccaagcacgccgagttcgcggaggatctgcgcaagatttcccgcggcctgccgccggtttatggctcagctcaatacaagcagggcctcctcgcaggcgccgccggcaaacaccccaaccgagccggcatggcgtaa

SEQ ID NO: 332234 - DNA, 759 bp, Pseudomonas aeruginosa
atggcgcaatcgtttcggtggtcccgcggcagcgaagtatcgccagatcagtggcgagctttctgcctggctgtttcggtgatgctctcccggtgtgcttccatccccctgggtgatgaacatggcaacttggttgaggcagacgcggcctttctgcgtctgccccctctgggggccggcgccgatgcgtttgacgccctgcccgtcgccgttcggatcaacggtgtcgattccgaatcggacaccccgttcgcgctgcagcgggatagtcatgaaggagcattttcaaccgaacatgctcatggtcacctggtgtatggggcattgctgctagccgcgagtaccctgaatggcttcaagctgcaggttgaatgcacggagcaagagggcggttacgggatggctctcgcccaggcggcactggtggaagtgttcccgaacctgccgccggcgagcgtcgagagtttcttcgcctctttccccggtgccgaagaagctcaggcgatggccgggcgagccgctgggtatggaaagctgatcaatcgtgttgacgagttgattgcctccaccgatgggaaggagcccgctggccgatttgaagtggtgacgctgcgcactgcgcgtgctgtccgccatcggctgcagatcggcgttgatcacaagttcgatgccgaatactcgttgcacagcctggaaggcttcttcaaccaatcgaaatttctcgaacccgcgcccctgtgggccgaactgaatccgtaa

SEQ ID NO: 332235 - DNA, 684 bp, Pseudomonas aeruginosa
atgagagctatcaaggtttttgagctgtaccacctggatgtatccctgtggcgcgacgtgcctctctccagcgctacggctcaggagtttctggccttctatcaggcggcgaaagatgctgggaagctgacgcatgtcgcctcaatccgcgcggccggcctgtctgacgttttccgcctgagcaacacggtcgagatgccctggtacgaagcggctgacatcgcgatgcacgtcgcagatggagctcgttcaacgtctgttggcgacctggttgttaccggtggcgtggcccatcgagtcgctagtctcggattcgagccggtggaaggccttgtgctcggtgagccgagcccactgcggggctttgcgctcgtccatgctaccgatggtgtgttcctgggcacggcaatggggttggccttctggagcaacctcgatcctgtagggcaggaggcggccgtgttgttcccgtccgaacaagaggctgctgagtttgtgtcgacctggacgttgggcggcatgactgagcagcaaaaagcctccttcctgggtgcgctgcgcgtgcatgaagtcgaggcagatgccttcaacggtacggccgcgtcgatcgctgcttgtgccaaggcagggctaccggcctgggatccggctgtcgaggaagatctcgcgccgacgttgcactga

SEQ ID NO: 332236 - DNA, 207 bp, Pseudomonas aeruginosa
atgagatcaccagagcaggcgcgccggcgtgaggttcgcgtgactttcgagggcggcaagacgctggagaccgcgatcaacggcactgaggaagagatcgtccgttactacaaggacaactccttcaatgtcggcgtggctgacaacgacgacatgcaggcggtcacctccgtcgagtttatcgatgcgcagccgggcatgagttga

SEQ ID NO: 332237 - DNA, 759 bp, Pseudomonas aeruginosa
atgcctgacttctactatcagatcaaaggccgcaggccgcctgagttcgagggggattctccctgggcctggcccccggtgttcagtgggctcgtttcggcagctgatcgcaaggctgccaaagcgatgattgatgaggagtacagccggacgttcccgcttcgagttcttcgggcagacgttgagcagcatgagtaccttctccacatccaggaagtggaccccgccaacgactacatccttcggcggtttcgcgattcggtatgcaaggagtgcggtagcaccttcaggctgatcgacaagtacaacgaccaccacgccgatcacaaggggcctgattactgctcgcagcggtgtgctgtggatggaaaggcccgtgaggttcaggagttccggctgacccacgaagggaaattgcctgcggtgatctaccagatccggcagcggtcgaccgggcgagtgtacgtggggcaaacgacccagcccttcacgctgcgttggtggcagcacatgacgaatcagacaggctgcaaattccatgaggcgatgcggtcgtctccggtgaccgactgggaatattcggtgcttgaggtgattgagtttccgaagggttgctcgacagccgattacctcacggaccgcgagagctactggatcgcgaagctgaactccattgaagccggcttcaatactgcccggcccagcgccgtagatcgctactcggtgcagggcgatgcctgtatcgaggctgtggcttga

SEQ ID NO: 332238 - DNA, 435 bp, Pseudomonas aeruginosa
atgccaaccctcaaatcaaccctgatcaccggttccaagcctgaggccggcactttgctgcgcgtccaggagcagatgggcctgcgtcccgggcagtccatgcagttcatggtctaccaggtcgagttcgaccggaagaaatactactgctgctggtctggcggtgagatgaagggcggtgagccgcacatgacggtggtcggtcaggccgcgatggaggcgctcgccaacctgccgctcggcagcaacgacgcactgatcatccaggagttgaagctggggcccacgccgctgcggaacaagatcaaggccacgctcaagcgtgcgccggcgaactcgaagatctgcttcctgggtgatatgcagggtgagctggatgggcacatgcatgtcgccttcaatatccagcccgggacgctcgatgtcgcacactag

SEQ ID NO: 332239 - DNA, 576 bp, Pseudomonas aeruginosa
atgtcgcacactagccctctgcagctgacccttgcctacgtggtggccactgccggcctgcaggaggtggtctttgccatttcctctggtcaggcgcgggagctgttctcggaggcggccggcgttggattggaggctgtcactagctgtgcgcgcgccccatgggctgaccagtacgcagcggatcggagagtcccggcgagagttcgtgttgcgcacggtctctcggtggcctgcgcctgctgcggcgctgcggcgaatgattgccccggcgcgtgcttcgatgagtaccaggcgtactgctcccaggaatgcctgatcaagcacgatgaacagatccaggagcgagaggtggccctgctggaggcgcgcgaggtggccctggccctttggccggaggcgagggtggtcaaggtcgaggagttgggtggccgatacagggtgcacttcatgtttggtagccctgaacgccatgcattttggttcgccgacgacgatcaggttcaggtggcccccgtcgacattgaggcatgggcggacttcaatcggcgcatgaggttgtcccggcagatctga

SEQ ID NO: 332240 - DNA, 1332 bp, Pseudomonas aeruginosa
atggccgaacatctgcaggtctggcgcggcgcgcatcgagtaggcgaactgctgttgaccagtgacaagcgaaccatggccttcacctacgccgatcccgttcctgggctggccatctcgaacagcctgccgctggccacgaaatccttcgatcactgggatctgcgcgcccacaactggtttgccaacctgctgccggaggaaggcgcccgtcaggccctggccacacatctgggtctccccgacaccgacttcgaccttctcgccaccctggccggagattgcccgggcgccgtgcgcctcataccggacgggatcgccccagaagaacctgcaggccgccggctgatcgacctcgaagccctcgggctatgggcgagtgggaaagagcgctacgcgctctacggcgccggcaacctcagcgacactcgcctgacgctccccggcaaccaggacaagatccccgcgctcgcgcagaacggcaaactctacctacccaccggcagccaggcctcatcgcacctgctgaagttcgccccctggagctcgctgatcatcaacgagctctatctgacgcacctggcgcgcgctgccggcgtccccgcggcatggacgcaggtcggccgcaccgatcagggtctgtacctcctggtgcgccgctatgaccgccagtacgacgaggccggcaacctgcagcgcctgcatcaggaggacctctgccaggcgctgggcctgtcctccgcccaaaagcgcgaggccaactccggcccctccctcgccgcgtgcgcggcgctcctgcgcgggatcacccatcatccggatcagcaggtcgagcagctgctccagtggcaaatgttcaacgtcctcaccggcaactgcgatggccacgccaagaacctctcggtgatccaagacgccgggggcaactgggcgctcgccccggcctatgacctgatgtgcaccctacccttcacccatgatcgtcacctcgcgttcgccgtaggcggcaatcacgaaccggagaagatcacctcggcagactgggaagcgctggccaccgacatgggggtaagtccatcccgggcgctacgcatgctcgccggtctggcccagcagctgcgcgagctggccgacagtgatgaattgcgcgaatccatggagaaagcctggatggccgagggcgaatgggacaaggtgaaactcgtccgtcagctggtctgtcagcaatgcgatcgggcattggaaaacctggctgaggtgggggtaaacccgggctttgatccagcggaacttgatcagcagatggggagcaacgcagtcaccttggggtga

SEQ ID NO: 332241 - DNA, 621 bp, Pseudomonas aeruginosa
atgaaacaagatcagcaggaaagtcatctgagggaaacccggcacgatgagtcaacctctgccatgcggcagctggcatctgacccatggtccttctggggcatggtgggatgttgcgtcctgggcgttgcggcggtgttgtactggatcggcctgcttgaagtcagtccgctggatttcgccgaatggattggcagcctcgtatccgatacccagttcaatgagatagaccagtcgtcctttctttccggcccgctgatgtttatccggcaattcgtgggaggcctgagttgggctttcctggtgcttccctggttgggctatgtccgctatcgcgtcggtgtcattgaggccggctcgaaagaggcttaccaccagcgtcgccgcgaggaggcggagcgcgcggcgcagcctgcaccggtcggtgtcctggttggaatgagcattgccaaaggtggtttcttctcgtccagcgagaccctggtggagacctcggagggattctttcgggtgtcagggttgatgcgcaccgtcaaaaagggcgagcccgtgttcaagcagggcggccaactgctgattggcgccgagggtgcccagaggcgctacaccgtaatcagctga

SEQ ID NO: 332242 - DNA, 369 bp, Pseudomonas aeruginosa
atggccacccaactgatccacaacgccttcgccaaggcgggcgtcccgctttgggtcaccccatacgatgcccgcgtggccctccagctgcggaactatgattcctcggtcgctgatgagttggccgagtggatggccaggcggctgagcatgagcttcgctgccggctacctcgggcgcaagccgttgccgattcgtggcgaggatgtgactcgccaactggcgaagatgggctattgcgagcagaacgcggccgagatcgccgggatgatgtgtgaaagccacctgctccttcatcagaagggttgtgctcgtcggtcatgcgactccggttacgcgctgcctctctccaataaggctggcggttga

SEQ ID NO: 332243 - DNA, 1107 bp, Pseudomonas aeruginosa
atgcctgagttgtcagtccaatatccagatctgccgtgggagcttcgctggcgattgatcaaggccgcggtgaactcggtgggcgagagcatggccagcattggcgatcgccattgtgtagctggggttgccagcgtgaagggcaagcgttacccggccgccgaggaagcactggccaggacccttggggtgtctgctgcagcgctgttccccgaacggtacgcagtcatctggtctgatcagtatcagcgcgaggttgagaaggtgcttcctggtctctctcagcacaccggtgccgagctgcctggcgcgacgaaggtgaaggagttgcacgcccactggaagagcattccggtggacctggatcagcttccggatacggccaaaagccggctggcttggatcagaaatcagctgcaggcgagaggattcagcatcaccgaggtggctcgtcacctgggtgtgagccggacagcgatcaacaacctggtggttgtcgcttatgccgacgtgcaggcgttcatcgctgagtgcctgggggtgaaaccccagcagctgtggcctgaccgatatgatgctgatggctcgcccttgccgaccggtcgagcggtgaagtccgcgccgtaccgtgatgcgccgtcctctgcgctggatctgcgagaaggcctttggctgccggtcgaatcaatcgttgggctgcccgggctctccgcctcggctgacggtatcacgggggccgcgaagcggcacgggtggcaaatccgcgatcgctcgggtgtgctggagatcgcattcggttctctgccggtagaggcgcgccatcacctggttggcaaagttgatgccggcggccgtgcgccagttggccggcgcgtgcgcaagcggttcaagcgagcctctttcgaactcgaccggctcaccgatggcgcgcggaaggtcctgggcgtcgaggctggtgacggagtgtcgactgtcaccatcaccagcgtgggcgtagacagcggcaaaattgaggcctggcagcaggctgcactcggcccggatgagttgcgccaggtcgcggccgctttccttgaggctgcccaagtctgtgagatcggagggtga

SEQ ID NO: 332244 - DNA, 321 bp, Pseudomonas aeruginosa
atgaggcctgcagacacgcagctgcttggattggtcaacgccgtccgggagttcaccggggaaggcatgatgtctgtcaaaaaggcgctcgcggctaccggtaatgaccctcttctcgcctgcggctatctgaagtacagcggctgcctgatcaatctcaatggcggcgacattgaggcgtggacgctgagaaatgctgaggggtatgcgaagctgctggctcttgctgaggatggccggatcgtatggcgggccgcgcctgagtccgcgcccgccgacgcctcagtcaaccaaactgatttagacggacctggccaatga

SEQ ID NO: 332245 - DNA, 291 bp, Pseudomonas aeruginosa
atgatgactcaactggaaaccgccatcgtgaatgccgcccaaggtcttctggccgaagaagcgttgttctgcctcctggtgaaggacaaggctgccacggatgaagatcagcgcgactacgaccgggcccgcggcgggctgatgacactgcttgccttggcccatcaggccgacagcggcctttcggcagaggccgttgaggcgttgcgcgagattgaggcgaaggaggccgccgcaacgaatgaagcgcgcgagacgctgggttctagcccgctgcgcgttggggtttga

SEQ ID NO: 332246 - DNA, 1938 bp, Pseudomonas aeruginosa
atgggtgatacaaaaagtcggctctatttaccattgactgaagaacaagccgatgcctctgtgaagtcgaggagcttagaaggattaagaaattctagcgttgctgaactggctgcctgttcattgattcagaacgtccgctcctttacggggaaggcttccgctgtaagtcttgctgagaaagccttggcagaattgatcaaaattggcacatcgctagatgcggatgcccctggcagtttttatgcggccatcgcatctcgttttgatgctcgcgctttcaaggaagggatatcgttacttgatgatcttggaatctgttatttgcagcgagaggaaattgaggctggagccttccttattgctgatggtctttgggacttcggatttagcgaaaggcactaccacgacttggaccccttcaaggaagagataaaaggagtgggcggcaacattcgtgttactcagcaacaatatcgtgcgcttcaggtattcaaaacggaactcgatgaagacctagacgtacaagctttggctggaaccggtaaaacattcatgatcgagcagatggttgatacgctcaaccgcttcaatccgatcgtactcgctatgacatgggttcagcttgaggctctcaagaaacgtattaaatctatcaagggaatgacatttggcgctttcgcagaggactgtctttccagagacctaagcattccctaccgtaaatctgcgcagcgccgcaatatgcgcgatcaggtagacgaagctgagattgtcaagagattggacctgcgtcgggtgcctggatttactgatcgtcaattagggcaggtttgtcgtcaaactgttatgcgcttttgtatggggcctgatgcaagctttcaggaggtgcaccttcctaatttagggccaaacgtaacccggattgttaaagaaatcattctcgaaaatgcctgccgtctctggcaggaaacaattgctagtccagattcttctggctttcaacttccaattaggggctaccaccgtataaagcaaatgtccctttcttgcggtgctcgcatagcgtctgaagtaacacatgtgatcattgatgaggcgcacgacatgcctgcgccgctcgttcagtttttggatcgctgtaatgttccggttataacgcttggcgatgtgtgccagagacttgatggccacctcatcagaagatcaatgaatatccgtaaacgtgaggtcttccattccgtgcgctcggggcgagaggttgagcatgctatcaatgcgttgattgaccgcaatcctgttgtagatgttcatcctttggaggggagccgtcagcgacgtactaaaacggtattttacgacaaggctacaatcccgagtgagccaactgttattctcgtaggttctgagtggggtatgtttgagtggtttcaaaggctgagtagctctggcgctaaattttcacttttagatggttcaaagttaggcttccgtcaatttgttacagatgccataactttgtttaaagagcgtatccgtccgacccataatgccttgtttagatttcacaattgggaggagcttttccatgccttccatgaaaaggatctcgcatttgatcgtgtttgccgaatgcttgagcagggttacacaacgaatgatttcgagcgggcctactctgcagtttcggaagggtcggctccctacatgcttggtaaagttgaacacgccaagaactatgagtttgagtctgtaatgctttctcccgaccttcttcgccaacaaaaggccggagaccgcataggcgcggcgagtgcatttgctgcgctttatcttggtggcacacgcgccaaacacaggttgtatgttcctggtcagctcagtgaatgggcctccgagcagtcggctaaggcgagaatcaacgatgcagaggcgtga

SEQ ID NO: 332247 - DNA, 423 bp, Pseudomonas aeruginosa
atggcgttgatcgagatcgccctggagcgcgctctgtcggcttaccgcgggaagcgcgacaaggctggtcaggcgtatgtgctccatcctctgcgcctcatggcgaagatgcacgacgagatctcccaggtcgtatcgctccttcacgatgtcattgaggactcggatgtgacggccgaggatctgcgggcagacggctttccagagattgtgatcgaggcggtcgttgcgttgacgcggcaggccggcgagtcctacatggcattcatcgagcggctgaagccgaacgagctcgcgcggaaggtgaagcttgccgacatcgaggacaacctcaacgtgttgcgcctggtcgagctgaacgaacaggatctgcggcgcgtccagaaataccacaaggcctggcactacctgcaggctgcgtga

SEQ ID NO: 332248 - DNA, 918 bp, Pseudomonas aeruginosa
atgccgcatgcccccacgctttactccaagcctgcgaaaaccccacacgccctgctgcgtcacctccgaacgaaaggcctcaacacccgcggccaacgcgacaaggccatcaaagccctggagttcatcggctatttccgcctgctgatctacatgcgccctcttcaggacgctgccaagcagtttcatccgggcgtgcgatttgacgacatcctggccctctacgacttcgaccgccggctgcgcctcgtctgcctcgacgcgatcgaccgcattgaggtcgccttccgcgcggcgatcgccaacaccctggccaacgaccgcagctgcggcccacacttctacctcgacgcgattcacttccaggggctcgatgagcaccgcgatttcatcaagaacgtgctcgggctgaggatcaagaacgcgccaatccggcactactacgacacctacaacagcccgccatttccgccaatctgggcggtgctggaggccatgagcattggccagttgtctcggctactggccgggcttcacctggatcatcgcaagagcatcgccgcctgctttggctacgatgaatcggtcgtctgctcctggctgaagagcctgacgctgctgcgtaacctgagcgcccaccacggccggctgtggaacacctcgatcacctcggacacgccggtcttcgcgaaggccatcaagcaggagttcccggctcacgccgaccgaggccgcgtgttcgcccgggcagtagccgtgcaggccctgctgcgggtcgttgacccgacggcggactggaaggataagttcaaggggctgatggccacgttgcccacggcaacgctggcgaaggccgggatgaccccagccattctcgggctggtccctggctgggacaccagggccttctggaactag

SEQ ID NO: 332249 - DNA, 183 bp, Pseudomonas aeruginosa
atgtccaagcgcgccgcattcaagctgttcagctggctcgggctggctttcacagccgttaccgttatcacgccctacgtgccctccgcagcagtgcacgaggctgcattcttcgcgctgattggcctctacgtgcccatcgctggcctcgtatggcgctatgcaccaccccaggtgcaatga

SEQ ID NO: 332250 - DNA, 933 bp, Pseudomonas aeruginosa
atgatccaccaccacccgcgccgcgcgatcggcgcactgctctgcactgccctgctcctctctgcatgcggcgacgacaagtcgccagcaccgcaggccaaggctcaaccggcagcgccggcagcaaccaaggttgccgagccggccgtcgcggagaacccgcgcgaagtgaatgccgactcgaaattccgcctgggcgcgcccgggccggcgccgagcttcgaccagtacctggagatcaccaccggcaaccagctggccttcatgtacaacaagcaggccgagcagatggacagcatcgagttcatcgccaagtcgatcaacatcgagcaggccgaacccggcctcaagccactgctcaagcagctggaagaggccgagaacgccggcaacccgttcaacaagaacgatgccctgaatggcatcaagcccttcatcgagcagcagatcctcgccgcacccgataaccgctacgtgaggatgttcttcaccgcgcaggaaatggaattccagccgtacgacttcgagcgcaaaggcttcgagatccagaaccgcctgttccggccggagctggagaacgccaagcgcaaggcaaccgtgggttgggacgcgtacagcaaaatgccgccggagaaggcctatatcaccttctcggacaatcgggtctacagcctcggctttgaaaacggcccgacggccaacttcctgaaggtcgaagacgaagctaccgcccgccgcctgcaggacgcattcctggccaacgaccatggcatatggctctacggcctgatcaccgctacccaggacaacaccaaccccgacaacccgaacaccccgcgccgagccctactggtcgacctgcaggcgctggatgtggtggagggtgtcgagccaggaccggccaccgccacgcttttcagcggcgagctctga

SEQ ID NO: 332251 - DNA, 261 bp, Pseudomonas aeruginosa
atgattcgacaccctcacccagaacgcagcgttgcgaaacctttgccgctggccagcacctcccaggctgatcgcccctatctcctgagtttcctcacggaagatcacgtcgaacgcgaggtggaaatcgcagccgcggacaacgacgccgcgattgctcaggcttgccagcacatcgccggcggcgaaggcctgctcacaggcatatcgctcaccgaccacgaaggcatcgagatcgagccgcaatacggctggctctga

SEQ ID NO: 332252 - DNA, 687 bp, Pseudomonas aeruginosa
atgaccaaagcagcgatccagaagctcatgatcaatatcggcatggccgccgcggcggcactgctgttcaccttcctcttcggcacgctgaacaacggctacggcatcattcatgctctattgatgacagccgtattcggcgtggccatcggctatatgcgcagccgcatcgatgccggctacgaaaagcgtatcaacgcagacgctacccaggcctgggaagtgcaactcaacggcgtgccagtcgggcacataccagaccaggagcttgcatccatccagcgccgcgcctttcaagacccggctgttgcgatcgctcaaggaaagaacctactgaccgtatcgctcatccttctcgccatgttcctggtggcggtcccaatcacctctttctggttggtcatctccaccatttcccaagactccggagcgctgctcgccgcgttcaacgcagcgcctcccggcgagatcgcgaccgccatcattcacagcctggagatctctggcctggtcgtcttcgctgtcgtctcggtgctgccgctcatcggcatccgcttcggctatcaggacgaatatcggaacgcagtaaccgagctgatccgcacgcattgcaaagccgccacggtaggcactattgagctgttccattgcctgccgtcgtcgggcaccgccgaatcgcctcgctga

SEQ ID NO: 332253 - DNA, 336 bp, Pseudomonas aeruginosa
atgagcgatcgactacccgatgatctgccaggcggctgggaacacgtcgccgagttcgagccgcacccgctggccgtcggccaggtctggcgcaaaatgggccccattgacgcgctgcgcatcgagcgcgtcatgctcccaggcaatccccagtacgacggcggagcaccgggcatctcagtgcgccgcaccgtttactcgcaccgcgtgaaatgggccaaggacaccgggttctggggcggctcccaagagatgctccaccggcgcctccaagagggtggctacagcctcgccaccccgttaaccccaagcactgaagagcaggcacaagcatga

SEQ ID NO: 332254 - DNA, 627 bp, Pseudomonas aeruginosa
atggagctcgtcttgaaaaagtccctttcatccttgtgcgccgtcctgttcgcctcgctagcactggctgctggaccggccagcgctactgatcagcccccgccgagcgtcaatcctcacctgaattcgaagtacctgctgcaataccgcgccctgctgatcaagctcaagaagccggttaccgaggagcaattgcgcgtcaagagcggaacgcccctggatgaagcgcctgccgcgatcgccggcgccgatggttacaccatcctcaggaacaagcgtctccacaccactgacggcgagccggcaacgcataaggacctggttacccatactcgcaccgtacctgaagagatccctggaggcctgcgcggccggcagatctccgaaaccattggcgaggtcatgaacatcgctcccgcagtggccaccacggccaagaagatttcctccgatatcaacttcttccactacatcaaggctgaaaaaggtggcgtagccacctataaggtcggcggccagaagacgctcggcgccggcgactacgccacctacacctggcaacacgacggtcaacagtacgccctgctcctgcagctagaggccgttgaccccatcaagcacgactga

SEQ ID NO: 332255 - DNA, 363 bp, Pseudomonas aeruginosa
atggctgtctatgtcgacaatatgcgggcctcgctgaaggtcggcaaccgcacctatgtcatgtgccacatgatcgccgacgacgaggacgagttgcgtgccatggcggccgccattggcgtgcagctgagatatcaccagtaccagggcacctacaaatcgcacttcgacatcgccctgaccaagcgcgcgcttgcagtgaagcgcggcgcccaggaaatcaccgctcaacaggttgcatcgatggtaaggcgccggcaggtgaccggctcgctgggcagccctgacgacgccattgaatggcgcctccagtaccgctacgcgatcaaggccagcgagcaagaacaaagtgcagcgagttga

SEQ ID NO: 332256 - DNA, 327 bp, Pseudomonas aeruginosa
atgcaattccaaaccactgaacaattcagccaggtggccgctgagctactgcggcatcactacctcgcccaactggccggcacctacctggccaaccctgacgcccagctggcgtgcattcatcaaggcattcagccattcgaagcggtcaacgccgtggcccgtgagtacgggctgccgcgtatggagatcgggctttttggcctgtcgctagcgtcgcccgatcggcctctggtcgaggacgaccagttgaacgcctgcgagcggctcggtctgttcgagctgctgcaggatgtcgccccttatgcagagcgcgcttcggcgtag

SEQ ID NO: 332257 - DNA, 1899 bp, Pseudomonas aeruginosa
atgctgctggatggagcggtgtcggagctggttggtccaggtagttctccggcggtgtccgccggcggcgccgggaaagatgcagtcgtcgcggtggcgaacacctgggctgaccatttcaatgtcaagcctgggaagcgcgaacaattcatcgagcgctatgttcgccgggtgcgtgagcaccgtttctgggtttgttccggagatatcggcggtcagcgctacacggcgtgccgtctgggagaagttctcttcttctacgatggggtgactgttcaggcacgctggttggcaggaaccagattcatcaccaaagataacctgggctgctggggcggacctatccataccaagatgaaggcgcctacggtgacgccagtcgggactcaggtggctccgctaatccgccgtctcaagcctgtcttcgcgaagaagatcccctgcgccgccgtcttcgacagcatgacgaccttcagcaaggatttccgcaagctcgcctacgccgaggccgcgggcgatatcgactactggccgaacgacgagaagagtcgtgattgtcgctattcgcgcccgcgtgcggctttctacacccgcctgggtgccgggacgctcaagcgctttcttgctgagctcgatcctgagatcgttcgaaccgtgcgcagcatcgggtgcccgagcttcacgctgtacaactggatcgccgccggcgatgtgcagcggcgaatccaggctgtccgcgcgtatccgcttctgctgcccttcctgatcctacggtgcgagcatcgcgataaatgctacgaccgggcgccggtgactgcgccctttggcatggctccgctttcgatgagtgttggcgaactggttgaccgcggcgagcggatccaggcgctgttggcagagttttacgaatggccggagcggtcaatcaaggcggtgggctccttcgcgcttcaccaaactggcgctgtcctgaactttatcgggcgccagggttgggactgcatgctgtcgccggtgttgcatgcgacgctcttgggcaacaagcggcccaagagcaaagctgagtgggcagtctggtatcgcctctacagctacctgcctgatgcgctactgcgcccagttaacgcggagcgctggcctgctttccttgcggggtgcccggagtggaattcaccgcagtgggaagatctggtgtcgagggtatacgacctgcgcgacctcggcctccacgttcagcatgactatgacgatcctgattacgagtggctctacgatccggaaaggcggacgagtatcgcgattccggattggcctcttcggcgcttcctgaacctcagcgcgcagtggcacgaggcgcgggatcagctcgtgcgcgagctggccaaggccgacgaagaggccgcggcgaaaggtgatcgcgcatggactgcgatgctgcctgctggcctggtgcacgaggcgaccggtgtcgaagtcgtcgagttgaccctccccgaggagctgttcctggaggggcgtgcgctgcgccattgtgtggatggctacagcgacgcctgctactcgggtcggagccgaatcgtgtccttccgcaaggacgggcgatcgctggctaccgccgaattccgcctcaagccttggaagaacaagccttccatcgcgtacctgtactgcgctcagttgcgcggtaaccgcaatgcgcccattcctgagtccggcgatgccggccgagcctacgcctggctgatgaggcagatccgcggtcggaagatccagacaaaccccgtgtggccggatgtgccgtacagcctgcggccggtaaggatgcgcgatcgggatgcgcaggttcggagggagatgagggagtggctggctaagaaatgtgcggagttggggaactaa

SEQ ID NO: 332258 - DNA, 3120 bp, Pseudomonas aeruginosa
atgaatgtgcgtcacctgacggaaaagcgcgctcacgccgcgcgcctgcgcattgagccttgggagctcggatgcgttcttttacggatggcgaagcggcgtggttattccggtggctttcgtgcaagcgagagcgccgccggtatggttaaaactgcaagcgaacgtttgcagcaggccatgtctctgcttgcagctgagcgaggtcttgaccgtataacgctaggcgaatacctgtggtatcgacaggagaacggattacctgtccacttgaaagcatctcgtcccagccttgcggagagtgatcccctttatgccctgcgcgaaatgctggagcatgagtttcagcagatctgggaaacccaggcgaagtatcactcagcgctcaacggcgattatcttggccgaccgttgaaggcgtggttctatgacgcgctcttctaccagcgtccgctcaagtcgattgctggtatggtcggaaactgcctgctggagcctaacttgccaagggcgcccaaggcccatcccgctgctcagtggttccggatcgagaaatccctgcacgacctgcgctggggcggtgggcggcgggccccgcgcctgagcagggcgcaactggatctgcttcgcgagttgctgggccagccaggcaatgccgatgcccgcgtttccttcaagcagatgctggccgcgctcgatgaagcggggcttggcgatgcgctcggccgtagtctcaacctggaaaacggtgggcgagacggcctgatcggtcatcgcaccctgaccacctggcgcaagctcgggctgaaggaccagtggctcgcattggcgcctgggctgcagaccaccctcatcaaccttctggccgatttgggcagccccgaggtgctggatcaggagggctggcacttgaaggtgcccagagccaacaccaagcctggtgaccccaacccctatcgcaaattcgccccggagctggttcggttcgtcgatcagttgcgtgagcaatgcaacgacaaagggcagcgagtctatgaccgcttcactacgatgggcttcgaagccgggcgtagcagctattcgatcaaggcgctggagcggctcaatgcatggtttgccgatccttggtggcctgatgaggggccgggtgccgagcggcgtggtgaggtcgacgaggaagccgccctgcgagtgtgttatccgcacctgttccagccggctccggcccggctggacgaactcaaggccgcgccggaaactggcagcgctgtagtggacgtggctcttcggcagctgcgccgggtcatcaaccagtgcatcgcggcgctgggtagtcctccgcaggaggtcatcatcgagatgggacgcgaggtcgggcgtggcgtcgagtggcgcaacgagcaggcccgtcgcatgcgcgagaacgaaaaggtgcggcgcaagatcgccgacagcctggctgctcatgggctgagtgccagttccgggcgtgtcctgcgctaccagttgtggctggaacagggggagcagtggtgcccctactgcaatcacccgatcagcctggaggcggcgacctgcggcatgactcatgcggagcatatcctgccgcgtgcgctgacccaggtcggacgcaagcgcagcgagttggtgttggcacacgccagttgcaacgacctcaagggcgaacgcacgccctggcaggcgttcggtagcgatccgcagcgctgggccgccgtcgagcgcgcggcagcgcagtttgaggcccaagggcgcaagctgtatgcgcgggaccgcgccaaggcgcaggggctttatcgaaaggctcgcctgctgttgctcaaggactacgaacaggacgtgctgagcgacgaatccttggccggttttgccgaccggcagatgcaccagacctcctggatcgcccgggttgccgcacagtgggtcaagtccatcactccactggtttctgtctcgcgcggcgagatgacggccttgttgcgccaccagtggcgcctggaaaccgtgattcccgaagtccggctggatgaagggttctctgtactggacacagagcgtcaaccggttacggcagaggatttcgcccgcttccgccggcaatgggaggggcacccgtccagccatggtgacgagcgtaccgagcggcgtctggagaagcgcctcgatcaccggcatcacgtcatcgacgccctggtcgtggcgctgaccagtcgcagcctgtacatgaagctggcgcgccattaccgcgaggaaggcgagcggcgcgcacgtggcgagtcgcggcgccgggattggggcatcgcaccgcccatgccccacctgcgcgatcaggctttggcgatgattcgtggctgcaacctgagtcacaagcccgatcgcaacgcttccggtggcctgttcaaggacaaaccctatggggtgacgcggccatcggagggggccgtgcaacggctcacacggcgcaaaaatctgcttgaacttgctgatgaaaagtcagtcagcgcaacctacacggcaattgtcagcatcgccagtgaggaagttcgcaaactagtccttgacacattcgaagcgcgattgagcgctgggcagagcatcaaggaggcattgtcctgccctgtcgactatccgcgttaccgtactcaaatctggcgagttcgctgcctgactccctacaaggcggacaacgtgaagcgcattacacaccgtagccgagggggtgaacatcacaagtacctgttgcacgcggggtatgcctgtttggaaattgccccgatcgagcatgagattggatgtgatgccaaagtgaagcgtaagccggcattcagcacccgactgattactatggtggaagcgacgcagcctggtttcaacatgccggcgcccggagtgcgccgtcttttcaaaggtgacacagtgcgcaactcggaagatgggcggatctacgtggtcgcttacttccaagaaaatggtagaaaaatctccttagtgcctttttgcgaaacacgtaattacggcaacatgaaaaaagacggcgataaaaacaagcgcgagatagcgttcagcaaagctgtctgcttggagttactgcccgatggctga

SEQ ID NO: 332259 - DNA, 387 bp, Pseudomonas aeruginosa
atgatcgcgcgcagtctggccatggccggactcaatggcagcctcggtgtcggtcactgcaaccagcagaatcccttcaacctggccgatgacctgatcgagccctggcgctgcgtggttgaagatcgagtgctggccgagttcgaagcggatcccggcgccgatttcgacggccaggcgcggaagcggctgctgcaattcatcctggccgaggtgccgctgcgcaccggtgatttccgccttccggcggcgatcgtaaagatggtcaacgactgggttttcgcattggagcgccatgcgcagggcgcggcccagcctccgcaacttgacgtgctggagtttcgacaatgggcatccctgagggtgctcagctggcttttttcctag

SEQ ID NO: 332260 - DNA, 135 bp, Pseudomonas aeruginosa
atgggcatccctgagggtgctcagctggcttttttcctagtcactgacaagcagtacgccatgactcgcgagttttttggcactcagcgcactcggtttcgtcccgacaatccgtcgcagatcgaacttttatga

SEQ ID NO: 332261 - DNA, 666 bp, Pseudomonas aeruginosa
atggcctcgcgcgatgaagacgaacacggctactacggcacatccggcccccagaacgacccccacgtctatccaaatggcgtcctgatcaacaacctgggcatccagaacacccaggatctgaacgccgccgaaaataccctcaccgaactccgcatcacccagctagcgatcagccccattgagggcgaatacgacctggcgcatgccaaggcgatccatcgccacatattcggcgacatctatccgtgggcaggcgagatccgtcaagtcgacatctacaagggcgatacgcttttcctggaacaggccaagatcgaggcgtacttcgagcagattgacgagcacctgcaggtaagtggtctgcgcggcgccccgatggaagatcagcgtgtcttctgcagcgccgcgggcatcttcctcggcctgctcaaccatgcccacccgttccgtgaaggcaacggacgcacgcagcgcgagctgctgcgcctggtggccagagaccacggctacagcatcgattggagtgggacttcaccacaggccatgaagggcgcgtgtattgaggcagagagcgatccgacctgcaaagcgctcggccggctgatactcctcgcgtcatcccgcgacgaagcccagcaaatctccctggatcaagaaccctga

SEQ ID NO: 332262 - DNA, 195 bp, Pseudomonas aeruginosa
atgcgcaagccgaaccgtaacgccccagatcgcagccggattgaagccgtgcagtatgcgcgggctacttgcgcgcttgaaggcgtacgccaaagccgcctgggcagcacgctagcccagaagttcatcgacggcgatatttcaatcgacgatgccatcaaagaggcgcggagcttctatggcctcgcgcgatga

SEQ ID NO: 332263 - DNA, 2670 bp, Pseudomonas aeruginosa
atgcgcaaggcgtcccgatacttaccgcttctgagtcctttcgaggcggtgcgtgatcagctcctgacagttcaaggctccgggaagtatgcagatgctgcaatccggctgtggcaggcgcgagccgaggccggtgttgccatctggaaccgcgagaatcccgacaacccgaccaccatcgaggcctgggcggcgcgctacccaatcgagattgtccgcgaaagctccaccgactcccaaccaggcgcccgggcgctgtcccagttcgccggcgcgcgagcccggaccgctgaccttgcccggctttcgctcgcgcaggaggcggaggcctcgggcgtgccggccgagcagattcgtctgcagaccggctggcaccggggtgtcgatcgcgcctggcgattcgagctcgatgactccgaggcctgcctggggccccaggtgctgcagcgtcagcagcaggcggccgccgaactgaaagccgcactggcggtgctcaacacccgtgccgatgagctgcgatcgcaggtgcgtgcgggcgagttgtcggcagaagccgccgaacaggcctatgagacggcgcgtgcaccggtgctcgtgttccaggatcgactgcaaccgttgctggcgatcgctccaggcgcaatgcgcggcctggccgccggcgcaacgcggcgtctggatgatgtgctcttccatccagcactgtttgcggcctatcccgagctggcggcgcttgaggtccgtggcttcgacgcggatccgttcgacgagacgcagggctatttcgacggccgcacgctgcacgttcgcgtgagcggcgcgacggccgatcatcagctcgacgtgatcatccacgagctacagcacgccatccagcacatagaggggttcgcccctggtgggatggtcgagtatttcaaggacatctccttggttgagcagctgacggcgccgatcaccaagcgcctgcatgaactgttggattctgatcctgaattcgggaggctcaagcgcctgcagcatcgaaccttttcgtcgatcatcggcgcctacggcaccgaccaagcgcgggggcgcgccctggactgggaccaggtgccggatgccgagcgggaggcctacttcgccctgggcgagcagctgcaggccttcgagcaatactgggagtacatggatctcgaagaccagcgcagccgcatcgagcgcgacaggccggtgctgagcgctgttgagcagtaccggcgactggcgggagaagtggaggcgcgcaacaccgtttcgcgccggcggctcgatgcggccacacggcaggtaaccccgccagagcagaccgaagacattgcgcgtgacctgcaggccgtcgatatccccgggcgtcgccagcgcctggcggccgaccaggccccagacggcgtgcgtgtgctgtcacagtctgcagcgctgcccgcggcgacgctgcgcgagatgaacctgcagcgctggagcacggagcgccccgcgctgcgcgcgtccgatggaagcctgcaggtgctgtatcacggcacgcaggcgggcgaagccctgacgcacttcatcccgggaggcgtcgatggcgttcagctgaccggtgatgcatacggcgtggccagctacttcacttccagcccgggcgaggccagcgcctacggcaccgacggcgcggtatttccggtctatatccgcggtgagctcctggacctggcggcgcccgagctgccagccgaagaagttgcccgtctgagcgcatttgccaacgaggtgctgctgccggccgatcgcgcccgcttcccggtgggccggcgcgagcgccgcttcaccgaggagcagctggaagacgcgaagacgttcttccagtcctgccgtgatagctggcagcgccttggcgatggcatggagcgggccaggcccgaggtggacaaggacggtgatgatttcatcgtccggttcatcgacttcgatgcccaggtcgagatccgcaccggtgagcaagcgcacacgctgttcaaggcgatcggctgggacaacttgccggccgccggttacgacggcatggtgatgacgcgcgaaggcgggcagaggtgggtcgtcatgcaccgtccaagcggcaacgtgaaaagcgcgatcggcaactctggcgagttcaacggcttcgatcaccatatcctccaccaggtggctggtggaggtgtcgagcgaggccagatccgcattggtcgagacctgtccttccagattgcgttgttcgagcatgccgacgcgagcaccttcatccatgaatcagcgcatgcctacctggagatcctccgcgatatggccgcgcgcacccgcgccgctgattcgcagctgcgaagggactggcagacggtcaaggaatggctcggcgttgcagcgcttggcgatgacgaacccattcccgaacaggctcacgagcagttcgcccgcggctgggaggcgtacatgcgggatggtatcgcgccgaatgatgacctgcagggtgtcttcgagcgcttcagcgagtggctgtgcgagatctaccgctcaatccgggatctgttcgtggagcttacgcccgaggtggtggaggtcatggatcgaatgcttgatgcgggtgatcagcgtatgtgcgacttggcctacatctataaatactaa

SEQ ID NO: 332264 - DNA, 606 bp, Pseudomonas aeruginosa
atgaaatcccccaactcagcacaagatgaacaccaagccaccccacgcaccgtcgaggaacaggcccgtacgcgaatccaggaggaatttgcacgcacactgtttgtcgtaacactggcagacacagctgaagaagtagggtatcccggaatatctggcgcagattggttcaacctagtcacgactgaaacacctgaacccgcaatgcgtgctgccgactacctcattcgaaagctggaacacgaaaatcaatgcaccgtagttgatcttttgcgccgagcattaggagctaatcctgatgatgacaaaacggagctgctgaagaagttcgggcattacatccctatggaagccatgggccacggcgttagctggaccgatagtcaagaaccgtttcagatcacctaccccacttatttctcagcaggtgacttgatccttatcggccaggacgcactgaagcaactgcctctcttcgatcaaaccgatatcgaagaaggtaaactggcagaacaacctgaaacaacctgctggggattcaataatgattacgagcccccaatagctggctatgactactcagcagcgtcccagtcaacaccgtga

SEQ ID NO: 332265 - DNA, 1269 bp, Pseudomonas aeruginosa
atgagtttctcccaaccctggctgttgaccccactccaattcgctgagacggccctgttccacggcagttgcgagccctggcaaaaccctgtgcctcgccccggcggatacgacaaggtgttctggacagctgagcagccgctcatcgcgcagatctacattccaaactggtactccaccatcagcttcaccatcagcagccaccagcttgattctcccgtcccgcctgatgagcagagcttcgcctgggacgtggcgcagcagctgggcgccacggcgacggtgcacaagaaggaccacatcggccgggcccagagctggagttccggcaagaaggtcacctttcaagaggtcaagagctaccttgaaggcctcggctacatcggtgacggctacggcaacgaaaattttcgtgtgaaaacctcattccagcagatgccggacggcagcaggcgatatatcgcggtgcccgcggcggccacaccgtatgggcgcctggtgatgatcccccgcccagaggaagcggcatcccacgactttagcaccggcgaagacccagacctgaccaatccgcagtaccacctggtcgacgcgttccgagaggccttccagggcgacaagaaggcggtgcgcatccatgacttctgccagtcgcccatcatgggcaacgtcggccacgcatcgatcgggttctcggcaagcacgatgaaagccctgcatgaagccggcgccgtccggatcatcgcggcaacgcaacgagatttttcgaaggaatggccccgcaccgctgagcagtacctcacagaggatctgctccagtggcacttcagcgagactgtacgcgccatcgcccttggccatgaagtaccagcggaggtcatcgcggttcaccaggagcgctttgatcaggcgatcgccggcctgcctggcgatgcaccgatcatggtggccaccacgttggacagcctcgccctgggcgaggtctccgcgccggcggaggcgccagaccccgcgcgcgtcgaaacgctggtctggggcctggaggtaggcaacctggagcataactcgacgttcgtgctcgatgctgctggccgcctgcactgcacccagggcattgagctgctggaagcggttcgtcaaaagggctattgcgtcccggtgcaaacacagctcaccgaccaggacggcagggttgtgacgtgcgaggcgatcgctgaagtaatttgcgctactcagatgccttattcatacgagatatctaccccataa

SEQ ID NO: 332266 - DNA, 342 bp, Pseudomonas aeruginosa
atgtctgacgttcgctaccgcgaagcctacgaggctgcggccgcacagatccccgccgatgaacctctcccctcctttgaggagatgatcgaatcgcttcaggctttgctcgatgccgatggccatgacgaaggtgtccgccagctgctcgcattccagaatttcgaggccttcttcacctggttcgataccgtcaccgctttcgaccagatggacacagaccagtcggccgaggctcacaagccgctcctgcagatcgccttcgatgccctggtcgagcagtgccaggcagaagcggagcaagactaccagcccgatcccgcgccggcatacggcctctga

SEQ ID NO: 332267 - DNA, 1098 bp, Pseudomonas aeruginosa
atgggcatcacgaaatccctgatgaacaccggcagccgcgccatcttcaatcggatgtctggtcttttcaaagacagccctcgcctccagggcctggtagccaagggcgccgacatcatctctccggatggcccggacaagtccaccacctcgaatgcactggtcgacctcttcaagcggaaggggctgacgctgctgcaggaccagctgagcaatggcagcaaggcgggcttcgtgcagagcctgctgagcaacgataacgccaagtctggcttcctgatgaaagccgcattcgtggtggccccggccctcgccgtggccatcaccgtgctcggcaagctgacctcggcgctgaaagaagccagcgcccgaacccataaccagacgccgctcggcgacctgatcaaggccggtgaaaccgccactccagccgctgccgcgccgcgcagcccggccgacgagaaaatttcggatctcgaatgggagattcaactcgccaaggacgtgggccgcggccttcaaaccaacctcgacaaggccaagagcaccccgggcgttcatccgggcctcatcgccgactttgagtcgcagatcgccgacaacacccgcaagctgcagcagaagcagaccgagcttcaggcgctccagaacccttccgagcctgctcgggccggcaccgatctgatgagcctgctgcaaatcagttcggtcccgatcacccagacccacagcaacgtggacgccgccttcgaagactggacgcgcagcgagaaagcctcgcgcgctgagttcggccataccgagcgtcaactgcgtgagacgcagaacatcgtctacatgctgcagaccgacctgcgcaacgatccaggcaacgccgagatcgagcgccgactggccgacgccaagcagaacgccgaacgcgccctggatctccattccgagtccatggacaagcggcacgcgatcgtcgagcagggcaagatgttcggccaccaggccgagaccttgatggcgagcgaaccggttccggaagactggaatcgaccgaaggacttcatccctgacaactgggatcagcctgccggcccttctcgctaa

SEQ ID NO: 332268 - DNA, 243 bp, Pseudomonas aeruginosa
atgcaaatcgaaaccgcaaaacgccttcagcgcctggagcgctgcgctgagctcatccagggcagcagcgagaccgatgaatcgaaggctgaaagcctgagttacatcgccggctacaccgccctgctcaaaggcgttgaggccgacggcgcaactgacgaggaaccggatgtggtcgctgccatcgtcaacctcgacgagttctgcgacctggttgaacagaccgcagcacaggaggcctga

SEQ ID NO: 332269 - DNA, 435 bp, Pseudomonas aeruginosa
atgagttacctggggcacgcccacactcgcgcaggctgggacttagcgctcagtgacctcaagaatatggcggaacggatcaacaatccgtcgcttgcagccaagctgttcggcccatcgcgtcaagaggcagtcgaagatctcagggggcatttccgcgttatgtttgacgtgatgacgcctcaagagttgcagcagatcatcccgcaactaattcaagaccctgcctattcccatgttcgtgccctcctggctcccgaagtgcagcagcttaccgatgcgctgcgctcgtcatcaccaagcacagtgggaacccctctcgcttctctgattgcccccaccccggctgatcagaacaaggaagcggcagcccaactattcgaagcgccagatcaacaataccctcccagcgatctcgaagccgggcctaagtaa

SEQ ID NO: 332270 - DNA, 426 bp, Pseudomonas aeruginosa
atgtcgaccctcacccgcgaagcactgctcgccatgccggccgatcagtacatgacggaaacccaactgaagttcttcgagaccctgctgcagtccgagctggaagaagctcgccaacgtcaccacgacgcgcgagagactatgcaggaccgccccaacatcgcggacatctccgactgggccagttccgaagaagagcgcaccaacgcgctgcgccaggcagagcgcaatgagcagctctgccgcaagatcagcaaggccctggagcgcatccacgacggcagctacggctggtgtgaggaaacgggcgagccaatcggcctgcagcgcctgctgctgcgccccaccgccacgctgtgcatcgaagccaagcaacgtcaggaggcgcgcgagcgccatcattacaagatccgcggcgcggcctaa

SEQ ID NO: 332271 - DNA, 600 bp, Pseudomonas aeruginosa
atgaggcaacccaacgcatacttgccaggaagcaaccagcgccaagccggcgcgctcaccgaatttgaagaattggtcgtgctgaatgacgaccaaccggtgggcgtcgcacttgcggacgaggcgcttgcggcgggccacacgccagaggggctgaggggacaagttgtttatgtcgacttccagaagaacgttgcctacccggcagatctgggtccgcacgaagatctgattcctcatgctgttctcgaagtgaacttccacctgtctggcctgggcagctacccgagccgcgaagcccgcacagcggcgaaaggtgtcctgcagcaagcgctcgcatcgacgcacctcgccgaacagctcagcgcctgccttcgcacccgccgcggggaccgcgccctcacggtcgccagtgaggtgatcgaggactcagttccgggcaccgctacggccacacaatcccgacaagttctgctccgcgccctggaagcattctgcgaggagctgcagcggcacccgcaagcggccttgcttcataccccaatccctgaacctgagtgtctgttcaacgaagagttgagccaggcctcaccacgctga

SEQ ID NO: 332272 - DNA, 543 bp, Pseudomonas aeruginosa
atgagcaatcaaatcgaccatgcagcggcgcttgccgccgctcgcacacccaacgtcaccgcgctgaccgattacctgctcgacgccgagtatgcggacttcagatccatgtgccaggcaaagcctggcctcaacgacggtgttccacgtccgttaccagggctgagcgatacagatctggctcgctgggaaaccgcgtgggagttgttcgccgagggtgaggatgagtcaatgcccgaagctgaacgggactggttcgccgccaatggcgcgggtcatgtgtggtgcgaagtcatccgcgcccgcggggacggccgagtcaacctgcagctgctcgcaaaagccgaaggcatgagtccggacgcgccggccgacgaaatttttcgtggccgacgcatcgatccagcggactacgccgaggagatgcaccagttcatcagcagcagcggcatgggggccgcattcgcagactttctcgccgggcagatccttctacaggagcggttcgttgaactcgtggattcgtccgagccgtcactctga

SEQ ID NO: 332273 - DNA, 339 bp, Pseudomonas aeruginosa
atggcgatccttgccgccgaagaagactgtatccaggtcgaggtagtcagcccttcagtcatcagcctcgacgagcaacacaaaggcaactacgcggtgggctcgcgcgtcgagaaaggcattcgggtgtattacgccaccctccagtgcacggactgtgggaatagcgactccggggtctggggtggcccctatgaaacccgcgaccaggccgagcagaacgtcgggcacagcctcgaaaactggatcggcgccatggatctctttgccgactccatgattccaccgggagaggaagagatcggactcgaccaccagccacctcccagcggtctgtaa

SEQ ID NO: 332274 - DNA, 954 bp, Pseudomonas aeruginosa
atgaagaagctcatcacccctgccctgatgctcacgatccttaccggctgctccagcatcccgcaggattaccagaacaccgcaaagttcggcggcatcggcgcgcttgccggagcggtcgccggcgcagtcatcaaccacgacaaccgagcccagggcgcacttctgggtggcgtactgggtggggcgggcggcgccggctacggactgtatgtcgacaagcaagaggccgagttgcgttcgaagatgctcgggacaggcatcaccgttaagcgcgacggcgacaagatcaacctcgtgctgcccgacagcatcaccttcgagaccggcagctaccgcctcactccccaggtgcagcaagcgctcaacgaagtggctgcttcgctgcagcgctacccaggcagcagcctgatcatcactggtcacgccgatgcaaccggcacgcctcagtccaacctgcagctgagccagctgcgcgcgaatgcggtttcggtgtacctgcagagccaaggcgtggagccttctcgcctgactgtcctggccgctggcgacagcgcaccgatcgccgacaacaacaatgcccaggggcgagcggccaaccgtcgagtcgagatgaccgtgacacctggagccgccggcgcagtgcagccggtctatcaacaacaaccccatacgcagtaccagcagccgcagcagtaccggccttcccagactcaacagcgctaccagtacacgccggcacctgtttatcaggcgccctacaccacaaatgcctcgaagcggattctgagcaactccctgctgcagggcatctcgcaagccatcaccaacggcccggccgcgggactgcgctccggcatggccaccgctacacgaggcgcaacccaagaggcgactcgcgaggtcaacagcaccatccgcgactatcaatacgacagtttcgggcggtactga

SEQ ID NO: 332275 - DNA, 1155 bp, Pseudomonas aeruginosa
atgtggttccgcaacctgctcatctaccgcctgacccagaacatcaacctcgatgccgaggcactggaggccgcgctggccaccaagcccgcgcgcgcttgtgccaaccaggagttggtgacctacggttttgtcgctccggtcggaaagggcccggacgcccccttggttcattcgaccaatggatttctgctgatcgcggcccgtaaggaagagcgaattctgccgggcagcgtggtgcgtgatgcgctgcaggagaaggtcgaggaaatcgaggccgagcagatgcgcaaggtgtacaaaaaagagcgcgaccagctgaaagacgagatcgttcaggccttcctgccgcgggcgttcatccgcaagagcgtcacctatgccgcaatcgacgtggcctccaacctcatctacgtcgatgcctccagctccaacaaggcggaagacattctgtccaccatgcgtgaggcgatcggctccctgccggttcgtccgatcagcgtcaaaatcgccccgacagcgacacttaccgattggctcaagaccggccaagccagcgaggggttcttcgtcctggacgagtgcgaactccgtgacacccacgaggatggcggcgttgtccgctgcaagcggcaggacctcaccagtgaagaaatccagctgcacctctcctccggtaagcaggtcactcaactggcgattgcctggagcgacaagctgtccttcgtgctcgacagcaagctgacgatcaagcgcctgcgcttcgaagacctcctgcaggaccaggccgcgcaagatggtggcgacgatgctgccggccagctcgacgcgagcttcaatctgatgatgctcacgctgcaagggatgatgccggcgctgctggagggcttcggtggcgaggaaattccgcagggcctgggcaccgaagcgccggcaaacgttgaaacggacgatcctctctacgaccaggctgtttcgtatgtcctgacttcgcgtcgcgcgggtgtctcagctgtccagcgcagcctcaacatcggttacaaccgtgcagcgcgcttgctggagttgatggaggccgccggcgttgttagtgcggcttcagctgagggccggcgcagcgtgctgatggcgccgccggcagctcaggtggcctga

SEQ ID NO: 332276 - DNA, 492 bp, Pseudomonas aeruginosa
atgatgagtgttccagaggatgtcatcgtgctcgatgagttgcgctcgaagatgtaccaggatctccgtcacctttccttgcgaatgcctgtcggcgtgagcattcagtcatgcgctatcgctggtcagcccactggccagggttcgctctttgatcctccggcggcggatgctgttgcgggttatgagtggccgccgggtagcgggcggtgcctgacggttcagcagctgatcgacagctgccccgttggcagagagggcgatcaggttccggtgacggggctcgatcgatacaacaaaggcgcgcctttggcggccgcgcgtatcttggccgtcagcctcgggcacctggaggatatttcagatgacgagatccacgctgaaggctatgcgaactggacggagtacgcgttccactggaaccagcgctatccgaaggctccgtgggatctgaacccgctgtgctggattattcgggttgtccaggggtga

SEQ ID NO: 332277 - DNA, 300 bp, Pseudomonas aeruginosa
atgaaaccagacgaaattgacgaactgttcgatcgcttcgcgcgtgatgcgtcgaaggcggcctttgccaaagggcttgaagccggcagacagcaaggcttcttcgaggggcatgcggtcggccagtacaccggctttgtaggcgcggtgaacatgctcaagccggcactctccgatggccttcgccatgggtcacctgagtgcggccgcgcaatgcaaggcctgcgcaacatgatcccggactatgtgaccgacgacgagctcgctgacgcgttcgagcaggaactggcaaagcagtga

SEQ ID NO: 332278 - DNA, 531 bp, Pseudomonas aeruginosa
atggaagctatcgagatcggtgccgtcatgcttgacctggccaagggcgagcctgttgctgaattcagcagcttcatacgaccgacgatcaagccgctactcacccctttctgcatggggctcaccacgatcactcagcgggatgtggactcggcccctgggtatttggatgtcctggccgccgtcaatgacttcctccagcccttcgaagatgagtggctctggtgctcctgggggaactacgatcgaaaccagctgatcaaggacgggcagcttcatagtcttgcgccgctcctgccgccggcgaaacacatcaacctgaagagatgcttcgccaaggagcataagtccaaggcggtggggttgcggcaggccgtccgccagcttcagcttgaatgggttggcactcatcatcggggcatcgacgatgcccgcaatgtgggccgagtggccatccgcatgcttgaggctcaagcagaacagcttcttcaagcgctcggcgacagtggatctgcacctggcacagcctga

SEQ ID NO: 332279 - DNA, 1008 bp, Pseudomonas aeruginosa
atggctgcggtggatacggcccgtgtagacccggtggcgataattgaggtgcttgagcagatcgagcacttcaagtcggcgctgtgcgcgtggaatacatctcaccaggcgttgtttgccggcgcccaggccagccatcggggcggctggatttccggtgcccgcggccttcagccgttccagccgaacgaggcgattcctgatgatctgcgccgagctctatgtgggcttgaatcagatgagccaagcttcttccgtgccagtggccctgtttttgtcggtggcgagctggcaagtctggtgcagcaagcgcaccagactcgtgttgacctcgatgttgccagcaggccgctgcgccgattgcgcgctggcttgctggcccgccttcctcaaggcggggagatcggtggcggcaacctgcagcactggctcaagctcaagccgcaccagagcatatggcgcgctgtcactgcgacatgcggtgttcctcgcctgcagatcaggtatgcggttcggccgcttctgctcgccggcgcacagccgattcttccgcgcaaggcctcgttcagtctcactccgcaccgggtcatcagccgtcggcatcccgaaaaggttctacgggcactcgaagagcagctggaatccgctgaacgagcggatgcggcgaggcgagaccttgcccgattggcctctctgcttcgcgcgccagttcagccagacctggcctacatctacagcggagacatcatccaccatgtcaacttcacctggggcgatggcagtcgccgcaaggtgaagacatcgcttccgctgttctggtgcggcccaccgatagacatccctccgccggatccggcagccgggcctcggcgccgccggtcggatatcaagtacagcaatgtcccgatcctggaaaccctgccgatatacggctccatcaagggtgtcgataggttgagcagttccactgcgcagccggtcgaccgcccggtcatgatttccgactaa

SEQ ID NO: 332280 - DNA, 357 bp, Pseudomonas aeruginosa
gtgtgggtgtctcgcccagatgagcacggcatcggcctgaagctgcacgacgatgagtcgaaggagtttttcgtctctttgcccgtggcgcatgacgcattcgctttcggcgagcgtatctccattgtgcatgcgatccaccccgccacggcgccattgcacctggccagcgtgaatctgacgaagggggagtggtgggagcaccaaacgtcccgcggcgtcgccaacttcttcgacgttgactcgccggccttcagcgatcggatggatacgcgcatccgcgatctgatcggctcgatggcgcctggggcgccgatgaagctggtcggggcccgggcgaacttgcggctggcttga

SEQ ID NO: 332281 - DNA, 489 bp, Pseudomonas aeruginosa
atgcagcttgagcgcaaggcgagttctcggcgagcgctgaatgcagtccccatttccatctcaaaggatgacgatctggaggccattgcaagcctcattactgccgctgcgcgtttggatccagaagccattgagttgcgcctagatccagatctgaatcgatcccagttgaaccaggttgtgcattacggaacgcaggcacaggaaagcggcgcagttgtatacatacaggcgccgaaagagttgagccaggccaaccaggtgcagatcccaagcggaaaaaccaggcgagcattggatcaagccaagcgcattcgtctgaacaaggagatcaccgatgcgctggaaaatgaaagcctgtctcttgacgacctggtaggtatgctccgacagatggccactggcaaggcgagcccagaagacatggagcttgtcatcaaactgctgggacgcatgggccgtctgagagaagtcgcttcctcggcctag

SEQ ID NO: 332282 - DNA, 2994 bp, Pseudomonas aeruginosa
atgccggtcggttttctgactcaagagcaacgcgacggttttggccgctatgttgattcgcccagccgtgaagagctggaacgttacttccacctgagcgatgaagaccgtgaagccatccaggtgctgcggggtaaccataaccgtctgggttatgccgttctgctgaccaccgtccgcttcgttggcgttctgccggacaagcccgccgccgtgccggtggaagtcctgcaggtgctttgccgacaactggcgattccagaccccgactgcctccagcgctatagcgatcatcgccgctggatacatgccaccgatattcagaaccgctttggctatcgtcatttcaccgatccgggcatcggctttcgcttgagccgctggctgtatgccctctgctggacgggcaccgaccggccgggagtgctgtttgagcgagccacctcgtggctgttcacacagaaagtcctcctgcctggtgtgtctcaactagagcgctttatcgcccagttgcgcagtcgggtcgaagaacgcctctggtttacgctgggccgcagcgtgactgaggaacagcgattgcaactgcaagacttgctgacggtggccgaaggcaaccgcagctcccggctggatcaattgcgctccggcccggtcatggtcagtggccccgcgttgattcgggcactgcgccggctcgatgacgtgcgcggcatcggcatcaccttgccggcggcggcgcacatccctcccagccgtatcgccgccctggcccgcttcgccaacacggccaaggtcaccgcgattaatcggctgccggcgtcgcggcggatggcgacactggtggccttcgcactctgcctggaggcgactgcgcacgacgacgcactggaagtcctggaggccttgctgcgcgacctgttcagcaacgcggagaaggccgacaagaaagcccgcatgcgcagcctgaaagacctggatcggtcggccgcgacgctcgccgccgcgtgcaaggtcgtgctggacagctcgatcagcgatgacaacgtgcgcgcccggctgttcaacgacctgccgaggaccaccctggaaaaggccctggaagaggtcaacgcgctgatccgcccggtagatgacgtctattttcttgcattggaagcgcgctaccgcagcgtgcgccgcttcctgcccgacctgctcaagcacatccgcttcggcttcagcccggccggcaagggcgtggcggctagtctggagtggctgcaactgaacctgccgcgccggaagccagaggatgacgcgccgcaggagatcgtggccaaggcttggcagaagcacatcacccgcgaagatggctccctcgacatgggtgcctatgtgttctgcacgctcgatgcgctgcgcacggccctgcgccgccgcgatgtcttcgtctcgcccagttggcgctatgccgacccgcgccttggcctgctcgacggtgccgaatggctggcggcgcgaccgatcatctgccggtcactgggcctgaccatcgacgccaaaaccaccctggacgccttgtccgtcgagctggatgcaacctggctggcagtagccgcgcgcctgcccgacaacccggcgattcaactgagcgagaacaccgagggcaagaccgaactgtcgctcggggcgctggacaagctggacgagccctgctcgttgctgcaactgcgggcggccgtgtctgacctgatgccgcgtgtcgatctgccggaaatcctcttggaaatcgccgcccgcactggcttttccgaggccttcacccatgtctccgaacgcaatgcacgcgccgacaacctggtcaccagcctctgcgcggtgctgttgggcggggcctgcaacaccggcctggagcccttgatccgcaccgacaacccggcgctgcgccgtgaccggctgtcctgggtcagccagaattatatccgcgacgacaccctgtcagcggctaacgccatcctggtcggagcgcaaagccaactggaactggcccaagtctggggtggcggcgaggtcgcctccgccgatggcatgcgcttcgtcgtaccggtgcgcaccgtgcatgccggccccaatccgaagtatttcggcaccggccggggtgtcacctggtacaacctgatttccgaccaattctccggcctcaacgccatcaccgtgcccggcacgctgcgcgacagcctggtgttgctggcggtcgtgctggaacagcagaccgagttgcagccgacgcaaatcatgaccgacaccggggcctacagcgatgtggtgttcgggctcttccgcctacttggctaccacttcagtccgcggctggccgatgtcggcggtacccgcttctggcgcacgcgcccggacgcggactacggcaagctcaacgggctggcccgccagtcggtcaaactcgacctgatcgccgagcactgggacgacctgctgcgcctggccggctcgctcaaactcggccgggtgccggcgactggcatcatgcgcacgctgcaaacgggagatagacccacccggctggcccaggcgctggccgaattcgggcggatcgaaaagactctgcacacgttgacctatatcgacgacgagtccaagcgccgcgccaccctgacccagttgaaccgaggcgaaggccggcacagcctggcccgcgccgtgttccacggcaaacgcggcgagctccgccagcgctaccgcgaaggccaggaagaccagctcggtgctctgggcctggtggtgaacatcatcgtgctgtggaacaccctctacatgacggcggccgtggaacggctcaagcagcacggctatccagtgctggaagaggatttggcccggctatcgccgctgatctacgagcacatcaacatgctcgggcggtattcctttgcggtaccggaagaagttgcgcgcggcgagctgcggccactgcgtaatccagacgacgacctgtga

SEQ ID NO: 332283 - DNA, 213 bp, Pseudomonas aeruginosa; identical to SEQ ID NO: 269210

SEQ ID NO: 332284 - DNA, 276 bp, Pseudomonas aeruginosa; identical to SEQ ID NO: 269209

SEQ ID NO: 332285 - DNA, 990 bp, Pseudomonas aeruginosa
atgcgcaacaggtacagccctgaaaccttcgaagctgtcatgtcgcttctgcgcgccggggaaaccccggcatggcggcgcgttcgcgagatcaccggaaaggggtcgagcaacacgatcctcgcggaggtcaaacagatcctcgccgaggttgcggagcgcgcttcagccggcgactacccaaagccggtacaggatgcgttctgcaccctctggctggagctgaaagcggccgcccgcggcgagctcgacgagttgcgcgccttcctccatgaggagaaccggcgcgcccaggagacagccagccaggctgagcagctggccgcgcagaccagggaaaagctcgcggaacgagaccggcaggtcgaactgctgcagcaacagctggacatggcctcgcagcgcgaagacggtcttacagagcagctgcgccaactgggcgcgcggctcgtccaggagcaggagaaactctcgactgcacacttagctcaccagcaagcccttgcggataaagatcaagagatacgccattggcagggcaagctggatacagaaacccagcatcgccaccaggtggtggccgagatggcgaccgagcatcaggccaaggtcgcacggcttgagctggagatcagaaacgaactggaacgctacgagaaggacaccgccaagttcatgcggcagctcgaccaggagcgcaccgaacatcgcaacgaactgaaggtgttgaacggaacggtttccggcttgcagacgcaactcagtgatgcgaagcagaagacggcccaggccgagggagagagcgccgctcttcgccggcaagttgaggacctttcaactcagcgattggcactggagcagcgcaaccaggtgctccaggctgaagcaatcgcttcgtctgcgcgcttggccgagctcacggaaaggatcacaacgctgcaacgggctgctgagcagctggagaaagccccctcgaatgctcaagggtga

SEQ ID NO: 332286 - DNA, 270 bp, Pseudomonas aeruginosa
atgatcatccgccggcggcgcctgcggagcattgatgtgcctaccgcccgcgtcttctaccgagccgctgaagcgataccgctgaccgagcaagtcgacgagatgccggaagcgattctggagatgctctatggcgaggactggcggaacacctacccaaggatgcaagcacccgacttcgacgcagtgttgcgcaaggtcattcggctgcaggccgccctcacccaaatgcaagcgtcgccggcatcgtgccagcgagggagtaactga

SEQ ID NO: 332287 - DNA, 624 bp, Pseudomonas aeruginosa
atgcactcatcgagcaaaaagcttccccgtattgtcatgtggcatggcggccggcagtgggacggcgccgccgacattcaccccggccgcaaaggccgcaacgagcgagcgccgggcatctactgcacaacccacttcctcagtgcgcagaaaaacgccaggggggatggtcaggttcgcaagctcgaactggagccgcgcttgctgcttgaatctgcagctattcccatttcggaagtagagagcttcgtccgcaagcacatccccaagcgcgcccaggcagaactcctgaccaagctccgcgcggcttccggacggcgggacctcgcctccagggttctggtaggagaggctcctcactgcctggccgagtcgatattaaacctctgcgtggaagctgacctggcccatggggcccggggcctcgcgctagccgcgcttttcctggcaaacggcatcgatgccagctttgaaagcgccgagggcaatgaggtgcttggtgtgatttttaaccccgcctgtatcaagtccaacgtgcctgtggaagccagtgaggttcctgcacacatgtacgagctccctgatcctcggtcatgccaaggtgacgacagcgcacccagctga

SEQ ID NO: 332288 - DNA, 813 bp, Pseudomonas aeruginosa
atgctgcagggccttcggcgccttgcgcgacggtggatcatgaagacgctcaatgctcagttgccgattcaagcagcagtcgacgcaggtagctctgggcgcattcgatcgcttgatctcatcaagtggatggccatcgtcctgatggttctcgaccatttgcgcgccgtctggcctgcagctgaaccgctaacggttccaggccggatggcgctgcctcttttctgtctcgcgatggcggcgaatgtcactcggcaagcccagggggaaaatccctgggcgcagaaccggcgctatgtcatctcattgatcgtattcgcagtgatcagccaggctccgtatcaggccctgttcggccccgggctgaacatcatgtggctgcttcttcctgcgcttctcattgccctggcgattcaccaccaggggcacgcggtttggctaggaatcattggtctcgcctttacgatcgccgccagcagccgacttggctaccacgcgagtgcggtgctgattcccgcggctatggtgggagccatcacgactgagggttgggtccgagttttctgggtgggttgtgccgcaaccctctgtgtaacggccaacctgctgataccaggtgttccagcattggcgtccgatggcgagccgtttgttctgctgatgatgggagcggcatttttggccccggtgttcggcttgtggttactgcgacagcgcgtccaattcctcctgcccccggttgggcggtggggttacttattctacccagcgcatctcgcagcttttgcgctgctgcgcctgctcacgcactag

SEQ ID NO: 332289 - DNA, 153 bp, Pseudomonas aeruginosa
atgaaaaagcaaaagccgatgcctaccgagaagatggagaaacctaagggtcagcccaaaaggcgcgatagtgagcttcgcgagcagatggggccttggctttcctgcccgccggtcattgatccctgggaggatggcccggtcgttcgctga

SEQ ID NO: 332290 - DNA, 1008 bp, Pseudomonas aeruginosa
atgcccatccgccacagcatcgttcacctgatcgacaagaagccagacggcaatcctgcagtgctgcatgctcgcgacagcgagttggccgcatcggacgcaatggagaatctgctggccgacctcaacgaaagctacaacgccaagcagggcaaggcctggggcttcttccacgaggagtccggcgcatacccgttcagtggctggctgaaggcctacctcagtggcgaacaggacttcacgaccttcagccgccaatctgtggagcagctgcagaagctgatggaagagtccaacctgtctaccggcgggcacgttcttttcgcccactatcagcagggcatgaccgactacatgaccattgccctgctactgcacagcgatggtgtggtggtgaccgacacgctcgaactcactccgtccaaacacttggatctcggccagctgcacctggccgcgcgcatcaacctcagcgagtggcagaataacaagcagtccaagcagtacatctcgtttatcaaaggcaagaacgggaggaaggtatcggactacttccgcgacttcatcggctgccaggagggcgttgacgcccccagcgagacccgcacgctgctcaaagctttcagcgacttcgtggagagcgaagatctcccagaagacgccgcgcgcgagaagaccggcatcctggtcgactatgcatcctcgcaggccaagatgggcgcgccgatcaccctggatgagctgtccggcctgatcgatgaagatcgtcctcgggcgttctacgaccacatccgcaacaaagattacggcatgtcccccgaattccccgcggataagcgcacgctcaaccaattccggcgtttcaccggaagggccgagggcctgtcgatcagtttcgaagcccacctgctgggctcgaaggtcgagtttgacgaggagcgcagcacgctcctggttcgtggcctgccgacccagctgattgaccaactcaagcgtcagaagggctga

SEQ ID NO: 332291 - DNA, 213 bp, Pseudomonas aeruginosa
atgaccactgctgaccatgacgaaacgctgtaccgcattggaaacttcctccagcctctgccagacgatcccgcggtcaaagggatcgtcctggcgcgggaggaggcccgccgcatggccaaagccgcgacgtgcactccgatcgccatctggggccagcatgacgaaaccatcgcgctcttcctcaatggggaagagttccagcctgtttga

SEQ ID NO: 332292 - DNA, 312 bp, Pseudomonas aeruginosa
atggtcgcaaccgccaagaagctgagcaaggcacagcaattcatcaaggacatgatccgccaccgtggtattgagttcgctcagatcgggatgatggtcgaggtagatggggccgtcggcacgatcgagggcatgaacgacagtgcgaacctgaatgttgtgttcaccaataagctcaaatacggcaagcacgctcataactgccaccctacgtggcgagtgaagtatttcgatgccgacggcaagctgatcgctcatcatgatggcgatcgctggctgatcaggccggagcagaaggcggttgttgtatga

SEQ ID NO: 332293 - DNA, 168 bp, Pseudomonas aeruginosa
atggaaacctatgctgccgctgcgctcatggccgagaccggtgtgaccgaaaccgaggcccgtatcgcgtacctggaagaggaattggccagcctgcgtaatgcgctccgtgagcctgtggccagactctttgggatccatccagacgacattccgcagcagccatga

SEQ ID NO: 332294 - DNA, 162 bp, Pseudomonas aeruginosa
atgaaccacccgatccaaccgctggtcgttgactcgcaaggcacgctgcgcttcaagtcgaatgcgatcgtgagttacttgctcgccaatggcgccatcgacatgaacatgctggcctgcaaagacttcagcgctgagatcgcgagcagttcgctcaattga

SEQ ID NO: 332295 - DNA, 1305 bp, Pseudomonas aeruginosa
atgcgagcagctgagtccgatcgcgagcaagccaccaaagcgggcgttcagctgttcacccatggcgggcctggctacccagctttgctggggatggccgcagacgctccgttctttctctacgtgaaaggtacgctgcccctgcagaacaccctcgctgtaatcgggacacgcgcaccaaccccgcggggctctgttgtggcaagcaagatcgcgggccacttcgcctcctctggcgtatccattgtgagcggcctggccgtaggtatcgatgctgcggcgcatgtcgccgcgctcgatgccggcgggcacaccgttgcggtgctcgggcatgggttgcaaaccatctacccacgcgagcacgcggcgcttgctgagcggatcctggcccaaggcggcgccctggtcagcgaataccccttcggtactccgctcgtgccaagacgcctgttcgaaagagaccgaatccaggctggattgagccaggccgttgtcatggttcagagcaagccagacggtgggagcatgcacactgcaaaagccgcactgcgctacggccggcgcctgtatgtgcccgcgccactcgatgccgacctcgccggcgacaaccctgccgtcgaagtgcctcgcatgctgtcccagggttcgccttcggacatctgcgagctgttccgctgtgaagcggagcgcctcgctgagatccagaccatcttcggtcgagaggactacgtgaagatttcccaatatctgcaggacagcgctcagctacctgccgccaacgtgttgccaacccaaggtcaggagaccgacgccatgcgaaatgaccgcaccccagcgcaagagcccgtctggatcaacccgaatcctactaccccgcttcggaccggccctcagtcggccgagatcgaggcgaaggtcgccgaattgcaggcacaggcgacacaagaacacgatgaggatgatctcgatgccttaaaggaaatcgaccagttcaacgactccatcatcaaactggagaagatcagcgaccagatgcgccgcgataacagtgcctatgcgctggccaagaagcacctggttcaatactacggattcaccggttcaccgcttgagcaagacatgctgcaggtcatcctggatggcatggatgcgagtccggtctaccggcgcaccgttgaggaagaggcctcggacaatctggagcttgctctgcaggctgcagccgtggtgcgcgatcgggcgatcctggcgaaggaagagcgcaaggagctcgacctgcagtccgcttccccatcctacccctga

SEQ ID NO: 332296 - DNA, 321 bp, Pseudomonas aeruginosa
atgagcacgacgcaaccggaatctgtctgcctcttcgcgatcaccggcactgatcaggtggccaagggcgcaaaggagcacttcttccacctggacagcggcggctgcagtgccgaggtcgcctgtgtcgaccgaggctacatcgcgttgcgagagtcgctcgtcgacccagaggaagtgaaattcatcgccattggcagcctggctgagcttttggggctgcatcggcagctgagcgctgagtttcctcgcgacggtgtttctgagtacccctctggccgtcggcaatcctatctggaagaggttctgccccatgactga

SEQ ID NO: 332297 - DNA, 1659 bp, Pseudomonas aeruginosa
atgaatcgaagctatggccacctcgccctggtcgatggttcccagtgggtcatgcgtggcgtcgcgccgcatgtggcgatccgtctcaagcaactcttcccgcgcattccgaagtgggtaaccgacgaatacttcttccccaatgatcttgcccattgcgcagatctttcctggttcacgactcgctacccgttgaccatctcgccggcggatgccgcggcgctggattggggaaggcaaagtttcgagcgagagcaggcgcggatggaggagatcctccgccccgaatacagcccctccgaaactgtcggcctgcgtcctggctgtgtgatccggcactaccagagccaagcggtcgacctcacgctcgcgcgcaagtcgctgctcctgggcgacgacgtagggcttggaaagacctacacggccgccgcgctgatcctgcacatggagacccggcctgcagcggtcgttgtccagacccacctgcaacgtcagtgggccgagaagcttggcgggttcaccgatctgacaatccactgcgtcaagggcacacggccctatgacctgccgccggcagacgtttacattttcaagtacagccagctgcttggctggatcgacaccttcaaggacggctttttcaaggctgccatcttcgatgagatccaggagctccgaaccggagcccagagtggcaagggccaagccgctcatgcgctggccaacagcgtgcaataccggcttgggctgtctgcgaccccgatctacaactacggcgtcgagctctggaacattatgcaggcggttgatccggggttgctcggcaaccacgaggaattcatgcgcgagtggacagatggcgacaagaaggtcaaagaccctcaagccctcggcacctatcttcgtgagcagaaagtcttcctgcgtcggaccaaacgcgacgttggccagcagatgccgccgctcaatgtgatcgtcgaagaagttggctccgattcggagacgcttcggtcggtcgagcagctggcccgccagctggccatcaggacaacagagggctccttcatggagcgcgggcgtgctggtcgggagcttgacttgctcatgcgacggatcacaggcgtggccaaggcgcgttttgtggctcagtacgccaggctgctcttggaggccgatgtgcccgtcatgctgatgggctggcaccgcgatgtttacgacatctggctcagggaattggccgacttcaatcctgtgatgtacacagggagcgagagtgacaagcagaaaaacgaagccaaagaggccttcgtctctggcaaaaccaacctgttcatcatgagcttgcgctcaggcgctggactggatgggcttcagtaccgctgttcgacggttatcttcggggagcttgattggtcgccgaaaattcatgagcaggtgattggacggttggagcgggaaggtcaggaagagcaggtcacggccatctacctcaacagcgatgacgggtccgacccgcccatggtcgagttactcggcctcaaggcgtcacagtcctccggcatcgtcgatccgaacgctccactcacccagcggcattccgacaagtcccggatccaggcgctggccgagcaattcctcaagcgcaaggcggcggcgtga

SEQ ID NO: 332298 - DNA, 393 bp, Pseudomonas aeruginosa
atgaacgccgagaaaacctactcaccacaagagcgtgccctcgccaggctgggggacttctgttccaggctgcgcctggatatggccctggagaaacgcgcccaggccgacctcgaatcagccttgcaggctgcgggccttgagttcgagcgcgaaaagcctctgtcgaagagcgatatcccggatttcctcgtgaaggtcgagggaatcacagtcgcactggagttgaagacccgggcgcagcgcaaagccatcttccggcagctggagcgttacgcggaacatggaatcgtcgactgtctgctgctgatgacagggacggccatggggctgccctcagcgatcaacgggaagccggcggcggtcgtatccatgggaggtggctggctatga

SEQ ID NO: 332299 - DNA, 591 bp, Pseudomonas aeruginosa
atggctaagcgcgatgtgcacctcaagttcgcgatcggcaacaagttcgtcaccgtcgagggtggttccggctatatcgctgatgcccaggacccgatgttcgacaccgtaaatatggtcatccgtggcaagaacgcgtcaggcggtgttggccccattgaggatcgatccttctacatccagcgtgaccagattctggccattggcctgaacttcctcggactggcatcccaaatgaccccgcggacgatgtgggcccgaagcggcaccgttgggtgctcgcacaaggaacccacgatctaccacctggttgaagaagaccgccgagagctggaggcatacagcaacgaggatctcaagcagcggcatgccgatgttcgcggccagtacgagaacatgcgtcggcgcgtccacacgcttcagcgctgccagcgactgctcgaaacccttccagactctcaggcgcaacagctcgacatgctgttggccttcctcgaaggcaccggttccttaccgtttggcgtccagcttgtcgcggtcccgcctgaggagatcgccgcattgatggctgaaggaaagaccaagcactga

SEQ ID NO: 332300 - DNA, 1014 bp, Pseudomonas aeruginosa
atggatcgcggccgccatgtgccggaaggcaatggggcctatgacgggcttctggctaaagggggccaatggaacggtgttatcaagacggtcgacagcgcgctcgatcaaccgctgcgctggcaaaaaagtcgcctgatcttcgtcaacagcatgtcggacctgtttcacgagaatgtctcggaacaggccattgaccgcatcttcgtcgttatggctctggccgctcagcacaccttccaagtgctgaccaagcgcccccagcgcatgaaggactacctctgcaatttctcgtgggaacgcgcagtcgaaaactgccgcggcgcggatggtgtctccgacatcctgcgccactccctggatgccttgcgcggtagcttcggcctgcgcccccgccgccccagtgaggctgatcgcagcagttggcccgtgaagaacgtctggctgggcgtctctgttgaaaatcaggacgccgcaaacgagcgcatcccgctgctgcttcagtcgcctgcggccgttcgttggctgtcgatggagccgctgcttggccccgtcgatcttttggctacgccggcgggcgacatcctctgccgatgcggcgggtgcacggatatggcccgagaaaaccccagccacgcaggcctgcagcgcatcgactgggtggtcgttggtggtgagtctggacgtgatgcgcgtccgatgaacccgaactgggttgtcgcgctgcgcgatcaatgcagcgccaatggcgtgccgttcctgttcaagcagtggggtgaatggcgtccgccgcttgacggggaggagttctctaccgccatgggccgtgctcaacgtgtccctgccttcatcgtggcgaagaacggcacggtgcattgctttgaaggccccagtaccgccgacggtgcgctggccatgctgcgtgtaggcaagcacgccgctggacgcctgctggacggccagttgttcgatggttaccccactaccctggattcggagcaagccaatggctaa

SEQ ID NO: 332301 - DNA, 621 bp, Pseudomonas aeruginosa
atgtctgaccttttctacttgcaggacagccgcagcattgtcggtacgggcgcaatgtggtgggcaaaggacggagctggttacaccaccagcctcgatcaggcggagcttttcacacgcgagcgcgccctgaaacagttcgagagtcgtgaaacggatctgccctggccggcggcatacatcgatgagcgcgcgcatcgtggggtggactgccagtacgtgcacaagaacgagggcgccgaaggtgaagcgttctacgcctacatcgaaggggactggaacggaaacgacttgatctggctcacccggagcctctcgcgatccagtgacctcggcaaggccagaaccttcacccgtgaggagatcagcgatctgctcgcggacgagttccacgtcacgccaatggaggcctcttacattgaaggcaaggcccggcgcctgatttcggtgagttccatgaatcatcgtgaggccttgcgtggcgtgcacctgaaactgccgaaaatcaaacggcagcgcttgcgccgctacctatcgaactgcgccggttgcggccgcttcttgagtcaggtccaggtttatcaggactgccccaactgcggcgcggataaccggccgtga

SEQ ID NO: 332302 - DNA, 381 bp, Pseudomonas aeruginosa
atgaaggctctcagcgttcgacagccttgggcttggctgattgtccacggccataagccggtagaaaaccgctcctggaagacgggataccgtggtgatctgctgatccatgcgtcccagggcatgacgaaggacgagtacgccgaagcgctttcgttgtgcggcaagcttggcgttgatctccctgagttttctgcgctggagcgtggcggcgtcgtaggacgggtcagcgtcatcggttgcgtagatgaaagcgactcgccttggttttccgggaaatatggatgggagatgagcgaggctacccctcttccattcatgccgtgcaagggccgtcttagcctcttcgatatcgactaccaggtgaacaccaatgtctga

SEQ ID NO: 332303 - DNA, 468 bp, Pseudomonas aeruginosa
atgaacctaaacgacctcggcaagaagcaaactgcgctgcagatgcgcgtacaacgctgcaacgcggcaaacgaattcatccaggcaatcgctagctgtggtcgccacttcttccgggatcgaggggctggccataacggtttcctcagcctgaatccacggggcacgatcgtttggttccatgacgattacaccgggcagcggatcaacatctcgaaggagggagactgggctggattctcgcatggcggaacgctcaagggactgctgcagtccatcggccggcatgtgctggctggctcccgccttcgccatggctacttccagccggtgatggacaacggcttcaacaacccctggggctacgaagaagacatcctgctcgtccgcgcagccggcattcgtctcgggctggtctctgcccctgcggagcctaccggcaccctgcagcaggaggctatagcatga

SEQ ID NO: 332304 - DNA, 1755 bp, Pseudomonas aeruginosa
atgacctcgctgaagaagcccgctccgctcgacttcaacacccagtatggccttgccttggacgattcggatgacgccatcatcgtggatctgttcgccgggggtggcggcgcaagtaccgggctcgaaatcggccttggccgccaggtggccattgccatcaatcacaacccggctgcaatcagcatgcacacagccaatcatccacacactaagcattaccaaaacgacgtgtggaaggttgggccgcttgaggcggttggctgcagaaccgtggggtggctgcacgcttcgccagactgcactcaccacagccaagccgctggcggccagccccgtaaaaaagaaatccgtgatctaacatgggttgtgatcaagtgggctggcattcttcgtaagcgcgagcaaggcccttggctgattagtctggaaaatgtgaagcagatccgccagtggggcccgctgattgccaagcgcgacaaggcaaccgggcgcgtgctcacgctcgacatgattgagtgtccgcgcacggggaagatggtcaaccgcgttgcagatccaggtgagcgcgttccgcgccacgagcagttcctggtgcctgacccgaagcggaagggagcaacttggcgtcgtttcctcgaatctctgcgtggactgggttatcacgttgactactgggttgagaagaactgtgactacggtgacccgaccactcgggagcgtttgtacctggtggccactgccgatggtttttcgcctgcgaagccgattcaaactcacgctgccgtgcctgccaatgggttgaagccctatcgcacggcggccgaatgtattgattggtccgacctcgggaagtcaatcaggggacgaaagaagcctctcgccgaagcgacgctgcttcgcgtcgccaagggcatcaaacgcgaagttattgagcgctcaagccctttcatcgtgccgatcgccaactggtcaaatgaggtcattcaccccatcaacaagcctctgaacaccatcacggcctggccgaaggggggatcattctcactggtcactccggttcttgtcggtgccggcggccctgcatacagcgggaagccggcgcccgtaggcgcgccgctgggcactgcgcttccacaaaatcaccgtgctattgccactgccttcttggctcagatgaacggtggttataacgccactttcagtagggctgcagaccggccgaccactacagtgacaaataccgggagccagcagcagctggtaacggccaacttggtgactctgaggaaagggtctgcggatagccctgcggacgcgccgatcaagacccaaaccgggggcgatcatcatgcattggttacctctgatttggtctacggcggattgactcaggaccaacttgacggtgccctgtgggtatcagccttcttgatcgagtacctgggagttggcgggaagttagtcggccatatgactcaagcggaactcctcgctttggtcaccgttcaggtcgacgggatcccttatgtcatcgtcgatgtctgcttgcgcatgctcaagcctcgcgagctttaccgagcccaaggctttccagacagctacatcatcgatcgcggacacgacggaagagagttcaaaattggagagcagacgcacatgtgcggcaacagcgtcagccctggaacgatggcagcaatcgcccgccgtaacgacccttggaaagcgcgccaactgtcgaggattgcagcatga

SEQ ID NO: 332305 - DNA, 1200 bp, Pseudomonas aeruginosa
atgagtcggcagatcgatatcttcggcgaaggcgctcccccgctgatcaccacagacaggcctgtagttgcggttacgcctcaggtcgaagcgatgcttgctcgcaatgctgtagtcgctattggagtcagcggaggcaaggacagtgacgcatgcgcgatcgccacttctgagcatcttgactcaatcggccacaccggcccgcgcctgctcattcatgcagacctcggatctgtcgagtggcggcagagccaggagaagtgccagattctggccgacaccttgggttgggagctggtaacagtgcgccgcgccgctggcggaatgatggagcgctgggacactcgatgggagaacaatgtagcccgatacaacagcctctcgtgcgtgaagctgatcctcccctggagcactccgagcatgcgtttctgcacgtcggagttgaagtcggccgtcattgccagctatttgaagaagcgcttcaagggccaggagatcatcaacgtcacgggtatccgtcgacaggagagcgctggtcgccgattggcagctatcgctaaagaagacccgcgactggcgcagaaggggatcagcagcgtcacctggaactcgatcattgagtgggatatcgatcaggtaaaagcagcggttgctcgccggggtatcaagctacacgaggcatacatcaggtatgggatgacccgagtcagctgcgtgttctgcatcatgtcatcgatgcctgacttgatcgcctcgaccacctgcgacgacaaccatgatgtttaccgttcgatggtctggttagaggccacctctacctttgcttttcaatcaaagaaatggctgggtgacgtagcgccgcatctgctggacaacgagctaaccgaccggctagcgctggccaaaaaggcctgcgagatccgagaggcagctgaagctcgtattccggttgagctcgaataccagaaaggttggcccatccgcaggcccacgttaaacgaagcgatgatcatcgctgatgttcgcctcaccgtcgcccgtgcggtcggtctcgatgctgggtttcttgatcattactcagtgctcgatcgatatgacgaactccttgcgctgaaggctgccagcacgccggctaaacccattcaacttcccgcaaatcaagtaaccgccgcttcggcgcagccgttgctgttcgtctga

SEQ ID NO: 332306 - DNA, 858 bp, Pseudomonas aeruginosa
atgcgagcgccgaagaagaaccaacccagcaatccagcagaacaccgcaagcagctgatcaagcttctggaggcgaacagccgtcgccggaatctctgggatgtcttcggtgacttcatcgagatggcggcgctgtccctcgccaatgctgtggattgggcgcaggccgagcagcgcgaaaaacgctacatgtccatcgtcaagcgctatgagccggacgaagttgctcgcttcccgcagatgctcgccgagctcacctccgcgctggagtacgggcccgatgacgtgctgggtcgcgtattcggcgagttggagttgcataacgccgcgcggggccagttcttcacgccctatcacgtctgcgccttgatggcgcgcctgcagattgatggcgccggtcacctggatgggctgatcgaaaaacaagggttcattcgggtgagcgagccggcctgcggcgccggcgcgatggttattgccatggctgaagccatgcaagagcgcggcgtgaactaccagcagtgcatgcatgtcaccgcacaggatgtcgactctcgcgccgtgcacatggcctatgtccagctcagtctgctccacatccctgcagtcgtgatcctcggtaataccctggcgttggaagaacgcgagcactggtatacgccggcgcacatcatggggctatggtcgcagaagctccgccgaggctatgccctcggcagcgcgatggatatcgcggcgaaccacgcgaccgcgccctgcgcagatcttgaagagcagctgggcctgcagcttgaagaggtcgcgcccgactgcgcagagccgctgctcacctctaccgcttgggggcagcaggcatga

SEQ ID NO: 332307 - DNA, 765 bp, Pseudomonas aeruginosa
atgaaattcaaaagaccgacagaggaggcgtacgaggagctacaggctgcctacgactactacaacgaccacctcttcgaggcgttgctgccgccgtgcctgatcaccttccaacgcgagaagcgctccatggggtatttctccaaatcacgcttcatccgccgcgacggtgttcaaaccgatgagattgcgatgaacccggacttcttcgcggtcgttcccctggtcgagatactgcagaccctggtacatgagatggcccacctctggcaggcccacttcggcaccccaagtcgagcctgctatcacaatcgcgagtgggccctgaagatggagcgcattggcctgatgccttcggataccggccagcctggcgggaagaaggtcggccagagcatgaacgactacgtgatcctgggcggccgtttcgacaaggtgaccaggcagctgcttgagcgcggctttgcaatttcttggatggatagatacccctcgccctatcagtcccccagtcagcccgcacaagccttcgcgcccatcggcgcgccgcaggcggagcagggcgatgaagcgggcggccacgccaccgcgcgactcgaagctgctttgcagattcctgccgcgaacggtcttgatgtctcgatccgcgaggctggcgacaagagcaaccgagtgaaatattcgtgcccaggctgcaaagccaacgtatgggggaagccgggactgaagttgatctgtgagccgtgcgagatgcgtatggagtga

SEQ ID NO: 332308 - DNA, 696 bp, Pseudomonas aeruginosa
atggccaccagtgctgccagctatgtgactgacgcaaccgacctcctggcggccctgggtgttcatcaggtgtcgccaggtgtatgggcgtttaccgacatccaaacagccagcgggacctacattcaccactcgcagcagccggtcgcgctggcggcatacgccgcggtcaacgctacgttcgcagccggccggttcccaggctacgccctggtgaacctggtcgacaaagttccgagcatggattacgcggagtacgcggcattagccatggtgtgcggcgcgccgatgccctcttttgaagggtcggacgcgcgagctcgtatattcggcaaggccgcctgggataccgtggagaagtatgagcttcaggggtgtttcgaaagacacaaccgacagcacccaggtaacggcgatcattacaacatgcgacctcgcggctacgactgggcagggaacagggatgcggttccagccgaactcaaggctatgcgcaagtcctatcgagcaatgtcaccactccagcaggtgatgacgctgacgatcctgcacctgtacaaccagggcccggacaatttcttcctgactggcgggtgcccaacgaagattcacgctgccgacgcgatgggcgtacttcgggcgcatgcggcactgcccgattggggccagctggtgacgaactacgccggatggtga

SEQ ID NO: 332309 - DNA, 825 bp, Pseudomonas aeruginosa
atgctgaccaaaaagcagaccatagtgatgatctctcgcactgttcgtcgcgcagaagataaagtcgccctcaatgagacctggaagacgctgaacctgcagcacggtatcggtcgcctgcacggtcggcagctagcgctgagtgagcaggatcaccagcatctgcgccggctgcttatcatgactatgaactttgatcctctgctcgacgacgtagccagtctcggcggcgatcgcctccagcagagccagttccgcgacgagaaggttggtggcgcccgtgccagcagcggcatcgtaatgctggggtctgtcaccggagagctagcgctgcacagtggctgttaccggctccctcccggagccactctgaatgtcccctctgatgagcttgcaggtatcagacgcatcgttctcgtcgaaaacctggctgttatgtacagcttgccgcggtatcggtggccggatgatcttgttggattgccgatgctctttcgcggaagcccgcaggttaccccagctgcagtgacgcaggcccttgcccatgttgctgaggtgatctgctttccagactttgatcctcaaggcatccgcaacagcctggttcagcctaaggcctgtgcgatcattgtgccgacagaggcggcgatcgctggcatcgtcacggctagcagggataaacctcaagactacgagcgccagagcgaagcgcgtctatggttgcgccggcaggagaacccggccgcgcagcgcctgataaggctgcagcgcgcgatttctcaagaatccatggctgggtatgagttggaggtttctaagctttga

SEQ ID NO: 332310 - DNA, 1248 bp, Pseudomonas aeruginosa
ttgaaggctgaagactggatcaggcttggggaacacctcaaagccaacgctgagatactggagtccatggccttgatggacgaaagcggcatgccgatgcccgacaggatgagcaaggggctttcgtggctgctgcagaagcgcctggtggacgaagacaatgacatgctgcgcctcagtggactgctgcttgatctcggcgcacagatatcactgcaaggctttgagcgcgctgcgccggaccttgaggaaagcctgatctccatcacccaactctgcgaggcctatcactctgccaagcaagatggcgccttggatgacatggagcgtcactacaagcgcctggcttacgccgcccggcaggtcgccacgcaccttcgtaatgaggccagttcgacgcgcgccttccttgagagcggatatggctattcccagcggctgagcgaccgcctggctgagatcagtaacgtgctcaatcgcctcaagcgcttgcaccagaagctgtcgatgttctcggacagtgggctgcgccccctggcgcgtggtgaccgtgcgctccaccggttgctgatcgacagcatgctgggtgctgtatcaagaaaccgtcaggctctcgacggcatgatctcccggctcaacaacctgcagtcgatcgttcgtaagcgtaaccgccagcggcaggtggtcaatgcggtagacctgtttatccagtcaggcaacagcattgatctttcccccctgcttgagcgcgcagatgccgctcagtggctccctgctcgaccactcaccatcaccggcgtgccctatgctagtgagagccaaactgaagctttctcgatcctcgaagcattgatcgctgaccttcctcagcccaaaagcaggccggcggccgtgatcgacggcccaaatcgggaggcggtcaatgtgccgcctgggcaggaagatcctacggcgatggcgccgccattcgcaaaggtgcacttggagtccatgctgagggcgctgatcgaaagtggagaagcgcagtcagccgctgactactgggcgcgccatggtgataattctgtagcgctgggtatctggctgtatgcgctagatgagtacgttacattgcaggtggccatcaagcgcactcagggtaaacgactcaattaccaggtgatcccggtcatcaaacccttctcccacgcatctgcgcatcgtgttgtgaccgaccttaccctgcagcgatttggggcgcacaggtag

SEQ ID NO: 332311 - DNA, 666 bp, Pseudomonas aeruginosa
atgagtattcatcggtctatcatcgagcctctgcttgaaggcgcattcatctgcccttacgccactccagagatcttccgggcgataagtaatcagggtgttgcggaggaagtacgtgcggcgctggctcctctcggtcgcacgcttgggaccctcggggaagaaggggctcccaccacctacttcgctcgttatgttgacctcctgcatcctggtgaccgtgcagcggctgtagcacagctggtcgtgatccgcgatcagctcaagccttgcttggagttcattcgcctgtttagccaggcggggcgctctgatgcctgtatcgcgccgggcgacactatttcctttgtcgacctgctcgatgccattgagtgccatgtcacctaccgcgaccagctgcgtgacctcagcggccacgactttttcagcaagtcgaagaacgggaaggacaacaaggatcgcctgacgcttgttctcaaggcgctggccgacgccggctacctggccaaacgcagcagcgaatcggctaactacgtggcaaccggcaaaatggagtacatctacaagctgctggggtggattgccgagtaccaccagttgtcgcctctgcctgatgagccggacgccgccggcaacgagcagggagggctcgatcttgaaggctga

SEQ ID NO: 332312 - DNA, 2067 bp, Pseudomonas aeruginosa
atgcggtcggacctcaatcctgctttgaacgaggatgcgtcttccgatctttatggcgtgcagctggacttggctcacctgcccactaccgtggccaccagcactccagagttggaggctaagattgctgagttgaacgccgttcgccaaggcctcactgaggacatggagggactggagcgcaagagtcgtggactcgacgagcgcaagcgcaagctcgaaacagccaaggctgaggcaagaagcgcaacgtccaaggcacagggtgaatacgaatctcgcgaggcggccctcgaaggtgtgatcgcaagcgcagaggctgatcacgccgaagcgaaggcggctcaagctgaacgcttggagatcgccctctccgcccgcaaggctgagcagcagaagctgaccaatctgcagaacgagcacaaacgtcatttgggcaatatgcgcactagcggccagcaggcgatcgcagcgctgctcgaagagcgtaacgcggttgatgcgcggctgacggagaccctcggccgactcaagcaaaccctgtcagacgagctgaagcaaatcgatgcagataaggccagcagtttgcgtgcccagggcatagaccctgccgaagtcattcgtatcgaggcagaggtcaacgcccttgcgagcaagatcaacaagctccgctcataccggcctgaggtcgagagttaccttgcctgggttcgtgacaccctcccccagctgccagatcgaatccaggccgtagagaaacactcggccaatgtggagcgtcttgagcgattactgaaggagtttgtcgatgagttcaatgccaagcttcagtctattagcagccagcgatcgcagcatatcaaggcagcagctgaggacaatcagcggctgcaaacactcaccttggccatgggtcgcctgatagacatcacgccgctcgccggcgagatcatgtccggggtgactgcctctgatatcgaggagcgggtccggcagctgcagatgacccgcagcacgctgcagcgcggggccagggatcgctaccgcaccatccgcgcgatcttccctgatcggggactggggcggacgccgcaaggtgccatgattgagcagataaccacgcaggcgctgaacgccagcggtgatgcggagaatgcttggctggaggccgccccgatgctgctcgaatacctcgaacaatcgcatccggatcaaaaggtccagctcatcatgcaggcggataacctgtcccgagatctctctgatcgacatgaagccttgagggacctgcacagtaagatcgccaagattggtcgcgaggctacggccaaggcagcagacgtgcttggcggtgccgagcgcgacggcgcgttccagcaggctcgtacgttcgagcaggttcaatccatcgagttcaaggtcgagtctcgcattcgcgatctttccttctggggtgcccttgaggactaccagcagcagtaccgccgttgggctgcgatgggtgaaaacgtcctgcctacggcgggcttcatggaggcgctgcgcaagctggaaaggcatatcagagaaggtgcgctgaccgccaagctgtctgactgcttcagcgtaagcgtgacatgccgcgagcagggcaggaccaaggtggccaacaacaactctgaactggtgagcgtcagcagtaccggggtcacgaaaatcatcgtcacgatgatctatgtctcgctgtttgagcttctgcggcgtgacgctgacttccagatgtcgatacccatcgacgaagcattggagctggaggccaagaactacatcgggatggtcgactacttcaattcgcgcggcatatcgatgctggcctgcttcccgggcggagcgcccgaactgcttcgccagttcccgaacaggtacacgcttcagaagcgcggcaagaccgccgatcaccgggatatcatcgtcaaggagtacaccgctgatgcggatagcgacctggatgagcttgacgccatgctggctgatcctaacccggtggagactactgccgtcgatgcagaagaggttgccgttcaatga

SEQ ID NO: 332313 - DNA, 1746 bp, Pseudomonas aeruginosa
atggcgcaactcctaaagatcattctgatcgactccttgtgcgcaggggccaaggcagagctggtgatgagtggtaataccagcgtcacgggctccaacggcatcgggaaatcgtcatttctcaagctaatcccggtcttctatggtgccaccccaagccgcttggtgcgggccggtactaatcacaagagcttcgctgattggtatttgcccaacgcctccagcttcatcgtcttcgaatacagcaattccgagggacagccgcgctgcgcgatcatgcatcgccgcggcgatgcctacgcctacaggatggtgccccatgcttgggatgcgggcctgctctacaccgattacgaggccggcaaactcgtcgcgcctggagagttgagccggcacctttcgaccaaggggctgcgctgctcccaagagctgttgccaaggcactaccggaaggtcatccagtacaacacgggcagtgcgaacctcgatgatgttgatgacgccaatatgcgcaaagaaatcatggctctgcgccctggtttttctttggcgcccaagcgcaaagacttcgccggcctggacaacgtgaccctggccctgctggaaagtcagggtactttcgacacgatgaaacagaccatggccgagcttctgttgcaggagaacggtgacccgagtcaggcgctggcaatgctggacgcccagcagtttcgtagcgtcgcggagaacctcgacagctacctggtgatggatgggctgcgggatgacatcaccgctctggccgaagcccagcgcgagcatcgcacagccaccatccaactggcgtaccagaagcaccatgcgctccaaatgaccagagaaatcaaggcgcagcaggagcaacgaagccaacgactcagtggactcgatcgcgaggaggaagaccttcgcgcaagcaccgccgctaagcgcaaggtgcaagaagatgctctcggcgaagcacgcgccaacctgcgctctgcgcaagaggccgttgaccagatcactcgccagcgtaccagctatgagactcgcggcatcgagaagatccgcagcgagtttgagacgctggaagcgttgaatcgcgagcaggagtcgaaagagcgtcatcttcagcagctgaagaaggctggccaggatatccacgacctctatgcgcggcgcgcgcaaggcgcgaaggattccgcggccgatcaggagcgctcaactcggatctgggccgacgacactcgcaaggaaattgatagccggctggagcgccggcgcgaggccaatattgagcaagagcaggccatcatccaggagcaggaggccgaggccgaagaacaacgcacccgggtggctgagagcaatacccgctacaccgttgaagagactcagatgagtcatctcaactccatgcgcacctcgccacaggcccaggccggtatcgatcaggctcgtgcgtcagcttcaactcagcgaaaggttgtcgatgcttgccgggcggcagaagagcagttggcacgcgatgagcgaaccctgaaggaggagcaggacgagctggccaggcagcacgggagcctgaagcgaaagcgcgatgagatcgccgccgagattgaaagctcaacgccggcgccgaaacccttctgggcttcctgcgtgccaatcaccccgactgggctgacaacatcgcccgcttggtcccggccagcattctcatgcggtcggacctcaatcctgctttga

SEQ ID NO: 332314 - DNA, 402 bp, Pseudomonas aeruginosa
atgaagaagcccgccgctgaattcaccaacgcccagcaatccagtttctttcgcctaatcacggctgagggaatcccgttccgagtcgcacttgtattgagtgacaagtcagcggatgagaatgtcaccagcgagcctttgattcagttcttcgacatgcgccactggccagagaaaggcggccagaaggtaagcagctatcacctttcgaccttcctggagtcggacgcagcggagcgaggactcaacttggacggtggcgttgccgactggacgctcgacccagcatcagtgaaggccgttattgactgggttcgcgcaaatccgctacccatcaatgaattggggaataccccggatgaaccggaggatcagagcctcaatcatggagcgcgtttgtaa

SEQ ID NO: 332315 - DNA, 2724 bp, Pseudomonas aeruginosa
atgctcgacctgaaggatctccttgcaatcgtactgcgctcaaccagttgcagcggtctttgctcatccggcgcgatctggagcaagacagtcatcaccagcgtcgacgcagaagcggcgcccgatatgctcaacagctttttcatcaaagaccttgaatgggttgctgctacatctccagacgcatggagcgccccgctgaagcaatacatcggcggccccctcggcgccgatgcacggatagatgtcagccgccgcgaggtctacctgaacttgagtttgcctgcgaggttccctcatgggcgctggcctgcgaaacctgagcactcgctagttttcagccagcaggtggccgtcaacgccttgttcggagaagcaccgagagaaggtctcttctcggtgaatggccccccagggacaggcaagacaacgctgctcaaggacattatcgccaatatcgtggtcgagcgagccaaagtgctggccgcgctcgacaagcccgagcgtgcattcaaaccggccgaaaactggcagatcgccagaaacgggaaggtcatccacctaaaagcgtacccattcatcgacgctcttttgggttttgagattgtggtggcgtccgcgaacaacggtgccgtcgagaacgtaacgcgcgaaattccggcgcacgacgcaatttgctcgaagacatgggacgagagtgctgtcgaccactttccggaactaggggcggccgttgcccagatagataaagcctgggggctctgcgcagctcctcttgggaaaatggcaaaccgcagcgctttcaccaggatattctggaaaagcccgaacagtttcaaggattggctatcaacagctcatctaacagagtgtacggcggagatgctggaagaggcctacggcggctcgtccatcatcactgacgcagctaaaatcttcctgtggaagaaggaaacactcacatttcagtcgaccctggccaaggttgaaacgctttcgcgttctgcagatgccctgatcgctaaaataaagcagcgtgaccaactcgcactgcaggctcgcgagaacagacaagcactcgacgataagcgcaaacccttcgaggcagcgaaagatgcagccgcagctgcaactgataaggtctcgatcgccgaagaacaactgacccggtgcacgctgcagatactcaagatcgagcagcagtccattcgatggtgggacttgccggcctggatgaaaaaacgtcgcgcattgggagaggcaaggcgtgcctcgcagattgcttctgctgagctaaccctcctggatagagagcgtggcgctgcagcgagggtcatggccgaagcacaggagcgctacgcgacagccgaaagccaaatgcagaaaagcctggccgacatagccaaggcagatgagcagatcaaagcagaaactagctccaactggggcctgccgggccatgactatgacgcccgtgagctttccatgccctggttaaatccggggtgggcgaaggcgcgcagcgacctgtttatcgcagcacttcgactccaccgtgttttcatgatgctcgaatcgaagaagatgaaaagcaatttgagcgcctgcgtcgactggctggacggccggctagcgacttcgaagagcatgatcgatccggcagagggtaatcgcgtggtggtcacccctcctagcactctgacgatacgcacagccaaggacgcgctgttctttgccgtgcccgtggtatctacctcgttcgcctccatgtctcgcctattcagcgactacggacgcggcgcatatggatggctgctgatcgatgaagcagggcaagccgcgccgcagatggctgtcggcgcgctcgcgcgttctaggcgcgccgtgatcgtaggggatccggtacagctggagcccgtggtcacggtttccgtagccgtccaggaaacactgcgtaagcaccaggatcctgtcgttggccacgagtggatgccgtgcaacacctccgtgcaggaattagcagatcaatcgaatccgttcggcacctgggcaggagagggcgaagatcgccgctggatagggagccctctggtcgtccaccggcgttgcgacaaccccatgttctcgatcgccaaccagatcgcatacaacggcaagatggtcttcggcgtgatacgcaagacgaacgacgacaacccttctgcctctttcgagccctcgtcctggatcgacatatcctcgaatgaggctactgatcattggatacccgcagaaggcgaggcgctaattgagttggtggagcgcctcatgggttctggcatcaagcccgagtcaatcttcgtgatttccccattcagatctgtcgtggccggctgcaggaatgtgcttcgcggcatcaacagcgagttgtaccgccgcgcaaaggcagccgccaccgacaagaacaagcccgtcaaggctgggcaaatccaggtcggcaccgttcatacggtccaggggaaagaggcagataccgtcgtcatggtcctgggcgggaatcccgagcgaccaggggcaaaagaatgggcagcgcagaagccgaacctgctgaatgtgggacttacccgagcaaaacgccgaatcttcatcatcggcaacagagccgcctggtcgaaagtgaggtactttcaggagacggcatggacgctgcctcgaatggcaacacaggcgaaagtgccaaactga

SEQ ID NO: 332316 - DNA, 804 bp, Pseudomonas aeruginosa
atgaaacgcctgaccgccacacagaaccctatcacgaaggtaacccagactttccaacgcgccgacgggtccgaagcgcgaattaccgcctccctggatgcaatcttcggcggcaagcctcacatcaccgtggagcgccgcggcggtccggaagagccgtggagggagtgcagcacgctgccgcatccggactggcgatcgatgtcggtcgacgagtaccagcagcgcggtcgtccagagcacttgcagacggtcaccttcgccgagctggtcaagaccagcgcactactcggccgagatctggaccagacggtagacgagggcctggccgcctacgcgccggggcaggaaccggccgtgcgccacgatgctccgctggccgagcacatcgaacactacctgagcgctgtgcgcgaggagttgggcagcgcccagttcgagatcggccagcaccacgctctagcccaaacactgcaggaattcttcggcggcgagttgttagcgatcatccaaccggcggacggagaagcggccgccaaatgggcatctactgcctgcaagatcgacggccaactcttcactatccatggagccatgaacggggaaagctaccgctccgaaggtgtggaacttgtcgccgtttatggcgcacggttcagcacgctcatcccgtcgtaccgcggcgagccgtacgaccaggagttggccgcaaggctgcgcgcgatcgggcgaagagagattcatgtgccggcgggtatcgaacaagcacctcacgcgatcgccacattcgagatgacatcctga

SEQ ID NO: 332317 - DNA, 819 bp, Pseudomonas aeruginosa
atgagtcagaagaaagcgctggatcagtaccccacgccggcgtgggtcgctgaatgcttggttcgggagcacttcgcggatctgagcaccgctgatgtggttgtggacccaacctgcggccctgggcgattccttcaggccgtgccgcagcatgtcagtgcatttggggtcgagatcgatccagagctggccggcgttgcgcgcagcctgactggccgccaggtgattaccggcgacttcttcaaggttgaactcccggccaggccaacagcattcattggaaatccgccattcaagctggccctggtcgaccggctcctcgatcgtgctcatgacctcctgcaggatgaaggccgcgtcgggctgatcctgccctgttacgcgtttcagactgcaggacgggtcgtgcgatacagctccgattggagccttcagcagcagatgattccgcgatcgatctaccctgggctctcgaagccgctgatgttcgctatcttcaggaaggatcggcggcggctgatgatcgggctatcgctctatcatgaagccgctttcgttcaggctctgccggagggcctgcaggaggccctcgttgaagggccggttacctgggaagggcttgtgatcagcgccattacggccgccggcggcgaggcggcgctggccgacatctacgactatgtgtgtgcgcgacggccgaccgcaaacccgcactggaaggagcaagttcgcaagatctgccaagcccgggcgcggagaactggacgtgggcggtatgccatggttcaggatgtcatctcgaatgtggcgatcgcgtga

SEQ ID NO: 332318 - DNA, 270 bp, Pseudomonas aeruginosa
atggcatcgcaggctgtcactgtaaaagggcaagtcactctcaagcgggacttgctacaacacctcggcatcaagccgggagagcggattgactttgagaagctgccgggtggcgaacttcgggttcgggctgcgcggccaaccggcaccatcgacggctttctccatgccctcgatggtaaggtgaagatgaaaaagccgctgacgattgaggaaatgaacgatattgcggcggcaggctgggcgggtcagttggacgaccacgaatga

SEQ ID NO: 332319 - DNA, 396 bp, Pseudomonas aeruginosa
atgaaaatcaccgccgatacaaacgtgcttgcacgcgcaattctgcaagacgatcccggccagtgccgcaccgcccgcaaactactcaaggatgcaaccttgattgcggtttcactgccgtctctgtgtgaactggtctggatactgcgacagggagccaagctaccgaaggaagacgtttctactgcgatccgggcgctgctcgacaccgggaacgtggtcatgaaccgtcccgccgtcgaggccgggcttgccctactcgaagccggtggagatttcgccgatggaatcatggcccatgaagggaagtggctgggcggagaaactttcgtttcgttcgacaaaaaggcggtaacgctgctgtcgaagcagggcgaatctgcacggcttctgtga

SEQ ID NO: 332320 - DNA, 1251 bp, Pseudomonas aeruginosa
atgcctatccaacaaattccgccagcacaacctccagtggtgatcctcgacgaattcggctactacttcggaggccgaaacgacaacctcaaggaagacctgcgcaagatcgacggcgtgcctaacgcaacctatctggtcaagggcaggcaggttttcgtgttcgacaagttggtgcaactggttgaggaacatcgaaagctccaaccaggattgccgcttgccgatctggcacgcaacctgatcgcagaagcgaccgtttctgcagatgaggcggtagatacatggggtgttgtcccagaaccctacgagctggccgatcattcagcaagcggcttgatgatccggcaccgcccgttcaatgcccgactgccgggaaccttccaaagcaaggacggcgcacgggacgccttcgccaacctgctgctgggaggcatccagtccgggaatggcgatttcacctaccggggccagcccatgacgctatgcgatcctctcgacactgcactgctccccccgcgacctgtcatccagcatgtgaaggagccagagagcttgggttacaccgccttgggccatgtggcgtatgcgtcgggtttcgagccggtttccgaggctctgtttgacgatgcgaaggaacgggaggctgcgtggaagaacgacagcacccgagccgcccggtacgctcaagagcatatcgcagacatctgggcacggacgatgacacttcaactggaagcgctggatgacccgaccgacgaagtgccggagtatgggctagatgacttcgccgagttgcgcccgctctaccccgaactgtccatgctctcggatggtgctctttacgcgtggttcgatgcgtatcagtccgagtgctgctacatcaacggctgggcggcaagccgcgacgatgaatttttgttctatctgctcggcaaggttgccggaagtcagcacgagcaggactcggccaaggaggttgggcaatgggttgcttatgccctgctgcgcggcgatgcgctgggtgatgccctcgcctttggacggtcagcggcattgtacgacagcgcaatctcccgcctagctcggaggatcgcggatgctatgcagttcgtgacggacgacaagaaagcgactgatcttcgggggcactccatcacgaccatgatggatggcttccgtgctgcccggaagttcagcactacgcccttcgtggcagagcagaacgtcgcggacttcaacgcagaatag

SEQ ID NO: 332321 - DNA, 1965 bp, Pseudomonas aeruginosa
atgttcaagcgccgcacaactcagccacaagaattactcggtcgagctgtctttgacggctatgactacgggctctcattcgcctatgtcgagggcttgggccgggcgctcggcgctcacaaggcccggtgctttcgcaggcctggccatcgccttcacaacgcatggcgagtgccgaaatcggtcgtgcacgaagatctcagcgagttctttgcggcgatccaggcagtcgccggcgatgccttccccgaaacgctggagacgttcactcgcaagctcgatcaagccagggctgcgccggtggcggacgccttcactgcagggatctgtgttcggctttcggccatggtcgacggcaaggtgctcgcccgcggcgactatcaccccgggctggtggcgatttaccggcgcatgcgcggtgtatttctggggccgagcaaggcctggaagatcaactgcacccccgaggttctgcgcagcaacctcattgaaggccttggcctcagcgaggatcaggtcgagatacttgaaggcgtgcacgagctgctggaggacggctccctgactcaggctcgtgagtgggattccatcgcggtcggcggcacaaggccggagccaactggcgaagaagatgacctgagcgaaaacgaagtctatctggccagtattcctgagatcactcgcaccaactggaccccgactgccctggccgaagctttgacgcggtatgagctatatgactaccagcgcgatggcgtcgggcacctggtgcgccggagcagtgcactacttgctgacgatatgggcctcggtaaaacccgccagtccatcgttgctgctgacatccaggcgcagggccggccgacgctgatcatctgcctggccagcctggtgatcaactgggcccgcgagatcgccgcggtgaagccgggcgatcgcgtggccattcaggaattcgaccccgaggcccagtgggtcatcatcaattacgagcggcttggccaattcgtcaaactggccgggcacttctcggtgatggtgatcgacgaggcgcatcgcctcaaggaacctacggccgagtggacgcggcatgcgttcgatatcgcctcgcagatccccaatcgctacctgctgaccggcaccccggtgctgaacagggagagcgagctccatacgctgcttcgtctgtccggacacccgatcggccagatgccgctcaaggccttctgcgagcagttcgccggaagcagtgagttccgcacgacactgcgggcccgcctttccgattggatgctgcgccgctcgaaggacgtgctcaccggcctcaaagggaagcagcgtcagacgctcgcagcgcgactgtccgtagctgatcgggatgcttacaaggcgatcctctcaggtgacaagacgccgcttgcgcgcatcggcgcgctgcgatcgcttcttgagcgctccaaggccaatgcctgtcttgaaatggttcgagatctcgatgcagaggacaaagcgattgtcttctgcgagttcatcgagacggtcgactggctgaaagagcagctggaggcatgcggcatcagcgtcgtcacgctcaccggcaagatgtcccgaacgcagcgtcagcgatcggtcgatcgcttccagtcggacgagggcgtgcgggtgttcatcggtacgacctctgcggccggcaccggcatcaatctcaccgcggcgaactatgtgatcttcgccagccttccctggacgccggcgctccaggatcaggcagaggacagggcctaccgtaatggccaactcaggatggtggtggtcaagatcccgctagttgaggattcaatcgaccaagggctgtgggaaatgctggcagcgaagcgagccgttgcccgggatctgatcgatccgactgatctcgacgagagccaggcaatggcctctgctgcggcgaggctcttggcggcataa

SEQ ID NO: 332322 - DNA, 636 bp, Pseudomonas aeruginosa
atgagtaacgccgacgctgcacagaactctgccgtcccgatataccggggccaagtggttgtttacccaagtctcaaggccaaggagatcttgctggtggacgaggcaagacctggagactccggacaactcgaatggcagccggtcagcgaccctcacctcatcaaggccgccctcgccggataccgcagtatcccggaagaaggtgacttctcggatcacgtgcgtgtttcaacgctgcgccagtacgccgcgaacctcatggcccgggcgcagctgtctttctcgattgttggcgacgggctcacgcagcagaccgcatcgggagtcgccgacctgctaatgcacaagcactccggctacgggattgtgcactttgctgtcgatcagggccttgaggccgaccgcccctgtctggcccagatcgagcacgcgctggcgatcgcaacgacggcatgccttccctcctccacggtccaggcactggagtgcctgcgaagcggtgaaccctcccgctcgatgttcactgtcgacgaggaactttcgtcgatcctgcttcaacatcatgagttgcacgccgttgatctgtacggcgcgtgcgcgctcagcaaccagctggcattgccagccgcatag

SEQ ID NO: 332323 - DNA, 1128 bp, Pseudomonas aeruginosa
atgaccgagatgacgctgaaggaagccctgcacgagtacaagactagggtttcgatcctcaaaaaaggctaccagcaggagtgctaccgagtagagcacctggccaactccatccttggcagcaagatcaccaggcagattacgtcggtcgacattgcaagctaccgagatcagcgcctgcagcaggtcaattcgaaaaccggtaaacccctctcgccggcgactgttcggctggaaatgtcgctgctgtcgaaccttttcgaactgggccgcattgaatggggcatctgcgacgacaatcccgtcctgaaggtacgcaagcccaagagccctcccggccgagagcgacggctgacagctcgtgaggagcgtcagatcattcgctatgcacacaatcacccaaacaccgagctgtactcgatcatcgtcatcgcgcttgagaccgccatgcgccaaggagagatcctcaagctgcagtgggagaacatcaacctgaagtcgcgcgttgcacacctcccagacaccaagaacgggaccaggcgcgacgttccgctctcgctgaaggctagagacgccctgatccggctcggcgtccaatccaagggcccagtgttctcctacaagtcgcagggcatcaagtcgacctggagagtgatgctgcagcgcctcggtattgaggacctgcacttccacgatctgcggcacgaggcaatcagcaggcttttcgagttgggaaccctggacatgatggaagtggccgccatcagcggacacaagtcgctcagcatgctgaagcgatatacgcacctcaaagcacagcgcctggtgaagaaactcgaaggcggcaaaagcaagggccgtcaggtggtgatcaaccacctgatcccctaccctgcagccgtctcgcagacgagcacaggggtaacgatccgactactcgacttcgaagacctgagcgcaaccagcgaatcgcgtgaaacggcactgagcctcgcccaggaccagctgctgaggcgcttgatgacttcgcttcgcgatgccgacccgatcccacctccagaccagtacctggagatgatcgatgaaaggcgtgtggtgatggtagatccgctcgcggccgcgtgctga

SEQ ID NO: 332324 - DNA, 720 bp, Pseudomonas aeruginosa
atgcagaaaggccaccctcgggtggcctttctgcatggcacgtgggcctgtagggcgaataaccgcttgcggttatccgccgttgtggcgggatctcggcggataacgccggtggcgtattcgccccacggaacggagccccctccagggtggccttccagtgtggcacgtgggcctggtagggcgaataaccgcttgcggttatccgccgtcgtggcgggatctcggcggataacgccggtggcgtattcgccccacggaacggagccccctccagggtggccttccagtgtggcacgtgggcctggtagggcgaataaccgcttgcggttatccgccgtcgtggcgggatctcggcggataacgccggtggcgtattcgccccacggaacggagccccctccagggtggccttccagtgtggcacgtgggcctggtggggcgaataaccgcttgcggctatccgccgttgcggcgggatatcggcggataacgccggtggcgtattcgtcccacggaacggaggtcactccagggtggccttgctgcgtggcacgtgggcctggtagggcgaataaccgcctgcggttatccgccgttgcggcgggatgccggcggattacgccggtggcgtattcgccccacggaacggaggccccaccaggttcgtacgtcgtcagccgcgcagcggcggcaggtagcccagttccatcagcttga

SEQ ID NO: 332325 - DNA, 330 bp, Pseudomonas aeruginosa
atgcagaacaattcgctgaacattctgaagctggttgaccaccccaaactcttgactcgccgagtgaacactgtcgccctgaacctcgaaaaagttgggtactcccaagaaatcaatgaccttgccaatgctaggtgcttgacgatgccggaaatctggtcctgcctaagagaaggcgaggtccagtcggatggactgagtgttgacgacgacgaggtctctggagtcattgcctaccattcccatgaggggcttgtaaggctgcttttctccctcctccaagacgactcttggctggaggttttgtctgcaaaacttgaggtgaaatga

SEQ ID NO: 332326 - DNA, 453 bp, Pseudomonas aeruginosa
atgggcctgtttcattatgttgcttgcggtctcccaaatgtgtggctggaaaatggctacaccgagggcgttgctagcgatggcacgccgatttttcacatcgagaacattgaggggctgcacaaggcaatcgccttctccttgtttgagaaagaggcgctgttgaccggcgatgagttccgcttccttcgaggtgagatcaagctgacgagaaaggctttgtccggagtgattggatactccgaagaggctattaagaagtgggagtctggagagaatccaatccaaaagactgctgatgcgacgctcagaactctctacatggaaagtcagaaccaggccagtcgcgttcgtgagctactggaaagaatcaaccacctcgagcgaaaggaaaccgaactctacttcaaaggtgtggatggcggctgggaaaaggaaaggaagtgtgcttga

SEQ ID NO: 332327 - DNA, 261 bp, Pseudomonas aeruginosa
atgaggatagtgctgatgctggtggtgttcgcgctggcgggatgcgccggccggcaggaagccgagccgcgcacggtgcgcgtagaggtgccggtggcggtgccgtgccgagtgccggcggtggaggtgccggcttgggcaactactgggctgcgaaaaggcgacgacttgcagaccaaggtccgcgcgctgctcgccgaacgcttgcagcggatcgggtatgaggcgcaactgcttgcagccaacagggcatgccagtag

SEQ ID NO: 332328 - DNA, 129 bp, Pseudomonas aeruginosa
atggattctaaaaatgaagaatacgaacacgaccctttctttaataatcctccgaaagaatacgacatgactccgcgcatggcactatttgcgatagcgcttgtattaacaatactctccattgcgtaa

SEQ ID NO: 332329 - DNA, 1656 bp, Pseudomonas aeruginosa
atgaacggacttgcaactagaatagttttctcgattttaacaataacaacatttaactcttttgcagaatcatcaggcagcaaaacatactgcccgtcaattggtgctgctccaagaacaccacacgcaagtgcggatcaatatgcaacatctggaaaattctcaatcagcaaagatggaatagctctgtttgactatggagaaagctatggcggcctagggaaatgggccaacccatatttcaactccaactacgcaaacgcactgtatagagactggattaataccggatgcacagacagcgatttaaagaagagatttctaactgttgctgactggtacgtagattctgccgagatacgacaaggaatggcagtatggccatacccatttcacaatgaccattttgacttagaccctggttggatatctggaataggtcaagctcgaattgcgggtgtcctctatagagcatatgcagtcggcaaaaaagctgaatacaagctaattgcagatgaggctatggaaacctatcaaagagagattaaggatggtggggttgtaacttatgaagacggggtgacatggatagaagaagcccctgatcataatggccgaagctacaagatactcaacggccacattacaggactaacaggcataattgacatatatgaaattacgagaaatcctgaatggaaatcccttattgataaggctgtagctgccgtaaagagagacatatcgaagtttgatgacggatttatatctctgtactcaatggacatgcctaccgataagcgcagaatggcagagcgaggcggctacaactctcttcatgtcgagcaaatgctttggctgtacgaacactttaacgatccaattttcctgaaatgggcaatgcatttccagtcatacgagaaaaatacggatagatacagcgcatcttactctgtaaatgcaaaaacaaatggccctgaaagagcaaaggcccttatgggcggctccgcctggacggcaaatgagttcccagcaactttcactatagagccagaacacccggaaatctacaaaggtattgcttttgactctcttgacttggagcgccggccttatgatttcacagtaaaggcgaagctcaaaggaaaaaatgtgtcagtcgtaaagataaagaataatgaaaaactatgggatgacatactttttaagtcgccagtaaaggcggataaaatagagatagaaatagagaaagggtacagaattgttgcgcttgcatctattatgcccataaagaaagaatttggtctttccacggtagttaaccagtgcaactacaggcctgttcctatctctggtagcagagaggttacctacacattctatgatgcattggacaacaatgacagcacttcaatgcctgtacactgcgacggatggatgatcatcccttcaagcggcacgaaagaaatagcaattaaggctgcgggctacactggatcaaaattcaagataagccaaagtgacgacttaaaatcatggagagatactactgttaaaagcagcccaactgagcataccgccaaattaaattcaaagttcacaaaaatagaattcgacaggctaacaaaagaaataaaagaaattacatttcgataa

SEQ ID NO: 332330 - DNA, 1155 bp, Pseudomonas aeruginosa
atgaataggaccaagcttccgttttcaaccgccccatacatccttttccttctcctattcccaggaacgattctttattacgtagcgacaacaaatggactgatcccggcgcttattacaggatactttggaaaaacatccgcagccgcgctcgcaatacttgctccgctatatctgtggaccacgctcagaacaggacgaatagctgtaattgatctgacgtactttggattccttctattcttcctgtgcgtcgtagttctcaacagcgaagaagatagctatatcttcacatggcacatggtttcaatcgcacaatgcgcagccgtttttcttatatgcaagggtgctttcagagttgaccgactacctgggctagctcttaaaactgcgtggattgcttcatccgcatgcattcttatatttactgtagacggaagattctcgcttagagaactccccagcgacgtagataagataccgggatatcaaaccttcgccctctgttacttgctgctttcggttgttcttgttacgggagtacgatcactgcctaccagatgcattgcgcatgctgtagcaatagcttgcctttacataaatggtgcgagaagcgaattcgttgcatacgctctatttgcggcaacctacgagtttctgtcgtcaaaaaacaaggggctccctatacttgcccttatcatagttgcagcaggatcagtggcgacaattagctctggaatagtggagattccagatagtagagtagcaaatctgcttgatcttcagcatgacaattcaagcaatgagcggagccggatagcatctgaaggactaaacaagataatggaaagtccaatactagggaactatggaaaatatgaaaaaggcgagtacatacacaacatcctttcagcatggaatgacctaggactattcggcttcttgtttatacttatcatttcaataggccccgccgtaaaactaggaataaatatagcactcggaagcgcgcagactaatagagaaatatcagcattctcaattctcgcagtgactatagtgcttctgcttgtcggaaaatactttacatatcttttactgccagccgcacttggtctttactcatcatccaatcttaaaatcgaggataattaa

SEQ ID NO: 332331 - DNA, 2250 bp, Pseudomonas aeruginosa
atgcccttccgatacaacaccatgaatgcggttgagccggatggatcgtccgacttccgtgatgcccacgacaacaccggcaaccttgatctcgcgatgaacggggcggcgcttgcatggacggaccgtctcggccgttctaaaaagtcctgggcaggcatcgaggatcaggtaaacgcgtggctcgacagccagggcttcgagccaggtttcctcgtgtacgttgacggctccccgttgaccgtagatcgcccgacccaactgatccagcgcggggacaacatctacagcgtcaagcgcccggcatcgttccccgtcaatctgaccgggaactgggcgactgaccagaacctgctcgttgcgcaggttgaccggacgctgcaaggcaccctggccaccagcgctggcgccgggatgatcggctggaagcagcgcaccgtagccgaccgcttgagcgacaccgccaatgtcaaggactacggcgctatcgcagatggggcgtatcacccgttgtcagagcggttcgctacgctcgccgaggcgcaggcggtctatccgcacgccactgcgctgaccgacagtatcgactgggcggcgtatcaggcggcaatcaactccggggcgccgcatgtgcatgcgccaggcggccactacgtcatgaatcgcgggactctcgctgagcgggatattcggtataccggcgatggatatgctacccgcgtggatttcagcatggccgatggtcccggtagttgcatgctgacgcagggcgagttggtgcaaatcggcgatctgtccgtgagcgtggttaaaggcgcccgcacgctgacatttgccgctgcaccagacctggctccgggagacgtggttatcgtgtacaaccccaccaacggctcttggctggctgatcgcgatccgtatcgtgctggcgagatgtggaaggtccattcggtaagcggcagcacggtcacgatctatggaaacagttcgtcggtgtacctgttctccgaagtggacgtataccgcatgcgcggcgtgcgcgtgtctgtcgatcagatgcacttttcgccgtctgacacatattccattgcgccgttcaaggtggttttcggcgatggagttaaggtttccaactactacgctagcgatgtcacgctttatacgggattagaagtagaacgatgctttgacgtttcgatcaatgcagtatcaagcccgaacagatcgccggcagtcaatgacgaatatgggattactatctcgaactgccataatttctcggtgtacggtggttatgcagcggcaaccaggcatgctgtcgcgctcggcggaatggacgctgtgtgctgcgtgcccaaccgtaacggactgatttacggtatgcatatagagggcatcgatatcgattcggatattggtgcgggagatatgcatggcaacgccgacaaaatcacatacgacaactgcgagtttcggaacggggtgattcttcaaggacgagacgccagcgtccgtaacagcactatctatggcgtttcgagcgtttctggcgaagctctatacgggagcgaagtgtatggcgggacgtatacaatcgagaacaatcgttttatcagttacggaaacggtgcttctttcggaatcatccacatctcaccggggacaagtcagcgcgaagcgctactgatcatcgcgagaaacaatacattcgaactgccgaatgccacaggatcgacaaaggtgctgttcttgcgcggacgcaatagtccgctcccgtgcagtgttaacatcgacggcatgcatgtccacatggcgcctgttgcgatgcagtgtttccttttcgcagacgaccaagttgcagcaactctgaacagtaactatctgatcattgacggcgtatatgggcctagtggtacgtacctgctgtatccaacctcgaagaatgccgccataccgaccaggcagatgcaccagtccggcgcggtgaacgtgactactacggcttccgctacggttgcagccccagctcagaccattcgctacccatactccaagatacccaacgttagcgtgcaggtttccagtcagtcgggcggtgatcagagcgcaatcgggtcaatcacccctgtggcgattgcgtacaatgtgcagccgaacagcatcaggcctgcaatcatggcgcccagcggatcgttcgcggctggaggctccgctcgtcttcactggtctgctagcctagatgatatttga

SEQ ID NO: 332332 - DNA, 399 bp, Pseudomonas aeruginosa
atggcaaaggggaagggaggaaggtcctggagcgtgtcgccgagcgccttcatggaggccgtggaagccgatctggtgcaaaagcagagcgatatgtccatggaggccctgcgggtgatcgtggagcacgcgcctgtcgataccggccgcttcatggccaacaacatcgtcagcatcggagagccggttttctactcgctcgatgcctatgacaaggccggccacgagaccatcgccaatgggtatgccgaattggcccacctggtgccgtactcggtggtctacatccagaacaatctcatctacgccggcgcgctggaggatggccactccggccaggccccggcgggaatctacggcgtggcccatctggcagtcagcgcgaagttcaccaaatga

SEQ ID NO: 332333 - DNA, 126 bp, Pseudomonas aeruginosa
atgagccccatctactggcacttcggaccgctgcagttcaccaagtccggctctctctgggttctctccgttagcggtttcggtctctgcggcatcgggctgcgcatggggctgtaccgtggctga

SEQ ID NO: 332334 - DNA, 384 bp, Pseudomonas aeruginosa
atgacgaatcaaaaaagaatcactgttcaagagattgaaaaccaggctgcgcaccgccgccagatcgaactgatctttgcccgggcctgtgctgagtcgctgaaggaatcggtcggtttcatcttgcgtgacgacttgaaggaggagaaggccagggctcacggcgaagcatttgcctcggccttcgtattcatgtcgcgctacttcacatccgaagcggctgcgtcacagcaggatgagattgcttctcgccaagaccactcgcgtagtactcccgaagctgcatctcaagcgagcgaagcatctctttgtccagagttactgtcgttgctgaaaacccaaaagtcgacccaggaacgtatcgaccagctattagcgcgttga

SEQ ID NO: 332335 - DNA, 540 bp, Pseudomonas aeruginosa
atgggcgcagagttcagggttatcaagtcgattgaggcgaaccagggggtgtcgcatttacatgcgatcccgctctatactcagcccatgaacgacatcagccgcgaagaactggatgcaaaactggacgcgaccaacgccagggtcgaagccaggctttcgtcgttcgagtcgtcgatacgagatacccttgcgggggttcgcgaggattccgcggccgttcgagcagaactcggtgagatgcgcggcgaactgaaggcaatcaacgtcgatctgtcgtatctcaggagtctgaaaagcagtatttggagcgccgccggggttacgatagcctcggtgatagcgggtattggcgtggtcattgggaccctagcctatggggtttcgaccttcgactcaggacgcgagacgagcgcgctcatccaggaagccaagcagcaggccagcgagacgcgtcagttgctggagcagatccgcaccgaacgattgacgcccccggacgaccaacctccagttgcccagccaaagccgcaatcctaa

SEQ ID NO: 332336 - DNA, 714 bp, Pseudomonas aeruginosa
atgaagcccatcatcttcgacaccgaaaccaccggcaccgaccacaagaccgaccagatcatcgaggcggcctggctggagcttcccgagttccctcaccagttcgcggcgctccaaccggtggagttcccgcactaccacgaacgcttcaagcccaacgtgccgatcagccttggagcccaggccgtgcaccacatcatttgccaggacctggtcggctgccgcgagtcgaaggagttcgccctgcccgccggcccgctcctgatgatcggccacaatgtcgacttcgactggcgcatggccggcgagaacaccgacatcaaacgaatctgcaccctcgcgctgagccgcttcctgttcccggacaaggacagccatacccagtcggccatgatgtacctgatcgcgcggcgcaacggccgggaggctcaggcccgcgaactgctgcgcaatgcccatgccgcgctcgacgacgtccgcaactgcgctatcgtcctccgcttcctgctggaggtagcgatggacgccgggcacgcggctgacacctgggaagaggtccatgcgctgagcgagaaagcacgcatcccgaccgtcatgccttacggcaagcacaaaggcacgccgatcaaccaagtcccgaacgactacaaagcctggttgctgcgccaacccgacgtcgatccatacctggtccaggccctgcgccagcggtag

SEQ ID NO: 332337 - DNA, 381 bp, Pseudomonas aeruginosa
atgagcgccgagtaccacatgcacctgtcccgcctggcgtccctggtgggcgggtaccactaccgatacggcagcgaggtacagcttcaccaggctctctccaccgtcctgaccggcgccggcttcgagcatgagcgcgaggtggcgctcgacgcacgcaaccgcgcggacttctggctggaggggatcatcatcgaggtgaaggtagacggctccctcgccgccgcactccggcagtgccagcgctacttggcccttccgcaggtccacgctgtgctgctcgccagcactcaacgctgggccgataccgccatggccaagcggccggagttggcgggcaagcccttccacattgtcaggctgagaaggcaaacgctatga

SEQ ID NO: 332338 - DNA, 1767 bp, Pseudomonas aeruginosa
atgacatcaaccatctacggccggatcgtctacaacggccggtactggcggatcacatgcgaaccgcaggtgcgcgccaggttgaagcgggtatttccgcgtgtgccacaggctccgggtgagcatatcgacctgctcggcagccccgagaacagccgggaactgctgtggttcctacagcgctacccaatggagatcgacgcggacgcacaggaatcgctcaagcagttggcgcagcagcaccatcagatggagcagaacctggccgaactggtcgctgggcggatgccgctgccggcattcaagctggccaagccgccacgcgagtaccagcgcttcgcaggcgcccaggtcacgatccgcggcggcctgctgctggcggacgacttgggcttgggcaagaccatcactgggatatgcccgatggcggaacccggcaacctgccggcggtcgttgtctaccctgccgccctcccgaaccactggccggaaaagctcgccgagttcgctccgaacctgcgcgtgcatcacatccgcaagggccaaccctacccgctggtccgccagccacgccagcgcatcccggacctctgggacacgctgcccgacgtgatccttgtcagctatcacaagctcaggggctgggccgatgtcctgggcgagatcgtgcagtacgtggtcttcgaggaatgccagcagctcaggaacccaagcagcaatatctaccaggcctgcgagtacttggcggggcaggcacgcctgcggatgggcctgaccgcgacgcccatctacaactacggctccgagttctaccacgtcgtcaacccactgatcccggactgcctaggcagttacgacgagttcctgcgcgagtggtgcgtgggcggcagcgttggcgaaaaaccacgcctgaaggacgccgagcagttcggcgcctacttgcgtcgggagggaatcatgctccggcgcacccgggccgaggtcggccgagaacttccggcgctctcgaagatcccgcacgagatcgagtcggacggcgcggccctggagcggatcaccggcgacgcggtagcactggccaagaccatcctggctcacaacgagacctaccgcggcgagaagatgcgtgcggccggcgagttcgaccagttggtgcgccaagccactggcgtcgcgaaggcgccatacgtcgcggagttcgtccgcctgctactggaaagcggacagcaggtgctcctgttcggctggcaccgtgaggtctacagcatctggcgggagaagttggccgactacaaccccgtcatgtacaccggcaccgagtcgccaaaggagaaacaggccgcgaaggacgcatttgtcgccggcgacagccgcctgatgctgatcagcctacgcgccggcgcaggcatcgacggcctgcaacacgcctgcagcacggtggtgttcggcgaactcgactggtcgccgggcgtgcatgagcaatgcatcggccggatacaccgcgacggccagcgcgagcctgtgcaagcgttcttcctgatctccaacgagggcagcgacccgatcgtctccgacgttctgggggtcaagctcgagcagatcgagggcgtgcgcaacccaggcgagcacctggtagaacgccgcgaccttggcgagaaccaactgcgccaactcgcccagcgcttcctcgccgatcacggcgtcaaggttccgcgcacgagccatccaaccccgattcaccagcaaccgccgttcgaacttacctga

SEQ ID NO: 332339 - DNA, 504 bp, Pseudomonas aeruginosa
atgagtaaggtgaagcgcttgaatttcaccgttgaccagttcgagagcgttgttccgtatgcgtcagagcatggccagtacgccagatatgccgactacgccaagctcgaagccgaggcccaggcgctaatggaggaagtcgcagcactgcgcgcaagggtggctgttgtgccggatgggtacgcgcttgttccggttgagccaacgcgggagatgttcattgccatcaacaaggaggacgacaaggcctatgccggtggctgtcatcacggcgcacagtttgaatggctgtgggctgctgcgattgaagccgctccccgccccaacggcctgacggtcagcgaatcagcgctcgacacgctgcgaaaggccgcgtcaggagaggtcaagcacctgaacaacggactgtgccctgatgacattgaggggcacgaagcgcgcgatccggactgcccggtatgcagagcgctgatcgagacgggaaaggagagcgacaatgtctga

SEQ ID NO: 332340 - DNA, 234 bp, Pseudomonas aeruginosa
atgtccctttccgagtttctatcccctgacgaactcactgaattagttggaaaaaaggtcgtgagcaaacagatcgagtggctcgaaaatcaccattggaactatgaaaccaacgcagcgggccgtcccatagtcgggcgggtgtatgcgcggttgcgtctggcaggcgttcatcccacaagaaccacagtttccgaccccgcctggtcgctcgacctgtcgaacgtgtcctga

SEQ ID NO: 332341 - DNA, 957 bp, Pseudomonas aeruginosa
atgaaactgttatggggagttctcgccgccgcgctggcggcctggggcctgacgctggccgtcgatccgccggcgagcctggacatctgggtggtgcgcaagcaggcgatcctgcttaccggggtagcgtccttcgccctgatgtcgttgatcatgctgctggcggtgcgtccggtctggctggagaagccgctggacgggctcgaccgcatgtaccgcctgcacaagtgggcgggcatcctggccatcgtcctcggcctgttgcactacctgctggagttggccggcccctggctggcgggtatcgtcggcaaaccggtgaaaggcccgcgggtggaaaccttcctcgatgtcttccgtggctcggccaaggagttgggtgaatggtcggcgtggattctcggcgggatgctgctgatcactctctggcagcgcttcccgtatcacctctggcgttatgtgcacaaggcgttggccctggtctacctggtactggccttccattccgtggtgctcgccccggccagctactggagccagccggccggctggctggtggcggcctgcgcactgctcggttcggcctgcgcactgttgtctctgagcgggcggatcggtcgcacgcgtcgccatgcgggcgtggtcaccgccgtcgagcggcacggcgaaagcctgctcgaggtgacctgccggctgcagggcgactggtcgcacagggccgggcagttcgcctttctcacctgcgaccgcctggagggtgcccatccgttcaccatcgccagcgccgaccgcggctgcggcgaggtgcgcttcagcatcaaggcgttgggcgactacacccggcgcctgcaggacaacctggaggtcggcgccagggtcgaggtggaggggccatacggctgcttcgacttccgccgtggcctggccgggcggcaggtctgggtcgccgccgggtga

SEQ ID NO: 332342 - DNA, 162 bp, Pseudomonas aeruginosa
atgactgagcgccgcctcaaatgccggcgctgccgctggatcggcgcgcttagcgatctccgtccggtgccgcacccgaaggagtcttggcgtagcgacaacgtctgcccgcgctgcgggtgcaaaaccttctctccaattgaggattcctcccatggctga

SEQ ID NO: 332343 - DNA, 282 bp, Pseudomonas aeruginosa
atgaccgtcatcacccacgcgtacaccccgctgatggatgttgacgccatgagcgagcaggactgccgggaagccctgaaggacgttttgcgcgatggtttcgcgaaggaccaggagctggtggagctgaagaccatcagccacaagctggacagcatgttggtcaagctcatcgacctcttcatcgccggccacttctccaagctgcatgcggagctgcagtgcatggcggtctacctgcaggaacggcgcgctcagcaatcagcagggagggtgcactga

SEQ ID NO: 332344 - DNA, 342 bp, Pseudomonas aeruginosa
atgaacgtcgtaccgatcactggccgcctccctgaagagcatccgaaagctacccatctgccgctctgcaccgtgctgacaccggaattggcccgctgcctggatgccgtcaacaacgccacccgcgccctgcgcaaggccggcattccgattgatcagacgtcggtgctcgatcgccggctgttcattcgtgcggaagacgcaccacgcctgtatcagcggttcgagggtgtcctccgcggcattcggcagaccacccgcgggagggtcaccttgcatctcgtcagcctgctcggcgtcgatgtgggctggacgaccccggtgaaggagcaagaccaatga

SEQ ID NO: 332345 - DNA, 1782 bp, Pseudomonas aeruginosa
atggccgtgtctgccgtcatcacccagcgcctggttgacctcgaccggcagctacagagcgccggtcaggggcagcgcacggcgctatgcaaagcagccgcggcagagctgggtctgtcgctggcatcgctgtaccgcaagctgaaggatgtacaggtacgtgagcgcgcaccgcgtaagcggcgcaaggactcggggcagagccgcctggggcgtgacgaggccctggtgatcagcacggcgctgatccactcggcccgacataacgcgaagcgcctgtattccgttgctgatgcggtcgaggatcttcgcgccagcggcttgatccgtgcggagtctgtcgaccgacgcaccggagagatccgcccgatgtcgatcagcgcgatcagccgcgcgctgcacggctaccgcctgcatccatcccagctattggcgccggagccggtcaccgaactgcgcagcctgcatccgaaccacgtctggcagatcgatgcgtccctctgcgtcctctactacctgaagcctggggccaacaagaaggctagcggcctgcaggtgatggatcgcaaggagttctacaagaataagccagcgaacctggatcgcgtggccgctgaccgtgtgtggtcctacgagatcaccgatcactacaccggctggatctacgtccgctatgtgatgggcgccgagagtggcgagaacttttgcacggtgctgatcgaggccatgcaagagcgcggtggagccgacatgcttcatggcgtgccacgcatcctgatgatggaccctggttcggccaacatctcggcgatgtcgaagaacctctgctgctccctgggcatcgaggtcatcgtgcacgcgccaggcgcggcgcgggttacgggctcggtcgagaacgcccggaatatcatcgagcgcaagttcgagtcgaagctgaagttcgaaccggtcaacgatctggacgaactcaacgcccaggcgaagaagtggcgcgcccacttcaatgcgaccgccgtccacagccggcataggcgcaccaggtcagaactctggatgaccatccgggctgaccaactgatcaaggcgccaacggtcgagctgtgccgggagcttgcagtgagggcaccagagtctcggaaggtcacggccaaacttcgcgtctcgttcggagggtacgagtacgacatttcggttgtcccggacgtgaacgtcaacgaccgcgtgctgatcactcgcaatccctggcgcgaagatgcagtgcaactggtcacggtcaacgagcagggccgtcaggtcttctatgtccttcccaaggtcgagaaggatgagggcggctacgcgaccacttcaccggtgatcgggcagacgttcagccgtcaggctgagactccagcgcagaaggcccgcaaagctgttgaccaactggcctatggcgtcgaaagcgaaacggaagtgcaggctgcgcgcaaggccaaggctgttccgttcggcggtgccttgaagcccttccaacatatcgacgacacccaactgcccaccttcatgccgcgacgcggcacggaacacagcttggtagcccccatcgtagaggttccgctccttccgcatgtcgaggcggccaaacgtctacgcgcgcagttgggtgaagcctggaccacggactcgatggcctggctcaagaagacccaccccgaaggcgtgccggaagaccagctcgacgccatcgccaaccagttgcgcaagccggcccggcctggcctgcgcgtcgtaggaggcaactga

SEQ ID NO: 332346 - DNA, 210 bp, Pseudomonas aeruginosa
atggccgctgcaaccaaagccctcacggccgaccaggtgaagcaacgcttccgccaggccggcaaaaccttcaccgagtgggcaaaggaaaacggttacgcccgtaacgacgtctaccgcgttctcaatggccaactcaaagccaactacggccaagcccacgaaatagctgtgaagctcggcctgaagccttctgtagctgctgcgtga

SEQ ID NO: 332347 - DNA, 633 bp, Pseudomonas aeruginosa
gtgagcgacattgacgttgatggcgatcgcaaccgggtcgcaggacgtgacttcattgaggtccatcttgcgcccgaacatgagccgctgtctcaagagcagaggaaacgactgaacttgctggtgaacaacatcagcagtgaatacaaagttgatccttggactctatggagagaggtcgttcatacccgtattggcgtgagcaaagtccggcagattccgaagagcaagttctcagaggccgaacgagcgctgctggaacacgcagagcacctacattcgttgtcacatgccaaacgattggttgcagaggtgctgcagatagccaacgagcgagggctctatcaggacctcacccgctactgttcgagggagttcggcttgacagtgctcaacaagctgaaccctgagcaactgaagcaagcactgcgctttgtcgaggatgctgccggcctttcctcgcagcaaaataaccagctacctgcagaccggtccttggagggtcaagcccacgagcggcacggttcgggttggaaggcgtttgtcatcgaagccagagccatggttgttgcctaccccattcaatgtggactacttgctgctttgctcgtggtgttggggaaagcaatttag

SEQ ID NO: 332348 - DNA, 132 bp, Pseudomonas aeruginosa
atggagtatccctactcactgccctgtaatctcccgataccgccgctggtattcctggtaagggagctgcatctggttcagttggtccagttgctcttggaccgattcgcgagtctgcaaggcatgatctga

SEQ ID NO: 332349 - DNA, 930 bp, Pseudomonas aeruginosa
atgagcaatgcaccatttcccatcgatcccgaactgacggcgatcgccatcgcctaccgcaacggccggatgatctccgacgaggttctgccgcgcgtaccggtcggcaagcaggagttcaagttctggaagtacgacctcgcccagggcttcaccgtcccggaaaccctggtcggccgcaagtccaagccgaacgaagtagagttcagcgccaccgacgaaaccggcagcaccgaagaccacggcctggacgcgccggtgccgcaggcggatatcgacaacgcaccgacgaactacaaccccctgggccacgcgaccgagcaaaccaccaacctgatcctgctcgatcgcgaagcccggacctccaggcttgtcttcagccccaatagctacgctgcgggcaacaagaccaccctgtccggtaccgatcagtggagtgacccgaccagcaacccgctgccgatgatcaccgatgcgctggatagcgtcattctgcgcccgaacatcggcgtgctgggccgtcgcaccgccaccatcctgcgccgtcacccgaagatcgtgaaggcatataacggctcactcggcgacgagggcatggtgccgatggccttcctgcaggagctgctggaactggacgcgatctacgtcggcgaagcacggctgaacatcgctcggccggggcagaacccgaacctgatccgcgcgtgggggccgcacgcgtccttcatctatcgcgatcgcctggccgacacccgcaacggcaccaccttcggcctgaccgcacagtggggtgatcgcgtgtccggctcgatccccgacccgaacatcggcctgcgcggtggccagcgcgtccgtgtcggtgagtcggtcaaggaactggtcaccgcaccggacctcggcttcttcttcgaaaacgccgtcgcggcttag

SEQ ID NO: 332350 - DNA, 288 bp, Pseudomonas aeruginosa
atggataaccaacatcgcaagatcagcggctatcgcgagttgactcaggacgacatcgacctgatgaaccgtgtcaaggccaaggggactgagctgctggagcttcaacgcgaagtctctgcctacctagtgaagtgccagtgcaccttggctgtcgaggggccaacagaggagttcagccgcttcctgaaggcagaaccccgccgctgggctgagatcgccaagactgacatccagacgggtgtcatggccctggtgcgcgccatcgctcagcccgagggctgctga

SEQ ID NO: 332351 - DNA, 465 bp, Pseudomonas aeruginosa
atggccgaagggctctgcgcacccttcgatcacaacctggtgatcgatcgtctgcgtgaccaggccaaggtgctgaagcacatcggcggtgccgccgaactcggcacgatcacccagttgcgcgatttccgcacgccagcggcctatgtgctgctggcccaggagacgctctcgcccaagcccgccggccatgctggcggagcgacccgacagatggtgaccgtgcatttcatcgtcaccctcgcggtgcgtagctaccgcgacaacaagggagtcagcgcggcggacgacctgcgcccggtgctcgaccaggttcgtcaggccctgatcggatggaccccacccggcctgtccggcgcccgcgactgccaactggtccaggggcaggtggtggattacgacgcctctgtcttgatctggactgacctctatcagacccaacatgccatcgggagaccctcatga

SEQ ID NO: 332352 - DNA, 195 bp, Pseudomonas aeruginosa
atgagcaccaagtccaccgacatctcgcccgccaaacgcgaggtcgtcaccttgatcgcggatcacacccatgccggcgagccgaaaaccaaaggcagcaagatcgaggtcagcgctacggaaaaagagtttctgatccgccacggcaaggtggcggagcctgtcaacccgtcggccgcgaaggcccaggagtaa

SEQ ID NO: 332353 - DNA, 741 bp, Pseudomonas aeruginosa
atgtcactgatttccctgcagggcaaagtctggctcgccaaccgatcggcaacgggcaagtacgagaaaccggtctgggtcggcaacgccccgacggtgacgctgcaactggccaccgagaccacccccaagacggagagctactcgggcaaccgtctgcagatcgggctgctcgatcgtggcaagaccgccacgctcaacatcaccttggacgaatggctgccgcagaacctggcactggggctctacgccacccagatcgacatcaccggcaccacggtcaccgccgaaccgctgcccgccaccctggcggccggagacttcatccgcctcgaccgcccgctggtcgacgacgtggtattgaccgcgaactcggcacccctggtgctgggcaccgactaccgcatcgaatccgcagccggtggcttgctggagatcctgaaagcgcagaccgaccctgtcacggcggcctaccagtacgccgacgccaccagcctgacgatcttcaccagccgtccgccggagcgctggctctacctggatgggatcaacaccgagaccaacgagccggtcctggtcgacctgtaccgctgcaagttcaatccggtcggcgacctgtcgctgatccacgatgaatacggcaacctgccgctcaccggcgcggtgctattcgatgcgctcaacgccaaggacgccaacctgggcggttatggccgcatgatcaccaaaaaggcggcctga

SEQ ID NO: 332354 - DNA, 516 bp, Pseudomonas aeruginosa
atgggccgtaaggtggcaaagcccagggcgccccgtgactcatccgcttccggccaggagccgggggcggatgacctggagatcctgcaccccgatcgcacggtggagatccatgggcgaacggtcacgatgcgcgagtatgggtttgtcgaggggctgaagctgcgagccacgatgcagccgttcctcgacgatctgcacgccatggtggtcaatgatcgaggcttgccgccgctggatcggatcattgacgtcttggcttcccaccactcgctggtcgtccagttgattgcccaggcggcagatgtcgagctggaatggatcgaggagttgccggcacggcctggcaagaacttgatgttcctctggtggatcgtcaatggccctttctttgtcggcgaggtgatggaccggatctccgccgagcgcgccgaactcagcagtcacgctgggccgacacctatgccagcctcatcgccggaggctacggcggcatcgccgacatcgggcgcatga

SEQ ID NO: 332355 - DNA, 3291 bp, Pseudomonas aeruginosa
atggccaacaaagaactcgaactcgccctacggctacgcgccgatctcgcccagggcaaagctgctctcgaccaggtgagcgaatccgtgcaagcggtgggcgataaggccgaacaagctggccgtaagctgagcagcgtcggcgagtccgccgatcagcagacggcccgcatcagggccatggtggcggcctcgctgcaacaacaatcggcccaggatgctgcggcagccagtacgcagcgcctcaatgctgctgtgcaagcggggaacactgcctggcgcgatagcgctcaagcgcagtccaccgccatgaacgcctatcacaatgccgagcgtgctcgcgtccagcaggcggcgaccgagcaacgcgctgccgaggcggcagccaaggctgctgctgaaacagccaagcaggatgcggccgcacgtaagttgctgggtgccatcgatccgactcagcgctctctcgctcgcctggccgagcaggagcggcagttgactgagcatttccgggcgggccgtgttgaggccaatgcttatgccagcgcgctgaacaggatcaaggcccagcgtgacgtgctcactggagtgggtaacgaggccaaggcctcgaccctggcgctcaatggcatgggggctgcaattcgacgggtccaggggctgctgttcgccggcatcgccggttacggcctggcctctttctccaaggaaatcgtcaacaccaacctgcagtggcagcaggcgttgtacaccatggaggcagctacggggtcggcggcgaaggcgaggcaggagctggagtacgtccgcgagatctccgaacggctgggcctggagctgctcaacaccagccaggcctattcccgcctggtggcggccgcgaaagaaaccccagagctgggcagttccttgcgcacgatcttcgaaggcgtcgcctcggccaccactgcgctgcacctcacccgccaggaaaccaacggcatcctgctcgccctggagcagatggtcagcaagggcaaggtccagacccaggagctagttctgcagctcggccagcgcgttcccggcgcgttttcgcttgccgccaaggccctgggcaccaacacaaagcagctcagcgagtggctggaaaagggcatgatcccggcggccgagtttctgccgcggttcggcgctgccctgcaggaagcttatgggccagcctcacagaaagcggccaccggcttgcaggccgaactcaaccgtctggagaacgcattcactgacctgaagatccaggcgggcgagtcggggttcatcgacaccttcactcaggctgtgcgagacctgcgtgatgtgctgaaagatccggcggtggtggagggcctgaatctcctgatcaagggcctgggtactgccatcggttatgcggccaagggggctgcgggcgtcgtcaacgtcaccaagttcgtcgcggaggagattgcggcgcgcgtgaacggtcccgccggtgatgacgtaccgcggttggacgatgccatcgctcgggaaaccgagtacatggcaagggttcagtccgcgctcgacgaggcctacgagaagaacgaccagaagcgcatccagcgatacgaagaagcactcagcaaggcacaagcgcagatccagcaatggcaggaccagcgtgacgcagtcctgaacggtgccggccaggtcgcggcgctacccgcgactacagtcaccggcacaggccccaccaccaagacacccttcacgccatcaggcggcgaagacaaggccgctgcgcgcctggccaaacagaacgaagactgggtcaagcagttggagaaggaagcggcgacctacggcaagggtcgggctgcgttgcgtgagtacgagcttgaccaacgcaatctgacaggggccctggaagcccgtgctcgcgccgcctgggcgaccctggacgcggcagaaaagcagaagaaggccgacgaacaggcaaagaaagacgccacaaccctgaagcaactcaacctggactaccttcgggccaccggccaaaccgtcgaagcggccggcgccgagatcgagaagaagtacggcgacctgcagaagcgtctgctcgccacgggtgacaccgaaggcgccggcctggtcagcaagctgatgggaatcgagaaggccaaggctgagctgcagcagctccaggaccaggtcgaccggatcttcggcgagcagtctcggcaggagtcgagtattcaggccgcccagcaggccggtctcgtcagcgaactggccgcgcggcagcaactgctagacctgcatcggtccaccgccgacgaggtagagcaacttgtgcctcgcatggaagagctggccaaggcaactggcgatccggcagcgatcgagcgcgtgaaggatctccgccagcagctcgaaaacacccgcgtggccgccgaccagctcactttggctctgcgatccggtatcgagaatggcatgcaggatgcgctgcgcggtctcgccgatggcaccttgtcgctgcaggaggccgcggtttcgttcctgcaggcggtcagccgatcgctggccgacgttgccgcgcagcagctggcccagaaggctacagcagggctcatgagtctgttcggccaaggtgagcaagacaccagcatggtaacgggagctgctgctgtcacctccgccgcaggagcgctttccaccgcaggcggaactctggtggctggtgcggctgccattcagggagcagcagccagtcttgcggccgcgaatggactcgcaggtgctggtgccgctgccagtggtgccggtgcggcaggtgcggctgccggtggtagcgggtggtggtcctcgatcacaagcatgttcgggttcgccgagggcggccaggtccgcggccctgggactccaacaagcgacagcattccagcctggctttcggatcaggaagtcgtcatcagggccgcggccgcaacccagccgggcatgaccccgctgctcctggacatcaacaagcgtggttgggctgcgctgcatgactggtccggcgctgtgcgccacgcgacgggcggaatagccaccatccccgcgcccgcaatgcctgctccgggcctttctgcttcgcgcctgcaggagccatccaagaacttcagtacctcggtcgccaactcgatctacctgcacgccgttcaggacacggatcagatggcggccgacatgtgggccggcaaaggcggcgaacacttcctggtctggctgaacaagaaccgccaggccgtcaagcagattatctag

SEQ ID NO: 332356 - DNA, 201 bp, Pseudomonas aeruginosa
atgccaataccaccccaaccgcatacctccatatgcccaagctgtggctggcagcgcaccagcattccagccagcgacgcccttcgcctgaatgtcgactggttctgccgctgccccaactgcaagcacaccgagttggaaacccgcccggccagccgcgcggaaatcatgcgggagcggctggcccagttctttcgctag

SEQ ID NO: 332357 - DNA, 1884 bp, Pseudomonas aeruginosa
atgatcaccgatctatttcctgcaacgctgctcacgcaactggaaaagctcagccgttttttcgtgtggcgccgcaaatcgttgcacgacagtatcgccgaagcgctgcaatcagcggatgctcgtcacgacgcgatgacccaggcgtaccaaaacaccctcgcgcgtctggaggcactaatccagacccatgctcaactgaccgaacagcaaacctgcaccaactccgaacttgaaagtacgagacagtccctgctcgctgcacaacactcgtttgagcagtctcaggtcaagcagcggcatgaccaagagcaagccaaactcagcttcgatgccttgtcgactcgccacgaacaactgattcaggagtgcagaaacgttgaggcggcccgcctggctctcgagcaacaactggagcagactcgtcaggagctgcacgagcgcactcaggcattggaattgctgcaacagcgttttacgcagcaccagcaaactcatgctgagctagcggatgccttccaggaactacaggaacgccatggcgatacctggacccgcttccagcttatctcccggttactggctgcacgcccacaggaaagtgctggcctcacccgcttccgagaactgctggccaccgactacatggcttttgcggaaaaggagtcatcactggccgccgaagccaaagccctgaccctgctgcagtcgattgaacaggagctagcgttgctggtgagctttcctgacatacgcgagcgaaccatcgtcggcatcgtcggtgggttcagcagcggtaagtcagagttcatcaacagttttatcgatgacccacaggtacgtctggccgtcggactgaagcctgttacagccattccaagctacgtactggctgccgatgagcgcatgattcgcggttactcagctagcggagggcatatcgatcttgacgtcgacttctacaaaaatgtgtcccatgccttcatcagctcgttcagcttcgacctcaagagtttgatgcctttcatgtgtgttggcgtgcagatgaggcctgaatcctttagcaatatctgctttatcgacacccctggctacaacccgccgtcaacagcagccgagcacagccatggagatagacgcaccgccgtacaattttcccagcaagctgactcgatcatctggctcatcgggctggattctaatggcaccgtgccggactcagatctggagttcatccaacagatcggtgtggaagggcgttcgatgtatgtcgtacttaccaaggcggacctcaaggccgaagaggacatcgacgacatcctagaagaggtgcagaaccgccttgacgatgagggcatacagattgacggtatcagcgcctatagctctaccctgcgcgaagaggtcgcctaccgtaacgaaccactgctagagcattttgctcgcatcaaccgcccagggaatgcccggaaaagccttgaaagacgtcttagcgaagtgtttgccatgtatgacgaagctatccaagcggatattgccgctctacacgcgcaaaaggttgcgatcaacagactccgcctggactgcttggaattcggcggccaagaggtctacgaacgaatgcgtgactctatcgataagctcacacacagcataaacaggtcaccggttaaagaagaagttgcgcgcgacagcatcacgggcgggctctccaagcttttggccacattctttcgcagttctgccacgtggggggcggacgcgaaagagacccttatcgatgtagacacatcacagcctgaagcctggctaaaagagtctcgaaggctgcatgaggctttcagcgaggcgatccagcaaaccgccgcagccgttgagacctaa

SEQ ID NO: 332358 - DNA, 2238 bp, Pseudomonas aeruginosa
atgaatgcacagggcgtaatccaactgaaccagcgcctccatcaatggatggagcaatacagcccagagctggaaaaagatatcgcccagtggctgcgcaaacatgcgatcggcccaaccgacgaccttgcccgctcgttcagcctgctggacgaagagcaccgtttactgcagataggtgtggtggggcgggtcaaggccggcaagtcgtcgctgctaaatgccctagtgttcgacggccacgcgattctgccacgggccgccacgccgatgaccgcggccctgaccaccttgacctatggcgagaccttttccgcccatgtgcagttctacgatgccgccgaccgggccaatatcgaacagaacgccgcacgctatcggcaacgcttcaaggaagaggaagcccgggccgccgacaccttgcgccaacgtcgccagcgcaacgggcaacacgtcgaagatgaacagttccgggccgacgtgcacaaggctgcccgtcgtgccttgcagggtgagcacacgctggtggccgcccacgaccaatggcagagcatctgtgagtgcaaccttgacctcaacaccctcgacagcttagggcagctagaagcagcggacgcgacttcactggccaggcagctggatgaatacgtcgcaacggggggcgcctacatgccactgaccaagagcgtcgacatctttctgcccctgccctcgctgcgcaacatcaggatcatcgacacgccgggtctgaacgatccggtacagtcccgcgaggagcgcaccaccgtgctgctcaaggattgcgatgtggtgttcatcgttagccctgccggccagttcctaagcgagcaggacatcgagatgatgagccgcattacccagaaagagggggtgcaggagctggtgctgatcgccagccaggtcgacaaccagctgtatggtagcgacatccgtcaacccaccctgaatggcgcgctggacaaaatcactgaaaccctcagcgcccacatgatcgacaccctgcagcgcttgaagattcagcacccagaaatcggcggaaccttcgatggccttatccagaatggtgccggcaaggtgctgcacacctcgggcatgtgccacagcctatcagtccgcttcgaccaacagcagggctgggatagtagcgagcgcaaggcctgggacaacctgcagtccaactacccggacttcttcacgcccgaccacatcgaacgctgccgcgccaacctcgacctactggcgaacaccgccaccctacgggacgtgctggaaaacgttcgcgctcagaaagaccgtatcattgagcaacgccgggaagagctgattcgcgccaaatcggcggcacttgaagcatttcgtgctgacctgctggccttcacacaggccaagtaccacgaagttcgcaacgctgatattgacgatctgaaggctcagcggcgcaagctggatagcctgatgacggtggccacctacgaactggatagcatgctcgccaagtgcatcgccgagttccagggcaaactgaagaaagagctctccaagaagctggactctgcttatggcagcaccggctcggccgttgactccgctgccactgaaacccacagggaggaggaagtggtgcgcgacagcttggctgccaagttcgccaactgggcgtggggaggaggtaaagaaacccgaacctataccgagttcaagttgtactggcgcaaggcgtacaacgagttggagcaattcgcagaggatgtagcgcaaaacctcaagagcacgagcgaggctctcaccaatcagtttcgcgagcaactggtccaggagtcgacaggcgttgcgaggcgccacctgggcgacgacctagatgtcgccctgatcatacgtaccaatcagggcctggtttccaacttcaaacttccggcattcgagctggacacccgtgagttgcgtaagctcaaacgtactggcactcacctgagcggttcagaagcccgcgagtacctcgacgaagcccagcaccgcctggatgagttcaaaggagaggccagccagcagattcgtcaattgatcggcgaagtcaaacatgcgctgccttcctcctatggcaatgccttcttccagagtatgcaggagcgtatcacccagttggaggaacaagtcgagaacaccctcctcacccttgaccgcctgcaacgcatggctaaggcgctggacgccctatga

SEQ ID NO: 332359 - DNA, 1758 bp, Pseudomonas aeruginosa
atgctgaaaactcaaaacatctatctgaactatctagatgcggtggaacggctgatcgttgagacccctctgtcagtcgacgagctagggcagttaaaggaggacgtgcgccacaccgagctgctgattccggtaataggtgctttcagcgccggcaagagcagtttgattaacgcgtttattggcgaagacgttcttggcgttggtctcactcctgaaacagagctggccaccgaacttcgttacagcagcgacccgcacttgttggccctacgcccggacggcagcagcgagcgccttagcgtcagcgccctgagtaccttgaagagccgcgccgatgagttcactcatgtgcagctgtacctggacaacccacaactcaaagcacttccttctctggtactggtggacatgccaggcttcggctcttcgctggccaaccacaacaaagccatcgcctattacctaccacgtggcgtgcatttcatcgtcgtaactagcgtcgaggacggcaacattacccagtcgatgctccgccaattggatgacctgcagacctacggccgtgacttcaccttcctgctgaacaaggtcaacctgcgttcggatgaacaggtgcaagccgtggctgaactggtcgatgaccagatccgcagcaacttcgtcgcttcacgctccgtgattagggttggtctcgacggcgacctgcgcctgaaggaagtgctgacccacctccagcccgagcagatcctgcgccaggtattcgaggacaggctcaaagacctgacacactcactactgagccagatcaacctcgccctgacctcgttgaagaaagatcagactgaaaaccagcatgccttgagcgaactggccaaaggtattcgtcaaatcgaacgcaagcgcgacgatatgctggaagatctacgcgaccagcaactggaccgtaccgtggatcgctgtttgaaaacggtggggcgcgagttggacaatgttgagtcggaactggtgagtgcgggcctagccggcaatcaggaagctttctcacgcatcatttccgaggtggtacgcagctcgatgacccgttccatcaaggatcagatggacaccctcagccggtcggtggtggctgattttgcccaagccgtgggcgatctaggcaagagcatgggccaattcaacaacgaacagaattggctcggtcaactcaccgaccgaatcaaccgcagcctgcagaaaaccggtgaaaccctgggccactggagcggctcgctggccgagcgtaatgctctggaactggaacgcctgaaaaaggaaagcaagtgggaagagggtcagcccttgccacgggtgacctatcagggtctcgccactgtgttggcagttaccacgtcggtggttaacccgctaatcgagttggcaatcatctttctgccgagcatcctggcgttcatcaacgaaggtcgccagcgcgagcaactgcgccagaaagtaatcaccgaagtcattccctcggtgaaacgtgaacttcgggatcgcctgcccgccttgctaaatgaacagatagacgctctggtgacccaggtgagcagcgaattcgaacgagagatcagcgagaagcagagtctgattgatgagctggcgagcaatcgccagcagaacgcccaggccgccgaacaacaggtcgagcacctgacccgggtcagggaagcgctacagaaactggcctccgataccctttacgagttgcaagcatga

SEQ ID NO: 332360 - DNA, 1038 bp, Pseudomonas aeruginosa
atgtccgaagcaaaggacactctcctgaggctcatcgctctgctgcgcctgatcccgcgagaaccaggcagcattgcgaccacaaccctgctggagaagctcaaggatgatggcttctcggtaagcctgcgcacagtccagcgcgaccttgaccgactctctatcccgtttgccctacagcgtgacgagagctccccgtcatttcgctggagcctgtcggagaatgcgcctatcgatttgtcggccatggatactcccacggcactggcgctatacctcgcggaaagtcacctgcagacactgctcccgcagagtgtgctggatcaactcggcccccaattccgcatggcccgcaactacctcgacaatctggaaaataacggcctggcgcactgggcgcgtaaggttcgagcgattcccaacggcaagtccctgcagaccgcacagattgccccatacgtctgggataaaacttctacagccctactggaacgtaaacagctgcagatcagctacctaagtcgaagcaaaaccgagctgaagcaactgctgattcaccccgccggcttagtttcccgccacgccatcagttacctgattggcagcgtcgatggctacgacgacctgcgccaattcgccctgcaccgcattcagcaggccgagtgcctggacgccccggctcgcgtccgtgacgacttcgagatcgaccactacatccgccaggatctcaacaccgccacaaccattgagcaggtggagctggtcgcctacatttccccgcagatcgcctggctgctcggcgaaactccactgagcaccgaacaaagcctggagccactggacggcagcgactggcaccacctaagggccaaggtgccgaatgaccaggaaactatgtggtgggtgtttagcttgggggagaacgtgcgggtgagtgagccaaagcactgggccactgcaatccgggagagagcctcccgcctcagggcactctacgagcaaggaataccctctcaagtgctagcctcgaatgtgtaa

SEQ ID NO: 332361 - DNA, 426 bp, Pseudomonas aeruginosa
atgaacaccgatactcagaccgcttaccgctcactggctacccacttctatacgacacgctttccagaaatccctgtctcggcgctggatgagttggatgagttccgcatcatcggcgcgctgctgcgtgctgcccccgagtaccggccggactacttcaggcggttgcgtaatgcattggtcctggaccagaagctcagggggcatttttggattgcgcaggaggtcaatcggacgcgcaacccggttaccgttctgggcttgcctcgcaagcgcaagcaggcgcgcaggcagagaatttcagatgacgatttcgctagctgggtgagggcgcttttagccaaggggctgggggttgaggctggcgcactaatgttgatcagtatgactggggcgcgtccatgcgagctgagttttaagtattga

SEQ ID NO: 332362 - DNA, 1275 bp, Pseudomonas aeruginosa
atggctgatcctgtgtacgcactggtcgactgcaacagcttctacgccagttgcgagcgcgtgtttcgccctgacctgttgcgcacgcccatcgtagtactcagcaacaacgacggctgcgtgattgcccgttctgccgatgccaagcccttcgtgaagatgggcgccctgttccacgagatcagaggcgacctcaagcgccacggcatcgtcgccttcagcagcaattacgccctctatggcgacatgagcgagcgtgtgatgacgatcttggaaagccgcttcccgagcatagaggtctatagcatcgacgaagcctttgccgatatgaccgggttgcccgaacctctggagtcgataggtcgccaggtacaggcagaagtcagacagaagaccggcatccctgttggcattggtatcgccacgaccaagacactggccaagctcgccaataacgccgccaagcgctggcagaagcagaccggaggcgtcgtagatattcgtgaccccgtgcgtcgcgacaagctgctcaaggccatgcccgtagaagaagtctggggcgtcggcccccgcatgcgtgcgcacctggaaggcatgcaaatcaagaccgcttgggacttggcacagatggatgcctggacactgcgcaagcgattcaatgtcgtggtcgagaaaactgtgcgcgaactgcgcggggtggcgtgcctggagatcgagaacgagaccgagccaaagcaggagatctgctccagccgctcattcggcaagcgcctgcgtgagttagctcccatccaggaagccgtgaccagctacgccacgcgcgctgctgaaaagctgcgcaagcaggagtcgctctgccggcaggtgcgtgtgagtctgcgcactgggatgttcaacccaaccgaggctaagtacgccaatggcatcctctgccaactgccctatccgaccgatgacagccggctgattatccaggctgttcagactgggctgaagcagctgtaccgcgagggtttcagctacgccaaggcgcaggtgctgctattggatctctgtcacaagaacgagtacacaccggatctgttcgccccagagcagcccatcagaaccgagcgactgatgaacaccctggatgcgatcaacagccgctgggggcggggcacattgcagccaggaagaacggccaagcctgcggagtggtcaatgcgcagagagtttctgtcacccgcctacaccacgcgctgggcagagctgctgagggttagcgcccgataa

SEQ ID NO: 332363 - DNA, 438 bp, Pseudomonas aeruginosa
atgagcaccgcacttatcctcggcccgctgcagcgcagcagggcagtccttcccctctttgatgcacgtgttccggccggctttcccagcccagcactggatcacatggaacataagctgtcgcttgatgctctgatggatctgcaagcaccgcacacctatgtggttgccgtgagcggtgacagcatgagcggggctggcatcttcgacggcgattatctgatcgtcagccgcgccatcccagcaaaaccgggccatgtggtcgttgcctgcttaaacggcgatgtcctggtaaagcgcctggcacagaaacagggccagtacattctgcagtcggagaacccgaattactctccacgctacatcctggagcaggatgagctgatgatctggggcgtcgtcactcatagcctgcggaatcacctcacccatggctga

SEQ ID NO: 332364 - DNA, 876 bp, Pseudomonas aeruginosa
atgaaacgcaaacaggaaatcgagtccgtacgctgggatctggcgctgcgctatcgcctgatcgagacggtggcgtggtgggaaggacgtttaaccaccgggcacctgatgcagagcttcggcatcagccggcagcaagcgtcgaaggacatcaattcctacatcaccgactacgcgccgaagaacctggaatacgacaagcatctgaaggggtatgtgccgagcagccacttcagaccgctgtttatagatgacagtgccagcgcctatttgcacctgctcaaccagaaccatgaccgtgcaccacacatcgaaggactggcattggcctatgcgcacaccgaggtgctgctggtgccggatcgcacggtgcgtccggagctgctgcgtcctcttctacgcgcctgccgcgaaggcctgcgcctggagtgtgagtatgtttcgttcaccaccccagatgccgaaactcgattgatcgccccgcacacgctgatctacaccggcatgcggtggcatgtgcgggcgtattgcgaaaagaacagggattaccgcgacttcgtgctcagccgctttcgcggtgtgccggagttgatggacgacaagaccgaaaatactcgcgaacaagatccgggttggagcacgcgggtgcaagtcatcatcgagccggactcacgcctaaaacccgagcagcgaacgattatcgaagccgactacggcatgcgtgacggacagctggtgatcgagacacgaggtgcgttggtgcagtacgtgctgcagcgctatcagatcgacccgaccaaggtgcatgccaaggccacggctcagcagatcgtggtcgccaacctggaagagctacagccctggctgtatcactga

SEQ ID NO: 332365 - DNA, 648 bp, Pseudomonas aeruginosa
atgaataagccatcatcggtacaggccctagaagagctggggcgcgtccggctatccaagcactttttcatgcgcgatttcctctactcggaaatcagccagatcgagggcatccccaatattccggattatccggatcgcgccattgaagccgggcgagggctttgcgaacagctgttggagccacttcaggagcgctttgggcggatcgtcattcgctcggcttacagggctccggcagtcaacgctaaaggggccgagaacaacaaccagtacagctgtgccgccaacgaaaaaaactacgcggagcacatatgggattatccggaccctgaagggcatctgggcgcgactgcctgcatcgtggtgccggcattgctgccctggtatgaggagcgcaaggactggacgccgctggcctggtggattcacgacaacctgccatacgccagtcagttctggtttcccaggctggcggcattcaacctgcgttggagtgcaaacccgaatacgctaccgagcatcggcacttacgttaccaacccacatacgggggacaggaaggcattggtaaaagacggggtggccacactcagtctggatgagcgcaaggtgatcgttcgcccatggctagagagcctggcatga

SEQ ID NO: 332366 - DNA, 2367 bp, Pseudomonas aeruginosa
atggacaagaaatcgctttccgagcgtgatatctgcagcaaattcatttcccctgccattggtaacgctggctgggatttgcataagcaggtacgtgaggaagtcagcttcaccaagggacgcattatcgtgcgcggcaaaatgcacagccgtggcgagtcgcgtcgagctgactacatcctctatcaccagcagaacctgcccattgccgtgatcgaggcgaaggataacaagcactcgctcggctccggcatgcaacaggccctcggctatgccgaggcgctcgacgtgccgttcgtgttttccagcaatggcgatggctttctgttccatgatcgcagcggcaccggcgcgcaggttgaaaccgagctagggctcgaccagtttcccagcccggacgagctatggcagcggtattgccaatggaaaggcctggatggcgccgctcggcaaaagatcgaggcgccctactacgacgacggctccgggcgcatgccgcgctactaccagatgaatgccatcaaccgcacggttgaggccgtagcgcgtggtcaggatcgcgttctgctggtgatggccaccggtaccggcaagacttacaccgcgtttcagatcatctggcggttgtggaagtcgaagcagaagaaacgcatcctcttcctcgctgaccgcaatattctggtcgaccagaccaagaacaacgacttcaagcccttcggccaggcgatgaccaagatcgccaagcgccagatcgagaagtcttacgagatctacctgtcgctgtaccaggcagtaactggctccgaggaagaaaagaacgtctacaagcagttctccccggacttcttcgacctggttgtgatcgacgaatgccaccgtggcagcgccgcggaagattccgcttggcgcgagatcctcgagtacttctccagcgccactcacgtcggcctgaccgccacaccaaaggaaaccaaggacgtttccagcatcacctatttcggtgaaccggtgtacagctacaccttgaagcagggcatcgaggacggtttcctcgccccctacaaagtggtgcgtatcgacttcgacaaagacctgcaaggctggcgcccgcccaagggcatgctcgacaagaacggcgagctgatcgaagaccgcatctacgacctcaaggatatggatcgccatttggtcatcgaagcgcgtacccagatggtggcgcagaaggtcaccgagttcctcaaggccaccgatccgttccagaagaccatcatcttctgcgatgacatcaaccacgccgagcgcatgcgccaggccctggtcaacctcaaccccgagcgcatcgctgagaatcgtaagtacgtcatgcgcattaccggcgatgaccaggaaggcaaggccgagctggacaacttcatcaacccggaggcgcgctatccggtcatcgccaccaccagcaaactgatgaccaccggcgtcgatgcgcagacctgcaagctggtggtgctcgaccagcacatcaagtcgatgactgagttcaagcagatcatcggccgcggcacgcgcatcaacgaggattacggcaagttctggttcaccatcatggacttcaagaaagccaccgagctgttcgccgatccggcattcgatggcgaacccgtggtgatctacagccctgaaggcgatgactcgcccgtgccgccagatagtcctctggcggatgaggaaggcatcgtcgacggtggcgattggctgcccgagggcgacgaaaccgatggcggcgaagagggcaaaaagcgcatcaagtacgtgatcgacaacgtgccgatccacgtcattgcagagcgcgtgcagtactacggcccggacggcaagctgatcaccgaatcgctgcgcgactacacccgcagctgcgtgaaaaagcagttcgcttcgctggatgacttcctgcgccgctggacggatgccgagcagaagaaggccatcattgacgagctcgcagcccaaggtgtgatgtgggaagccctggacgaggaagtgcaggccaagcgcggccagccgctcgaccccttcgacctgatctgccatatcgccttcgaccaaccgccgctgacccgcaaggagcgcgccgagcaggtgaaaaaacgcaattacttcgccaaatactccggtgccgcccgccaggtgctggaggccttgttggacaagtacgccgacaccggcattgagcacatcgaagacataaagattctccagctcgatcctttcagccagatcggtgcgccagttgagttggtcagggcgtttggcggtaagcctggttatcagcaggcgattcaggagttggagagtgagctctatgcatcctga

SEQ ID NO: 332367 - DNA, 942 bp, Pseudomonas aeruginosa
atgtaccctgagctcgtagcggcgctgcagcaactgggttgggtcgagagcgagcccatgcatcggagcgaaggttcgactacagatgcgggcggtgactcgctgacaattcagcaactgatgatgacgctggagcgccaggggttcactcgacctgtgcaatcaggcctgatagtgctgcgtatggaacatccgttgctgcctcagccgttattcatcaaacaaagcaccagcgctcaagctcggccaaagacacctttggtattgcatccggattacgaaagccagctacctgagctgctagccatcagcggtgttgagcgtagcgatgggcgttactaccacaacagcaacctgcgcggctttcccaagcgccgcaatggtggggctacggatatcgcctatggcttggatcttggctttcggcacgtcgccgccctggagcagttgttggtgcatcttctgggtaaggcgtcagatactgcgactcaggagcccagccattccaacgcgtccttgccgaatgactgtggcttgcaagaccaggcagtgaccgacaccgagcgtgacgccctgatcaaggcccgcgtcggtcagagtggttatcgcgatgatctgttggcctactggggtggctgtgcggtgaccgattgcagcgtaccggagctgctgcgcgcctcgcatatcaaaccctggcgcgctgccagcccagccgagcggctcgatccattcaatggcctgctgctcacacccaacctcgatcttgccttcgatcagggcctgatcagtttcgacgaccaggggcagattctgataggtgaggatctcgaccccgacagcgcccgtgcgctcaacatcacccccgaacttcgcctgcgccagatcgagccgcgtcaccgcgcctatctggcctggcaccgtgaacacctgtttaggaagtaa

SEQ ID NO: 332368 - DNA, 1470 bp, Pseudomonas aeruginosa
atgtccatcagcagcaccatcaaatccatccaggacatcatgcgcaaggatgtcggcgtcgacggcgacgcccagcgcatcggccagctcgtgtggatgctgttcctcaagatcttcgatgaccgcgagcaggagtgggaactgctggatgacgcctatcgctcgccgattccggaaagctgccgctggcgcacctgggcggccgacccggaaggcattactggtgacgagctgaagaacttcatcgacaacaacctgttcccgcagctgcagaacctccacgaatacagcaccactccagccgcctacgtggtgcgtggcgtattcgaggatgcctacaactacatgaaatccggccagcttatccgccaggtgatcaacaagatccaggagggcgtggacttcaacaaggcgcaagagcgtcatgccttcggcgacatgtacgagcagttgctgcgcgacctgcagaatgccggcaacgccggtgagttctacacgccgcgcccggtcaccgaatttatggtgcgcatggtcgaccccaagctggatgaaaaggtcatggacccggcctgcggcaccggcggcttccttacctgcaccatcgagcacaagcgcagccgctatgtgaaaactgccgaggacgagcgcgtactgcaggccagcatcttcggcgttgagaaaaagccgctgccgcacctgctggccaccaccaacatgatcctgcacggcatcgaggtgcccagccagatcaaacacgacaacaccctgagccgcccgctgatcagctgggggccgggcgagcgggtcgactgcatcgtcgccaacccgccgttcggcggcatggaggaagatggtatcgaaaccaacttccccgccgccttccgcacccgggaaaccgccgatttgttcctggtgctgatcatgcacctgctcaaggacggtggccgcgccgccgtggtcctgccggatggcttcctgttcggcgaaggcatcaagagccgcatcaaggaaaagctactcaccgagtgcaacctgcacaccatcgttcgcctgcccaacggcgtgttcaacccctacaccggcatcaagaccaacctgctgttctttaccaagggcacgccgaccaaggaggtgtggttctacgagcatcagtacccggccggctacaagagctactccaagaccaagcccatgcgcatcgaggagttcgccgtcgaggaggcctggtggggcaacgaggctgatggctttgccgcgcgggtggaaaacgagttcgcctggaaggtcagcctcgacgagctcaaggcgcgcaactggaacctggactgtaagaacccgcatgtgggcgagcagatcagccacgatccggaggagctgttgcgtaactacgcgcaactgcaaggcgagatcggcgagttgcgcgcccagcttaaggctatgctggccgaggctttggagcgccaggtatga

SEQ ID NO: 332369 - DNA, 1695 bp, Pseudomonas aeruginosa
atgacggcgttgctcaccgataacctgccactgctggcgggagcacccaatggcaccaaaaagctacgtgagctgattctggagctggcggtgcgcggcaagctggtgccgcaagatccgaatgatgagccggccagtgagctgctcaagcggattgccgatgaaaaggcgcgactggtggcagaagggaagattaagaagcagaagccgttgcaagaagttgacgaggaagcactgccgtttgaattgccagcagcctgggtgtggactcgacttggcgaaatcaccaactttggtactacaaccaaaaaagacgaaataccagatgacgcctgggtgctcgatctggaggacattgaaaaagacacctcacggcttttgcagaaagctcgctttaaagaacgcaactcactcagtgataagaacagcttcactaaaggcgatgttctctacgggaaactccgcccatatctcaataaggttctggtggctgaggaggacggattctgcacaaccgagattctccctttcagatgctacggtccttttgtagctcactacttcatgatcgcgctgaaaagtccgtattttctcagctatgtgaatgctaaaagctacggtatgaaaatgcctaggctaggaactgaagacggcaggcaagcctattttcctcttccccctcttgccgaacaacaccgcatcgtcgccaaagtcgatgagttgatggccctgtgcgaccgcctggaagcccagcaggccgacgccgaaatcgcccacacccaactggtgcaagcgctgctgggcagcctgacgcaggccagcgatgccgcagactttgcgcaaagctggcagcgcctggccgagcactttcacaccctgtttaccaccgaatccagcatcgacgccctcaagcaaaccctgctgcaactggcggtgatgggcaaactggtgccgcaagttcctagcgatgagccggccagtgagttgctaaagcggattgccgaggaaaaagcgcgattggtagcagatgggaagatcaagaagcagaaacctctgggcgagattgccgtctccgatatcccgtttgatgtaccagatagttgggcttggtctcgaattggagaaattgcgcttaatacagagtacggcctgtctgagaaaacttttgacctacaggatggagtgcccgtgttgaaaatgggcgacatacaagaagggaaagttttacttggtgggcagatggccgtaagcaagagcacagagggtctaccagagctttatttggagccggaagatttgctttacaaccgaacaaacagtgctgaactggtcggtaaaactggaattttcctggggcaagccgggaaatattcctttgcttcttacttgatccgtatcagatgcctgaaggagctgttttctccgctctacctgaatacttcgatgaatgcgccaggctttcgtgaaacccaaataaacccgcatttgaagcaacaatgtgggcaggcaaacgtcaatgggacgatcatgaaaaacatgctggtttccgtcccgccactcgccgaacaacaccgcatcgtcgccaaagtcgatgaactgatggcgctgtgcgaccaactcaaagcccgccttaaccaggcccgccaggtgcacgagcaactggccaatgccctggtcgagcaggccgtggcctaa

SEQ ID NO: 332370 - DNA, 1077 bp, Pseudomonas aeruginosa
atgcccattcgcacccagatctggactgtcggcccacagcccgagccgctgaaaaacgccgtgctggccagcgagcagtttctcgaagacatgatcgtcagcgcgccggcgctgctctccgaggactggctgctgatcgggcgccaggaaagcaccggccagggcgggcgcatcgacctgctggcgctggcgccggatgcctcgctggtgctgatcgaattcaagcgtgagcgcaccccgcgcgaggtggtggcgcaggcgctggactatgcggtgtgggtcgagcgcttacagaccaacgatatcgaggccatctaccagcgcttcaagccgggtgccgacctggcggcggacttccaggcacgctttggcacgccgctggaggccgaggcattgaatcagagccaccagatcgtcatcgtcgccgccgagctggatgccagcagcgagcgcatcgtcggctacctgagcgagcgcgatatcgccatcaacgtgctgtgcttccaggtgttccagctgggcgagcagcaactgatcagtcgtgcctggctgctagacccaaccgaggcgccgcaggccagcagtgccagcaagcccggcatgcaggcggagccctggaacggcgagttctatggctcgttcggccatagcagtacgcgcgactgggccgaggcgcggcacttcggcttcatctgcggcggtggcggcagctggtacagcaacagcctgaagatgctcgcccccggcgatcgtgtgtgggtcaacgtgccgggcgccggttacgtcggtgtggccaaggtcaccggccacgccaccccggccagggacttctgtctgctgcacaacggcgaggaacgcccggcgctggatgtgctgcaagcggactaccaccgcgagttcgtcgacgaccccgagcgctgcgaatacttcgtgcccgtgcaatggctgcacagcctgccgctgaacgaggcggtgaaggaggtcggtctgttcggcaaccagaacaccatctgccgccccaccacaccgaaatggcggtggacggtggaacgcttgaaggagcgcttcgcgctctga

SEQ ID NO: 332371 - DNA, 2127 bp, Pseudomonas aeruginosa
atgatggatctgctgaaacacctgatccccgacttcgcccacatgttcagtgccaatcccaatggcatcagtgcctggttttggtctgcgacggcactgattttcggcttgtcactttattttctgttcgtgcacttccgccgtttccgtacccggctgcgtgccctgcgttctttgcttgaagggcaaagcaaggaaaccctggcactgagccgacgtgaaaccatgcaaaaggcgcagggcttggatgcgcccaatgtcggcatgctgtggcgtgagttcgacgaaagcctggtgctgtcgtccgatcagaagcatttgttcaatacgctggatgctgagcatttcttcaatgcccgaaccttggctcccggcctgacagccagccgcttgctggctgctgcaccgagcttcctggtggccatcggtgtgctcggcacatttgtgggcctgacggtggggttggaaggattggtgggcacctccgatgagatcgagtcgctcaagggcggcatcaacaagctgatttccggtgctgccgtagccttcatgacgtcggtatggggtgtgttcttcagcctattgctgaactttgtcgaaaagatgttcgagcgttcagcgctgggccagatccagcagctgcagcacgatatcgacttcctctacccacgcatccccgccgagcagtcgctggtgcatatcgccgagtacggcaaggagagcaaggaagcgctgcaggagctgcacgagcgtattggcgatcgtctgcaggaaacgctcaacggcatgagcgaagcgatgcagacggcgctgaccgatgccctgaacaacatcatggcgccagccatccagactctggtcagcaccaccagccagcagtccacgcaagtgctggaaaagctggtgggtaatttcatggacggcatgacctctgtgggccgtgagcagggcttgcagatgcagcaggcggcggctgacgtgaacgctgcagtcagtggcatgagtgagcgcctgaaccaactgttcagcagcctgaatgaacagcagggtcgacagatggaggtggctcagcaacagagtgcggccttcgagacgcagttgcagcgcatcagtggttctgccgaagagcgccaggcacagatggagcaacgctttgctgagttgatgtcggggctgacgaaccagttgcaaacccagttgggtgctgcccagcagcgcgacgaggagcgccaggtgttgttcgagcgtgtgcttggccaggccagcagcagccagacggcgatgctggagcagttttccaactcaacccgtgagcagatgcaggcgatggccgaggcgggtaacgagcgccacaacaatctggagaaggttttctctcgtttgatgatgaacctcaacacccagctcgattcgcaaatgggggcggcggagcagcgtgagcaggcacgccagcagcgcttccaggagcagctcgatcaggtgtcgacccatcaacaggagctgctttcgggcctggccagcgctgtacaggcgacccagcagcaaagccgcctaatggcggatcagcatcaacagttgctaggccagctcaagcaggtatcggaagcgactgcacaaagcagcaagcatctggacagcagtgcgaatcagcttgggcttctatccgcgaatctgcgccaggccgccgataccttggggcagcgactggaggccgttactcatggtgtcgagaaagctggccagcagaacgccgagctcgcggcgcagttgcaaagccaggccgctaccctggcgcagctgcaggccacgttgcttgagggggcgcaacgcttcgagcaagcggccggtgaagcgcgcaacggttttggcgagatgaaatccgctcagcaggagtttctctcaggtgtgcgccacgaattcaccgcgctgggtgaaaagttgcgtgagcaggtcgaggcagtagagaagcaagccgaggaatggctgcgcagctatgccggcgaagtccggacgcaaatcgatgaccgcatgaacaagtggaacgaggtatcgctcagctacgccgaccagatgcatcgaacggtgcaagccatgagcagcattctggatgagctggaggcacgctga

SEQ ID NO: 332372 - DNA, 765 bp, Pseudomonas aeruginosa
atgcgcctgggtaaatccaaggaagtgagcgtcgacgaagagaacccttattggatgtccttctcggacatcatgtcggcgctattggtgatcttcatcctggcttcagtgattctgatcctgcagttgatggaaattcagaaggagctgcaagagcgccaggtgcagttcgagcaggaactggtcgagctgaaaaaagcagagcaggtgcgccgcaccattctggatgaggccgtggaggccctgcgcgagcgcggcatcaaggtcgaggtgagcgagaaccatacggttctgagtattcccaacgatctgctgggcttcgacaccggtgcctatgacattcatgccgcctatcaggcgcgcgctctggagatcggcaaggtcatcaatgaggtgatctcgcgagaggatcgagtcgagttcctcgatacgatcttcatcgaggggcatacggacaatcgtccgctccagggctttatgggcaaaggcaactgggggctctcaaccttccgtgccatttctctctggcagttctggggcagcgcgctgtccgccgatgagcaactggcaaggctgaagaataaggatggcaagccactgttctcggttagcggttacggcgaaacccgccccgttttggtcgaccagcagactgaggatgacttcaagcgcaaccgacgcatcgatatccgcttcaccattcgtcgtcccgacagcgctcagtacgagcaggtgcgtgagcgtctggaggaggtcaagccgtga

SEQ ID NO: 332373 - DNA, 2166 bp, Pseudomonas aeruginosa
gtgaagttgcctcctgttcacatgccggtcgctgaatgggcgcccgtggtgcgggagcgatggacggtgctggtcgaaaaggtcgctcgaatgaaggccgcaagtggcaagagcgatgcctttgacgccatgttggcacgattgcgcgacatggcgagtacggggcgtttcgacggcctgcctgagctgctaaaacgtcgtctcactgcgcgtgcgttgacctggttgtggctcaacgacgaggccatgggtaggcgtttgcttagttcgcgtctgctttcggtgctggtcgatgctcagcagccgaggctgacacgtatcaccttgcagcagttggctcagttttactttcgtcgcttcgacaagctggatgagcacgatgggctgcgtgagcagcttgagcagattttgctccagcaactgcatttaatgcccgagcccaaagtaagtggcccccagactgatccgctggtaaccctcaagcgtgatggtcattggttgttgccgcctgacgggccagtccaactggttgagcgggtacgcgacagcggccatgagctgggccagacctttgaggtcatgggattgcagggctttgatgacgggcgttatggcgatatctgccgggcccacttctacctggaaaccctacgagggcttgcgcccggtgaatacgaccccgtgctggatgagctgcagaagcccgctgtgtccaaggctccgtacgagggcgagcgtcgtatcggccatgttgcgctggagattctgatcgatcgtgccggacaggagccgggtgaggtctggcagaactttattctcaatctggcgggggatccgcggatcgcaagtaccgcagccaactaccgtgagtggtggcaaccacttggtgaggcgcgtatccagaaggtgcgtggttggttgtctaaggaagaccttcggttgttcctgcaggcggttgagcaatatggcttggagtcgggaaaggaagatctcaagcgtatgttcccggcgcgcaaactgttcttggagggattgtttgcgctcggcttgatccgacatacgaggttgatgcttggccgcaatgccaagctgtcggtgaagcgtattctcggaagtgaggtaaaaaccagcttcgcgggcatggattcagccatgagcgacaaggcggtgatctatctcgattgtggcgacttccatctggtcgagggctcccatagtttcaaaatttgggtttacctcggccagccagggcattgggtcaagtcgtatgagcgaaatcagttctcgcacttcgatctgacaacgtcgttgcctaatcaatacaaggcagcctacccaagccttccctacgaggcagtgacccataacggttcctggcagcgtaaggtgttcgatttcctggcggataacggtattgcgctggatatcgaaaaattgcttagccggtcggagtacaaggcatatttgagcaaatacggcctacccgtcgtgaggggcaagaaagcgcgcgttgagccactggttcagcaaagcgcgaagtctgattcggccccagtttctcagggtggagcaaccggctctgtgtccgcgcatcgtatggctgaaccgcgtcctcctgctgtggatgcttttgcctcagaagctccaagagcctccggcaccgaactgaccgacacgcaattatcgattttggcctacctgtccaagcacccggaaagcttgatgggtgatattcgtcaagccctagaaggcgatgaagcactcttttacgagatccaggacgctcttcgaggcagtatttcaagctacgtccaacagaacgaagtcttccaatggtccttatccagcaagggagaggcattgttgcgtaaagcggatttagatcctgcacccaacacctctgatgcagaccagcaacctttaaaggctactttgcagcatttggggacgtttgacttgcaggtgctgtggtacttcaaaaataacccaggcgacaaggtgcgccacgcagcgaacgttttcggcgtcgaggcgcgggtgattaatcaggtgctttacggttcgttgaagggcatgtgtgtgcaggacaagcagttcggctggtccgttaatgaaacgactcgcctctcacttgaagcgttggataaacaggacagggctgaataa

SEQ ID NO: 332374 - DNA, 3042 bp, Pseudomonas aeruginosa
atgggattgatggatattttccgctcgctgattggtgagcgggacggagcgctcagtacccagcaaggctttcagtctcagcctgattccaatggcttgaatttctatctgcccttgccggccttcaaggcactgcaagccgggcagggcagtgctttagaaaaaattcagctgatagtgctcaacatgctggttgagcaagggattgccgaaaacacggccaacggttttcacatcggtgccgaagatattgcggggatggatcttgagcaggcggaaatcttgcgtttgccgagacgcttgccagggcactttctaacctcaatcagtgggcgcacgggcaacagtggttttcgtgtggcgatcacgctggaaatgccggacggccctgccagcttcagtcgcaaaggcccctatctgtacctgaccagcagtgagtgctattggctgacgccggctgaaattatggggttgcaggcttgggaactgcatgagtcgttaggcccagaacagcgaggagaggcggctaatctgcgcctgatggccgagctgcagaccgctgcgcgcagcgggatgcgtattgatcttagccactttgagcggctggatgtggtggtgcctcagaacatcggagttatcgctacgcgtttaccagatggcagcctccaactctgcccgagccttggggatggctccagtgctgaccagctggaaaaacgctggtcgcagttggatatgaccgccgatggtggtgtgctgcgcatcgacaatcgtgtgttgctgctggatcaggcgcggatggatggcatccgtaatgtgctggccaacaaacgtatcccggctgatcaggtcaacgagtttattgccacgccaacggcgtttctcgatgctgcgctggtcaatcttgaggtgggcttttctgcccgggttgcgggtattggcaagcttcagcacatggatttcggtgtcctggatgcaaccaagaatgactggtttgcgcttgataagcgcccggcacctgcagcgatcctgagcaagctgattcagtctcctgaggatttgcagcgcttcgaggaggtactgcaggcggctaatgaacagggtgcgacgagtttgtcgttcgcgggtgaggtaatcgacatctctgacgcgccggctgttcagcaagagctggccagggctcgccagaacatgactgatgtgagcgatagcgagccgcacagcgaggagggtgttctcccgggggaggacaaggagaaagtcggggtcattctcaaggatgccgacgagatcaattctgcgctgttgcgtaaggctgctgctgcgacgccgctggtggtgccagattggtcggcctatgcccgggagccgttccctcatcagcgtgaggggatcgagtggatgctgaagctgatgggcgcagcgttgcaggatgaaactgatgatctctatcgcctgcagggtggtctgcttgcagatgacatgggcctcggcaagacatacatgtcgctggtcgcagtcggggagtatctggccagccagcgcgcggctggcaagccgcagaagccggttctggtggtggcgccactgagtctgctggaaaactgggaggatgaagtcggtaagaccttcgccagcattccgttccgcgatgtggtggtgctgcagtcggggcggagtctgcgtgactatcgcgtcaaaggtgctgagcgtgagtcggtgcagttggcgtcgatgattgatgacagtagcggcatgatggatgagcagagcattcgctatgcactgcatgtggggcctgaagcaggcgtgcatcgtctggatatggaccgtcgcttagtgctcacgacctatcagaccctgcgtgattatcagttctccctgtgccgaatcgactggggcatggtcatcttcgacgaggcgcagaacatcaagaaccccaatgcgctgcagactattgccgctaaagggctcaaggcggatttcaaactgttggcgactggcacgccggtggaaaatagcctgggcgatttctggtgcctgatgcatacggtgcagcctggcttacttggtggctgggaaagcttccgcgatacctggatcaagccaattctggctgcaagcgatgaagagcgtgatgaggtacgggcgcgtttgggcgagcagctgcggcgtgctgtaggcatattcatgttgcggcgggttaaagaagatcagctcaaaggtctaccagccaagactattctcagtggtgtcgagcaagccgatcatggcctgcaacggtatgcggcgcagttgggtgtggtgatgaaaggcatccagttgcaggcctacgacgaagtcctcgacagctatcgggctcgtcgtgcaagcgctgaggatatgcgtggtaccgcactggcggctttgactcagcttcgctccatttccctgcacccacggctggagaatgagtcggcgctgtacagcgaggatggcaagcaggcgcgacaactgatgatggagtccggcaagctggcggtgctgctgcagttactcgatgagatccgtagcaagggtgaaaaggtcatcctgttcatgatgaccaagcgcctgcaacgagtcctcaagctctggctggatcagatctatgacctgaatgtagcggtgatcaatggtgacacccaggctgtggcgactcgcgccgaggatatgacgcgcaagaagctaattgccgagtttgaagcgaaaagtggcttcaacatcctgatcatgtcgccagtagccgctggtgtcggtttgacggtgattggggccaaccatgtggtgcatttagagcgtcattggaacccggctaaagaagcgcaagcgtccgatcgggtttaccggatcggccaaaccaagcctgtgttcatccatctgcctgccgtcactcacccccagtttgattcattcgatgtgcaccttgaccgcttattgcgcggaaagctgatgcttaaagacgcggtagtgacaccagaggcggttagtgaaagtgagatgatgcaatcgatggggctttga

SEQ ID NO: 332375 - DNA, 933 bp, Pseudomonas aeruginosa
atgcaccagagtaccttgaaaaaataccagacccgggcgacaaatttttaccgcgcacactgtggcacggacacccccaattctgcgcaaatttgcgcggctttgctcgctcaagctcaagcgtatcgtccgaacagcttcagcacgcttaagagcgcgttagcacacgaccaggtagctcgcggcaacccagacgtggcgaaagcgatccgacatctggtcaacccggtgacagcgcttggctcgacactaccgagaaagccgaagcccaagaaagtccgcaccgtttccgatgatgatttctgggagctcattctgcacctgcgctcacgtgactttcatgatgaggccgtctgtgcagtgctggcttactacttgggtgtccgtccctgcgagatgcgcacgatcaaagtaattggcaaccaggtacacatcgttgggggcaaaaaaagcgcgcccttgcatcgtggtgcggacaggacactgattattgatcggcctgccgtcctcaaagccgtcgcagaggctgcagaatggatgagcaaatgctgcaggacagacaccgccatccgagaccgtttgcgcaaagaatgccgagccctatggcctcgtcgcaaacggcatccaacactgaaaagcttcaggcatcaaatgggctcaaacctgaaggcatcgggagagagtgatgaggccgtggcatacatcatggggcaccagtcgaccgagtcggttggtgtatacggtgacaggcgctgcggagatgggctaatgattttcgtgagggttgttgctggagcggatctgactaaggtgcgcaagccgaaaaaaccagcacgatttggtaagggccaggtgattggacggatcggccatcagcaaagcattggattacagcctcaaacgctggacggcgctgtcgcgctatctcgatga

SEQ ID NO: 332376 - DNA, 1269 bp, Pseudomonas aeruginosa
atgaatgtaaatcgtacccccaatctatccatccctttcttcaatggccttttcataagtgccgctcctggccatgaaaagtctcttgagctagccattccgcacctgtcactggtcgtgaatgcgctcaaccgttatcactactctccccttttgagtgaatacctagataccgtgctctctcgctttttgcgctcgaacgactacagcgccaagaacgagtacatgctccgagcacgcatggagaagatcaaacgcgttctcactgcagaaaatccagagcggcgagtttgtgaactcagcagtgcggatattcagactcttaaggaccagcttcctgctctcctgaagcagaacagcacatcgcagagccaagggggcaacctgcaaggctatttccagctcttcaacagaatgatcaacgaagctgtcaacgatcagttgcttgctgagcctgtgaaagtacatggctgccagactaaatctcaggtagagacgaaagcgcttctggactccaacctcgttggtctcttcgatagctggccttatcaggcatacgatcctgggacaccgatagcccatgtacgccacgatgcccacagctattgtttctggttgatgccactcggtatcttcacgggagccaggctcaacgagctttgccagctacgtgttcacgacgtgttccacgatgttcacggcgtgccgctgattagcattaacgacaacggcttcaacaagtctctgaaaaattcgtcatcgaggcgcgagattcctgtctgctcgaagctgatcgaaatgggtttcctagacttcgtgatggagcggcgccaggcagaaggcccggatgccctgcttttttcagaactgcgctttgacgaaaagcatctgtactcacgtgccgcgagccgtttcttctgcgggcctgtgacaggagcgggcttcatcggacagcattgcccagtagccctcaacggtggcttcaactttaaaagcttccgtcgcactttcgcgacacggcttcagaagtcgggtgtacccgaaaccaccatcgcacatctgctggggcacaccgagggcaagctagaggtcactaccgaacactacttggaaaagccggagtccctgattttgcgggatattctggagcgcaacctgagctacaacctgcccttggcaaccatcaactggcagcacttcaaacatttgatgggcagccaggcaggacgcagtaagcgaggccggaaagccaagaagacgctgcactag

SEQ ID NO: 332377 - DNA, 2454 bp, Pseudomonas aeruginosa
atgtcccaacaccagagcaaagcaggtgtcccacacctgatcttccaagccaaaaccggcttccagtactacctcactttccccaagcatttcgcgctcaatccgcagctacccgcacagatccgttggtctctggggtatgacgaagcgcttgctcgcgacttagcagcgcacttgaatctcaagttcaagcacttgctgcaaaagtcctctgaggatcatgttcagttttgcgggcatagcattctcttcgacctggcagaactgcatgacctcgtgaagcgtaggctagagagcgcacgcatcgtgtggcgcatccgctctgcgcccgccaaacttgccaaatccgacccaactccaggctacgaacgcctgatgaaagaatgccaggaacaccccgttctcttcactgaagagcctggcggagaaatttacttcgcgctgttcccaagccagaaactgatgaaagctttgaacatcaggtttactcgcttcgactggccattgggcactcgtgatccagaagttgccaacagcgccgcaatctacatctacaacgccatcatcgctcttgagacgctgccgcttaccggcatcagttacgcccccggccatccgcttctttcgctgatgtcgctctatgaatacctgtgtttcgcgcgtccggatcaaggcaggaatctgctgcacattccgccgagtttgccccaatctgcatatgccgtcggtttctggctgaatcaacaacatgtggaaattgactcgcttgaaatctgcagccgcctcgtaatcgtgcaagaagaaagtgggctttattctctgcgtattccgctcagtcaccctcgcctgaaagcgaaccctcggcgcccgtctgaaatcaatatcgaactgctgaccagttcgccgatcgtcgcgttgctgatgatccaagcaacgcttattcagatcgataaggccttgctgcagagctttgtcgagcacaattcgactgatgcttatgagcgtgcaatgcaagaaatcagcgatctgattcgccggacgctagggccaatcccgccagccgaaccgatgacttcacttccggagctggtcgctgcaaatgacgcccctcctgccccccaggatcccggcaccctggcactgctcagtgcgctgagcagcgttctgcccgaggcacaaaaaacgaaactggccacgctgtttgacaccccggcaagtaatgaccgtttgattccagcgggcttgagcaatcctgagcagctcaactttgctgcactcgtcaatgagttcgaagagcgccaaatccgcgaaggggcttggagcaatccgcgcacacgcatcacgatgcatgcacgtctcgaaggacttgccgagctcattggtggtcacaggacactcgactcattgagccgttcagacttcaacgcactgcgcgatcagctccgtagctatccgaaaaaccgccaccgcctgcgggccacacgctatcagcccttgagccaaatcatccagggtggcaagtacgagcccatcaatgcgcgcacagctaagaagttttttgagctagcgcgggcggtcgtcggctatgcgcacgaccagggttatctgaaagagaaccttgccgctggcctggtgttcagcacgaaaggcgccccctcaccacgcaagcgcacctacactcaccggcagattgagcaactgcttaatggccccgtgtataccctcaaagaacctccgcgctggcgactggatgactatcgcttctggctgccactgctcggcctctataccggtgctcgcttgagtgagctttgccaacttcgcctcggggatatccgcgaggagcttggtgtctgggtgatcagcatcagcagttctggtgcacgtcagctaaaaacggcggactccgagcgcctcgtgccgctgcataaagccattcttgaagctgggtttttagagtttcatcagcaacgcctggatgcgaatgacggagatctgtcggcccagcttttcgacaacatccgcgtgtatggcgatctgtcgcctgggcatgtggcaagccgctggtttatcggctccagcaaggaagaccaaggttacctgggtcaatgcgggctgggcgatgacgagctgactttccacggcctgcggcatacgttcatcaaccaattccgtcggcagaagctcgacatgctgatcggcaaggccctagtcgggcacgcggaccgcagcaccacgggtggctatggagattgctatccgagctatgttctcaaggaagagctcgacaagatcgacttcgaggtccccgttgagcatattcattactcccaatacctgcttctgaaagaccgtcaaggctccttcaaggtaggacggcctagaggaaaagcctccctcaagagctcaagttggtccgaaaaacggcattggaagtcatttatccaaaaataa

SEQ ID NO: 332378 - DNA, 324 bp, Pseudomonas aeruginosa
atggggatctgccgcccgaagcaatctcgcctagcgataccggtactgagggccggctaccggacgaaaggtagccgcgcctcccagcagatcgctaggcctgtaggaaaaatctggaattaccgagagcgcctggattccagcgccggcatgctggcagagccgggcaatttcaaggccaataccaaagtaccctctgtaatcgctgattacgtcgggagcgcattgctacgcctgcagaatggtttcagggccttagaaacagaaaagcccacctataaaggcgggctattccatattgacatcacgtcaatgcgggcctaa

SEQ ID NO: 332379 - DNA, 876 bp, Pseudomonas aeruginosa
atgggaattgatgatctcacacccaaccattcacgccctcagacagaaagcgaacactcaatattaagccttatggattacgaaagccttcttgcacaggtcgtccaactagtcgaagacgctggcctgctgctcattactgaatggcagcgcccagaaggacctcgcggctcaggcgataaagcagatgtcgatgttgaaattgaatcactgctaaagccgcggttactgcagctgctcgactgtgatttctggggtgaggaaacaggccataggctcacaggagccaggtattgctgggttgttgaccccaatgatgggactgcagacttcctgaaaggccacaaaggctctgcaatatctgtcggtttgcttgaggatgcccaaccggtgcttggcgtggtctatgcacctgttttgctggatggtgattccgactgcgtcgcatgggcaaaaggggcaccgtgtgtgcttcgcaatgggagccccattaaagcgacactcacccaaaaagaatggaatcaagacagcagagttatggtcagcactgcggcaacgaacaagcccgaaatcaattctgaattgtgctcaccaggttgctttgtggcgatgcccagcatcgcctatcggttggcacgagtcgcagcaggtgatggggatgcaggcgtatcgcttgtgccggtttcagcacacgatgtggctgcaggtcatgcgctgctaattggcgcagggggcgtgctgattgaccaggatgggaacagcatcacttatgtcactgaagccgacatgcagacagtatctcggagatgctttggcggtacgcgagaagcctgccagtcactggcaagccgaaattggagcaaggtatttacatga

SEQ ID NO: 332380 - DNA, 777 bp, Pseudomonas aeruginosa
atgatcttgaaccataaaacggcaatcgagctgttggtcgagaacattgaaagtgcagagttcaaccgctacacattgatgaacctgcacagcgccttggccgagaacctgctcccaaatcctgcagatgaaggccgcatccggcagcatgccgtcgacattgggaaaagcacctatcgccctctctcaacaccacaacagattgaggacaccttggaggttctgcttagcaaggccaatcagattactgatccgttcgagcagtcgttcttcatgatggtgcacctgccctacctgcagccctttgccgacatcaacaagcgcacctccagactggcagcgaacctgccactgtttcgcgccaacctatgtccgctgacatttctggatgtacccgaacaggcctacagccgcgccacgttgggcgtatacgaaatgacccgggtagagctgctgcgcgacctgtacctctgggcctatgaacgctcaacgcaggagtacctggcaatcaagcaagaccttgctgaaccagacccacttagactgacctggcgggacttcatcaaatcgaccattcgagaggtcgtcactcatcctgagcttgatccactgacctgcattcaacacgcagtagctgagcatgtttcagacactgagcagccagaagtacaagccctgatcgttgaagagctccgacgactgcacgaaggggtgctggcgcgttacggattacggccatccgagttcaccctctggaaatcgcgccatgggaattga

SEQ ID NO: 332381 - DNA, 1227 bp, Pseudomonas aeruginosa
atgaggccggtaatcttggtttcattggattggcgtcggccgcaggacggtaaaaccggattagggatcgcctctatcgctgcggctttgcgcgcagccggtgtgccatttcagatcatcgacgcacaagtgaacagccctgctttctcactggggcaggtacaggctcgtttgctgcaagccatcacgcaggccggtcctggttgcttggttggcttcggtacctttgtctggaacgacgcaaaggttcgcgccctgactcattcgattcaggacactggagcagagattgtccttggcggaccgcaaatctcctacatggccaagggccaattggaatgcacatatccgttagtaagatatttcgttcgtgggcagggcgagatggccatggttgcactggcctgcggtaccacacccgatgactgcggcatccacatcgccggtactccagatctaggccgtaaggcagatcacgatctgctgaccctaccctcaccgtacctgctggaaacagctgggttacagagcagcatccgttgggagactcagcgcggctgcccgttcaagtgctcgttctgccagcaccgcgagccaggcatacgtctcaaacaccaatggtttgatggccatcggctggagaaagagctcgcgatgtttgctgctgcgaaggtaaagcgcatctcggtgctggatccgatttttcacaatgatgccaagcgagccattcagatcctcaacagcgctaaagcggcgggtgtaactgcgcacctttctctgcaatgccgcttcgagacctgcacccaggaatttctggatgcgcttgaggggctcaatgtcacccttgagttcggcctgcagaccaccatagaggccgagtaccgagcaatcaaaaggcccaaccatctgggtatcgtctgcagccgaatccgtcagttacatgaacggcaaatagactttgaggtttcactgatttacggcttgcccaatcaaacattggacagcttccgtagcagtgttgattggtgtgtgcagcggcgggtgcctcgggtaagggcctggccactgatgttgctgagagggacgccactatacgagcagaaacagctctatggattcaaggaaagcgatgaccaaaccattcccatcgtagtcgccagtaatggcttctctgagacggaatatgccgaaatggctcgtattgccaagcagctggaggagaactga

SEQ ID NO: 332382 - DNA, 1593 bp, Pseudomonas aeruginosa
atgaccagcggcgacaaggaaccggagaactcccccgttttctggcgaactcaggaaatgttgctgctgcaacaggtaaccgcactggcggggcgagatttctcgcccgacaccgtgctgcgggagatgctccacctgctgtccgagctcctcggtttgaaccgtgggcgaatcgtgctgctcgacgagtcagggcaatcgagccagatccgttatgcctatggcttgaccgcagacgaaatcagtcgtggccgctatacacacgatgaaggcgtgacggggcgagtgctggcgcgcggtcagttgatcatcgttcaggacatcgataacgatccgctgtttctgggccgcatggtcgcgcgtaacaacctcccctccgggccggtttcctatatcgcattaccgatccagatcggccagcgcaccatcggcgtactggcctgccatcgcatccgaagccgcgcacgcccattggcagatgacctcaccatcctgcgaatcctggcgacgtttgccgggcagatcctccatttggagcagcacctgcgagaaaagaccgaggcgctcgagcagcgcaacgccctgctggcccgggcactggagacccgcaccagccgctacgggattatcggcagcgcgccccagctgctgcgcgcgctttcagaactggaacgcgttgccaataccaccgcaagcgtgttgctgctcggcgagtcgggcaccggcaaggagctgttcgcccgtgcgctgcacctgtccagccccagacgggacaagccgtttatccgcgtcaattgcgcagccattcccgattcgctgttcgagtctgagttgttcggctacgagcggggcgccttcaccggggcgcaaacggcccgtgccggctggttcgagcaggcagatggcggcaccattttcctcgatgagattggcgagctcccgctggccatgcagaccaagctgcttcgcacgctgcaggagggcaccatcacccgcctcggcgctaagcgggagctgcacatcgacgtccggctggtggcggccaccaaccgtgatctggaaaccgaagtcgctgccggcaccttccgccaggacttgtactaccggctgaacgttatcccgatacggctgccctcgctggctgaacgccggtctgatatccccgtgctggtgctgcacttcctcaaccggatcaaccaggccaaccagcgaaacgtcagcctaagtgccgaggcgatcaagcgtctgcagcggcacgcgtggccgggcaacattcgcgagctgtccaatgtcatcgagcgaatggtgctgctggccgatcacgccctgttgagcgcagcggacgtcgaccgttacctgccgcgggagaacgagcaagctgcgccgacacctgccctggccactccaccacccagccccccggcctatatcgaggacatccgaccttacgtctcggtcgcctcccatacggccgatgcgctgcgccaggcgctggaccgctgtggcggaaacaagacgcgcgccgctcagctgctgggcatgaccgcgcgacagttccactatcgctggcagaagctggtagcccatcgctga

SEQ ID NO: 332383 - DNA, 549 bp, Pseudomonas aeruginosa
atgaacgcacctgcacctaccaccgttaaatcctacctgcgaccgatcgatcgcgacggcctgctggccttcgccgagaaaggccgcaacaacccggccagccgtggcaccaacaaggtccatacggtcatgcagggcatctaccgcagcctcagctatgtcggtgaccacgaggccgttgtggtcgacgagccgctgcacctgttcggcgaagacaccgcgcccgctccgggggagatcgtgctctccgggctgggtggctgtctcgccgtagggattacagcagtggccacctggaagcaggtcaagctcagcaagctggaaatcttcctcgaagccgacatcggcaacccggcggcgtggggcgccggcggcgcgccgatgcagcccgagcagatgggcttccaggagattcgcgtaaaggtcctggtcgagggtgacgccactcgcgaagagctcgacgagatcgtcaagcacgccaacttctactcgcccgtggccaacagcatgcgcaaccccattccgttcagcatcgcgctggccgactga

SEQ ID NO: 332384 - DNA, 1140 bp, Pseudomonas aeruginosa
atgaacagtgtcgccgcgcccgttgctgggctaacaaccagcacgaacgacaaacccatgctccagcgagtatccgagatagccggcgggcctctcgccgaggccgccagccgtatcgaccgggagggttactacccgctggacatcatggcgcgcctcgccaaggtgggcgcgttcggcgcgcatctggaccggcgcggggccgactttgggcttgcgctggcagctaccagcgagatcgcccgcagctgtggctccaccggttttctcgcctggtgccataacgtctgcggcctgtacatggagcaatcggagaaccccgctctgctggctcgcttgagcgatcacgtcgaaggccgtcgcttcggcggtaccgccctgtccaacccgatgaaggccatggccggcatcgagccgatgctgttgcgcgcacagcgggtgccaggcggctaccgggtgagcggttcgctgccctgggtcagccacatcgccccagggcagtactgcggcgcgatcgcaggtgtcgaccgcgccgatggcagtcggtcccacgagatcatgttcctgctcgatctggatgagcgggtcgagctcaggcattgccctgagttttccgggatggaaggcaccagcacctggggtatccgcctgaccgactacttcatcggtgaggaccagctcatcgccgaccccgccgggcccttcgtcaaccgtgtacgcgccgccttcattctcctgcaggtcggcatggcgaccggcctggtgcaggccagcctggatgcaatgaacgaggtcgagccggtactggggcacgtcaaccagtttcttcatgaccgtcccgacgtgctccaagccgaatttgcagagctcaattcacgggtcgccgagctggtgcgtaccccttacgaaaccgacaaggacttcatgctcgacgtgctcgatgcgcgcgtgcaaggcgccgagctggcgctgcgtgcgacccagtcggccctgctgcaccagggcgcgcgcggttacctgatgagtgccgggccacaacggcgcatccgcgaggcgcacttcgtggcgatcgtcaccccggcgatcaagcacctgcgctaccagatgaaccgcctgatgcaggaggcccaaccagcatga

SEQ ID NO: 332385 - DNA, 1338 bp, Pseudomonas aeruginosa
atgagcgcaatcacccaagcctggcggcagttcatctgccgcgcctgtggcctgatctacgacgaagagaccggcgatccggacagcgggctggcgcccggcacccgcttcgaggatatcccggatgactgggaatgcccgctttgcggcgtgaccaagctggacttcgaaccctacgtgatgcgcgaggcgccggttgccgtggcgatgccggtcggcccccgcgagacaggcatcgtcgtggtcggcggcggtctggccggctggtcggtcatcgaagccatccgcgccatcgatcagagcacccccatcacgctggtcagcggttgcaagggcgacctttatcacaagcccgaactgtccgttgcgctcagccgcggtcagtcagccgacaagctggtacgtgagcgcgccgccgaggccgctgttcggcttggcgtgcgcctgctgccggaaaccttcgccgtaggcctttccccgcggctccgtcaactgcgcaccacacgcggcaacctgagctacacccggctggttctcgctcagggcgcccgccccgccctgccggccgcgctgccggccgagctctgctggcgcgtcaaccacctgcacggctgggccggtctgcaggcgcggctggccgagcgcagcgcccaggacgtggcggttatcggtgccgggatgatcggctgcgagatcgccgaggatctggcgcgagcgggtcaccgggtcacgctggtggatcgtcaatcactgccgctggcgaccctgttgcccgagccggcggcccgccgtctgcacgccgcgcaacgccagttgggcatcgagctgcttggcaacgtcgaaatcgcctcgctgacctcgcttggagacggccgcaagcgcctgctgactcgctgtggtcagcgccgcgacgtggatcaggtgatcgccgctaccggcctggccaccgaaccccgcctggcgcgcctggcaggcctggacttcgcacgcggcatcagcgttgaccccgccacgctgcagaccagtgaccccgacatctatgcgctgggtgactgcatcagccttggcggtatgccctgccgcttcatcgaacccatcgcccgtcaggcgcgagcgatcgccgcccatatcgccggcgtgccgggcgcgccctactgccacagcgaccccgtcatcaggctgaagaccgcctccttgcccatcgccctgcacggcatgcctcgtgcagacgggcagtggcatgtggtgcaggaaaccgagggctttctgctcatggaacaacgaaccaatggcacgagtacgtcaacgctgcgggttggccgcgccgacgccgcgtga

SEQ ID NO: 332386 - DNA, 1395 bp, Pseudomonas aeruginosa
atgagcgacgataacttcttccgcccctattcggagcacaccacgctgaccggttgtgcctgcggcaagcacgaaagccccgaagcgcatgaccgcgctgcggaacaggcgcgactggcgcgatcgctcgaccgggatctcctgtctcaggacttcgtcgaggccgcggcggtgcgcgcgctctttcccaacgacgtgacgcgccggcgctttcttcaggcggtaggtgtcggcacggcaatggccgcgatctccagtgtgctgccgctgacgtcactgcaggcgatggccgatgagcgcgggccgctggaaaagaccaacctgaagatcggcttcatcccgatcaactgcgccacgccgctgatcatggctgacccgctcggcctgtatcgggagcagggcctgtcggtaagcctgcagaagactgccggctgggcactggtgcgcgacaacatgctcaacggcgagctggacgcatcacacatgctcgctcccatgccgttggcgatcagcatgggcctgggctcgaatccgcaaccgatgcgggtcgccaccatccagaacatcaacggccaggccatcgtgctggcgctcaagcacaaggaaaaccgcgacccgaagaactggaaaggcttcaagttcgccattcccttcgaatattcgatgcacaacttcctgctgcgctattacctcgccgagcacgggctggacccggaccgcgacgtgcagctgcgggtgacgccgccggccgagatgatcgccaacctgcgggccggcaacatcgacggcttcttcggccccgagccgttcaaccagcgcgccgtgtatgaccaggtcggcttcattcacgtgctgtcgaaggatctctgggatggccatccctgctgctccttcggtgtatccgaagccttcatcaaggaaaaccccaacacgttcgccgcgctctaccgcgccattctcaacgccgccgccatggctcaggacaaggcccagctgccgaccatcgccaaggcgatctcgacgccgaattacctcaaccagccggagacggtgatcctccaggcgctttccgggcgttatgccgatggcctgggccaggtacagaacgagccgcaacgctccggcttcgatcccatgccctggtactccatggccacctggatgctgacccagatgaagcgctggggttacgtgaagacggatgttaattacagcgcgctggccgagcaggtgtttttgctcaccgacgcccgccgacagatggctgcgctgggcatggccgaagccgaggctcagccggccagtggctacaagccgttcgaggtgatgggcaggccatacgatccgacggacccggacgactacctggccggcttcgacatccgccacgcatga

SEQ ID NO: 332387 - DNA, 852 bp, Pseudomonas aeruginosa
atgaacaatcatcttcgcctgaaggcggcgctggtctcagtattgttgttggccgtgctgttgctggtctggcacgcggccacccatacgcccgcccagcagaccgaggcaagcgcggctgacgccgaatacgccgcgctcatggggcaagcggccgaagcgccgaagaaggacggcttccccacgccggcgcagttcttcgaactggctggccagcagctgagcgaacccttctatgaccgtggcccgaacgacaagggcatcggtatccagcttgcgcattcgctgggccgcgtcgcgctcggctatctgatcgcactggccgtggcgattccgctcggcttcgtgatcggcatgtcgccgctcctgtatcaggcactcaaccccttcattcaggtgctcaagcccatctcgccgctggcctggatgccgatcgcgctctacaccatccgcgattcatcggtttcggcggtgttcgtgatcttcatctgctcgatctggccgatgctgatcaacaccgcgttcggcgtagccggggtgcgcaaggactggctgaacgtcgcccgcacgctggaggtatcgccgctgcgcaaagccttctgcgtgatcctgccggccgcggctccgaccatcatcaccggcatgcgcatctccatgggtatcgcctggctggtcatcgtcgcggccgagatgctcattggcggcaccggcatcggctacttcgtctggaacgaatggaacaacctctccctggccaatgtgatcttcgcggtactgatgatcggtgtcatcggcatgctgctcgatctccttttcgcacaactgcaaaagaaggtgacctatgtcgactaa

SEQ ID NO: 332388 - DNA, 906 bp, Pseudomonas aeruginosa
atgtcgactaaaaccttcctcaaggtcgaaggcctgagcaagcgttaccagccaagccagcctcccgtattcgagaacatcaacttcagcctggaacaaggcgagttcgtctgcgtgatcggccactccggttgcggcaagagcaccattctcaacgtacttgccggcctggaagagccgagcagcggcggcgtcgtcatggccggcaaggagatcgccgggcccagcctcgaccgcggtgtggtgtttcaggggcatgcgctgatgccctggctgacggtcgagcagaacatcgccttcgccgtgaagtcccggcacccgtcctggtcgcgccagcagattgccgagcatggtgcacgcttcatcgagatggtcggcctgaccggcgctgcgcaaaagaagccggcggagctgtccggcgggatgaaacagcgcgtcggcatcgcccgagcctttgccgtcgagccgaagatgctgctgatggacgagccattcggcgcactcgatgcgctgacccgcggggtgatccaggacgaactcgtgaagatctgcgcggcgacccggcagaccgtgttcatgatcacccacgatgtcgacgaggccatcctccttgccgacaaggtaatgctcatgagcaatgggcccaaggcccggatcgccgaaatcgtgatcaacacgctacctcgcgagcgaacccgcgaaaccattcatcacgacccgcagttctaccgaatccgcaaccacctcgtggacttcctggtgcgtcgctccaagaccattcagcaaggtggcgagggcttgggcggtgaccagccgctgatcgtccgcccaggcctcgacgataccgacccacctccaccagacccgcgaacgcagcaaccgctgcgccgcattcacgctgtttga

SEQ ID NO: 332389 - DNA, 450 bp, Pseudomonas aeruginosa
atgattaccgaccgcgcacaagttacccaaatgatcatctccgccaaggtgacgcagggcatcaaatggagccaagccgccgaggccataggcaagagcaaggagtggaccacggccggcctgcttgggcagatggccttcgacaagccccaggccgaaacgcttggcaagctgttcggcctcaccgacgaggccgtggcctggctgcagatcgtgccgtacaagggctcgctgcctaccgccgtgccgaccgacccgctgatctaccgctggtacgagatcgtcaatgtctatggcagcaccatcaaggagctgatccacgaggaattcggcgacggcatcatgagcgccatcgatttctccatggatatccagcgccagccggacccgaaaggcgatcgcgtgaacgtggtgctgtcgggcaagttcttgccctacaagagctactaa

SEQ ID NO: 332390 - DNA, 897 bp, Pseudomonas aeruginosa
atgcaggttcagcgcgccgcggccatcggctgcagcgccgatccggcgttcatcctggcccagcggagaacccgtatggatccactattgcttggcggcttcgccggcatgctggttggcctgagcatggggctgaccggggctggcggcggtgtactggcggttccggccctgacgatggtgctggggctggacgtgcatcaggccgtaccgcttggcctgctcgcgatcggcagtgccgcgctgctgggaagtctcgatggtttgcgccacggcttggtgcgctaccgggcggccctgttcatggcggcgatcggtgtgctcaccgcatcgctcggtacccgcctcgcccaaaggctgccgaccgacgcggtgatgctgctgttctgcctcgtactaatcaatatcgccgtgcggcagtggtcgcagggcatgaagccgatcgcatccggcatcgctgacgctgccctgttcaagccgtgccggctggccctggacaaggggcgcttccgctggacgccccgttgcttcatgcattttgccgcgatcggcgcctcggccggattgctcactgggctactcggggtcggcggaggattcgtcatcgttccgttcatgcggcgctactgcgaactcggcatgcaaggggtggtagccacctcgcttgcggtcatcgcgctggtttcgctggtcagcgtcggacaggcgttgcatgccgggatcatcgtgcccccggcaggctggctattcatcggcgcgtgcgcgctcggcatggcagccgggcgtctggtggcggcgcagttcagggcgcgcaccctccagctcggtttcgccgcgcttgccgctggcgtggccctggcgctgggcgcgcgcagcctcatccacctgctcgcttag

SEQ ID NO: 332391 - DNA, 804 bp, Pseudomonas aeruginosa
atgagtctggttattcgctcgttcttcgatccggtcacttcgaccttcacccatgtagttcatgcgtcaggccaggcgcaatgcgccgtggtcgatgcagtgttgggttacgaccccgtcactcgcctgaccgatacgcaaatggctgatcaggtgaaagcctatatccagaccagtgggctgcagcttcaatggttgctggaaacccatgtgcatgccgatcacctgtcggccgccagctacctgcgcgccgaacttggcgggcgtatcggcatcagcggccgcgtcatggaggtacgctgcacgctcgccgatcggtacggcccgttccagcagaggccgtacgaccacctgttcgccaccgacgaggtgttctacatcggtccgctgcggacacaggcgctcgccgtgccgggccacacgcccgctgacattgcctacctggtgaatgatgaggttgtgttcgttggcgacacgctttttccaccggacgtcggcacagcgcgttgcgacttcccagggggcagcgccaagatactgtatcgttccatccagcgtctgctgagtttgcccgcgcatgtacggatgatgatgtgccacgactacccacctcaccaccgcgccctcattgccgagtgcaccgttgcccagcagcgtgaaggaaacatccatatacgcgatggaatttcagaagcagcattcctagcgatgcgtacagagcgcgatgggaagctatcagccccgcgtctcttggagccatccatgcgagcaaacttaggcagcgaacaacctgagcgatattag

SEQ ID NO: 332392 - DNA, 282 bp, Pseudomonas aeruginosa
atgcacatcgcagttgcgcaatccttcgaagtcttttttcacaacgtcttctgcggtgcccaggccgacatcgtggtagggagagaagacatcgaggcccatggctttcaggtcccggcgagcctgcccgactacccagggttcttcgagcgtgaagaacgggccagcaaggtagactttcggcacgtagccatcgcggtaccgctgaaccgtcgctatccggccaatagcggcccttggctgcgggcgcgcggtacgcgactcggcccgaaggagtcttaa

SEQ ID NO: 332393 - DNA, 1872 bp, Pseudomonas aeruginosa
gtgcatcttgtgcgtgttcgcgtccggaacttcagaggcatcgcctacggtgaggtccacctcaatggacacactgcttttatcggtgacaacaacgccggcaagtccacattgctggaagcggtggacttggtacttggcccggagcgcctgagtcgtcgccctgtaatcgatgagcacgatttctatgccggtacgtacgtagacccggccaagaacgaggtcgtcccgatccaggtcgaggttattgtcgcgggactctctgatgagcaactgcggcatttccgggaccatatcgagtggtgggatacacagaccaagtcattgcttgtaggggcacccccggagggaacagatgcgccccatgtcggagcggcaatacgcgtcttcttcaacggttggtatgacgtagatgaggacgacttcgctggggatacctattacgccactcccgaaatgccggatggctcctacccccggttctctgcgcccgacaaacgaaaatgcggttttctttatctgcgcaccctgcggaccggagctcgcgcactcagcctggagcggggctctttgttggacgtgatccttcggctgaaggaaacacgactgactatgtgggaggatttgctcgaccagctgagggcactgccagttggagagaccgaggacatcggcgagttgcttgtcgcagtccaagatgcagtacggcactacgtaccatccgactgggcagagcaaccccacatgcgggtttcggacctcactcgcgacatgctccgtcgaaccctgactgtcttcatgggtactggagcgaaaaggccggacggctcagtctattccgccccatatcagcaccaaggcactggcacgattaacacgctggtattggctctgctttcgatcatcgccgaactcaagcaaagcgtgatcttcgcgatggaagagccagagatcgcgcttccgccgcacacccagaaacgaatcatcaattcgctgcgccagaagtcggcacaggccatctttacctcccactcaccctacgtgctggaggagttcgagcctgcccaggtagtggttctcaagcgcacggccggtattatgaccggggttcctgctacatatccgccagcagtcaagcccaaggcctatcgcacagaattcaaagcacggttctgcgaagccctgctggcacgctacgtacttgtacttgagggccgtacggagttcgacgcattgcctgccgctgcccgccggctcgccgagctggatcccacgcgattcaaatcgctcgaaaacctaggtgtggctatcgtcgacgcccgcggcgagaccaatgtcgcgccactgggtgcattcttccgctcactcggcaaggtcgtgttcgccgtatttgacaagcaaacgccggaggcgctcgcaaccatcactgcctcggtcgatcatgcctatgagtctgcgactaagggctttgaaaaccttgtcttgtatggcgcgtctgaggttgcactccgcagctatgctgctgttgtggttgttggcggtgattggccgcagcatctcgcggcatacacaccaacacccgcaacaccgctggccaatctgcaggtggctctgtcgcactattttggctgggccaaaggcggtggcgacgccggcgacttgctcgcctcctgtccaaccgccaatgacatgcccgaatacgtgagagccacgctggcagccatcaagaacgtcattgagccacctcagccgcctccattacctccccagctagccggcgtgccccctctcccagaggctgcagctaagccaccgccattggcagcagcctatgggaagttccaaccgtccccgccccagcctctggcatga

SEQ ID NO: 332394 - DNA, 1713 bp, Pseudomonas aeruginosa
atgacggaagtgtggagcgatcagaagcgcggcttcctggcgtccgctgggcacaccttggcgctaggtggtcctggtgcaggcaaaacacacgtcgcgctggtcaaagcgcgtgatgagattcgctctgggttgctcaaaccaggccagaagatcctcttcttgagcttcgccaggcctaccgtagcgcgcatcatcgaaaaggcttctgagctgatttctcgcgaggacctgaagcaacttgaggtcagcacgtaccacggttttgcttggagcattctccgaagccacgcctatctgttgaatggcaggccgagcttgcagcttctgccaccacccgaggcagcagcgcatttggcagatatcgataaggcccagcacgaaaatgagaagcgacgcctattcgagcacgagggccgcctgcatttcgacttgttcgcaagcttggtcagcgaactgctgagccgtagtgaccggctaagcgccatcttctccgacgcctatcccgttatcatcctcgacgagtttcaggacacaaactgtgatgaatgggcgctgatccagcagcttggaaagcgtagtcgcctcattgctctggccgaccctgaacagcggatctatgagtttcgaggcgctgatcctaggcgggttggcgactttctggagatcttcggcgccgcccacttcgatttcgcaggtgaaaaccaccgcagcagcggtaccgatatcacgacctatgggaatgacctgctcactggcgcaaacaagggcaaggtctatcagcaggtaaaaatctcgcgttacggcttcatgcatggaaagagcctgcacttcaatgccaaggccgcagtgctctcggcgttggatcgcctcaaggcaataccggacaaatcgatagcgatcctggtgccatccaaacggctgatgctcgagctttctgattacctttcttctgcagctgatggtctaccagagctacatcacgacgttgcaatggatgctgaaccgccggctctcgccgctggcgttatcgccacgttactggagggggggacggctggcgatgtggcgagccgcatgcttaatgcacttcactcgcacattcgtggacgccgcggaggcaagcctaccccccagtccgagctggacctggcaggtgctcttagcggattcctctcctcgggaaagatccgcggtgccaaacgccagctgattgtcagcgaagttcagcgtatcgcagagttgcggcagcaactgcaattaacgggcgaccctgcggaggactggttgcagctgcgcggcctgttgcaagcgtccgctgcggtagccttgaagcaagtagcaacagatgctcgctaccttcgacttcttcatcgtggctcggtactgcgggctaacttgggtgcgctgtggcgtgcccagggagagtacaagggggctgaggaagcagtccgcagtgccttgatgcaggagcatttcgctgcaggtcaaaaggactggcgcggcatccacctaatgacgatacataagtccaaagggaaagagttcgacgaggtcatcatctacgacggcctattccagcgcattgccaaagccccgcaggatccaaaaatctgcgctcaggatcttttagtgctacgggtgggagtgactcgggcgatacgtcgaaccaccattctgactccgaagcgcgatacctgccctttcctgtga

SEQ ID NO: 332395 - DNA, 1161 bp, Pseudomonas aeruginosa
atgattgatctgctgaacatgctgcgctacaagagcgagagcactgatattgacttcaaatctgcccagtaccgtttcaatagcggcactgaggccgataaatcagagctgctcaaggacattctcgcaatcgccaactcctggcgcgatggcactggctacatccttttagggttcaaggatcagcgcccccaccctgctgaagttgtcggcatccaagacagcatcgacgactctcggatacagcagttcgtgaacagcaaggtgaagccgaagctgacgttccgctacgaggagcacgtttacgaggagaagaccatcggcgtgatcatcatcccaaagcagaagcggccattttacctcgcaagcccttacggcaagctcaagagcaatgtggtgtatgtccgccgaggtagcagcactgacgaagcagagccggtcgagaccatcgcgatggcaaatgaggatagcggtcgtggcgatctgagaatcgagctgtccctactgactcccgggaacgaagaactccccaatagctttgctcacacctacttgcatttcaccgaaaaatttccggacttcgagaaaccacgcaagccccgtggcccgtttgatccgcccgagtttataggcctcgatagagacaacaatgatttctggcgggagcacggcgagtacacgcgcgtcaacgaagcatgcatcgcaatgcgactcgtgctgaccaatcgatccagcgtacagctgtccaactccaagcttgaggtaaccgtagaagctcttgactcccaagcggttcacatgatcgctggacgcgatttacccgacgagccaaagcctacgtggaacatagccaatctcgcatccgtacaggaggtattggccaaaaaagatgtcaacctggaggtagatgaaagcggcccaaccccggtatgccacattcgtcttgggtctctcttaccaggggagcagggtagatcggaattacttgcgattctcccgcaagcccctggcagattgcgcctccatctgcgcatcctaggcggcgagctggccacaccgattgaagaagagcacttaattgagacaacaggcgaggttctctcgctggactttgaaggctacaagagattcttcctagcggagcgagctaggtgcagataa

SEQ ID NO: 332396 - DNA, 624 bp, Pseudomonas aeruginosa
ttggttgaggctgcggttgttgagcgcgttctctgcgtagtggacagatgtctgaaaagccagtttcctgacgactactacaagcgatgtatgtatgcgtcgttcgggttgcacaggctgctgcagacccaaggttacagccctgtaatcgtgggcggaaattttggggcctttgtcgtatcgcgagatcaacgcacggcttcgatccaggggtacgcatccggctctggcgagcattcccactattgggtcgagctagatggctccatcattgacctggcaacttactacttgccaatcgagtccagcttccaggcctgcgaggtgccagcggtgttttggaatgcgagctacccgttacctaaagggctgatctataacccggctgtccgctacccatcgtcggatatctcgcatctggcgccgcatatcatcgaaaagatggagcctttccttgccgcatgccacgcccgaatggcgaaaccgctggccaagccaaaaattggaaagtggcttgttactacgccctcatccatccaaaaagcggccagcaagggtgatccgtgggcacgagcggtgattcgatatgaatctatgtctgcgcaaaacctctccgtcggatga

SEQ ID NO: 332397 - DNA, 906 bp, Pseudomonas aeruginosa
atgcctgtcccctgcagtacgaaacacatccagaacttcagagccaacctcgccgacgtgatccggctgattcagatccatagagacttatctggcagcgagcgcgggcgacgcgttggcgttgaatgcttgaacaaatcggccatcgttctgattcttgcctcatgggaggcatttgtggaggacttagccgaaagcgcgtttgactgcatgctggcaaacgcacctgaccacacggtgtttcctaatcacgttctgacgctggcctgggctgacttcaagaaagcccaaaccgctgatgccttcacgagtatcgcgaccggatggaaggtcgtgctgagcaactacagaaacatgatcctcgagaaattcatcgtgaaaggcagctttaacactccgagcggccccaactgcaataaccttttcaccaacctcatcggcctccacccttttaccggaagctggacctggaaaatcactcgttcgaacgtaaccagcgacgatgctgaaaagctgcttcagacgttgatcgatctcagaggggagatcgcacaccgagcaaccaccgcaaaagcggtgcagaaacaagtcgttcaaagccacgccaagttggtcactcggctggcggtccgctcacacaatgaggtaaggcgatttttgattgcccgcctgggtttcgatccctgtcctgagttttcagctgatgacgaggcgcaactgctggacgacatcaagctcgtgataacccccagcgcaacccctgcggcccagatcgcagcaccagtggcacaaggtgtcgcagcgccacccgttgctgcagcctcggcaccagtaccagcgcaacaagcacccgctcccgtaccgatcgcagcaccgcagggtggagcgatccctcccaatccgtag

SEQ ID NO: 332398 - DNA, 1383 bp, Pseudomonas aeruginosa
gtgcgccctatctcaaaccaacgattcaatgcctttgcagcgtactgcaggagcccccaggcgctggctattgcggaggaaatcctttggttcgaggcggacgactcacgcattgttgcgacaattatcagggacagacctgacagcgagttcgctggaatcattttggggcgcgacgaaagagaacgatatcgctggatcaacgcaactgaattctttaaatcaaaaatccaagccagggcagctctcagagcaaagatcgaggaaataatcccaatcctcgagcagcatcggaagcaaggcgacaacgacaaaaagcccgtagacttctttacgccactaaagaaaaccaagcagccgcttcaccaatcatttctgaacctaactaatctcgaaggattctcgccagcaaaggaaatcatcgaaccgatgatgcgctggcacgaggatgtcgatggaaacttcgtcgaacaattccagaccactgggtttgactctcgaatttgggagctatacctattctccctgttcactgaggccggtttcattattgataagtccagcgcaatccctgacttttcctgttccgggttagctggcgagttctgtgcggaagccaccaccgtcaacccttcccgcgacaagaaaggcaaaattgttcctcctccgcccatcgagacggaagaagagatggaagcagccatccgtgactacttcccgatcaagttcgctggcccgcttaccgagaagctcaggaagcgctactgggagcgggagaatgtacaaggcaagccattcattcttgcgatacaggattttcagaccccaacagcgatgaccctgacccgggatgcactaccaatctatttgtatgggtaccggcaagctgatgattggagcatggaagacccaaagttcgagcgcgtggaaacacatcagtggggcaccaaaactattaactcaaatttcttcagctttgaaggagctgaatacatcagcgctgtaatattcaattccagcgccaccatttccaagtttaatagagtcggcctgcaagctggcttcggctccgaccgtgtcaggctgtttcgctttggcacagtttgcaaaaccgagaatggtaatccgcacattactgagtacgcacactatgtgtcggaggatgcaatggtagaaacatggtctgaaggacttgaggtcttccacaatccccgggccattcaccccttacccatggagatgctgccggatgcggctcatcacttcatgcctgacgacgggctaatgagaagtcgattaccagactggctccccacccagtcgttcacacacatcgaagtcgaggagttgccacctcagccggacgacaacgagctgttctaa

SEQ ID NO: 332399 - DNA, 1257 bp, Pseudomonas aeruginosa
atgttcgcgctgattgactgcaacagtttctacgccagctgtgaacgcgtctaccgaccttggctcgacgccgtgccagtcgtggtgctgagcaacaacgacggctgcgttattgctcgcacccgcgaggctaagcgcttaggcatccctatgggcgcaccgtacttccagtggcgagaccagatgcgggagtggggcgtagtctgcttctcaagtaactacgagctctacggtcagatgagcgcgcgcgtgatgaccacgcttgaggagatgttcccgcggctggaggtgtacagcatcgacgaggcattcgcggatctgactggtctgcagagtgacttggtcgagctggggcgcgaggcaagggctcgggtactgctgtggactggcataccagtgggcgttggcatcggacccactaagacgctagccaagctggctaactgggcggccaagacctggcgcaaatcggaaggggtaattgacctgcgcgatccatccaggcgcgatcgcctgctgcagatgactgatgtgagcgaagtgtggggcgtcggccgccggctaaccgcccggctgcagccgctgggcatcaagacggcctgggacctggcgcagtatgacccggtgtcacttcgccggcagttcagtgtagtgctggaaaaaacagcccgcgaacttcgcgggatctcgtggctgcagcttgaggaggccgtgccgccgcggcagataatctgcagtagcaagatgtttggtgctcgggtgcgcgagttaccgccgatccgcgaggcggttgccgcctacgtgtccaaggcggcagaaaagatgcgcgcgcagggtagccttgccggtgccctgcaggtggccatccgcaccggcatgcataaccccgaccagccgcgctacgccaacgcaatcaactgcccactgccgtaccccaccgacgatactcgtgtgctcgccgcagcggcaattcgcggcttggatgccatctaccgccccggctacgcctacagcaaagctgaggtgttgctgatggacctgcgccagcgcggggaatttacaggcgacctattcgcggcctcacctagccctggcgctgatcggctgatggccgtgatcgaccgtatcaacgcccgcgagggcagggggacagtacgactcggccgcatccccgccgcccctgagtgggcaatgcggcgcgaaatgatgtcgcagcggtacacgacgaggtgggatgagttaatggtagtgagatga

SEQ ID NO: 332400 - DNA, 426 bp, Pseudomonas aeruginosa
atgcgggtcactattctggggcgcctcagccccgcaaaaatattctctcagtacgtggacagccgggtgccggcgggtttcccatcacctgccgctgactacgaggagctcaccctatcgatcgacgacttggtcgatttgcgggcacccaacgtctatctcgtgcgagtgagcgggccaagtatgattggcgctgggatctatgacggggatgtgctggtggtcaaccgcgccctcgaggcgcggtcaggcaacatagttgtcgcgtacgtggacggagggatgacggtcaagcgcctgcagatctccgctgcgggcgtgtggctgcagcctgagaacaccgattacaaggcgttggccgtcaccgaatcgctgcacgtgtggggcgtggccacacacaacctgcacagcctatgttcgcgctga

SEQ ID NO: 332401 - DNA, 708 bp, Pseudomonas aeruginosa
atgtgcggacgattcagccagtgccgaacagcgatcgagtacctcgaggcgctgcgctacgacaagcccatcgatagcggcatcgacccagagcccatcggccgctacaacgtaccgccccgctccagagtattagtgttcttcgagaccgcttccggcctgcgcatggccaagctcccgtggggttaccagccctggtgggccaagggcaaacgcccgccggcaattaacgctcgcgtggagacggcctccaccagcaagttctttcgggatgtctggcgcaccggccgcatgttggtcggcgctgacggctggtacgagtgggtgacggacccggccgatccgaaaaagaagcagccttactacatacgattgagatcaggcgagccgatgtggttcgcggcgctggggcagttcaggcgagaggacaggatggaagagcaggaaggcgacgggttcgtgatcatcacggcggacagcgaccaagggatgctcgacatccacgaccggcggccagtcgtgctgcctccggatctagcgcgggaatggatagagcccggcatatcgcctgagcgcgccgaggaaatcgtgagtaatttggcgctgccggtgcaagcattcgaatggcacgcagtggaccgggcggtcgggaatgtgaggaacgaaggtgcgcacttgatcgagcaaatcgacaacccttctttatag

SEQ ID NO: 332402 - DNA, 162 bp, Pseudomonas aeruginosa
atgactcttgaagtattcggccagaacgcgtcgccgcgggtgatccgtaccttggtagttgtaccgtctgtaatggaccctaagcggttactgttgccccgggtgatgactagcgtggcaaggctcgccactatcaagcgcttcatggggctactcgggtaa

SEQ ID NO: 332403 - DNA, 612 bp, Pseudomonas aeruginosa
atgccgagtaataaatctcaatcgacatctatccgaattgctcagcgggtcaagcgtctaccgaaaggacatccgttctcaatcaggcgctttgcgcaaattggaacacgcaatgccgtttacaaggcaatagcgctgctgatcaacagaggcgaactagagaggctacatcgaggcatctacatgcgccccaaacctagtctgtatgtgacgcggtaccggcctagtgcttgggaaattgtgaagttgattgctaggcagaaccgtcaaaccctccaaattcacggcgccaatgctgtacgaatgtttggtctcagcacccagatgccattggtcccgatttactacaccagtgggccaagtcgatcataccagttcgggaaaggtgaggtccgcctgatacatgccccgccattcgttatgcagcatgccggaaccgaagttgggacagcaatcagtgccctgttttatctaggcaaagagggggcaactgcaggatgcattacagccatccaaaacgcactcaaacctgcagaccaaatcaccctgatgacctgcaaaatgcctcgatggatgcgaagagcgttggagcttaatgaccgccagggctag

SEQ ID NO: 332404 - DNA, 291 bp, Pseudomonas aeruginosa
atggagctgagcacagcattcggactggtacttaaaaggttgcgcaagcagcagggccttacccaggaagacttttctagcgtcagtagccgaacctacctgagcagtctggagcgcggcatcaaggggccgaccatcgagaaggtcgatcaactcgccagtgtgctggatgtccacccggcaaccatcctagccgccgcctatctgatcaaagaaagcggagtagcgcgacgtgaccttgttcagcggattgagacagagctgaagcgctttgagaatatgaatcattaa

SEQ ID NO: 332405 - DNA, 459 bp, Pseudomonas aeruginosa
atgttcacgacctatcggagtgcggagatccacttggataccgcagagggcaccaccacccagctgtggagctatgttgagcaggaaatcagctggccttggttctacctgcaaatcgttcggcgccacggccgtcaggcctaccgaagcatgctgatggttaatcacgcccatgatctaaaaaagatcattgacgaccagtcgaacctggcctgggcggaagaagtgcagctggtcacaccggcacacgtcaacggccactcaaggtggctgatggaaccactgaaagaagtgtgcgtcgttcgagatgggccctccggagatccgggctacctctataaagtcgccaatggcgtcagctactcaatgcatcaccggaggaacctggacgcactgatcgtcaccgacgttattttttcggccgagatgcatcttcggcggagtgacatcaatgcttag

SEQ ID NO: 332406 - DNA, 219 bp, Pseudomonas aeruginosa
atgaatgcaactcaggtagtgattcaagactgggacggcgatggcgccatccggattccggacgatatcctccaagtaatgggagttgaggtcggcgatagcctctatctcatcgaagagtatgtcggcactacccgctgtattgtgttgagcaagactccccgcgttccagaccgaattgacgaattggttgagcacatggactccgggacaaggtga

SEQ ID NO: 332407 - DNA, 891 bp, Pseudomonas aeruginosa
atggcggtaggcgtaccggaaaccgaagtattcgccgcggcggatgcggtgctggagcgtggcgagcggccgacggtggagcgggtgcgccaggaactggggcgcggcagcccggcgcgggtcggcgccttgctagaccagtggtgggaacgcctggctcagcgcctgcgtggcgaaacacgcttgccagcgctgccgacggagatctcgcaggcctttgtcgcagtctggcaacaggccatgctcttggcggagggcgttgccgagcaggcgctggccgaacaccgcgccgtgatagaagccgagcggctccaagcggccacagtcgaggatgaggcacgacaattgatagctaaggccaggcagcaggtagctgccgcgcaagcagctcagcatactgccgagacccgtctagccgacttggagctgctgctggtacagcagcagacacaactggcggaccaaaaaagccgctgcactgagcttgccgaggagcgcagagtagcgttgcaggaggtgaccgtgctgcgccaggagttgcaggtcgcgcagcagcagctgatccaagagcgtgatgccgcaacgacttacctgcgcggtaccgaagatcgtgcccaccgcgaggtcgatcgagctcgtgaggaaagtagggtaaccgccgctcaactcaagacggtgacaaggcaacacggccagttgcgccagcgcctagacacagtgttgtctcaacttctcgaggcgcaacaggtcgctgccgctgagaaggcacgggccagcacactagagcaacagctggtgaaacctccccgagccaggcgcgcaaaggctaagccgaccaagtcgaagtccaacacggctgctcaagccgagactcgcggctccgggcattag

SEQ ID NO: 332408 - DNA, 1089 bp, Pseudomonas aeruginosa
atgaataatacgtcaatatcaacatctagtgactgcggtctgctagccgtccatcacctcaatgcagaggcccgttccgccgcggcagcgttcgttgccgccggcaccgccgccaataccgtgcgcagttaccgcagcgccctcgcctattgggctggctggttgcaactgcgctatggctatacgttggaagcggggccgctagccgacacggtggcagtgcagttcatccttgatcatctggcgcgtccgacagacggaaactggactcacctactgccgccggcgttggatgccgcgctggtcgacgcaggcgtcaaaggcaagctcggcgccctgagttacagcacggtgcgccatcgtctggcggtgctcgccaagtggcatgacctgaacaactggcctagcccgaccgagatggcgtcggtgaaaacgctgctgcgcgacgcgggcaaggcccaggtcaggcagggagtgtctgtgcgcaagaaaactgcggtaatgcgcgaacctctggaagccatgcttgctacctgcaccgatggcgtgcgtggccagcgtgaccgcgcgctcctcctcctagcctggagtggcggtggccgtcggcgctccgaagtggtcggcttgcaggtcggtgatgtacgccgattggatgctgatacctggctctacgcactgggcacgacaaaaaccgacactggcgggctgcgccgcgacaaacctctacgcgggccggctgcacgagccctggccgcctggctggaagttgcgccagccgaatccggaccgctgttccgtcgaatgtataggggcggcaaggtaggcacccaaggcctgtcagccgatcaggtggcacggattgtccagcgccgcgcccagctggcgggtctggacggcgattgggccgcgcacagcctgcgctcaggtttcgtcaccgaggcagggcgtcagggcgtaccgctgggcgaggtgatggcaatgaccgagcaccgcggcgtcgccacagtgatgggctattttcagaccggactgctcctcaatagcagcgcaacccagctgctgaaagctgaaagtagtaacggaaaatag

SEQ ID NO: 332409 - DNA, 1332 bp, Pseudomonas aeruginosa
atgaacgatcttttctaccctgttcctgagccgatgccctatgaatcaatattatccatttatttgaagttgtcgcatgcgaatttcatggggctaccttctcttggccgggttctagggaatgaatgcttgaatatgcgccgcatttggcaatggtttcagccggactctattgatactataaagttaaagttcccagaattggaaaaacacttaccctggaactatgcgccctttgagggtctagctgatctgggcagaggcatcgtcttctgcccctattgcattcgtttcggttatcactctgtatttaatttggtagaatggcataaggtgtgtgttttgcataagtgccacttactagtagcatgttcgctttgcagtgataattatctgcgaggctttcaagctagtaaaccgattcctcagatcacaagtcgttgtcgagagtgcggattctacgatataggtttggtgagagagattaagatgcgccgaagtaaagggttggatagtgctttgcagcactttggtgaagcccaggcctcgtggtatacccaagttaaaaaaactcataaggaagggtctatccatggcgcgtattattataaattttcgggttgtcgacagggtttcacagctcctttcgaacgcgcttttagaatgcagagcccagagagaattgccaaaatacgccgcgatgaccagccgatagcttgggtgaaacttccaagcttctctgaggcaggatcttgggggaaatatgaatgtcgtatcgataatatacaagaggcatgcgaacgcttggagtcttcatacttatcaggtcatcgttcatgcgtagctagcattaataccgtaactggttattcggacgggacagagaaaaaagctaaattgtgcccagttgccttggcctacatactgttgcgtctaaagcttgcctacctaaattggcctgtgcctggaagtatatcagctctttcctcagggttcgcatacgctgaggatgtaattccattactaagcccagaatggaattatcgtgaactacgcgtggcatatctatcgatcttaggaagattgcagctccaagtgtccgaaggtaaggagtttttaatcttgtgccggtttggaatttctttaccgtggcgctaccgttcgctagatttcattcgcaaatcttcatatggcttcagaacgttgtgccgaactccaacctgtaccttagaaatttatcgcgatggttttggtggccctctactgataagacctgatagcgatagcagtgagagcgaaactacaacggtgattgagagacttgttatctga

SEQ ID NO: 332410 - DNA, 942 bp, Pseudomonas aeruginosa
atggatttcctgcaccctcttctcagcactgaatatcagttaaatacccctaccttaatgtcagttgtgcagaatgcctgtttcaaagtgctgatgcgtaaaaccggtgttgtgttcactggtgagcctcggatagggaagactcgatgctgcgaagcccttgttcacgaaataccaaaaaaatttcacaacgtttacgccttcatgattgcggcgacaaataaagatatacacccacagtattcatcaatagtccatcaattgatagagatggaggaaattagacccagcacccgcactacattcattcaacgtcaagctatgttgatcgaaaggctgaaaataagagctgcagctaacaacgcaaagcaaatagtaatgcttatagacgagctgcaaagactatctgctggtgattttaaccagcttgctgatttgtataacaaattgcgagcttgcaatatcaccttgacggtagtctcctttgccatgccttcaattgaaaagagagtggtggagtttctttcgaatgatgacagacatataatcggacgcttcttaagcgacataagaccgctatatggtgtcactaatcaaaaacaactatgcactatactatccctctacgacacggacagtccatttcccgacaatcctcgcgatagctttaccaaagatttactgcctaaggcttatgctaggaactttaggctagctgatttatcagaagacatttggcgagaaatgtctcgcgtcgcaagtggtaaatacgtcaataacttgccaatgcagcatttgacgcaaaccattgcatatttattcttgattcttagtcatgaggactgctcgacgctagtcgtggcggtagacttaatagaggaggcagtcagggaaagtaattttcaggaattctgccgaagcattaatgggggaggccaatga

SEQ ID NO: 332411 - DNA, 1908 bp, Pseudomonas aeruginosa
atgaagaataaaatatccagagagcgattgagcagtgttggattcgagaaggtcgacccatcgttattagagcctgcaattagagaaagcttcgtgcggcgccagcacgcaatcgagttaaaacttgatggcctgacaggcgcagaaatacaccgaataacggggcttcctgagagcgaaatcacgagattcttcaaaagatatacagcactcacggaagaggggattttttggggcgagtctgccttaattccccagagccgtatcgtatcgtatcaacgaaggaagcctcttgaaaaaaaaggaagcgaacaaaaaggcgggatgtctggcgcgctaagctataccttggcgaagtttccaactatttcagaaaaatttaaggcggcggtttttcgaacagaccttgaatatgcttgcggcagccgttacgacaaaaggcaactgtgtaacattttttatgatatctgcgctgcagctggtcttactgccgaagattggccttttaaccaagctcggggagctcgccggacgattacgagatatatagataagcttctaaacgatgactttcaaagagccgcgcttgcaaccggaggctcaatagccctaattcatagcaaggtcggaactggatacagtccgtttcttgagagttgcgatgtgtatgaccttattgaaattgactcctatcatgtagatgctttctttgtacttaatattagtggcgataagcgtaccaagactaaagacgtcataagccgtatctggttaatggcggcaatctgtaggagaagcaatgctattctggcgaccaagtttgtattcgctagcgaagtaagatcgcaggatctggtggatttaatatgtgaggcctacgtcggtggctgggcgccccgcgaaatcctcaatgttaaggatcttcggtatagcgagttatcaggcatgccctgctactccgtgccgaagctacgccatcatatctggggcggaatttgcttagacaatgctatgcagcaccatgcaaataaagtttatgaattagccctgcacagccttggtttctccatcaactttgggcctttagggcaaccggctcgcagacccaatattgaaagacttttcaaacgcatagctaccaaggtaatgcaccaacttccatctaccacaggaagctccccagccgacggacgggctgatgcccctgagaaggctgcgatccgctaccagatagatgttgacgatgcacttgaagtcatggacgtttataccgcaaattataatggaacacctcaaggcgggatgaataaagcgaatagtccccttgatatactcagggactattgtgctaatgatgatctcctgatcccagccacaccagagagttatataaatagcgtatcattggggagctctactcgagaggttaaggttaccggaagtataaagcacggtatccgaccgcgaataaaactagaccaggccatatatacaagtacggaactggcaaattctccgcatctaatagggaaaaaattaaccattcggataaagccgcacgattaccgttacgtagaagcttatatagatgacggaatatacttaggcatgctaactgtagaggcctcttggcgccatatcgctcatagcgtcaccactagaaaactagtaaaccgggccttagcaaaaaaagaatttcaaatcgcggaaggccaacaccccgtgcttgcgtggcaaaaacacctgattgccaacgcgagtccagcgaacgctcgcgaattaaagcggctgcaagaagagcgttgtgataccagtcagctaatacctaaggggcaggtagaaatagtacctgagcaaccaagtaattctgtctccgaacgttggagatttctagatatcttcaattga

SEQ ID NO: 332412 - DNA, 651 bp, Pseudomonas aeruginosa
atgcctaaaaaaagtaaaacctcatattttacaaagcgcggcaactatttcggaaacctatgggcaacctatagtaccaaggcagggtgcgtactattgctaggtagcgaccgccaattagctcactggcttttgaagctagaattctctcctctcataaaaaacttcaacttcgaaccaggatccaagtcgcttggtgcttctagcacacttggcttcatagactatcatgtcgaagttcagccggtgaacgggccgattgaactgcattttctacgagtcagcggattctctgataattatgcggagaagtcgagtgctgccgaaagtatgaaatacaagtacgttgagtataatgatgagcattggatagcagacaagtctaagatttttaccctactgagggctgcgagctttcttagcgctggacgacatttgtatgtgcccacaggtctcattgaggaatccaagcgatatattcatctcgcaaaaaaaggaaatttacgggcatttctttcagcagtttatgtttacgatagaaacttgtgcttgctagttttctgtcggatgtattccgcaagattaatagatgttagctttgaagataattttttctcattgaacacatggtggtggttgaatgaagaataa

SEQ ID NO: 332413 - DNA, 1095 bp, Pseudomonas aeruginosa
atgtcggggagcggagggcacgccacggggatgggaggaaccgttcatgcgcctgggattgccagccctcgccgcggggctgctggccctgcgcttcctggcggaattgccgtcggtcggctggctgctgggcatggccgccgccggactgttgctgctgttcggccggctgtactggctggggttgttcctgctcgggttcgcctgggcctgcggctcggcgcaagtcgccctggacggacgcctggccgccgagctggatggtcgcaccctttggctggaggggcgtgtggtcgatctgccggcgagcggcgagggcgtcacgcgcttccggctggaggaggtcagcgctgcgcggggcgtgcttcttcccgagcgtctgcgcctgagctggcgcggcgcgccgccgctgatgggcggcgaacgctggcgcctggcggtgaccctgaaacgcccccgcggcctggtgaacgcggcggggttcgactacgaggcctggttgttggcgcagcgggtcggtgccgtgggcacggtgaaggcgggccaacgcctgcagccggccagcggcctggatgcctggcgcgacgcctggcgccaacgcctgctggcggtcgacgcacaggggcgcggcgccgccctggcggcgctggtgctgggggatggctcgggattgagcgcggccgagtggcgcatgttccaggacaccggcaccgtgcatctgatggtcatctccggttcgcatatctcgttgctggcggggatgctctatggcctggtggcggccttgcatcgcctgggctgctggccgcggcgcctgccctggctgccctgtgcctgcgccctgggtttgcttggtgcctggagctacgggttgatggcgggtttcgaggtcccggtacggcgcgcctgcctgatggtcagcctggcgctggtctggcgcctgcgtttccgccacctgggcttgctggccccgctgttgggaacgctggtgctggtcttgctggtcgagccgctggccagcctgcaggcggggttctggctgtcgttcctggcggttgccctgctgctctggctctgtctcttatacacatctga

SEQ ID NO: 332414 - DNA, 1065 bp, Pseudomonas aeruginosa
atgcacacgctctactggcgggacctcgaaagccccgccaatggcgaatggctgggcctcgcggtccaggtggagggcgcccatcgggcgccctctttccttcatctgcaatccggcggccaggcccgcattcgcctgatgcgtggcgatcagccgctgctctgggccacccagttgccgtaccacgatggcatctggctggtgaagagcctggtcgcggcgagcccggcgcaggccagcgtgccgcccatcgactcgccgaccctggaagcgttgcgcggcctgcgcggcgaggcccgctacaaggcctggagccgctatttcgtcgagaccctgcgtaccagcccgggcagttgcctggaggccgggcgctggttgctgcgcctgtcgctcgccgagcaggtgcccgcctggcagccaccgcagagccacgatccgcgcgaaagggtgctggaacgctggcgctaccgcagcgtcgggcgcgacgcactgttgccggactggcgcttctacagcctggagaaggtcctcgacgacgactgggtgcagtggctcgactggtgggggcgcgacaacgacgccctgatcgccctgcgccgggtcgaggatgacgaggggcgggtcaagtggtggcgcaagaaggcccgcgaaggcgagctgccgccggtgctggcgctgcgcctgaactgcctggatgcctgcgtgatcctcgatggccactgccggctgcgcgccggcctgctggagaacgtcgcgccggagatcctggtgctctgtgcctacgacgagcagccgatgccggtggatacggcgcagcgcgaacgggtgctgcaatcgctggcgcagcgggtcgacgcgccggtgcgccgtggacgccggccgctggatagcgaacagctcaaccaggtgctgctgcgcctgttcgacgaccgtccctggccgcgagtgctgacccgtgcccgcgcggtgctgaaggaagaacagtggtgcgcggaagtgcgcgactggctggccgcccgcgagcgtctggacgcgctggagccgatcatccgtcgcgtcgagtag

SEQ ID NO: 332415 - DNA, 540 bp, Pseudomonas aeruginosa
atgaagcagatgaccttcgtcgacgccgagtacgctggcaagcgcaagcaaacccgcaaggagttgttcctgatcgagatggatcgggtggtgccgtggaagggcttgattgctttgatcgagccacattatccgaagggtgaaggtggccgtccggcctacccattgatggcgatgctgcgtgtgcatctgctgcagaactggttcggctacagcgatccagcgatggaggaagcgctgtacgaaaccacgatcctgtgccagtttgccgggctgaacctggagcgcatccccgacgaaaccaccattctcaacttccgccgcttgctggagaaacacgagctggcggccggcatcctcgctgtcatcaatggctatctgggcgaccgcggcctgtcgctgcgccagggcaccatcgtcgatgcaacgctgatcaatgcgcccagttcgaccaagaacaaggacggcaagcgcgacccggaaatgcaccagaccaagaagggaaaccagtattgtgtgtcacgaacacaggtcggatga

SEQ ID NO: 332416 - DNA, 2598 bp, Pseudomonas aeruginosa
atgtcgagtctggctaacggagtggtgtacgtagacgatttcgaaaagtggttgagcgagcgaggtcgctggctacagacagcggcaaagaagctcatcgagcagaagcggccgcctaatgcggaggagcttgccgagctagttcgcctctgcaagctcgaggctgccaagcagcaggatccgggattcgcgaacgtagctccgggatcattctctgcagcaaccgtacggccggtcgttagagttgaaggggttagccaagtctttggcgttaatgcgatcaagccgggcgcgtctcttcagttcggagcgggcggcttgaccgtgatttacggccaaaatggttcggggaagagtggttatgcccggctgctcaaacagctctgtgggtcgcgctcaaaggatgaaatccgtccaaacgtcttcagcgatgaggagcacgcatgcagtgcgcaatgccgaatcactatcgatggcaccccccgagatatcaactggcagcctaatgccgagccgcatcctcaacttaaacatgcgcaggtattcgattcaaaggccgcgtctcaatacatggggaaaacagagtcgagctacgagcccagcagcatgcggttcatcactctgctcattcaggtatcggacaaagtttctgcggagctggcctctgagaaggcaaagcttgtcagctcccttccacagtttcccgctgatctggcagacactgcgggaaaaggctggctggcctctttgaaggcttcggtctccgccgagaaaattgaagcgtattgccaattccctaaagagttggatgaagaacggatcaaggctgaaggcctgctggcggaaaaggacattgcgggcagactagtttccattggaaaagagaaggttgcgaccgacagcattaggcaggcgatgcgcactctgaaagagggcctgtcggatgagaaagctgctgcgctattcaagtcgaagagtgatgcagcggtagctaggaaggcagccaatgacgtcgcgcaacaggccttcgccaatgcgcctctccagggcgttggcgaggctgcttggatgctgatgtgggagcaggcgcgcaactactcagttgctaatgcttaccctgcccacgagttccctgtgacctcggatggtgcgcactgcgtgctatgccaacaggtgcttacggcagacgccgcatcacgactcaagagtttcgaatcattcgttactgccggcctcgagactgcggcaaaaactaaagaaagcgctaatgcagctcttgttgcggaaatagtccagttaccatccattgaagattggatctcaagattggctcagctgcagttcgacgaactggttgctcgtagctggtatgagtcattgaaaagcaggcgtgctcagtttgttgaatgtgctgctgcggtcgacctattgagattcgactgggaagctattgataatgccttggaaaagcgcgctgccgatctgctcgtagaggaagccgaccttactcaactgcagcaagatggtaagcggcaagagctcgaaactcgggtgaggcagctcaaggcgctacagtggttatccgagaacaagccggccatcctagcggagcgtcagcggctggcctcgatggagctgctggataaagctgcgaggctgaccgcaaccaatgctctgacgaccaagcgcaatgagctcgcgaaaactgaacttgacgctggctatcaggctcgttttgctgccgagttgaaaatgcttggtggtagtcggttacccgtggcaccgcagagcaaggctcaaggaaagggggtaatcacctttggactcactcttgtcggggctcgggtaaatcattcacctgaggtcgtactcagcgagggtgaagcgcgaatcgtcgcattggccgcgtttctggcagatacaactggctctaaccagctagctcctttcatcttcgatgatccgatttcctccctggatcaggacttcgaagagcgggttgtggccaggctagttgagctggcgaagactagacaggtcatcatcttcacgcaccgcctatctttgatcgctctggtcgaatctgcgctcaaaaagcatgcggagaacccaggcaaccaaaagatcaaccacacagtgctatcgcttcggcggttgaataaggtcgcgggaatcttggcgcagcacaacttgcgtgatgccaggcccgacaaggctattaatgtaattcgagatcaggttattccgcagctaaaaaaacttcaggctcaggccgatgcggatggatatgacctggccgtgaagagtgcctgtagtgatttccggattatccttgagcggacggttgagttcatccttctgcacgatgtcgttgctcgattcagaagggatgtcatgaccaaagggaaattaagaggagtcgccaaggttacggctgtcgactgcgattaccttgatcggctgatgaccacttactcaatgtacgagcactcacaggcagatgaactgcctcaagtcccagttgagctcgacgttttcgagcaagatgtgttggagcttgtaacgtggatggatgagttcaaggggcgcgttgtatag

SEQ ID NO: 332417 - DNA, 606 bp, Pseudomonas aeruginosa
atgggttcgaagctgctccaggtcaaaggcaagctggagaatcagtccggggtcgcgtcacccaaacaagaaatctgctgctcgcggatgttcggcaagcgcttgcgcgagctggagccgatcaaggaggcagtggcggcgtacgccgcccgggccagcgagaagctgagggcacagcagtcactgtgcaagcgtgtccgaatcagcatccgtaccggcatgttcaatcccgacgagcccaagttcgcaaaaggcgtggtgtgtgagctgccgtatcccaccgacgacacccgatacatcacccgggcggcgatcgccggtttggagcacatctatcgcgagggcttttcgttcagcaaggccgaggtcctgctaatggatctgtgccagcgtggcgagtacaccgacgatctattcgctcaaacccagtccgctgcgtcggagcgggttatgggcgtgctcgatgcaatcaacgccaagtggggccgcaacaccctccggcccggccgcgtaaccaccgcgccggactggagcacgcgacgggagatgatgagccaaagtttcacgaccaagctggatcagttgtgggtggtgcggtgcaactag

SEQ ID NO: 332418 - DNA, 963 bp, Pseudomonas aeruginosa
atgtcgataggcaagaaaaaaggatccactaaaacgcgaagaacccacgtctggctgtgggtggtgctgttcctagtaattttcgccatatttcaaatccgtaccaagcatcttgatgaccggttgtatttttgggtaaagacctactggcacaccgacgactggaatgagagctcagtatggctgccggcttatcaggtcgagctggatgctaagccggttcctggtgtagagaacaacctttccggactgaccttcgaccctgaccagaatctgttgtgggcagttaccaacggacctaatgaactgctgactctaagtcgcgaaggcgatttgctgagacgctacagcctggacgggttccatgatgtagaggcggtgtcctacgttggtaacggccagctggcaatcgctgaggagcgtcgtcagagtctggtcatcgtggatgtgcccttggaagataatggcgagctttcttcaaatcgctcgataagccgcgagaagtatccagctctcaccttggcgctgggcaaccaggacaacaaaagtcttgaggggcttgcgtacgatctgaaacgagaccgtttatttctcacgcgggagcgtgacccccgccagctgctggaggtgagcggactacgtgcaagtcttgaaggcggcctttcccttcatgtgcgcgacatgtcggacttggtaaatagcaagattttcgcgactgacttatcttcggtcgtgttcgatcaacgaagcggtcatctactcctactcagcgacgagtcgaagctgctgattgaaatgacggatgtggggaaagtcgtgagttttcgctccttggccaccggttttgctgggttgcagaaaggtattccccaggcagagggtgtaacgaccgacacggagggctatttatacatcgtcagcgaaccaaatctgttttaccgattcacacgggcgcaagattga

SEQ ID NO: 332419 - DNA, 852 bp, Pseudomonas aeruginosa
atgaccaatgtaatcgcctgcatcgacggttccgcttcggctccagcggtttgcgactatgcagcctgggccagtcggagtttgcaagctccgctgacctttctgcacgtattagatcaacaacaatatccggttgcagcgaacctgagcggcaatatcggactcggcagccgcgagcatctcctcgatgaacttgcctctctggatgaacagcgcagcaaattggcgcttgaacaagggcgaatcatgctagcgaacgccaaagagcgcgcgattggaaacggtgttacctcaccggaatccaagcagcgccacggcgagttgttggaaagcctccaggcattggaagacgagatacggttgctggtcatcggccgtcagggcgaatccagcggtagtctgagtcagcacgtcggaagccagctggaaagcgtgattcgaatcatgcatcggccagttctcgttactccgacagcattcaaggagcccaaaagcgcgttggtggccttcgatggcagcgctaccacgcgaaaaggcgtggagatgctggcgtccagccctctgttcagggggctgccagtccacattgttatggtcggatcggaaaacgaagaatcggtatcgcagcttggctgggcacaaaaagccctgctcgactcagggttcaccgttcataccgcgatccgtagcggtgaagttgagcccaccctgcatgcctatcagaacgagcatgccatcgacctacttgtgatgggcgcctacggtcattcccgtattcgccagttcctggtcggtagcaccacaacaagtatgttgcgttccaccacaagtccgctgctcctgctgcgctga

SEQ ID NO: 332420 - DNA, 1488 bp, Pseudomonas aeruginosa
atgctgcaaacaatcaagcaaaactggctgaccaatatacgtggcgacattctcgccggcctcgtcgtggcactggctctgatcccggaggccatcgccttttcgatcatcgccggagttgatcctaaggttggcctctacgcctctttctgcatcgctgtggttatcgctttcgtaggggggcgcccgggtatgatttcggccgccacaggcgctatggccctgctgatggtcacactggtgaagaaccacggcctcgaatatctccttgctgccaccttgctgtgtggcgtgctgcagatctttgctggctacctgaaactcggctcgctgatgcgattcgtctcacgctcagtggttacaggcttcgtcaatgctctggcaatcctgatcttcatggcgcagctgcccgaactgacgaacgtcacctggcacgtctatgcaatgacagccgcaggcctagggatcatctatctctttccgtatctcccgaagattggaaagctcatcccatcgcccctggtatgcatcatcgtgctgacggctgttgccattgcagttggattggatattcggactgtaggtgatatggggcaattgcccgatacgctgccagtctttctctggccagacgtgccgctgacgttcgagacgctggtaatcatcttcccgtactcggcagccctggccgtcgttggactactagagtcgatgatgaccgcgaccattgtggacgacttgaccgacacacccagcaataagaaccgtgagtgcaagggtcaaggtgtggctaacatcgcgtccggtctgatcggcggtatggctggttgcgcgatgattggtcagtccatcatcaatgttaagtccggtggacgtactcgcctttcctccttggctgcgggcgttttccttttgctgatggtggtcttcctcggtgattggctgaagcaaattccaatggccgcgctcgtggcagtgatgatcatggtctcgatcggtaccttcagctgggactcgttacgcaatctgaagaaacacccattgtcgaccaacattgtcatggtcgtaaccgtggtggtcgtggtcgcaacccacaacctggcctacggcgtactcgccggcgtattgctagccgcgatgttcttcgccaacaaggttggccattacatggatatcgcttcgtctttggacgaggcaggtgaacatcgaagctataccgtcatcgggcaggtgttcttcagctccgctgacaagttcatcgctgcattcgatttcaaggaagcagtagacaaggtaaccattgatctgagccgtgctcacttctgggatatcaccgcagttgccgcgctggacaaggtagtcatcaagttccgccgtgaggggaccgaggttgaggtgctgggactcaacgaagcgagcgccactatcgttgaccgctttggcgtgcacgataagccggacgccattgatcaactaatgggccactaa

SEQ ID NO: 332421 - DNA, 1065 bp, Pseudomonas aeruginosa
atggccagatccgtcgatacatgcccggacggcgttgccgccggagccgaagcagaccagcggcggatacgtgccggctacctgctgggaatgttcgccgggctgttcgggatgctcggcggctttgccgccctgctcgcctggctcaatcacaccgacaacctgccgccaccggccttctccaacagcctgtgtgtggacgaaaagctacactttctgcggcacaaccccatcgccgatccgaacctgctgatcgttggttcctcggtcgcctggcgccatgtcgatggtgacgtgctgatcgagcagacgccaggcttgcgtccgctcaacggtgcgttctgcggcctgcacgccaaccagtcgacctatgtcgccaactggctgctggatcgtgaaccgagcgtccgccaagtggtgatgatcgtcgatccgctggacttcgccggctgctggaaagtgccggatgcggtgttcgaccgcactcacgccgaccagtacgtctatcagcaggcctcgcgctggggctactacatgcgctacttctcgccgcgttcgctgctgcgcaacgcgcagacggtcaaggcgcaacgggccaacgagatcgaatgggacccgctggtattcacccgccatggcgacgggccgctggagccgcagggtgatcgcggcctgttctacgacaaaccggacgcgctggatgacagctgctttgtcgccctgggcgaactgtcgaaacgcctgaagaacgagcaacgccagctgctggtggtttccacgcccctgcacccgcagtggaaagccaagatcgatgccgacggcagcttcctcacccgtttcgacgccaagctgaacgccgccatcgccgggcatgacggggctcagtattggaacgccgatcgcgaatgggtcgctccaccagcggccttcgtagatgccatccacctgcgctggtcagccgtgcagggcttttccgtggcgctggccgagcaactgcgagcgtgggatcaggccagactccagaattccgtgctcgccggcaacgatgcctacggcgagccatga

SEQ ID NO: 332422 - DNA, 249 bp, Pseudomonas aeruginosa
atgaacgaaaaggaaattctccaggcgctgagccaggtcttccacgacgtgttcgacgatgacgatatcgtcctcacctccgaaaccaccgccgacgacatcgatggctgggacagccagacccatgtgctgctgatcgtggccgcagagcaacgcttcggcatcaagttccgcaccgccgaactggaatcgctgaagaacgttggccacttcgcgcaactgatccagaccaaactcggagggcgttga

SEQ ID NO: 332423 - DNA, 1902 bp, Pseudomonas aeruginosa
atgcaacagctctcctggctgccgacacacccggacctatccagtgccatcggccaagccaaacgcatcgaagatccgctgcagcggctgcatgaagccgtcaagctggccgctcatcaacgggatttcaccctgaccgcacgactggacaagctggctgccgccggcatcgcgcagcacgccgcggcggcacgcctgactccactgcgggtggcactgctgtcctcgcatacggtcgatcacctgctgccggccattcgcgtggccggactgcaacggcgcctggcgctgtcgctgcatgttgcgccctacggcatgtatcgccaggcgctgctggccgatgacccggcgctgaacgccttcgccccgcaactggtgctgctggcgctggacgcccatgacgcgccgctgcaactgcccctgcaggcaagccaggcggaggtggatgccgccgtggcggagcgcgtcgatgagctgcgcatgctctggcgccgggcccgcgagcgatatgccgcgcaggtggtgcagcaaaccctggtgccagtgacgccgccattgttcggttcttacgaagcactggtgccggcttcgccgcgggcagtcatcgaacggttgaatggcgccatccgagccgctgcccgcgaggaaggcgtgctgctgatcgatctggcctggcacgcagccgcctatggcgacggcctggccgagccggtgcgctggcaccaggccaagcagctgatcagcccgactctggcaccgctttatggcgagcactttgcgcgtatcgcagcggccactgccgggctgtcgcgcaaatgcctggtgctggatctggacaacaccctatggggcggtgtgatcggtgatgacggcatcgacggtatccagctcggccagggcagccccagcggcgaggcgtttctcgcctttcagcgttatgccgcgcaattggcgcgccgcggggtgatccttgcggtgtgcagcaagaacgacctgcacgttgccgaagtagcctttgaacataccgagatggcgctcaagcgcagcgatatcgcggccttcgtcgccaactgggaagacaaggccggcaacctgcggcgcatcgcgagcatgctcgatctcggcctggatagcctggtgttcgtcgacgacaaccccgccgagcgcgacatcgtgcgccgcgagctgccggaagtcgccgtaccggagctgcccgaggatgtcgccgactaccccgcgcgcatcgccgcggcgggctatttcgaggccgtatcctttacctccgatgacgccgaacgtggccgcagctatgcgctgaatgccgaacgcaaggccgcgcagagccaggccacggacatggacggctacctgcgcgggctgcagatggtgctgcgggtcagccgcatcggcaccgccgagctggcccgcgccacccagctgatcaacaagaccaatcagttcaacctcaccacccgccgctataccgaagccgaagtcgagcgcatggccagcgatccgcaaaccatcgcgttggccctgcggctggaagacaagttcggcgataacggcctgatcagcgtggtgctggcgcgaccggatacagctatcgaggctgacgaactgctgatcgacagctggctgatgagctgccgcgtgctggggcgtgaagtcgagatggccgtgctggaggtgctggccgatgcggcagcggccaccggctggggcgcactggtcggcgaataccgccccaccgaacgcaacggcatggttgccgaacactatccgcggctgggcttcgagcagcgccccgcccctgccaacgccgctaccgatgcaagtttctggcgctacgagctggcctcgcgcgctcccatcaaccatcacatccaggtgcaagcatga

SEQ ID NO: 332424 - DNA, 1539 bp, Pseudomonas aeruginosa
atgcttttcaattcggtggaattcatcgccggctttcttccggtggtgttgattggattcttcgtgctgaccggatcgggccgacagcggctcgcagtgatctggctgaccatcgtctcgttggtgttctacggctggtggaacccggtttacgtaccgctgctggtcggcagcatgctggtcaactatctgctcggtggctacctgcgccagcacccctcgcgtctggtgctcgggttggcggtcgcggccaacgtgttgctgctggtctactacaagtacaccggcttcctgctcggcacgctggatgcggctttggatctcggttggcgggtggaagacatcatcctgccgctggcgatctccttcttcaccttccagcagatcgcttacctggtcgatgcccatgacggtgtggtggaagaacatgacttcgccaactactgcctgttcatcagcttctttccgcagctgatcgccggaccgatcacccaccacgctgaaatgctcgcgcagttcaacgaccgcgacagcttccgcgcgcgcatcgacaacctgtcgctgggcgccacggtgtttctgctcggcctgttcaagaaggtggtaatcgccgacaccctcgcgctgaaagccacgccggtcttcagcctggccgccgacggcaccatcccggcgttctacgacgcatggaccggcgcgctgacctacacgctgcagatctatttcgacttctccggctacagcgacatggccatcgggctggcgctgctgttcggcatcagcctgccggccaacttcaacagcccgttcaaggcgcgcaatgtcatcgattactggtcgcgctggcacatgacgctgacgcgttttctcaccgcctacatctacaaccccatcgtgctgcgcgtgacccgtgcgcgcatggcggccggcaagccgcagccgcgacggggcaagatgaccgtcggcaccttcttcgcactggtcgcctaccccaccgtgttcaccatgttcatctccggcatctggcacggcgccggctggcacttcgtcgccttcggcctgctgcacggtttctacctggtggtcgcccacggctggcgtgcctggaaggcgcgtcagggctggaagctggacagcgacatctggtggcacaaggccgcggccgtcgcgctgacctttggctgcgtggtggtggcgatggtgttcttccgcgccagcgacgtgccgaccgccatggcgatcctcgccggcatgctcggcctgagcccgaccagtacggcgatggatcgctccgacttcgtctatatcgcggcgttgctggtcttcgtctggggcatgcccaacgtgcagcagtggatgggccatttccgcaccgcgctcaacttccagccccagccgcactggaccgaacggctgctgccggtcagcgcctggcggccgacggcgatccacggcatggcagtaggcgtgctcggtttcttcgccctggcgatcgccttctccatggcaccgacggagttcctctacttccagttctga

SEQ ID NO: 332425 - DNA, 825 bp, Pseudomonas aeruginosa
atgtctaaagccgagcttgatgttggcaacggccagtctgtcttggagaagatcgagctactgaagccagaccttatcgtcaatgccgccgcgtttaccggcgtcgacgctgctgagacgagtgtggaagctgcctatcgagttaaccgagacggtgcaggaaacttggcgcgacacgctgacagccacggtattccaattttccatctttccaccgactacgttttcgacgggaagcacagccgcccttatgtggagcacgacaaaacagcccccctcagcgtctatggtgcgagtaaacgtgatggagaggctcaggtgcagcaggtggagaagcacctgatcttaaggaccagctgggtctatggggcatatggaagcaacttcctgaacacgatgctgcgtctgacaggcgaaaaggagctgcgtatcgtcgatgaccaggtagggtgcccaaccagtagcgagcgtatcgcttcggtcctgcttgaactcgctcagcgttatcaatcagacggaaagctgccatgggggctctatcacttcagcggtcagtcacattgctcctggttcgagtttgctcaagccatattcgatcatgtatccagagcaggaattattggacgctctccgcgattgacgcctatcacaacagaagaatatccaacgccagccaagcgccctgcctggtccgtgctggactgtcgcctttttgagagcacatttgggatatcgccgacgccttggcgtgccgatcttcaggcgactctccaatcgttaaaagcggattctgatcggctgcacatctcatcggttcgctgttaa

SEQ ID NO: 332426 - DNA, 4878 bp, Pseudomonas aeruginosa
atggcttcaccgtctcaacccaaaagcctgatcttcgatctggaagtcgcccccggcaatgccgaccaacctgaccgcatcttcatggtcggtgccctacgccccgacacgggcgaggaactcgaacgcaaggtcgacaaggacctgcccagcgtcctcgatgcactggacagcctggggcagggcgcaagcttcgtgctcggccacaacgtcatcgaccatgacctgccgatcctcaaacagcaggccccagaccttgccctgcacgggctcccggtgatcgataccctgcgcctatcgcccctggcctttccgcaaaacccgtatcaccgcctggtcaaggactacaaactcattcgtgacagcctcaactcaccactgaccgactgccgttccacgctcaccctgttcaacgaccagcgcatggccttcgccgagctcaacacgagccaccaggccgagctcctgtgctaccagacgctactggctccaacactcaaaagtgacttgggctcgttctttgcctcgctcagcggcaaaagccccaaaccggtcaccgaactacgcagcctcatccccgagcttctcagagaaaccgacccgaccctgacccgtgccttcaaggtctgcagcacccgcctggagcagctgctcgaaaccgacctgctggacgagtccctgcattggcccctggcctatgccctggcctggctacgggtctcgggcggcaactcggtgctggccccctgggtacgtcaccagtttccagaagtgggccgcctgatcgccgagctgcgcgacacgccctgcgggcaagcgaactgcggttactgcagcaccacccacgacccacgccacgagctcaagcgttacttcggcttcgacgactttcgtaccgaacctgacggccgcaccctgcagcacgacgtggtgttggcgggcatgcagggcaagcacgtgttggccattctcgcgacgggagggggcaaatcgctgtgctaccagctcccggcgctgaaccgttttcatcgcaacggcagtctcacggtgatcatctcgccgctgcagtcacttatgaaggaccaggtcgatggcctgctggcccgcaacgtccaatgcgccgccaccctcaatggcctgctaaccatgcccgagcgggccgaggtgctggagaagattcagctgggggacgtgggcatcttgctggtctcgcccgagcaatttcgcaacaaggccttccgtcgggccattgcccagcgccaggtcggtgcctggatcttcgacgaggcccactgcctgtccaaatggggcgcggactttcgcccggactacctctacgtctcgcgcttcatcaagcagttcacaggtgacggtgagctggccgccatcggttgcttcaccgccacggccaagcccgatgtgctggaagacatcgtgctgcacttcaaggaccagctcgacatcaccttcgagcgcttcatcgggacccacgagcgcaccaatctgcacttcgaggtactgccttgcgcccgagccgagaagcgccaccacacccaggcgctgctcgaggacgaactgggtcggaacgagggcggggcagtggtcttcgtctccagccgcaagggtgccgaggaactggcggacttcctgattggccatggctgggcctgcaagtactttcatgccgggctcgagccccacgagaaaaaggacattcaggacgcattcaagagcggcgagctcaagatcatcgtggccaccaatgccttcggcatgggcgtggacaagtccgacattcgcctggtcgtgcatgccgacattccaggttcgctggaaaactacctgcaggaagccggccgggcggggcgcgaccaaggcgaggcgcgctgcgtgctgctgtacgacgcccaggacatcgaaaaccagttcggcatgtgcgagggctcgaaactgaccctgcgcgacattcagcagatcctgcgcaaactgcgtaaggagagcgagcggcgcaagggcggcaaagtcgtcatcaccgccggcgaagtgctgatggacgagcaggtcgagacgagcttcgaagccggtgagcgcgacgccgaaacgaaggtcgtcaccgccgtggcgtggctcgagcgtgggcagtttctaaggcgtgaggaaaaccagacccagatcttccccgcgagcctgaagctctcgaaagaagaggccgacaagcgcctggccaatgccaagttacccgcccgtaggctggaagagttcaaggccattctgagttttctctatgacgcgagtgcggatgagcgcatcaacaccgacgcgctgatggccctgaccagcctgacctccgaagaggtcaccgcgaccctgcggcagatggaagatttaggcctgctggtcaacgactccaagctcaccctctacgtgcgccacggcgtggtcggaccgtccacacagcgcctgcaagccacgcttgagctcgagtcggcgctgttcgatctcttgcaggagcaggcacccgaggccgagagcggcgactggcaggatctgaacctgccgttgctgaccgcagcgctcaaaaccgccacgggcaatcaggaactcataccgctgcacgtactgcgtctgctccggagcctggctcaggatcacgacagcgaaacgcaactgcgcagcagcttcgagctgcgccagatcagccaggactttctcaagctgcgcatccgcggtgggtataactggcggggcattcaagggttgggggagcgccgtcgcgccctcgccgcggtggtgctgccgtttctgatcggcaagctgccgccaggctcgcgcagcaaggatctgttggtcgacaccacgtttggtgaactcatggacctgatcgaccaggacctggacctgcgcagccgcatcccggaatcccagcgccgcaaagccattgagcacgtgctgctctatctgcacaaacaagacgtactgaccctcaaccacggcatgacggtgatgcgtcgcgccatgaccatcgaagtcgagccggacaagcgcaccgggtacctcaaagacgactatcagcgcctggacgagcactaccgcgagaagcgcattcaggtgcacgtgatgcgcgagtatgccgaggttgcactgggctcgatgcgcgaagcccgcgacctggtgaagcactacttcaccctggccaaacaggagtttatccgacgctacttcgccgggcgcgaggaggtgctcaagcttgccaccagcgaagagtcctggcgcagcatcgtcgagaagctgagcgccgcgcagcgggtcatcgtctccgatgacgatgacgtcaaccgcctggtgctggcaggccccggctcgggcaagacacgggtcatcgttcaccgcattgcctatctgctacgcgtacgccgggttccggcacgctgcatcgtggcgctgaccttcaaccggcatgcggccaacgagatcaagcagcgcctgctgaggctggttgggcccgatgcgttcggggtcaacgtcatgacctaccaccgcatggccatgcgcctaacgggaacccgcttcgaacgcggcgagacggtcgaggaggggcggctcgcccaggtgatgagcgaggccgtcgagctgctcgaaggcaagcgtcaggtcgagggcgaggatgacctgcgcgaacagttgatgcgcgggtaccgctacatcctagtcgacgaataccaggacatcgacgacctgcaataccgcctggtcagtgcgctggccgggcgcaaggccgaggaagaagggcgcctgtgcatcttggcggtgggcgacgacgaccagaacatctatgcctggcgcgacaccaacaaccgctacatcgagcgctttcgcgaagactactcggcgtcgaccagctatctggtcgataactaccgctccagtgcctgcatcatcgaagccgccaacagtgtcatcgggcgtaaccccgatcgcctgaaacaggatcaccccattcagatcgacacggcccgtcgtgagcgacccaaaggtggcgactgggagagcctggatccggagcgggcagggtgggtgctgcgtttgagggtcgacgccgaagacgacacacgcgcaaacgttcaggcccaagcagcgatggccgagctgcaacggctgctcacactggaccccgaggattggcagggctgcgccgtactggcgcgcacccaccagtacctgctcccggttcaggcgtggtgcgaggcgcacggcgtgcagtactgcctggccgcggacaaggacagtgcattgccacttacggcccaacggggctttgtgcgcgcggtcgaagggctccgcgcgatcaccgaaccggtcacggccgccgaagcatgggtgcctctgagcgagacggccttggtgccggattggtacggcttcttcatgaccgcattcgaacagcttactgctgagttcgggcaatgcccgctcgccgcccacacgctgatcgactggctatacgactacgcacgcgagctgcgccaacaaccaaagcaggggctgtacctgggcacggtgcactcggccaaggggctggagtttcggcacgtggtagtcttggacggtggctggtcatcgcagcccgacaccctgagcgacgagcgccgactttattacgtgggcatgacccgcgccgagcagaccctaaccctatgtgaatttccgggaggcaatcccttcgtacgcaacctaacccaagaggtgataggtaagcgcttcgtcggcgagcccatcccagaactcgagaagcgctacctgcagctctcgctcaaggacatcgacctggattttgctggacgccagccatcaagatttaaaccggggcaaaatacctag

SEQ ID NO: 332427 - DNA, 681 bp, Pseudomonas aeruginosa; identical to SEQ ID NO: 321228

SEQ ID NO: 332428 - DNA, 1401 bp, Pseudomonas aeruginosa
atgaaactcacgctcacccctcccctgacccccagccactggatgcgctcgaccgacctggccgacgccgcctgcgcgcccctcgtcggcacccactcggcggacgtggcgatagtcggcggcggtttcgtcgggctctggaccgccatcaccctcaagcaactggagccggacgcacgggtcctgctgctggagcaggacgtctgcggtggcggcgcttccggcaggaacggtggtttcgtgatgtcctggtggccgaagatcggcaccttgctgggcttctgcagcgaggcgcaggcgcgcttccttggcgaaagcgcggagcgggcgatccaggaactcggggagttctgtgcgcggcatgacatcgatgcgcacttccagcagaagggctggctgtggaccgccaccacggcgcaccacctcgacgcctggaacgataccctcgccgcctgcgaacggctcggcgtcagtcccttcgaacgcctcgacgccagcgaagtggcacgccggaccggttcgccggtgcatctcgccggggtcttcgagcgcagcaatgccaccgtgcaaccagccttgctggtgcaaggcatgcgccgcgtggcgctggccctcggcgtggaaatccacgagcgctgtggcgtcagccagatcgttcccggccagccggcacagctgctgagcgccggggcccgggtccaggccaaggcggtggttctcgcgaccaacgcctggtcggccgccctgcccaggctctccaggctgatcgtgccggtgaacagttccatcgcggttaccgaggcgataccgcaacggctggagcgaatcggctggaccggcggggaagccatcaccgattcccaactgatggtggactactaccgcaccacccgcgacgggcgcatcgccttcggcaagggctccggcgccatcagctacggctcgcgcatcggccgggtattcgacgtcgaccgggagagcctggccctgaccgaggccgacttccgccgcacctatccctcgctaggcgacatcccgctggtcgacggctggtccggccccatcgaccgtacctacgacagcctgccggtcttcggccacctgcacgagaacatccactacggcatcggctggagcggcaacggcgtgggaccgagccgcctgggcgggcggatcctcgccagcctcgccctcggccgcgacgacccgtggagccgttgtccgctggtagaacgccgctgccggagcttcccccccgagccgctgcgctacctgggtggctccctggtgcgcaacgccgtcctgcgcaaggaacgcgcggaactcgccggtaccgcgccctcggccaccgaccgctttctcgcacgcttcgcccccgccggccttgaagacaaatcctga

SEQ ID NO: 332429 - DNA, 1962 bp, Pseudomonas aeruginosa
atgaccccccattcctccccgcaccgtcttcctccgctgcggctggcccgcgccgtgccgttcctctacctgcttccctgcctggcgctggccgcgccggtcgacctggagccgaccgtggtcagcgccaccactaccgagcgcaagctgcgcgacgccccggccagcgtttcgctgatcaccgccgaggacctgcggcggcgcccggtgcgcgacctgcaggaagccctgcgcggttcggaaagcctgcagttcaacggcgtcggcatgtcccggcggggcatcagcgttcgcggcatgtccagcgagcacaccctggtgctggtggacggccagcggatctccacctcgtccggggccatcgcccattccgacttcgacctcggctgggtgccggtggagagcatcgagcgcatcgaggtggtacgcgggccgatgtcctcgctctacggttcggaagccctcggcggagtggtgaacgtgatcacccggcgcgccaccgatacctggacgggcagcggcctgctcgatggcggcgtgcgcgaggacggcctcggcgggcagagccaccagctcggcgcctatctcgccgggccgctggtgcccggcaagctgggcctcgccctgaacggcgagagccgccgccagcaggaaaccccggacgccgacgagcgccggctctccgagctggaaggcggcaacgccgacagcggcgggctgaacctcagctggaccccggacgacgcccagcgcatcgacctcggccaccagcgcgggcgcgaacgacgctggcgcaacagcgagaccggggggccgcgctcgcgctactacgagtcgcgcgacgtgatcgaacgcgagcgctggtcgctcgcccacaatggccagtgggactggggcagcagccagctgcgcacctaccgcaaccgcctggagcggcacaacgcgcgttccgacggacaaccgccgagcaacccgcagcggcttaccgacagcgtggtcgacggccacctcagcatgccggccttcgagcggcatctcttcaccctcggcggcgaatggcgcaaggaagaactggaggatcgctcggtgaataccgccggcgacgccagcgcgcgacacaaggcgctgttcctgcaggacgagatcgccttcggcccggactggtcgctgaccctcggcagccgcttcgacaagcacgaggcgttcggctgggaaagcagtccgcgcctgtacctgctgcaccacctttccgatgcgctgaccctgcgcgccggcgtcggccgcggctacaaggcgccgagcctgaagcagctatcgccggagtatgcggcggtcggtggcggcgggcgcttcaccatctacggcaatcccgacctgaagccggagaccaatacgtcctacgaactgggcgccgactaccagggcgatggctggtcgctgaagggcacggtgttcgagaacgatgtccgcgacctgatccagaccgtctgcgtagcgcgctgcggggtgcgcggcggcgaggtgcgcaactacgagaacgtcgacagggcacggatccgcggcctcgagctgggcggcggcgtggacctgccggcggacctgcgctgggaactcaactacacctacctcgacgcgcgcaaccgcaccgccggccagcgcctcggcgaccgctcccggcacctcgccaacagccaattgcgctggagccccaatgcccgcttcagcgcccagttgcgcaccgaatacgtcggcagccaggtggcctacagcagcaacgtcggctacgccttgccggcctacagcctgtggcacctggagctgagccagaaactcagcgagaacctgacgctgcgcggcggcatcgagaacctcggcgaccagcgcctggccgacgacgacacgcacttcacctatgccgaacctgggcgcaccttccatctcggcctggtggcgagcttctga

SEQ ID NO: 332430 - DNA, 3846 bp, Pseudomonas aeruginosa
atgcgccgttcgctactcttctgcggcgcgctgctggccagtctctgtgcctgggcggagccggcccaggtgcgtctgctcagcagcgatttcgtcctcccgggcaagcaccagcgcctagccggttgggcgcgcgaggccggtgtcgagttgcgcggcctgcgcctcggcatcggcgaggcgccgcccggcgagtggctggacggcggcgacctgctgatcctcgacacgccgcggccgaccgatcgcgcccaggtcgaggaggcgctgggcgagcgcttgcaaggcgggacgcaaccctggatccgcgtcggcggcggtcctccgggcttcggcaacctgccggcggtgctgggcgggcgcctggtcggctactacgcgaacggcggcgaagccaacctgcgccggctgttcgaggcggtccgacgctggcatgccggcctgcccgtcgacgcgttgccggcgccgcagcccctggcgcaggccggcttctatcatcccgacgcaccggcgccgttcgccggcctcgccgactacctggcctggggcgcctcgcgctgggccagcgatgccccgcgcatcgccttcctgatcccgcgcggcgccatcgccgacgcccagaccggcgccatcgacgaactgttgcggagtagcgagcggcacggccaggcgccgctggcggtgtggttcgacgacagcgatccggaggcgttgaggaagtccttcgctggcgccgatgtccaggcgctggtcaacctgcagcacctgcagaacggcccggcgcgccgtgccgagttcctcgcgctggacgtgccggtattgcagaccctcggctaccgcgacggcaacgaggccgactggctggccgccgccagcggggtggcgccgcgtaccgcggcggccttcctcggcatgccggaaacctggggaatgagcgatccgctggtgatcagcgccctggagaacggcgagccgaagctgatggccgggcaggccgaggccctgctggacaagctcgaccggctgctgcgcctgcgtcgcctgccggcggcggacaagcacctggcgctgatgttctggaaccacccggaaggcgagaagaacgtcgccgcctcgcatctcaatgtaccggccagcctggcccgtctcggcgaagcgctgcgggcggccggctaccgggttgcgacgagcgacgaaagcgcgctgatcgataccgcccagcgcctgctcagcggctactaccggccgcagaccctggacgcgctgtatcgcgacggcctcgccgcgagcctgccgctggacgcctacctgcactggttcgaggcgctgccggcggatctgcgcgaggagatgcgcgcgcgctggggcgacccccgtcgacattgggccttgcgcgatatcgacggccagcgacgcttcgtgttcccggcggcgcgcctgggtaatctgctgctgttgccgcagccgccgcgcgccggccgtccgggcgaggcctaccacgacagcgcggtgccgccggaccatctcttcctggcggtctaccagttcgtccgcgagggtttcggcgccgacgcgctgatccatttcggcacccatggcacccaggaatggctacccggcaaggaccgcgggctggcggtgggcgactacccgctgcgggcgctcggcgacctgccggtgttctacccgtacatccaggacaacgttggcgaggcgatccaggcgcgccggcgcgggcgcgcggtcaccgtcagccaccagacgccgtcgttcgccccggccgggctgtacgacgaactgcgcgacctgcaccagttgatccacgaataccagcaactggacgagggcgcggtgcgcgaacgcagcgccgagcagatccgcgcggcggtgcgggcggcgcacatgaacgacgacctgggctggagcgaggcagcgatgcgcgaggatttcccggcgttcctcggcgtgctccacgaccacctgcaccgactggccggctcggcgatgccgctggggctgcacaccttcggtgtcgccgcctcgccggagctgcgcctgggcaccgtcatgcagcagctcggcgagccctactaccgcgcgctcggtctcgaccccgacgaactgttcgccgccgatttcagggcgctgcgggaaggtcgtgcctaccgcacgctgcaacgctacctgcgcgacggtggcgagatcgccaaggtggccgatccgcgcctgcgcgagcagttgctgcgcgcccgcgaactggaccgccagctcgccgacaccggcgaactggaggcgctgctcgccggcctcgccgggcgcttcgtcgcgcccgggccgggcggcgatccgatccgcaatccgcaggtacccagcgggcgcaacctgttcgccttcgaggccgacaaggtaccgacccgcgccgcctacgaagccggcgccgaggccttcggccaactgctggaaagctaccgcgccgagcaccagggcagggcgccggaaaagctcgccttcagcctctggtcgtcggaaaccatgcgccacctgggcgtcgtcgaaagccaggcgctgcacgccctcggcctgcgcccgcgctgggacgccggtggccgcctgctggcgctggacatcgtgccggcggcggaactggggcgtccacgggtggacgtggtgctacaggtgaccagtgtctaccgcgaccagttcgacggcttcatgcgcctgctcgccgaggccatcgagcgcctcgccgcgctggacgagccgggcaacccgctggcgcgcaacagccaggcgctggagcggcgcctgcgcgaacgcggcgtcgaagcgccactggcgcagcgcctgtcgcgcctgcggctgttcggcaatgcgccgggcgactacggcaccggggtcacgcaactgaccctcgactccacccgctgggacgacgactcggcgctcgccgagcagttcctcgggcgcttgcaatacgcctatggcagtcgcgactggggcgtgaagctggatggcggcaacctgttcgccgaacagttgaagggcgtacaggcggcgatcctctcgcgctcctcgacgctcaacggcgtgctctccaccgaccacccgttcgagtacctcggcggcctgtcactggcggtacgccacctcgacggcgccagcccggcgctgtacatcgccgacctgcgccagcgccagccgcgcaccacggccgccgcgcagttcctcgccagcgagctgcgcgggcgctacctcagcccgcagtggatcgccgcgatgcagcgcgagggctacgccggcagcctggaaatgctcgacctggccaacaacctgtggggctggcaggcggcggatcgcaccatggtccgcgccgaccagtggcaggcgttgcacgacaccttcgtcatggaccgccgcgagctgggtctcgccgagtggttcgaaacgcacaatccgaccgcccaggcgcagatcatcgcgcgcatggccgaggccatccgcaagggctactgggacgccagcgagcagacccgccgcgaactggccgagcgctggcggcaactggcggccgccggcgccggcgaggtcggcgcggcgaccacccgtgaattcatcgaacggatggccggcggtttcggcgaggccgcggcgcaggcagagggcgcggccgcgtccggtgccggcgaaacggtcagcggccgcgtcctcgaagaagtcgcgccgccgccgtccggcgagccgcagccgtggctccggctggccgccgccgtgctgctcgcgctgttcgccgccggcgccgtccggcaatccgtagtcaatcgtcgtccgatggaaaatcgctcatga

SEQ ID NO: 332431 - DNA, 2301 bp, Pseudomonas aeruginosa
atggccctggcccacactctcggcttcccacgcatcggacgcgatcgcgaactgaaaaaagcccaggaagcgttctggaagggcgagctggacgaggccggcctgcgggccgtcggtcggcagctgcgcgctgcccactggcaggtacagaaggatgccggcatccagttgctgccggtcggcgatttcgcctggtatgaccaggtgctgacccattcgctgaccttcggcgtgatccccgagcgcttccgggcgcacggcgaggccgggccgaccctgcataccctgttcggcatggcccgtggcgtcagcgacgacagttgttgcggcggtgcccatgcccaggaaatgaccaagtggttcgacaccaactatcactacctggtccccgagttcagcgccgaccagcagttccagctgagctgggaacaactgttcgaggaggtcgacgaggccagggccctcggccaccaggtgaagccggtgctgatcggtccgctgacctacctgtggctgggcaaggccaagggcgccgagttcgacaggctcgacctgctggaccgcctgctgccgctctacggccagatcttgcgtcgtctcgccggccagggcgtggagtgggtgcagatcgacgagccgatcctggtcctcgacctgccgcaggcatggaagaacgccttcgagcgcgcctacaacctgctacagagcgaaccgctgaagaagctggtcgccacctacttcggcggcctggaagacaacctgggcctggccgccaacctcccggtggacggcctgcacatcgacctggtacgagcgccggaacagtatccgagcatcctcgaccgcctgccggcctacaaggtcgtctcgctgggcctggtcaacgggcgcaacgtctggcgctgcgacctggaaaaagccctggaggtggtgcgccatgcccgggagcgcctgggcgagcggctgtgggtcgcgccgtcgtgctcgctgctgcacagcccggtggacctggaacgcgaagacgggctggacgccgagctgaagagctggctggcctttgccgtgcagaagtgccgcgaagtcgcggtgctggcccgtgccgccactgagccggaagccgccgaggtgcttgccgccctggaagagagccgtgcggtccaggccagccgcgcttcctcgccgcgaatccacaagccggccgtgcaggcgcgcctggccgcgatcaaggcaagcgacgcccagcgccgctcgccgttcgccgaacgcatcgccaggcagcgtgccgggctcgacctgccggcgttcccgaccaccaccatcggctccttcccgcagacctcgtcgatccgcctggcccgccagtcgttcaagcagggcaagctgagcgaggccgagtacatcgaggcgatgcacagcgagatccgccatgcggtgcagatccaggaacaactggggctggacgtgctggtacacggcgaagccgagcgcaacgacatggtcgagtacttcgccgagcaactggacggctacgtcttcacccgcttcggctgggtgcagagctacggctcgcgctgcgtgaagccggcggtgatctatggcgacctgagccgtccgcgggccatgaccgtggagtggatcaggtacgcccagagccttaccgacaaggtgatgaagggcatgctgaccggcccggtgaccatgctgatgtggtccttcccgcgcgaggacgtgtctcgcgaggtgcaggcgcgccagttggccctggcgatccgcgacgaagtggtcgacctggaggcggccggcatcaggatcgtgcagatcgacgaggcggctttccgcgaaggcctgccgctgcgccgcaacgcctggccgcactacctggagtgggccaccgaggccttccgcctgtgcgcctccggagtccgcgacgaaacccagatccatacgcacatgtgctacagcgagttcaacgatgtgatcgagtccatcgccgccatggacgccgacgtgatcaccatcgagacttcgcgttcggacatggagctgctggaggccttcgagcagttcgactacccgaacgagatcggtccgggcgtctacgacatccattcgccgcgcgtgccgagccgggaagagatcgtcgcgctgctgcgcaaggcggcccggcggatacccgccgagcggctctgggtcaacccggactgcggcctgaagacccgcgcctggccggaaaccgaggcagcgctggtgaacatggtcgccgccgcccgcgaactgcgtggcgacctcgcccgcggttga

SEQ ID NO: 332432 - DNA, 624 bp, Pseudomonas aeruginosa
atgaatgacttcaagtccgccctggcgcccttcccgcccgactacccgaggggcttgccgggcaaccgacggcaggtgccgatactgcatcgcgacgcggacttcctcctgcgcgcgctgcaacccgacgatttcgtccggaccagccgctacgagaacgccaaccgcgagcacctggcgccatgggagccgctgcgcgacccggggtatttttccgtggacaatgcccgcgcccgcaccctgctacaggtggcgagcatggacgaaggcgaggcgcttctcctgctgttgctcgatcccgacgacggcgaggtgctggggcgctgcagctacaccaacatcgtccgcggggtattccaggcctgccacctgggcttttccctggccgctgcggcgcagggccgcggcctgatggcacgagccctgcgggtagccaaccggtattgcttcgagcagctcggcctgcaccggatcatggccagccacctgccgcgcaacgcacgcagcgagcgcctgctggaaagcctcggcttcgagaaggaaggctacgcccgcgcctacctgaagatcgccggggtctgggaagaccatgtgctacgggcgctggtggacgctccgcgctga

SEQ ID NO: 332433 - DNA, 2205 bp, Pseudomonas aeruginosa
atgagcagcctgccccacagcaccgggcaagccctggatcgcgtcgacgggccagccaaggtcaccggccaggctcgctacgccgccgaatatcctgccgccgacctgctccacggcagcgtggtcagcagcgacgtcgcccgcggccgggtgcgcggcatcgactgtgcggcggccctggcggtacccggggtggtcgcggtactgcatcacctgaaccggccgccgatggcgggcgacgacgagccctacaaggacgccgaggccgccgaaggcgaacccttccgcccgctgttcgacgaccgcgtcctgtacagcggccagccccttgccctggtcctggcacggagcctggaactggcccgctacgcgggctcgctgctgcgcatcgatatcgagcccgagccgcaccagaccgacctgctggccgccctcgaccaggcccatgaggctcccgcccaactgcccgccgagcgcggcgatttctacaccgcctaccgcgccgcgccgattcgggtcgaggccagctacagcacgccgatcgagcaccacaatcccatggaaccgcacgcgtccacggtcatcgtccagcccgacggcagcctgctggtgcacgacaagacccaggggacgcagaacagccaggcctacctgcaaaaggtcttcggcctgcccgccgacaaggtaagggtctgtgccgcctacgtcggcggcgccttcggctccggcctgcgtccgcaataccagttggccctggcggtgatggcggcgctgcaactgcggcggtcggtgcgcgtagtgctgacccgccagcagatgttcaccttcggctaccggccgcgcaccctgcagcgcctgcaactgggcgccgatgccgaggggcgcctccttgcgctgggccaccaggcgacagcgcagacctcgcgcttcgaagacttcaccgagcacgtggtggagtggagcggcatgctctatcgctgcgagaacctttccctggcctaccgtctggtgccgctggacgtctataccccgctggacatgcgcgcccccggcgcggcgctggggctgatcgggctggaatgcgcgatggacgaactggcggtgcggctcggcatggaccccatcgcgctgcgccggttcaacttcgccgagcgcaacggcaacgaggacaagccgtactccagcaaggcgctgctggcctgctacgaggagggcgcccggcgcttcggttggcaggcccgcgacccacggccacggagcatgagcgaagggcgccagttgctcggctggggcatggccggcggcgtctgggaggccatgcagagcaaggccagcgcgagggcgcggctggaggcggacggcctgctgcgggtggccagcgcgaccacggatatcggcaccggcacctacacggtgatgacccagatcgccgccgacgccgctggcatggcgccggaagaggtgcgcttccagcttggcgacagtgcgttgcccaaggctccattgcagggcggctcgttcaccgtctcgtcggtcggttccgccgtccgcctggcctgcctgcgcctgcgccaggccctggtcgcccatgccagggcccgccatccggagctggccggcaccgccgaagaacgcttccgcatatgccgtggccatctggaagcgggcgatacgcgatacgccctggccgacctgctgcaagggctgccggaagacgcgttgcaggtggaggtggaagctgaaccctcggcgcggcgcaaaggctacgccaccgcgacccattcggcggtattcgtcgaggtgcggatcgacgaagccctcggtaccctgcgtgtgagccgggtggtcagcgcggtcgcggcggggcgggtgatcaacccgaagaccgctcgcagccagatactcggcggggtggtctggggcctgggcatggccttgcaggaggaaacccaggtcgaccatgcgctgggccgctgcatgaaccacaacctcgccgagtaccacatcccggttaacgccgatattggcgatatcgaggtgatcttcgtcgacgaacccgacgatatcgttaacgaactgggctccaagggcgtcggcgaaataggcatcgtcggcgtcgccgccgcagtggcgaatgccgtgtaccacgccaccggccgccgcctgcgcgacttcccgctgaccgtcgacaagttgctcggctga

SEQ ID NO: 332434 - DNA, 1338 bp, Pseudomonas aeruginosa
atgcccaacagaggctgcaccatcggtaccttgaatagaaggctaattgtgcatttgagcggcgcgagtggcgcatcgaaacagggttctatcgccaacgccgcagtccgattcatcgaggcttactcgacgccgcgcctaatcattctggccggcatctgctggggtgcccccagtttcacgtccattggtcagacactggtatgcacccatgtcttgtcactgaatgatatggaagtcacgcctactggcactcgttacagaaagagatccttcaatagcaatacggtgttggacgaagaccaactcgccggcgtgccttgtaccactgcgactatggcgagcctggaaactctatacaaaagcgatgcggcccgcgacgacttgctggcacagtacccggaggtgaaagcaggagaaatggaagccttcggttttgtgcaaagcgtcggccaggtcccgtgggtcgttgtcaagactgtgtcggattacggcggcgatagcttctcggatatcgcgcagaaagaaatcgctgctacgacagccgagcgtctacctatcattatcgactcgttgtgccagtcaaacggctacagctttgaaactgagtcttccgcttaccttcatctgttcgacgcgatggttggcgacaccatttctctacacgaacgagatgtgaaaaatctaggcctaaatgacatactcaataacgagtatggtcctctactgctacgtaagttgcgtaactactgttctgaaatcgaatatgacactgaattcccttatctgatatgtgacgttcttctcgaactttcccaaaatgccttcaaacacaatggttctaagacgctaagcatctgccttaatgccacatcgattacggtggtgaccgacaacgacgtgttcgatatgaaacagctaactacaggacgcggaggggcagaggcttggaaagatttttcggcacgttacatggacaatggtgatatctcctatcgggcgaagagaaatcaccacagattctcgctccaccgagtcgatgacaaccttcgaaaagccaaggaaaactgcgctgcgaccatcagacccgacacgattggcagcggattcagcgcgcccaatggcattctggtctttgaaaccacctgctcatccgtcttcatcagtaccgacggtatcttcatgcgatcgcgtgcattgtcgattatcgaagacataaaaagacgcctttcacaaggtctggttatctacctgtgctgccgtaattcggatgaagcccagcgctacaaaagcgcaatagaagatggcacggggcaactgagagtacttaccgtctag

SEQ ID NO: 332435 - DNA, 948 bp, Pseudomonas aeruginosa
atgtcctacggtgatctccggcgtgccggcgtcgagggtaccggcacgtacggggcagggctaacacgcctgctgcgcgaacacgatattgaggttttggaggtcaaccgccctgatcgggctgcacgtcgatttcagggaaagtccgaccctaccgatgccgaaagcgctgcacgcgctgtgctgtctggcaaggccacggcgattccccaaacccagtcgggggtagcagagtccatgcgcgcggtgctggtcgcgagacgtagcgcggtcaaggctcgaacccaagccatcaaccaggttaaggccttgctcatcagtgccccgcaaccgttacgtgaacgcctctggcggaacaagtcagccgaatgcatcgccggatgtttgcgcctccgcgaaaaggcgactcatcccctgcaagccttgacggcaacactgcgcctgctggccaagcgctggttgctactagatcgagaagttaatgcccttgatgccatgctcgagtgcctgacacaactgtatgccaaacgtctgcgaagccgattcgggattggcccgcaaactgccgcgaccctcctcgcggtggccggcgacaatcccgagcgtttgcgcaacgaggcggccttggcagccctgtgcggggtgagcccgttgcaagcctcatccggcaaaaccattcgtcatcggctgaaccgcggcggcgaccgttccgccaacaacgccctatggactatcgccctagtacggatgcgtggtgacatacgtacccaggcctacgcggagcgacgcacacgggaaggacgaactactagggagatccatcgctgcctgaaacgctacatcgtcagagaactatatccgctgatacggctgacctggtcgattcaacgaactctggttgacataggagcgtcaatgccgtggcggaatccttcttcaatagtttga

SEQ ID NO: 332436 - DNA, 1638 bp, Pseudomonas aeruginosa
atgaacatgcacaggcaaacttcttccgccccggcggactcgctgacggcttcggagcaggcttcattctgggcgccattgcgccatcggttgttcgtcgggctatggctcgcctgcgccatcgccaatctggcgatctggatgcagacggtgggcgcggcctggattatgacccaactgacggcgtcgccgctgatggtttccctggtgcagacggcaatcaccctgccggtctttctattcggcttgccgggcggggtgctggccgaccggatggacccgcggcgcctgctgctggtcacccagtcggccatgctggtcgcgtccgcggcactctgcctgttggcctggggcgacctgctgcaggcctggtcgctgctgttgttcaccttcatcctgggcagcggcagcgccttgggcatggcggcctggatgactacgctggtcggcgtcatccctcgcgagcaggtgccggcggcggtatccctctgcggcatttccatcaatgccacccgcgccctgggaccggccctggccggcgctttgatcgtctggtggagcaccgcctcggtattcctggccattaccctatgtatggtcgcggtgatcgccttcatcttcgtgcgtttgccggccagtgcgcggacggaaggcttgccgccggaaaccttgaccggcggtatgcgtagcggcctgcgctacattcgtcactcggcggtgctgtccagcgcgctcaagcaggtattcgtctttaccagttgcgccagcgcgctgtgggcgctgttgccgctggtagccaaggatgagctgggcatggacgccggtggctacggtctgctgatggcgttcatgggggccggcgcggtgctggctgcgtttggcctgaccagcgtctatcagcgtttccctctgcgccggctgatcgccgtcggcgccgccgccttcgccacggcaaccctggcggcggcgttgtcgcacagccaggcggtggtatgcgccatgctggtgctggccggtatgggctggatggcggtaaacgcaaccatctccaccgtggtgcagacctacgcggcgaactgggtgcgcgcccgggtcgcctcggtgtatctgctggttctgatgggctcgatggcattggggggcgccctgtggggtgtcctggcgcagtacctggggttgggcaatagcctgctgctgtcggcgtcgagcatcctgctcgggttgttgctgacgcgtcgcggtgagatcgtcatgggccgggaggcggatttcgccgacgcgcagcagaccgacaagttggtgttggccggggaggtggcccatgacgacggccccgtgtgcatcgaagtcagttaccgggtggcggctgccgagcgtgatgcgttcctgcacgcggtctatgccatcggccagacacggcggcgtaatggcgcgcgcaactggcgtctgtaccgtaatctggaggaagccgaccactatagcgagcgcttcatcgtcgagtcgtggctggattacctgcgccagcgcgggagactgacccagaacgacgaagctcaggagttggccctgatgcgattccgcgatgggcggcgggagatcaagcgctatatctaccaggcgccggtgaagcaggtctga

SEQ ID NO: 332437 - DNA, 885 bp, Pseudomonas aeruginosa
gtgcgtctggcgagggtcgagtcgggcggcgaggcgttctgggcgctgctcgacccggaccttcagcgcctgcgtcgcatccgcgagccgttctccgcctgggcgccggccctggggcaggggcgggctacccgtctggggctcgatgacgagcgtttggagctgtcggcttgccgcctgctgccacccctgcagccgggcgcgcgggtcttcggcgtggggctgaactaccggagccacctggaacgcctgggtagttcgccgccggcccatccgctcgcctacctgaaaccggattccgccctggttggggcgcacgacgaggtcgcctatccggccctgaccgggcagctcgactacgaggtcgagctgatcgcggtggtcgcccggccgctgggcgacgagccccgggccagcgcctgcctgctcggctatacggtcggcaacgatgtcagcgcgcgggacgcgggccggcgcatcgcccgcctcgatctgctgacccagaaggcgatggaccgcaccacgccggtcggtccctggatcgtcaccctcgacgaactgggtggccccgggcagccggagctggatatgagcctgagtgtgaatggtgagttacgccagcaggacaacagtcgccagatgatctttcccgtcgacgagctgctcaactatctcgatgcccgcatcagtctgcgcccgggcgatctggtgttcaccggttcgacccacggggtggggctggaagatggccgcttcctggcgccgggcgacctggtggaggcgcatatcgaggggctcggcactctatgcaatcgcattggtacgcagcgcgtcctgagtcccgcgcgtggtgtcggacggctgggatggcccacaggcgaatga

SEQ ID NO: 332438 - DNA, 231 bp, Pseudomonas aeruginosa
atgagttcgaataaagcgcggttcgaggtcgtggtcgaccgcagtcggtgctgtggctatggcctctgcgccgccatctgccccagcgtctataaactggatgccgatggcctggtgtacgtggatagcaaggtcgttcccccggagctggaggacgaggcgcgtgaaggcgccgaggcgtgcccggccgaggcgatctggctcgaagatctcaagcccgacagagaatga

SEQ ID NO: 332439 - DNA, 1653 bp, Pseudomonas aeruginosa
atgccattcctgagaaatctatccatcggcgccaagctcctggtgctccccactttgatcgtgctcgctctgctgatcatctcggcggtggcctaccgggggctggccacgcagcaggcggtgatcgaggagatcgaccacttgcgcttccagcagtacaggacggtgctcgagacctcgactgcttcccaggctgcgatggttggcgcttatgccatgggcgcgcgcattctcgagtccaatggcgaggcgttctccgaggaactggagtcctacctcgaggatatgcaggccagcgtcgatgacatgcgcgccgggttggacaaactgacccgcgagacgcgcctgggcgaggaggaaaagatcctcgtgcgcgcggtggaagatcaggccggtgtgttcggcgagggtctggccgatttcaagcgcgccgcgctggaggagcagttgcaggcggcctcgctgctgggccgggtgcgtgccgagtactacggcctgcagggccagttcaatcgcctgctgggcctgcaggcggagttgaccgccagcgccttcgccgaagccggcgccatggtgcggcaggtgtcgcggatccttgtcggcgtgctgctggcagccatcgtcctggcgttgctggtcagcctgctattgcgcggccagatcgtccgctccatccgtgaaatcgagcaagcctcgataaaattgcgtgacggcgacctgacccagcgtgtgcgggtcatcggccgcgacgagatcgctcacacggcgcaggccttcaacgaactgatcgacggcttccagcaggccatgcgtcaggtcgccagtgtggcggcgtcggtcagtgcctcggccgaggaactggtgggaacctcgaccagggtggcggagagctccacggcccaggccggcgcggtaggcgaggtgtcgatgacgatggagcagatgagtgcgggcatcgcgtcgatatccaggcacgcggagagcctgcgcagttccgccgaggccagcttgcgcggctcggaggatgggcatctggcgctgtcgcgcctgcttgaaaagatcgacagcgtgcgtcatgcgttctccgccattcgcggttcggtgggcgatttcgtcgagagcaccacggcgatcaccaccagcatcacccaggtcaaggacctgtccgcgcagaccaacctgctggcgctcaatgcggcgatcgaggcggcacgtgctggtgagagcgggagaggcttcagtgtggtggccgacgaggtgcgcaatctggcgcagcgttcggcgctggcggccaattcgatcaatgagctgaccgtgaggctggagagccagtccgaggtcgtcgacgaggccctgcgcgcagggacagtggcgctggacgacagtggcaggttgctaagcgaactggaaagcaccttgcagcaggcggcggagctggttggcgactccacgcgcggagtggagcagatcgccgatgcggtgcgggtgcagagcgagggcgggcgggatatcgcgtcgaacgtggagcgaatcgcacgtatggcgggggaaggggatgcgatcactcacagggtttccagcgccgtggcgggcctgcgcgagctgtccgaagagctgaatctggcgatgagtcgctttcgtttcgaggcgtga

SEQ ID NO: 332440 - DNA, 1266 bp, Pseudomonas aeruginosa
atgccttcttccaaaaacgaagcggcgatcgacctcagcgaattccggcaaggctggagagtcctgctgctctccgtggtcggcatcgccatcagtatcaatgcgtcgctgctctatggcttcggcaccctggtcgtgccgctggaacaggccttcggctggagcaagagcgaacagcaggtagccatctccttcctgttcggcggcgcggtgatcgccttgcaactggtcggctggttcaacctacgcttcggcataaaacgcatgacggtggcctcgctgatcatgctgtcgctgggctacctggccaccacccagttgcagggctcggtctggtcgctgtatctggccttcgccgtccttcccctggtcggcatgggcgcactcgccgtgacctggacccaattgctcagcctctggtacgaccgcaatcgcggcctggccctggcgatcggcctgtccggcaccgggctgaccgccgccaccattccgcaactgatgtcctggggcatcgagcagtgggactggcgcgccgccttcgtcatcctcgccctgctcaatctgctggtcctgctgccgctgaccctgctgtggttcaggatttccagcagcggtggcgccgcccagggacacggcaaggaactgcagaacctgcccggcatgagctttcgcgaaggcatgcgctcgagcaagttctggacctgcaacctggccctggccctggtgatttcctcgatcatcggcatggtcaccagcacggtgcccatgctgcagagcaaggggctgtcggccagcgaggccaacctgatcttcagtggcttcggcatcgccctgatcttcggccgcctgctcatcggctacctgctcgatcgcatgtggccaccgctggtatctgccgtcagcctgtccctgccggccatcggttgcctgatctacctcggcggcaccgtcgaattcgctccactgctgctggcggcgatcctagtcggcttcggtgctggcgccgagttcgacatcgccgccttcctggtcgcccgctacttcgggttgcgcgaatacgggcgactgttcggcgtgcatcaaggcctgaatacggtggcctccgctctcgccccgctgctgttcgccttcctgctcagccgcaccggctcctactcacccatgctgatctacgccattgcctgcagcctgatcggccccctgctcttgctgaccctgggccgcgtcccgcgcttcgaaccgacgccgatagcggcccacccctga

SEQ ID NO: 332441 - DNA, 321 bp, Pseudomonas aeruginosa
atgcccacactgactttcatcgagcacgatggcaccgcacacaaggtatccgctgacgttggccaatccgtcatgcaggccgccaccttcgcctcggtgcccggcatccccgccgactgcggcggagcctgcgcctgcgccacctgtcacgcctacgtcgacgaggcctggctgaaccgcctcccggccctggatagcaccgaaaacgacatgctcgactgcgccttcgagcgccgcgacaacagccgcctgacctgccaggtgttcatgaccgaagagctcgacggcctggtgctgcacctgcccgcatcacaattctaa

SEQ ID NO: 332442 - DNA, 1176 bp, Pseudomonas aeruginosa
atgaaagcccgcagccaatcgctccccgccggcctgtcgatcatctcgatcgtctgcttcaatttcgcctccttcatcagcaacggactgccgctggccgtgctgcccggccatgtgctgaacaccctgggcttcggcagtgcggtggctggcctggtgatcggcacgcaatacctgacgaccctgatgtcgcgcccactggccggacagctcgccgaccgtttcggtgccaagcgcacggtgatggcggggttggccgtgctgacgggcagtggcctgctgacagccctggcgatcatcctgccggcctccccctgggtcggcctggcgctgctgatggccgggcgcatcctccagggcatctcttcggccctgatctccacgccctgctgcacctgggccatcggcctgcacggtacggcacgcaccgcgcaggtcatgtcctggaacggtatcgccgcctatggcggcaccgccatcggcgcgccactcggggtactgatacgggatcacctggggctcgccggcatcggtatcggcatcatcctgctcggctgcctgcccctgctgttcgcccgcacgaggcctcccgcgcccttgctgtcgggcgtgcgcctgccgttccacagcgtattcctcaccgtactgcccaacggcctggccgtcgcctgcagttcggtgggcttcggcagtctgaccgccttcatcgccttgtacttcgacagcctgggctgggccaacgcggcctattgtctgagcgccttcggcgtcgccttcatctgcgccaggctggcctcgcccaatgcgctgccgcgcttcggcggctaccgggtggtcacgctctgcatggccgtgcagactctgggtctgctgctcatctggctggcgccttcgcccctgcaggcgatcctcggctcggcactgaccggcctgggcgtttcctgggtctatccggggctggcggtggaaaccctggcgcgtacgccggaggccaaccgcaattcggccctgagcaccctctcgctgttcttcgacctggccgtggggctggcaggcccgctgatggggctggtggccgcccatttcggcctgtcatggattttcttctgctcggccctgctctcgaccctcggtcttaccctggtgctgtacctgcgccaacgccccggtcagtga

SEQ ID NO: 332443 - DNA, 1185 bp, Pseudomonas aeruginosa
atgctcggccccttcaccatcaacatctacatgccttccttcgagcagatgaaggcggtattcggcgtcacggacgtcgagttgcaaatcaccctgtccctgtatttcgccgccttcgccttcatgtcgctctggcatggcgctttctccgacagcttggggcggcgaccagtggtgatcgccggcctactggtgttcgccctggcatccatcggcgccgcctgcgccacgcgtatcgagcaggtgtatgtctgccgggtactgcaagggctgtccgccggggccggcatcgtggtcggccgggccgtgatccgcgacctctacgccggcgccgccgccctacgcctgtatgcgctggtggtcatgctgttcgccctggcccccgccatcggcccggtgctgggcggctggctgcaggtgcatgcgggctggcgagcgaacttcggcctgctcgcggccatgggggcggccctgctggtcatggtgctgttctacctgccggaaacgctgcctccgggcaaacgccagcgcttttccggcgcggccttgctggcgggctatcggcaagtgttgtgcaacgacaccttcatgctctgggcggtgaccttcgccctgatgttcgccgggttcttcatctacgtgctgtccgcccccgtgttcctgatgcgccacctggggctgcaggaaaccgatttcatctggctgttcggcccggccaccgccggcatgatgctcggctcctacctgtccggtcgcttcgcccaacgctggtcgtccggccgcagcctggtcacgggcttcaccatcatggcgctggccagcctgtggaacctcgccatctgctattgggcccccgcggcatacggatggtatctgccctatctgttcatctacacgctcggcatggcgttggtccagcccaccatcgtgttggcagggctggactgcgtgccggaccggcgcgggcttggctcgtcgctgcaactgttcatccagaccgggttcaacgccgtactggcagcgctcatcgcacccttcttctggcacacccctctgctgcttgcctccggcgcagcgctggccatgaccttgtcactgggcgttgccgcactggcctggatgaccgccggcaggcgcctggcggaagccggcgtcacgccactggcgccgcgcggcagccagtga

SEQ ID NO: 332444 - DNA, 549 bp, Pseudomonas aeruginosa
atgacccagacgatttacgacatcccactcaaaacaatcgatggagcccccctgacactcgaccgcttcaggggcaaggtgttgctggtagtgaacgtcgcgtccaagtgcggacttaccccgcaatacgagggcctggaaaagctctatgaagacaagcgtgaagtcgggctcgaagtactgggctttccggccaacgacttcagggaacaggagccgggcagcgacgaggaaatcaaggcgttctgcagccttaactacgccgtgcagttccccctgttctcgaagatcgcggtgacgggcgcggaccgtcacccgctctactgcctgctgaccgaggcgcaaccccagacgaccggcgaaggaccgatgcgcgagcgcctcaagggctacggcatagagcccgacccggcaccggcggtgctgtggaacttcgagaaattcctggtcggccgcgacggccaggtggtcggtcgtttcgccccggatgtggcggcggacgattcccgcctgctccaggccatcgaggccgagctggagaaacgctag

SEQ ID NO: 332445 - DNA, 903 bp, Pseudomonas aeruginosa
atgaacgcgatcagctacaaggaatacgaatccgaacatagcggcgatttctggaccgaagcctcgctacgcaagcagggtttcgacattcgcctggaacacgcccactggtccagcgcgggcacggcactgatcaagctccagaagaattgcctggtacgcatgctgctgacgccatccggcctcgcctacaacggcaccgcacacaatttcggcagtttcgacggccatgccgcgcaccgtttcaagccacttggccagcttctgttcattcctcatggtaccgaattccatctcaagcatggcgcctatcagcagaagtcgctgatctgcatgttcgacccgacagacctgggcgcgctggccgccttccactgggactggaacagccgcgcctgcgaggaaatgctcaacctgcagagcctctacctgcaagctaccctgcaacgcctggcggaagagatcgccgcccccggcttcgccagcgaactgcacatcgaatgcctgctgaccagcatcgccctggagctgcaccgggagtttctccgcgaccgcggcggcgaggaagacggcaaactcagccccggccaactccgactgctacgggacatgctggaggccggcccggatgaggacacctccctgcgatgcctggcggcggcctgttccttgccggccagacaactgtcgacccgcttcaagaacaccaccggcaagaccctgcgccgctatgcggcggaaatccgggtcaggaaggccatggcgctactcaccgatccacgcttgttgatcaagcaggtcgcctatggcgcgggcttccagaatgccgcggcttttaccgcggcttttcgcaaggaagtgggactgacgccagaggagttccgccggcagcgcagccgctga

SEQ ID NO: 332446 - DNA, 375 bp, Pseudomonas aeruginosa
atgccgctgcatggtgctcgcggcgaactcggcgcgctgagcctcagcgtggaagcggaaaaccgggccgaggccaaccgtttcatggagtcggtcctgccgaccttgtggatgctcaaggactacgcactgcagagcggtgccggactggccttcgaacatccggtcagcaaaccggtggttctgaccagccgggagaaggaagtgttgcagtggtgcgccatcggcaagaccagttgggagatatcggttatctgcaactgctcggaagccaatgtgaacttccatatgggaaatattcggcggaagttcggtgtgacctcccgccgcgtagcggccattatggccgttaatttgggtcttattactctctga

SEQ ID NO: 332447 - DNA, 1302 bp, Pseudomonas aeruginosa
atgctgatcatcatccactccgagaccaacaagaccaccatccggcagaacctcgggcgcccggagtacagctattacttcgtcctcaaggaattccgtccgctgctggaagagatcggccaggtggtcgaagtcagcgatcccgacgaactggtggaccgcctctaccacgactgccgcaagcgcggcgaaccctgcgtcttcctctccttctcgccgccccatcgcacgccgatccaccatgcctgcccgaccatcccggtgttcgcctgggagttcagcaccctgcccagcgaaacctggcacggcgaaccgcgccacgactggcgacatgtgctgcgccacagcggacgggccatcacccactccagcttcacggtcgacgtggtgcgcgccgccatgggtcgcgactacccggtactgagcgtgccggcgccggtctgggatcgcttcgccaaccgcgcctcgcagcaggcgggccgtcccgaagcccgggatgtgcgcctgcgcctggacggcctgctggtggacagccgccacctggacctggccgaccatgccgaccccgagccgtcggcggaggtcctggccctgccggaccgcgcggcgaaacaggtcgagctgagcctcgacggggtcatctacacctcggtgttcaacccctacgacgggcgcaagaactggcaggacatgatcagcgcgttctgcgccaccttccgcgacgagcccgacgccaccctggtgctgaaactgacccaccacaacgtcggcgaagcgctggccgacatgcttcaccacctgtacaagaaccagtcctaccgctgccgcatcgtgctgatccacggctacctcgccgacccggactacgagcggctggtcgaggccaccagctacgtggtgaacacctcctacggcgaaggccaatgcctgccgctgatggaattcatgtccagcggcaagccggccgtggctccgcgcaataccgcgatgatcgactacatcgacgccgacaacgccttcatcgtcgactcctcggaagaagccaccgcctggccccacgacccgcgcgcggcctaccgcacgctgcgctacatcaccgactgggagtcgctgtgccgggcctaccgggccagtttcgaggtcgctcgccaggagccggagcgctacgcacgcatgtccgcgcatgccagcgccagcctcgaacgcttctgcagccgcaagctggccgtggagcgcctgcgtcgcttcctcgacgaagcggcacaaggcgaccccgccgccttgcaaagcatcccggcatga

SEQ ID NO: 332448 - DNA, 960 bp, Pseudomonas aeruginosa
atggcaaatgattcacctgctctactcgttggcaaagaggtcagtccaagcgccgaaattttcgtgcgcaacgagctcggccagatgcagaaaaggctgggcgtcgttggggatctcgtacccaaactgcaatgctttcaggtaactgtagtgaaccaggccaacgaggagcggattattgatgccattcgcgtcctcctggaagaccgacaccttgaggcccagaagctaaggtacgaagcgatcattgataccttccaatcgtatgtcgacacaggcctgaaagaaattctggggcgctcccacacgctatgcacagaagctgcaggctctttttacgcgggcctcgaagcagcgctcacctctttccacccatattcatatcaaaatagccgatcctctgtagtgaaagaggcgcttaacccagttatcacggcggctgattcgtatctcgttgttttggcgatcgcatttcattcgctaaccatgattgcaccaagcgcaggccccggggagaaagtcgtgattggcaaggtgaatgcggccattgctcttctcgaaagacacctccagagagctctgctcccactgggcagccccaaaaagtcgccaatggctgccctgctctttcgaggaaacgaacaaagatttctacactactacccatattgccaggggtatgagggtcaggctgggattgtacggatggtgggagaagcgaacgagagacctgacgaggatagatggtggaacgggcacaaagtatcctcagacatttactacgagtcctatctgacttttgctgacacgctcatcttactgatcgaccgatttaaggcgctgaaggccatacgacttgatttcgatccgagcgctgggccgctcgacgatcccagaaagattctcgaccatgacggcagtgataccccgcgaatagcactgaccactagcgacgactag

SEQ ID NO: 332449 - DNA, 438 bp, Pseudomonas aeruginosa
atggcgcagcgtgcagttcgctctggtcgagctagcatcaagctggcatgccaggccttcggggttagcgtcacctgctatcgctaccagccacggctttcctcggaaaatgccgagatctccgaccacctgatccggcttacgcacaaccagcgcaactggggtttcggcctgtgcttcctttatttgcgcaacgtgaaaagccactgctggaatcacaagcgggtgtaccggatttatcgcgagctggagctgaacctgagaatcgagccgcgcaaacgcattgtgcgagagaagcccgagcctctggctgtgccggaagcgatcaatcgctgttggtcgatggacttcatacatgaccaactggcagacggtcgcagcttccgcctgtttaacctgatcgacgacttcaaccgcgagccctggccatggatatag

SEQ ID NO: 332450 - DNA, 393 bp, Pseudomonas aeruginosa
atggatatagacctatcactgccggcagagcgggtggtgcgtgcgctggatcaggtgatcgaatggcgtggcaaaccccggtcgattcgcagtgacaacggcccggaatacatcagcagcaagcttgtgctgtgggcagagaagcatggcatccgcctagaacatatccagcccggcaatccccagcagaatgcctacgtcgaacgctataaccgcacggtacgttacgactggctggggcattacctattcgagtccactgctgaggtgcaagagcacgccacacgatggatctggacatacaatcatgagcgaccaaatatggccctgggaggcatcccccaaacagaagttggccctcgcggcctgacctctacttctggtgagtactaa

SEQ ID NO: 332451 - DNA, 1344 bp, Pseudomonas aeruginosa
atgagtcatccgatgtggattgctcagcgcgatgggcatgattggacggatgactctgcgctacgcgtaattgattggttccgaaacatggtgacggaatctgtttggtcgcagcgtatggatgcagtgagggatcgattcgaggcgggaaagagagcatgggcgcaaggcaatcctgagcccctttttgatccggaagacgcaatcttctggtacctcttccaggccgctgcatacgcttcccctgatcgacgacatgactacttcgagcccgatgctttcaggattagcccggtgttcgctcggctgggtcaaatgctcccgcagctatctcatgtagttggcattgaagaccgccttgagacactaataactaaaggtaaaagccagccggatgcaggtctctatgaggttcttgttgccggtgcctacaaaagccgaggatggaaaacagtcacatttgttcccgagcagccgggtattgcgaaaacgcaggacttgctggtcaccaatggccggcgacgttgggcggcggaatgcaagcgcgtaaaccgaaacgaatatgaggagcaggagtatcaatacgccttggtcttggcgcagcctgtacacgaattatcagaacagcttgggttgtcagttctctgtgaggtgatgtttctagttgagctaaaagacgtcccaattgggtacctagggagcaggttgcgcgattgtttgtccgatcctagtttgcatgcttgggaggacgagatcgctatcggtttgattcaggacgctcggcttgatctcctgcagcaggtgttacagcacgatgatgtgttctatggctcaagcagaatgattgagctgctcgcagggcggtatcggcgggatttcgaccacagcgttaaggcgttgtgggaaccatctccacagcgccctcttcatgcatattgggtaaaccaagccagtgtggtcagctggcgtagtggatcgcctgaggccgcggagagcaaggcacgccactttcgggctcttattgcaaaagccaccaagcaactgcctactgactgccctggcgttgtgcacgtgggctacgaagcgctcggtaacaactctgtggatcaacagcgtcatgtacgcaatagtttcgaaatgtggcgatttgatccagaaggttcccggttacgctgggtatatgccaattacctgatgcccgaacacacgacggcgagaaatgagaattgggctgtcagtgaaaccaccgctcactaccgcataggtcggcataaaacggctcagccattgcccggtcatttagtactaagccaagaggatggggagccgggagatcattggtga

SEQ ID NO: 332452 - DNA, 2277 bp, Pseudomonas aeruginosa
atgtctagtcggcagctttcgccagatatcgtggcgctaattcatcacgtggagttgaacgaatctgggtggtggaagaaaggtgtcagccagatagtaaaaggcgtgctctggaagaatcatagtgccccgctagggctagacgcccttcataacgcgattcgtgccgaggctccaggggccttggggtccgacgacgagctagaaaggcaattgcatactcttcgtgatcagggcgccgtttcgatcttacccgggccagcgtacaaactgaccgaggggactttcaacgaactttcagctcatgcggccactgctcatgcggagcaggatgcatgcgagaaggactttatttccacatgccgggaacattgtccaactcttgatccagaactggtttggaaagattttactgaagcgctttcgcgtgcgatccgcgttagcggtgccaacctcttcaagctattggtcggtggcaagctgcagaatgattttgactggttgcataaccttttccacaaagtggatgccgacaaccgagagggtctgcgcaaagttttgatgttcttcttcaacccgggcaataaagtctgtcgaagccagattctccgcttcatgacggcgtacttttttgccgaggcaactcgcctcaaccctgaaacccttgccgccatcaaccaggctcgtaaggtgaaaacaatcaaggtggtgctagataccaatttcattttctcagtgctccagcttcacgacaacccagctgacgcagcagcgttatcgcttgttgatttggctcacaagagcaacgggaagcttgatataaagctttacgttttgccgagcactttggaagaagccaagcgcgttcttgtggcacagctgcacattattgagcgtatacgggttactcaggcaatgtcccgcgtagccatgactcagccgctacccagcatcgcgaaaaagttcttcagcgcagcagcctcgacagcaaatctttctgcagccgacttctttcgcccttacattgatgagcttagattcatcttggaggggaaagggataagcgtcctcgatgcacatccaaacatctaccatgtacggcaggatgttattgacgatgtgatgcacgaggtcgagagggagacaaaagaactccctgagaaacgtcgcaaagggtacgatgctctgttgcatgacgccgttctttggcatgccgtcaacgaccgacgcccccccaatcatgagtcgccttttgaaactgagtattgggcagtatccatagactggcgcctaattggctttgacagagctaagcgcgcagtcaatcgagcgaagctgccagtggtactgcatcctagcaacttggtacagctcatccagttttgggtgcctcgctcctcagaactcgaagaaagtttggttgactccttgcgcctgccgctttttttccaatcgttcgatcttgaagacgagagggctacgcttaaggtgctggagtcaatttcgagattcgaaaatgttggagacctcccagaatccgcaatccgcgtggtgcttaccaatcgggcgcttcgcgcacggatcagtaatatcgaagcctccaatcaggaggtcttcgagctggtacatgatgaacttttgagccaccaccgagacgtttcccagcagcttgaacaagccaaggctgtactggatgaaaaggagcggcaccttctagaggagcgggcggcccgttctgccgtagaaggtctgcgggacacctccgccaagcagatcgctgatctcgaggccgaacggaaaatggccgagcagaaggcccaagatctggaggctgtccaagctcagttgcgagagcgcctgcaggaagctaatgaggctacgaacgagatccaggctcatcgagaacgtgccgatgtcgctgagagatcactcacgcgtatcaagtacgtcgggatttttctcgtgctccccatcctgcttggtctggggatctacttttttagcagcgctctaacgccagaaatgctgccggtgatatccacggacacgagggtactgtgcttgcggcttttcgcagctattctcccgttgaccctagcgttctgtttttcagggaaatatgtcgagtccaagccgcacctcagttcatggaaggtgagcaattttctgagttggattggcaagaagatgatcgtagccccggcattgatcgccgccgaaggtatcttcactggcgtgacatgggatgggcttaaggtgcttctcggtatcagctag

SEQ ID NO: 332453 - DNA, 771 bp, Pseudomonas aeruginosa
atgaagtacacatcaaataccgcgatcggtgatgcaggagaatatttctttgcgtatcaaatttctcatattctcggctggccttgccggttgttcgatatcgatatcggcattgatgcacaggtggaaatactggatgaggatcggaacagcaccggaagatttgtcgctttccagatcaaaacatcagccgatgaagagccacaaccctcttggtacgtaaaaaagaagcaactcgattactggcgcgacatggacacccctgtattcattgtattgatatcactaagcaagcaaacaatgtatcttcatcacataaggaaaaaatttgcctaccatgtaactgaaaaagattctatccgcattgattttgacttagcacgagaacagttcaatgagtccagcggcaggcgcattaaagcagcagccgaagaaagcatcatgactgcaatacaggcacatctatctgatgtccagatgaagatagatgaaataaaatcagcaatcgagggaatggaagattactcagacccggagcacctcattgagataatgaatagaaggaagaaggcctacgaagatctgttacaagccaagaccctatccgccaattataaagttggggcaacccaatgcaaggatatggaaataggccttgaggaaacactgaatgagttgagaacattcatgcgggactggaatatgcatatcgactgggatgatcgaaagtacggaaacggcgaaatccaaaaattcattgacgaggcatga

SEQ ID NO: 332454 - DNA, 732 bp, Pseudomonas aeruginosa
atgattgggccacacggaagtcccggaaaactagtctcaagccacgcagggttcccagttagggtctcgccgaatgtcttaacagtagtcattcaggccctacaaaaagcatgggcagaaatctgcagcgacccagtaaagcatttggcgcctgtcactccggggaatccggaggaagatcgctatacagacgcgatttgtgagttacttttgtactacctgtatgacccatcgcttcccgtaaatggtttcacatccgatgtgttcgaaagtgttgagcgtggcgccaatctctcgaatttcaatttgggcgtgataaataagcaaccagacttagtcatacgtctagctaacagccccttggtcaacacccgccgatacgttggaatcttcgctgagaccaaagtggtttcaaagaaaaaagcattgagtaactacacacggcaaggtgtttcgaggttcgtacggggagactacgcgtgggcaatgcaggacggaatcatgattgcctatcggaagcaaccaactaggcaagttgatgcgttagatgagtcgttgaagaaagatgtttctttgttgacacaagaagagaactccaagcatcttcttcagtcgaacttgccaatacctgcttgcggcaagagcacgcatgagcggcggtggacctatcaagccggcggtgcgcctggagatattcgcctgtggcacctgtgggctttcgacattccatag

SEQ ID NO: 332455 - DNA, 3051 bp, Pseudomonas aeruginosa
atgttgcctgctgagttaacccgccaaaccattgcagcggccttgggcacacagccggatgcggtcgtgaccttcgcacaggcgtctgaggcacttcagcctgagcacttagacttcttggggctggtgaatgcttatgctcgcaaggagccgactccggacgctgtggtcctgaacgacgaccagccactgctctacatctgggacctacggcacgagccgtcgctgcatgcgcaggaccgatgccgagatatgtcccgccttgcgttgcgagcagacgctccttatgtggtgtttctgcgtcccggaactgtgcaggtgtacgctttgggacaagcgcgcgatgttgatgcctcaccgctgctggaagctgctgacctccatccgggcctgctcgcgaaactcgcttttggggacgtatctacccgtgcagacggcgttagtacgcacgcactgatgctcgagttgctgaatgtcgtgaccgaggaattgatcagcctgcgcaaggttagtgcttctgaagctctggctttgatggggcgtgctcttttcctccggttcctctccgatcgagggatcctcagtgagctcaatcccttccccggcgtaccgcggtttgtggattgcctgtccactcccgagtatgcagcgatcagctccaaatggcttgatgacaccttcaacggcgatctactgacccttccagataaagggagcgaagcctattttcgtgggctgaaggtcagcaacggcacctctgcactgaacgacctgagcgccataatccgaggcgacaagcctgtaggggacggcgcctaccagacccagttctcctggagcgacttgcacttcgcttacatcccggtggggctgctcagccaggtctacgaggagtacatccatcgtttcgaaacatcgacggccaaaaatgaaagtgtctattacactccgcggcacctcgctgagtatgtggtcgaccatgcactgggcatgttgggttcagacgcctataaggccagggtgctcgatcctgctgcaggcggcggtgtgttcttgcttgccgcatttcgtcggctcgtccaaggatactggcgagcaaaaggaaagcagccgaccacgaaggtgatccggcacatcctgaacaaccagctggtaggtatggatatcaacccggccgcccgtcagctgagtgcactggctctgtacctgacggctttggagctggatcctgatgttgggaagcttcaggatctgaagttcgagaagcttcagggacaggtgctgctcgatgctgagaactgggttgatgagcccagtggccttcgtctgggcagtctgagtcgccctgccgccgacacaatgtgcggccaatttgatgtggtcgttgggaacccaccgtggacgtccgttgctgatcgcttgaaacagagggcttttgacgaggtagcacgccaggcgatgggagaaaggggtatccctccggtgaccaatccggatggggtgccagatctgccatttgtgtggcagtccacccggtgggccaaacccggtgccgtaatcgcattcgctctgcacgcccgcttgctgatcaagacaacgcatcaaggtttggatgcgcggaaagcgctgttcagcgggttgaatgtcacgtacgtgctcaacggaatggaactgcgcaataccccggtatggccgagcaacgccgcttacttctgtctgcttttcgcacggaatgaggctgcgcaacgggacagccatttctacgcggttaccccggccgtagatcgagcactcaatgctgaaggtcgcatccgtatcgaccacaaagatgcctgggcatctgacaccgagatggtcggccaggtaccgcatctgttcaaaacgctggcgaagggaaatggcctggatgtagctctgctggagaagatacagcgagacgttaggcgcccgggcgcgccttcagatgcaggtgaatccggccagcaagccgaatcgtgtcgacctactttgaaagcttatgccgatagtgtcggcatcaaccacggccatgggtaccagaccactagcgagcaggaagcggctgatttccttattggtttgccgatgatgccggacccaacaaaggcgctgtggcatatcgtgccgactcatgagctggggccgttcgagcgcgagcgcgtccatcgtcggcgcaatgccaagatctatgaacctccagtagttctactaaggaagtcgcctagtaccaatctgaacgcgcctgcagccatgttggccctagagcgcgttgcgtatcgtgagtcgtacattgggtacagttgtgcagcagtagcagagcctcgcttaatggcggtatacctctgggcgctgatgaacagcaaactgttcctgtactacgcgctgatgacgagcagtatttttgggtgtgagcgcgaagctgttcagaagtccgacatcgagcagttcccggtaatcccactcgaatcgctgcatgaaaagaaccttgatctactccgtgagcttctcgttaaagtagagtcgcgccagcttgatgcaaaggatatcgactcgatcgtcaatgcaatttaccggctagcacctgcagacgtcgtacttgtcgaggatcgactagctaccgcgctaccattttcccaagttaagaggtttgcagtatctcctccgagcgagaaggaagttgagcggtatctggagtcacttgaaaagatacttaagccttttgacttcagcgagcagcccttggagctggctgcggtcccacaaagcccactatcaccatggcgattcatcagaatcggagggcctgccacaggccatctgcctaaagcgtctgaccttcttgcgactctgaacatggcagatggtttgggatgtacgctggtggagtttcatgaggagggcgctatgtatctgggcgtcttgaaccagcgacgctactggactcgaacagcggcccgcacatttgccttagatttaattaagcgcaatgacgagattctcaaccgagtgacaaggagcgcggttgctacatga

SEQ ID NO: 332456 - DNA, 156 bp, Pseudomonas aeruginosa
atggtgctcagcgctctccactacctcgggaaagagggagtgtccacccaggtcgtttccaagatcaccaatgccatgaatggcgatgagttgctcaagctcagagcctgcagtatgcctgcctggatgcggtcggcattgcttcttataggctga

SEQ ID NO: 332457 - DNA, 1056 bp, Pseudomonas aeruginosa
atggaatgcttccacatcgacgagagtggctacaccgggttcgatttactcaaccctgagcaacaatttcagggagccgcagcagtggctattacccacgatgaagctgcgcggctgattcgcacgcacttccccaaactacaggcgccggagctcaaataccacgcgctggcacggcgtcctggctaccggcagccgctactgaacctgcagcgggccgtgctggaccagcacaagtgcgtaacctacatctgcgacaaacgctacctgctgctgctcatgttcatggactacgcagtcgagccgttctactacgagcgtggtatggacttctaccaagacggccagaactacgcattggcctcgctgctttacacagtcggccccaccttgctcggcaaagagggcttcgatgcaatgctcgcagccttccagcaggctatcaaatcgaagactccgcaagccctggaggcgttggttagggcagtcagagaactggactggcagcaattacccgaagcgctcggcccgctcgcactagcggcacctgaatgcctgtctgcgattgccacaccgggcgtttcgaccgacgcggcgatggtggtgcttcaatctcttatcagtcggatggaggtaatggcggcgggaccgtaccgagtcgagcacgaccaatcgaagaacctcctcacgtaccacgaactgttgcagcgctacatcgaccaccaagatgagatcgaattcaggcagacacaaatcgcgggcatccgttttccgctcaagctgtcttccgtgacccaagtcgactcgaagaccagccccgccgtccagatagctgacgtcatgatcggggctgccatcgaggcagctaacggattgacctgccggcgcacgccgctgctagacccacaggccgtgatgtcgctctacgcagaagatcaatttatccacatgttgccgtcgatcaacttcgatgaacagaaacgattccgtgaggggactcaggcggcggaaatgatcgattacttcgccaagcactttggcaccaaaacttcctaa

SEQ ID NO: 332458 - DNA, 1731 bp, Pseudomonas aeruginosa
atggcaagaatcagaaaaatcgagatcgccaactttcgcagtattcagcggttggtctggtgcccgacgcccggtatcaactgcttgatcggcccgggtgacagtggcaagtccactgtgttggacgcaatcgacctatgcttgggtgctaggcgaaatatccagatctccgatgccgacttcttcagtctggacatcacgaacccgatcagcatcacgctaacgctgggcgacctcgatgacagcatgaggacgctagaaagcttcggtgcctttctgcgcggctaccacaccgccactggtgtcgtcgaagacgaaccctccgctggcgcggaagttgtgctctgcctgaacctgacggtcgccagtgacctggagccgtcctggaccctcatttccgaccgcgccgcccaacaaggcctggtgaagtcactagcgtggaaagatcgcgtggcgctggcgcccacgcggatcggggctcttgccgactacaacctgagttggcaacggggttccgttctgaaccgcatctcggaggagcgggccgatgcctcggcggccctggtcaaggcggcgcgggatgcgcgctccacttttggcgaccaggccgaacagcagttgggcgaggcgttgggtatcgtcgtcaccaccgctcaggaactgggtgtacacatcggcacgaaggccagggcgctactcgactcgcattccgtgtcgttcggcggcggcaccatttccctgcacaacgagggcggtatcccgcttcgcagtctgggggttggttctacccgcctgctagtcgccggcctgcagcgcaaggcggccagtcaggcgtcgatcgtgctgtcggatgagctggaatacggcctggagccgcaccgcatcgcgcggttcctaggctccctcggtgcgaaggaggcggctccgctgcaggtgttcctcaccacgcattcgccggtggcgctcagggaactgtcgggtggccagctattcgtgctacgcggcggtccccacggccacgaggcccgggcgattgggactgacaatgacatccaaagcaccattcgcctgtatcccgaagctttcctggctcgttctgtgatcgtgtgtgagggagccagcgagatcgggctccttcgaggcctggatctgcaccggatagaacaaggcggtgtgtccttggcggcgcagggagttgccatggtcgactgcggtggcggcgatgcagatcgtccgtacgcacgcgcagcggttttccagtccttgggctatcgggtcatggtcgtgcgcgatgacgacaaacagcccacggccgccatcgaacaggcattccttcagcgcagcggtaccgtcgttgcataccgcgcaggcagggcgctggaggacgagttgttcagcagtctcacgccggcggcctgccagaagctgatcaactacgcatatgatctacatggcgacctgattcacgagcaccttcggacggtctcgaacaatacgcttaccattcaagccgtctggaacgagattcagaacaccaacgcgctgtcggtgccaagccgaaccctgctcgggcaggcggcacgtatccgcaaggctggctggttcaaatcgatctcctggatggaggacgtggcgagaaccatcgtggcgcctgacctacctctgtgcgatccgggcttcaacgcattgatgagccaagtatcaggatgggctgctcatgggcctcgttga

SEQ ID NO: 332459 - DNA, 1419 bp, Pseudomonas aeruginosa
atgggcctcgttgaaatcgacctgcgtgcgatcaatcgcggcactgtcacggcaccggccggctgcggcaagacgcaattgatcgctcacgcactggccagccaccgaggcagcaaacccatcctcgtgctcacacacacaaacgctggtgtggcagccctgcgaggccggctcgatcgtgcaggcgtgccgcacagtgcctatcgattgagcacgatcgacggctgggccatccgcttgatcgcgagctttccgggccgtagtggccacgatcccgacatcctgcggctcgccacgccggctcgcgactacccggcagtcagggaggcggcctggaagttactacagaccgggcacgtcagcgaggtactgaaagcgtcctatgcgcaactcatagtcgatgaatatcaggactgctcggtgccccagcactacatcgtctactttctctcgctgatcctgccgacctgcgtgctcggcgacccgatgcaggccatcttcgggtttcgtggcaatgcccttgccgattggaaccagcaggtctgcgcgcattttccggtcgtggccgagctggctacgccatggcgatggcgcaatgccggcgctgaagcgctcgggctgtggttgttagaggcccggcgtttgctggccgccgggcagcaggtagacctgcgcaccgggccggcagcgcatgtaacatggactcaagtcacaccatcgaacgatcacgcacagcgactggccgcagcgcggacggcaccgcctactccagatggccacgtgctgctcatcgccgatagccgcaatcgtgcgatccaacaaaatttcgcgagccagacaccgggggcgtcgaccgttgaggccgttgatctgcaagacctcattaccttcggtagctgctttgatgtggcttcgccggatgctctgggacagcttctaaccctagcgcagagcgtcatgaccaacgtaggtgtaccagagcttacccggcgtctggattcgttagcgcgaggaaccgccaggaatccgccgtccgaagcggagagccgagccttggcattcctgcacgcaccgtctattgccgccgccgctgcgctgttgtcggagctgcgcgccatgccaagcgtgcgcgtgcaccgacccgccattctctacagcgtgctaaaggcattgcgggaggccgcaccaggaaccataccgctggcggaagccgccaggagagtgcgggaagaaaaccgactattgggccgacctttacccaagcgtgcagtgggaagcactctactgctcaaggggctggaggcagaagtagcggtagtgctgaacacagagaatatgaatgcacagcacctgtacgtagccatgacccgaggatcgatgaagctggtggtatgcagccctgatgccatggttggataa

SEQ ID NO: 332460 - DNA, 246 bp, Pseudomonas aeruginosa
atgaaacatcatttggtggtcgaagactgggagggcgatggcgccattcgcttgcccgacgacgttctgcaggagatgggagtcgatattgggagtacgctctacttacttgaggagtacgtaggcactacccgctgcctagtgctcagtaagacgccgcgcattcctgatcgcgttgatgagctggttagccaatgggagttttacggcgaagctccaggcgacttggcagccaaggatggatga

SEQ ID NO: 332461 - DNA, 447 bp, Pseudomonas aeruginosa
gtgtttaagaccaatcgcaatgcggagttgcttcctgggctctccagtggtccagatggcgtgcaattctggtcatttgtcgagcaagaggtggcctggccttggttctaccttcagatggtcgaggatgatggcagggatgcctttcaaagcatgctgatggttcccaccctcccattgcttgagcagatcgtgggagcaaaaagcgatcatgcctggattgaacaggcccaactcgtgaccccagcgcacataaacaagacggggcgctggatgatggaaccgctgctggaggtcagcgcgatccgtaacgagcaagggcaagagcttgggtatgagtgtgtagtggagggaggtcgaacgtactccatctcagcagacaagctaccagacggacaactgaacaatcacacgatcttttctgcggcgttgcatctgccgaagtaa

SEQ ID NO: 332462 - DNA, 1257 bp, Pseudomonas aeruginosa
atggcgcaagcgatcaaggatcacggtctgacttcagtgtttgccggtgaatttgagtgttctcgtaagaggaacctgcaacgggtcttgatccagatgcagtatgttcttaaaacggtgatccacctctataccggcatgcgcgatcaggaggtgatgcgaatgccttatcactgtttgtccaatcaagtcgttaggccgttggtcgtcgatgatcagggcattgaacgcgataagccgcagtcagtaaacgtactctcgtccactacgaagttcatcggttacaagagagaaagcatatggtacgcgccgggggaagtcgtccgggcggtcggagtcgctcaggcgatttgtcgcggcctcgccaaactctacaaaattgagttgggcgctcgttgcccgctgtttctcaatccggcgattgttggtttaacgcggaacagtgccgaagttggcgtgacgcgctttatgggtagagcgacacaagaaactgctttgcactcgctgtcgatccaggcagaggatttgcaggagctggcgcagaccgacccttctagggacttttacaatgagccggcgtttgctgtcggccagccctggcccctgacaagtcatcagtttcggcgctcgctggcattttatggcagtagtagcggttttctttcgttaccgacgctgcgggcacagttcaagcacatgacgattgaaatgtcgcgctattactcgaatggctacgataacctgcgcaccgtttttggctactacgacgataagaagaaagactttgtgctgccaagcaatcacttcgccttcgagtatcagatggccatgcctatgtcggtggcgaatcagttgatagccgatcttctatttagtgaggaaccgctgttcggcggcacaggatcatacattgagaaacagaaagagcgagtcaaagcgggggatattcagattgaagatgtgcgtgccgacacagagcagcgggttaaaaacggtgcaattagctaccgtccgacactgctcggtggctgcactaaggtgggccgatgcgactcattcttgctaggcgtctacacggaatgcctgtcttgtgagggcgcgatcatcaagcctaataagctcaatgcggcgattgaagatgcgacggatgagttgtgcagttacgcagaaggctcgggcgaatatcaaattgtgaagggcgatattgagcgtttaaccgcctttaaggcccgcctgattgacttggtggaggtttaa

SEQ ID NO: 332463 - DNA, 1242 bp, Pseudomonas aeruginosa; identical to SEQ ID NO: 330606

SEQ ID NO: 332464 - DNA, 1137 bp, Pseudomonas aeruginosa; identical to SEQ ID NO: 330604

SEQ ID NO: 332465 - DNA, 789 bp, Pseudomonas aeruginosa
gtgaagacggtaatttttccggaagtactggtacgggccgcccaactggaaggcgggcgcctggagggagcgggcttgacggttggcgagctgctggcaggccttgccaggaagcatccttcattactcgggcacctgtattacgaaaacggtcaattgaaagaacacttcctgctgacccacaaaggttcgctagtcaatctggatggcgagctttccgatggagatgaagtcgaagtcatgctcgcgacatctggcggttctggcgttgaagcgttgagcgacgaagaagttcaacgctacgttcgccacatcacgttgccaggcgttggcagggaaggccagcagcgcctgaagcaggccagggtgctgataatcggaacgggcggcctgggttcgcccgcttgcctttatctggccgcagcaggagtgggcaccatcgggctggttgactttgacgtggtggagtcgagcaatctccagcgccaggtcgtccatggctatagcacgctcggtatgccgaaggttgagtccgcccagcgccggatgcaggacctgaacccctacattgaagtcgtaacccaccgttacgccatcgacgcggacaatgcgcagtcactgattcagagctatgacctggtattggatggcaccgacaacttcgccacacgttacttggtcaacgcggtttgcgccaagctcggaaaaccactcgtctttggcgcgatctatcggttcgaaggtcaggtgatgccgcgcgcgaaaaatacgggcggtgatgtgagataa

SEQ ID NO: 332466 - DNA, 795 bp, Pseudomonas aeruginosa
atgtccgctcaacccatcatcccgtggatagggggtaagcgtcggcttgccgacaggatttttcccctattccccagacacagttgctacgtcgagccattcgcaggtggcgcagcgctgttcttccttcgaccggtcccggccgaggtcgaggtgctcaacgatatcaacggagacctgatcaacctctaccgggtagtgcagaaccaccttgaggagtttgttcgacagttcaaatgggcccttagtagccgacaggtgttcaagtggttgcagatgaccaggccagagaccttgactgacatccagcgcgccgcccgattctattatctgcaacagagtgcgttcggcgggcgggtggatgggcagaccttcggcaccgcgactaccacgccgcctgggctcaatttgctacgtctggaagagacactgtccgcagctcacttgcgcctcagcagtacctatatcgagcatttgggctggcaggaggtgatgaagaagtacgaccgcgagcacacgctgttctactgtgatccaccttactgggagactgagggctacggcgttcagtttgagttcgagcagtacctggaaatggccaagatgctgaaggcaatcaagggtaaggcgatcatcagcttgaatgatcacccggcgatccgggaatgcttcgccgactgtcatatcgaagcgacggaaatcaagtacacagtcgggggcggcaaagggagcgatgcgaaggaagtgctgatcttcagctgggacatccaggctgaacctgcaggtcttttctaa

SEQ ID NO: 332467 - DNA, 636 bp, Pseudomonas aeruginosa
atgaaatatgttgctccctccctaagattgaaggtattcacctgcccgttttgtcacgcatatgccaccatgagatggaaaaacgtctgtgtggagcatttcagtggtaattatgctcagattccattcgctcagtgcgaatgcttaagctgcgagcaacctagcctctggaacaccaatacagggaacatagtcacaccgtctgtggttagcgctccaatggctagctctgatcttccagatgagtgccgtatagacttcgaagaggctcgccaaattcttgctgcttctccccgtggggcggcagcgcttcttcggctatgtattcaaaagctatgcgtggtcctgggcgaatctggcaagaacattaacgacgacatcaaatcactggttaccaaaggtctgcctgtgcagattcaacaggccttcgattatgttcgcgtgaccggcaacaatgctgtacatccaggggaaatgtcgttaaaggacgaccccgagacggtgagcataatgttcgaaatgatcaacctgatcgtcgaagaacgtatctctcgcccgaaaaagctcgaagagcactacggccgcctaccagaaagtgcacgggcggcgatagaaaagcgggacacctccaagtaa

SEQ ID NO: 332468 - DNA, 237 bp, Pseudomonas aeruginosa
gtgaggcgccggggaaactccggagcgccgctgggcgaacgcgacgacagccgcctggcgccccgcatcaacctgcgcggctactggctgcaacggccgggtttcaaggccaaggaccggaccaggacccgggtgaggcagggcggcctggcgatcacggcggagcgaggggaggggacgccttcggttggactgaggcgtctctgcaacgtcggagacaaggcggtggctggctga

SEQ ID NO: 332469 - DNA, 1824 bp, Pseudomonas aeruginosa; identical to SEQ ID NO: 327718

SEQ ID NO: 332470 - DNA, 402 bp, Pseudomonas aeruginosa
atgacctggcgcgtcggcctgattgtctttgtgctcctggtgatggtctggaccgccggctggtggggcggtcgcgaggcaggcctggccgatgggcgcgccgcctgcgccgacgcacagacgcgcgcttatcgcgacgtcctggagcagtcggcggcacaactgaagacggtccaggacaccagcgcggctcttttccagcgcctggccaagcgggccgacagcgaccaacaaactactcgggagcttcgtaatgccctggccgaaaccgctgctgatcgcgctgcctgccgctttcctgctggcgtcatgcagcagctcgaaaccgcccgtcaacgtgccgccaaggccactaccggcggccttggctcaaccgtgcccgaccccagtggcggtgactga

SEQ ID NO: 332471 - DNA, 1938 bp, Pseudomonas aeruginosa
atgaataaccgtcagcaatttgagcatcgtgccaatacacagattattactctgggtgaaatcacccacgagtttgccgagcctgagcgcttgcgtctgcaactttctccgaaggtgctgaagaaaccgtttgatattggcagttttgcgtatgtcatccgtggcaagaatgaaagcatttttgatgaccgcggtacaccggtagggattgaatcttttgttgaaaaccgccgtgaactgattatgaggctgctggagacctttgtgggtcagcgtgaactaactgtgctgactagattgagaaacaccgaataccttattgactggttgaacgcaaagggctacagggaactttttgccagtgcagcgcaagcccagcaagcctatcgagagtataccgcgcacctgaatcatcaaataaatcatcagaagttgaagcccagcactgggaaaaatatgcaggtctttttttctatgattattgaactactttacccagaaggcagccaccatattctagcgggtgcggtctcgatcattgccgaacgaggctctgaggaggctgccagaactgcccatgttgatatgtaccgggacgtttgtttggccattgcccggcaatgcagcgctttcgttctgaatggtcagtcatatcccttggttgtgagtattagggactatgaggtggttgggttcccatcaaaccacggttgggttggcccattcaaggaatcgccgcttggatacaatgccagcgcgcgacggattgccacggtcgaggaatacctggcggcttctgaaaaactggggcgaaagcgaccctttaaatcgacagtaaagcgcgcgctagcagaggcaaaggcggtcttagatgcggccaaccgagatgagcgctattggcaccggcttaacgtggcgggtcttgctgtgaaagcctatgccagccttttcctgatgatcacaggtgccacgccgaccgagtttcaacagtttaactatgcagatgcgctcgacattgagaagtctccgctcaagaaagagttgtcggctgtgaaattccgtgcgagcgggaaagcaaccctttacagcatcgggcagggcacgggtttgccactactcaaggagtacttgaagcttcgtgaatggattctgaatggcgcgacacatgagcggttgttcttttcgatgccctcggctgatgaacgagtcagcgatagtaaagaattctctgaatttaacgtggtttatttgctgccaaaattctttaaaaccatcagcggcaccttcctcgaccccaaggtgccgagactttcgtcgcgcaagatgcgcaagtacaaaagccttgtgatgcacgcagctggcgtgtcgccgtccacggtagcggcaactttgaatcacagcgtggcggtgaatctttcgacttattcggaggctactcctgagcagcaggaagccgagttcggacagttctggcaggccatgcgccatgccgccaaagtcacggttgagcgcagcctgaggtccgcggagggcgagatcacaacggcgacgggccactgtgacgggttcaatcagccgatccccctgcgtgatttagggactattgcaatcaagccgaactgccgcacccaatatggctgcttgtactgcgaacactatatctgtcacagcgatgaagaagacctgcacaagattttgagcttacagtatgtgatcaattcggtgcataaagttgcgcccgatgcgccccatgctgaagcgctctacaaagaattgtcgatccgagtcgagttcatccttgaggcgcttgccgagcgctcggatgagattaagcagttggtcgaggcgataaagaccaaagtatttgaatacggtgaactcacacctttctgggaaagccgcttgagccgttatgaaaaaatgggggtggcattttga

SEQ ID NO: 332472 - DNA, 1056 bp, Pseudomonas aeruginosa
atgattaatgaaggcgcccgcagtaatcaggtaatcaatcaatacacaggcgttatctaccacttttacaagtacgtttccgagcattggcatgatctcgacatgaagcgtgtcgatacgattaagcaggtgcgcttcatcgtgcggggggctaaaggcgtcaaggtcgtagatgcagaaaagcgcagtcaaacgcgacgcacgccgccggttagttcagtgcagttagggttcgtgcgggaagacggcgaggatcttaggccgctttccaatcttgaattgggtgcttttttgtccagcattcgcaatgaaaaagaatggtctgcggttgaacgattgatcctgatgacctcgctaatgacgggcgcccgtaagcaaaccgtcctgaccatgcgcttaaaacatttgaaaggatttacagaggacaaactggagccggaaggtgcatataaattacatgctggccccggcacaggaattgatacgaaatacgacaagccgcaggctctgtacgttccaaagcaacttgccgaagaactcgtgacgcttgccaaaagcccaatgatgaagaaacggaggggaaagtttctagctcggttagaagcaagtcatcccggcttctcggtagctgaaggcgatatgtatttatttctttccgatcaaggaaattgctactacatggccaaaagcgatccgcgctatacgattgtgaagtcgccgcagacaggacaggtagcggaaacgattaaacgcaagttgatcacaaaggtctctagcccattcccgaagaacttttcatatcactggttgcgagcgacctttgcctatcaactctaccagcgcttgcaggtattggttcgggagggtgcgctgaaaccgggcgaagatattgactttattcagaagcgcatgcaccacgagtcaagggaaacgacagagaactacctgaagttattcaacatgactcacgaaaaggttattgcccaagatatttgggaggaaaaactgttcaatggcagctacgcgttgctgaaggtggtggcgcgcgatgaataa

SEQ ID NO: 332473 - DNA, 3348 bp, Pseudomonas aeruginosa
gtgccgcttgtccaatggatttcagactttttatctaggcgtggactgcaagagccggatggtcgccccctattcgcctataagacctcatcagaagaattcgagacactgcgtcagctcttgcatgggctcaacctggggcaacacgcgcatcccgaatatgctcaggcctggctactctttgcggccgaatggtggaagcgcgaatatccgggaggagcatggcgttggggaccactgtgcgaggcagctggccagagaaaggtagctcatgagaagacccgcagcctggtaattgatgggcgtcgtcagtggcgtctgcaaaccactataaaaagtgaaggcaaacgtttcatcggcctggtcgcggtgaatggcggcctgcccatgcgccttgtcgagtcggcacagggcgggttatcccgcctgctacgcatggtcactgagcaggcactggaataccgcctgcaggatgagcgtctgcgccaggccatcgaggcccaggccgagcttttgcccgcctgctaccagcaggcgccggtctacgaactgctcgacagcttggtcaaggcggtgctgcacatccgcaaggcctatgccctgcagagcgcccaagacccaatcgcccggctgcaggaagagtgccctcactgggaagagctcttccccatcgccctcgattcccaggccgccgccagcctgatcaagggtctggtccgggatacagtcagcatcacgccccagtcgcggcggcctcctttccagatccagcgcggcctgcgcttcagttccgatggctccatacccgtctacgagctgtccttcgtgatgcaggctcaggccaggcgcgatcaggttgccgaggcgctggggatggccgtggatgcgctgccgccacacttccagctcctgctgcgcatcggcgagcgggaatacctggtcggcgaagccctgcttagagacgaggaataccagctgatcgccaggccgctgccggccatccacagcctgcacaatgccgcgcagctgatcgtcagccgctggggcgccaccctgcacattgccaacctaccgggcggcgaagccttgagccatgacgagccgctgatcttcgagaatacctacccctttgcccgcctgctcgcccagggcgatgcgctggtcaagggcgagtcggcactggcggccatgccggcaagaaccatcgtgtatgccgaagaaggcgaggctcgcgagctgcatgactgcctggccgacgggcaaatgctgatggaacttcccgccggtaccacccggctcacgtacaaacaacagcccttcgttgtcaccatcagcgccagcgctacccgccacccggaagcctactggcatggcaacagtctggaggcgctctccgtgccggggctgctgttccgtggcacgccgcgcctacgcattgagcagggaacgggcttttccagctatgcgcccgcccatgagctgtttgtccgcacgcagggcaaggagctgccgctcgcccaagcccgggcgccggggctgtgccggctgatctggcgcaaggatggccagcgcctgctgaacacccgcgccgtgcttctcccggacgaagcctccatcacctacgcgccgggcgccactaccctcgagggcagcattcgccttcaccactggcctgatgtgcccgtgcgctgcgagagcgaacagatcgcgctggagcgccgccatgatggaacaggcctgaccctgcggctgaagagcaccggcagccggccggccaccacggttccgctgtgcctgcagtggcccgacggcgagcagaagctcactctgcccttccccggctatggcgtcacgctgctgcgcaacgacactcctctcaagctgaatcaggccctgaccatcgaagaactgatcggctgccgcgcggtactgatgtcggctcagggcgccgaaaactggcggattcgcctgacctccagcggcaccgactcacgctccaccctgtcgcaggaaattcgctacaccgggatccgcgaaatccgtctgttcgagctgattccggcgatccagcagatgatgtcctgccacccggggctcgatcatgtcgtgcagctagagttgattcatgcccaccagacccacgctcgcctacaggtgggccgctactcgacgcgcatccgcctgcacagccagcgcgagatggcgtcactgaacgatagcggctccgacgttctgcttgagcagccgcatgccgagggtctgatattgggcctgccactggcagaaccggaacatgacccggtcagcctgccgctgcatttttccgaacaggtgttcaccggcagctggctggtcagcctgccagacgatgccgtcggcccttggttgctgtacacctctgccgagtcaccgctacacagccgtgcgaccatcgtgccaccgaccgcgagccaactgtcgaagcccctgaccccgctgcgcgaggcgctctgcgaaggcgatggcgaagagcgcatgcgccagctcagggccgcgctgcgcgccatggccgcagacccgcaggctgatgactggcaaacgctggagctgctgctggatcggctgcaccacctgccgctggccagcctggatatctgccaggcactaatccgcgagccgcaggcgctgaccatggccaccctgctgctggatgatttctccagccgcctggccgagcgcctgccctgcgagctgcccttcgagtggctgctgatcgccccggagcactggttcggcaccttcgcgacactgcgccagcaactggccgccgacaatccgcgcatgctgtcggtaatccgcaacgacatccagagcaagagccagttcctgtcccgctggcagcccgcgctgcgcttcatcttcgatcagggcctgcaccactccttcgatctgcaaagcccggatgtggggttcttcctgaaaaacccggcgatgctcaccgcctcctggcagtcgtacctgtttgatggcgagaactcggccatgcagcagatgttccggcgcaaccccgccgaaacccatcaatatcccggcagcggcaatacggatatcggagccttcctgaaaacgccccacgggcaaatgctcctccgctgctgcaagctcccggccaatgacttcaagctggccacggtcatgctgcccttcatggccgccttcgatacctacgccggccgcgggcagcaatggcaagccgacccgccacgcctgttcagcctcagaaacgctcgccagttcgataccgtctggttcgactcggtctatcaacttggcctggccatggcgcaagccgcctcgatgcagaagtga

SEQ ID NO: 332474 - DNA, 6216 bp, Pseudomonas aeruginosa
atgctctatcagaagaactatttctccgctctcaccggcaacctgagcacccgcagcgagcgcgccgcccagggcctgctcagtctaggcaatccgcagctgcggcagttcctgcatgatcagctgaccgccgcccccggcactccgggcgcctggctggccgacccggtcttcgaaccgaccttcggctggcaggaaagctctgaaaccatgagttcgctggccggcggtgacctactacaccgacgccttgccgaagccatggcggccccgcccaaggagccccatgatcttgcagaggaatatgccttccccagcaatcgccatcctttcacccaccagttggcggcctgggagattctcaaccgtcccgagccgcaatcgctggtggtgaccagcggcaccggctcgggcaagaccgaatgcttcctggtgccggtcctcaaccagctggccaaggccatcgacgcgggcgaagacccggaaggcgttcgcgccctgttcatctatccgctgaacgcgctgatcaactcgcagcagaaccgcctggatgcctggacagacggcttcggcgggcagattcgccactgcctgtacaccggcgcgctggagaatgagcgcaagacgtccgaccagcagtacaagggtcaggtgatcgaccgcaagagcctgcgcgccagcccgccgcaactgctggtgaccaacgcgaccatgctggagtacatgctcatccgcaaggatgatgagccgatcctgcagaagtcggccggcaagctgcgctggatcattctggacgaggcgcacactcacatcggctcccaggccgcggagatggcgctgctgctgcgccgggtgatgctggccttccaggtcaaaccgcaggatgtgcgcttcgtggcgacctcggccaccttcggctcggatacccagaccatcgagagcctgcgcaccttcctcgccgatatcggcggagtggatccgcagcaggtgcatgtcgtgcagggtcatcgggatatcccggcgctgctgaacgccacgcccgatgccgagcaggacacccctgaagccatcggcgccatcgaggcggaccaggagcagtcgacgctgcgctaccggcgtctggaggccagccccaccgctcggcggctgcgcgccctgttcatgcctgatggccaggtgaaaccacaaagcctgcaagggctgatccgtgagtccggtctaccctcggcgcaggtgctcgcctggctggatctgctgtccggcaccaagagtgccgagggcctgtccttcctgccgctgcgcgcacacctgttccataacgtgattccggcaatccgcgcctgcgtggaccgccactgcagccacaaggccggcaccgcgctggcacatgccgactggccgttcggcatggtctatctggaggagcggactcactgccgctgcggcgcgccgctgatgccactggtgtcctgcgaggagtgcaacgagagcttcctgcaggcggccaccaaaagcagtagcagtgctctggtcgatccgacacagcaacaggacgacgagttcgctctcgaagatgaaaccacggaggccgatgatcagaccaaggataaggatactgtgtcatccatccagatcctgatcaccaatcgcgccgtcaagaatggcagtgcagacttcctcgatcgcgccactcaccgactgacgcccaatcgtccggcggatggtggcatcgagctgcagctcttccgcactgccaagaacgaatgcccctgctgtggcgccaatatccagggccgcagcctgctgcgccccacgcgcatcggtacgcccttcaccctcagcacggtgatcggcaccctgctggagttctgcccgccggatccgatgccgaccggcaagccgttccagggccgcaagctgatctccttcaccgacagccgccagggcaccgcacggattgccatcaagctgcagcaggactccgagcgcaaccggattcgcgggctgatctatcagcgcctgctgcaggcacaacccgtcaatgggctgtccgcagaggacttgcaggacctgcaagaccttcaaacagcaacgcaactgagtcgtatcgagcagaaacacctgcagtctttgctcgacaggcaggctgaagctacaaagggcgcggaaataagctggacagatatggccaaccatctggccggcacgcctgagctacagatgggcatgctcgactactacaacaacctcgcgccgaacaccttcggcaagcaggacagtgtcgccctggccagcatgctgctggcgcgcgagttctatcgccgcccgaagcgcgccaacagcttggaaaccctgggcctggtacaggtctgctatcccaagctggccaacgtcaccggcaaacccatggcctggcccgcgcacctggatgccgagtcttggcgtacctacctgaaagtgctgctggacttcttcgtccgcgaaaacaccatcctgaacatcaacgaacgctggcagtcactgatcggcgcacgcattcgccccaaatgggtagttgcgccggtcttgggggaaaagcctgaaaagctgcagagccgctttgtccgctggccggcggtcaataccgtcaatggcatccagtcgcgggccatcctgctgctctgcaaggcgttcaactggtcgaccgcggcccatcaggaccagatcgactcgatcctgagcgaggcctggcgggtactgacccagcaggcaaagctgctgatttcgtcaggcgacggctatcagctcgacctcaaggacctgagcttccggctgcccgaaacggtctaccagtgcccggtatcgcggcgcttcatcgacaccccgttcgagcagctcagtccctatacgccacgtaccgaccgcgagatggtcgtcaaggtgacgccctacactctgccgcgtccgcccgaggcgctcctgcatgtgccgggtgatgagggcctgctggcgatccgcgactggctgaacagcgagccgcagatccagcagctgcgcaaggacgcgctctggtcggacgtcatggaccgggtcatcgaggggggccactacttccgtgccgccgagcactcggcgcagcagccgaagagcaagctggacagctacgaaggcctgttcaagaccggcaggctgaacctgctgagctgctcgaccaccatggaaatgggcgtggacatcggcggcatcagcgtggtggcgatgaacaacgtgcccccgcacccggccaactacctgcagcgtgccggccgtgccgggcgccgccgcgagggacgctcgctggccctggccgtctgcaagaacaccccgcacgaccagagcgtgttcaacaacccgctctggccgttcaacacgcccatgcgcatgcccaaggtgtccctgcagagccccgatctggtacagcgccacgtcaatgcctggctgctgtcgcactggctcaagcacgtggtcgccgcccaggaaatcaagtcgatgaccgccggtgccttcttcctcgacggcgaactgcctatgtcgctggccgcgcgtttctgcctgtggtgcgacaaccaggcggtcgataccgaaacgctggtgggacaggccctcaaggacatcacccgccgcagcatcctcgacaccaccccgcagcccgagctgttcaagcatgccagccgccgcatgaaagagatcatgcaggcatggcagcaggaatactcggccagccacgcccagctgctgcagattgccgacaagaaggccgctgcctaccgcgccatggatgcacagctcagccgcatcgcgaaggagtacctgctcagcgagctggctgaccggcgcttcctgccgggctacggcttcccgaccgacatcgtcagcttcgacaaccgctgcatgcagaccttgaagcgggaggacggcgaccagcgcgaggacaaccgcgcccgttaccgctcgctggcttcccgcgaccgcatcaccggcctgcgcgaatatgcgccgggcgccgagctggtcatggatgggctggtctacaagtcctccggcatcaccctgaactggcacgctcccgcgtctgccgaaaacgtcaaggagcttcagctgttcaagaaggcctggcgctgtgggcaatgcggtgccagtgactcggccatcaatcccggactggagatcaactgccaggaatgcggcgcgccgatcgagcgcgacaacatccgtgaatacctggtgcctgcaggctttgccgtggacttcttcgacgagccgcacaacgacatcagccgcctgcagtatgtgccggtcaatgcgccctggctgaacgtgccggccagctgggtctgcctggccaacccggcactcggccagttccgcgccagccagcaggcgcagctgttcaactacacctcgggcgccaaccagaagggctttgccatctgcctggagtgcggcaaggccgagcccatgctgagctatcccgatgcatccgcccctgccaatgaacagtatctgccggctattttccgccagaaggcacagcaccgccgcctgcgcggtggcaaaagcaatgaacaaggcgacgggacaaacatctgccccggcagccacaacagctggaagatcaaacagaacgtccaccttggccatgacagcctgaccgatgcgctggaactggtgctgcgcaaccctaccagcggcgaactgctcaacgacgatatcaccgcctactcgattgccgtggcgctgcgcgaggcgattgccgccgatctgggcatacaaaccgaagagctgggctgcgcaagccatccgatcaaggtcgatggccagccaacccgcgccatccaggtgttcgacctgcgcagcggtggctacaccacccaggccgcggagcggctgaatgaagccagcctgtggcgaaaggtcatcgctcgtctggacagctgcaactgctcgcatgcctgccagaactgcctactcagtttcgatacccgcttcgaggccgagcgcctcaatcgtcacgtcgcgctggagtggatcaatcagacttggcttgccggcctggcgctgcccgccgagctcgctgtctttggtccgaaaagccaggcagaaatcgccactctacaggaagcggtcgaaagagcgattactagggacgacaacgcgaagaccgtagccatttacttcactgcacccgccgaagagtgggatcttgctgtcgcacgccgcctgaggcatcaactgcatagctgggaaagcgtcggacacctagtgcaattacatttactggaaagtaccgtttccagcctgccaagagaccaaaaggaatggttggcaaagctagccttcaacggagtacagatatgcctacacaattccataccggatctcggggcgctggcactcaatgtctcactgcaaggcccacaaggctgcattgcctgggctagcgacaatacgaacctggccgcacctggccacacatgggatctagcggaggccggtgcacggatcatccgaggcaccccctccgacctcaaggcagagcgcatcttgaatgctgccgatctcatgccggccccaccccctggcttgatcaagatcgagatcggcaatcagctggatggctcgctcgacaactttgctcgtcggttctgggagcacctaggtactgaggccaatggcctgattaatgatgccctcacaggcaaggatccaattacagaactggtttacagcgaccgttacgtatgcagcccgctagttgtgaatctgctggtcagcgtgatccacgagctcggacggctgagtgatgcagatttcgctatccgaatcctaggccgacaatatcagcgggaagacaatcgctcgccttggcagtaccggcatgactggcactcagctcgcgagcgcgatgaggccctccgccaggctctggcgtactgcggccgcgagggagaggtgctaagcctgcctaccttgccgcactaccgccggctacagcttaagctgcgctccggtaatcaactgaccatccagtttgatcaggggctttcgtattgggaagccgagcgcagcgaaaagtcttaccagctcaggttcgactttgcatcacgcgagcttggagaagaaatcatggagcgcatcaggtgtaaagtttcggcggctggggaggaaaacactcagatattcctctcttcctcttga

SEQ ID NO: 332475 - DNA, 819 bp, Pseudomonas aeruginosa
atgcgaggcttttctaggttaatttcattagcttttgttagctccattcttgctggttgcggcagcgaggatttcacaggtgcatatcgttataagatagctggtggggagagagtcattgttctcaacgttcacggtgatgaggccgagatatttggagaggacgcgagagatggtcgcatcaagccgctggttaaaatgaaagtttcagtaaaagataaaaaacttctccttgacgacgttaacagctccgagcgcttggctctaacgcgaaatgtagatgagcagagtgtcgattgtctaaactgcaaggtgcttggaatcaatgatgcggcggtttggaaatatgaccctcaagggccctatgacgtagagcggatgctgaaagaccaagcacttaaggatgaaaaagcattaaatgccgaactgctcaagatgcaggagcaaatttatgagcaggccaaacgagacgaggaagcaaccaaactaggtgcatatgaaggggactgggtttatcagaggacaacgaaacaagaccccttgatcattatgactatctggcgcaaaaatcagattaaacgctggtcgttccgatttgaatccatggatcgcatagggcaggaagcaccagggttcgaggtctcagatgttggattgaaagtcaaagtcggctctgagaaccgcctatatagcctcagccctgataagcagatactgacctgcgcgacctgcaacagacctgagcgctgggtcaaagctgaccccaagaaagacctcagcgatcgcaattacgctcgacagatggctggtaatccgtaa

SEQ ID NO: 332476 - DNA, 231 bp, Pseudomonas aeruginosa
gtggaagtcggattggcgttcggaaaggtcctgcgcagacgccgtgtcgaagcaggattcacccgggagcaattggcccatgaggcggaattgcagcgtaactacgtcagcctgatggaacggggcatcaatcagcccacgatcaccaccttgatcaagctagctaaccccctgggctgcaccgcagctgagatcgtcgccgaggtagaacaactcgttgcgcatccctga

SEQ ID NO: 332477 - DNA, 987 bp, Pseudomonas aeruginosa
atgtggcagacgccgcagcagcgcatcgctctgctcgagttgctggtgcaggggacgctcaagcgccgcgcctcacaggtgaaagcgtatgacactctggcagagctatcctggatccgctcgaccggccggcgtgatcagattgccttggtagaggctcgccgcactgaactcgttgcgctgcttgagcgggtatggccggactggcaggaagcgctggcggcacttacagcgggtgggttttcccccacgcctgatggttggactcgcttggaagatgcgcgccgcgcagggcggcttccggcgctgccaggacgtctcaatcgccggactgcagccgcgctaaccgcgccccactccaaagcggtactcacgccgcgccggcaagccgcgcttgccggcaccgaagcgacccacgacggattgttacgcttgcgaccaccgcgtggattggtggcacagaccgagcagggtgtcctggatctgtggaagcttgcccgtattcttggtgaagcaccgatcccggagcgggccttcctggatggcctcatcttggaaggtcccttgcgagcggtcttgctggtggaaaactctggcgcttggcgtgacctgccgatgctggacggatggcttttggctcatgtccctggctgggacatagccactgttgtgcatctactcgctcaggtgcagcccgaggttcctgtcgttcactttggtgatctcgacccgaacggcgtacgaatcttcctgaaactacgagagcttcggtcggatctgtgctggttcgttccatccttctggaccgagtgcgttgagcctaggaagttgaaaaagccatggcctgctgggcttgatcttcgtcatgcgcccaagctggtgcatgatctcgtggacaaaggtctttggttggagcaggagcctttggtggtcgactctaggatgagaagtgctcttgagtcgaccattcaactagtcgtcgattga

SEQ ID NO: 332478 - DNA, 4425 bp, Pseudomonas aeruginosa
atgagtcgaacgcgtgccgatgctttagccctggtcaattggaaaggtgtcttctacgagcgttatctactcgatcggcatgtcactgcgctggagggcagcaacggtgccggcaagaccacggtgatgattgccgcctatgtcgctctgctgcccgacatgtcccgcctgcgcttcaccaatctcggcgagactggagcgactggcggcgacaagggtatttggggacgtctcggtgatcccggacgcccttcctacgtggtggtagattttgcccttgcgggtgcacagaggctactggctggggtacatctggaacgcaaaggtgaaccctccgtggagcccaccccatttatagtctggggcctcgaacctgcggttcgcttgcaggatctgctgctggttgcacaggggggcgtcgagtccgtgccggagttacaggagttgcgcgacaacgcggcgcggctcggtgggcgattacaatcttatccatccgcccgggagtacttcgccgcgctattcgatcagggagtcatgcccctgcgccttggtaccgatgaggagcgcaataagttcaacgatatgttgcgtaccagcatgaccggcggcatctcaagggtgctcacttcggagctacgctcgttcctgctcagggagcaaagtggcctcgctgataccttgcagaggatgcgatcgaatctggattcctgccggcgcacgcgggtagaagtgcaagagtcgcgccgcctggagcaagaaatcggcagtatcttcgaagccggccaggccatgttcgcagcagctttccttgccacccgtgaacgggccgatgagctggcacgccgggtagccgaggcgcagagcgcacgcgatcaagccttccaggcgcaagagggagcgcgcagagtactcgacgaaaccttggccgagctgaatacgctcgatacttgcaaagatgaactcgaccgcgtacttggaaccgcccgcgactggcacggcagactgaaggactccttagcggcgctacgcaacctgcaacaatgtgtctccctgctcgcggaagctgagacagcggcacaacaagcgggcaggctacgaagcgaatctgaaacgttgcggactcgcaatcgcgaggaactcaagcgtgcccgggagggctacaaacgcgctgccaaggggctcgccgatctgcagcagggcatcgaagagttgcatcgccgggctgctgcttatcgtcaggcaattcgacggctacgggaagccgaggcgcatttgcagaccgtacctttgcttcctgcgcagttcgccgatcagcttatgtcggtacgccacatgctcgaatgcgtcgatcaggaacgtcgggaggcaaggacgcgcctgtccgatgcgctggagcatcgtgcgcgtcatgagcagctcatggaggctgtgtggcggctagcgggacgggatgtcgaaatcaccgctgcgtacgatgtgaccaccgaagcggtgcaccgtcatcggacactgagcgtacttgccgagcagcttcccgacattgaggcgaaactggccgaagcgcaacagctgcaggcccggcaggcccgggtgtgtgcaacggcgagggagctgggcgtggttctcacccaggcgcctgccattgaagtcgtcgacgcgttgctgagtgatactgaagtcgagcaatccacacatgaacaggcacaacgggcggccaatgaagaacttgctgagctacggcgccggcgtgaggagctgcagcaacagcatcggcagttaatggcacgcgagccgcaatggcagactttggcggagtgcgccgtccgcatttccgatcacctcgatacccatgtgacggaccgggccagtctggatgcagctcgtgcctgtttgagcacagagcacgccgaggcagcccgggtcgaacagggggcacggcatgtacaggagcagctgctccgggacgcacgtgacctgctgtcggccggcgggccgttctcgcccgcgttgctgcagctcaaggacaggctcggcgccgagctgctggctggcagctacgaagaagtggcgatcgaggaagcggctgtgctggaggcccgacttggccccctggcacaggcactggtcgtcgatgatcccgctgcggcagctcgtgcctctgtcgaccggccagaggaactgacagacgtgctactggtgtcacgtgatgccgatctctaccgtctggccgattcctccgacactacgatggctaacgaaggtgatttgctcgtccaggaagggattgccctgcgtatgtcgcgtattcctgccaagccgcggctgggacggcgtgcgcgcgagagacgggcggccgagctgcaggcgcaggccgaagagaaaacgttcgaactagagaatgcgaggagccagcgccgcacgctggaacggttgcaggagaatggcgacacgctgctcgccgggctggaggtctggctggcaggtgaccccgcggacgccatcatcgaggtgcagcaggcgatcgccttggtcggtgaacagatcgagcgacagagcgacatggctgatcgccatgctgcggctgcacaggcactgcaaccccgtattggcaggctgcgttcgctgttggccgaggcgattctgcttgatcctcctgaccacggcgagcgggcgcagatactcagtgaaagggcatcgcaggcaggcgaggccagggactgggttaccgccaaccaagaggatgttctgtatgtggagaacggacttggtgatttgcgccagcttccgttgtcggacacggacatagaggatctgacgcgccacgccgacactctggaaggccggcgccggcaactcgatgcagggatcgaagccctcgaatacctgtgcgacaacgctgaggcgctcgcctgggaggaagcgccgcgccggctcgaagactcgcaggaattaataccggccctgaaggagcaactgagcgaagcggaaggcttgcaagaggcagccgaggaaagggtgagccaagctgaggcacgatatgaccaaattaccgagcacttccaagaagtggaaggccgacgtcaaatcgccagtcaggagcatgcggctgcaacgactcgattcaacgggataggtatccctgctccgacggaagaagcggtagtggatgcagctaaagaggtcgtacggcaggaagaatcgctgcgtgctctagagcaccgacgacaggaattgaatagaaccgtcggtacgcagcaggaagcccagcgagcagcgcaggaacgcctgatcgcagccgatgagaaactcaccagcgagcgccgtgaggccgagcctgcaacgaggcggtggagtgaactacatgatcgggcacagcgccacggcctcataggcaatctactcggcaatgatcccgatgggccaggcggtattcgcggccatgtcaatctcgtacagatcgcgacagcgcggcgtgacgtcttgctagaacggttacacaacgcacgaggcggggacgctctgctctctgagcttgaactggtacgaagtccatcggcagacgccgctttcgctgatcctattcttgaactctggctggctgtgcgcgactggctgcgccaccgcctgccggcacaggtggccgaggtcgatgacccgcgcgaagcgctcatccggctgcgtgaccaactatctgacctcgaagagcgtctcgcccgtcaggaaagcgacctgcgtggagctagcgaagacgtagcacgaggcattgacgtacagatccgcaaggcgcgtggccaagtcactcgcttgaccaagaatctagaaaaggtcagcttcggcagcattcagggcatccgtgtgcgcatgcaggctgtcgaacgtatggagcagatccttcgcgccctgcgtgaaggtgcggctcaggagctgctattccaggcggacatgccgatcgaggaggcgctcgacgaaatctttcgtcgctacggcggtggacgctcagcagggcagcgtctgctcgattatcgggaatacgtgcatctgcaggtggagatccgtcgcaagtccggcaccgagtgggaagtcgccaacccgacacgtttgtcgaccggcgaggcgatcggtgtcggcgctgcgctgatgatggtggttctcaccgagtgggagcgcgatgcgaccttgctgcgcggtaagcgcgctcacggttcgctgcgtttcctgttcttggacgaagccaatcgcctgtcgccagacaatctcggcgtcctgttcgatttgtgtcagacactggatctgcagttgatgatcgcggcccccgaagtggcacgtgccgaaggcaatacgacttatcgcttggtgcgccaggtgacgcccgaggggcgcgaggaagttctggtgttcggtcgtcgcactaggagcgtaggctaa

SEQ ID NO: 332479 - DNA, 681 bp, Pseudomonas aeruginosa
gtgagcgatgccgtattcgattctctggaagaggtgattgtcgacgagcgattccccgaggtggatctgatgctgcgacgtggacgccatatcggtcgagatgatggctgcccctatgattacctggtggaggcacaggcgctgctcgaacctttttatcggcgtttcggttgtgagctgatccagcagagcgatggctatttctatttgctgcccagcggcgagcggctggggcgacgtcagctatccgtcggcgaaatgcttatcgggcaggtgctggcgctgatgtatctcgatcccgcgactttgcagcatggcggcatggcgacacgtgaagcgctattgcagcggctgtccggattactgggcaccgatgtgctggtgcgtacgctaaatccgcgtagacgcaagtatgacgaacgcattgccgctgaaactgtgcgagggaaagcggacgaggcgctgcgtaagttagctgagctgggtttcatcgatgtggttgatgcggccagattgcgcctgcgtccggcactcatgcgctttgccgagccagttcgcgggctcacagatcccagcgacgccctagagcggctggttgcgcgtggagaggtattactgggtgatgctaacgacatggatgacgatagcggcgacgcggagggggaggaaatgttgtcatga

SEQ ID NO: 332480 - DNA, 1059 bp, Pseudomonas aeruginosa
atgctggcccgagttgatggcgccggcatcgttcgggcgggcgagtatgcgctgacacgacttgctgctgcggttatcgaatactttctggcggacgaggccctgactcgggaaagcctcagcctactgaccggtaccttgcgcgctcaacttgccgacatcctggcgacagccaggaaggcccataacgatgaggattggcgtcagcgcgtggtcgcccccctgaggatcacggtcggtgacatggtggcgggtatcgaacgtcggcagcgggggcttgatgcccagcaggaggaaatccaggcggaaatcgctagcctgctgtcgaacgactggtttagcgcaatcgatcgatgccagagcctgctcgacgcaacgacccacacattgcgcgagctcaatgaaatcctgctgcgagacacacaccatttcgttgcgttgctccaggacatccaggcgctggccgtttcagcagaaaatgtcgaagccgagggagccgcacagcgggtcatcgaacatgtagaccggatcggagcctggggcggtgcacgccaaaaggcatggtccgaatactaccagtatgtacaccgctacctgcgcgacgtggtcagactggatcctgatcgggcgctgagccagcgcttgcgcgatcagattgcggagtggggaaacaggcctttccatctactagctgcgcatgcaggctctatctgcctgctacgtacacttgaagcacgcgtcgagcgtccggtggtggccaggccaaagactgatcgtgaggccgaaccagcctgggtggaagctgaaaatgcgctggcagatatcgaagtgttggtgagtcgggcgctcgacgagggcgtagataccttggcggggctaacggtgcaggtactcgccacgctgaccgacgatagccaatacgtggctgcgggtcgcatcgctgacgcagctgcaaggctagcccgattgcgttcaagccgcgagcggctatggctagaagtgggcgaacagctcgaagtcgaggaatggactgtccagggccggaggaaagtggagtga

SEQ ID NO: 332481 - DNA, 2280 bp, Pseudomonas aeruginosa
atgattgagtcaatacggatagtgggggtggcttcgtatggacaagaggtacaagcgcttgatgggctgacgaagttcaactttatctacggtgccaatgggtgtggcaaaaccacaatttccagggtgatcgacaaccccactcgttatccgagttgccatgttggctggaagagcggcgtgccccttcaggctatggtctacaaccgcgacttcgttgcacgtaatttcggcccttccgcagagctcaaaggcatcttcaccctcggtgaaaagaacgtcgagaatgttgccaagatcgcggcactcaaacaggagtccggtagctgtagtggacgcatcagcagtctgagggagactctagaagggctggatggtctgggaggaaaacgcaaagaactcgccgatctcgaggcttggtttcaggagacatgctgggcccagaaaaaaaagcacgatagtgcattcgctttggcattccagggcgtacgcaacaatgccgagaacttcaaggtccgtgtgctgcaggagcatgctgggaattctgcagcattggtttcgttggccgatctccaggagaaagccaagaccatttttggcccctcacctatgttggagccccacgtcgtattgccttcgttcgatgcgctgttgtcccacgaatcgaatccgatcctgagcaagcgcgttctgggccgggaagatgtcgatatcgcggcaatgatcaaggcgctgggcaacagcgattgggtgcggcagggccgggcttacttcgatgaggcgacaggagtctgccctttctgccagcaagccacagaagcctcgttcgcggccagtctggaggcctatttcgacgaaacgtttctggatgacagtcgtgccattgatgaactggctaagacctatgccgcggcggccgatcaccttttggcgcaattgtccgagatccttaatgcgccttcccgattcctcgatgcggaaacactgaagacagaagtggcgctgctggcttctcggattgccctcaatcgtcagcatcttgccgataagcaacgcgagccaagccagctcattgcactggaacctctggctgacgctctgggcgcgatctcccaggcactggcgcttgccaacgagcagatcgagtcacacaacgctacggtagctaatctgggcaaagaaaagcagcaattggcaagccaggtgtggaaacacatcgtcgccatcgagctggcgcccgcattgcaggattgctcgacgaagaagcgagggttggtgggcgcgatcactgccttgaacggaaagatcgaagcggcggaagcagaccggcgtcaggtggagaaagaaatagctgagctggagcgtgcgaccaccagcatccagccgaccatcgatgcaataaataccttgctagcctcgttcggttttcatggtttctccctagccaaggcagatagcggtaccgcctatgtgctgcggcgaccggatggtatggatgcgaaggaaaccttgagcgaaggcgaacgtaccttcgtcaccttcctctatttttaccatctgctcaaaggcagcgattcggaaagcggcgtgacgactgaccgtatagtggtcttcgacgatcctgtgtcgagtctggatagcgacatcctcttcatcgttagcagcctgatcaaggcgctgttcgatgaggtgcgccaaggaaccggtcacatcaaacaggttttcgtactgacccataacgtctacttccacaaggaagtgaccttcaacgcccggcgcactgatagaaatgcgatgcgcagcgaggaaaccttctgggtcgtccgaaaatctcatcactcttcaagagtagaggcccacacaagcaacccgatagtcacctcatacgaactgctgtgggcggaggtacgacgggccgaccgatccaacctttcaatccagaacaccctcaggcgcattcttgaaaactacttcaagatcctgggtggatccgataccgacgacatctgcaacctgttcgaggggcgtgagaaggtcatatgccgatcgcttttttcatgggtcaacgatggttctcacttcgcacacgatgacctatatgtcgctgtcgacgatgcaatggtggaaagctacctgaatatcttcaaggcgatcttcgtcaagtccgggcatttggctcactacaagatgatgatgcgagaagcatactcagacgattctgagatcgcggccaaaactcaggaacagcaggccgatgcacagggggccgtccatgcctga

SEQ ID NO: 332482 - DNA, 315 bp, Pseudomonas aeruginosa
atggccgccacctccgtgcatccagcggaagaggtattcttttaccacacggttcactggcttgccgaagcgggatatctggcctacaaaaacactttctttaactaccagttttatggggcacgcttgacgcccaaagggctagaggtacttaaagcggtccccgagtcactaaaccaaggacagtctttcggggagtcgctaatgcaagcatcgaaagacggatcgaaggagttgctgaaaggcgtagtcagtgaagctctaggtataggagcacgaatgctgagcactcatttcgggctacctggtggatga

SEQ ID NO: 332483 - DNA, 525 bp, Pseudomonas aeruginosa
atggcaggcttcgtagctcaccgcatcaccaacggctctgtgtatctggacggcaacagcttcttcggcaaggtcgaggagatcgagctgggaacggtcaaggccgtgatgtccgacttccagggcctgggcatgatcggcctgatcgagttgccggatggcctggacaaactggagggcaagatcacctggaacagcctctacaaggaagccggcatcaagctggccagcccattcaaggccgtccagttgcaggcgcgctccaacgtccaggtgttcaacaacggcggcctggtcgacgagataccgctcgtcaccactctgaccatcatggccaaggagtacggactggggacttacaagccgcgcgaggcgatgaagcaggagacgccgttctcggcgacctacgtgcgccaggtgctcaacggtgaggaggtgttactgctggactacctggccaacatcttcaaggtcaacggcgaggaccagttggcgcgatatcgccgcaacatcggccaagcatag

SEQ ID NO: 332484 - DNA, 219 bp, Pseudomonas aeruginosa
atgagcccggaaacgctcgcccgagtaatggatgtgcatgaggccttggagtcgttcggtggttacagcgagtggtggagcggcgctatgcagatcacgttctcccagcgggtactaggtctgggtaaaccgctccgggaggtcactgtaggtgagctgcaggacatcgccgctgaagtctccaaggaaatgaagggctgcgtccggaggcacgtatga

SEQ ID NO: 332485 - DNA, 498 bp, Pseudomonas aeruginosa
gtggtcggcggggtgattccccgcgaattcatcccggcgatccagaagggcatcgaggaccagatgcagaacggcgtgctcgccggctacccgctgatcggcctgaaggcgacggtgtacgacggctcctaccatgacgtcgactccagcgagatggcgttcaagatcgccgcctcgatggccaccaagcaactctcgcagaagggcggagcggtgctcctggagccggtgatgaaggtcgaggtggtgaccccggaggactacatgggcgacgtgatgggcgacctcaaccgccggcgtggcctgatccagggcatggaggataccccggcgggcaaggtgatccgtgccgaggtcccgctgggcgaaatgttcggctatgccaccgacgtgcgctcgatgtcccaggggcgcgcgagctactcgatggagttcgttcgctatgccgaggtaccggccagcgtggccgaggcgatcgtcgccaggcagggccgctga

SEQ ID NO: 332486 - DNA, 1071 bp, Pseudomonas aeruginosa
atgcgagaactattcgaatcgaccatagagcgcctactcggcgacctggccacgccggaatacgtacttggctgcgaaggaggcgtgtggccagccgagctctggaccgccgtggaggagtcagggtttaccctggccggtgtgccggagcgcctgggaggcgcagaggctggttgggccgacctccatgtgctggtccgcgccgccgggcgttttgccgcaccaatccccttgggcgaagcgctgctggccaactggctgctcggtcaggccgggcttgaagggcagggcggcgtcctcagctttgccgccgatgcccggcttgttttgcgcgatggcaaggtggacggcaccgtccatgacgtgccctggggccggcatgccgaggccatggtggccatcgccgacgacgccggcacgcccagcgtggtactacttgctcgtgccgaggcggccgaacagagccacgggctgaacgtggccggcgagccgcgcgacggcctgcgcttcagcgcggctccggtgatcgctagcgcacccttgccggcgggagtcccggccgaggtgctgttgctgggaggggcgttgctgcgctccgcgcagatcgccggcgcctcgcgggcattgcaggagatgacctccacatacgccagcgagcgctcccagttcgggcgcccgatcggcgccttccaggccatccagcagcagctcgcggtgttcgccgagcagacggccgccgctggcatcgccgcggaggcggcttttgtcgagtcggacacggccctggccgccctcaccatcgccgccgccaaggtcagcaccgctgaggcggccagcagcgctgccggcattgcccattcggtacacggcgccatcggtttcacccaggaatattcgctgcacctgctgtcgcggcgcctgtgggcctggcgcagcgagttcggctcggccagcctctggagccagcgcatcggccagctggtctgcgcccgtggtggcgaaggctattggccgttgctcaccgaacatgcgagacaacctctacccggactcgaggggcatacgccatga

SEQ ID NO: 332487 - DNA, 858 bp, Pseudomonas aeruginosa
atgtccaatcttagaaggcttttgctggtgctatgtactctgttgtccctgggtgtcttcgcccagacaggagaggagtacgcgcaggaagccgagcgtgccacccggctgctggacaaggccgtggctcactacaaggcgaacggtgaaagcgcgtttgccgccttcagccggcagggggtattcgtcgatggcgaactctacgtctatgtggtggataccagcggcgtgatgctggccagcggcggcccttcggccaatctggttgggcgtgatatcagcagcgttcttggcgacgagctgaacaaaaccttcaaggaagccctatcgttgccggaaacgggtgaaacccatagcgccgaatatcgctggatgaactgggccgatggcaagacacagcgtaaacgggtgttcttccaacgtgtcggtgagcggatcttcgcagtcggctactacatgccgcgttcgagccagaccgaagcgctggccctgctggaacgcgccactgctgccgtcgccgctgctcctgtcgaggctatcgggcgtatcaatggtctgagtcccgagttcgtccaggacgacctgtatgtcttcgtcgttgacctgggtagcgagaagttcgtcgcccatggctacaacctgcgcctggtgggcactgacttccgttcactgcttgcggcagacaggcagccgatcggcagacagatgctggatatattgaagagcgggggcgaaggagaggtccactatcagtggcgcaatccggccaacaaccgggtcgagcaaaaaagtacgctgatccgtaaggtcggcggctatgcggtggcggtcggtcactaccagcgtcctgggtcctga

SEQ ID NO: 332488 - DNA, 912 bp, Pseudomonas aeruginosa
ttgatctatctactccccatgctggccgcgttgatctgggcgggtagcactgtggtcaatcgtctggccgttggtgccatcgagcccgctgccatttctttctaccgctggctgctggccttgctcgtgctcagcccctggttgctgcccaaggtctggaagcagaggtgtctgatccgtcggcatttctggcagctgtgtgtccttggtgtactgggcatggcgctgtaccagtcgctggcgtattttgccgcgcatacggtctccgccacgtcgatggggttgatccttggcaccatgccgttgctgaccaccctgctggcgttaccgttgatgggtgtacggccgagccgctccgcctggttgggctgcctgctctcgttcttcggcctggccctgctgatcagcgccgggcagctgagccgattgtggctggaagggatgggcctgggcgagttcctcatgctcatggcgtcgttgtcctacgcggtctactgcctgctgctcaagcgctggcaactgccgatagcgacctgggagtcgctctacgtgcaggtgttctgcgggctggcggtgctgctgccggcgttcctgttgagcccttcggtgcaactgacggcgcagagcctgccgctggtggtctatgctggcctgtttgcctcggcgctggcacctgggctctggaaccatgcgctgggggtggttggggccgagaggatcgccgtattcatgaatctcacgccgttgttcactggtttgctggcggtgctgctgctgggcgaggaactgcacagctatcatgccatgggtggtggcctgatcctgttcggcatcgccgtggtacagggcctggtgccgatgccgcgcaggggcgccagggctaccgatgggctcaggcgctccgatacctga

SEQ ID NO: 332489 - DNA, 246 bp, Pseudomonas aeruginosa
atgagcacccagcgattcactccggaattcaaggccgaagccgttaggcaggtcatcgagcgcggatactcagtcgcggaaatcgccgcgcgcctcagcgtctctactcacagcctctacaaatgggtaaaggctgtgcccccgacaagtcggagaaacaggccagcgaactgttggaagccaagagcgaaatcctgcggctgcgggcccaaatgcgtcgccttgaagaagagcgggacatcttaa

SEQ ID NO: 332490 - DNA, 2076 bp, Pseudomonas aeruginosa
atgaatgagttggttgaggccatgctggctgcagttcccgctgatggttctagcatcggcaaccagtcgctgctggagcacctcaaaattcagtttccacatttaagagacgagttctattggcagacgcgtgaagctctgatcgaccagggacttctgcgggcaggtaaaggtcgtggcgggtctgtgcggcggtctgatgttgagcttccaccggcaagtgcttgggttcaattcctgcgtagttatgggccgtcatcgcgcaatctggcgatgttcgatgagtatgtttcaagggcgttggcgcaggcaggagtggagccgattagcctatcaacacctctattagaggatatggtacggcacattgaatccaaggcaccaggatctatcttgatcgcgggaacagctggtgatggtaagacgtaccactgccgctctctgtgggagcgcattggtggggatcctaaggcttgggccgccaagggcaatatgaaagagctacctctggcggacgggcgcctggctgtttttatcaaggatctctccgagttcaatggagaggagagtgatctgccattgcggcgactggagaactcggtgctacaaggaaatgactcagagatagttatccttgccgcaaaccatggccaaattcttgatcgtctccgtgatttaggccgccgccaagagcgtgatcacccacttcgcaaaccgctgcaagagcgcttcttacaggcggggccagctcctgatcgcctggcagtgtttgatctcagtcgctctactagccgcaaaacattagacgaagttgctatggctgtggcagggcatcccgagtggggcaattgtaagcactgcacacttcagagtgacggtaaagtttgtcccattgacgagaatcgccgtcgacttttgggtgagtcggatagtggtcagctctctcgccgcttgggcgatttggtcgaaattgccaggcacaatggcctgcacctccctatacgcgacttgcttgcactttgttcaaacatgattctcgggtgctccgatgccaagcaggcgaaggacaatctcatgacctgcgctgatgtcgcgaagatccaggaggggggcgaccttggcaaagctagtgtctatgccaacgtctttggcgccaatctcctcaagaggaggacttctgaccgtccgatctttaaggcgatgtccagttttggggtgggtgatgagtccaccaatgctactgatggattgcttgtctatggcaaggatgattcgcgactgcaagccgacttcggccgcttggtcgcgagcgatccgatctacggagcaacggctgcctttcgcgcagcccaggacgcctatttggaagggtacgagggggctcgtttggaaggaggggccaccgaatttttagcgatgttggaagaccagcgccgcagactttttttcacacttccggatggggaagggggttatccgcattggtcgatgacagccttctgctttgctggggattacctagaaatcatcgaggcgctcaaagcgcagaagcctgtaagcgagacggttcgtgggcgcatcgcaaagggcctcaaccgagtattaacaggtcttcttctcgaaaacgaagatcgcctcttcatcgccagttcaggtggtttcactcaaagccgggtgagtgtgctttgtgactacgagacgctctcccgtaggcagggcggtgttggtatggcgatcaggcttgccgaggagacaggtcgccctcgactcgacgtttcgcttgctatggggtcgggtaattcggtcgctttcgacttaacgcctatccgtcacgagtttctctcgcgtgtggcggagggagcgttgcccgcaagcttctctaacgaatgtctcgaagatctgttggctttcaaggctaagctcttgcgcaaggctgagatcgtcaagaaagccagcgtaactggagatgatgacgaaatcggtggcgagacctccgtgctgacactgaacttcatcgatatcgagcccggtggtcgcggtttttcgcgcccagtgactgtgagggtctctgaatga

SEQ ID NO: 332491 - DNA, 1554 bp, Pseudomonas aeruginosa
atgagcgcaatcatcaagaggcctgagattaaaagcgtcgatttttgcgtcgacgagaatatttgggggcaccgtctctatgatgagcagcttcctcacctggctgttctggagtttttgggcgtacttggatcgaacttggatcggccgctcaggcctcaccaagaccaaggcggctcggtcatgttcaagccacagcggcaagtccgcttacgtgcgttgctgttcaacaatccctacgtcgaatcgattgcagagagctccgcgtctgatgaggagaaatggaagcagtggtttgatcgttttaggcagggagcaactggtaatggggatgaagatatggcctatctgcgtcgctcgtttaccagttttgacgacttcgcaaaggccattgagctgctgcgctcgtcgtcatttgagtctcgcagcaacaagcgttggagttcaaagtttgtttttcctttcggtcctgacgctctttatgaggacttggcgatcaatgcgaaaggaggcatgagcaatgatcgtcgcttctttgcccgtacgggtgagctgctctatctcatgcttactcgcgccaagcgcggagcggagctcggtgacagccttgccaagcgcctttttgatcacggggccccgatgaatcgtttggtcagggctctgcaaggggcgccgcagagtgccgaagaaccacgactctcgggttatctacccgaggttgccaataatcgtttcgatcaaatctgtgacgactggttgtcgatcttgcacaaggatatgccgatctacgatgccttggagcatttgatcgcgatcactggcctgaacatgctgctctatttcttagagcgcgctaagcgggtagcgggcgatgacgatccggtcgaaattgtctgcgaaatcgtctccaaggaacgtacgaaggtgcgagcgctttctggcgacagctatcaattcaatcaagggttgccttcaaaggcagtgcgggctcatgtcgaatcgatccggttggatgttgagtgggctgcggctgagactacggagtttccggatgccgagcgagtgaagttaatgcgcgagcgctttcagtggccgccaattgatggtggcgacgatgaggacttcaccgataagagtccagacgagttggtcgccaaactagccgaaaatgcgttatcgcgtcatgagcagcatgtcggcaagattcatgcgtcatggtcgcgtgcaatcggactcagctcacgcaggctctcgagacgcacccgctacgcgccaaacgataggttgctcaagtcgatcgtagtgtccattgtggacgaccggatgcagttcgatgagtttctcgctgaagccaagcgccgttacggtctggtaattggtgatgcggagggggcgcgcctagttggcgccaagcttgttgatcaagaagagcttagcgagaaccgaaacaatcttgagacccgtctcgtcagcttgggcttggttcgcagactttccgactcctgctcgtttgtagaaaacccgttcgcgtttcagggagaagccgcatgctga

SEQ ID NO: 332492 - DNA, 5418 bp, Pseudomonas aeruginosa
atgctgaccgatcgcattattgggcgcgtcggcgcggacattctcgcccaacgcatatctaagcctggccagtttggtgatttggccgcgcttttcaggctagacaagctttcagccggtcagattgcggcagttgcgcgagctattctcgccaatccagatctgctcgcccaagtagatctcatgatcccggaggccttggtagtaggccaaggcttaccgtcggatattctgattccacataacgctggctatgtgcgcaacaacgcattgactaccaaagctgcaatccttacggcaaatggcaacgaacataatctcgcggacacgttgggtcatgtcatggccatcggtgccaaagagatgcgggccgaccctgaaccgtgggtcgaggccacgttgtattcgggcggcatctcgccggtgtctgatgaccgagcggtgttccatgcggctctgggcgggctattagcatcctcggagctttcgttagtgcaacttggggaattttgctctgccatcgtcgaggctgttgctacgcatgggttacccattcgtgatgcgattggcttcgccttgccatgcgcaggacttccgagagacagcacattcttctcgaatgccaaaactttcggcgcattgcataaaccatggcatagagcttttatcaagctctttgctcagcgtgcgccgctgcttaaaaagctccgccaaaatggccaacctctcgatccagaagagatcaccgagcgaatagaggtgaatgctgcagaaatttcggatggcgctcgccaagctctcgaggctttcgccatcgcccctgctggagatcaagaggcatccgaggcccttgcccaattcgaatgggaaagcgatggcgtataccttgccttcgataagcctaaagaaaagcaacttggcttagccgagtcgacaatccgcttcttcgatcatgagtgtgaccaagaggacgcacttgataccgagggccgtaagctattggaggatctgaggggccgtgagcggcgctcagattttactgaggaggatgaggagtttttcgttaagcagcggagactattggaacaagatgccaaactttgctcgcgctgggaaaaggctctctatggcaagcccatcgactgcaatgacttcttcgagggcttcgctcgggtggtcaatagcctgcacgccggcctgcgcgatccggagggtgagcggattctacgctttacggtgactaagggccgcaaggattggcgtgagcgattcaattacgacgccggcagctatttttctgcgatgtaccgcggattaaaggaacttatggggtccaaggttgattggagggtcgagcggctgggaaatgcaaacttacccgacccccttttcgactatgaggccttcttcgctaaggagaaggagcttcgtaacgataagaagagcaaggttcgtccaaatccgtcgctatcgcgcttagcattgcaaatcaagtttgacgtcgccttaatccaaattgttaaggacaaagaggcggtgctggctaagacacagctcctttggagctacaggcctacagcgattggcctttcgttgactgctgacatgcgccgcctcttggagaaaggggcagtaggatgtactgaggtttcccgcaaattagtgagtaagaaggggggggtacaaaacgtctcgttgctcgacaccgggacgttggaggcaacttattcaactgatgcaggatcattggttccggcgaccagtaagctccaaagcctgcgtcatgtgattaaaagtcgaatcaaagagcttgctgaagagggtaggctgacggcgcatcagcaaaatgaggtgaaggcgtcttgggataagttcgagcaggactacatcaaggctatggaggacttcgttattactgggctgcatggcgaggctgttatgcgccaagcggagtcttacgccgaactgttgaacaccctgatggcacatgctcgtggtgacgtatgccgttcgcgactggtatctgaagtactatcggtgggcacggttcgtgttgctggcgataaccctgtagtgattatcccgccgtggcatcccgaacgaatgaaggctcttgcggtaaagacgcggcgcgttgcgggtttcgccacccacttgctttctagcaatagcattctctatggcgatcgcgagattttcatgcgagagctttctgacgagatcgctcatccattctatccagagatcgccgttctcaagcggggcggcgctttggagcttgtttcggaaagcagcactgtcaacggatatagccttttagagtcgcccacgcgtggtgccgcggaagctatgaccgatgttgatccgacggctgcagccaaacaggtgcgtgaacttctggggcgctatgtagggctgcagccccatgaggcaaacaacctgagcgtcgtgctttataacgctgatgcagccgaactgccgctggctaccgtgcgtgagctctccgcactccaagaggacggcaacctccaatgtagcgtttctgtacgccactcagatccaggaaagctgcgacgagtctatggtgagctggtaaacaaggctggggacgatccggacctgccagtggttagcgagactagcgacaacttcatctcgaagttgcgtatatctgtgacccccctcgctgcgactccaagcgtgagtgcgcaaggtttcaaggcttttgacgtggctttcctgcatgacgtagtcgcgagggaggctcaaacagagtggctccctgtgcagtggagcaatgatcgaccaaatctagaccatgcgccgtcgcgctggtcttaccggagcgtttccggtgagaacgagctgaagtcgactaccttcctaacctgtccatggcagacggcctcaggctgggcatatgtgtcggctgtcgctgcggtttgccgacaaacagacgctatgccagatgagcgtttcctgcctgctcgccgaatttccctgcaaagccctgcgttggctgcaatgatcaaggacgcccacgagctggccgaatgggtggccacttacgacgaactactggacaagcgccagcttcagcacaacaacatcacagtcgtgcgctaccgtcggggctcgacgaacggccgcaatatgatcgtgagctcgacctcggaacttcggttgttgggcgtgttggttcgcagacgactggaagagttgaatcttcagctcggatccaatgagctccaagccgctgccgagaaggcgaagcgcgacgcgctttcaatctccggagatatcgtactgcgtgcggccaagcgaggcgtctctgccggagagatgcttggtcttgtgctaagtcgatacttgctcgcagaggaattcctcgcctcagcgaaggggggacaggtcttgaccgcttatttcctgctcgacgattacgcgagttggttatcccagccggagagtcgcatcgcggacattttggcgctcaacgttgaagagcaagaggaaagtatccgagtcgtaatttcaattgttgagtcgaaatatgtcagtgccgatgggttggctcaagctcgacgaggctccaaggatcaattgctagcaacattgggcatgttccgagaggctcttttcggtgatcctgggcgtcttgatcgggatgtttggttagcccgtttagcagatttgcttttggatgccgatgttccgccggggatgacggggttgatggagcgcgcccgtgctaagctgcgagagggcgatgtagaaatctcgctgcgtggctactcgcacgtctacgttcatacctccgacgcgggttctgcttccgcgtccgagcaagagcttttggatgagtccgaaggcgtgatggcttggcaagaggtgttcgatcgacaagaactgcgaaagcttgccgaagcgtatgccaaagattctggtggtcacgaggttcgagcagggcttggacctcagcagccttggagcggacattacttcaagatgccggccccacgagtaccatggttgtccccgatggggcagttatcgagtgggcagatagagcccctttttgaggacagcctaccgttagaaatagaagacacggtggcgacttcgggtggctatgtggtcgcttcctcaatgccgaaagaagaatcggctcacgccactgccactgccgctgatgcagatgcagtttctagcttggtgcccaccacgacccctagtgttgggagggggctctcttatcttgtcgcatcgaagttttctggcggttcgcaagccgatgccgagcgggaggaatgggctcaagacatcactaagaagctcaagtctgcactcaacagctacggacttcaggcggctgttctagccacaagattgactccaaacggctgtctagttcgcttggcgggctctgatcggttacgcgtcgaagatatcgaaaacaagcgaatgcagctcctcactacacacgcgatcaacctcgtaacggtgcaacctaagccaggcgagattgtagtgacagtcgctggcgcaaagaggcaggctgtatcgctgtgggagctttggtcgcgtcgagagcttaataggaacgtcgcaggcatcaacacatcattcctgctgggtctccaggagattaatggtgctctgctgtatctgaacttgggagcagagttcggtgggctctcatcgcatgagccgcattcacttgtggcaggagctacggggagcggtaaatcggtcctcatccaagctcttatattggacatcgctgcgaccaatccgaaggcgttggctcaaatcatcttgattgatccaaagatgggggtggactatgcgccattggccgacttaccacatatgcgtgatgaaattgtcaccactaaggaaaaggctgctgaggttctggatgctttagttcaagagatggaggaccgctaccgagcttttgccacagccagggcccgtgacttaccaacatataactcgaaagtctcgatcgaagaacgtttgccaatgatcttcttggttcacgacgagtttgctgactggatgcttgacgatgcttataaggctgcggtgggggccgcagttcagcgactcggagtgaaggcgcgtgcggcggggattcatttgatattcgcggcacagcgtccggataaagatgtgatgccgatgcagcttcgagaaaatttaggtaatcgcttgatcttgaaggtatctagcgaggctacctcaaagattgcgcttgatcggccgggcgctgagttgttgttgggcagaggccatctcgcagccaagcttaatggagagcagggactcgtttttgcgcaagccccattcctttccgaccaggatattgaagctgctgtagccgccatccgtttggaaaattcaaataagtaa

SEQ ID NO: 332493 - DNA, 2355 bp, Pseudomonas aeruginosa
gtggctcagccattcaaacacgatgcagcaagcttgctcgatttcttttcgcaaagcgggcgtggtttttacgtcccctactaccagcgcaactattcgtgggacggagagaacgccacgaagctgatagaggacattttctccagcatcaagcgcacacttaccaagccggaaaacagcatctttttgggcacagttatcctccacgatgagaagaatgtgcagaccagcgttcacacagatacgccaaatttgctgaccaaagtggcgaacgtcgtcgatggtcagcagcgcatcacgtcgatcgcgatattggcctgcgtgatcgcagaacaaattggcattacggtagcaaagctcaagtccttttcgggagcagctccggaactcggcaagcttgccaccgagctgacagatgagcttccgaatatccaacgcttctactccgtggagatctccaagactggcgctcagccgaagttgaagcccaagatcatccgagctggcgatgtgtctgcgaatccggtttctgatcagtggacgctcagcggcgacatcaacacgttctaccgctctaacacttctagttttttgtccaagttcatcgcaggcaatgcgctcgaaacaataaagacggatgatcgggtgggctcggtgctggacgtgttcagagacaaagtttccgggcagatcagcgcggctgatgcgacgcttgccacgggtctgctgtccgctaacgccgtgaacgacggcagcctctccagcttcatggcctatccaccggactggacgaatatcaatgctcttggagctgacgagcaggccgcctactgcgggggcatgctgctgctggctgtatgtgcgttcttgaagaactcgtgtcaccttgtggtcatcgagtgcctagatttgggtttggccttcgatatgttccagtctttgaatgctacggggacgccgcttactgccttcgaggtgttcaagcctcaggtcgtgaagacatggggcactggctatccaacggcgattaagccacaggtcgatcgcatcgaggcggtctttgatgttgagagaaattcatcggacaaggaagaactcacggacaaggtaatcgtctcctcggctttagtgttcaatggaatggagtgcagccgtcgattcagcgaagagcgagactggctgacggacactcttgataaatcgctcgcgtcgggccttcccacttcgcattcagtcgactttatcaggtgcatcgctgatcaagctgaatatttcaaagtgttcatcaaacccagaaagtctccaaaagattctcttactttcactctagtcggagtgctgcaaacaaagggactcacgcctcaacaagcggaccgtgccgctctctgtgttttctacctgcgcgacgcaggtcacggtttcgcccactcggtgatcagcgtcttcttttcaaagcttctccgcgctcaaacgaacactgccgccaaggcggcagtagcggcggagtttgtcgaggtgtgcgaggcgacagctgccttcttcactctgtacatgggggctcagcaaggccgtttccctgactcagactatcgaaccttgttccagtcgactgctgggaatatctcttttgcaaatgggcctgtaaatcagactgccgcgttcgtaaaagcagcgttcaggcaggcgttagaaaaccagaaaatctacgacagtgctaatccagccgcagcgcgtcaaatctgggtagaccaggccaaagagaaagcttggtattcgagaaaggcggtttgcaggtttgcactgtttgcttcggcccatgatgcagctccggatatcaccaccggaaatgaaggtctcttcactaatggcatgaccggatcggcagatttactcaactgccgtgtctggcactcaagtacttatgaagtcattgagcacgttgctactcgtgatcaaccatcttcaatcaaatttccctcgcacttcgacgcgtcggtatacccaggcaataattcgatcgtcgacaagcttggcaatctgactttgctttcgggaccagtgaactcgtcgatctattcggaatggcctgacaaggtcttctattactggaacctcaccactccgagatcgacagctgctggcccgagcggggccgctttagcaactaccctcggcattgggaatattccgccagcgctgtcgacgctggtggcggcttccacctacctctcacatttggcgccactagcgttgcgaggacaggccgggcttaaatgggacgctgctttcattacaaagcgatctgagcacttgtgtcagcgcgcttttgacacgcttgacgcttggttgcggtaa

SEQ ID NO: 332494 - DNA, 264 bp, Pseudomonas aeruginosa
gtgccaggccaacgccgctcctatcccaaatctttcaaggcccaggtcgtcgaggagtgtacccagcccggcgcctcggttgccggcgtggccttgagccacggcctcaacgccaatctcgtgcacaagtggattcgccgccagcaggcacagctgcccgcggtaccctcaggttttattccaattcctctcgtcccgagcgtgccggctaccccgagtgcggtaagcgtctggccaacacacctccccggttcttccagctag

SEQ ID NO: 332495 - DNA, 4770 bp, Pseudomonas aeruginosa
gtgtacagcctcggcaggctggatatcgcccgcgacgatgcgggcaaccgtgccgccagcctgcgcaacctttccggggtgatcgagagcggcaaggacttcagcctgcgtgccagcctgatcgagaaccgtcgcgccgtgctggaaagcaagtcgggcctgtacaccgcgaagatggagcagaccgcctgcatcgaaggcgtcaacgcgggcgactgcagcggcaagcgcaacgccatctggaccatcacccagcgcgacaagaccgaggtcaccgccagcagcgccatggggcaactgctggccggaggcgacttcgccatcgacggcggcaccctgaacaacctttccagtctgatcggcagcggcggcaacctcaccgccaacctcgaagtcctcgacaaccagggcctggaaaccggcgagctggaaaccatccgcgtgctgcgtaccgctcgcggcggcgatatcggcggcatcgaccagaagtcgcgcaacttcaccaacctctactggtaccagagcgccaatttcgacccggcgcgcgcgggcgagatccccgccgcgctcaacgcgatcctcagcgactggtccttcgagtacgaattcccgagcaaggggccgaccccgatcagcagtggcgaccagtcctacgcagcggtgatccaggccgccggcgacgtcacggtcaatgccagcacgcgcatcgacaacggcgtcacccgccccggctacaccttcgtcggcagcggccgccaggtgggcgacagcgcggtgggcggcagcggggtttcggtggtcgtgccgctgacctcgcaactgccgcccgacctggcgcggcgccaggtcaacccggttaccctgcccggcttcagcctgccccagggtgacaacggcctgttccgtctcagctcgcgctttgccgaggacggcaatggcagcgccgcgctcggtgccggcgccgaccgcacccagggcggtagcggcgtctcggtcggccagcaaggcgccggcaacgccgccggtacctggcagggccagggcgtgcgagtcgacggcctggctggcgcggccaacgtccagggtcagggcggcagcacgctcggcggtagcctgccgggcgtcgcccgggtccagggcgtgcccggcaacgccacgccgagcgccagccacaagtacctgatcgagaccaacccggcgctcaccgaactgaagcagttcctcaactcggactacctgctcagcggcctgggcatgaacccggacgatagcaagaagcgtctcggcgacggtctctacgagcagcggctgatccgcgacgcggtggtggcgcgcaccggccagcgctacatcgacgggctgagcagcgacgaggcgctgttccgctacctgatggacaacgccatcgcttacaaggaccaactgcacctgcaactgggtgtgggcctgagcgcggagcagatggcggcgctgacccacgacatcgtctggctggaagaggtcgaggtgaacggcgagaaggtcctcgcgccggtggtctacctggcccaggcggagggtcggctggcacccaacggtgcgctgatccagggccgcgacgtgaagctggtgagcggcggcgacctgcataacgtcggcaccctgcgcgcgcggaacgacctctcggcgacggccgacaacctcgacaacagcggcctgatcgaggccggcaagcgcctcgacctgctcgccggcgactcgatccgcaaccgccagggcggggtcatcgccgggcgtgacgtgagcctcaccgcgctgaccggcgacgtaatcaacgaacgcagcgtgacccgctacgacagcgcgctcgacggccgcacctgggaacgcagcttcgccgacagcgccgcgcgggtggaggcggcgaacagcctgaacgtccaggccggacgcgacatcgccaacctcggcggggtgctgcagagccgcggcgacctcagcctcgacgccggacgcgacgtcaccgtcgccgccgtcgaggaccgccagggccagacccgctggagcacgtcgcggctccagagcgtgacccagctcggcgccgaagtcagcgccgggcgggacctgaacgtcagcgccggccgcgacttgacggcggtggccagcaccctcgaagcgcgccgcgacatcgccctctccgccgggcgcgacgtgaccctggcggcggcggcgaacgaggagcatgcctacagcaagaccaggaaggtcacctaccaggaagacaaggtcgcccagcaaggcacccgcgtggacgccggcggcgacctggcgatcaatgccggacaggacctgcgcctgatcgcgagccaggccagcgccggcgacgaggcctacctggtggccggcgacaagctggaactgctggccgccaacgacagcaactactacctgtacgacaagaagaagaaaggcgacttcggccgcaaggaaacccggcgcgacgaagtcaccgacgtcaaggcggtgggcagccagatcagcagcggcggcgacctcaccctgctcagcggcggcgaccagacctaccagggcgcgaagctggaatcgggcaacgacctggccatcgtcagcggcggcgcggtgaccttcgaggcggtgaaggacctgcaccaggaaagccacgagaagagcaagggcgacctggcgtggaacagcgccaaggggaaagggcagaccgatgaaacgcttcggcagacccagatcgtggcccaggggaatctggcgatcaaggccgtggaagggctgaagatcgacctcaagcatatcgaccagaagaccgtaagccagaccatcgacgcgatggtgcaggcggatccgcaactggcgtggctgaaggaggccgagcagcgcggggatgtggactggcgcatggtgcaggaggtgcacgatagctggaagtacagcaactcgggcatggggccggcgacgcagatcgctgtcgccatcgcggcggcagccatcggtggcatggcggcagcgggagcgctcagtggtgcaggagtgggtgccagtagcttcgccatgggcgcaggagttggtgcggcaggaagcctgtcgggcacggcagcggtcagcctgatcaacaacaagggcgatctcgggaaggtgctgaaagacagcttcagtagtgacagtctgaagcagattgctattgcgagcctgaccggggggctgacggctgagtacttcgacgggattcttcagaccaagactgatccgcttactggaaaggtcacggtagacctcagcagcctatctggtgttggtcgcttcgctgccaatcaggcgatgcagaacgctacatccactgtactgagccaggccttgggccagggcgggagcctgaacgaggcgctgaagagcgcgctctacaacagtttcgcggcggcaggtttcaacttcgtcggcgatatcggccaggaatacagcctgaagccaggcgatccttcgatggtgaccatgcacgccctgatgggtggcctggcggcgcaggtcagcggtggcgatttcgccacgggcgccgcggcggctggcgccaatgaagcgctggtggccaagctagaccaggccttcaagagcttgagccctgagaaccgtgaagccatggtcactatggggtcgcaattggttggtgttctggctgcggcggtacgcgatcctgatgtgacaggcaaagctctggaaagcgctgcttgggtagcgaagaactcgacgcaatacaacttcctcaaccatcaggatgtggccgatctggataatgccttgcagaaatgcaagtcccagggaaattgccgtcaggtagaggaagagttcaaggcgcgtagcgacgagaaccggcggaggttgaatggctgcgtggctgtgggtaattgcgcggagattcgtgcggagatcgatgcggggtctacggctctcaacgagctggtggcccggcaggaaacagctaatccgggaggaagtgacagcgatatagcctacggtttcctgatgggccgaaatgttgtcgactggacgacggctggtcagttgcacctggagcagaccgccaacctctggtggaacggtaatccacagtggcagaaggaagtcggtgcatacctagaccagacggggttcaatccgttcggaatcggcgttccggcaatgggcggtgccgctggcaaggtaacggccaaggcgctcatgaatgcgctgaaggcgggagagttgcccaaaggagaggtggccccaggaaaggctaatctgcctaccattggggcgttggcggatgctgaggcgggaatgccttatacccatccagttaagctcgccgcaaaagcgactgggacagcagggaagattaagattgaagccggcgcaatacctgacgcaaatgaagtacgtgcaggacaagggttatctggtcttgggtacgatgttacgcaccaaaccactgcgtcagctaaaggtattcaagggcagcgaactgcggacttgcatgttgatggactcggttccattgatgtgtatacgccgaagaatcttgatccgacaaagatagttcgagcgatagagaagaagtcgaatcaagccggcggagtcttggtgcaggcggacttgccaagcactgacatgtcgtccattgctgctcgtatgtgggggaagactaacgcgcagagtataaaaactatatttttccagaaaccagacggatcattggtccgatttgatcgacctgctggaggaggctga

SEQ ID NO: 332496 - DNA, 924 bp, Pseudomonas aeruginosa
atgaaaaatacctcacctaaaattacccgagtcgcatctgttcatttctcaggccatgagacatttccactgcgtcaaatgtggctcaaaaaagccttcgaccaagcgaccggcgacggactgatcccaaagacaaccttcactgccgaaagctctatcgctgctttcggagtaggtaagaacatggtttcgtccattcgacattgggctttggcatccggagttatggatgacgaaggcgatactttccgtataacaagcctcgcaatggaaatcctgcaggatggaggttttgatccatacgcagaggatcctgctacagcatggcttgtccattggcagctagccggtcggcgccaccgttcaaccacatggtattggctattcaaccatgtcactgcgccaaccttcacacgccaagagctcgaagagcctttggccgaatacgctcgtagcctagaccctaagcatcggctctcaaatgccactatctcgcgagatttggagacctgcttgcgcagctacgcacccaaagctgcaggcggttcgcccgaagactttgccgaacccttactcggtgaattaggcctactccaagaggtccacaaaggccaatatgccttccgccgaggccctaaggcgtctctccatgacggtatttttgcctacgcactcatcgacttctggaacagaaccgcaggcagtcaaagctcgctggctttcgaaactattgcctatgcagaaggctctcccggtcgcgtcttcaagctcgacgaagagtcaatcgcccaaaggctaatctcattggccgaccttaccggaggtaagcttgcttggaccgactccgcagggctccgtcaagtgcacagaaaagctctatccaaggaagatcaaaaagaaatggtcagacgcgcatatgactga

SEQ ID NO: 332497 - DNA, 3309 bp, Pseudomonas aeruginosa
atgctctcggatattgttcagatttcacgccaataccaacgatcaatccggattgatgctgacattggccgttccgacgcattggacgggtatatcgtccattcaactgcatcatccgtcatagctggaatgtgcagacaacttgcgagcacaaaccagcgcagctttacatggacagggccatttggtggcggaaagtcctctctagctgtcgccttggcgagtgcactccatcctgacgaaagcctaagaacgaaagctcgctccgcacttaaactagattcgaaatcagatttcgaccaagcctttcctgtccatgaggggtggttagtcattcctgtggttggccggcggggtagtgttgtaaaagagctggacgcagctatccgaaaaagccggggcatgagcgttgacggccgaagtaagtccaccccccaaaacgtcatagccgatctgattagcgaagccaaaagccgcccaaacgacggtgtcttggtttttatcgatgaaatgggcaagtttctcgaagcatcggccttaggctccggcgacgacgtctattttttccaagagctcgccgaagcttctgctcgcgccgatggccgactggttgtaattggcgttctgcaccaatcattcgcgcaatactccaatcgactgggcatcgacactcgggacgactggggcaaggttcaggggcgttacttagacctcccctttgtcgccgcaagtgacgaggtcgttgagcttatcggcagcgcgatcgaagctaaaggccgccctgattgggcacaaaatgcttctaatgcaatagccgacgccatccgatctcgccgccccgctgtcgggaaagacttttctacagctctagaacgttgttggccactgcatccagctatggccgcattactgggacctatttctaagcgtcaattcggacagaacgagcgcagcacctttggattcctgtcgtcggttgaaccctatggcttccgcgcttatctccagtccacccccttggaccagtcatcttggtatcgccccagtgactactgggactacctacgtgcaaatttagagcctgcaattctggcctcgcctgatgggcatcgctggtcccaagcggttgaggctgtagagcgtgccgaggcaaagtcgggtgatccacttcttgtggcgataatcaaaaatatcgccgtgattgatctattccgtaacggttcaggactttctgcggatctgccagttatctcggccctgttccacgatgtgcctagtgagcagattgaagatgccctgaagaaactttcagcactcaaagtagccttatacaagacctacaccggctcttggtcagtattcgagggcagtgactttgatatcgacgcagctattgcccaggcgctggctgcatccgctggagtcgattacgccaaactctcccaactgatgggaatgcatcccgtagtagccaagcggcactaccatgaaacgggtgtaatgcgctggatggaactatcactgcaaagcatcgagcaggccgaaaaaatcgctaagacctacacaccgcaacggggcgaattcggtcagttcatattagcgcttccaggacgcgatatgtcagcacgcgaggctcgcaagcgagcccaagcatgcgcgtacgaagagccctggccagtactagtaggcatcccttctaatcatgcccgcatcgcagaactgtcggctgaattagtcgccttagaacaggtaaaagagcgtcacgagctcggaggtgaccccgtagctcgccgcgaagtatttgcgcgcttggccgcaaccaaatccgacctcgaagaccagctacaagcagctgtttcactctgcaaatggcacgatggaggcgacacaatcatcgagccaggcacaaaactctcaccgaaagcttcagagcttgctgacgagctctattgtgactgccccccggtatggagcgagttagttaatcgcgatagcctctctagcaacagcgtcaaagcacgccgcgatttgctgcacgcaatgatcaacgccgaaggtgtcgagcggttggggatcgaaggctttcctgcagaacgcggtctgttcgaaacattgcttgtagcatctggcgtataccgcaaagaaggtgacatctggcagttctgccatccacccgaagcttcgcacaaaggattctacaagctttggcaagtcacacaaaaactcttcctcgacgcgagtacacgagtaagccttgcctcaatctatgagcgctggcgcctacctccgtttgggatgaaacagggcatattgcctgtatttcttactgcattcttgcttgcgcacaaagccaacatcgccgtttataaagacggcatgttcatcccccgactaagcgatgcggatattgacgagtgccttcaagccccgacgcgattcacactacgctggatcgctattgacgaagacaaagtccaaattctagagggcatttccactctcctagaggaggtcggggagaaaatcgactctgcagaccctctcgaggccgcacgcggactcgttgcattgattttcagcctgccagaatgggcacgacgcacacaacgcttaggtgaagtggcaaaagctatacgcgacatgttgttgaaagccagcgatccacacaaagtgctgttcatcgacttaccctcactgcttggtgctgatgacggtacaacttatgtagaaacactgcgtgctccacttcatgaaatcgcagcagcctatcccaagatgctctctgaagttgaaagcaagatgcttgaagcgctcgatgcgcctctcgacaacttggattcgctccgtaaaagagcaaaggctgtggcaggggttgctggcgacttcaggctcgacgcattctcgacacgactggcgtcatacgatggtagtcgcccggcactggagggcattctgagcctggcagccgaaaagccgccacgcgactgggttgatcgccatatcgatgcggccgtgcttgaacttgctcagttcgcacgtcgcttccgagaagcagaggcctttgtctcagtcaaagacaggccagcacgtagcgaggcgatcgctgtcgtcatcggcgccggagcggaaaccacaacgatctctagatcattctcgatttcggaccgccatcgtaaaaccgtagacgacaaggccgctgaactcacgtcgatgctacaaggccaaggccttgaaacggacatcttgctggcgatccttgccaaagcaggaatgagtctggcgagtgaaaaggagaaaatggatggctga

SEQ ID NO: 332498 - DNA, 843 bp, Pseudomonas aeruginosa
atggctgagcgacacgtactgggcttgtccggtgggaaagacagcgctgccttggcagtttggatgcgtgatcatcgccccgaactaaacattgactacttctttactgatactggcgaagagcttcccgaagtctatgaattcttagggcgactcgaaggctatttgggtaaaaccatcgaacggctcaatccacaccgcgactttcgcttttggcttcgtgagttcaaccatttcttgcctagcccacagactcgctggtgtacacgtcagctcaaacttgtaccgttcgaacagtgggtcaaaccatggctagcagcgggagataaagttttttcctatgtagcgatccgggctgatgaagagtatcgcgaagggtactcagcaaaatctgaaaacatgcttgtgaaattcccgttccgtgaagttggcatagataaagctggtgtcatcgacatactcgaatcctctggattgggctatccaaagtattacgaatggcgctctcgcagcggctgcacattctgcttcttccaacagaagatcgaatgggtgcgccttaaggaacgacatcccgaggactacgaaaaggctaaggaattagagaaagatgcactggaacatggttcaccttttacttggacaaaaggtgaatcgctttcggatctagaaaagcccgcgcgcattacagagatcaaagccgaatatgaggttcgtcgcgcgcgccttcgtaagaatatccctgtgaaccccctacgccccgtaaaaagctgtcccgaagacattgacgatatctacggggaggacgaaggtaacagctcgtgcctcatctgccacaagtaa

SEQ ID NO: 332499 - DNA, 246 bp, Pseudomonas aeruginosa
atgcgaacctggccgttactggtgatcgagcccttccatgcggtcttgccgctcgcccggattgcacagacctcgtcgatcttcttacccagggcgaaatggatgtcaaaaaagtactcgaacccgaccgtctgtgccttcggtttagcgcccatcggctacctcctggcatgcgtgctcaaccagcttgagcgcgagcgcgtcgccggtcgcgaccagcacgtcggcctcgatgccgtcccgtag

SEQ ID NO: 332500 - DNA, 666 bp, Pseudomonas aeruginosa
atgacaacggctgcgcctaatgttattctttcgagtgtgcaatactcacaggcgcaagcgcgcagaaaccacccttgtcagcctcgacacaggagtttgtcagtcatgaagaaaattctcgggctcgttgttctttcgcttttcgcgatcagcgcttcggccgcggatctgatggcgtcctcgacggcgccaaccgtcacacagaacatcgttgtagaaggcgccccctgcccgggtgttggggcgacggggttctcttcgacgggtctgctactttcttgccaatccggtagctggacacagctatcgaaagtcagccgatacgccagtattgatctgagcgccgcactagatagaggaccggacggcctatgtacagtcgtgttgaatactcgctatctggaacacacttttgagttagattcaaacagcttactgctgctaaatggttatatggggtctgcagacgtagcggggaatgttggtggcctctgtctgtttgtaaacggcaaattatgcaatgccgaaagtgtggagcaattcagatccgcttccgcaagttgcattgttcccgttgccgctggaacagtaagtatcaggattgttggcgcccaccgttatggtttgcacgccttcagagcagggtatgccgctcttccgatgtag

SEQ ID NO: 332501 - DNA, 1026 bp, Pseudomonas aeruginosa
atgcgtaagaaaactggactcgtcgattgctccgatctggcacaccagatcgaggaagggctcaactccatcgacgccgagcttggcatcgttgcatttcaagcgaccgttgccggtccggctgaggcgcttaaagcctccacgcgagccgtttcgaaggctgcccatgaactgacagacagcaaactggtgaggctctataccgccgaggagagagcccgctggcaccagttcgcacaactcccaccgatgcgcttcttcctcgacaagctgggcccaaaacagagcgacgctctggccaccgtaatgagcaaatgggttgggtttccgacgctgctcagccaggcgacaaccctgcgcaaactctgcgtgacgacctcgatcgcatccagcggcctcgcttacgtcctgagcaccgatcttgggcaggcgatggttgccaactgcgagggcctgctggatctcgccccctctgaagctcacaccgtcacgggcatcaccatggtcatggcggcatatgcagtctccaccctactcaagacggccgtctgcttccgggcccacgcgaggcatgacgaaatcgtccgcagggcccaggagtggaatgacaagctcgaacgaagctggcgggatgtgttgccaagactcctcaccctggggctgcagaaggtgatctctccctaccctgcgtacgacgaaaacgcactccagaagattcgcgccgccgcggacggcggactcttgaaggggctgagtaaggccgagctcgccccactgcaggcggtaaggacccacctggtgcagcactatggcatcgacgagctgcaggctcctgccattgccatcaatctcctcgctcacgaggaatcgaacccaaaccgcttactgagcaccctgcacaccagaagcctgccggccgactggatatccaagtaccagatagacccgcgatattgcgttctaagcggtgatgatgcaccggccacgccggcggttgatgcgccccctcaggagatgagccgatga

SEQ ID NO: 332502 - DNA, 279 bp, Pseudomonas aeruginosa
atgaccgagccagagttgctgtatgagctgattggctacctggggtcaactctcattgctgcagcattccttggagcctgcctcggccttacagagaggcgtccgcgctggttcctgatggtcaacctggtgggcgccacagcgctctgctttcccgcataccagagcggcacagccgcggcgctggcaatcaacggcttctggatattggttgcattttctggcctggtggcagcttggcgtcgggggatctccccctccccactaacaggccgttga

SEQ ID NO: 332503 - DNA, 1374 bp, Pseudomonas aeruginosa
atgaaggcgagctttcgcctggaaatcgttaatgagccgggcgcgccttcacacaatctctatctgcgtacctatattcttgaggatgcagagaaaagggtttggcattcaacacctgaaagcgaatggccattactggcgtccataacgccaaaccagatcatcatgcggccgatccatgtgaacccgcatgcacagcgctatctgtcacccaagaatggccgtttcactacggtcatctatgcgggtgaaatcggcgacaaattgcccgctgacgcttccgccgcggagacttttattggcatgcatttaccttggaaactctttgattctccagggtatgggctcggtttacacaaggatattgaccccgtgtggcaaggcctctcacgggtcccaaacgcaacagtcctagtgattagcgatcggccggaccaatacgcacgcgatggagtggtttccattagtgttgacgagctcgacaagctccgccgtgacttcaatagaattacgattcgaggccgccagctagtccggcaaaccaaacagggccttgtacacgacgatgtgctcaaccggatcgaccctgatcggttccaacgaacagcacgagtggctccgcccttggttgaagtacgacgtgaaggatcaaggcaaactgttacccgcgagcgaaccgagcgtagagccaatgtgcgagctgtacgcaagcaactcgatgagttagcgactgaggcgccacaagagctgatgatgctgcatgcggagatcgagcgggtgaccctcgccaagatgatcgaagcattcagaatgaaactcgccggcagttccaacgaatctgcttggcagaaattcttcgaggtgaacaagttcgtcctgagcctggcgtttgctcggcccgtggagctagcgcatacgcaattccatgcaaaaggatccaccttgcccggatcgggcgctcagatcggtgatttcctgttcaaggaacatggtcaagcgctagctatcgtcgaaatcaagactccaaagacgattttgctgcgggccaaagcctacagaggaaaggaggtatttggaccaaattcggagctatctggtgcggtgccccaagttctgttccagcaaaacgaactcaagcagcgttgggtacaccatcggcatgacacaccaggaatgcatctgtcaggcgccgacgccatcaagtgcgtggttgtggcaggaaccttacccaccgatccgattcagctccgaagcttcgaggtgttccgaaacgcctgtaaggacgttgatatcgtcactttcgacgaactgctggcgaagctagaatttctgaagacacatttgaccccagagcctgaggaagacttattttga

SEQ ID NO: 332504 - DNA, 180 bp, Pseudomonas aeruginosa
atggagacagaatatgagcagctcgttcgtgcgaaacgtgagcgtcaagaggcgcgttcaaactatagcgcttcactaactgacgcggagcgcgaagaggatgggcggcggattcttgaggcctggaagaaactgccattaaagatgaaaagccgccgtccctatgagggctctttttaa

SEQ ID NO: 332505 - DNA, 567 bp, Pseudomonas aeruginosa
gtgctgcctggagtgattggcctgctgcaggcaaccgaggcggtgaaggccctcgtcggcctgggcaagtccctatcaggcagacttcttcgattcgacgcgctgctcatgcacttcaatgaagtgaagttcaatcggcgcgacgattgtccggcctgcggcaaaaccgctgcagagaatccccgccactggagggagggattgctctgccaggcaagcgcggcaccgtcgcaacgactcgacgacgatcgctatatcgatcccggctgcctgttgcagttgatgaaatccaacagcgaaaactatgcccttctggatgtacgcgacgcgggcgagctcgaagtgtgccagttgccggggatcgtccacgttcccttgaacgaactcgccagccatttcgccaatctcgacttcagtaagcgctacatcctcgtgtgctacgccggcactcgtgccgaacgcgcggccatacagctcatgggggcagggttctccaacgtccaagtgctcgatggcggcatgaagcgatgggcgaaagagatagagcagcacatgccgatgtactga

SEQ ID NO: 332506 - DNA, 1269 bp, Pseudomonas aeruginosa
atgagtggcgtgagctcggcgaaaccttatgacatagcgaaacgcacggtatgggacgcctaccagcaggtcagggccaaccgcggtgctgccggcatcgacgatgaaaccatcgccgatttcgagcgggatctgtctaagaatctctacaagctgtggaatcggatgtcgtcggggtcgtacttcccgcctccggtcaagcaagtagaaattcccaaggcatcgggaggcacgcgcaagctgggagtgcccacggttggtgatcgtgtcgcgcaaaccgtggtcaagcttctcatcgagccggagctggactcgatcttccactcggactcctatgggtaccggccgggacgatcagcgaagcaggcggtggcgatcacgcgtgagcgctgctggcgatacgactgggtggtggagtttgatatcaaggcagccttcgatcagatcaatcatgggttgctgatgaaggcggtgcgcctgcacatcaaggaggactggatacttctgtacatcgagcggtggctggttgcgccgttcgaaacggatcacggcatgcgcgtcccacgcgaacgcggcaccccgcaaggtggagtgatcagtcccctcctgatgaatctgttcatgcactatgccttcgacacctggatgcaacgtaccagccccaactgcccgtttgcccgctacgccgatgatgcggtggtgcactgccgcagtcgaaagcaagcggagtacgtgatgcgctccattgcttcacggctggctgcctgtggcttgacgatgcaccccgagaaatcgaaggtcgtgtactgcaaggacagtaaccgtcgcgcaggttatccgcatgtgagctttaccttcctcggcttcacctttaggccgaggaaggcgctcagcaaacaagaccagctcttcacgagcttccttccgggagcgagtgcggatgccttaaagcggatgcggcaagcggtacgcaggtggcgactcaatcgccaaacccacgtgacgctggtcgacgtggctcggctctacaatccagtgatacaggggtggtggcaatactatggctcgttctatcggacagccatgcttggcatcttccagcacattgaccgcgcgcttgaacgctgggcccgacgaaaatacaaggctcttcataggcgcaagcggcgcgttagccaatggctggacaagatgcggactgtggtaccccggctgtttcatcactggcgagtgaccgggcagcaaggttggataacgggagccgtatga

SEQ ID NO: 332507 - DNA, 1329 bp, Pseudomonas aeruginosa
gtggtggacgacgagatagttcgggtcgatgcggtcaactacgccagcggtactgtcaccctggcgcgcggctgcgccgataccgtgccggccaagcacttggccggggctcgggtctggttctatgacacgttcgaaacggtggacgagacggtctacagccagggcgtgacccttcaggtcaggatgctgaccaacaccagtgagggccaactggccccggcgctggccgcctctgacagcctcaccctgaccgggcgtcagggactaccgtacccgccgggaaaccttcgaatcaacggccagcctctgggagcttcgtctatcacaggcgagttgacggtgtcttgggctgggcgtgaccgtattcagcaagctgaccagctcctcgaccacaccgtcggcaacgttggaccagagccgggtactacctacagcctcaacgtttatggcgagactgggactcgggtcaaagcgctgacgggcctgacctcaacggcctggacgtggccggagtctgatgaggtcggtgaatcgggactcggtctcgatgtcgatctggatgccctgcacgccgcaattctggccgatgccccgtatgcctactacaagctggatgccggcgcctcgggacagtctgccgctgactccagcggtaatgcccgtaatggcacctggcagtcaggcgcggctggaggtggccgttacgcgggcgtgatctgcgggcgattcgctccaggtggacagcgggtggcgctgcccaacgggttcaacgactgggcgcagggaatcagcgcgtttgcgttgtggaacacgacaggcgttcggagctgggagcgggtattcgaccttggcaacggcattgccaataacaacatcctgctcagtcgaaacggagttaccagccaactgtcgttcggggtctggaatggcaccagttccgggccggcgctcaacggcggcactatcgtaaatggccgctggcaactggtcgggatcacgatgggcgccgaccgggtcgccaagctctggatcgatggtcagatcgtcgcgacttcgaccctgccgagcctgccgcaggcggtgaaccggacatcgaatatgctcggttactcgccctggggcgagcagacagacgcgcggatggccgctgtggcgatcttcaacaaggggctgagcgatgcgcgggcggtggcctactgggacacagtcaaggaccagttgaatcgggggcgcttgaacaacagcctgcgcctggaactgtggtcggtacgcgacggcttgaacagccagcagcgccatgacgtgacggtgacgcggagcagctag

SEQ ID NO: 332508 - DNA, 1125 bp, Pseudomonas aeruginosa
atggcggccatcctcttctgccgaagccagcccaagccgatgcgtggactcgacctcaaacaaaacgagctgttcagttatacgacgctggagcagcgcatcccgaacgatcacccgctgcgtcccctgcgaggcctggtcgataccgttctggcttcgatggatcgggacttcgacgggctgtactccaccctgggacgggcctcgattgcgccggagcggctgctgcgcgcctcgttgctgcaggtgatttacaccattcgctccgagcggcagttggtcgagcagattgatttcaacctgctgtttcgctggttcgtcggcttgtcgatggacgagcgcatgtgggatcactcgaccttcagccagaaccgtgaccgcttgttcaaccaggatgtagcgcggctgttcttccagcgcatcaagtcgctggccgcatggtccgagtacgccagcaacgagcatttcagcgtcgatggcacgctgatcgacgcctgggcctcgcacaagtcctttatcaagaaggatggcggcgacccaccggaggatggcacgcgcaaccccgatgccgacttcaagggcgagaagcgcagcaacgcgacccaccaatcgaccagcgatcccgaggcccggctggcgcgcaagagcaatggcgatgccagtcgtctggcgcacatggcccacacgatgatggagcaccgcaacggtctgatcgtggatgtggaatgcaccgagttcaatggacgtgccgaggtagaggcggcgctggagatgctggagcgcacggccaagccgggcagcacggtaggtgcagacaagaattacgaccagaagcgtttcgtgcagagggcgcgcgagctgaaagtgacaccgcatgtggcgcagaagcgcaagggcagcgccatcgatgggcgcaccacgcggcatccggggtatgccgccagccagaagatccgcaagcggatcgaagaaggttttggctggctgaagacggttggcggcctgcgcaagaccaagctgatcggtcgcgccaagctgagtgctcagttattactgggtttctcggtctacaacctgatccgactgggtagcctgtcgggttggtggcgaggatcgcatgtatag

SEQ ID NO: 332509 - DNA, 870 bp, Pseudomonas aeruginosa
atgcgcctcggccatgccgccatacagctcagcggcgaccccgcccttggcctgcagatgggccgcctgagccgtctcggacagatgggcctggccggcgtcagcgtcgcccaggcgcccaacctgcgcgccgccgcgcgggcaatgatccacctggaaccgctttacgcgcagaactaccggggccagtcgagcctggtggaagacgccggcggcgcctggctgcgcttctattcgatcagcccttataacgcctataaccgcttcgtcgtcgattcggtgctggcaggctggatcagccatctcggcgccctggcaaggcagccgttgaaagcggagcgggtggagatcgaatatccagcgccgccttgggccgagcgctacgaggcattcttcggctgccctgtggaattcggcgcgccgaccaaccagttgcgcctgagccaggccagcctggccctggcgaatgccgagcactgtccgagcacctggaaccagatgctggaactctgcaaccgcgaactggagcagttgacccgcacccgcagttggcgcgagcgcgtcagccgcctgctggggccgatgctcaatggtcgcgaaccggacctcgaggaaatcgccgcgcgcctcaagttgccgacctggaccctgcggcgcaagctggccgaggaaggcacccagttccgcagcatcctcaacgacacccgccgcgacctggcgatggtctacatccgcgagaccgacctggctttcggcgaaatcgcctacctgctcggcttcgcctcggcggaagccttccagcgcgccttcaagcgctggagcgggcagacgcccggcgaattccgccgcgcccagcgacagagcgcatga

SEQ ID NO: 332510 - DNA, 738 bp, Pseudomonas aeruginosa
gtgctacgcagccaggtcaaccagttgttcagccagagtcggggctcggccggcagccgcagcatcctgggcatgctgcgcgaagagggcgtgaccatcggccgtttccgagtgcgtaggttgatgcgtgagctgggcctggtcagcaagcaaccgggctcgcacgcctacaaacaggccacggttgagcggccggatatcccgaatcggctgaaccgcgaattcgcgaccgagcatcccaatcaggtgtggtgtggcgacatcacctacgtctgggcgcaaggccgttggcactacctggccgcggtgctggatctgcatacccggcgggtgatcggctgggcgttctcggccaagccggatgccgaactggtgatcaaggccctggacatggcctacgaacagcgcggcaagccacagcaggtgctgttccattcagaccagggcagccagtacgccagccgcctgtttcggcaacggctctggcgctatcggatgcagcagagcatgagtcgccgagggaattgctgggataactcgccgatggagcgcctgttccgcagtctgaagtcggagtgggtcccgtcaacgggttacctgacggcgcaggaggcccaacgggacatcagtcattacttgatgcaccgctacaactggatcaggccgcatcaattcaacgacgggttaccacctgcggtggccgaagaaaaactcaacccactgtccgggatgggttga

SEQ ID NO: 332511 - DNA, 1362 bp, Pseudomonas aeruginosa
atgagcctgttgcgcgatgcctggcgccacgccccgacccaccacagggtctgggcgctggccgggccgatgattctgtcgaacgtttccgttcccctggtgcacctggtggacagcacggtggtcggccacctgccgcacgcctaccagctcggcgcggtagccgtgggcggcagcctctacaccctgatggtcggcgtgctcggcttcctgcgcatgggcaccaccggcttcgccgcccaggccgccggccgcgatgatggcggcgcgctgcgcctgatcctcgcccagggcctgggcatggcgctgctcctggccctgctgctcggcgcgctggccctgcccctgagcggctgggccctgcaactgatgcaaccgtcggcggaactgaccggcgaggcccgcgccttcttccatacccgcctgctcggcctgccggcggccctggccagctacgcactggtcggctggttcctcggcacgcagaacgcacgggcgccattggcgatcctgttgaccaccaacctgagcaacatcgccctggtgctctggttcgtccacggcctcgactggggcgtgcaaggcgcggcccgcgcctcggtgctggcggaatggagcggcgccctgctcggcctggccctgacccgacgcgacctggcccggcgccccgggcgggcgcagtggcaacgcctgcgccactggctgtcctggctgccgctgctgatggtcaaccgggatatcttcatccgcagcctggccctgcaactggtgttcttcctgctcaccgtacagggcacccgcctcggcgacgccacggtagccgccaacgccctgctgctcaacggcctgctcctgacgtcctacgccctcgacggtctcgcccacgcggtggaggcgctctgcggccacgccatcggcgcccgcgaccgaactgccctgcgccgcgcgctggtggtggccggtggttggtcgctgctggcaagcctggcgttcgccgcgctgttcgctctgttcggccacctgttcatcgacctgcagagcgacatcgccggcgtccgcgaagtcgcctacgcctatctgccgtacctggcctgcctgccgctgctggggatgtggagctatctgctcgacggcctgttcatcggcgccacccgcgcccgcgagatgcgtaacgcgatgctcgtcgcggtggccgccagcctgcccctcggctggctgttgcaggggctgggcaaccacgggctatggctggcgttcctcgccttcatgctgctgcgcgggctggtcctggccgcctacggctggcgcctgacccgccgcgatggctggttcgccgctcagggcgccgacagcgggcgatag

SEQ ID NO: 332512 - DNA, 1008 bp, Pseudomonas aeruginosa
atgagcgaacagacgcccgaacaaccgagcaccacgcccaacccggcgctccagcgccagcgcgcgagccagttggcccaggccctgcgcagcgaactgcagaaagccctgatcggccagggcgcggtgatcgacgatgtgctcaccgcgttgctcgccggcggccacgtgttggtggaaggcgtgccggggctcggcaagaccctgctggtacgcgccctggcgcgctgcttcgacggcggcttcgcgcgcatccagttcacccccgacctgatgcccagcgacgtcaccggccacgccgtatacgacctcgccagcgagcagttcaagctgcgcaaggggccggtgttcacccacctgctgctggcggacgagatcaaccgcgcgccggccaagacccaggccgccctgctggaagtgatgcaggagcgccaggtcaccctggaaggacgcgccctgccggtgccgcagccgttcatggtgctggcgacgcagaacccgatcgagcaggaaggcacctatccgctgccggaagccgaactcgaccgcttcatgctcaagctgcgcatcgattacccggccgaagccgaggaacagaccctggtgcgccaggtgacccgctccgcgcgcagcgacatgctcgacgtggccaacctgcggccgctgctgaaggacaaggacgttctcgccctgcagcggatcgccagcgacctgccgatcgacgaccaggtcctcgactatgccgtgcgcctggcccgcaccacccgcaactggccgggcctggccctcggcgccggacctcgcgcgtcgatcgccctggtccgttgcggccgggcgcgggcgctgctgcgcggcggcgagttcgtggtgccggacgacatcaagggctgtgccctggcggtcctgcgccatcgggtccggctgtctccggagctggacatcgaggggctgtcggtggaccaggtcctgcaacagttgctcgaccaggtaccggccccccgcgtatga

SEQ ID NO: 332513 - DNA, 1572 bp, Pseudomonas aeruginosa
atgcgcctgactgacgccagcgtggcgattcgaccacgcagcgcctgggaagcgctcgacctcggcatcctcctggcgcatcgccatgcgcgcctgctgatgggcagctgggcgttgctgaccctgccgctgttcgccgtgctcagcctcctgctgtggcagcatccgaccctggcgatcctgatcttctggtggctcaagccggccttcgaacggctgccgctgtacattctctcgcacgccctgttcggcgatacgccaaccctgaagcaggccctgcgcgcctatcccgccctgctgaggaaacagttgccggccagcctgctgtggcgccgcttcagtccgacgcgcagcttcgacctgccggtcctgcaactggaagggctcgccggggagccccgcagccagcgcctgatcgtattgtcccagcgcaacgccggcggcgcgacctggctgaccgtggtcggcgtgcacctggaaatggcgctctgggccggcttcgccatgcttctctacctgctgatcccggcgcagaacgagatcgactggaactggcagagcctgctcgacccggaagccggcgagtggctctggctggagcacctctcgaacctgctctacgtcctggtgctggtagtctgggagccgatctacgtggcctgcggcttcaccctctacctgaaccggcgcaccgaactggaggcctgggacatcgagctggtgttccgccgcctgcgccagcgtctggtcggcagcgcctatgtcctgctgctcggcctggccgcttcgctggcctggctgcccgccccttccgcctacgccgagccggcggccgccgccagcgccggcgacgccgagctgccgcccgagcaggcccgcctgctgcggcagaaactcaacagcgaacaggccggcaagcagatccgggcgatcgtcgacggcgcgccgttcaagaacagcgagaccgttacgggctggcgcttcggcgacaagaccgagaaaaaggacagccgcaaggaggacgaagagcggctcaaggcattcttcgaggccctggccaactgggtgccgttccgtcacgcggcgcaggtcatcgaagtgctgctctgggcgctgctgttcagcgcggtgttcctgctggtctggcgctaccgtgaatggctgcgcctgttcgtcggcaacctgggcttgccgcaacgggcccgccgcgaagcgccgacggtgatgttcggcctcgatctcagtccggaaagcctgcccgacgacatcgccggcaacgccgaacggctctggaacgagaaaccacgggaagccctcggcctgctctaccgcgggctgctcagccgactgctgcatgactaccgcctgccgttgaagggctcccataccgagggcgaggtcctgcgcctggtcgaaggactggagcaacaacggccgctgctgcactacagccaactgctgaccgcccaatggcaggcgctcgcctacggccaccggctgccggccgacgacgctcgccagcgcctctgcgatggctggcgcagccttttcgccgcgggagccaagccatga

SEQ ID NO: 332514 - DNA, 627 bp, Pseudomonas aeruginosa
atgacacgtattcactcctatgtagtgcggtacgacagtggttttgcacccaaccccttctatagctactgcacgctcgcgacttgcaaacccagtatccgcagaagcgctgacatcggcgattgggtggtcggtagtggaagcaatgatcgaagtgtccgacgcggtgggcatctcgtgtatgcgatgcgggtcaccgaagcaatgacatttgacgagtatggccgagacccgcggtttgaatccaagaagccgtaccgcaatggcagccggaagcaaagttgcggggacaacatctacttcagggctgcggctggggttgcttggcagcagcgagactcatttcactcccgccccgatggctcgctcaaccctgaccatgtggcccgtgatacaggcgtcaacagggttttgatcagcaacgatttcgtatatttcgggggtgagggccctgcgtttcctgatgaattgcaagatcagcaaggtcgccctctatgcaaaacgggaataggcctcacagcctttgacgatgcgcaattagttggaaatcttgagcaatggattcgcaacttggcagtgagcggctaccaaggcgccccattcgaatggctgactcttcgcaggtga

SEQ ID NO: 332515 - DNA, 318 bp, Pseudomonas aeruginosa
atgagcaccctgatggaagacgacatcaagcgctggacagccaagcgtaagacggcccttgtcctggacatcatccagggcaagaccacgatctcggaggccagccgggccttcgacctcaacccctcggaggttgagcaatgggtcgatgaaggcaagcgtggcatggagaacgccctgcgcaccaagcccttggaagtcaaagagcagtacgagaagcaactgcgcgaacttcagcaggcctatggcgaagccatgttggagctgcgtgccagaaaaaagctggcgtccctgctgggcaacgaggacgagaaatga

SEQ ID NO: 332516 - DNA, 822 bp, Pseudomonas aeruginosa
atgatcctcagccttcagcagggactggcccaagacggattcaaagtcagcctggtcaagctgtgccattggttcgagatgccccggcgcacggtgtactaccgcagcaccaaggcaccaccgaaggttcaggaacacttcgtcaagcccatcaaggccatgatcgaagagaacccgtcgttcggctatcgcacggtggcgcacctgcttggcttcaacaagaacaccgtgcagcgggtcttccagctcaagggctggcaggtgcgcaagcgcccggtgggcttcaggcctcgcatccaggcattgccttctgtggccaaggcgccagatgagcgctgggccaccgatctgtgccgcgtgtggacagggcgtgatggctgggcttcgctggccctggtgatcgactgctacagccgcgagctgctgggctggcacctcagccgaagtggccgatccaagaccgctgaagcggcgctggagcaggcgttgattgccaggtacggctgtctgggcaaggtccggcacccgttcctgttgaggtcagacaacggtctggtgttcaccagccgcagctacacggccttggtcaaaagctatggcctgcagcaggagttcatcaccccgtacagcccggagcaaaacggcatggtcgagcgcgtgatcagaacgctcaaagaccaatgcgtgcaccgccaccgcttcgagacactgcagcacgccagtcgtgtgatcgcagattggatcggcttttataaccaccggcgccctcatcaggcgctgggcatgaagacccccgctgaggcttatgctttagcagcctga

SEQ ID NO: 332517 - DNA, 582 bp, Pseudomonas aeruginosa
atgagtgcaatcttcctctcggccagcgtgccacttgtagggcgtggcacttaccacgaaaccgccgatccatttcttatccaatgtgcggtgagagaactggtcatagcagtcattcgccagcacaagatcgtgtggggtgggcatcctgcgattaccccgatgatttggagcatatgtgaagacttgggggtcgactactcgcagtctgttgtcttgtatcagagcacgttctttgcagaaatcttccctgaagagaacaagcatttccaaaatgtagtcttcaccgatgcagtccctaatgacagggcggcaagcttgcttgtcatgcgcgaacagatgctctcacgtgaggacttaagcgctgctgtgtttattggtggaatggatggggtagaagctgaacatgagcttttcaggcgcttccatcctgcagccaaggtgctcccggtgtcctcgccaggcggagcggcgctgaatctcgccaaggaccatagctatttcaccggggaagcgcttgtcgatgtggactttgctcagctcttccatgagcatctggcggtgcccttggctggcaagtag

SEQ ID NO: 332518 - DNA, 1143 bp, Pseudomonas aeruginosa
atgccagccctatatcaacttgccctgcttggaacaccaactgcagttcaaatttccgaacttgaagaagtcatcggaaaggctgtcggcatgttcaatttgcggttggggcatgagattggatgggaggtttgtcccgatgaattcaatccagaccaacagcgatcgtctgctgcggcatttttcggaggtcatgagcctcctcttgccaatgtggcaagactgctggcgcgaggcatcccattgctcccggtcgcctctgacgtcaatcgagtcagtgcagaaatccccgcattgctgcagccgctcaactgcttagcatacgccgcaggtgggccgcaacgtgtcgcgtctgctttgctggagtgtgctgggctccttcctcgacagcgccgggtgttcgtaagctatcgtcggggcgaggctagggaagcagccttgcagctattcgatgcgctgtctgctcggctatttgatgtatttctcgatacacatggtattccacctgcagaagatttccagacaatgctatggcaccggctttgtgactcggatgtcctgctgatgctcgacacgccaggatattttgaaagccgttggacgagtgctgagttcggacgcgctttggccaaaggcatcagcgtcttgcgggtcggttggcctgacacaacgccttctgcgcgcacggcaacggccagtcgggcggaactgttacctgaagaagtcgatccgacgaccggacgcatcgcagacggtgcggtggatcgcatttgtcttcaactggaggaagttcgcagccagagtcacgcggttcgctctgtcaacctcgtaagcaatctgcgcaatgccattcaaacaatcggcggccaagtcgtcggagtgggcgccaatagagctgtatatgtccaactgcccgatgggcgaaatgtagttgtttatccaacggtcggtgttcccacgtcaactacgctgcacgatgcgtctacgaactcaccggaacaatccgttgccgtggtctacgatcacgtaggtctgcatcccaggtggctgggccatctggactggttaggacagcacattcactccgctaggtgggttaaagccagcgaggcgggttggcaattcgcggactgggaggcgtag

SEQ ID NO: 332519 - DNA, 831 bp, Pseudomonas aeruginosa
atgagtatcgtcacgatctatcacaacccggattgcggcacgtcgcgcaacacgctggcactgatccgtgcaagcggcatcgagcccacgatcatcgagtacctgaaagcgccgcctgaccgggaaatcctgaaggcactgatcgcgcggatgggcatgcgcgtgcgggatgtgctgcgcgtcaagggcacgccctacaaggaattgggcctggacgccatgcattggagcgacgaccagttgatcgaccagatgctggcgcacccgatcctcatcaatcggcccatcgtggtgtctgcgctgggtgtgcggctgtgccgtccttcggacattgtggtcgagctgttgccgcagcggcaggcaggcgagatccgcaaagaggacggcacgctgctcctcatagacgcgccaatcgccggcggcgatcccgaccttgccctggcgctgcagggggccgggcttcccacggatgacttgaccgagccgggacgccgattcttcgcctatgtcacggtgtcaggggagcgcgtgggctttggtggcttcgagcgcatgggccagaacgtgctggtgcgctccttggtggtactgccgcaagcgcgccatcgcggcatcggcggcggcatgctcgcgctgctgctgcgccgcgccttcgacgaaggggggcgcgaagcctggttgctgaccacgacggccgcgccgttcttcgagcgcgcgggcttcaagccgatggagcgtacaagcgcaccggcttcagtactggcgacgcggcaggctgcgaacttgtgtcctgccagcgcggcgttgcttaggcggtcgatccatctgtag

SEQ ID NO: 332520 - DNA, 1095 bp, Pseudomonas aeruginosa
atgaccgcaggagccgataccgccggccgcgcgccggcggcgcccgccatgagcgtcttcgagcgctacctgaccgtgtgggtgctgctgtgcatcgtcgcgggcatcgccctgggccagctcgcgcccggcgcgttccaggccgtcggccgcatggaagtggcccaggtcaatctgccggtcggcctgctgatctggatcatggtgatcccgatgttgctcaaggtggacttcggcgcactcggccaggtgcgccagcactggcgcggcatcggcgtgacgctgttcgtcaactgggccgtcaagccgttctcgatggcgctgctggcctggctgttcatccgccaggtcttcgccgactggcttccggccgaccagctcgacagctacgtcgccggcctgatcctgctggccgccgcaccttgcacggcgatggtgttcgtctggagccggctgaccggcggcgatccgatgttcactctgtcgcaggtggcgctgaacgacaccatcatggtcttcgcctttgcgcccctcgtcgggctgctgctcgggttgtcggccatcatcgtgccctgggacacgctgctgacctcggtggtgctctacatcgtcatcccggtcatcatcgcgcaggtgtggcgccgagcgctgctgcgtcagggccaggcggcgttcgaccgcgcgctggcgcgcatcggtccactgtcgatcgcggcgctgctgctgacgctggtgctgctgttcgccttccagggccaagccatcctgcagcagccgctggtgatcgccatgctggcggtgccgatccttatccaggtgttcttcaattccggcctggcctactggctcaaccgcaaggtgggcgagaagcacagcattgccggcccctcggcgctgatcggcgcgagcaacttcttcgagttggccgtggcagcggccatcagcctgttcggcttccactccggcgctgcgctggccaccgtggtcggcgtgctgatcgaggtgccggtgatgctgctggtcgtgcgcctggtcaaccgatctcgtggctggtacgaacaggccccgcgcaacgcagcgagacatccggcatga

SEQ ID NO: 332521 - DNA, 498 bp, Pseudomonas aeruginosa
atgacgactgaagttacctacaacgcgctgttcatctgcacgggcaattcggcgcggtcgatcctcgccgaaggcatcctcaacgcattgggccaggggcgcttccgcgcctattcggcgggcagccatccgaaaggcgaagtgcatccattggcgctcgccacgctggagcgcctgcacctgtcggcgacgggctaccgcagcaagagctgggacgagttcgtggcgccgggtgcgccggtgttcgatttcatcttcaccgtctgcgacaacgccgccggtgaggcgtgcccgctgtggccgggcgagccggtatcggcccattggggcgtgcccgacccagcggccgtcgaaggcacggaggaacagcagcgcaaagcgttcacggacgccgcgatcacgctgcgccggcgcatcgagctgttcctgtcgctgcccctgaaaagtctcgatgccatgtccttgcagcgcgagctgcgcgacattggccgccagtga

SEQ ID NO: 332522 - DNA, 465 bp, Pseudomonas aeruginosa
atgaaacgctttcacgtccacctgcacgtcgatgacctgaaccgcagcatcggcttctattcccaactgttcgccgcgcagccagcccgtgtcgaaggcgactacgcaaagtggatgctcgaagacccaccggtgaacttcgccatctccacgcgcggcagcaagccgggcatcgaccacctgggcatccagaccgacgacgccgaggaactggccgcgctgaaggcccgcgcgcaggctgctgacatggcgctgctcgacgaaggcactacgacctgctgctacgcgcgcagcgagaagcactggatcaccgacccgcagggcgtggcctgggagcacttccacacgctgggcaacatccccgtcttcaacgaagcaccccagcccgcgcccggcaccgtcgcggcgtgctgcgcgccaagcgatggtcgcgccgcagcgaagcccgctgcatcttgctgctga

SEQ ID NO: 332523 - DNA, 330 bp, Pseudomonas aeruginosa
atgaacgagacccaagctgtttccgccctgagtgccttggcccatgcccagcgtctgcgcgtgttccgcgccctggtcgtcgccggccccgagggtttgacgcccagcatcctggccgaccagctcgacgtggcccgcaacaccctgtccttccatctgaaggagctggcgcacgccggcctcgtcacgatcgagcagcagggccgcaacctgatctaccgcgccgagtacagccgcatgaacggcctgatcggctacctgaccgagcactgctgccagggcggcgtgtgcgaggtcagcccgtcttccgccatctgcaccacctgctga

SEQ ID NO: 332524 - DNA, 510 bp, Pseudomonas aeruginosa
atgtcgcaactgtccttttcctcgttcgatgcctcgctgatggtgcgtgacgcacagggccgctacctgctggcgacggcagaccagattttggaggccgcgcgccacgccatcgagcagaagatgcagcgtggtgcctcgttcagttcgccggcggcagtcaaggagtacctgcgcgccaagctggctggcttcgagcacgaagtgttcgcggtgctgttcctcgatacgcagcatcgcctgatcgagtacgcggagatgttccgcggcaccatcgacagcgcatcggtgtatccgcgcgagctggtcaaggaggcgctgcggctcaatgcggcggcggtcatcgtttcgcacaaccacccgagcggaaatcccgagccgagcggcgccgacaaggtgctgacccagcgactcaaggaggcgctggcgttggtggacgtccgcacgctggatcacatcgtcgtggcgggcggcagcaccacgtccttcgccgaacgcggcctgatttga

SEQ ID NO: 332525 - DNA, 771 bp, Pseudomonas aeruginosa
atggtcgatcacagcgccgagccttggtatccgactgccgcgtatctgtacgtgctgcatctggacggccttgcgcttgcctgggaatacctgcgccggcatcccgactaccggctcgactggctgcgccgtcatcgtcggccacaagcagcccagcaggcggcgcatcactggggcttgcgcctgctggaagacccggccctggatgcgcgcgacgcgcatccggcctggctgcccggccatgccgccgtggtgcagctctacccagatgccgatccgccgctggacgcggcgacgttcgcgttctggcgtatccccggccacaagcaactgctgcatgacggcaaagggctggcgctgatcgcgcgcagcccaggccactgcctgcgcttcgcgctcgcggccggcctggaggacggcatggctgtcgcctatgcctatcgcggcggcgctgccgcgcctgcacgcggacaggtgcccggcgccgctctggccgatgccaaacccaggccaacacctaccgcgctgctggaactgcacagcttgcaggcgctcgacgcgaccctggcgggcgcgtccttgcgtgaagtcgcggaaggactgttcggcgtggatgccgcagccgattggtacagcgatggcgggctgcgctccaaggtgcgccgcctggtgcgtcgcggcgatgcgctgatgcgcggcggctaccgccacctagcacagcttccgccgcttgagaagggtcgttttgaagaccaagaaaaacgaccctga

SEQ ID NO: 332526 - DNA, 273 bp, Pseudomonas aeruginosa
atgacagcgaagccaccgatacgcgcaaagcgcgtcggcatcggcgcgcgtccgcccgcgaatccgcacgccgaggcgtggattcgccaaggcgacgccgatgcgctgggcaagggcgacctctacaccgcccgcctgaccctcgacatcacgcccgcgctgcgcgcgcgcatcaaggtgtcggccttcacgcagggcgtgaccgtggccgatctgctgcgcggcctgctggagcgtgagtttccagagcaccgcagggagaacaccccatga

SEQ ID NO: 332527 - DNA, 534 bp, Pseudomonas aeruginosa
atgaccgcatccgcttcgcctgccgctggcgcggccacggctgcgctcgcagcaccttccggccatcctgccagcgcgccgctgacgcgcgtggcgctggcctacatcgaaccacgcttcaagctctacctgcgcttcggcgaacctgcgcgcacgcaccagctcaaccgctggcggcgctgcgccgtgttcctgccgggtgccatgttgtgccgcatccggtgggaggccaacgactacggcacgatccgctggcagctcatggtgatgcaggcttgcacgccgctcgacgcggcgcagcgcatccccggcgtgcagccgggcgcacgcctgctgctgcacgccgaaggcgaaaacgcggtgcgtgccgtgctgaaacgcatcgacggcatcgacgcacagagcatcgccgccatcgacgtgtcgcccgcgtattggcgcacgctcgccaaccggctcgcggcgcgcctgccgctgcccgaatacaccgcagaacggcacgccgcctggctggccgggaggacattcccatga

SEQ ID NO: 332528 - DNA, 588 bp, Pseudomonas aeruginosa
atgaccgcgatttccacgaccggccccgcgccgcatcctcgctcgcgcctgcgcgctcgcatcgtgctggcgggcttcaccgccgccggcctcgctgctttggcctgggcggcgttcgtgcagccgctgccgcgcctgatctacaacccgtccgacagcgtggcggtcggctggtatcgcgtgcagccgctcgaccatcgggcggcctcgctgccacgtcctttgtccgtggacagcatcgtcctgacccgattgcctgccgacgctgccgcgctcgctgcgcagcgcggctacctgccggcccgcgtgccgttgctcaaacgtgtaggcgcggtcgcgccgcaacacgtttgcatcgtcgccgggcaggtacgcatcgacggcgtgccggtggccgccgcgctgcctgccgaccggctgggccggccgctgccatccttgctgctttgccgccgcctcgaaccgggcgagctgttcctgttgagcgtgacgaatccggcctcgttcgacagccgctatttcggcccggtcagcgcgtccgccgtgatcggcgtcgcgcatccggtgtggatggagacacgcccatga

SEQ ID NO: 332529 - DNA, 378 bp, Pseudomonas aeruginosa
atggttaaatcgacgacttccctcaagaccgtagagcgcacaccggtggactataccgaccggttgtattggagcggcatcatcaagatgagcctgtccaagttcttcatcctgagcgtgctgcaaaagcggcccatgcacggctatgagatcgcacgtgaagtggagtgctcgacccaaggttgttgcgcacccaccgaaggcactatctacccggtgttgcgcgagttcgagcagggcggctatgtcaccgcgcataccgaaacggttgcgggccgtggacgcaaggtctacacgttgaccgacaggggccgcgaagccttcacggtggcggtagatgcttggatggaggtggctgcgtacatcacccgtcagtaa

SEQ ID NO: 332530 - DNA, 894 bp, Pseudomonas aeruginosa
atgaacctgaacacactcaccgaaaccctgcagttcttcgccatgaccagcgccgagttgatcgcgctgttcttcgtcgtcagtttcatggtggcgatgatgcaggagtatgtaccagccagcacggtgcaacgcttactgaccgggcgaggcctgcgtggcaacatcgtcggtgccgggctgggggcagtcacgccgttttgctcctgctcgactattccggtcacggtcggcttgctcaacgccggtgcgccatttggcgccaccatgtcctttctagtttcctcgcccatcctcaacccggtgatcctgggcttactggttacgttgttcggctggaagttcaccgtcttctatggcgcggcatcctttgtgctggcggtggcagtgggcgcggtctggcaactctttggcctggagcgcgacgtaaagaaggtgcgtgtggtcggcgagagcgaaattgcagggccgaccgacttcaaatcgcgcctgcgccgagctggcagcgcggcctttgctttgttcaagacttccttgccctacctgctgatcggcgcgggcattggcgcgctgatttatggcgtggtacccggtgagtggatcgccactatggcaggtgccgacaatccgttcgcgattcccgtggctgccgctatcggtgtgccgttatacatccgcgctgaaaccctgattccgattggcatggccttgcagtcccaaggcatgagcatcggcgcggtagcggcgctgatcatcgctggcgcaggtgccagcattcccgaagtcacgctgctcaacacgatcttccggccccgactggtggcagtgttcgtgctgaccatcttcacggttgccatcagcgtgggttacgtcgccaatctgctgttcatttga

SEQ ID NO: 332531 - DNA, 198 bp, Pseudomonas aeruginosa
atgtccgagaaaaaaggctttatagcgcgtttgtttgacaagcaggaggactcggcttgctgcgcggtgcgcatcgaagaagtgcccaagacggaagtgacccaaatgcccgtcgccaagaagtccgcatgttgcgcggtgcgcattgaggaggtcaaggacgatgatgccactcagccgccacctgccacccggtag

SEQ ID NO: 332532 - DNA, 1086 bp, Pseudomonas aeruginosa
atgaacaatcaagctccaagcctggaacggcggatcgaggaagttcagcactactacggggacaccttgacggataagcaagatttggcgaccaatgtctgcacagcggacgagccgccgtcagacgccatcaaagccatcctgacgcaaatacacgacgatgtgcagatgcgcttctacggttgtggtgcgcccttccccccgctgctggagggcgcaaccgtgctggacctgggctgcggcggcggacgcgactgcttcgtgctgtctagcctggtgggcgagcgaggcaaggtcatcggtgtggacgccacagccgaacagatcgctttcgcgcagagctatgtggagcaccaccgcaaggtcttcggccacaccgaaagcaacgtccgctttctgcaaggcaatatcgaagccttggatcagctcgacctgctgccggagagcatagatgtcatcgtttccaattgcgtgatcaacctgtcgatgaccaaggccgatgtgttggcaggcatggccaaactgctcaagcctggcggcgaaatctacttcgccgatatcttctcagatcgcaggctagcccctgagttgaaagacgatccgcttatcgtcggcgagtgcatcggtgatgcgctgtatttcgaggacttcgtgcgcttggcacaggctgccggcttccttgatgtgcgagttaccgccaagagcctgaaaaccatcgccaatcccgccatcgaagcaaagctcgggggcgccaagttgtactcgatcaccttgcgcctgttcaagatggatttggaagaccgttgcgaggattacgggcaggttgccatctacaaaggcaacctgccggaagcccccgaccgattcgtgctggacaacggccatgctttcgataccggtcgggcggtaccggtatgtcgcaatacggccgacatgatcagcaagagtcgttatcgcatcttgttcgatgtgattggcgacggccgccgacactatggccttttccagtgtggtacgccgctgatcgagtcagtgccaacgctggccgatgtgggcgtttgcggccccgctgggtgcggatgctag

SEQ ID NO: 332533 - DNA, 675 bp, Pseudomonas aeruginosa
atgcttcctacacagtggaaatattttctgtccgaattgattggggttttcgcgctgatttttatcggggcaggcgcagcgatactgagcaagcaaggtgacgcggtcagttatctcggcgttgcgcttgcatttggggtcagcgtaacctgcatcattggcggtatttcgacgtcaagcggcgcccaccttaaccccgtggtgacactttcgctctgcgctactggtaggtgttcgtatagatgcctgctctattacaccatcgcgcaaatcattggcgcctgtctggcgtcggccgctttgttcgccctcttcgggcaacggatcgaagcgggcaccacccgaatcggcaccggcgtcagcctggcgaacggtttcacggtggagataattctgacttttttcctggttttgaccgtgctgcgaacaaccagtgcactgatcattggttcggtggtgttcttgggcgcactggtcggtggatacatcacaggcgcaggcatgaatccggcgcgaagttttgggcctgcgctattcagccatcactgggaaaaccactggatctattggttggcaccgttatccggggcgctgctcgctgtcttggttttcgtcttgatggacaaacccgccacgctgccgaaatgcagcgatgcagaatcgaagaaatcgtga

SEQ ID NO: 332534 - DNA, 384 bp, Pseudomonas aeruginosa
atgacgcagatgacttttcctgctttccgtttttctgcaaatccggcattgcgtcttgcgcggctgcgctgcctggcccgccctgcggggcaagggctgctgctggccgcgctgctgttgttcctgaccggaaccgcgcaggccgccggttcctcgatgccgtgggaaggccccttgcagtcgatcttggagtcgattcaagggccggtggcgcgcatcgtcgcagtcatcatcatcattgccacaggcctcgcgctagcgttcggcgacacgtcgggcggattccgcaagctgatccagatcgtctttggcctgtccatcgcgttcgccgcgtcctcgttcttcctgtcgttcttcagcttctcgggcggggccgtcgtatga

SEQ ID NO: 332535 - DNA, 333 bp, Pseudomonas aeruginosa
atgcgatgcgtcctcgccctgtcggtttcgctgcttatggcactggtggccgcgtgcagcgaccagccggccgacaaccttgccgatgccctggccaccgatcccgtgcggctcaaggcattgcgcgcgcaatgcgcggccgaccgccaggccacgggcgaggacgcttgccgcgccgccgccgaagccttccgacggcgcttcttctccggtcagaccgggccggatgaataccagacgctggccgacctgccgccgatcccgccgagcttcgatgaaccgggcgatggcacggcgccggcatcgccggccgaaccggagggcacgccatga

SEQ ID NO: 332536 - DNA, 1401 bp, Pseudomonas aeruginosa
atgaatgacgtgaccatcatcgaccagttcctcaatatcttctccgcctacatcgactcgggtttcgggctgttgcagggcgaagtggccttcctcaccgccacgctgatcgtcatcgacatgacgatcgccggactgtattgggcgatgagccacgccaccggccagggcgaggacgtgatcgccaagctgctgcgcaaggtgctctacgtcggtgccttcgcctacatcatcggcaacttcaactggctggccggcatcgtgttccgatccttcgccgggctgggcctgacggccaccggctcggcgatcaccatggaaaacttcttgcagccgggccggctcgccaagaccggcatcgacgccggggcgccgattctggagcaagtcggcgagatggccggcttccccgaggtgttcgtgaacctcgatgccatcacggtgatgttcctcgcgtggctggtcgtggtgctgtgctttttcgtgctggcgatccagcttttcatcaccctgattgagttcaagctgaccacgctcgccgggttcgtgctggtgccgttcgcgttgtggaacaagacctcgttcctggcagagaaggtgctgggcaatgtcgtttccgccggcatcaaggtgctggtgctggccgtgatcgtgggcatcggctcgggcctgttcgctcagttccaagtccatcccgccgagccgtccatcgaccacgcactggtcatcatgctggcctcgctcaccttgctggcgctagggatcttcggccctggcatcgccacgggcctcgtctccggtgcgccccagctcggcgcgggcgcgatggccggcgctgcggtgggtgctgccggagccgctgttgctgtcggtgccgccgcgacgggcgtaggcggcgcggtcatggccggggcgcgcatggcgcctgccgcggccaagctcgccggcagtggtgcgcgtgctgccacctcgacggccagcagcgcacgctcggcgttccaggccggttccgccgccgcaggcggtggcgcgaaaggcgcgatggccggcttgggaaatgtcgccaagaccggcgcgcagtctgccggacggggtgcagcgtcccgcgcatccgccttcggccagaagatgaccagctccttccgtgccgggtggaacggcccgactgacgacggtgcgggtgcggcatccggtggagccggagcatccagccaggcctccacaggcgaagccgcagcgggcggcgccaacgcgcagaagcaagaacagcccgcttgggccaagcggctgcaccgccgccagcaactcactcatgccgcgaccaccaccgcccacgcgctgcgcggtggcgatggcggcggctccggccaggggccgagcctgcgcgattccgattcataa

SEQ ID NO: 332537 - DNA, 384 bp, Pseudomonas aeruginosa; identical to SEQ ID NO: 325393

SEQ ID NO: 332538 - DNA, 720 bp, Pseudomonas aeruginosa
atgcagacacttcaagaacgacttaaacgtgcgatggcaggcccaccgagggttacgcaagcggctcttgcacgcgcttgccatatcacagcgccctcagtaaatgactggatctccggaaagacaaaaagcatcgaaggggagaatctcctcaatgctgcagcgtttctgaaagttagcccgctgtggcttgcaactggaaaaggccccatgcgagagcatggagctataagcagggacagtcctgagcaagcgggtggctcgctgaacgagcacgccaacgtgatctcggtggctacgcctccaagaaagaggaataaatatccagtgatcagttgggtcagggctggcgactgggcagaaagtccggacaattttcagccaggcgatgcagatgattggttggagtcagaggaaaaggccggaccccatggatattggctggtagttaatggcgactcaatgacgccgctattcccccaaggaagtcgaatactagtacagccagaaggattcgacctgatcagtggaaaatactacgtagcagtttgctacgagccggggaaaaagcgcgatacaactgtgaagcaatatgtgagggatgcagggttcgaatatctaaaacctcttaatccaatatatcgcacccttgaggtaagcgacacggttcgaatcattggccgcgtgattgactacaagcttcccgctggcgtcttgtag

SEQ ID NO: 332539 - DNA, 246 bp, Pseudomonas aeruginosa; identical to SEQ ID NO: 325388

SEQ ID NO: 332540 - DNA, 2601 bp, Pseudomonas aeruginosa; identical to SEQ ID NO: 330330

SEQ ID NO: 332541 - DNA, 450 bp, Pseudomonas aeruginosa; identical to SEQ ID NO: 326321

SEQ ID NO: 332542 - DNA, 393 bp, Pseudomonas aeruginosa
atgaagaagatcccgctcgccgccgccgaccccgaccgcctggatacctgggtgaaataccgcgaaggcctgtgcggcgagtgcaacgcgacctgctgcacgctgccggtggaagtgcgcatcgacgacctgatccgcatgcgactggtcgacgagttcgagcgcgaggagccggccaagcgaatcgccaagcgactggaaaaggatggcgtgatcgagcacttcaaccacaagcgcgagatcttcaccctcacccgcatggccaacggcgactgcctgtacctcgaccgccataccggccggtcctgctcgtccagagcccagtgcgcggtgccggcgcgcaggcgtacgccgccgacccagcgttcgggggcgccgaggtcgaggcggtag

SEQ ID NO: 332543 - DNA, 690 bp, Pseudomonas aeruginosa
atgcacaacgttctgatcgtcggcgcctcgcgcggcatcggcctgggactggcggatgccttcctgcaacgcggcgcacaggtattcgccgtcgcccggcgaccgcaaggctctcccgggctgcaggcactggcggagcgagccggggagcgcttgcaagcggtgaccggcgacctcaaccaacgcgactgcgccgaacgcatcggcgaggcgctgggcgagcggcggatcgatcgcctgatcgtcaacgccggcatctacggcccgcagcaacaggatgtggcggaaatcgacgccgagcagaccgcccagctgttcctgaccaacgccatcgcgccgctgcgcctggccagggcactgtccgggcgggttagccggggtggcgtggtggcgttcatgagttcgcagatggccagcctggcgctgggcctgtcggccacaatgccgctctacggcgccagcaaggcggcgctgaacagcctggtacgcagctgggagggcgagttcgaggagttgccgttcagcctgttgctcctgcatcccggctgggtgcgtaccgaaatgggcggcgacagcgcgccgctgagcgtcgaggaaagcgccgccggactggtcgcggcggtggaggatgccgcgggcgtgaatgcctgtcgcttcgtcgattatcggaaccagccgctgccctggtga

SEQ ID NO: 332544 - DNA, 2976 bp, Pseudomonas aeruginosa
atgtcgaaagattctgttcttggcttattcaggcaacacgcagatacccatcccgaacgccccgccctcgtcgatcgcgagcgctcgttcagctaccgcgaactcgaccgactcagcgaccggctggccgcccacctggccaggcgcggcgtcgcccggggcgagcggctgcccctgctggccgaacgctcggccgaactggtcatcgccatcctggcggccgccaagtgcgcagcggcctacgtaccggtggaccgtcggcaacccgacaggcgcaagcaggaaatcctccgccagtgccaggcccccgtggccctcgccacccaggccgaggacctgccggggcaaccggtggaggtcatcgcacaggtgctcgcgacgagcgcggcgggtgccgcgccgaggccggcgctcgacggcagcgaagcgctgtatgtgatcttcacctcgggcaccaccggcgaacccaagggcgtggtgatcgagagccgctccctgagcaacctcgtggactggcacaaccggcgcttcgagatggaccaacggagccgcaccaccctgatggccggcgtcggcttcgacgtttgccaatgggaaatctggtccaccctgtgcgcaggcgcctgcctccacctggtgcccgacgaggtgcgcccggacccggcggcgctgctggcattcttcgccgagcagcggatcagccatgccttcgcgcctaccgtgatggtccctgcgctggtggagcaacccgctccgccgtcgctggcgctgcgctacctgttctgcgccggggaaaaactgccgccggtcgcaaccggcgggctgccctataccgtggtggattactacggcccgaccgaagccacggtcttcgccacctgccgcatcgtcgacgccgaagctcatcggcggcccgcctcaatcggcacgcccatcgacggttgcgaggcattcattctcgacgccgacgaccggccttgccatggcgaccggcccggcgagctgaacctggcgggcgtctgcctggcgcgcgaatacctgcgcgacccggacatgaccgccaggcgcttccactactcgcaggcactgcggcgccggctctatcgcaccggcgacaaggcccgctggctggccgacggcagcctgcagttcctcggtcggctggacgaccaggtgaagatccgcggccaccgcgtcgaactcggcgacgtcgaagccgcgctgctgcgccagccggcgatccatggcgcggtggtgctggcgcatgccgacccacgctgcggtagccagcaattgagcgccttcgtggtcccccgccagcggggcggcgatgccagggccgtgctcgccgccatcaagaccgccctgcgccaggaactgcccgactacatgctgcccagccgctatctgtcgctggacagcctgccgaccacggtcaacggcaagatcgaccgccaggccctgcgtcgacgcctggaggaacaatgccaggaacgactcgacgagcaacgcttcggcactcccggcgaactgcaagtggctctggcctggcaggaagtgctggggcataccgacttcggcctggacgacagcttcttcgaggtcggcggccattccctgctggccgccgccctggtgcgcgaactgagccgacgcttcggcaaccgtgcctacatccacgacatctaccgcaccccgagcgtgcgccaactggcggccagcctggcgcggcgcgccggcgaagcgccgccggcgctggacagcgaaccggcccaggagctgcaacgggacgtgcgcctgcccgccgacgtggatttcagccggcccatggacaccgcccaattgctcgcgccacggcacatcctgctcaccggcgccagcgggctgatgggcgcccacctgctcgccgagctgctggccagccgcgaggccgacctgcattgtccggtccgtgcgcaaaacgacgcccacgccctcgaacgcctgcgccaggccgcccggcagcaccgcatcgaactcgccgagtcggactggcgacgggtcagggcctacgccgccgacctcgcagaaccaggtttcggactaccggcggaaacctaccgcgagctggccggcagcgtcgaccaggtcttccattccgccagcgcggtgaacttcatccagccatacagctacatgaagcgcgacaacgtcgaggggctcggccaggtcctgcgcttctgcgccagcggccgctgcaagccgctgatgctgctgtcgagcatctcggtgtacagctggggccacctgcataccggcaagcgcctgatgcgcgaggacgacgacatcgaccagaacctgccggcggtggtcaccgacatgggctacgtgcgcagcaaatgggtgatggaaaagatcgccgacctcgccgccgaacgcggcctgccgctgatgaccttccgcctcggctacgccacctgccacagccgtaccggcgcccatgccgactaccagtggtggagccggctggcgcggacctgcctggagtaccgggccgtgccgctcctgcgcgagctgcgcgagggcctgaccacggtggactacatggtagaggcgatcagcgtcatcgcccgccagccttcggcgctgggcaagaaattcaacctggtgccgagcattccgcgctgcctgaccctggacgagttcttcgaccgtctcgggcgacgcgccgggcgtcccctccggcagatgccgttcgacgactgggtaagtctctgggaagacaatcgcgacgccccgctctatcccctgctgagtatgttccgcgacaacatgtacgccggccgcagcaccgtcgagttgtaccaggatacctatctctgggactgcaccaacgtcgaggaacacctgcgcgggagcgccgtgcgcgagccggagttcgacgaccgcctgctcgacctgtacctcgccggcctgggcggcagcgccatgcggtaa

SEQ ID NO: 332545 - DNA, 414 bp, Pseudomonas aeruginosa
atgaccggcggcgacgccgccatcaatctgaccgcgatgccggccgtggtgttcaccgacccgcaagtggcgaccgtgggctacagcgaggcggaagcgcaccacgatggcatcgaaaccgacagccgcacgctgacgctcgacaacgtgccgcgtgcgctcgccaacttcgatacccgcggcttcatcaagctggtcatcgaggaaggcagcggacggctgattggcgtacaggtggtggccccggaagcgggcgaactgatccagacggctgttctcgccattcgcaaccgcatgacggtgcaggaactagccgaccagttgttcccctacctaacgatggtcgagggcttgaagctcgcggcgcagaccttcagcaaggacgtgaagcaactgtcctgctgcgccggataa

SEQ ID NO: 332546 - DNA, 366 bp, Pseudomonas aeruginosa; identical to SEQ ID NO: 328170

SEQ ID NO: 332547 - DNA, 990 bp, Pseudomonas aeruginosa
atgagcgcttcccagccaattgaatggacagtggcgcaactggcgcaggcggtcgagcgcgggcagcttgagctgcactaccagccgattgtcgatttgcgcagtgagcagattgtcggcgcggaagccctgttgcgctggcgtcatccgacgctcggactgttgccgccgggccagttcctgcccgtgatcgaaccgtccggcctgatgccggaaatcggcgcatgggtgctgggcgcagcctgccgtcaaatgcgcgactggcgggtgctggcatggcaaccgttccggctggccgtcaatgtttcggcgagccaagtggggccagatttcgacaagtgggtaaagggcgtgctggccgatgccgggttgcccgccgcgtatcttgaaattgagctgaccgaatcggttgcgttcggtgatccggcgatcttccccgccctggaagctttgcgacagatcggtgtgcgcttcgccgccgacgacttcggcaccggctattcctgcctgcaacacctgaaatgctgccccatcagcacgctcaagatcgaccaatcgtttgtcgccggactcgccaacgaccaccgcgaccagaccatcgtgcgcaccgtgattcagcttgcgcatgggcttggcatggaagtagtggccgaaggcgtggaaacatcggcgagtcttgatttgttgcgacaagcggactgcgacacaggacaaggcttcctgttcgccaagccgatgccggcggcggcattcgccgtcttcgtcagtcaatggaggggtgccaccatgaatgcaaatgatccgactgccaccagttgctgcgtgtgctgcaaggaaatcccgctcgatgccgccttcaccccggaaggcgcggaatacgtcgagcacttctgcgggctggagtgctatcagcgcttccaggcgcgcgccaagaccgggagcgaaaccgatgccgatccgaacgcctgcgactcatcactgtcagactga

SEQ ID NO: 332548 - DNA, 135 bp, Pseudomonas aeruginosa; identical to SEQ ID NO: 325199

SEQ ID NO: 332549 - DNA, 1320 bp, Pseudomonas aeruginosa
atgaaaacgccgctctggttcccgcaaagcttcttcgcccgcaccctctggctggtgctgatcgtcgtgctgttctccaaggcgctgaccctggtctacctgctgatgaacgaggacgtgatcgtcgaccgccagtacagccacggcgcggcgctgaccatccgcgcgttctgggctgccgacgaggagtcgcgcgcggccatcgccaaggcttccggcctgcgctgggtgccgagcagcgccgaccagcccggcgagcagcactggccgtacacggaaatcttccagcggcagatgcagatggagctggggccggacaccgagacccgcctgcgtatccaccagccgtcgcagctctgggtgcgcgcaccgagcctcggcgaaggctggctggcggtgccgctgtatccgcatcccttgcgtggccaacggatctggagcgtgctcggctggttcctcggcatcggcctgctctccaccgccgccgcctggatcttcgtccgccagctcagccagccgctcaagcgcctggtggtcgccgcccgccagttcggccaggggcgcagcgtgcgcctgccgctggggccggagacgccaagcgaaatggccgaggtgtatcgcgccttcaaccagatggccgaggacatcgagcagggcgggcgcgaacgcgaattgatgttggccggtgtctcccacgacctgcgcaccccgctgacacgcctgcgcctgtcgctggagttgctgccggagagcgaacgggagatggtcgaggacatggtccgcgacatcgaggacatggatgcgatcctcgaccagttcctcgccttcatccgcgacggccgcgacgagccggtggaggagggcgacctgaccgacctggtgcgcgaggtggtggcaccgttcaaccagactcgcgagcaggtgcgcatggccttgcagccggtaccggcgatgccgttgcggcgggtgtcgatgaagcgtctgctgggcaacctgatcgacaatgccctgaaccacggtggcggctcggttgaggtggccagctacgtggccggcgaaagcgcggcgccctacgtggtgctgagtgtgctcgatcgcggccagggcatcgatcccgcggaagtggacagcatcttcaatcccttcatccgcggcgacaaggcgcgtggcggcaagggcaccggcctcggcctggcgatcgtcaagcgcatcgccgcccagcacggcggcagcgtcgaactgcgcaaccgcgatggcggcggcctggaagcgcgggtctgcctgccgctggggttgctgctaccgcgcggcgcggcctga

SEQ ID NO: 332550 - DNA, 276 bp, Pseudomonas aeruginosa; identical to SEQ ID NO: 307113

SEQ ID NO: 332551 - DNA, 351 bp, Pseudomonas aeruginosa; identical to SEQ ID NO: 230937

SEQ ID NO: 332552 - DNA, 435 bp, Pseudomonas aeruginosa; identical to SEQ ID NO: 230936

SEQ ID NO: 332553 - DNA, 471 bp, Pseudomonas aeruginosa
atgcgactcgacgccgcgctgcacgcgaatatccctcagccgctgcggctccccatgatgaacctgctgcgtaaggtcaactcgtactacagcaacagaattgaagggaattccaccgtcccggctgacgtattgcgtgcgcaggacttgcccgctgacgtcagggccggcgaggagttgctggagatcaagcgccacattgaagctcagaagcgcctcagcgatgacccaattgatgaggttgatatctgtaccaatggcgcgatttcgcgcatgcaccgcgaattctacgagggtatgcccgaagagttcctgcagatcaaagtcaacgaggagggagagactgttcgtcttgttccaggcgagttcagggatcaaggcgtcaaggtcggaaaccacatcccaccggctgccgagaaccttcgtacatacatggggtcgtctcagaaaacggaaaataaagcacgctaa

SEQ ID NO: 332554 - DNA, 231 bp, Pseudomonas aeruginosa
atgaagcgcgaaaacgtgaaagtcagaattgccgaaggtgtagtttttgatacccaaatcctagccaatccagcaaatactcgcgaatggatcgtgatgttcaagaaggatgccggccgcagtttctttctgatagatgatcaggacgagatcgactcttttcccgacctcaatagcttggtcgacgagctacgaaaactcggtatccgccgtacggagattcatctataa

SEQ ID NO: 332555 - DNA, 603 bp, Pseudomonas aeruginosa
atgtcttcacaaaaacatcctctaactaatagcaaggaatgctggacatttgttgtggcggcggcaatcactgccttactctatgtggccctgataatcacgatttctaaagaggtacacctgagaggttttttgtttttagaagctggcacaaccgctaaaatatttgagttctatgcagaaaacttgagagggagtctttttacagggttcttagcacttggtgggtttcttatgtctgccaaaacttttatcattgttaatatgaaaaaagaggtttatgactccgccaaatacaagcaggactggctcgatggtatggagttaaacggccctgaaaactatccacctttatttaggccgcttagaagattaagcaacatactcttctacacaatctcatttagctttcttgcatccatagcgcagctaactattggcttgtacgaaagcgtaccatctgtgatggtatgctcgttccttgtaattctagctatatcctttttaatgctttcgctttatctcataaaaaagaatttggctacaatgtttgactacctagacaagtcacacgatccagtacttcctctcggagacgactag

SEQ ID NO: 332556 - DNA, 891 bp, Pseudomonas aeruginosa
atgttcactgttaaaaactacggcgtctccttttcaacaaaaaaaagcgacatcgcgctaactaatttcttcgtgtcattagtaggagccgatattgactttccaatccgcactgatagtgttataaccataaaaaaccagaaaaaattcacatcattagtagggaaaggaagcaatcttgaaattaaggtctcggatctatcaaaacttgaaaaaatagctgaattcaattttttaattatcaataaaaaaaatggctttgggatttaccagtatcatcatgggtcgtgtaccgcccctaattttggatcaatgataaccacgctttataggcgaaaattagaggctaagcgagatgcagagatattagctctcggtggtagagattccgtaccaagaaaacaattaaaagctattaatagtcgtttttttcatggaattgaatttgacatgattgctcagtcaaaagacattaaaaaagttttagaaaaatacaaatccatacgttctttcagatacgaagtgtcttctctcgaagcgtctttacgtgaagagtcgccgctgcaaggcctaattgaaaaggtaagacatcacgtacgctttgatagctcagtagattcaagtctgatcataagtggtattcaaagtatgatacctaccattaaacaagcaacggctagagttgaagtgcttgacgatcaggatgagccggtctctgtgaaagtaatggatgtgcctgcgaattttggcgaaatgggctatgatgatttcatcaagaatttgctaacatttaaaatgacagacattaaaggctgtagtttgtttcaagatcttaaaggcaaatgcgaaaaggattataagcatgtcttcacaaaaacatcctctaactaa

SEQ ID NO: 332557 - DNA, 3639 bp, Pseudomonas aeruginosa
gtgcccagcaatgccacaccgagcaacagccacaagtatctgatcgagaccaacccggcgctcaccgagctgaagcagttcctcaactcggactacctgctcggtggcctgggtatcaatccggatgacagcaagaagcgcctgggcgacggtctatacgagcagcgcctggtacgcgaagcgatcgtccagcgtacggggcagcgcttcatcgccggattgaacagcgacgaagcgatgttccgctatctgatggacaacgccatcgccagcaaggacgtattgggactgacccctggcgtcaccctcagcgccgcccaggtggccgcgctgacccacgacatcgtttggctggaagaagtcgaggtgaatggcgagaaggtcctcgcccccgtggtctacctggcccaggccgaggggcggttgggcccgaacggcgcgctgatccaggggcgcgacgtgaacctgatcaccggcggggacctgaggaacgccggtaccctgcgcgcgcagaacgacctcagcgcgacagccggcaacatcgacaacagcggcctgatcgaggccggcaaccgcctcgacctgctggccagcggctccatccgcaatgaccagggcggcatcattgccgggcgcgaggtaagcctctccgcccttaccggagacgtcatcaatgaacggacggtgacccagcaccagtcctcctacaggggaaccggtaccactgaggcatttgccgatagcgccgcgcgtatcgaggctgcgcagaagctgaccgtttcggcaggacgcgatgtagccaatattggcggtgtcatcgacagcaagggcgacctcgccttgcaaggcggcagggatgtcctggtttcggctgcggtagcggagcggggctggacggcaggaagccaggcataccagacccagacgacccagatgggcgccgaggtcgtggcggggcgcgatatcagcgtcagcgccggacgcgatatcagcgtcgcgggcagccacatcgacgctcgtcgcgacgtgacattcgaggcgggtcgcgatgtgggcctggtcgcggctgccaacgaagagcatgcctatggcaagaccaagaaggtcactttccaggacgacaagatcacccagcaggccactcgcgtggacgctggcggcgatctggcgatcaatgccggacaggacctgcggctggtcgcgagccaggccagcgccggcgacgaagcctacctggtggccggcgacaagctggagctgctggccgccaacgacagcagttactacctctacgacaagaagagcaaaggcagcttcggtagcaagaagacccggcgcgacgaaatcaccgatgtgacggcagtgggcagccaaatatccagcggcggcgacctcaccctgctcagtggcggcgaccagacttaccagggcgcgaagctggaatcgggcaacgacctggccatcgtcagcggcggcgcggtgaccttcgacgcggtgaaggacctgcaccaggagagccacgagaagagcaagggcgacctggcgtggcagtcgtcgaagggcaagggccagaccgacgaaaccgtacgccagagccagctcgtcgcccagggcaacctggcgatcaaggccgtggaaggcctgaagatcgacctcaagcacatcgaccagaagaccgtgagccagaccatcgatgcgatggtgcaggcggatccgcaactggcctggttgaagcagatggagcagcgcggcgatgtggattggcggcgcgtgcaggaactgcatgacagctggaagtacagcaactccgggctgggcgtcggcgcgcagttggcgatagcgattgtcgtgacttacttcacggcgggtgcggcgagtgcggcattgggatcgatggcgggtgtgggggcgggctcaggaagcatgatggctgctgccggtagcactgcaatggtccaggccggtacagcagtaggaacagctgccgccggctgggcgaatgccgctggaactgccgtggctatgggcatggccagcaatggagcgatcagcaccatcaacaaccggggaaacctgggggatgtcgtcaaggacgtgacctccagcgatgcgctgaggggctatgtagtcgctggcacgactgcggggctgactgccggcgtctacgacaaatggacctcgacccagaccggcacctcgaccgctctaccgaacaccggggccgtggcgcccgccgcagggttgagcacctggcaaggtgtgggccagttcacctcgaaccagttgctgcagaatggcacttcggtgctgttggaccgagcgctgggcggcaagggcagcctgggcgatgcgttgcaaaacagcctggcaaatgccttcgcggcctacggcttcaagctgattggcgacaccacccatggcgtactggacgacggcagcctcggcaagatcggcttgcacgccctaatgggaggtctggccgccgaagcggtcggtggcgatttccgtaccggagccctggctgcgggagtcaacgaggcgctggtggatagcctcgccaagcaatacgccagcctgcccatcgatgacaagaagggcctgctgatcatgagttcgcagttgatcggcgtgctggcggcttcgacgcagggcgatgcggacgccaagagcttgcagacaggagcctgggtggcggggaatgccacccaacacaactacctcagtcattggcaggaggagaagaagcggcaggaggtcgatggctgcaaggacaaaccgctctgcaaaaccggaatagaagccaaatgggcaattatttcggcccagcaggatgtcggtatcgtcgtaggtgttggaggaggcatcggtctttcgacagctgaaaccgcagtgggtgtttatgagctggtcaagaactggagggaaacctacgcagctctggagcagttggccacttcgccagagttccggcagcagtttggcgataactacctgaaggggctggaggagcgcgccgcattcttgacccaggcttacgaggatgccggttggcaaggttcggtcacagctggtgtcgagggcggtaggttcgctgcggaacttgttggcgttctgacggcagtgaaaggtggcgcgcagataaccgccaagctgccaacagcagccaagaacctggtcaacgcgattgcggagtcacctgtttccggtagtatgagttcgcaactcggggcagtgggggacttgggtaggctgggtgggggtccaaaagcaactgggactgctgctgaagcggctattcaagttcctgggcgtgttcagtcacgcgttaacttgatgactggtgacaaaagtgcgggttgggagcacgttgtaagtcgtcacttcaatccagaggtaaatgcaagccaattcactatagggcaggctgagcttcgcactttgcttcaaagtaaagaggtggtgagtgcgcctgtaacgcgaatgttagaaagtgcgcaaggtattcgatatgttcgagaagtgaatctcagtgggcctattggtattgataagttcagtggtcagcctacctctaccatgactgttcttactgataggtttggtaacttaataacgactactccgggggttgttaagtga

SEQ ID NO: 332558 - DNA, 288 bp, Pseudomonas aeruginosa; identical to SEQ ID NO: 326310

SEQ ID NO: 332559 - DNA, 810 bp, Pseudomonas aeruginosa
gtggtctgttcagctttcgatgtggcgcggtcttgctactacgtccaccgtcttcgacggcggcgtgtcgatgctcgccgcgtggcgctacgcagccaagtcaaccagttgttcagccagagtcggggctcggccggcagccgcagcattctgggcatgctgcgcgaagagggcgtgaccatcggccgtttccgagtgcgtcggttgatgcgtgagctgggcctggtcagcaagcaaccgggctcgcacgcctacaaacaggccacggttgagcggccggatatcccgaatcggctgaaccgcgaattcgcgaccgagcatcccaatcaggtgtggtgtggcgacatcacctacgtctgggcgcaaggccgttggcactacctggccgcggtgctggatctgctgatcggctgggcgttctcggccaagccggatgccgaactggtgatcaaggccctggacatggcctacgaacagcgcggcaggccacagcaggtgctgttccattcagtccagggcagccagtacgccagccgcctgtttcggcaacggctctggcgctatcggatgcagcagagcatgagccgtcgggggaattgctgggataactcgccgatggagcgcctgttccgcagtctgaagtcggagtgggtcccgtcaacgggttacctgacggcgcaggaggcccaacgggacatcagtcattacttgatgcaccgctacaactggatcaggccgcatcaattcaacgacgggttaccacctgcggtggccgaagaaaaactcaacccactgtccgggatgggttga

SEQ ID NO: 332560 - DNA, 264 bp, Pseudomonas aeruginosa
gtgaaaaagcgttttaccgaagagcagactctcgacttcctcaagcaggcggaggccggtgtgccgatggaggagctgtgtcggcggcatggcttcagtgatgcctcgttctacacctggcgggcgaagtttggcggtatgaccgtggcggacaccaaacggttgaaggatcttgaactggaaaacagccgattgaagaagttgctcgccgaggcccacctcgacatcgagtcgctgaaagtggtcgcccggggaaaagggtaa

SEQ ID NO: 332561 - DNA, 675 bp, Pseudomonas aeruginosa
atgtacctcttcgtgaaacccaacggcgtgaaaacgtggcgattgcgctacttcaagcccaacggcaaggaaggcacgctgatcatcggcaactaccccatcatctcgctggccgtcgcgaggaccaagcgcgatgaagccaaggccctgttgatcgacaacctcgacccgatggaagagaagaagaaagcgaagctagctgctcaacgagcttccctgctttttgaaaccgtcgccctggagtggcacgccgaaatgtcccggcgctggacagagggacacgccaagaccgtcatgagtcggttgcgcacccacgtcttccccctgataggccaacgccccattgctgaactcgatactcatgatctgcttgaggtcactctgcgtattaaagagcgcggcaccatggacgttgccctgcgcgtgcagaattatctctccacgatcatgcggggcgcgaagcgggcgcggcagatcagccagaatccggcgcttgatctggcagggtcgattcatgccccgcgaacagtgcaccgccctgccctatcactcaaccgcctccccgaactactgaaccggatcgacaactacaacggccgtgagctaaccaagctggctgtactgctgacgctgcacgtgttcgtgcgctccagcgaactgcgctatgcgcgctga

SEQ ID NO: 332562 - DNA, 540 bp, Pseudomonas aeruginosa
atgtgggaaattcctgacacccgtaagcccatcgacggcgtacgcaattccacccgtggcaccaagatgagcggagacatacagatggtgccgctctctccccaagtcattgcgatccttgagcggctgcgcggcttgagtcgcttctccgaactggtgctgcccggtgaccacaagtactggaagccaatgtctgagaacacggttaaccaggtgctacgcaacgttggctatgacacatccaaggaagtatgcgggcatggattcaggaccatggcctgtagcgccttgctggagtcagggctgtggacagacgcggctattgagcggcagatgagccacaaggaacgcaatcgcgtgcgcgccgcctatatccacaaggccgaatttctggagcagcgcagactgatcatggcgtggtggagcaattacatcgatgccaacagatcggggcatgccactccgcatgagttcgcccatccagctggcgacaacattactcccttgccaagtgggcgtggcgcattcaatcgtcggtga

SEQ ID NO: 332563 - DNA, 1608 bp, Pseudomonas aeruginosa
atgaacgaattgatacacatgggcgtgcgaggacttaggagcttcggatataagctcaatccgattccatttcgaaaaataaatatatacgtcgggcaaaacagttgtgggaaaagcacttaccttagaacctttcccttgcttagacagtcagtagaatcggatacgcgattccccattctttggtatgcaggccatggaagttacgtcgactttggcaacttcgagagcgcactgcatgattccggggatgctattcacttcgacttcaaacttaaaatatcccctgcagtatctagcaaaaatcaaagcaacttgcttatggagcattactacatctcctccggccatggctctccaactccaatttcttatcatgtagacttatctatcagcttaaaaaaggaaggctcagcgttgattacaaccatagccctccaatcagaaggtagtaaagtcgagctaaactacagtgcggacgatgtcataagcctaatagccagcaatgataagcatgaaatcgtagaacaatttagcacgccactccagataactaaaggctccctaatcccgacaggcgtatttcgcggccgccaaatcacaattaaatctattaacatcccaagattcgtcccaaccaacaccgtaagacaggagtctcttacggcgttaagcaaatacctacatgcatttcatcataaatcaaagcaactgaagaatgtccgagactctttaaactaccttgcactcggtagcaagaagcaactttcaagaaatttaaaagctcttttctcttcagataagtattttattaaaaaattcgaagagaattctgaagagatcgtagatgtcacctttacttatttgctcgctaaaaacataggcactttctgggagagtgcagatgagactcttaaaaaattttacagcggcgtgagatatcttgggcctctgcgagcatctgcggagcgattttatcggcatcaggatcttcagatcagcgaagtagaccataccggtgcgaatttgccaatggtgataaattctctaagcgaagaccacaaggcagaactaactgaatgggtaaagaacaattttggcttcgatctaagattggaaaccacagggctacattatgccttgctaattaaagaggatagtgactcaaactaccataacgttagcgatatgggatttggctattctcaaatattaccggtaattgtatctatttggctggaactcgtcggtgatcgagacgacaaacccagcacacccgcttggttcagggtcaaagcctcacgaactattgtaatcgagcagccagagcttcacctacatcctgcacttcagtataaatttggatctgcaatcgctaaagttgcaagcttggttaaagatcgagactataatttcgtcatagagactcatagcaaacacttgatcgatgccattggtgaaagcatctcctcgaacttgattgatgaagaccaagtcaacattacattattcgagaaaaaatcttcaggaataagtgacatagcactatcaggatttgatagtgatggttacttgaaagactggcccgcaggatttctttcagcgtga

SEQ ID NO: 332564 - DNA, 1014 bp, Pseudomonas aeruginosa
atgcccgacctttcagttgacgctcacaataaaattagagccctcgaaaatttacttgtggcattcggggaatgccgacatgtaatttggatgcccacgaatgtggctaccgatttaattgaaaagaacatactagggtcatatgcccaaagagttctcattgagcttaaaagcttttcaactgagtcccgcggcatagaaaaattctttgcattccacttaaagattgactttagtgcgggagaaagactagatgttgaagatggaaaaattctccacgttgggtattcgcatattgtggactcaatgagccttaagaagtccatcttgctcacggaaaacctaagggactctgaactatttaagcttggcggtgagatattcctcttctcaaacaaactatatcgattttattcagtatctcttgagcagcttccaggtggcggcaatacaactttcgatctatttaaccatcttgaggcaagtggagcatttttcctgtgcgttattgatagcgatttaaagcaccccgccgggccaaggggcgatacagcaaaacgtttttctagcactgcaaccggatatgagcagaaaagattcctgaagatacttgactgtcatgaagttgaaaacataattccattctctattgtccaagaggttagcaatggcgcagtcgagaatagcttgatgtataaattaggccgagtatccttagatcgagctcatccagaccacaagtcggggctaagcctatctcaagccatggatcaagatgaaaaataccaaagcaagcactgggaagcatattatagctataaatgctcgaacaaagatccgtggatagtgcctcctttgggtgagaaccttctttctcattgcttgaattttatgagcaaggagagcataagcaagttacacgagaagctatcaccagatctagacggcatatggatggatctatctaaaagcatcgcctcgtgggggatttcaatgaagcgaaggataaattga

SEQ ID NO: 332565 - DNA, 468 bp, Pseudomonas aeruginosa
atgtctgccaatcgggtgaatattcgcctggcccgggtggaggacgcagagatgatcggcgcgttcgtacgccggctgactcgcgagcatgttgcccgtgatttccctccacaggggcggcgtttccttcagcgagcccttggcactccgcgaatcctggagggtatgcgtggaacctgccgctatttcgtcgccgaggagcgggggaaaatgcttggcgtcgtcgccactcgcgacgaccatcatctgctcatgctattcgtcgcggaagaggcccagggccaggggctggcgcgtgccctctgggcacgtgcgcgcgaggcttgtctcgaggcgggatattcgggtgtcttcactgtcagcgcggcgctgggggctgtgccggtctaccagaggttcggtttcgtggcgagcggtccggtgaccaccgagcacggtgtgacgcgtctgccgatgacgacccggtga

SEQ ID NO: 332566 - DNA, 588 bp, Pseudomonas aeruginosa
atggacatcgtgcattcccatggacacgacccgggcgtactcgatccccggaccgatcgcctgttcgtcgtcgcgctcagccaaagcccagccaaggtcatgctgcgcgcggcggatggcgcgcacctggaaatagcgctgccggcaagcggagctccggacagaccggccgggacgcgctgctacatgaatctggaacgcacggtggtggagcttcgcgaacgcttgaagccgcgtgattgcggcgcggcggtgatcgatcgggtcaacgcctatatctctccgccaggatgcggagcgccgctgcatttcgacattcgtaccgtatggatcgtgcaactgttcggctgcaagacctggaggctgggcgacaagcccgcggtggaacagccaagccacaactgcgtcctgcccaatggcgagcgccacgtcatctacgacgggcgggagctcgaggcgccgacgcggatgcgaacctataacctgtttccgggcgactggcttctggtgccaaagggcgtatggcacgaaacgacaacgaccgcaggctccgtgtcggccaccctcgcggcgccggaaggcagctag

SEQ ID NO: 332567 - DNA, 1191 bp, Pseudomonas aeruginosa
atgcagaagcgacaggttgaaacggatgagccagccaccctgcggatcagcggcaacgccctgcatctctcggacggcgtgggagtaacgctgctcgacgatcagatcgtcctcgagaaccgcgccactggcgccagcaaagccttttccagggaggcgataccgctgctggatctgttcatggactggatcgaacccgacgatttcgtcagccgggccttcgagcagggaggcgaggcggagtctgtcaacagagccatcggcgttctgcacgatctgctggaactcgatgtgctgacggtgcgcgccgaggatctgaggggaacccgcctgcgcgcccctggtgcgggctggggcgacgccatgcgcttcctgctcgcaacacggacgagcagggagacgatcttcgccccacccgcggagttcaatgccgccctggccgagaaggcagccgtcacgcgtcaggcatccgccttcatggaatatccggcggcaccgttcagtccattgagcgaaccacgcatgacggcctccagaggagaaccctcgttcccgaaaaccatgctgaacaggaggacggctcgccgatacgcggaccatcccctcaccgaagcccagttgtccagcctgctcaagttcgcctggggcatgatcaagagcgtacccaaccctctcggcgacgtgttcgtccgcaagacctcgccgagcggcggctcgttacatccggtcgaagtctatccgatcgtcctcaacgtcgacggcatcgagagagggatctaccactattccgttcgccgccacggcctggagcgcctgtggacgggggatgcacacgagtggatcgccaaggcctgcggagaccaggaatgggttcgggaagccgccgtcatctttctctgctccgcgttccttccgcgcacggcctggaaatacgacttttcgcgcgtcgcccgggccgtgatggccgagatcggcttcagcgggcaatcgcttctgctcaccgcgtcatggctaggccttggcgccttcaccaccattgccctgcgcgatgaactgttcgaggacctgctcggcttcgaccctctgcgcgaaccggtattcgccgtcttcggagtcggtgccctggaaccggacatcgtcgaccattcgcgtcctcgaacggaaaaccaggacgaagcgggcgccctgtag

SEQ ID NO: 332568 - DNA, 1113 bp, Pseudomonas aeruginosa
atgagtccgggcaccgaccgcccctggaactcggcattccagcccgacagggggctcggggctttccactcgctgcgcaaggccatccttgcgcagcgtacccagctgggtctcgatgccctgaaacaatgcgacgaagtgctgaggacggcacaggagcctggcctccccgagccgctgctcaatctccgggagggggaaggaggatctacgctcgtcttcgatgatcccgtctattcgatctggctgcgttttttcctccgcgcatcggccaacaggcgcacggaagaactcatccgccatatatcgaaacttccctcggtactgcaggacgtcgagcgtcgactcacaggcaaggccaacctctacgtccccggcagcgcgatcgcactccagcgcgaggatctacatccctatgtcatgaaagcgacaccgccaacctatgatttcagtcgtgccccctcctcctccggagaagaaggacgcaccatcggccatccgttgagaatgcaagccggccttctcggcagcgccctgaagaacatcgaaacggcctggcccgaattgcatgcgcagatcgaggagtgcgtgcgcatcttcggctaccttccggatgcggcatttcgcagttgctcggcggcgcgctactccggaatcgtctacctgggcaacatggatgaatcacttctcgatcttgaagagtcgatcgtccatgaaaccggacatcaggttctttaccaacttggagaaatgaccaggctgaccctcccgcagacaccgctcgaggccaactacgtgctgccgtggtccggctcgcgtcgtgatctcttcggcttcctgcatgcccattacatctacgccctactggtcaagtactactggcgccgagcaaacctggatggacgggaagcggccgaatgccggggccgcgcgttactgatcctgtccggctgcctgaaggcgacccccatgctgcaaggagacgccaacctgacggaacagggaagaatcatcgtcgagcggcttgccgaagaactcgccgaactggatggcgaaattcgcggacgggtccggcacgagcgggagaaagcgaatgcagaagcgacaggttga

SEQ ID NO: 332569 - DNA, 480 bp, Pseudomonas aeruginosa
ttgtttgcttccctgttgctgttgttggtcaaggatagcggccaagccttggaggaactgtcgacctttctgctgttgctgctggtcgagcaacgcggcgaggtcctgcaggttgcggcctccctgctgttgctgttggtcgaggaccgcggccaggtcctggaggagctgtcggcccttctgctgttgttgctggtcgagcagcgcggcgaggtcctgcaggttgcggcctccctgctgttgctgctggtcgaggatagcggccaggccctggaggaactgccggcccttctgctgttgctgctggtcgagcagcgcggcgaggtcctgcaggttgcggcctccttgctgttgttgctggtcgagcagtgcgacgaggtcctgcaggttgcgacttccctgctgttgttgctggtcgaggacagcggccaggtcctggaggaactgccggcccttctgctgttgttgctggtcgagtag

SEQ ID NO: 332570 - DNA, 294 bp, Pseudomonas aeruginosa
ttgctgctggtcgagcaacgcggcgaggtcctgcaggttgcggcctccttgctgttgctgctggtcgagcagcgcgacgaggtcctgcaggttgcggcttccctgctgttgctgctggtcgaggaccgccgccaggtcctggaggaactgccggcccttctgctgttgctgctggtcgagcagcgcggccaggttcggcaggttgcggcctccctgctgttgctgctggtcgaggacggcggccaggtcctgaaggagctgccggcctttctgctgctgttgttggtcaagtag

SEQ ID NO: 332571 - DNA, 675 bp, Pseudomonas aeruginosa
atgaaacgacttcgagttgccgtttcctgcgcgctgctggcggcgctggtgggttgttccaatggtcaggtcaagccggaaaactactcgggcttcatcggtgactattcgacgctggcgcctgccaccgcgccttccggagcgccgctcctgcgctgggtagacccgcaggcggacgtgcggcgctaccagcggatctacatcgagcccagcaggttctatccggtcccgaaaccgaacgacaaggtttccgcgaagacgcttgcggacatcacgacctactacgatcaggcattgcgccgtgaactgggcaagagcctgccgctggccagcgcccccggcccgggtatcctggtgctgaaaccggcgatcaccgcagtttccagccatacccagggcctacggccatacgaggtcatccccatcgcgctgatcgctgctgggatgagtacggcggtcgggattcgcgaccaggatacccagatcgccaccgaggccatgctgctcgacggtggggacaacaaggtattggcgaagatggtgcgccagggcaccggcaaggcgctggacgattccgaccagccgatcacgggagacgatgtcaaggcggtgctggacggttgggcggccgacatgcgcatgtcgtacgagaagactctcggttctcgtcgatga

SEQ ID NO: 332572 - DNA, 555 bp, Pseudomonas aeruginosa
atgtccaagcagcacatcatccatttcaccgggccgatcaattcgtccacctgcggcaatctgatcaacacttgcgccaaggtcctgcaacaggaggccgaggagttgcggatcaatatcgccaccatgggcggggaatgcagctacggctttaccctgtacaacttcctgcgcgcgctgccggtgccgatacatacccacaacctgggtaccgtcgagtcgatgggcaacatcctgttcctcgccggcgagcgacgcagcgccagtgcccacagcaagttcctgttccatcctttccactggaccctgcatggcgcggtggaccatgcgcggatggcggaatatgcgatgagcctcgactacgacctggagctttacgcccggatcgtcgccgagaacacccgtgatgcgccggaacgcctggacatcccgagctacctaatggcctatccgcgcatcctcggtccggaagacgccctggcttgcggactgatccatacggtggacgattcgcctatacccgcttccgcctgccagtggagtatccattcctag

SEQ ID NO: 332573 - DNA, 1200 bp, Pseudomonas aeruginosa; identical to SEQ ID NO: 289460

SEQ ID NO: 332574 - DNA, 1065 bp, Pseudomonas aeruginosa
atgaaccagcgcaaggcatccgtagcgtcacccgcagcgccttcggcgctgctgggcgacattcgggcactgatcgaggcggcgcggcaacgcgccgcctcggcggtgaatagcgagttgacgatgctctattggcgcatcggccagcgcatccacacgcaggtcttggagggccggcgagccgactacggcgaggaagtggtgttgaccctggcggcgcagttggtcaaggagtacggcggcagtttcgcggtcaagaacctgcgccgcatggtgcagttcgccgccgcctacccggacgagcgaattgtcgtatcactgatacgacaattgagctggacgcatttcatcgccctgatcccgctgaaagacccgctccagcgggactactacgcgcagatggcgagcgccgaacgctggagcgtgcgaacgctgcgcgagcgcatcgactcgatgctgtacgagcgcacggcgctgtcgcagaagccaggggagatgatcgcgcaggagctggcgacgatgcgcgatgcgcagcgcatgtcgcccgcgctggtcatgcgcgacccgtacattctcgacttcctggggctgcgtgacacttggcaggaaagcgacctcgaagccgcgatcattcgtgaaatggagtcattcctgctggagctgggcgcaggtttcagcttcgtggcccggcagaagcgcatcccgattgacgacgaggatttccacctcgacctgcttttctacaaccgcaagctgcggcggctggtggcggtggagttgaaggtcggcgagttcaaggcggcctacaagggccagatggagctttaccttcgctggctcgacaagcacgaacgggagccggaggaagcctcgccgctgggcatcatcctttgcaccggcaagaagcgcgagcagatcgagttgctggagctggacaagtcgggcatccacgtcgccgagtacctgaccgccttgccgccaaggggtgtgctggtggagcggttgcaacaggcaacgcagcgggcacagttgcagatcgagcagcgcaagaccgatagcgggtag

SEQ ID NO: 332575 - DNA, 510 bp, Pseudomonas aeruginosa; identical to SEQ ID NO: 289459

SEQ ID NO: 332576 - DNA, 351 bp, Pseudomonas aeruginosa; identical to SEQ ID NO: 289458

SEQ ID NO: 332577 - DNA, 279 bp, Pseudomonas aeruginosa
atgagcagccatcacgactacatcatcgaaatcaccgcgcagcatgatgcgctcaagccgttcgcgccggagaacggccagccgctgcgctgcaagatcggtgacgcggtgatctacaccaacgaatacggcgtgcagttccgtagctgcatcaacgggttctaccgcccgaccgagccttcggggctgtatgcgcgcggtatgcgctactacctcgattcgtcagcgccgtggatgccggttgcgcaatccagcctgcgccctgacgactcggcctga

SEQ ID NO: 332578 - DNA, 831 bp, Pseudomonas aeruginosa
atgcaactcgcatcccgattcgcttcccgttccccctcgctgcgcagcgactacccgctgtccgatgaccagattcaccgcgtagcgccgtccatcttcgcggacgcgccgcatgaaagccgttcgcagcggtacgcctacatccccaccgctgccgtgctgaccgagcttcgcaaagaggggtttcaacccttcatggtgacgcaaacccgcgtgcgcgacgaaggcaagcgcgagcacaccaagcacatgattcgcctgcgccacgccagccagatcaacggcgcggaggccaatgaaatcgtgctgctgaactcgcacgatggcacgagcagctatcagatgctggccgggatgttccggttcgtgtgcagcaatggccttgtgtgcggcgacaccgtggccgatgtgcgcgtgccccacaagggcgacgtttccgggcacgtcatcgaaggcgcttacgaagttttgcgcggcttcgaccgggtgaaggattcccgcgatgccatgcgcgcaatcacgctggacgaaggcgaggccgaagtgttcgcccgcgccgcgctggccctcaagtacgaccccaccgacaacaagcccgcgcccatcaccgaatcgcaaatcctgatgccgcgccggttcgacgaccgccgcccggacttgtggagcgtgttcaaccgcacgcaagaaaacctgaccaaaggcggattgcatggccgcagcgccaacggacgccgccagcaaacccgcccggtgcagggcattgattccgatgtgcgcctgaaccgcgccctctggatgctggccgatggcctgcgccagttgaaagcctga

SEQ ID NO: 332579 - DNA, 2067 bp, Pseudomonas aeruginosa; identical to SEQ ID NO: 291767

SEQ ID NO: 332580 - DNA, 210 bp, Pseudomonas aeruginosa; identical to SEQ ID NO: 291768

SEQ ID NO: 332581 - DNA, 315 bp, Pseudomonas aeruginosa; identical to SEQ ID NO: 291770

SEQ ID NO: 332582 - DNA, 351 bp, Pseudomonas aeruginosa
atgaccttgccgcttgtcaccgctgatgaacgcgcccggctgctggcccacggcgcggcgctcgccgctggtcagcgcctcgacccgctgccggtggtgcgcctgttcacccctgacgcgcatgtgacctggctgctggtgtcgctcgaccccgccgatggcgatacggcctatggcctgatcgacctcggcatcggcatgccctcgctggggacggtcaggctgtccgacctggccggcatcgtcgggccgcgcaagctgccgttgcagcgggatcggtatttccaggcggtgcgcccgctgtcggagtacgtccggctggcgcaggagaacgacgcgatcacggactga

SEQ ID NO: 332583 - DNA, 3015 bp, Pseudomonas aeruginosa
atggcatccctcgaacgtaccgcctaccctgtattgtcgcgctcctattcgagggccgagcttcagcgtgaattcagcttctccgaggaagaagtcacgtgggtcaaaagtcgctctaatgcagcattccgactgaatctcgctgttctgttcaagacttttcaggtactccgatactttccagaaatcgctgaagtgccggagccagttgtcgatttcatccgcacacaaataggtctacgcagcaaggttgcgctatcaccctacaagtggatgcagctttaccgccatatgagtgccgttcgggaaaaacttggggttcgaccgttctacggctcggatggtcaagacatagcatccacgcatgcacagttgatggctcccctcctcgaacagcgcgctgacattattaatgcgatcattgacgagttgctgcgccaaaactacgagctgcccgcctattcgaccttgaatgacctagcagaagccgctcgtgcagaagcacaagagaaaatcttcaaccttgtggtagccagagctccaatcaaggtgatctataagctaagggatcttctcgacacggacttcgggcgtcggcagagtgacctcaacacactcaaacaggcacccaagaaaccctcgcgcaagcatctggaggtactgatcgaccacctagcctggctagagagtttcgggaaactggatgccatttttgatgggatcgtcgatacgaaaattcgccactttgctgcccaagctgcggcgtcggatgtatctgaactgaaggactgctcgctgccgaagcgttacacgctgatgcttgctttgatctaccgtatgcgggtgcgaacccgagatcacctggccgagatgttcatccgaagaatctccacgatccacaaacgcgccaaggaggagctggagcaaatccaggcacgtcaacgtcagaagttggaacaactggcggccaccctggacggcgtggtgcagattctggttcaagagccggatgaccaggaggctggtagcctgattcgagaatacctctcccccgatggcaacatggatcggttgcgagaggtttgtgctgaagttcaggccacaggaggtaataactacttgccgctgatctggaggcacttcaagtcccatcgttcactgctgtttcgcctcagccaccttctccagttggagcccaccacccaggatcgctcacttatccaggcgcttcagctcattcaggacagtgagaatctgcaccgtgaatggatcgatgagcatgtcgacttgtcgtttgcatcagatcgctgggtgaagatcgtgcgtcgccctaccagtgaagggccgcctaccaaccgacgttatctggaggtctgcgtgttctcctacctggccagtgaactgcgctcgggtgatctgtgcgtgcagggatcggaatccttcgccgactaccgtaaacagttgctgccttgggaagagtgtctccagcggctaccggcatactgcgagaaggtgggccttcctaccacagcgaaggagtttgtcgcctcgctcaagagccagttggaggaaaccgcgcaacagttagatgacaagttcccttcctgtcgaggggatgtgtcgatcaacgatgcaggcgagccggtactgcggcgggtgatggcacgggacatcccgccttcagccatctcgctacagacggcgcttatgcagcgtatgccagccaggcacgtgctggacattatggccaacattgagcactggattcagttcacgcggcatttcggaccgatgtccggcaacgagccaaagctcaaagagccggccgagcgctacctgatgacgatcttcgccatgggctgcaatctcggtcccagccaggccgcgcggcatctggccggtaatgtcacaccgcatatgctgtcctataccaatcgccgccacctctcgctggagaaactggacaaggctaatcgcgagttggtggagctctatctgcaacttgacctgcccaagctttggggcgatggcaaagcagtggccgcagacggtacccagttcgacttctatgacgacaacctactggccggctaccacttccgctatcgcaagatgggggccgtggcgtaccgacacgtggccaacaactacattgcagtgttccagcacttcatcccgccaggcatctgggaggcgatctatgtgatagagggactgctcaaagtcagccttagcgtcgagcccgatacggtctactccgacacccagggccagtcggccacagtattcgccttcactcatctcctgggtatcaatctgatgccgcgtatccgcaactggcgcgacctagtgatgtgccgaccggatcgaggcgtatcgtacaagcacataaaccgactgttcaccgacactgccgactggcacctgatcgaaactcactggcaggatctgatgcagattgcgctgtcgatccaggccggcaagatttcctcgcccatgctgctacgtaaacttggctcttacagccggcgcaacaagctctacctcgcagcacagacgctgggcagtgttatccgcacgattttcctgctcaattggattggcagccgagagctgcgccaggaggtcactgcgaacaccaacaagatcgagtcctacaacggcttctccaagtggctctcttttggcggcgatgtaattgccgaaaacgatccggacgagcagcagaaacgtctgcgttacaacgacatggtggcttcgtcggtgattctgcagaacaccgtggacatgatgcgcatcttgcaaaaactagcccgcgaagggtggcagtttaccgatgaggacgtgtcctttcttagcccctacctgaccagtaacgtcaagcgtttcggcgagttcaaccttaagctcaaccgaccgccggagccctggatcaaggattcggtattccaacaggctgccggctcgttgcgagtcaactcgaccagtaaggccgcggccgaggaggcaatatga

SEQ ID NO: 332584 - DNA, 264 bp, Pseudomonas aeruginosa
gtgaaaaagcgttttatcgaagagcagattctcgacttcctcaagcaggcggaggccggtgtgccggtgaaggaactgtgtcgccgacacggcttcagtgatgcctcgttctacacctggcgggccaagtttggcggtatgaccgtggcggacgccaaacggttgaaggatattgaactggaaaacagccgattgaagaaattgctcgccgaggcccacctcgacatcgagtcgctgaaagtggtcgcccgcggaaaagggtaa

SEQ ID NO: 332585 - DNA, 1188 bp, Pseudomonas aeruginosa
atgattttcggtcatgagggccttcctggctctggcaagagccttgaggccatggttcatgtggtcaactcgctgctcagcggtcgcactgtggtgaccaacatcagcggcattgaccatcgggcaatctccgagcatctggccatcccgttgcccacggtccagcagctgctgatctgcctggaagcaccggatgaactcgacgaggatgcgaaggtggcgtgggtgaagggccagttcttcgcgaaccggcatcatgactgcctctggatatgggacgagatcaaccagttctggccgcctgatcggcaaccgctgtcggcggattgggccaagttcgtgactgagcaccggcacctgggcatcgacattctgatcatgggccaggacttgaccgagctgcatcagacgtggcgcaagcggctccagcgctacacgcgattcaccaagctggacatgatgggcaaggacgaccagtaccattgggccagttactccagcgccgggcggctccggttcaagcagacggcctcggggaagaagccgtacaacaaggacttcttcgggttctacaagagccacgatgacgggacggccaacgttgcgaactaccaggacaagcgtttttctgtgttccaggcgaagcacaaggcgctgggctggggactgtcgatcgcgattgcggtgtcggttgcgtacctctggaacttcttccagccgggcgaccaggacctgaaggccgctgttcatgacgcgcccaagactgagcacgcggtgacgccggcagtctcggcgccggttcagcctcaagtcgtcgtagccgcggcgccggccaaggcggaagaaccgaaggagccgccgcccatcgactacctggacaagctcgcgcagcagtacgatctgcggctgtcggcgatccttgatcgcaagaatccccagcccgaacaggccgcgttcgagttcgtcatggacgttctggaccctgggtatcgtgtgaaggaacggttccgtcggatcgacgtggtgtcgctgggctggacggtcgagcgcagggattacggggtgttgatcagcaagggcggcaagtcgtacgttgtcagaccctggccgttggacaacttcgggaaagcgccggagcgtcagttgagccagctcgggcagatgcctgtggctacaggcaagccctga

SEQ ID NO: 332586 - DNA, 348 bp, Pseudomonas aeruginosa
atgcaagcaattattgaaacggtggcaagttggtttaaggcgcttttggcgtggttcggtcgaatctttgaatggttccttggcatgttcaaggatttcatggagttcattgctgatttgccgctactgatattcaagggcgtcatggaaggcgcgctgtacttgatcaatgcgcttccggttccgcagttcctggtgcagtacaagttgcagacgctgttcagtggtttgcctgaatcggtgctgtggttcatccagttcttcggcattccgcaggggctggccatcctgggcgcgggtgtcgcgtttcggctgctgcgcaaggcgctgacgctgggtcaatggtaa

SEQ ID NO: 332587 - DNA, 1422 bp, Pseudomonas aeruginosa
atggctcgttattgcagtgttcggcggcttagtgtgtggtggtgtttctgcttatgcgttttatgcgcgacagtaactgaggctgctactcgaaaaaatgtaaatgtccctccggctcgtgatcaagttaggggagggaaggcgtccggtgtttcgggtggagttttgactatcgtcgggccagccttggaaggcgagtatattcctcgcggtggtactggcggtgcaaatattccagtgcgtggtattcatggcggagtaacggcaggtgcgcgcactattgcgggcggtgctgtctctgcactgcgcggcggtatagttggcgttgctgcaactgcggccatgtcaatggctcttgatagtatcgggggctttattgatgagaatggcaagccggttaagaaggtaagtgacgtgccctcgggtgcggtggcaggtgtttattacgtcaggccgccacaaaatgttggcggtgtttatcttgatcttaagtatgggctgacacgtcagcaggcttgtgaatatgaggttacgcagagtggcaactgtgtaatcaggattaacggcattgtgggttcttctattatttacgctaatagttgcgaccctggcgtgtggtttaatatttcaaccggcaagtgcgatagtttgtggaagcctagcgagcatatagagcctttgactggtcctgactatgacggcattactgacacgttgtcgggggtgacgaacccagattggctgaagagcttgcttgaggcttcttgcgaaggctcgttgagccctggccggtgctacgacgaactgaccagccttgccgaccagttgaaaggacctagctcggtcaaaggcccgtcaagctcgaccacaagcacttacacgcgtcctgatggcactaccggcacgaccaacactactacggaaactaattacacgatcaattacggcccgaactatttcgactactcgaaaacgacgaccacgacaactagcaaggatggcgagaaacccacgacgacgacggaaactgagtcgccggaggtgacgggggaggagcctgccactgaacctgagtctcagacgccttcgccatgcacgacaaactgcgagggtcccgcatatgaagaccagtacaagccgaccgaggaaacgaaagaaagcgttattgacaactatctgtcgcgtgtagaacaggcgccgatagtgaatgcggcaacgggatttttcgatgtttcggtttccgcatcgtgtccaacttggcaggcgcctgtcgatatgtcgattatgggtgcaagctttcactctgaacttgtatttgatcatcactgccagccctggtttaccggatataggacggcggccatggccgttgtgatgattctttgtgcgttcggcgcgttctatatcgccatgcttgattga

SEQ ID NO: 332588 - DNA, 231 bp, Pseudomonas aeruginosa
atgaaagccaacctgaaacaaaccgccctggtcctggtcctgggcgctgtcgctgcatccgccgcggtgccggccttcgccgccgagggcgatctcgacttctcgtcgatgatcagctcggtcaacggctcggctgtgatcgccgcattcatggccatgggcgtggtcaagctcggcccgaacttcgcccgctgggctgtcaacaaggtggccggcttcttcggtcgctaa

SEQ ID NO: 332589 - DNA, 270 bp, Pseudomonas aeruginosa
atgctgccgctctgcatcgtcgtcgacgagtctggacggctcgtctcgcaaggtgagttcaccggcgattgcaccggctacgtactcatgaccccggctgatttcgcggggtccatgaccgttgctcagttgttcggctggcctgatccggtcgccttcggggcagcgttcacgaccgcattcggcgtcgtcctgggctgtgcggtcgtggcccacaccatcggctctttagccggtttcttcgataccaatcgtgaggaagaactatga

SEQ ID NO: 332590 - DNA, 309 bp, Pseudomonas aeruginosa
atgcccttcgtctatctcggcctgactcgcgacgccggaacctcgaaaaagaccggcaacgcctatgacatcgcggtcgtgcacttcgccgtcgatgccacgcaatcgacccgccccgatcgcaagtttgccctcggcctggaacctcaaaacctgccgatcgcgccggaagcggtgagccagttccagcgcgttgaaccgctgtcgtctgtgaacttcgagttcgagccggaccctcggaacatgcagcgcaaccgcatttgcggcgtgaaaccgctgccgaagactactggccaagcggcctcctga

SEQ ID NO: 332591 - DNA, 264 bp, Pseudomonas aeruginosa
atggctatcgagatcaaccgccagtcgtacctgtctctgcgctcagccctggagctggaactgctcaatgccggcatcgattcgcctgagctgctgagccggcttatgcgccacgtgctggccaccgagtcggctacccgtaccgactcgcaacgcgtgcgccgtgcgttcgtcacggcccgtagaaacccgctgctgggcgcaatccctcagcacagtccagggcgcacaaatcgcccgtatatccgcaagaggaaaccctaa

SEQ ID NO: 332592 - DNA, 162 bp, Pseudomonas aeruginosa
atggcggcggtgaatcagtccgtgttgcaacagcaagttgtggccacgctccaggccctggagcagcacaaagagcagggcggcaagcctgagcgcgtctggaccactgtcaccaacgaaaagggcacgccgttcctgggcgacgtgttcgggtggccgtga

SEQ ID NO: 332593 - DNA, 1137 bp, Pseudomonas aeruginosa
atgttcattgattggttaagcgttactcaggagtttccgtacgaccttccggtcgtgagtgacgtattccgcatgactgtcgatgccttgactggtgagcatctggcgacaagccagccgcgcataactcacgaaggcagttactccacaacggtttctatcagtgtccaggggcgcaaggtcacggttgagggcaacccatcccggatcaatcgccgggacaatctttggggttacacccgcatcgagcagtgcatcgctgtttacaaccggttgcttgcggagcgtggccttccgggcttcacgcgctgccgtgaaattttcttgcgtgacggtgcgtcgggcgcgaagccgggtgattgggtggctgatggtgcggtgatcaccatgattcacctgactagcaatgtcggggtagggaaggggaatcagctcgattatttgcgtggtctttccagtgttcgttatggccggttgatcccgtttctcttcccgaacggtcggactgtgagttggacgacaaagggggccgacaagggtgcgcggctccgttacttcaaggtctatgacaaggcctttgagcttgaacagcacctgttgcctcggatgcgtcgggagttcggccctgaatccgaagagtgccgctatgccgaacaactgcgtgactactgccttgaacatggcgtggtgcgctttgagcaagagctaaagagcgaatttcttgcccgcctgaacctccgctattggggccttttcgatgaacgccggtttgagccgctgcatgacgaattcctggccctggattcccgcttaaaggtgactgctatggacctcgcttcgatctccgatcagttgttgttggaaaaggttgtggacactccgaaggccgcccggacaactgcttcttatgctctggagtgggcaactggtggcaagttcgattttcataagcgccaggtgaaagaacatgctgcgcgtttgaatcggatcggcattgatatccgccagccatttgatgtgacccgtaactcgctggtcttcgttcgtgaggctcgcgaggtggttaagactttcgatctgatcgcgccgagctggtaccggaagcctgtcggtcatctgcaattggtggcggcatga

SEQ ID NO: 332594 - DNA, 192 bp, Pseudomonas aeruginosa
atgtcgaaggcatatcgagtacgcgacaaattcgtcgacgaggtgaaagaccgccgcgtgaaaatgatcattgagaccaaggacgacgtccgggaatcggacctaatcaacgcgacgctatggaagtacctggacaagatcacgactaaggacgtgcttgaattccgggaagagttcggctcaaaggagtga

SEQ ID NO: 332595 - DNA, 174 bp, Pseudomonas aeruginosa
atgggtttgcacgacagggaatggttcaacgaaagccggcacaagcccaaaaacgccaccagcgcaccgcagcggcctcgcagagtcctgttcatccactatctggccgggttctggccgggcgtcctcatgggcttcctggcaggcctgactgtcggcctgctgatcagctag

SEQ ID NO: 332596 - DNA, 294 bp, Pseudomonas aeruginosa
atgctgctgaccattcgcgatgttcctgaagacctggtgcgccaggccaagcttgccaccggcaagggcaccggcagtcaggcgttcatcgccggtattgagttgatgcttcatcagcgcgatcgcatcgaagagatgcaggaagagattcggtcgctgcgcgagaccctcggtgtgttccagggcgtgttggctgatgctcatgccgctgctgtgcagttggctgagatcgcggggcagcgtgacatgcttgtgtcggacaacccgctgcggcctgggtatcgtcgccgctag

SEQ ID NO: 332597 - DNA, 1188 bp, Pseudomonas aeruginosa; identical to SEQ ID NO: 332585

SEQ ID NO: 332598 - DNA, 348 bp, Pseudomonas aeruginosa; identical to SEQ ID NO: 332586

SEQ ID NO: 332599 - DNA, 1422 bp, Pseudomonas aeruginosa; identical to SEQ ID NO: 332587

SEQ ID NO: 332600 - DNA, 231 bp, Pseudomonas aeruginosa; identical to SEQ ID NO: 332588

SEQ ID NO: 332601 - DNA, 270 bp, Pseudomonas aeruginosa; identical to SEQ ID NO: 332589

SEQ ID NO: 332602 - DNA, 309 bp, Pseudomonas aeruginosa; identical to SEQ ID NO: 332590

SEQ ID NO: 332603 - DNA, 264 bp, Pseudomonas aeruginosa; identical to SEQ ID NO: 332591

SEQ ID NO: 332604 - DNA, 162 bp, Pseudomonas aeruginosa; identical to SEQ ID NO: 332592

SEQ ID NO: 332605 - DNA, 1137 bp, Pseudomonas aeruginosa; identical to SEQ ID NO: 332593

SEQ ID NO: 332606 - DNA, 192 bp, Pseudomonas aeruginosa; identical to SEQ ID NO: 332594

SEQ ID NO: 332607 - DNA, 174 bp, Pseudomonas aeruginosa; identical to SEQ ID NO: 332595

SEQ ID NO: 332608 - DNA, 294 bp, Pseudomonas aeruginosa; identical to SEQ ID NO: 332596

SEQ ID NO: 332609 - DNA, 1020 bp, Pseudomonas aeruginosa
gtggatagagaattggatcagacccttcagcgcaatctggagcggctatacaattacctagaaaatccagaacgagaggaggcacagcgtgttctgctcgcagcggaaccagagccgatccgaattactcacggaattcctgacctctataccgactggctgtcatcccccagctactcagcacaaggtgggttgacggggcaactgacgcaggtcataagccagactgccgggcggcccgtgctagtgttcgacgactacttcaaggttcatgaggtcactattcgtacggtcgccgaaaccggaggagccaacagtatttcggtgagcgacctccaggtgcaattgaaccagcagatcaatacctttatccaagaccgcatcgatggtgacaaagccgataaggtcagccgcctccagtccaatatttcctatctgattgaaatgggtattaatatcgatttcaccgcccgtcatgagcttccacctggtgggcgaggcaacagagctactattccgacctctgaccccaacggtgaatcaggtgtaacgattggctatggcttcgatgtcggccagcacgatgaatccggcattcaggctctgaacatcgctgaatccacgcgcaaaaaaattcgccccgccctcggcttgaaaggagcgaacaccgcgaccttccaggcattagcccaactcatcccggtactcacagatgaagacgggctgtccctctttaccgccaagatgatcaaggtcactgatcggatgaaggtgaagttccagcagtggagcaccttacctccggcggtcaaaaccatagtgacagacctgtattaccactatggtgagtattcctcgttcccaaactttgagactgctatttcccagagcgactggccagccgccattagggagttgaggaactggaatggtactcccaacagtaccgatccgagcgatggcatagccaggcgattgaacaatcgcgcggactatctccaacgatccctgggactctag

SEQ ID NO: 332610 - DNA, 741 bp, Pseudomonas aeruginosa
gtggcgctacgcagccaagtcaaccagttgttcagccagagtcggggctcggccggcagccgcagcattctgggcatgctgcgcgaagagggcgtgaccatcggccgtttccgagtgcgtcggttgatgcgtgagctgggcctggtcagcaagcaaccgggctcgcacgcctacaaacaggccacggttgagcggccggatatcccgaatcggctgaaccgcaaattcgcgaccgagcatcccaatcaggtgtggtgtggcgacatcacctacgtctgggcgcaaggccgttggcactacctggccgcggtgctggatctgcatacccggcgggtgatcggctgggcgttctcggccaagccggatgccgaactggtgatcaaggccctggacatggcctacgaacagcgcggcaggccacagcaggtgctgttccattcagaccagggcagccagtacgccagccgcctgtttcggcaacggctctggcgctatcggatgcagcagagcatgagccgtcgggggaattgctgggataactcgccgatggagcgcctgttccgcagtctgaagtcggagtgggtcccgtcaacgggttacctgacggcgcaggaggcccaacgggacatcagtcattacttgatgcaccgctacaactggatcaggccgcatcaattcaacgacgggttaccacctgcggtggccgaagaaaaactcaacccactgtccgggatgggttga

SEQ ID NO: 332611 - DNA, 975 bp, Pseudomonas aeruginosa
atgcttcggctggactacacccacctgcctgccgagcgcgtcagcgttgggttcgattttatatcggatcatctaactgttcgtgagcgctttgtgtacgaattcaggagcgctgcagagcaggggccgattgcattgaccctcacgatgcttgggcacgggtccattgggatcagcggttcatcgtccattctggaccaagatgcctgccgatctgctgtgggggacttcaggaatgacgtgcttcaaggcgactcgcgggctctgcgtgaagccatattggcggagattgctccccgtgctacatggctgagttggttgcttgatgccgacccgcattcctttttgggcgatggggagatcatggcggccttggtggctagcacctcgaagggcgattggattgactgccttcgcctagtggcccctcatcacggccacaataactgggcctttgaacagacggtcgagcagcattggcaggatgtgtgcgtctatttggatacccatatcggagggtccccgggctattcacgctgcaaagtgcctggtctcgtcttctcgctttttgcgaattcgccgaaggtgcaagagtcccggtgggcctgcgagcaggttcttaagcgagccgatccaacggtctttccgcagttgatccaacattgccgagcgatcgaagcggacgatgtgcgtagcctgtttctgtgctggcacaaccgtcagaagacagagaagaaagacgatttcaaagaatgcgtcgccaaagcctgctcggtgcttgcttcggtgtttgcggacgccgtgccctcggacctcgcgcttgcctcgacctggcacgaattcgcggagccagcgcggtccgaccagcaaagcgttgctgcaagcctcagggaattgccatccggggcgtgggaccgacaggtgctgtggagccaactgggcccttccgcccgtgaggcctggcggcaggtgtag

SEQ ID NO: 332612 - DNA, 210 bp, Pseudomonas aeruginosa
atgggactgaacaatgcgttcggcgatctgctgctgaacttcgtgctgggcgcgatgttcattgtgctgccctcgttctgggtcatggggttgagctgggcgggcatgcgggttggcaacgtcgttcaaggattggcaaccggtaccaaggacagtgcccagatggcgagcaagggggctagcgtgctgtcaggtggaaagctgcgatag

SEQ ID NO: 332613 - DNA, 366 bp, Pseudomonas aeruginosa
atgaggaccgcaacccaaaacagtatcgcagaacgccttggccgctggctcggccacggctggcgcggttatgtccgacgggaggggcaagccgttgcgtggctcgccgcgcggggtgtacccaaagcgctggcaaccgcaggctcgtgggcggtgaagcttactgtggttgctgcgcttctgtacgtttcgttctggattgccttgttgtgcatcggtttcgccgtagcggcatggaatggggcacgtcacgatgaggacatgcagatagggccgtttgaagagtacgaagatcccagccagttcatcgactacgaccccaacccttacaacgacatcacccaccacagctacaccgacgactga

SEQ ID NO: 332614 - DNA, 1545 bp, Pseudomonas aeruginosa
atgcaggttggtttcaaggctctcgccgcacagtacggcatcgcactggcgcaaccgctgcgtgtcgactcgatcattggcaccggccgcgcgagccgtgataccggggagcagatcgagaaccgctatcctccggcctaccggccagtggacgactttgccggccattttgagtttggcctcaagtacgaagagatccacctggagtttttcgcgcgcttgttcgctgcggtggggccggcgccgatcgaggcttggtgcaggaatgagcgtttcggccaatatgcccgtcgcaccggcttcttctacgaatggttgaccggccaccagctggacgtgcccgacgtcgataacggtcgctacatcgaggccatatcttcggaccagtacctcacccgcacagaggcgacgcgcgtacggcgctggcgcatcaacaacaacctgccaggaacagtagatttttgccccatcgttcgtcgcacgcctgctgttcaagaggcgctgcaattcgacctcggcgctgcattggacgagttggatcgcgcttacggcgccgacgtcctcatgcggactgccagttggttgaccttcaaggagtcgcgcgcgagctttttgatagagaaggaagcggaccaggccgaccgcattcaacggtttgcccacgtcatcgcccagtactgcggccgcatccaggacccgctgagcgaacagagcctgcataccttgcaagctgccatcctggggcacgacgccttggggctcggactgcggcgttccccggtctttgtgggccaagccacgatgcgcgaagacatcgtgcactacatcgcgccacactttgacgacctgacgccgatgctcgaagggctgaaagcgttcgagcaggcgaccaggggagccgagtctctggctcgcgccgcagtactcgcattcggcttcgtctatatccatccgatgcgggatggcaatggccgcatccatcgtttcctgattaacgacacgcttgttagggacaaggccgtgccggacggcgtaatcctgcctgtatcggccaccattacgagttcggccgagttccgcgcgggctatgaccgtaccttggaggtgttctcgcgtccgttcatgcggcggtatgcggcgtcctatcgctttggcgaactggtgacctacgaggatgggacgcccagcaacttcatcttcgacgactacgaaagcgcgcgacttgcctggcgctatccggacctgaccgagcatgtgctgtatacctcacgagtcgtcgtgcacacgattcggacagaaatggctgaggaagccagggtgctgatgatttttcagctcgcccaggagcggctcaaggaggtattggaaatgcccgaccaagacgccaatcgtgtcattcgctccgtcaaggaaaatggctggaatgtctccggcaagctcaagaagcagtatccagtgctcgacaatgaacccttggcggcgcgaatcgtggaggccgttcggtcggcgttcgaagacagggaaatgcaagacggcgatgagtga

SEQ ID NO: 332615 - DNA, 1851 bp, Pseudomonas aeruginosa
atgctcaagttgttcctgcgccaaaaggtcgtaatacccacgcccagcacaccagttgcggcggaaccattgccacatggcctgttgcgcccggagtcggccgaatccctcctggctgccccccggcgacggcgcctgttggaatacatctggcagcgtacgtcgatgccacggcagcacttctcctggctgtatcgcgcccccttggagcgttacgccgagctggtacagcagtttcccgcatcggaggcccaccatcacgcttacccaggcggcatgctggaccacggcctggagatcgtcgcgtatgcgctcaaactgcgacagtcacaccttctgcccgctggcgcgccgccggaggagcaggctcagcaggcggaagcctggacagccgcatgcgcctatgccgcactgctgcacgacataggcaaagtcgcggtcgaccttcacgtcgagcaggccgatggcaaggtctggcatccctggcacggaccgctgcgccagtcctatcgcttccgctacatagaggaccgtgagtaccggctccatggtgctgctgccggtttgctctatcaccaactcctcgatgcccgcatcctcgattggctgtgcggctatccgtcgctgtgggcatcattgctttatgtgctggccggccagtacgagcacgccggcccattgggcgagctcgtggtccaggccgaccgcgcctcggttgcccaggacatgggcggcgacccgactcgcgccctgggcgcacctaggcacgccctgcaacgcaagctgctcgacgggctgcgttacctgctcaggtcggagctcaagctcaaccaggacggaccggccgatggttggttgaaccaagatgcgttgtggctcgtcagcaagacggtggccgacaagctccgcgcccaccttctgtcgcaaggcgtcgatgggatccctagcagcaataccgccgtcttcaacgtgctgcaggatcacggcatgctccagcccacaccggcgggaaaggccatctggcgggcaaccatcaccagtcaatccggctggtcacacagcttcacactgctgcgattgtctcctgccctggtttgggaagcggccgagcggccagagccttttgccggcacggtcctcgtggaggccgaagccgaaccgacgatggacgtcgaatccgccgttatgcgccagccatcgcaccaggctggcctctcacggcccagtatggcggcctcggatgtggcaaatgccgagcgatctgccgtgctggaacagcctccggagcgtcaggacgccatggctgatctgctggcgttgttcggcgatgacagcgccagtgtgagtccagagactccccccgaccctacggagccggtacaagcaccgccggctgacgctcccgcagcacaagatcagccactagacgaggggtcgtcccttagccaaccatccggccagcacttcatcgcatggctgggccacgggattgtcgctcggcggctcatcctcaacgatgccaaggcgctggtacacacagtcgccgacgcagtgtttctcgtcagccccggcgtgtttcagcggtacgcacaggaacaccctcaaatctccggctgggccaagcaagagcagatggcagactggcaatgggtgcagaagcgcttcgagaagctgcagcttcatcgcaagcaacctgacggcctgaacatctggacttgcacggtcacggggccacgcaagtcacgacgcctacatggatacctgcttgagcgccagcaactggccaccgagctaccactacacgacaacccttacctgagcttaggtaggccgcagccggcaaaacagtag

SEQ ID NO: 332616 - DNA, 990 bp, Pseudomonas aeruginosa
atggcagacgctctccggacgcccaatcgccgaatgaaccactcgctcgagctggcgcgcaagaccgccaaaggcaccaaggtatcggtgcgcacggtcaaaagtccgggcttcggccccaagggcgtcctacgctgcatcctgccgttcactatcttcctcaagctcaaggacatcggcggcaacgtcctgccaccgtatgacgaggagttccgtgaagtcgcaatggacacggcgcaggccgcggcctaccgcgacctggcgggtcggctgaccgccgagctgaaacaggctctggcgcgacgcgatacgacgctactgggcgtggtgctcaacgtgctgctggcctggccggactgctgcttccggtcggagaccgtggtgcatccgcgcacgcgcaacaccttggcgttcgtcccggctcagttcaacgagttcgaggtgacgccgaaagagcgcgagctgatcgacatctgcaaggaagagaaggcccagggccgcaaggtcctggcctacacggtctataccggaacgcgcgacaccacgtcgcgcctgaaggtgttgctggagcaggaaggcttcaaggtggcggtgctacgcgcaagcgtggatgccagccgccgcgaggactggatcgccgagcagctggaccgtggcatcgacgtgctcatcaccaatcccgagctggtcaagacggggctcgacctgttggagttcccgacgatcgtgttcatgcagtcgggctacaacgtgtactcgctccagcaggcggcacgccgctcctggcgcatcggacagaaacagccggtgcgcgtgatctacctcggctacgccggttcctcgcagatgacctgcctggagcttatggccaagaagatcatggtctcgcagtccacctcaggcgacgtgcccgagtcggggctggatgtcttgaaccaggacggagattctgtagaggtggcacttgcccggcagttggtcgcggcttga

SEQ ID NO: 332617 - DNA, 720 bp, Pseudomonas aeruginosa
atgctgcagcgattgttcaagttccttaaacggaaacccggcactgcacgtctaccgactcggtccgacgaaataggtgactaccgcaggaatttcgagaacgcgatcacgttcacgagggattgcggctttgaggtggctccacccagttggattgaccaggacatcttggatgtcaacggagaattcatcgagcctgcctttcgcgctgccggcgtcgtcgatcccgcgaaggccgctggccaatgtttgaagtggtgccactacctcgcgccgcactttgaacggcaaatcggcgcaaaggtatgggtgactattgggcagctttggaaaggcgaagagcggatcttttcacccacctggaccgatctaagtcgttggcgccgcaccggcattacccttgatgagctccatacagatggacgcaacggcatcaaccttcatgcttggttgacatgccaatccggggaaataattgaaccgacgttcggaagctcactggctgcatttgctggggacgcttatgcgggactcagcggggcagtggtatggggacgagatccccaagttctgaatcgtcaccgctactttcccatggccgtcggccacgcattcgccgaagcggttggccgccaatcggaactaccacttctggcgaccgacgcggccagccttcacagtgtttcactgctctggggtccgccagatttcgacaggtag

SEQ ID NO: 332618 - DNA, 1098 bp, Pseudomonas aeruginosa
atgaatgaaatagttgaagcatcgaatggcttggatagccaagcggcgttgacccccgacgcgctgactggactgttgcgactggccgcacccgagggggccgtcacggtgaagggattcgctaccgacgttcgctactggtccaaaccgggcgacaacaaggtgaccagagtctacggccgcctggtcatgggcgaatccagcatccgattcgaactgcagccccacgccgatattcaggagaacatgccggtgcttctgcatggtgcattgcggatcaggccggtagaggcatatcgcaccacccacgaggtctttcttgtcggagatgcgatcggccgctggctgccacacacaccggccgcccaggaagaagccctctctccgttggtgcgcctgcaaccgcgcttgtccttggaggaggccatagatagacatggactcgaggcaatcgcctttctcgccacaggaacagcttggggcgatttgaccacggcagcgtcagctgtgccggccattgcacgttgccggcatgtggaaaccaatttcatgcagccggaacgcttcattgaggacgtgattgaggtctgccgcgatcccggaatcaagatactagtgatcgcccgtggcggtggcgcggggctggagctcatcggcgatgcgcattcagtgacggcggcgctgctggcgagtgagcgcgcgttctttaccgccctgggccacgagcgcaacacgctactgctggacaagcatgccgaccagccgtttcccacgccctccatactgggtcagcaactggctgcagctgtcaaggcaatccaagagcggcgggctctggcagagcgactgcgcgacatggacgagcaggtccgcaagttgaccctggagcgcgacaggctgcaggccagcttggacgcagtgcagcagcgcgacttgggtccgagcaaagttcgcgaacagggttccgtttaccaagcctccagcacgagcgagccggcccgatcgccttcgcggcaggcaaccccttcaaactatcggtacgcactggtgggcatcacgctgttcatcgtgttcctgctaggacgctgctcaggatga

SEQ ID NO: 332619 - DNA, 666 bp, Pseudomonas aeruginosa
atggatgcgaatttctttctcatatcacggctggacatgattgcccagttctacaatgttgcggctgccccattcgtcctcatcaagaagcagatagaggatggagatgctccttatgagccgccatattcagaagatggcgagcctccgttcctactggaatggacccgtgcggatgactcactaaagcttctgggtggggtgtgcatgagcctcgtggcaggctcgcttcaactctacctggatactattgtcgagcgctacggtgaccttagagaattcaaaaaaatgaaaggtgccgggtggctggagaaacaccagaattatttcaagaagcatggttacgacttccagagcagcggagcggacctggccttgctttcagaagtaatcctggcgcgaaatgcagtgattcaccatgatcaaatcaccagcgatgtagcgtcttatagcaatgacgacttgaggaaaattcccagcccgttctttgttagtgaacgggagcagcaacttcttagcaaccttaatatgaacacttctccgtggctccttccaccaactattcatgtcgatgaagataagcttctgaaggctatagcagaggcaaaaaagcttgctgcctgcgtagatccttatcaagtgcaactggcaaatagactccagtag

SEQ ID NO: 332620 - DNA, 1665 bp, Pseudomonas aeruginosa
atgcaacatctccgagttagcgtgaaggccggctctgctttggccttgccggtagaaatctattccccgaaaggttcgttgatcggtagtggcgcagtatcgtccaggttcgacaaagtcttcgaattccccttgcaggaaaagggtcgggaaggtcaaccgctggagcgggtctatgtgttcgcgaaactccccggtggggcgacaattcaggaggtcgcggaactggatgtagacgggggcgaggcggttctcaacctagccaagagcagcccttacgagtggctcgaatgggtgacgccatttcgctccctgcaccacttgagcagcgaacagccccatgagccagataggccctccgtccgcacgtcccgtcggatcggcaaggtgtgggcaacgctctgggcatttcagaatcaacgttgggaggccagggacgttcgtttcgaaagccgccggggtgaccgaggcatacgccaactaactatagacgttccgcatcatccacacttgctgcagctgggcggcgaagaattggcatggcgcctgatttcgctgccaccgggggagcaggtgaacattgctctcacccccagcaggcaagaggccggtggtgatgctctcgacattaccgttggcaggcagtttcccgaaaacgagcttgtcatgtcctacctgtcccgtggcaacctccccgaagcatcacgactggcagaactcatgcgcgttgcagatcgtatgctgtacgggaaatttagcgacccgatctctgctgtcgctgggggctatatcctgctcaagacgaatcaactagagcggcgagaacactggttgaggaacttggagcaccactttccctacattgccgacgtgaagatattgaaggctgcgctggcacgtgagcaggatggtgtctcggaagaagacattcggcagatgctgctggatgccctggaggtcggtctcccggttttctcgctcggcatgaccctgttgcacgacagcatggcggcgatgcaccgtgggcctgatgaaaagccgaagttccatagggcgtatcttgcagtccaagcctatgtccgagccaggtgttcgaagggcatgtatctggcgttttatggcaagagccctgcagagccgctatggagtccgatctatggcagagagcaattaggtgccgccacgcctgtaagccaaggctccagtccacccgtattcatgcgtcgacccaaggggtcaccccgtttagtccggtacggagctacttccgtgacactgccgcaagctcctgtaagtgggcaaatgttcgagacaaggcgcttggctttcaaggaaccgccgcattctatcgagattgaccgttggcttagtttgtcggacttgccacgaccgttacttgagcatgccaagcgtatacggaattcggcactcccttctgtcgaaatacaggaactccccgaatacttggccgtacaagaggaaaccgactctgccatggaggtggtcgtgattaatcacaatcgaccaaggcagtctcgccttccccgatccgaatcgacccccgaacttggtggcgtagttgagccaaggcccaggcagaatgcgaagtactggcaggatgcgcggatttctcactcaatctcagtaatggatgaggatgagtga

SEQ ID NO: 332621 - DNA, 1185 bp, Pseudomonas aeruginosa
atgggtattgttttccaatctcaggcattcagggacgaccccaaggtaaccgcgacacatgttttgctcgtgggatgtggtgagtaccccggtctagctgccgcgaaaggtgggttgcagccactgattcctccgcgcctttcggtagaggccatggccaactggttcctgtccggtcgtgatgccatgcctgcgggacaggaactgcctcccgagagggcgttccacaacccgcatgcacccttggggtcgcttgccatacttgcgtccccggcaggggactacaccttgccttcgggagaggtcgcgacctgcaccagaccaacactcgccaacttgaaatctgccgctcacgaatggttgggacggctgggtaacaatccccagagccgcgggatcttctatttctgtggtcacgggttgagcgacgggaccgtccagcatctagtagcagatgacgtgatggaaattgagtatgacccctgggggccactctttcatgtttcaaacacctgccaagccgccattcgggcgacctctgcgaccctagccttctggatcgatgcctgcatggagttcaatgagcaactcctcaacaacatcggcgcaccgcaatcgcttgttcatgggagccgttcgggccagcccaagacgaaggattggtcgctgattggcgccacgagtatgaaccggaaggcctatgctcccgagcgcggcgtggcgcgctttactgaagccctgctgcgtgccctgcaaggtcattgcggcacgcagttcggaatggatcaggatttcagtgttggggccaacgatctacgtgccgcaacggcagagtttctcgacctggcgcagcaaggcgtggaaggggacgtccagacactgggaggtttccaaggggatggactcgggagtactgcgcttcatgtcttgcccagcagcccacgagtccacgttgaaatggacattgatccaccgggctacagagcgctcgctaccgcctatatggagaacatggccaatccgcgggagctgcagaaactcaatgaggggcctgcacggttcctgaaggaacgaggagagtggacttatggcgcactgttcagccagaaccgattcccaggccaggcgcatcgcaggctgctgacatcggccgtccttcgttggcaattcaaagtgccggagtaa

SEQ ID NO: 332622 - DNA, 1191 bp, Pseudomonas aeruginosa
atgcccatcgtgttcattcatggcgtgaacaatcgcgttgaggacaaggattacgagcccggagtcaacagcaagcgagagtacttccgaagcaccttcgctccccgggtggggatgtcggtcaaagcgcagcatgtgatgttcccctactggggcggccagggtgttgacttccgatggaagcaggcttcattgccccgcgatgatgttgtcgcgctaggctcaaacgatgcggctctcgaactctggctcggcgaagtacggttccagaagggaagcgaggaagtcagtctgggcgagatcagccgcacggaaggattcgccgctgcggtagacttgttctgggacacagcttcagtggccgctcccaatgaccgtgtcgaggacatcgccaagtgttacgaagcctcgctgcgatatgccgaagtcgatcctgctccggcatgggcacttgttacgccctccctggacaatgaagcgttcacccaaaaactcctcgaagccataacgccctacctgcagcagaacgcagctgcgccagctgccgtggctttggggatcggagactggttcgcatcagtgcgggaagcgatccgtcggctcgggaatgcgcctggcgatgccgctagcgcagcactggccaagctaggcagaaaatctgtccacgagagtgcttcccggtttcttggcgatatcttcgtttacttgacgactcgcgaccagacaggccccaccagcatcctggcagacgtcctagcgaaacttcaggaggcgcacgccgcgagaacgccggaggacgacaagctcgtcgtggtcggccacagccttggcggcctgcttgcctatgacgcgcttacccattacgtgcctgacataagggtggactacttcatcacggttggctcccaagtggccttgttcgaggaaatgaccctctgcaagatcagcaagctcggtgtacccacgaatcctcccagcgaccgtttgcccaagccttcgaatgttggacgttggatcaacgtgtatgacacgaacgacgtgttctcctttcgcacagaaggcgtattcctcgatgccgaggattacaagttcgacacaggttatggcctgctcggtgctcacggtggctacttcttgagccccagtttctataagcgacttgccaagagggtcatggaggcgacggcgtag

SEQ ID NO: 332623 - DNA, 246 bp, Pseudomonas aeruginosa
atgagccaggggcaaaggcagggaatagagatcaccggacgcggaatcggcatcgcacaaccgatagccactgcgcttgagaacgtggagcaagccatccctcacactggcgtgtgcgtcggctggcagggagacatccaccagttgcagcagcaaatcgcgctgtgccgccgccggtgcgagctccaccagggtgtagcgtccctgtcggaccacaggaatgtactcggagggctgctcggctga

SEQ ID NO: 332624 - DNA, 663 bp, Pseudomonas aeruginosa
atgagcgaaccgcgtaagcaagtaggaccgcgcacgttttctttgatcaccatcgtgcagtgggtctggctggttggcctgagcgtcctgatcgtaattggatggcggccaagcagcacagacgcgggctcggcaatgtgggaggccgtcacggcccacctcaaagccttcgagacacggatctccgctctggaggagagcaatcaggctcgcctggtgcaggccccgtcggcaacgcagcaggccctgcaaggcctgcgcgaaacgctggaagcccgccttgagcgcctggagaaaccggcgggtgaagatacctccagcgtcgccttggatgtgctgcgcagcgaagtcgaaatgctcaaggggcagttgactgcgctgaagtcggcggcagcatcgccgcccaagacgagcaaaacggtcaggcccgcgcgtcaggcagtcgccaaggaagaaccgctgccgttccgggtcctgggaactgagtggcgtgccggccggctcagcgtgtcggtcgcgcccgccgaaggcgccttggcggcgagcacgatccaagttgtgctgccaggcgagtcgctgggcaagtggcgtctggagtctgtggacggcaatgcagccctattccgtgccggcgagcaaacccgtcgcctggtcctgccctaa

SEQ ID NO: 332625 - DNA, 741 bp, Pseudomonas aeruginosa
atgaggatcctgactctcgtcggtggcctgctgctggcgaccgtgtcgccttcgctctgggcgcaagaactgccaggtaccacgactccgcgtaaagaccgcccgctccatgtcgaacagacccgtgaacaccgcttggcgagcgactggggcttgcggaccgaagagtgggaacgctaccacgagatcatgaaagggccgctgggcatctattcgcccaatctggacccgctcacggccctcggaatcgaagcgcgctcagatgcggagcgccgtcgctatgcagagctccaggttcaggctgaagcccggcgggtcgaaaaactgctgacctatcaacgcgcctacgacgaagcgtggctgcgcctgcagcctggtgtgccgcgggtcaaacttcctgatgcggtgactggcccagcccagtctgcaccgagcgccattgtcatgggcggcagccgccgcaccgcggtattcgtgcgcgacaactgcacgccctgcgatcgcctcgtgcagaagcttcagacatcaggcgcgggcttcgacctatacatgatcgggagtcgttccgatgatggccacattcgggcatgggctcagcgtgtcggcgtcgatgcggccaaggttcgcgatcgcacgatcaccctcaatcacgacgccggacgctggatggcactggggctgtccggagagctgcccgccgccgtccagcaggtgaatggcacgtggcaacgcctgccctga

SEQ ID NO: 332626 - DNA, 588 bp, Pseudomonas aeruginosa
gtggcaacgcctgccctgaacgccgcagggccggtgctgctagccctgctggccctgggcgcaagcagccgcgccaatgcccaggaagtgccgccgccggcctaccagttggccgcgcaccgtgccggcgttccttcaacggttctgtacgccgtggcattgcaggagagcggcctgcgccgcgggggccgcctggttccctggccatggacgctgaacgtggccggcgagtcgcgccgctacgctactcgcaaagccgcctgtaccgggctgttggaggcgctgcgatcgttccctgccacacgtatcgatgccggcctgggacaaatcaatctcggacatcagaagcagcgatatcgccgtccgtgcgacctgctggacccgtattacaacctggcgcaagccgcagacatcctgcgcgagaagcacaccgtcaatgaagactggctgctcgccattggtcgctaccacaggccagcaggaggggagcccgcggcgcgctatcgccgaagcgtcgcgcgccatctacagcgcgtgcaggggccttgcgcgtccacttgcctcactcgcaaggaacaacacccatga

SEQ ID NO: 332627 - DNA, 531 bp, Pseudomonas aeruginosa
atgaacatgtccaagatcgcctccagcctcttcttgctgctcagctctaccgcgcagcttcaggccgcgcaacccggactcacaatcgtccaggatctcggcggcacttccgcactgccgtactacgaggccctgaatttggagccgcgcgaagctgctgccgcgccgccattcagcctgccggcgccaccttccgccattggcgaggccgacatgctgccggtgcgcacggagcgcatgacccctggaaccctggccccccgcgttctggacgctccagggctgacgcccttcttcctggtcggcgatgacgaacgttccatcgcctggctgcgccgcatgggcccctctctgcgcgagcgcaatgccgtcggcttggtggtcaacgtacagacgaccgaggcattggcccgcttgcgcagtgtcggcgcgggcctggagctggccccagtctcggccgacgacctggctgagcgtctgaacctgcaacactatccggccctgattaccagtaccggcatcgagcagtga

SEQ ID NO: 332628 - DNA, 2160 bp, Pseudomonas aeruginosa
atgtcgaggtcgcaaccggtggaggttctactgcgtcccgcggtggagctgtacaccgtcgccgtatcagcgggggccgcatttctctgcgcagcggcgccgtggtcgctggcgctgactccttcgatcggtatcggcagcgccgtggccttcgcggccttcgggtcgatacgcatgcaccaggcttggcgaattctgcggtaccgccgcaacatccgacggctgccacgctatgtcatgaccagccgcgacgtgccggtcagccatcaccgcttgttcatcggtcgcggcttcttgtgggagcagaagcacacccatcgcctgacccagacattccggcccgagtttcgccgctacgttgaacccacgctggcctatcgcctggcgcgccggctggaggagaagctggagtttgcaccagcgccattgccacgattggcccacctgaccagctgggatgtgcctttcaatcccgtccggccgctcccgccggttggcggtctggcccgtctgcacggcattgagccggacgaagtggacgtcagcctgcccttgggcgagcgcgtcggacactcgctggtactcgggacgacgcgagtcggaaagaccaggctggccgagctattcatcacccaggacattcgccgcaagaattcccatggcgagcacgaggtggtcatcgtcttcgatccgaagggggatgccgacttgctgaaacggatgtacatcgaggccaaacgggcgggccgggaaaacgagttctatgtcttccacctaggctggccagaaatcagtgcccgctacaacgctgtaggacgtttcgggcgtatctctgaagtcgccacccgcatcgcgggccagctttccggcgaaggcaactcagcagcattccgggagttcgcctggcgcttcgtcaacatcatcgcacgggcgctagtcgagctgggccagcgccctgattacctgcttatccagcgccacgtcatcaacatcgatgccttgttcatcgagtacgcgcagcactacttcgccaagaacgaacccaaggcatgggatgtaatcgtccagatcgagggcaagctcaacgagaagaacatcccgcgcaacatgatcggacgcgagaagcgcgtcgtggcgctggagcagcacctcgcccaggctcgcaactacgacccggtgctcgacggcctgcgctctgccgtcaggtacgacaagacctacttcgacaagattgtcgccagcctcttgccattgctggagaagctgaccagcggcaagatcgcacagttgctggcgcccaactactcggacctgacagattcccgacccatcttcgactggatgcaggcgatccgaaagcgcgcgatcgtctacgtcggactggatgccttgtccgatgctgaagtggcctcggcggtcggcaactcgatgttctccgatctggtctccgtggctggccacatctacaagttcggcgtggacgacggcctacctggcacagcgcccgacgcaaaggtgccgatcaacgtccacgcggacgagttcaacgaactcatgggcgatgagttcatcccgatgatcaacaagggaggcggcgcaggcattcaggtcacggcctatacccagaccctatcggacatcgaggcccgcattggcaaccgtgcaaaagcgggccaggtaatcgggaacttcaacaatctgttcatgctgcgggtccgggagacggccactgctgaactgctgaccaagcagcttcccaaggtcgaggtctactccacgacgatcgtcagcggagctacagacagctcggatatccacggcgcgaccgacttcacctcgaacacccaggaccgtatcagcatgacgagcgtgccgatggtggagcccgcgcacatcgtgcagttgcccaaaggccagtgcttcgcactcatgcagggcggccaactgtggaaggtgcggatgccgctgcccgcgccagatcccgatgaggccatgccaaaggacctacagcaactcgctcaatacatgcggcagagctactccgaagccagtcaatggtggatgaacgttgcagcacctgatctgcaggatggtccactgccagccgatctgctggacgaagagtcgaagacctcggcccctgaggatgcagacccatga

SEQ ID NO: 332629 - DNA, 750 bp, Pseudomonas aeruginosa
atgacggacgcggccgcaaccgccgaccgccagcgcacgcgccgcagggggctgatcgcggggctcgtcacgttgccgttccggctgttcggagtgctggtggcatcgctgctactctccatcctggtcgaatgcgtcggaatgcacctgttctggaaggaccaaggttggcgacattcgcaagccatgctccagtatgagtttgggcacttgtccttgcagttcacccgcagtgccatcgtgcaagagcctgggcgcacggcccaccggttggtcgacaccggctaccaatggttgttcgtccgcacaggactgctagagcggatggaccacaccgcgacgcgggccagggcacccagccgtacgggctcaagggactttcgctactacatcagccaggcctacgtctggtccgaggcctacttgattgctgcagccttcaccgccctcacgttcatggtgcggttgctcattctggtactgactctgcccctgttcctgatggcagccttcgttggcttcatggatggcctagtgcgccgtgatgtacggcgcttcggcgccggtcgggaatccggcttcctgtaccaccgcgccaaggcatcccttatgccactggccgtactgccctgggtgctctacctggcgctgccgttttccctgcatccactactggtcctgctgccggccgcggtgctgctggggctggcgatgaacctgacggcaggcagcttcaagaaatacctctaa

SEQ ID NO: 332630 - DNA, 2733 bp, Pseudomonas aeruginosa
atgaacgataagaatatgaagccgagctacagggagttcatgcgagcgcgacgccccgagctgtactccgataccttgcatgttgaagttggcgagatggaccgacgtcagttcgagttccatttggactttctgacgagtcgcaaggaagaaaccgcgtttgaaaacttcgcgcgggtgctcggcgaaaaggagctttgcccgaacttgataccacaaaccgggcctaccggcggtggtgacagcaaggtcgacaccgagacgtatccggtcgccccggcaattgcgacgctgtggtatgagggcatcccggcgtcggctagccagcgttggggcttcgccataagtgccaaggcagactggaagccgaaggtccgctctgacgtcgcaaaaattgttgcgactggccgtccgtatacactcatctacttcatttcgaaccaggccatcaaggacaaggatcgcgctgacatggaagatgccctgacggccagccatggcgtgcaggtgcgcatcctcgaccgcaactggattatcgagaaagttgtccggaaccgccggtgggacattgtggcggaaaccctccagttcgaacttatgcgtaaaacactctcgacgccggggccgcttgacgtcggcaggcttcgtgacctggaagcgctagacaagaagatagaagcagcaacggagtccgcggtaactctgcaattggtcgaagagagcttacagtccgcgctgcttgcacggggactcgacaggccacggtatgaggtcgacggtcgtttcgatcgcgcagatcggctcgcgcagagaacaagtagtagacaaaggcagcgcatcctgtaccacaaggcatggaccgctttgtggtggttcgatgattcggaggaggcggccagagtctacgaccgactagcggccgaagccctttctacggactggatttgggacattgagtgtgtcgtcaacctgtggctggccctccaggcaggcaatgccctggatgaagcgcgaaccgccgccctacgagccgcactccagcgtcatgctgatgacaagtctaaggagacgagttcgctatgggcacagacccagttacttcaaatggacctcgtcacgggtatgcgcgaaaaggatgacctgcagcccaccttcgccgctatgcgccaagttcttagcaacgtgcgtcggcagattgagttcccgattgagcctgtcgttctcgtcatacgagagctggcgaccattgtcggcgattcacctggctacgacgagttactggacgcggtaattgagattgagcgcgagagaaacggtgaccgggtggctggcgagttgcagttgcaacgaggcctgcaaaagcttgagcgaaagaaaccatatgacgcgatcgacgacttggcacgcgcgcaaattcttcttgcgcaggaggattgccgcgacgagttcatcgctgcgctgtgcggcacgggtttggcatacgagtcggcaggccttctttatgcggcaagggcgaacttggcatctgcgctagaccggtgcctgtactcatggttcaaggaaggggctgttgatcaccgtgccttgccagttttgaagaagctggcgtggctagaactgcagcttggccgcgtaccttacgtactcgcttgggttaagtggtttcggcctatccagattgcgttgagcttgaacgaggaagacaccaaggctctcgagcaggaattacgggccattgatcgggtcttgggaatcttgattctgcgcaccgcgcatgaggattgggcatcgctgacacggcttccggacgtcctgagcaatctaggtctggagatgtcgcgcgccgctgctctcttcatgctcggacacgtagacatggtccgggccgaatacgatgcggcaaacgacgacttgaaccagtttgcgagtgaatggcttgttgctccggcggctcaggacgttccgaatcggcctctatggcacttcgggaccacgaccatgacgacggtcattctgggttgccaggttgatgtcatcgcccgcggtggtatcgcatcagcattgcttggcgagagcatcattggatttctcgaggctttctactctactaccgtgcgttccaggcgactttggtctcccagggaacggctagtcgtggaagtccgacagtcagaggctgcaacgccgccctttgttcatcgacatgctgaggatgaatgtggcgagacgaggctcgtcgttacccagcccgtgctggcagccgaaagcttggttggcgaaggtttcgaaaggcagatatttgagctgtttgcgcacataaccttcgagctgcaactcggtgtcgctcgattggagttcaaggagatgtttgcgaagcatcgtgctcaagaccgtgcgtaccacgtggcgcgctctatcatctccgtcacgaacattctgggcaactcgccgccaggacgcgccgaagactggtgcgggacgaaactattaccgcgtttccggtcgtgcgcgacaaagcatggacaccgaacgtggcggcgcccccatccaccgttcagcctccagagctggatgccacaacttcggaggatccgccgctggagcatatgttcggcgcggatgcgctgcggcatcgcgacttgctggtcatgtcccccatcaatctaccactctgggacaaggccaagtggaaggggactggtgtggtactgccgcaggtaccgggcgaaatag

SEQ ID NO: 332631 - DNA, 1761 bp, Pseudomonas aeruginosa
atgcaacactatattcaacgattgattattagcaactttaaatcctgccagtcactaaacatcactctaaccccctttgtccctcttgttggatataataatgcagggaaatccaacatcctatcagcattagagtgggtcttaaagaaccgcctattaaatgatagtgaattttataacagatcgaaacctatagaagtcgaagctgttatagttggcatatcagacgaaattctaaaacttctaggtgaagaccatagaaacaagatagagccgtatattgtcgatggcactatgaaggtcaaacgcattcagcctattgaggcaacaaaagcaacagatgttcagctgcatgtatttcatccagagacaggatacaagaaaaacccaacgggcatacctaatgctattaaacaattattccccgacccaatacgcatagcagcaatggataatgcggcagacgacgcagcaaaagcaaagtccactagcacaattggaaaacttttagcagagttctgcgatgctgttcgagagaaaaacgccttacgtattgaccgacacttaggagctattacgcgaaggatgtctgccgatggtaatcgaaggctaacagagctatccgaaatagatgaatcaataaacaaaaaaatacaagacctctttccgggaattagtttaaagctacacttcgacgtaccaacatttgatgaaatattcaaggccggcacagttcgtgtttatgaagaaagcagtgagatctctcgagacttctcagcatatggacacggagcacagagatctattcaaatggcattagttaggcacttagcagaggttcgcaaagaagccaatgtacccacaacaacattgcttttaattgatgaaccagagttgtacctacatccctttgccattgaacaagttagagaggcattacacactctatccatgcacggatatcaaatcgtattttcaacgcactcgcctcaaatgattaccgccgagcgcgctcaacatacattgcttgtaagaaaaacaaatactgatggaacaatcactcgaaaacgtatgaaagatgcgctcgacattgtcattccgaatgcaattgcgcaagctcagcatctattctctttaactcagtcatctcagattcttttttcgaacagagtcatactaactgaaggaaagacagagttaagattacttccctttctatacaagagctttttcggaaagacattagggcaagaccagctagcaatgatagaaaccggctcggtagatagcattgcaaagacacttagagtactcaaagagatggatattccagcagttgccgtggttgaccttgattacggtttcagaggagccatcgcaaatggatttttgcaagagagaagcgaggagatagtagagctcaaaaaaatcctagcaaggcttgagcaggctggtaaatgtaaattacatggaggacttcccactagtaaattagccccgtgcacagcagctcaagcttttgagctactagcattagaggctgatgcagtaccacatcttaaggcgcttcataatgctttgcgcattcagaatatatggctgtggtgggggggagcgattgaggcacacctgggtttaacagataaagaagaagctacttgggtcaagtttaaaacagacattgaaatagatggcatccgtgctcactgcaaggacgctcagtctatagaagatctccttacgtggtttaaggaaggataa

SEQ ID NO: 332632 - DNA, 216 bp, Pseudomonas aeruginosa
atggaactggaagagcttaaccccagcgccctgatagggccgcaacaggatgtggagtccattgaacggtgggcggaacgcaacggcattagctatggcactgcccgcgcctgggtttaccggggtgtgctgccgtccgtgaagcttggaaagctgcgcatggtgaatagcgcgctgctgcgcaactggctgttggaacaggagtggacagcatga

SEQ ID NO: 332633 - DNA, 2850 bp, Pseudomonas aeruginosa
atggccagaaaacaatgccaagtctgcggccagcccgccacggtgcgggtggaagccaatctcaatggtcgccacagcaccatgctgttgtgtgacgatcactatcgccaactggtgcgccagcaaaagcgcaccgtctcaccgctggaagccttgttcggctcgcgcagcgggctgttcgaagacttccttggcagcgacttcttccgcatcggtgacgacgcaccgtccatggcggccgataccgacgaggtcgtcgatgcctcgttcggcgaacccgccccggccggtacgggcaccgcgcgccgtcgcggcagtgggctcgccagccgtatcagcgaacagtccgaggccctattgcaggaggccgcccgacacgctgcagagttcgggcgcgccgaagtcgataccgaacacctgatgctggcgctatccgacagcgacgtggtcaagaccatcctggggcagttcaagatcaaggtcgatgacctcaagcgccagatcgaatccgaagccaagcgcggcgataagccgttcgagggcgagatcggcgtgtcgccccgggtcaaggacgcgctcagccgtgctttcgtggcctccaacgaactcggccactcttatgtcgggccggagcatttcctgatcgggctcgccgaggaaggcgaaggtttggcggccaacctgctgcgccgttacggcctcacgccgcaagcgctgcgccagcaggtaagcaaggtggtcggcaaaggggccgaggatggccgcgccgagacgccgaccaacacgccggaactcgacaagtattcgcgcgacctcaccaagatggcgcgcgagggcaagctcgatccggtcatcggccgcgcgcaggagatcgagacgaccatcgaagtgctggcccggcgcaagaagaacaacccggtgctgatcggcgagcccggcgtcggcaagaccgccatcgtcgaagggctggcgcagcgcatggtcgccggcgaagtgcccgagacgctgcgcgacaagcgtctggtcgaactcaacatcaacgccatggtggcaggcgccaagtaccgcggcgagttcgaggagcgcgtgcagaaggtgctcaaggaagtgaccgagcaccagggcgagctgattctcttcatcgacgaggtgcacaccatcgtcggtgcaggccagggtggcggcgaaggcgggctggacgtggccaacgtgttcaagccgatgatggcgcgcggcgagctgaacctgatcggcgccaccacgctcaacgagtatcagaagtacatcgaaaaggatgccgcgctggagcgtcgcttccagccggtgatggtgcccgagccgacggtagcgcagaccattatgatcctgcgcggcctgcgcgacacgttcgaagcgcaccacaaggtcagtatcacagaggacgcgatcatcgccgccgccgagttgtccgaccgttacatcaccgcccgctttctgcccgacaaggccatcgacctgctcgaccaggcagccgcacgcgtgaagctgtcagccacggcccgcccggttgccgtgcaggagctggaggccgaactgcaccagctgcggcgtgagcaggactacatggcctcgcgcaagcagtacgacaaggccgccgagctgggcaagcgcatcgaggccaaggaggccgaactcaagaagctcgtcgaggaatgggaacgcgagcgcgcctcgggcagcgccgaggtcaaagccgagcatgtcgcgcagatcgtctcgcggctgaccggcatcccggtcagcgagctgacggtggaagagcgcgagaagctgctgcatctggagcagcggctgcacgagcgcctcgtgggccaggacgaagcggtgcgcgcggtggccgatgccgtgcggttgtcgcgcgcgggcctgcgcgaaggcagcaagccggtggcgacttttctgttcctcgggccgaccggcgtgggcaagaccgagctcgccaaggcgctggccgagtccatctatggcgatgaaggtgcgctgctgcgcatcgacatgtccgagtacggggaacgccataccgtggcacgcctggtgggcgcgcctccgggttatgtgggctatgacgagggcggccagctcaccgagaaggtgcgtcgcaagccctacagcgtgttgctgctggacgagatcgagaaggctcaccccgacgtctacaacatcctgctgcaggtgttcgacgacggtcgcctcaccgacggcaagggccgggtggtggatttcaccaacaccatcatcatcgccacctcgaatctgggctcggacatcatccagcgtcggctgaaggcccgtggcgccgccggcgaggaatacgagaggaccaagtccgaggtgatggacgtgctgcgcggacacttccgccccgagttcctcaaccgcatcgacgagatcatcgtcttccatgcgctgggcaaggaggagatccgccatatcgtcggcctgcagctcgatcgtgtggcccgcaacgccgccagccagggcgtgacgctgaccttcgatcagaccttgatcgatcacttcgcggaggaaggctacaagcccgagttcggcgcgcgtgagctcaagcggctgatccgcagcgaactggagaccgcattggcgcgcgagatgctgggtggcggtatcggcaagggcgatcacgccagcgcccgctgggacgacaaggccgaacgcgtcgtcttcgagcgcaaggagccacccgcgcagccggccgagcctgataagtccgatgccgcgaacgtggccgaggcaccgccgaacggcgagagcaagcctaagcgcaagaagaagccggcgggcggcgaatcttga

SEQ ID NO: 332634 - DNA, 1080 bp, Pseudomonas aeruginosa
atgcgcggccaagagaatccccaagcgtcgatgttcagctacgtgagcctggagcaacgcgtgccgaaggaccacccgctgcgcactctgcgtgcgctggtcgacggcattctcgccaacatgagtgcgctgttcgatgagcgttactcgcacaccgggcgcccgtcgattccgcccgagcagctgctgcgtgcgctgctcgtgcagatcctcttcacgatccgcagcgagcgccagctcgtcgagcagctcgactacaacctgctgttccgatggttcgttggcctgggcatggatgacgcggtgtgggaccgcaccgtcttcagcatcaatcgcgaccgtctgctcggcaccgacgtcgcacgccagttcttccgtcgcgtactgcatcttgccgagtggcagggcttcgtctccgacgagcacttcagcgtcgatggcacgatgatcgaggcctgggccagccacaagagcttcgttcccaaggacggcagtggcccggacaagcctgccgggcgcaacccggaggcggacttcaagggcaagacgcgcagcaacgccacacaccagagcacaaccgacccgcaggcgcggctctacaagaagggcgagttcgcggaagcgaagctgcgctacatggcgcacgcgctctccgagaaccgcaacgggctcgtcgtcgatgtcgagagcacgcaagccacgggacgcgccgagtgggaggcggcgatccggatgattgatcgcagcgtgcgcaagccgggcgcgacggtgggtgcggacaagggctatgacacggccgagttcgttgccgcactcgaacggcgcggcatcaaggcacacgtggcgcgcaaggtcagcggcagcgccgtcgatggacgcacggcgcgtggcaaaggctacgcgatgagtctgcgccggcgaaagatgatcgaagaggccttcggctggatcaagacggtgggtggtttgcgcaagacgcggcacaaggggctggaaaagctctcgggccaggcactgttcgcgttcgcggcgtacaacctgacccgaatgctgagcctgatgcgagcggctgccgcgtag

SEQ ID NO: 332635 - DNA, 1095 bp, Pseudomonas aeruginosa
atgcgaggagcggacagctacaacgaggctctgttcagcacgatacggctggaggacttcgtgccggccgagcatccgttgcggccgattcgcgtctgggtcaacgacgcgctgggcaagatgggcgatacgttcgcggccatgtacgcagccgacgtcaagggcggtcgcccgagcatcgcgcccgagaagctcatccgcgcgatgctgctgcaggtgctctacagcgtgcgcagcgaacgccagctcgtcgagcagattcgctacaacctgctgttccgctggttcgtcgggctgtccatcgacgacgaggtgtggaaccactcggtgttcagcaagaaccgcgaccggctgatcgagcacgatgtggtgaccgagcttttcaacgccacggtggagatggcgcaccagcgcgggctgctgtcgggcgaacacttcagcgtggacgggaccttgatccaggcctgggccagccacaagagcatgcggcgcaaggacggttcggacgacgggcgcccacccgaggactggaaaggccagccccgcagcaacgacacgcacgaatcgacgtcggatcccgacgcgcggctgtaccgcaagagcaacgccgcacctgcgctgccgagctacctggggcatgtgctgaccgacaaccgccatggcctggtggtcaacgtgcaggccagcaccgcggacggcacggccgagcgcgaggtcgccgcgcagatgctgggcgacgttgcaagaccgggcaagcgcgtgacggtgggtgccgacaaggcatatgacaccaaggggttcgtcaaggtgtgccgggagatcggagtgacgccgcacgttgcgcagaacacgagccgcaatggcggcagcgccattgacgggcgcaccacgagacattctggctacgctgtcagccagcgcaagaggaagcgcatcgagcagtgcttcgggtggggcaagctcatcgggccgatccgtcaggtgatggtgcaaggactggacaaggtggaccagcttctgaccctgacgatgacagcctacaacctcacacgactgcgcaacctggcgcagccatgcccggggtgcgtccaatga

SEQ ID NO: 332636 - DNA, 762 bp, Pseudomonas aeruginosa
atgccgaagtcgagcagcctggccgatggcgccaagaccaactaccgcccgatcgaggcggcaatccgctggagcggattgctgcgcttcgagcggcgcatcctggcgaccttgggacagcggcctctgccggaggcaacggagtttccgcgctggccgatgctgcggttgaacgccgaaagaatcttcgatgcgctggctcacggcgagctgccgtatggcaaggacggcttggcgcgggacacgcagggcctgacgatggacgacccgtcgctgaccgtgcggcacgtcgatctgaaagcctggatggcgcactactaccccggcgagaaaccggcgtttctgttcgatgagatcgagcgtgcgcttcacccggcgatcagcctggacacagtgggcgcattgatggccgagcgggaagcgatcaaggcgcggctggcggaacacttgggcgtgcacgagacgctgcgcgccgagcacgaggcgctgctgaagacgcacgccgcctacacggccgacgcggagcgtgcgagcacgcctgggccgcgcagcgaatcgacctacctgaacatcgttggcgggttactgacgctactgctgggcaagtcgcccagcggcatgccgtattccagcttcctgacgcaggaagccatcatcagcgcgatggtggcgcaccacggcaacgcgatgggcatcaccgagcgcacgctgcaggccaagttcgcactggctcggcgcaatctgcagagcacaaattcctga

SEQ ID NO: 332637 - DNA, 372 bp, Pseudomonas aeruginosa
atggcctctaccgctttcgcggatgtgctcgaatcggtgcgtgaagccggcacgtcccgcttttccgccacgaacgtcgccgatgccctgggcctgcagtaccaggacttggccacgctggctggcgtgcaccgcaacaccctgcgcacccaccccgagtcaccgcgactccaggccgcgcttcgtgacctgatgcgggtgctatcggccgcctcggcggtgcagccggataccgcgcgtgcattcttcatggtcaagaacgagcccatcccgacgttccaccacaagaccctgctgcagttggtgcaggaaggacgcaccgacgatgcgatcgactacctggagtcgatcagtgcagggttcaccggatga

SEQ ID NO: 332638 - DNA, 528 bp, Pseudomonas aeruginosa
atgatcctcctcgacctgccgcccggcaccacgctgtttcgcgcgcacaccccgcagtgggccagccggccaaccagcggcgctggtgcggcggccaagggcgggcgcttcaaccgggagggcgtcgaggcgctgtatctgtcgctggaggaagcgaccgcgctacgcgaataccagcagacctcgcccttcctgccgccctgcacgatgtgctcgtacaccgtggcattgcgcgagctggtcgatctgcggcagctccaccgcggcgaaccttgggacgagctgtggcacgactggcgcgaggactggcgccatctgaaattcgaccttcacatcgagccgcccacttgggtgctgggcgacatggtgctggcccagggccataccggaatcctgttccccagccaggcgaacgatggcggcaccaatatcgtggtgttcgtggatcggctcagggatggcaattcggtcgaggtcaatgatcccgacgggcgactgccccgcgaccaatccagttggacgcgctga

SEQ ID NO: 332639 - DNA, 1059 bp, Pseudomonas aeruginosa
atggacacaacgagagacttcgacttggtggagccgctgatcggcgagacatgggtagtggatgggaaggtggcggcctcaccacctggcgagatcgatgcgctgtatatccggccgatgttgcaccaatggggacaggtgccatcgggctcgaaggtgctgcattcactggtgctcgacaacaatgtgctgaccgacatggtcgaaggccgtcgttcggccaacaccgaatatctggagaaccttctgcgctcgaaaccgttggagctgaacccggtgatggccatgctcgaacagcggcagaagtttggaggcgccagccaggcactgcatgattttgccgagctgctggggaggcgctttggtgcctgggcggccaagcacaatgccggatacttcgacaggttgctggaggacggcaagcctgagcttgcgcagaacatagacctgctgtcgggttacctgccagccattctgtacatctaccaccagcctggcagtgcggaatccaagctggagtggttgagtggcctgatccaggcggtggatctgccattcctgcaattgcccttctatcttgctgcgttgttgtttctcgtgaaggaacaacctgcactgttccgcaacaaggtcatccgcaaggtgaagagtgacaccaagttgatggccagccttgaggagcagaagaaggcggtgctgaaccttgcgcacgatgtgatgctgccggcggtagcgatttttcctgccggtgtcgaggacacgatcgtgtttccatacatcgccacccgcgactacttgttgcaggatttcctgggggaaatccgttgccgtgccgtcgtggcgatcccaggtggtcgagccaatggcgcttgggagttgaatccaaccggtcatatccatgcgcgactaggcgacgtcgtcgcccgctgtctacccaaacgcgcggggcctggaactgcggcggagcaatcggtgcgtcgtgcgaacctgcgagcgttctcggatagctatctggcgaaatgcctgctgctgaagaagcaacccggcacgcttgaatga

SEQ ID NO: 332640 - DNA, 252 bp, Pseudomonas aeruginosa
atgccccgtccgcccccaggggtgctccccagccccgcacaggcccgtgccgattccatcggccatctggccctggtccacgtcggcaagcgcctgcccctccaggtctgccacagcgccgccggccactacatcggcaccaccgatgcagaaggtccggtctcgcgtgagtccgtccagtacttccgttcgtaccaggccgcccgccatgccctggagacaggccactggcaacagcggcttaccccttaa

SEQ ID NO: 332641 - DNA, 870 bp, Pseudomonas aeruginosa
atggacgaggcggatgtcaggcagagagcgcgcgcgtttgtcgcgagagtcgatgtttcgaacatccgagaagacctctccccgtatgtgaccgcggctaacgccaagatcaagaaggatgagcttggcgagggggagtctggctataccgttaccaagccgaacgggaagcacatcatcactgtgaattcgctggaaactgacgagcgccagcgcttcactgtctgccacgaaatagcccatatcgtgcttggcttggaatcgagtcacgacgaggtgccgtcatggtcctatgcaaagcgacatccgaacgagatcgcctgcgacacgtttgccgctgaactgctgatgccctatcagcaatggctctccgctgttcccaaggaagagccctccctggatctcatccaacacatggccgacttgttcggcacatcattccctgcagcggcgtcaaggtttgccagtcttagcgatatgccgtgcgcattcgtcaccatggagcgcggtgcggtgcggtatgccgcacgctcaacggccttgcggcaagcaggggcctggatacctcccaggtcggtcattccagcaggctccgtggctcaccgaatccgctcttcagggaatagcgctactgagacgggggaagtttcacaggacatctggttcgacaactgggaaaagggccttgacctctgggaactttcaagacattaccagcgcaccgataccaccatctccttgctatggttcgacagcgacgatttgccggaggttgaggtgaaccgcttcggcgcacgtgtcgaagacgatggaggcttggctgaactgacgggagaactgccatggccggggcgaagcaggcgccgctga

SEQ ID NO: 332642 - DNA, 225 bp, Pseudomonas aeruginosa
atggcaggcaagaatcagcatgttgttcctcatcaggacggttgggccgtcaagggagccggcaatcagcgggcgacctccgtgcacgacacgcagcaacaggccattgacgcagcgagggatatcgcacgcaaccagcagtccgaactcgtcatccatcgtccggatggccgtatccgtgataaggacagccacggcaacgactccttcccgccgaagggctga

SEQ ID NO: 332643 - DNA, 1002 bp, Pseudomonas aeruginosa
atgacgggcatccctacctaccatgtgctcgccctgtcagggggcggttatcgcggcctgtacaccgccacggttctcgccgaactcgaaaccgcgctgggtcgtccgatcgcttcgcactttgatctgatttgcggcacatcggcaggagggatgctcgctttggggctggctgcggaaattccggcccacgaactcaaggcactgtttgaagaacagggcagccgcatctttggttgccgcagccttccacggcagcttcttggattctggttgaccgcaaagcatgactcagcgggattgaaggaagtgctgaccgagcgcttccaagggaccacgataggcgacctgaaacatcgtgttcttgtgccggcagtcaactactcgacgggacgtgggcagttcttcaagacaccgcaccatccgtcctttgagctggatcaccgcatgaaggtcgttgatgtggcattggcgactgctgccgcgccggtctatttccctctggcgcgcaacgaccgcggtgtcttcgcggacggggggctggtgggcaatgccccgggcctcttcgggttgcacgaagtcaagacgttcctggcgccgaaacaggatgcgctggttcgggtcctcgccatcggcacgatgaccatcggtgcgaccgttcgcggcggcgccagcctcgaccgcggattcggcaagtggcgtgggggactcttcgacctcgtgatctccgcccaggagtcgtcggtggactacatgctgcggcaagcgctgggcaacaactacttccagatcgacgacaaggcgacaccggatcaaagcaaggacgtgaaggcgctggatcgggtttccattggcgccacgaacacgctcaaggatcgcggcaaccacgcggcgcagcgtgcgctcggcgatcctcatttccaaccgtttcgagcgcaccaggccggcgctcccatcttctatcacggccccaacaagaatgttccggaggccgcatgctga

SEQ ID NO: 332644 - DNA, 1143 bp, Pseudomonas aeruginosa
atgctgaacttgagcccgctcttcttcaccacccttgataacgaatcgtgcatgcacgacgagttggatctgacgcctgagcagcgcgcctggatcgccagcgcacgcactgacgtcagggactgcttgcgcacaggcatcccccgcgtgcttaggacaagcggatacacggaagacgtgccgcagccgcgcttcttcacgcaagggtcgtgggcatacaagacgctgaactccccggcacaacgccctcagcaggcggatgtcgatgatggctgctatctgccaatgagcttcgtctcgcagacgaggcgtcccagcactgccgcgacggtgttctttgccgctgcggaagaagcattgaagccgctggtcgaggagaagcggtggaagcttgtcaccgacaagccgacgtgcatccgcatcgtcattgctgcgtacgcccacattgacatcccgctgtacgcgatccccgatcaagaatttgtcaatttggcagaggcctcgatgaggcgctatgggtatgactctctgatggacgctgtgatcaaagcggagcgggacgcttggacggcattgcctcgcgagaaggtgctcctcgcccatcgggaatgcaactggatgccctccgaccccaggcccgtgaaggaatggttccttggcgaagtggaagccaagggggagcagttccggcgtgtggttcgttacctgaaagccttccgcgattggaggtggtccagcggaggacctgcctcgatcctgttgatggccgccgcggccccactctttgagaaacgcgataggcgcgacgacctcgctctgctggatgtcgtcgcggcactgccagcccggttgcgtgggggagtgaacaaccccgtggaagagtccgaatcgctcacggagcgacttggccaagcgggtgtcgaagatgcggccaaagcattcgaagagtttgagaaagtgcttcgcggagcaaccggcgccggcagtccttcacaggcctgcatctggatgcgaggcgagttcggcccgcgttttccggacgagccagatcggatcaaggtggtgtccgttgccgccaccattgccgcggctcccgccactgctggtcctagcgaacttatcggacgaacgaaagcgggatga

SEQ ID NO: 332645 - DNA, 1632 bp, Pseudomonas aeruginosa
atgagcagcgccgcagcggtcgcagacgtgatcgaggccttcaagcagcgaggcttcgagtttgttggcaagacggatgacggctggttcaggctgcacgggcggttgaccccgccccaagcagacaagggttgttcgtgcgaagtccagctcgaccccaggttcttcgacttgcctcgcatccggctgctggaaatccctcctgagctgcccgcagcggttcctcatcttggggcagatggcgggctttgctatctcgccaagggcgccgtcgttctggacatctacgatcctgtcggacagtcgctggcgtgcctgcaacgcgcggccgtcgtgttcgggcagatcatgcagggggagatgatcgaagacctcgcggaagagttcttcgcctattggcagggctggcattgtttcgtggacatgcaaggcgaggatctagggcggcagaactgcatcgtcgcgcaggccaatgggtgccctttgtggttcattaccgacaacgaagatcgaactactgagaagctgaagtcgctcggctaccaagtcaccgatagaacggtgctgacttaccgggtcaagactggtgctcaaccccgtcctctgagtaggaattggcctcctgaaacagtcggggatatcctggcgtggcaaagctctcttgaccctcggtgccggcgcaagattcacgagcgtatcaaggagggggagaggaagaaggccaacggagttctgatcgtcatcgagtctccgctgatgacctatggctttgcggttctctacgaccgccaaagtcctgtccaaaagagcaagctcgtagatcgcagggattcgagctatgggttgaaggtgatgcccatctcggtggtcagaattgacgatcggtatcttgcccagcggaacatgccgaattcaaagacgcttgcagggaagaacatcgccgtcgttgggtgcggcacgattggcggctatctgtcggatatgctcgtcaaggctggagcggggacatgtggcggaaaactcacgttggtggatttcgactgccttctcccgcaaaacatcgggcgtcatcgcctgggatttcccgacctgttgtctaacaaagccgaggctatggcgaaggaactcaagcgcttgacgccaggcgccgagattcgtgcgctgcccgtggatgtcaggcaggcccaactgggagagccggacctgctcatagatgccaccggggaagaatccctcgggcattggctgtgcggccactatccgcctccgacgcccatgctttcggtctggatcgaggggccgggaacggctgtccgcacgcttctgaggacgaacgcgtctggtgcgtgctatcgatgtctttggcacagcaacaggagaggcgagctccgttctaccattgatcctcttcctgccattctggcggggcatggatgcgagggcttgtacgtgccattccccgcttcggtgtcggtgcacgctgccagcctgggcgctgagatgacccttgattgggtcaacggcgtctatacccccgcgttacgaaccaggttgatcgaccgcgcccagcagcttgctacgccagattgcgatccgctgcgggatcgggaatgccccttatgcagttcatga

SEQ ID NO: 332646 - DNA, 342 bp, Pseudomonas aeruginosa
atgccctgtatattgagttggtgccaagctcaggccaaggatcagtattctcccctgtggaatagcggcacaacaaaccaatgtcgtcccagcgcgccgtcttcgtcggcctcgcgggcggggtggtgcgccgggaacatccgccgcttcggcgcgggacgcgaatcgggattcatctatcaccgcgccaaggccagcctgatcccgctggccgtgctgccgtgggtgacttacctggcactgccggtcaacgtgaactcgctgctgatcctgctgcccagcgccgcactgctcggcgtggcgatggatatcgcggcggggagtttcaagaagtacctatga

SEQ ID NO: 332647 - DNA, 549 bp, Pseudomonas aeruginosa
atgcttctcgctgcaagccatgcattcgagaacgtttcgaggcgccagtccaccgagctcgtgtggacggggccgacgacgccattcgtctccgcccgtcgaacggaacaggcgctcctgcaagtcatcgacgcggccaagcaaaccctgttcgtcaccagcttcgtggcctatgacgtctcggccatcgtggaggcattgaacgacgcaagcacgcgcggggtgagcatttcgatgcttcttgaatcgtcgcaagatcacggaggtagcatttcgttcgacgtaatcggcaagatgaggacgctggttccttccgcgaagctctacgcttggcgtgaaagagcggccccgtttgcggatgggcgggttcacgccaaagtcgcggtcgccgatggcgacgtgtgcttcatcaccagcgccaacctgacaggccatgcgatggaacagaacatggaagctggacttctgatctcgggaggacatatcccccagacgctggaggagcatctgcgcgcgttggtctccatgaggatcgtggcgccggcgtga

SEQ ID NO: 332648 - DNA, 3996 bp, Pseudomonas aeruginosa
atgaagaatgattcaaatacgggaacggccagcgttcccaacgcatggatcgccgtcgatcacggtcttggcaacgatcgtaggctcgcgccctacaccctcgttttgaagggcgatcgctccctttatcaggccatcgccgaagacgattgggtgctcgtactgaaccctgccggggagatcgtgcgcggcgggcgtgtgctgcggcttcgtttcgacctcgaaacaaccacgatcttcttcgaccggctgtcggttgccgacgctccggtgccggtcgccagcgtttcgttggcaccgccgtcgtcgggcaacgtcggacgcatccagtgggacgagttcgtcgcggccttgcccacggcgctgcagcagaccgtcggcggcgtgccgccggtcgaggatcgggcctatatccgcgaactgctgcaactggccgtggtggacgacctgctcggcccggcgggcggcccgcacgagcgcatcgtggacatgggtgtgcgcgaccgctatctggttggcaagctggcaccacgcgaagcagcgcagggtggcatcgaagggctggaaggtccattggcggaggatgaggtcgaggaacccagcgacccgatcgtgcctggccagcacgaaccgggtgccgagttcggaaccgcgaccgggagggtggaacccgaatcggatgcatcggacgagatcgacgccgccagcaatcaatcgttggtgcccagcagtttcggcatgaccttctgcgtcgatggcgacgccgagcgcatcgaggtcgaggcgcgctggggcagctacgagcgcgtgcccaacgaggaacacgagctgacgcggcccaatgggcagaaggccaaggtctggcagcgcatcccctgcggcggaaagctgatgctgccgctcaccgaaggcgtgatcccccatcaggcgccggacccaaatcgtccggcggtgcggatacagggttccgtccgcgccaagaacgccaacggcgaccgcttggtgacgttgttcctgatcaacgcgcaggaagaacccgataccaaccgcgacacggcgtggctgttccagccggagctgttcgtgcgtgcggaatcggaggcatccaagcgcgccatcttccgccgccgtcccgtgctggacgcagacggcatggacaccgaacgcgaatcgctggagatgatctaccgcaaccgtgtggaattcgcggtcgggcatggcgtcgccgtccacgccgagacggcggacgacgtgacgttggccaccgaggtgcgcaccaccgtcctgccgcagtacgaagtgcaggtcacggagacgccgggcctcgaccccgccgaccgtccggcgatgaaggagatggtgtcgagcggtctgctcgacatgcatcgtctcgccacactgggcgtcaccgagttggtcgatgccctgaacgtgctgaccaaggactacgcggcgtggatcgccgagcagcgcgagcgcatcggtgaggacgtggtcgggtatgacgcgcaggccgcacaggcactggatcggtgtcaggaaatccaatcgcgcttgcagcagggcatcgacacgttgaagaacgacgaaaaggcgctggccgcattccgcttcgccaaccgggcgatggcgatccagcgcgtgcgcagtcagtacgcgctcgaagtgcggcgtggacgtgacgtgacggtggatcagttcgatcagccgaagaaccgaagctggcgtccgttccagttggcgttcctgctgctgtcgatcccgtcgctggccgaccccatgcatccggatcgcgtgcaaccgatggaagcccatgccgatctgctgtggttccccaccggcggcggcaagaccgaagcctatcttggcgtggcggcgttcacgatggcgatccgtcgtctgcaaggcaagctcggcggctacgacggttcgcgcggtctggccgtgatcatgcgctacaccctgcgcctgctgaccttgcagcagtttcagcgcgccaccgcgctgatctgcgcaatggaaaagcttcggcgagatgctctcgtgcaaggggatgagtcgctcggcaaggagcctttcaccatcggcctgtgggtcggcaacaaggtgacgccgggcacgaccgaggaaagtcactacgccattcaagctctacgtgattcaggaaagaacaaagcaggacgtacttcgccacttcagctaaccagttgtccttggtgtggctccgcgattgatcccggaaaagatgtcgttgtcgataaggatcgcggtagaacagtggtttactgcggtgacaaaaagagcagttgcacattctctcgcggcaggtcgagcagttcgccgtatcccggcattccagtgctgacggtggatgaggagatataccatcgtccaccgacgatgatgatcgctaccgtggacaagttcgccatgatggcgtggcgcggccaggtacgaacgctgttcggtcgcgtgagtcaggaatgcgagcgccacggcttgctgtggcacgaagcggactgctgcactggcaatcaccaggctgggaagggcatgcccgcggtcaaggtcaagagcgtcgcaccgatccgaccgcccgacctgatcatccaagacgagttccacctcatcagcggccccctgggcacgatggtcggcctgtacgaatccgccgtcgacgaactgtccggctggatgctcgatggaaagacggtcaagcccaagatcgtcgcgtccacggcgacggtgcgcaaagccaaggaacaggtgaacaacgtgttcatgcggcgcgtgtcggtgttcccgccgcacggcttggacgtggaggacaactacttctcggtgcagcgcccgatcgaagagcgacccggacggcgctatctcggcgtgtgctcgcccggcagctcgcggcccgcgatgctgatccgtgtctataccgccttcctcaccgctgcccaagccctgttcgatcgcttcggcgagcccgccgacccgtacatgacgatggtcggttacttcaattcgctgcgcgaactgggcgggatgcggcgcttggccgaggacgacgtgcagacacgttcctatcgcgtgcagatgagcatggtcgaacggcccgcactcgcacagcgcagcgtcaacaatatccgcgagctgacctcgcgcgtctccagtcaggacatcccgaagtacctcgacgatctggaggtcaagttcaaggccgcgctcgaagcggccaccgggaagtacgtgacgaaatggaacgagggcgacacccgcgccatcgatgtggtgctggcgaccaacatgctgtcggtgggcgtggacgtgaatcgcctgggcctgatggcggtcaacggccagcccaagggcacggcggaatacatccaagccaccagccgcgtgggccgttccttccctggcttggtctgcacggtgctcacgtgggcgcgtccgcgcgacctctcgcactacgagaccttcgagcattaccacgcgaccttctacaagcatgtggaagcgcaatcagtgacgccgttctcgccgcgcgctatggatcgcggcctgaccggtgcgctcctctccctgatgcgactggagaacgatgtcttcagcccgaacgcgggcgcgagcgagctggacaagtccgacaagcccgagatcactgaagccatcgacgtgctggtgaggcgggcttggaacgtcagcgagacgaccactatcaagaatctggccgagcgtgaactgaaggaacgcgcggacgaatgggccaaggaggtgagcgttcccggtcgcacgttggcctacgaaaagcgcggcgcacaggccgcgacgatggtcgggctggtcaagtcgccgggcatccatgcgtgggacaactggacggttccgatgtcgatgcgcgaagtggagccgggcgtgcgcctgatcatgaacacgggacacatttcggacgaccacgggtggaagccccgtccggtgccgaaggacgaggactga

SEQ ID NO: 332649 - DNA, 1626 bp, Pseudomonas aeruginosa
atgaagagttggaaggatcaactgcgggatctcaaaaacgcactacgaaggtcggagcgcgacaaggaacgaagtgaggaggcgcccaagctcgacttcgaaccaccgccagcgtggctggctggcggtcagcctactccgaagaagccttctgcccggaatcccgttcagaaatcagccactccggtcgcagctggagcttctgccgccaagccgtcggcacggcccagcgcgctgccaccgccaccattcaagccccgcatcgacgacgggtgtgttctgaacatgccggagtggagcgacgtcggcagatcgttgcagcatccagaacaccgaggcgaacgctcggcaccgatggccgtccgggtcggggtggactttggaaccgcgttcacgaaggtggcgattcgagcaggtgtcgatctggtgcccgtcgcatggtctgccctcacggaggacgattcggaaaccggacgctatgtggttcccggtttcgtcgttcgcgcgccggatggtgagttttgctggcgacgtcttaccgagggcgatattcgagggaacctcaagctcccggtcatcgagatggccgagtcagatgagtgcccgacagccactgttgcgtatctggcgttggtcatccgctacgcgagagcgttcttgtaccggaatgcggaaatcggacgaaaactcgtcgggcgttcactgcgctgggagctgaacattggttgccccaccgagccacacgagaaccccaaggtcgtcgatgtattccggcgcatcgttcgaaccgcgtggttgttggcagcggaagatcggctcgcagaacaggatgtcgtggctgcatggtctttggccgatcgtgcaatagacctcgaagcagaaccgggtgtcgtgccggagttcgtcgctcaaatcgccgggtatctggggtcgccgcaggtgaaggaaggtctgcacgcgctgatcgacatcggtgcggccaccctagacgtagcgacgttcaatgtcgtcctgcgaaacgatcgggcatctccgccacgtatccccatcttcttttctgcggttcgtcgcctcggaactcactacctgcgccacaaccgccattccagactcggcctcgatctttcgtggaacgacgcagcacccgtcgaatcgtccgatgacttcgggcaccgaaatggcaagcgtatggatgaggtcgtcgaggtagatgaggaattcgtagaacaagtcgtccgctgcatcatcggggtcatcgatggaacccgtaccaacgcacggggagacccgcgtagtgcagcttggcgagaaggcttgccgatattcgtcactggcggtggtgcgaattgcgtcttgtatcgccaagccatcgaggtggtgcaaagagaagtgagattgcgagtggagcagcgaccgggttcttcgacacatttccggctcatcgaattgaatccaacctccggcaatgcgcgacaaatcgaggcaggcgacaggctgaccgtggcgctcgggctgacggaggatgccgagaatatcgctcgtgtcgtcccacatcgggacattgagccaatcacccagggcacgcgggaacgcgtcgatcacacggatctgtatggagaccgatga

SEQ ID NO: 332650 - DNA, 1968 bp, Pseudomonas aeruginosa
atgactcgaacccaagccacgccgacgttcgagatgaccgtcgacctcaacgtcctcgaacatctcggcatcaacctctacagcaacatcgccgcggtcctgacggaagcggtggccaacgcctgggacgcggatgcgtcgagcgtgcagattcgcgtcgatccaaacagcgagtggatcgagatcgaggacgatggtgtcggcatgtccgtcgatgacctgaacggcaagtacctgcgtgtcggctatcgccgccgtgacgaggacgcggagcatgggcgcaggaccgccaagggtcgcccggcaatgggccgcaaggggctgggcaagctgtcactattctccatcgcaaatgtcatcgaggtgcagtcctccaagaacggtgacatgcacggatttcggatgagcgtgccgggcattcacgaggccgtgcaagaaaagcgcccataccacccagagccactggcgagcgaaacgctcaccgtgacgcggggtacgaagatcgtgctgcacgaaatcaagcggcagcgcctcggcaagggggtgagcgcgttgcgaaagcgcctcgcccggcgcttctcgatcatcggtcaggccaatggattcgagatcaggatcgacggcctgcccatcacggcggccgatcgcggcgatctgcccaaagcccagttcctctggacgttcgatggctacgagccggaggccagcaccatttcacacgtcctggagcgcgaatcgttgtccgcgcggttcgatgcatgggattcggcgtggcgcgtgagcggctggctcggcacggcgcgcaaacccaaagacctcgacgacgacgaagcgggcaatctgaacggcatcgtggtcttcgcccgaggtcgcctgttccatgagaacgtgctcgaccgcctgaacgacgggcggctctacacgaaatacctcaccggccagattgaggcggacttcctcgatgccgacgatcagccggacatcgccaccagcgaccgccagcgtgtgcaggaggacgacgagcggtacatccagttgatcgcgttcctcggatcgcggctcaaccagctcgaaaaacgctggaacgaatggcgcaggaaacacgaggtcgagaaggccaaggagacctctccggccctcgccgagtggctcgatacgctccccgagggatacaagaagagcgcggagacgctgatcgccaaactgagcgcgctgccgctggacgacgaagacgaccgcaagctcatgtaccggcacggcatcctggctttcgagcgcatgaagctgcgtggctcgacggaagagttcgtgacgagcgtggagagcgccgaccggctgctggccgtgctcgccgaccgcgatgcgctggaagcctcgctctaccgtgacatcgtgaagtcgcgtctggacgcgatccgcgacttccaaaccatcatcgacgaagatgcgaaggaacgggtgctccagaagtacctgttcgaccacctgtggttgcttgatccagcgtgggagcgcgccacgggcagccagatcatggagtcccgcctcacgacggaaggcgtgctgatcgaagacctgaccgagaaggaacgtctgggccgcgtcgacatcgcctaccgcactcacgcgggcaagcacgtcatcgtcgaactcaagaaggtcggtcgcaagatgggtctgctcgaactggtcgagcaaggccagacctatgtggacaagctgaagaagattctgcgcgagcagaacgtggcgacgccggatatcgaggtggtcttcgtcctcggcaaggcggtcgatgaagaggccaccaacccggatcggctcaagtcgtcgatggagtccattgcgccgggcagtcgcatcgtccactacgacaccctgatccgtggggcgcaggaagcctattcggcctacatcgaccagagcaaggcactcgacaagctcgaaaagatcgtgagtgcaatctga

SEQ ID NO: 332651 - DNA, 4404 bp, Pseudomonas aeruginosa
atggtgacgcagacccaacaccacgactggctctcgctcgtcgagatttccggccctttcctcgccgttcccgtcctgaaagaagcctttccgcagggtctggaagaactggatgcagccaagcgcaagcggctgcggcaagcctacgacgaatggcgcgaggcactggaaaccgacgatctgcatttcgcagacctgcatgcggcatggatcgacgaggtcttgtcgcgtggactggaactcgacgaggacggtcgcggcgacgtgctcaaacgcaaggattggtgcgtcgcgcacctgaccgccgatctgcccgagcacggggtgaccctgttgccggacttcgccgttgtcggcaacggcgaccagccgctgatgctcatccacgcctacgggcaggatgtcgatctcgatgccacccagaagctggacggctgggccagcacaccggcagaacgtatggtcaggctctgccgcgccacgggctgccgcctcgggctggtgaccaacggcgaacgctggatgatggtcgatgcgccggtaggcgcagtcactaccttcgccagttggtatgcgcgcatctgggggcaggaatccatcaccctccaagccttcgtccacctcttgggaatccggcgtttcttcgtcgatgaatccgaacggctgcccgcgctcttcgatcgctcgctgaagttccaggacgatgtgaccgacgccttgggcgagcaggtgcggcgcgcggtcgaagtgctcatccagtcgctcgacaaagccgaccaagatcgcgaccgcgaattgctacgtggcgtgaaggaagccgaactctacgaagcggcgttgacggtgatgatgcggctggtcttcctgctctccgccgaagagcgcggcctactgctcttgggcgacgaacgctacgaggcgaactacgcgctctcgaccttacggatgcagttgcgcgccgaatccgacgagattctggagcgtcgctgggatgcgtggtcgcgcctgctggctgtcttccgcgccgtgtacggcggcatcaagcacgaaaacctgcgcctccccgcgctgggcggctccctgttcgatccggatcgtttccccttcctcgaaggccgcgcccgtggttccgattggcgcaccgacccagccaagccgctgccgatcgacaaccgcaccgtcttgctgctgctcgaagccatccagcaattccaggggcgcacgctgtcgtatcgggcactggacgtcgagcagatcggctacgtctatgagggtctgctggagcgcaccgtcaagcgcaccgccgaggtcacgctggaactcgacgccaccaagagcgcccagtcgccctggatcacgctggccgaactcgaatctgcgaggctggacggtgccgaccgcttgaccgaactgctccagcagcgctccggcagttccgccagtcgcgtacgcaacgatctggctcgtcccgttgacgattcgctcgccgatcgggtgctgacggcttgccacggcgacacggcgctacgcgatcgcatcaagccattcggccatatggtgcgcaccgacccttggggttacccgctggtctatcccgctggggccttcatcgtcaccaccggctctgaccgccgtgagaccggcacccactacacgccgaagtcgcttaccgaagccatcgtcgccgagacgctcacccccatcgcctacgtcggcccgacgcagggtacgccccgcgcggactgggcgctgagatcccccgccgatctgctcgatctgaagatctgtgacccggcgatgggttcgggtgcattcctcgtgcaagcctgcaggtggctggccgaccggttggtggaggcatgggcgcaggccgaggcgcagggccacacgatcggtgtcgatgggcaggtggcggatgccagcgccagcgtcgaggcgctaccgcgtgacaccgagacacgcaccattgccgcccgccgcctcatcgccgaacgcggcctctatggcgttgatctgaacccgctggcggtcgaactggccaagctttccatctggctggtgacgctggccaaggggcgtcccttcggcttcctcgaccacaacctgcactgtggcgacagcctgctcggcatccatcggctggatcaactcacccagctttcgatgaatcccaccggccagggccagctacgcctgttcggccagaacgttgagcaggccgtgcgtgaggccatcgaactgcgctcacgcttgcgcgagatgcccatccgtgacatccgcgacgtggaagccatggcgcatctggacgctgacgcgcgccgtaggctcgaagtgccggaatgcatcgccgatgccttcatcggggaggtgttcgcatcggtcggcggcacggcgctggagaacgcgctggcgtcactgaccatccaggccgggcaagccatcgatggcgaccgcgaagtgctcgcctcgatgcgccggagatcggtcgctgcgctctcgaccgatctggccggagacaagcctgcgcggagacccttccattggccgttggagtttccggaagtgttcgcgcgtgagcgcggcggcttcgacggcatcgtcggcaatccacccttcctgggtggacagcgcatcaccggcgtcgcgggcactgccttccgcgattggctggtcgcgtacatcgcggaggggcgtcgcggctcggctgatctggtcgcctatttcttcctgcgtgcttggagcctgctgcgcgaaggtggcggtttcggcctgctcgcggtcaacaccatcgcggaaggcgacacgcggcaggtcgggttggaagcgatggtcggcgcgggtgccgtcatccatgcagcctacccaaacgaaccgtggcccgggaaggcggcggtcgtcaccagtcgcgtgcatgttcacaaaggcgagtggcagggcgaacgctctctgctcgggcgatcggctccctttatatcggctttcctctccgatcgtgaggaatggagtccgaagaggctgaaagccaacgaaggcaaggctttcattggctcctacgtacttggtatgggcttcgtgcttacgtctgatgaggcacagcgaatgctggacgccgacccgaagaatgccgaggtgatccttccgtacatcaacggtgacgatctcaattcagacccggagcagcgcccgagccgctgggtaatcaacttctgggactggccggaggtgcgggcccagacgtactcaaagccttggtcatggatcgaagatgaagtgaagcccgagcgccagcggcgtgacaagaatgggaagttcatgctcagaaagcccctacccgaacgatggtggcagttcggtgagaagcggccggctctctatcactccatcggacgcggccaacacttcgaacaacatcccgacggctggaactcgaaggccaagcccatgaaggagatcttagtctcagcccgtgtcgggaagtacttcggaccctccgttgtgccgaataacgtggtatgcagtgaacaatgcgtcgtctttgcggccgccagcccccacgcattcgcagtcctgctcaactcgtccatcgggcaggcgtgggtgtggcaacagtcgtcgcgacacgaaacgcggctgcggttctcgccgtcagatgcgttcgagacccttccgtttcccaatgacctcgaaaccctggaaccgctcggtgaggcgtacctgagggcacgccgcgaagtcatgcggaccgatcacatcggcctgaccaagctctataaccgcttccataccgacacagagcgcgatcctcgcatcgaagggctgcgcgcattgcagcgtgaaatggacgcctctgtcgcacgcgcctacggctggcatgaccttgacctcggacacggcttccacgaagtgccgtatctgccagagaacgaccgcgtccgcttcaccatctcggaggccgcgcgcatcgaagtgctgcgtcggctttcggagttgaaccgccagcattacgaggaagaagtcgcccaaggcttgcacggcagaaaagccaacggcacggccacgcgcaaaccacgtacccaacgcaccgaaaacacgctcgcacagcaatcctcattcgggttcgatgccaatccagccaacgaaggccactacttcaaagctgccgaaccccgcgccgactatcgcgccggcccagcccacgccatcgtcgaatacctgaagactcatgccggctggcacgccaaatccgacattcttgccgccaccggcctcgtggagagtcagtggaactccacgatcacagccctgatttcgggtggcagtgtcgagcgccaaggcgaaaggcgcggcgcgcgctaccgcatccagcccggcaacgaggaaaactatcacgaggggacgtcatga

SEQ ID NO: 332652 - DNA, 639 bp, Pseudomonas aeruginosa
atgatgacctggcaggaatatcaggaggccgtcgccgagttctacgagcaaatcgacgacttcggtaacgtcagaagaaacgtcatggttccggacaagatcaccggccagctacggcaaatcgacgtgctcatcgaaatcgaggccaaggggcatccgctgaagatgatcgtcgatgccaagttccacgccgttcccatcgatgtgcgagaggtcgagtcagtcctcgcactcgctgatgccgttggcgcaaacaaagcgatcgtcgtcgtggcgaatgggtggacggagccagccaagaagaaggctgaccatgctggatgcggcctcgaacttctgtcggtggaagacgccctcgatttgatcgttcctgacaaatggaagatgtgcccatcctgcgatgccgactgcatcgtgctcgatcaagaaggtgcggtcaccctcgatggaggcgcgtggttctggtggcttgcaggtcagtgccgcggatgcaagtgcgcgcgtatccactgccaagactgtgggacgaaggcattcgtcgaactccatggctccatcgtttgtggttgcggacatcgctggtcgagcaccgatgacagcgtcaccatctcatttttcgcggaagagcctgaatggtga

SEQ ID NO: 332653 - DNA, 3132 bp, Pseudomonas aeruginosa
atggaggtccaaaccgagcagcaagcccagacgtatcgcgcgaggcctgagccaggacaactggtcgaggtgcgccgtcgtcagtgggtggtggccgacgtcgatgccgctcggctggataccggcactccccaacattgtgtgacgctatcgtcgatcgacgaagatggtctcggcgaggaactggaagtcgtctgggaaatcgagccgggtgcccaggtcatcgaacgcgcgggcctgccctcggtcacggggcaggacgattcgggcatgctcgacgccttcctcgacgccgtgcggtggggcgccgccaccaacgccgaccgagggtttctccaagcgccgttccgcagcggcgtcagcatcgaggacttccagctcgatccgctggtgcgagccatcgacatggctcgcgtcaatctgctcatcgccgacgacgtcggcctcggcaagaccatcgaggccggtctggtcattcaggaactgctgctgcggcaccgtgcccgcaccatcctgatcgtctgccctgcgtcgcttcaggagaaatggcgcgtcgagatgctggagaagttcggcctcgatttccgcgtggtggacaccgactacatcaaacggttgcggcgcgagcgcggcatccacgcgaatccgtggacgtcgcatccgcgcctcatcacgtcgatggattgggccaagggcggcgagggtttgcgcgccatgcgcgacgtgatcccgccgcacgtcggccatccgcgcaagttcgacctgctggtcgtggacgaagcacacaacgtcgcgcccgccgcaggcgcgcactacgcgctggagagccagcgcacacgcttcgtccgcgccatcggcccgcacttccagcatcgcctgttcctgaccgcgacacctcacaacggctacaccgagtcgttcacctcgctgctggaattgctcgacgaccagcgcttcgcgcgcaacatcctccccgacgaaaagcgcctaagtcaggtgatgatccgtcgcctgaaaagcgatctggtcgatgcgcacggcaaccccctgtacgcccggcgcaccttgcaggcgctcgaagtcccgtacacggcggaagagcgcgcgattcatcgcaagttggacgactactgcgccagccgcgaaaaagatgccgagaaatcaggtaatggcttcggcacggccttcgtcaatcgcctcctcaagaagcgtctgctctcgtcgccagcggcgttcgcgtccactctggaaaagcacgtcgcatcgttgtccgaagcacggtccgcgaagtcggacgcgatggcggagcgcattctgcacaaggccatcctaaaagtcgacgaagactatgccgacgatcaggaggtagagaacgcccaagccgaagccatcgaggaagccacgcgccgctcgacgccgctgacgccggagcagcgggcgacgctggacgacttgagggtgtgggctcagcgagccaggaatcaggccgactccaaggccgaagccatcctcgactggctcacggccaacctcaagccggacggtcagtggaacgatcgccgggtgatcctgttcaccgaataccgcaccacacaccagtggatgcatcaaatcctcgccagccacggcttcggcggcgagcgtctcggcctgctccacggcggcctctctcaagaggaacgggaacccatcaaggcggcgttccaggcatcgccacaggattcacccgtccgcatcctgctcgccaccgacgcggcgtccgaaggcatcgacttgcagaaccactgcaatcggctcatccacttggagattccctacaaccccaatgtgatggagcagcgcaacgggcgtatcgaccgccacggacagcgcgaaaaggaagtgctgatctggcacccggtcgatggtggcgacacgagcggcgcatcggtcggtggccacggcgaggacatcctgcgcgccttgcgaaaactggactcgatgcgcgccgacatgggcagcgtcaatccggtcatcgcgccgcagatgtccggtctgatcgaaggctccttgaaggatttggacactcgtctcgccgaggcacggatcgcacgggccaagaacttcgttcgtgccgaacgtgagttgaaggagcgcgtcgccaaactgcacgaacgtctcctcactaccaagcaggatttccacctcacgcccgaccacgtcctgatggccgtgaagaccggcctcgcgctggcgggccgtccgccgctggaacccgccgagctaccgggcgcaccctcgggcagcgtgttccggatgccggcgctgtccggctcctgggcgcgatgtctggaagggctgcgtcacccgcacacccagcggatacggcccatcaccttcgaccacgccgtcgccagtggccgcgacgacgtcgtgctcgttcacctgaaccatcgcttggtgcagatgtgcctgcggttgctgcgcgccgagatctgggcgcaggacgacgtgaagaaactgcaccgcgtcaccgtccgcaccgtgccggatgcgctcatcgacagccccgccgtggtcgtcgtctcgcggctggtcgtcacgggtggcaaccatcatcggctgcacgaggaactgacggtatccggcggctacctgcgcgaccaatccttccgccgcgaagaaggcgtcacccgcgtccagcagtggttggacggttcgaggccgatcacagcagccccgtccctgttcgacgcacttcgcgtccgcttcgaccgtcagcaggaagccatcctgaaagcggtggatgcgcgttcgaaggagcgtctccgacacctggccaacacgctccagacccgcagacagcaggaaatcgacgacatcggcaccgtgctcgacgaactggagaaggcgatccagtccgagttgaagaaaggcgagcagcccgaacagctctcgctcttcaccgaggatgaacgcacacaactccgccgcgacatcgccgcgctggaagcgcgcctcgcgcgcatccctgacgagcgccggatggaaacgcaggccatcgaatcccgttacgccaagctcgacgaccgcaccttcccggtcgccgtgatcttcgtcgtgcccgagtccacgtcaggggtggcgaaatga

SEQ ID NO: 332654 - DNA, 459 bp, Pseudomonas aeruginosa
atgccgcaactcctgccctcgtcacccgataccagtcgccgcatggcgaaggtgaggcagaaagggacggatgcggaggtggcgttgcggagggagatgtatcgaatcggtctgcgctacaggatcgattacgaggttctgaggaagccccgtcgcgtcgcggatatcgcgtttcccgggcgaaagatcgccatcttcgtcgatggctgtttctggcatggctgccccgagcatgccacttggccgaaacggaatgcggagttctggcagcagaagatcgaggcgaaccggaagcgggacgcggacacgaatgagcggcttcgctccgtcggctggacggtactccgattctggtcgcacgaatcaccgaccgaggcggcaagagctgtcgcgcgcgtgatcgccacggtcgacgcacagcgtcgcgtttcgtcgtccggcgtgaatgcgaaaaactga

SEQ ID NO: 332655 - DNA, 948 bp, Pseudomonas aeruginosa
atggaccccgcctgccgcttcccttatgaggccaacaaccaggcccgattcgtggagcgagacatcagtaaggtcaccatcgccgagctgaaggcgttgttcggtgacgccgatctgacgattctcgcgggctgcgcgccatgccaacccttctcgacctacgcgcagcgctacgagctagacggcaaagatggcaagtggggcctcctgtatgaattcgctcgcctcgcgaagggctccagtcccgatgtcatcacgatggaaaacgtgccgaccgtcgccaagcacgaggtgttccacgacttcgtggatacgctgaaacggctcgggtacaaggtttggttcgatgtcgtcgacagctctcgttatggcgtcccgcagatgcggcggcggatggtgctgctggcctctaagcacggcagcatcgagatgatcccgcccacccacgagaaaccgaaaaccgttcgacaggccatcgcgcacttgcgaccgctcagtgccggagagtccgcgcccagagacaaactgcacgtcacctcgacgctgtccgaaacgaacctcaagcggatcaaggtctccaagcccggcggcacttggcgcgactggcccaaacacttgatcgccgaatgccaccgcgccgagagcgggcgcacctatccgggcgtctatgggcgcatggagtgggacaagcctgcgccgaccatgacgacccagtgctacgggttcggcaacggtcgcttcggtcatcctgagcaggatcgagccatctccctacgggaagccgcgatcttgcagagcttcccgcgcgactatgcattcatcccgccggatggcgaggtgagtttcaaggtgctcgggaggctcatcggcaacgcggttcccgtcgatctcggtcgcgccatcgcccgcagcatcaaccaacacctcgcgtcggtcacggctcggtga

SEQ ID NO: 332656 - DNA, 162 bp, Pseudomonas aeruginosa; identical to SEQ ID NO: 328044

SEQ ID NO: 332657 - DNA, 1446 bp, Pseudomonas aeruginosa
atggccctcatgttcccgcgcttggcgcgcaactttgcacgcaacggctacttccctaccgatgaggtcaccctcgaacgcgctctgcaggccctcactcctgccccgtcgggcaggatgaggatctgtgacccctgcgccggtgagggtgttgccctggctgaggcagcacacaccctcggccgcgatcaggtccaagccctcgctgtcgagtacgaccgcgaacgcgccgaccatgcccgaggattgcttgaccgagtgctgcacagtgaccttttcgacaccatgatcagcaggcagtcgttcggactgctctggctcaacccgccttatggcgacctggtggcggaccactccggtgcgtcgcagtaccagggcagcggccgccggcgtctggagaaagcgttctaccagcgctgcctgccgttgctgcagtacggcggcgtcatggttctgattgttcctcaccacgtcttggacgatgagctgactggctggttgagcaaccacttcaccggcctgcgcatctacgcagccgcggaccctaccttcaagcaggtggtgatcttcggcatccgggtccgtcggcaggacctggcccgggcggacgccaatcaggtgaggtctcgcctgcaggcgatcggcgcgggccaggaaaaggccgaggaaattccagcggcttggccgtgggaaccctacgtggttctgccggccaccagcgagctggagcacttctaccgagtaaccctggagccggagcagttcgccggtgaagtccagcggctgcgaggtctctggcctgacttcaacctgcacttcgcgcaagcggggctgcagccgcgcccaccagtccgcgagctgtctcgctggcacctggcccttgccctggctgccggcgcgatatctggcgtcgtgcgatcgaagtcggaccggatcctggtcgtgaagggtgacacctacaaggacaaggtccgcaagaccgaattcaccgaggacgacgacggcaacatcaccgaggtgaggatcctcaccgaccgtttcatcccgatcatccgggcatgggaaatgacaccctcctcggtcaaccagggccgcgtgctgaccatcagctcctcggccgcgaccacggaagaagctgaagagccccaacctgagccggcctctgcaccgctgctgttcagccctggccaggtcgtgatgaccgcagccgtgagccacctggtggaaaccggtcaactcaacccagcgcctttgctgaatcgccatctggcgggagactgggggacgctggaccaggaagactggaacaccaaccagagagccctgaagttcggcgatcggctgctgtcgtcctacgacatcgacgccggcgacgaatccaggctctggatcatcactgaggcagaccgcagctcaaccacgcttttgctccctagcgattactga

SEQ ID NO: 332658 - DNA, 2250 bp, Pseudomonas aeruginosa
atgaacgctctgacccaaccggccgccctggccgcctcccccctgaacatcaacctgaccgacttcatcgacgagttcggcgacgagctcctggagtcgctcaatcgctccaaccccccggtctataccggctccgacaacgctcaccgccaattggtgatggaccgactcaagcgcaagcccttcgcggcccaggccgaggtcgtccaagccatcaccgccctgctgctggaccgtaacgagcaggccggaatcatcaacgccgagatgggcaccgggaaaaccatgatggctatcgctgtcgcagcggtcatgcacgctgccggctatcgccggaccctggtcatctctccgccgcacctggtctacaagtggcgccgcgagatcctggagaccatcccagccgcccgagtctgggtactcaatggcccagatactctactcaagctgctcaagttgcgagatcagatgggcgacgcctacgacggacgccaggagttcttcatcctcggccgcgtgcggatgcggatgggtttccattggcggctcgcctgctggaagaagcgcgccgccggtggccaactgctcgctgcgtgcccggattgcggccaggtcctcgaggacctggaaggcaacctggtcacggtggaggagttcgagcgtggtgaccgtcgacgtacctgttcctcctgtcgaggggcgctctggacgctgatccggccaggcaagcccaacggcggcaaccggcgcgcaacgatcctcacgtcgatgtgtcggattccaaccatcggcccggtcagggcggagcgcctgctgaacgacttcggcgaggacttcctggccacgatgttggtggacaacgtctcggagttcatcaacctgatggacgccaagggcaacttcgtcttcagcgatcggcaggccaaacgcatggagcgatcgatggcaaacatcgagttcggcttcggtgaaggcggctaccaaccgaccgagttcatcaagcgctacctacctgatggctacttcgacctgctggtggtggacgagggacatgagtacaagaacagcggctcggcccagggccaggccatgggcgttctcgcagccaaggcacggaaaaccgtgctgctgaccggaacgctcatgggcggctacgccgacgacctgttctacctcctgttccgcatcctcactcagcgcatgatcgaggacggctatcggcccaacgcgcgcggcagcatggctcccgcagccatgtcgttcatgcgcgaccacggtgtgctcaaggatatctacaccgagcgcgatggtgattcgcacaagacagcgcggggcaagaagctctcggtacgcacggtgaaggctcccggcttcggcccgaagggcatccaccgcttcgtattgccgttcaccgtgttcctgaagctcaaggatatcggtggcaacgtactgcccgactaccaggaggagttcgtcgacgtgcccatggcgcctgaacaggcttcggcctatcagcgcctgtcggccacgctgacagcggagctccgccaggctctggcgcgacgagataccacgctcctgggcgtggtccttaacgtgctgctggcttggccggactgctgtttccgaccggagatcgtcaagcatccgcgaagccgggacacactggccttcgtgccagcgatcttcggcgacgagcagttgatgcccaaggagcaggcgctggtggacctctgcctcgaggagaaagcgaagggccgcaaggttctggcatacaccgtctacagcgggacgcgcgacaccacgtccaggctgaagaaagtgctcgagcaatccgggctgaaggtggcagtgctacgtgcttcggtcgataccgctcgacgcgaggattggatcctcgaccaggtcgatcgcggcatcgatgtgctgatcaccaacccggagctggtgaagaccgggctggacttgctcgacttcccgaccatcgcgttcatgcaaacgggctacaaagtgtacaccttgcagcaggccgcgcggcggtcgtggcggatcgggcagaagcacccggtgcgggtggtgttcttcggctacgccggcagctcgcagatcacctgcttacagctgatggccaagaagatcgctgtggctcagagcacgtcgggagacgttcccgagtcaggtctcgactcgttgaaccaggatggggattcggtggagatggcgttggcacgactgctcattgcagcatga

SEQ ID NO: 332659 - DNA, 936 bp, Pseudomonas aeruginosa
atgaccaaagccactattgcattaggcgagctcgccgagaaaaaggcggatgccgatctgctcaagtacatgatccagttcgtcgcccagcgtctgatggaactggatgtcgaagtgctgtgcggtgccagctacgacgtcaagagtagcgagcgcagtaacagccgcaatggataccgcgagcgtctctggcaaacccgcttgggtgacgttgatctgcgcattcccaaattgcgccagggtagctatttcccgtcctttctggaggcgcgtcgcaccgccgagaaggcattggcggcggtgatccaggaagcctatgtacagggtgtctcgacccgatcagtggacgatcttgtacaggccctgggaatgagcggcataaccaaaagtcaggtttcgcgcctggccggcgagatcgatgagcgcgtacatgcatttcttgaccgcccgatcgaaggtgactggccttatctgtggatcgatgcgacctacgtcaaggcgcgggaggccggacgagtcgtttcggtcgcggtgataatcgtcgtggcggtgaataccgatggtgtgcgcgaggtactgagcatacgcgtctgcccttcggaagctgagccgttctggacggacttcctgcgcagtctgatgcaccgaggtctacgaggggtcaagctggtgatctccgatgcccatgagggcctcaaggctgcggtggccaaagtgctgaaggcgacctggcagcgctgccgggtgcacttcatgcgcaacgccctggcgcatgctagcaagggacaacgcagtatggtggcggccttgctgcgcacggcgtttgctcaggacagcgagatggaggcgcgtcagcaatggcgaatggtggcggatcagttacgcgagcgcttcccaaggatcgcccatctcatggacaacactttggttcgatga

SEQ ID NO: 332660 - DNA, 1491 bp, Pseudomonas aeruginosa
atgaaaactgcaatcaaacctacgcgagccgagaactttccagagtggtatcagcaagtcgtccagcacgctgagatggctgagaattcgccagtaaggggttgcatggtcattcgaccctggggttatggtatttgggaacatattcagcaagaactggacaggcgcttcaaggagacgggccatgtcaatgcttactttccgttattgattccattgtcgtttctgcaaaaggaggccgatcatgtcgagggcttcgccaaagagtgcgcagtcgtcacccatcatcgtctcgagcaggacgcagagggtgctctggtggccgccggcgaactcgaagagccgctgatcatcaggccgaccagcgaaacggtgataggcgcctcatttgctcgctgggtgcagagttatcgggatctgccattgctgatcaaccagtgggccaatgtgctgcgctgggaaatgcgaccgcggatcttcctacgaacttcggagttcctatggcaagaaggccatacggcccatgcatgcaaagaggaggccctagaggaaaccctgagaatattgaatatctacgcggacttcgtccacgaccacctggcgatcccagtcatcaagggcctcaagtgctcctgggagcgctttcctggcgcggtcgatacctacaccatcgaagccatgatgcaggatggtaaggcgttgcaggcgggtacgtcgcattttctggggcagaatttcgctaaagcttccgatatccgcttcatcaatcgcgacggtcagcgagcattcgcctggacgacctcctggggggtatccacacgaatgatcggcgcaatgatcatgacgcacggtgacgatgatggtttgcgggttccacccaaagtggcgcccgtgcagatagttatcgtgcccgtcgttcgcgatgagtcggacaggcagtcgatcctggaggcttgcgaagtactgcgctcgcagctgtcagcgcagcgctgggacgatcagccggtacgagcgctggtggataaacgagaactaagcggtgcggacaagaagtggtaccacattaaacgaggtgttccgatacgggttgagattggcgccagggaagttctggcaaacacggtgtcgttaagtcttcggaccgagcccaaagacgttgaaagttcgacagtcgaacactttatcgatagcgtaagtcagcgacttcaggggatacaggaccgactattggaacaggccagtcagcgtttactggaacggacgatcaccgtaacttcattgagcgattttaagcgagcgttcgaggaggagcagcagactgcgccattcgtactggcgccttttgtggatcatcctcacgtagaagaggggctctcaggcatgggcgtcagtgtccgttgtctgcccctacaacaatcaggtgatacacaccattgtttgttcactgggcaagcgaccaagacaatggcgctatttgccaaatcctactga

SEQ ID NO: 332661 - DNA, 1128 bp, Pseudomonas aeruginosa
atggcctacttcctggtgtacttgaaggtcaacttcggccttgcagtggaccaaatagggctgttcatcgctggttttgtcttgttcagttctctggtgagcttagtggcgggggcgctgaccgaccggttagggcccaagtgggtgatggtactttcaccactgctgcaaagcgcggcctatgtgggactgcaactgtgcgactcgttgatcgttgcgttcatgctgtgtctgatcctgaacttggcgtacctggcttcggagactgcggtgcgtctgtgcatcgctcgctggttcagtgcgcatcagacggcaggcgtcctctcggtgaagtacagcctgaccaacatcgcctacgccgtcgggccattgatgggtctttggctgcacagcctcggcggaagtccgctactactgtgtgcagtcatggcttcactgttgatggctgcagcctttctcccctggcagccaagcgactgtggcagcgacgactccacgccccaggaagcgatgctgtcgaccctcaggagcatggtcgcagatcgaacattactgacctacacgctggcgactatcttgctcgcaggcgtgtttggccagtttcatctctacatcggccaatatttgctgacgcgctactcggtccagcagatgtacgaaatcatcaatgtcgttttcatcactaacgcgctgacgtccgcctgtttgcaatatgtgttgggccgtcacgtctcagttgaacatttcgcgcgctgggtcggactctgcctggcggcctttgccattggactcattggcttcggcacgtccagcacactagtgggatggatactgttcacgctgatattcaccgtcggcgaaatcatcgtgcagcctgtcgaatttctgttcatcactgaaatcgcgcctgcacaccgcgccggggcctactacagttcgcagaatctaacgtatttgggtgccgcctccactccgctgatggccgggctgatcctttctcaggtgagcccgatctggctcttggtttatcttctgacactgctcgccacaggcgggggcatattgctgcgacacagtcggaaaatccgcccaaccgtactcgtcgacgagcacggtggcggagggtga

SEQ ID NO: 332662 - DNA, 753 bp, Pseudomonas aeruginosa
atgaccctctcattggcgaagtcctataacggaaaaactgacttgtacgagcgcgcaagaccgctctaccccagcgccgcgatcacgtggatcgatcactgcgttccacgcctgtcgacgctaccgattgtcgatatcggtgcaggaacaggtattctcactcgccagcttggcgctttaggacttcccatgatcggcatcgaacccaacagtcagatgctcgctcaagcgcgtaaccgtgaccagaacgcagattatcgacagggatctgccgaagaaaccggactggcctcaggctcggctcgtgcaattgtgtgcggccaatccttccattggttcgatactcggcgagcggctgaggagtttcgccgaatcctgaatgtcggcggaccggtcatactggcgtggaacatcagaagccctgaccacgacgccttccatatcgcttatgaagccatgctcgcacaactgttcgagcactacgcacagacgctcgacatcgaccgggaactcgaggaccgcgtgaacgacttttacgctgggccgttcgaggaacgcaggtttgccaatgcccagcagttggggattgatgaattcatcgacagaaccctgtcgtgctcgtacgccgcgttgccgggaaccaccgagtacgaagctgcgattacggccctgcaagcgcttcatcgacaattccaggtgcaaggtcgagtatcgcttcggtattcaacgcgtgtcgtccatggctttatctaa

SEQ ID NO: 332663 - DNA, 900 bp, Pseudomonas aeruginosa
atgcctattgaaatgcctgcacaccagtacccagcgcgttgctcgacgattcaggacattcatcagtgcatgctcacgctgtcccgaacggggccaggttgcgcttatcgatggtgcatccttgattggcagacaggctcgcgcttcgaacaggcagccgatgcgccatgccctgcctcgagtacccgcaaactgttcatcctcatcgcggtactgcgcgaaatcgagaccggtaactggcggctcgacgacaggctttggctacttccgcaggcggctggccagcagacgtgcggggcattatggctgctggacgaaccccgcgcgttcaccattgcggagttgctcaaatgcatgatggccctgagcgacaacgtagccacgttccatctcgtccgtcggctcggcctgcagcggctcaatgcgttttcaaagacgttacagttgcagcacacccaccatgtcggtgccgtccccaacccgctgctcgatgcagatcatcccctggaagcggtgaataccaccaccgcttcggatctggtgaaagccctggagttgatggtgcagggcgtccaaggcaccggcaggggcccgacattcattgccccagaactgtgtgaattcggcctggcgtgcatgcgtgggcaacaagacaccacggcaatccgaagttggctcgacgatgccagtcacgtaggtgacaaacacggcattggttatcgcaattacaacaacgtgggttacttcatgcgccaaggtcaggtgaaggtgatcgtttcggtcatcgttgacgatctgaaccatgtcgctcccaccacgtgtgcatttgcccacgccagagacttcattgggctgttttcacgcctgctcgatgactattgcacacttcagcatgattaa

SEQ ID NO: 332664 - DNA, 729 bp, Pseudomonas aeruginosa
gtgagccaggaccgtatttcattgctgtgcttttcctacgcgggaggcagcgcgagtttctacgcacgctggcaacgtctactaccgatggctcaggtcatacctgtggacttgccgccacggggccagtcgcccggggctccagcgttcaacagccgggaagccacgatcacctatcttctcgagcaggtgcaaagccgctgccgcggccggttcgcgctgttcgggcatagtcttggcggtcgactcgcctttgagctgctcgtcagtcttgagcagcgtctggaactgcgcgcagaggcactgttcgtcagtggctgcctggcgcccgagcgcttcgccgttgccatgggcgcctatgaacgtgatctgagcgatcagcgcctgctgcaggttctacaggagttgggcggtacgccgccagaactgatgagcaaccctgaactcatgcaacaggctctgccggtcatacgcgcagattttcagctggccatcgacctctccagatgcccgcctgcgcaggtatcggcgcccatccatctcgtactgggcgataacgacccggtgaccgatcagcagcccgattactcgggctgggcgcgtcatacgttgggcaggtgccaattgacgacggtcgcaggcgatcacttcttcatccgcacgaacttcgcagccgtagctgagacggtggcacgaacgcttcgtgaggtcaccgcacatgcctattga

SEQ ID NO: 332665 - DNA, 5736 bp, Pseudomonas aeruginosa
atgagcgagctcaatgacgaacagtcaggattcgaagacaccgcgatcgccatcgtcggcatggcatgccgcttcccgggtgccaattcagtgcatcaatactggcagaatctcctgaatggcgtggagagcatcgatgtctcccaagatcaggctggcagaattcacgccaaggcgcagatcgagcacatcgagtgctttgatcacgaatttttcggcttcagcctcaaggaggcgatgttgttggatccgcaacaacgggtgttgctcgaatgtgcgtgggaagcgatggaagatgccgcgcttcatggccgaacagcagccactggggtgttctgcggtgcgggtccaagttcatatttcattaacaatgtctatggcttgcaagcacacgacagtgcatgcgccctgtatcagtcttctgaagcgctcgcccgcttcatggccactgacaaggaattccttgccagcagaattgcctacaaactcgattgccgtgggccggcggtgaatgttcaggccgcgtgcgcaacctctttgtttggcgtccaggctgccgtacaggccctactcctaggcgaatgcgagagcgcggtggtgggcgccagtgcaatctcggtacctcagacgattccttatttcttcgagcctgggatgccgttcagctcagacggccactgccgtccgttcgacgcccaggccagcggcacgatctttggttccggggcggcggtcattgtgctcaagcgactgagcgacgcgcttgcccaaggcgatgagattcatgcgctcattcgtggtattgcaaccaacaatgacggcgctcaccgggcaggcatgtcggcgccatccgtggcaggccagactcaagtggtgagtgaggcgttgagtcttgcagaaagctcgccggagcgcatccactacatcgaggcccacggcaccgccacgccaattggcgacccgattgaaatcaaagccttggccaacgtcttcgctgaacgctccaggcagtcactctgctatctgggcagcgtcaagggcaacatcggccacttgggatgggcagcaggcatggcgggactgatcaaagggatcatgatcgccaagtaccgcaagattccggcgacgctacatctacaaacttacaatccagaactgcacatcgaagacacgccatttgaagtcaaccggaacacgattgatcttgatgtcgatcgtgtccagatcggcgtcagcagcttcggcttgggtggcaacaacgcccatttgatcctggaaacggcgcctacgcacgctcatgccccagcagtgcacgcgctcccggcaggtctcgttcctctgtcagcacgctccccgcaagccctacgtgaattgatagcgcagtacagggagtttctacatacacagccggatgaggcctacgccacattcgtggccaacctgtggcaacggcgcacgcactttgaccatcgcgcttgcctggtcgctaccgaccgctcacaagccttgcagggcctgcaagacatgcaggacatgccactacccatcaggcactcgcagccggttcgagtcgctttgatgttctcgggccagggcggcgaacatcgaggcatggctcgcgcgctgtatgagcgagagcccgttttccgccaggcagtggatgagttcgacgcgatctgcagcacgacgttcgcggcacgggcatcgcaattactgttcgatgaccacttcagtggcgcgctcgaaacggatatctctcgctctcagcctttgatcttcatcgtgcaagtggcgatggcgcgcttgctcctgagcaaccttcatacacctgccgcgttactggggcacagcctgggagaatatgctgcggcctgcgtcgcaggcgtcttcacccctgagcaaggcttcatgatcgtcaccgagcgcagccgtctactgcattcgatcggcgagcagggcgccatgctgatgatcgcaacggaccaggaacaggtcttcgggctgatgcaagcgtgtggcgtcaacgcatccatcgcggcaaccaatacgcagaccaacaccgtagtatcgggaagcgttgccgacatcgagaccctgatgcgacacgctgatgcctgcgcagtcacccaccagcgcctaaacatcagcagaccgggacattcggcgctcctggaccccttgctggaacagttcgaggcgttcgtctcgcagttcgaactggcctccccgtccatgccgctgatctcgggcctgaccggaacaatggcagacagcactgtggcacatgccgcttactggcgtcgccaactgcgcgagaccgttaactggcagagcgcttacgcctgcgccgtggagcgagggtgttcccatttcgtcgaggtgggcgtgtccagtgccttgtctgcgatggcggtcgggcaatccccttcagaggtcatcgttcttccaatgactcgcaagggacgcgctagcgatcagcagtacctggcggtgctcgcacggctctacagcgatggcgcccaactcagcagttcgctggcaacgtcgccccacttgctcgaaggattgccaagttatccatttcaacgggtgcgctgctggatcgaaagcaacgtccctgaggcgagcacaccaagcctctacaaaaccacttggcatccactttcctgcgaaaacgctcaatcgatcagcacgcccccaacgaacgtgttgttgctcaccccagattcgcattccagatactgctcagcactgcaacgggctttcggccaagtctgggctgtggactcggacccctggatgagggctgcccaaggacccgatcactgcgtgcctgccgcaatcgacacgctttggcgagagtacccggaaggattcgactgcgtttacgcagacctgactcatctgccgacagacgagccagacgcggcagtgatggtgtgtgcctatcttctgagcatcgtgcgtagtctgacgcgaacgtacgcacaactgcctcggctttgtgcgatctgtgcaagtccgggcgcaatggcccatcccgatcatccttcagcactcgctactagcgtggccgccttgttccgcacggtcatgatcgagtgtccacaactgcgggcgtgcgtggtgcatttcgtccagcattcgcctgcgcagctggatgatgaaaacgagtcgagggtgttacggcaggtgctgcacagcgatgaggcgctggtgcactgtagcgacggcactgctcaggtcccgcgcctggaggcagcgaacctcgagcagacaccaatgaagttcgacaacggcataacgtatctactgctggggggcggcggagggattggcaggcatttgatacagcgtcttgtggacgatcatgtcagcgatattcatgtgattggacgatccatgcggccgacagatgaactgcaggcaatcatgcgtagccatcctcaggtccactaccactgtatggataccagcagtgaacaagggcgagaagaatgtcgtgcttgggccagcagcgctcgcctgggcaagctgtgcctgttcaatctggcggtggatctgcaagacaagttgtacgaagacgtcagcatcgaggatctgcgacgggcgttcgcagccaaatgcacagccatcctcacgctttgcactgtgcttgccgaacaaggcttgcagatccagtgggtgatcaacttctcatccgctactgcgttgctgggcaatggaggacaagcggcctacggggctgccagcgccttccttgacgcattgccaacccagcgctttgccgccgcagccaaagtctccaccatcaactggggcgtttggctcgacgccggtgctctacgcgatcagcctcaacgtcaacacatcttgcaagccggcggactgctggggcactcgagcgcccaaggcatcgattacttgagtcaactgatggcccaaccgcctggcaacaacgcattcatgaagttggacgtcgagcagctcgctgcccgctcgcccgcatgcgccaggttgcttgagcagttgaccccgtcaacccaggcaagcgcgatctcgaccccggattctctcaccctggctgagaggctcagtacctgtcacgacgagcgagccaggcgcttggagctcgagccgtggctgatgaagaccgtggacaacctggtagggctgaacgcctcgacacaacgcagcttccaggacatcagccaggcgacgctggccgagttgggtttcgactcactggcaaaggtgcaattgcgcaatgcactcaccacgcagttgggcattgattacagcattaagcaactgcagcagatcgccaatatggacgcgctcgcgcaggtggtcgcaaccttgaccgggaccgaacaatggcgagcgcctggcgctcgaccgcagtcacaggatggcgtggaaacaggggagtcccccgtgtcgatccagcaggctcgctggctttcgctgatcgccaaagggtacggcctgcgggtcattccctatcgaattcatgcgccgcttcagcgggagcattgctatgcggccttgtctcaagtgctggacgaagaaccgctgctgcgcacctttttcccgcaaggtagaccgcagatccgctcgacccacgaagtactggacagcttcgacgcgcttttcgtggatctgcgagatgtggccgatccagcccagcagattggcgagcaggtgcgcgcaatggctcgcacgctaccccagccgcaggtgaacgtgacctgggcactgcgtttcattgacgtgggagcaccttttttcatcgcgctgctaggtgtgcagcacctggagttcgatggcaaatcgctgacgctgatgctcgaacgattcgcccattgcctgcacgcctttacgcgaaatcaaacgccacgcacacgtgcagagggcctgcgctacgccgactacgccagaaggcaggcccagtaccatagcacttgggcagaagatgctgccttcttccgggggctattcaacgccttcgagggtcccacagcgctgcctgaccacccagggttcaccttgacgacggtggcgccttcaagccgatacagtattgagttgccatcggccaatcggcgcctgtcggccttggggggcgaatacggtttcagcgtattcaatgcggtcttgtatgcctacgcctccaccatggcgcacgttttgcggtgcgacaagctcatgataagcatgatcaatagcggccgcggtctcgaggagttcaacgatgtcattggccccttcacttcgccttggcccattccaattacggtgcatcaccagtggcttgatggcatagggatggtcgcacgcacgatcaacgccatgcaggactatccgttgatgcacccaagtatgctgattgatgttgtcccagcgttcgcgggtatggcactggatacctacttctccgatctgggaatcaacttcctcaactatcggcacacggtcccggcgccagatcaggtgcgtgtggaaggtgtagaaattctcgggcccatctcagacagtctattggcccaagcgaatatagaagacatgcagcgtgtccctggcctgcacctggtagtcgagatacttgaagacgacctgcgcttgaatttctggcatcacagtcagcgcttcagccacaagcaggtagaaggttgggcacagttgatgagccagaagctcgatgccctactccaactgacggagagtgacgtgtga

SEQ ID NO: 332666 - DNA, 1845 bp, Pseudomonas aeruginosa
atggactttatcgagcgtttcatcgaaattgcacgtgctcatcctgagcgtattgccgttacccagactgatcattcattgtcctatcggcaactgtaccgccgcgctgcggcactggcgctcaccttgcaaacagccaccaccggcccgcttattggcttgatgatggcaaaaaacatcaactacatcgtcgcgctgctggcggtgcacatctcgggacgaacggccattgcgctggaccgcggctatcccatcgagcgccaaaaacagcttgccgatgccgttgacctggcgctctgcattgtggatcgacccgtcaccgaacctatcgacttggtgcgtgcaggcacggtcttgctcgacctaagcgaagtccaccccggcaccgagccgtttgagcccacgggagccaacgaccgtcaggaggctgcagcctatatagtctttacctcgggcacgaccggacgccccaagccggtcatggttccctaccgctcgttgagcgcactgatcgacggcatgatccaacccgataccgtacagggctgcacgcttttctatgccgcgcagggcttcgacgtatcttttcaggagatctacagcacgctgtgttgcggccacacccttcatttgattgaagacgatatcaagaaagacctgcacatcctctatcggactctgcacgacaggcaggtcacccggttgttcctgcccacttccatgctcatccctttcacgatgtttgatcgcaatggcgcctttgacctaccgctgctgacacagatcttggtggcaggtgaacagttgaggatcaatcccgcagtacgcagatggttccaggagcacccaacctgccggctgatcaatcattacgggccatcggaaactcacgtcgtgatggaacatgtgctcgagcagccacccaagcaatggcccgacctccctgccctcggagacgtgctgccttgcagccgagcctttgtactgaacgaggatctgcagccggtagcgccaggcgagtgcggtcgtctgtacatcgccggtagatcactggctctggggtactacggcatgccgcagcagacagccgacaggttcatccatgatcctgtatccggtgagctgatgtatgacacgggcgatatttgctatcaggacagcaatgacctctatcactataaagggcgtcacgaccgtcagcataaagtgcgagggcatcgcgtcgaactcaaggaaatcgaagttgtagtgtccgactctggccttgttacggactgcctggtcgtcgcgcgcgagtcgggggccacgacggtgctgatcctctactacaccacacacgcagcggatcaagacgtcaccctcgctctgcacacgcacttggccgcgcagttgcctgagtacatgctgccctcgttctatcagcggatagccgccattccgctcaaccataatggcaaggccgacccgcaacgtttacctcgattcggtagcgcacgcgatcaactcccagggcattacgagcccccgcacggcccaatggaaattcaattgtgcgcaatcgccgccacttgcctcggactggacaaggtcggtgcactcgacaacttcatggaactgggcgccagttcaatctccttgctgttgctcatggcggagttgcgtcatgcgctggctcacgatctgcgtctgacagacctgtatgaattcccctgcgcacgccatctctgcgcacacttggcccgtcctcacagcgtcacaccgccgcccgatagaccgttgccggtcagtgatcgcaggcagcgcagtgctgccatggcaaatctatcggccaagaggaggcactga

SEQ ID NO: 332667 - DNA, 1212 bp, Pseudomonas aeruginosa
atgaatgcacccgtagcatccacgtctacacaccgggcccttgggcttcctcacaccatgcaagctcacacgataagaccggagcgctatggcccaccgctgaaagcgttcgcgctggaacgtgtgccgcttcctccggtgggaggcgatgagtgcctagtaaaggtcatggctgcgggtgtcaatcacaacggcatctgggcagcacagggccatccggtcgatgtcgtcgcacttcaggggggcggtggacagcagcagggatttcatatcgcgggatcggacgcatccgggatcgtcgtcgccatcggggagaacgttaccgacgtccagattggggacgaagtggtaatgcattgcggttggtgggatgaggatgcggtcgatgaccagatcatggacaggtctgcaaagatatggggatatgaagtcaacttcggcgcgttcgccgaatatacccgcgtcaagcaaacagctttgcttccaaagcccaaacatctctcttgggaggaggcggcctcctacatgctctgtggagcgactgcctatcgaatgttgtatggattcgcaccccataccctgaagccaggggacgtggttctcatctggggcggtagcggggggatgggagcgatagctacccagttggtacgggcggcaggcggcattgcaatcgttgtggtcagcagcgaggaaaaagctgcgtactgcatggagaacggcgcgcacggaacgatcaatcgccgcgactacaagcactggggggccctcgatgacctgcaagatggcgtgctctaccatgactggatgatggaagctcggcgcttccaaaaagaaatatggcgcttggtgggtgcacgtaaaaacccatcgatcgtgatcgaacatcccggcgaagatacgttcccaacatcaaatttcgtttgcgcacccggaggcatggtggtgatatgtggcggcaccagtggttacaggggcacgttcgatatccgataccagtggatgaggcaaaagcgacttcaaggttcgcactttgccaacagaaaacagtgcgaggcattcaacgcactggttgaacagaaaacaataagaccctgtttgactcgaactttcgaattccacgaacttccccaggcgcatcaactcatgtttgagaatcgcgagcccatgggcaacatggtcattcgtattggcgccggtaatggagcatga

SEQ ID NO: 332668 - DNA, 1206 bp, Pseudomonas aeruginosa
atgcccctgaaagacaccaactgccgcaacgccaagccccaggacaagccgtaccgcctgtatgacgaacaaggtttgtacctggaagtgcagctcaacggaggccgttactggcgcttgaaataccgctttctgggcaaggaaaaacgcttggctcttggcgtttacccagaggtcagcctgcaggaggcgcggcgaaaacgtgatgatgctcgtgtccagctcgccagcggccaagacccttcactgcaaagacgcatggccaaggtggtcagccagttcgatcaccaacacacctttgaatcggtcgcaaagcaatggctcactattcgcgagtcaacctgggatccggagtacacccgcacggtgcggcagcgccttgagctcaatgccttcccctggctgggaaaactaccggtcagcagcattagtacgcccatgctggtcgaaaacctgcagcgcatcatcaagcgcggtgctcgcgagacggcacgtcgtgtagctcaaatctacaaacagattttcgagttcgccgaagctgccggtatcaccccgcccaaccagatagggaatctctcacggacgctcccagccaagcgggtgaaacactttgctgccgtgaccgatcctgaaaaactcggtgcactgctcaaagcgctggatagctacaccggaacactgcctgtttgttgtgcactcaaactggccccgttgctgttctgccggcccggtgacctgcgccacatggagtggtcggaggttaatctggacgctggcgagtggttgattcctggccacaaaatgaagggccttactgccaccaaacaggatcgcccagatcatttggttcccctcagccaacaagcagtcgctgttctgcgcgaactgaaaccactcactggcagacatcgatatgccttcccatcagcccgaggaggcgaccgaccgatgtccaacaatgccgtcctcagcgcgttacgacgtatggacatcagcggcgacgaaatgactgggcacggctttcgtgcgacagcgagaaccataggtgcggaggtgctgggatttcgcccagatctcttggagcatcagcttgctcacacggtaaaaaatccgctgggacgtgcgtacgatcgaaccaccttcttgccggagcgccgcgaaatgatgcagcgctggtcagattacctggatgcgatcaaggcctga

SEQ ID NO: 332669 - DNA, 840 bp, Pseudomonas aeruginosa
atgagcaacgaaataacgcgcgccatctggaaactccacgggattcctgcaactaccaaattcgtgttcatctcactgggcgaccaggcagataaaaacgggcgctgctggccatctgtacgtcacacagctacacgtacaggcctctctgagcgaaccgttcagaacgcgattgcctggttggtagatgcggggctagtcaccagaaaactccgacatggccgctcctcaatgctgagcgtgcaccctgcaggattttcaccacgctgcactaacgactacgcagctgaggacaaaccagctgccaatcctctcacccgccccacgcaggctgtgcacccgcgccctgcagcagcttcactcataaccaccatagaaccatcaggtaacccccaaacagctacagcgctctccgtcacggcaatacaggagaacaccaatacgacagtggccagacccggacctagatccacaaacagcaaaacctatctcacctggcgtcagtacgctgaggcctatatcgggcgctatggggtgtggcctgtctggaatggcaaagcggctgggcagattagtcacctgatcgaccgacttggcccagatgaggccccgccagtcgctgcgttctacatcgcgatcaatgacgcacggattctgaacaactgccacagcctgagcgacctgctggcacgagcagaatcctaccgaacccagtgggcaactggacagcagataaattcgactacagctaggcaaatggaggcaacccaggcgaacctcaattcagctgagattgccggccgtatattccaagagggagatcaaaatgctttcctctga

SEQ ID NO: 332670 - DNA, 684 bp, Pseudomonas aeruginosa
atgctttcctctgaacagcaagcagcgctggcatccgccatctgcgcaaccgctgaggcgcttggtcagacgatcagcccgactaccgcgagaattttcgctcaggatctcgtcaaatatcctgccgaggaaattcgcagtgctctgctcgcgtgccgccgcacattgacgggtaggctgactcttgcggcaatacaacaacagctctacgaactggacggtaggcctgagccgaacgaggcctgggcaatagctgtgaccgcggcggatgaagacaacagcgttgtcctcacagaggaaattctgctcgcactgggtgcagcccgcccagtgctaaacgcaggggatgcggtaggtgcgagaatggcgttcctgaacgcctaccaacgcctagtagctgacagccgcagtcaggtagctcctgtcaaatggctacttagccaaggacacgtcgcagatcgtcgaaaggctgccatctcagttgctgtgcatctaggacgtataaaaccgaccatagccagccgtttggctctgcagctagcgcatactcctgaatcgctcggtcaattaatatgcccttccaccacggcggagtcatcaccgcccaaccacgaggtcagtaaacgcctggaatctcttctcaaaatactgaagcggccaaaatcactatcggctgctcagtag

SEQ ID NO: 332671 - DNA, 2799 bp, Pseudomonas aeruginosa
atgaatgcagtagaaattgagtccgccatttcggacctggccctagagccctttgacgcggcggagtttccgttcacattcctggccgcattcggcaacaaggaaaccgcgctcaagcgcctacgcatcggaaataacaacgcctcggacgtacctggtggcgtgctactgcgcagcaatattcatatcgccacatgcgagcctggcagcgtgggcgaaacgctcaaggccttgcgcgccagcccggccaccacaaaagccaaagccaagttcatccttgccaccgacgggctaacgctggaggccgaagagctgatcacgggtgaaaccatcacctgtgactacccggactttcccaaccacttcggtttcctgctgccgctggccggcatctccaccatcaaggagataaaggacaaccccatcgacgtgcgcgccaccagccgcctgaacaaactgtacgtcgagctgctgaatgagaacccggactgggccaaagccgagcgccgcgctgacatgaaccactttatggcgcgcctggtgttctgcttctttgccgaagacactgacatcttcagaggcgacagcctgttcacacgcaccatggagcgttacagcgagcgcgacggatccaatacccatcaggtgctgtcggaaattttccgcgcaatgaacatcaaggacgccgagcgcgccatcacacagtctcggcttcctggttgggccaacagctttccctatgtgaatggtggcctgttctcgggcagcaccgaggtgccacgcttcacgcgaatggctcgcacgtatttgctacacgccggcaacctgaactggaaaaaaatcaacccagatattttcggcagcatgatccaagcggttgccgatgatgaggagcgtggcgcactgggcatgcactacaccagcgtgcccaacatcctcaaggtgctgaatccgctgtttctggatgacctgcgcgcacaactggtggctgctggtgacaataaggccaaactgcttaacctgcgcaaacgtatagcccgcatccgagtgttcgaccctgcatgtggctccggcaacttcttggtgattgcttataaacagatgcgcgagatcgaggctgagatcaatcgtcgccggagcgaggctcacaataagtcggaaataccgctgaccaatttccgtggtattgagctacgcgactttccggcagaaattgcccgcctggcgctgatcatcgctgagtttcaatgcgacgtgctgtatcgcggtcaacaggatgctctggctgagtttctgccgctgaatgcgcagaattggattatctgccacaacgctttgcaactggattggctgagtgtgtgcccgcctacaggtacgggcgtaaaactggtcagcgatgacttgttcaatacaccattagatcagacggaaatcgactttgctaacgaaggaggagaaacctatatctgtggcaacccgccctatcttggctccacttggcagactgatgagcagaaagcggacctagaggccatctttgcctcacgagccaagaactggaagtcactagactatgtggcaggctggtttatgaaggctgccgactatggaagtaagaccaaagcaaaggctgcatttgtatccacaaattcaatttgccaagggcagcaagtaccaattctctggccgcagatatttgctacaggtcacgaaatctcctttgcgtatacgtccttcaagtggaccaatctcgccagctacaatgcgggcgtcacagttgtgatagtgggcctgtcgtcgcaattcaaagtgccagctcatctttattctatcgccaatagcggcaagggcgacgtagtggatgtgaaggaggttgaaagcatcaacgcttacttggtgccgggaaccaatgtactgattgaaaaatcatctcgtccactaagcggacagtcggaaatgagctttggaaacaagcccgtcgacggtggtcatcttctcctttccagagatgaagtcgatgcacttggcctaacgttagagcagcatgaccgcttcattcgtcgtatctatggatcttcggagttcattcgcggcttagaacgttattgcttatggatagaagattgcaacctagaggaagcgatgcgcatcgagaccattaggccgcgtattgaaagcgtgcgagcgatgcggttggcaagcagagacagtggtgccaatgaaatgtctgcgcgggcacaccagatgagggaaatgaaaattgcccaaacctggacgattactgttcctagaacctcgtctgagaaccgcccatttttacccaacgggttaatcgattctcgaagcaccgtgacgagcgaagccttcgctctctatgacgccccgctctggaatatggcactcatcgcctcacgcctacatttggtctggattggaactatttgcggcaaactaaaaaccgattttcgctactccaataccctcggctggaacaccttcccagtaccgatgctgaccgaacagaataaagctgatctgactgcctgtgccgagaacatcttgctggcccgcgaagcacattttcctgccaccatcgccgacctgtacgccccggatgcaatgccggataacctgcgccacgcccacgagcgcaacgatgaagtcctggaacgtatctatatcggtcgtcgcttcaagaacgacaccgagcggctggagaaactgtttgacctctacaccaagatgacagcagacacagcaaaggccacgccgaagaagccccgagggaaaatggcatga

SEQ ID NO: 332672 - DNA, 1074 bp, Pseudomonas aeruginosa
atgagtcgatctatggaaagtggccctgccagcctgaccacaccacccgagggctacggcgagtggctggcggatctcaaaggtcgcatccacaacgcccagcagcgcgccacgctggcggtaaaccgcgagttggtgcagctgtactggcagatcggcaacgatattttgagccgccaggcacaacagggctggggggccaaagtgatcgagcggctggcccatgacctgcgcaccgcttttcctgagatgaagggattttcccgcgccaacctgatgtatatgcgcgcctttgccgaggcctggccggatgcggcaattgtccaacaggctgttggacaattgccttgggggcacaacctggtactgctgacccggctgaaagacccacagcagcgcttggcctatgcccagagcgcaatagcgaacggctggtcgcgcaatgtgctgaacatccacatcgaaacccgtctgctggagcgcagcggcacggcggtcactaacttcgatgtcatcttgccaaaggcgcagtccgacctggcccgcgaatcgttgaaagatccgtatcgctttgacttccttggccttcgcgatgaggcgcaggagcgcgagatcgaacatgccctagtcaaacacgtcaccgagtttctgttggaactgggcgcaggctttgcgtttgtagggcggcaggtgctgctggatgtaggcggcgatgagttctttatcgacctgctgttctaccacctcaagctgcgctgctatgtggtgatcgagctcaaagccggcaagttcaagcccgagcacctgggccagcttgggttttatatgacggcagtggatcgccaggtcaaaggcgagcacgacaaccccaccatcggccttttgctctgcaagagcaaaaataagatcgtggccgaatatgcgctgggcgataagacccagcccatgggcatcgccgagtacaaattgctcgaatctctgcctgcagaactgcaaaccagcttgcccagcattgaacagatcgaacgtgaactggcgggcaacggcaccctcatggaggacgaatcacagtga

SEQ ID NO: 332673 - DNA, 1137 bp, Pseudomonas aeruginosa
ttgtcttcgtggctcaaccgcgtggccctttgctatcacatggaggtgtccgagctgctggagcacgatcttggtcacggccaggttgatgacctggacaccgcgccaccactggcgctgctggcgatgctctcccagcggagcggcatcgagccggaccggctgcgttgcatgagtttcgccggctgggtgccttggctactggacagccttgatgatcagattccagacgcattggaaacctatgcgttccagctctcggtgctgctgccgaaactccgccgtaggacgcgatccatcacgagctggcgtgcctggctgcccagccagccgatacatcgcgcctgcccgctctgtctgaacgacccggcaaaccaagccgtactgcttgcatggaagctgcccctgatgctgagctgcccgctgcatggctgctggctggaatcctattggggcgtgcctgggcggtttctcggctgggagaacgccgacactgcgccgcgcaccgccagcgacgcgattgcggtgatggaccggcgcacctggcaggcactgacgaccggccatgtggagctgccgcgccgacgcatccacgctggattgtggtttcggctactacgcacgctgctcgatgagctgaacaccccgctttcgacgtgcggaacctgcgcggggtatctccgccaagtctgggaaggctgcgggcatccgctgcgtgctgggcaaagtctgtggcgaccgtatgaaaccctgaacccggcagtacggttgcagatgctggaggcggcggcaacggcaatcagcttgattgaggtgagggatataagcccgccgggcgagcatgcaaagctgttctggtccgaaccccaaaccggtttcaccagtggcctgtcggcgaaaacgccgaagcccgaacccgtcgatcactggcaacgggcggtccaggctatcaatgaggcgatcattgaagcgcggcacaaccccgagacggctcgctcgctgttcgcgttggcttcctatggtcggcgcgaccccgcttcccaggaacagttgcgcgccacctttgcaaaggaaggcatccctccggaatttctgtcacattacgagcctgatggaccctttgcatgtcttagatag

SEQ ID NO: 332674 - DNA, 960 bp, Pseudomonas aeruginosa
atgaagcagagttttcacttgcattttgatcgggacttgaccagggccggttcagcgattctcagggaggcagtccgacgcgggctcctcagtcaacacgaggcaatgatccacgagcagcagtggacccagttcagtatttacgccaaggaatctcatgacgtggatatcctggagctcgtcaataaaaaactggggcggcaatacggcgaagaactctgcattcaggcgtaccacggcaatctctcgcggcaaggcgccgtgagccttcttgagaccgtgagctcggtgatggcccttgcaaccaatggtgattggaaagtcgtgatgtctgatattggctttccaggtcatgcacgggtcacggctccatacagccttgatcaagcgaagttcgaagccgcagtggaagacgttcaggcccgcctatcagagcatctcgcggtggtgttgatgttagtgcggcacctcggcttctcattgcgcgaagctgttttctttgacgcccaagcggctctagatacagccaagggggacggatgtatttccctggaaagcggcaaagaagggctatatacgcccaggacaattaacatctcgatgtccaagcacatcgctattttggagaccgcatccgccgtccaagatgttcatcgctatccacaatcaaagcaaacatggcggctctggaagcagaacagcttacctgccgccaaggagattttacttgctcatgggctgagcttccgagattgccgagcagcctttgcatgcgagctttacaagcagtggtgcggtcatgaagccccgattcttggaggcagcgctcccaatgtcgaggatctagaggcgcgggatcacgtcgcctacgagctcgggaatttgcgtatctgggaaactgatgcgtacgtcggtgcccgagccaacctgaggatggaagcttccggtattagtcgctaa

SEQ ID NO: 332675 - DNA, 366 bp, Pseudomonas aeruginosa
atggaatttcgtcacctcggtaacgggcagtacttcccacccattgcaccaaacggtcgggtttacgctgtacctcttgggcaggaaacccaggtagaaattttctgcctgagccctgtaggtatcatgggcgcgggcatccaattgcactggtcagaaatcgttggttgttactacgacgacgaatcctgggagatcattctgcgcaactattcgggacgaggaatgcgcttccgcagaggcctatcctgcatcatggtgatcgcaggcaacgaagccctcacgacacacatccagggctaccccattcccatttgcgtaatgaaccgcattgcattcgaacagcagcgaggcagtgaggggtag

SEQ ID NO: 332676 - DNA, 459 bp, Pseudomonas aeruginosa
atgagtaaagcacagacgatagttaccctgctggatcagcagtacgagcagttgcttgcggacgcgagatgcctggccgcaagctatatggatgcgtccatgaagatatacaaaaagaccggggtcaaaactgtcgtggctgctgtgtcaatcaagcaaacgagcccgaacgcgtactcgatctactggtgcagactggtgccattgcaagggcaaaaaaacaatttcgcgcccctgactattcctaaaggcaacggcaagcacaaatacccggcttcctcgtttgagtttgttaaattcccttaccgtcgcctcgttttacaggtcgaggagcgtcttgctgagattcgcagcatcgccagtgagaatcgtcagctgcgtcggacgttggtagcctatgagaaaaagctatctcgatatcaggcgctcgatcatggcgatctctgctcggaggagtag

SEQ ID NO: 332677 - DNA, 1806 bp, Pseudomonas aeruginosa
atgacaaacccattccaggaccgcgagccacacatcgagaacaacgaacgtatccgcaccccccagaagggtgttttcctcgccctgaacgaggttttcggggcgggtggcgaagagcgtgagttcgcggtcatactgccggtcggatgtggtaagtccgggagcatcacgatatcgccttttgccttccgctcgcggcggacgctggtggtcgcgccaggcgtggccatcgctcagcagttggccagtgatttcgacccgtccaatcccaatatgttctaccagaagtgcgcggtgctcgtcggcgcgccctatcctgaacctgtcgaaatccgagggatgacgaccaaccgggcagacttggacgaggcgcacgtcgtcattacaaatattcagcagctccagggcggcgactcaaaccgctggctgcgtcaactgccggccgactacttcgacctgattctggtcgacgagggtcaccacggcgtagccgagagctggcaggccctcaaggctcagtttcccgaagcgcagatcgtcaacttcagcgcgacgccgatgcgcgccgatggccagctcatggaggggcgcgtcatctacacgtaccctatcttcgaagcgatccgcgaaggctacgtcaaacgccttaaggccgtgcaactgaacccgcgcacgctccgttacgtgcgccgcgaagacggtcaggagatcgaggtagggcttgccgaggtacgcaggctgggcgaggaagacgccgatttccggcgcagcatcgtaacttctaccgaaacgctgaacaccatcgtggatgcgtctattcgtgagctacgccggctgcgcgaggaaactggcgaagtccgactgaagattatcgcctcggctctcaattacgagcactgccggcaagtcgtcgaagcctacgtcgcacggggcctgcgcgccagctacgtgcattcgcgagagaatgcgccggcgaaccagagagtgatgcagcggctggaaagccacgagctcgatgtgatagtccaggtgcgcaagctcggcgaagggttcgaccatccgtacctgtccgtggccgccgtgttcagcatctttagcaacctgtccccgttcgttcagttcgtcggccgcatcatgcgcgtcatacggcagaacgctcccggcgacgtcctgaaccagggcgtcgtcgtattccatgctggcgcgaacatcgccagacgctgggctgacttccaggagttcagcgaagccgaccgcgactatttcgaccagttgctgccggtggaggaagtcgatccagatcatgcccccgccgagcgacaggtggagccgattccccatgatttggacggcgtggaggtgcgcagccagtccgatgtgcacgtcgaggaaattccacttctgctggacgatgaggctctggcggcccttcgcgtgctgcaggagcgcggatatacagcgaacgacgttgcggctgcttaccagaccctgcagccactgccgacaactcgtgtacgcgagcggcaggcgatgcgtgacgggcttccgattcgagttcgaacggcagctggacggattctcggtgagcgggacatcaacccgaatggtcgcgagctcgatatgcgacgtctcggtaggacgaacttgatcgttatgattgctgccatcaacagtcaggtaaatacctttgtcggtatgggaacgggtcaacggcacgagttctcgcgcgagatgcacgagcggattgaccaaggatttgacggcatcctcgcggcagccgtaagggaggtgttcggtggcaattaa

SEQ ID NO: 332678 - DNA, 2379 bp, Pseudomonas aeruginosa
atgacgcatgatattgacctaattggagagttcgatcccgagtcctctattctcttcttaggctctgggttcagtctcggcgcgagcaacatcgcgaatggtaccccgcccaacggcagggggttgcggcgccactttattgaacaactcaaccttccagcggataccgactacgatctacaagtcctgagcgaggaatttgccgagcatgactctgagaagcttcgtgaagagctctataggatttttcggctgaccgagctaactgctggacaaacggctgttttgaatgagccttggcgacgcatctactcgaccaattacgatgacgcggtcgagttgcatcggttaaaaaagaaagtgacgccgaatgcctacgatgtctcggagccagttccgaacaagcttcctcacggcgcagtagtgcacctccacggcagcatccgactgatcacgcctgataatgtgatgaaaagcctggttctcggcgaagggtcttacgtgaaccagtatgtcgtgcgatcacgctggtacgaccaatttcagcgcgatctggctttcgcaagcaccctgtatatcgttggatacagtctcgccgattatcatattgcaggcctactgatggccaaccctaagcttgccgagcgaactatcttcatacaagggcccaccgtcgacgaaacgttcctgcgacgcactgcacagtacgggcgcactatgtttataggcaccgacggcttcgccgagattctagcgcgcgctccacgctcagttgctccttcactggataacctgcgctctttccgctcgctgtcacccgtacgagataagaaggcagtcgctcgtccgaccgctaccgaggtctttgatcttctagtctatggcgatttcgatcctggtcgccttgctcgctcgcaacccagtgaggagtacgcgattgctcgggcggattcagtgcgcgcggcggcggatactgttgagagtaaggcatcgctcgttgtagatggtcgtcttggtaacggcaaatcgatttttcttcatctgcttgcgttcgagctttcgtcgagaggatggacctgtctacagctccaactcggccacccagaccttcagcgtgaggttgcggcgctggccggggtcgaacgattggtcgtgtttgtcgaccaatattcggccgcacaggacagtttgcgcggccttcgcgatgctcttccacaggctaagctcgtggtggaagtgcggacggggacgttcgaggtccgctttcacgaattcgtaaagcttctgccccaaccgtttgaccgggtgagccttaacgctctcacacgatccgaaatagcctcgtttggccggttgtgcgagagtgcggggcttcgtgcacctgatctcgatcaccgtggcgatctacgcgaccttttgctcgatcttttcgaaaacgccgcagtccgcgaccgagtgaaagaggctctagcccccctgtttgaaaatagggctactcggcgaattttgactatgactatgttgatcgccactcatcaaggctccgtcggtgcctcattcgtgagaagcgtagtcggcgaggatccctttatggtgctcaaaccgctggaggatctatcgcatgaaattttcgagacgtcagctgatggtttcagggctcgatcgtctatcttctcctcgtttgtgatcgcagcgttcatcgggccagaggagatcgctgacgctgttgtcgaggtgacgctggccgctgcccagcggcgaagcgagcgatcgtatcgaattctcatgtcgagcatgattgcgtattcgagcttgcggagaaccctgcgcggcaagggagatccggacaccgtcattgccagcatctatgaacgtctgcgatacgacgagcgggtgaatggtgagccgctcttttggcttcagtatgcgatcgcgatggcggaaaaaactcggctcgatgcagccgacgaattcatcgccacggcctacagaaaggccgaagagcttcccggcttccaaacctaccagattgatacccaagctttccgcatcgctctgatgcgcgcgatagaggagagctcgggtcaggctattttcaacattgatgcggttcttcttgggattgagcggattgatgccatgctcggcgacgggagccaccgattctacgctgtgaaagtgcttgaatacgttcagccgtttgtgacggcacggcttggagatttggtgaatggcgagcggaccgctttgcagttctggcttctaaaggtggaaaagtcgctctctttgctgccagatgacttcaaggcagcagctggttctgaggtagtccgcaagagcgtcgaggcggctgccaagatgtttatcgaccaacgttaa

SEQ ID NO: 332679 - DNA, 405 bp, Pseudomonas aeruginosa
atgaaaaaggaaccgaaaggagcaaaaaacaggatagtcatcgccaaagatgagaagaacgttctgacctgcaccagcgaagggttcgaatatacgccagacatcgtcaagaacgtctacggaaagagcagccgacccgcactggaagactggttcctgacggaacttgatttctttcgcaggtattacccgggatacgaggttttcaccctcggctccagttgtgtcttcggcgaaaagttcgtgaactacctgaccatctgcgaattcgacatagacagtacctacgccttcgactgtctcaagaaggccctgagggagtccgaccaggccattaggcggaaactctccgccatgtggaaatgggacatagccgccaggaaggactggagcatcgtcttgtag

SEQ ID NO: 332680 - DNA, 1146 bp, Pseudomonas aeruginosa
atgagcatgaggttatttcccggccgcgtttccctgcgccgccggcctggcgcgcaggctcggcaggcgctcgttctcggcctctgctgcctgaccggcggccaggcctgggccctgaacgaggtcgccctgaactgctcgttcggcaatggcaaaggcttgccctggcgtgtggtgaacgagctgaccagcggcacggcgaaaggcacggtgctgttcgccaggccggtgagcctgttcctgagctacaagccccaggcttcccaggaggcgcatgagctggtcctcggggggaactggtccggggtgggctatccggggccctacggcacggtggcgtccgacgtcaaaggcatcggctatcggatctcggtggatgcccaggacggcgtcaagcgggtgattccggtcgacaaccagccccatgcgctggacaagcgagtcacgagcttttccggaagcacgaccagcgactacctacaggaactggtcctgacggtcgaccccggcgagttgcctgccggcgacctgaaggtaaccagcgtatccggcagcgccaccctgaatctctgggcggtggacaggctgaagggcgaagcgtccatcggcagcgtcctggcggtgcctgcggacaactaccccaccggggtttgccgaaagccctattcgctgatcggcccggcctccatcgctatcggcggcggtcccccgccaccgccgatagcgaagaaatgcaaggtcgaggtgggacgggaaatcaacgtcaaactgggtagcgtcgcgttgaagaacttcccgcgggtcaacgacacctccacggagcgctccttcgatatctctctcagcgagtgtgcggcgctggccaagccggaaatcgctttccgcgacaagtatgtctcggcgcagcaagcggacccgacgatcctcagcttgaagagcggcggcgcggcggggttcggcatcgtcgtgaagaacggcctggaccagcagcggatacgtttcgacggcacgccctacccgatgcggcgtgtcggcgacagcgccgacctcccgctgagtgccgcctacatccgtatcggcgcggagggcgaattgaaggccggggtcgccgacggcgccgccgagttcacgtttaccttcccctga

SEQ ID NO: 332681 - DNA, 375 bp, Pseudomonas aeruginosa; identical to SEQ ID NO: 320265

SEQ ID NO: 332682 - DNA, 1092 bp, Pseudomonas aeruginosa
atgcaggccgccgccgaggtcgaggttttccacctgccggcgcatcgccgcgccatagaggaacatgcagcaggccaccccgaccaaccccagggccatcgcccgcggcagggtccgcgaagcgtggcgcacctccggcgccagcggcgtgacgaattcgcaaccgacgaacatgaacatcgccatgcccaccagcgacagcagggtcggcaggtcgtcgccgaccatcgaggccccgaaccagccctgcaactccaccgcgggcaggcgcaacaggccggccacggcgaagatcatcagggtgctccacatgccgaaggtgaggatcacttcggcgcgaccgaaggcggtgatccccagcgcattcagcaggccgaagcagagcaccatgccgacgcccaccagccaggcgccgccgcccggctcggtaagggtattcagcgactcgaagttgaccagcgccatggtgccgctgagcatggtctcggcggtgccggcgaacacatggacgatcaggtaggccgacagcgtgccggtgatcgcgaagaagcgcccgaggccgcacgacaggtagtcgtagaccgagccacgggtcggcagcaggcaggcggcctcggcgaaggtggtggactgcgccagcatcagcagcagcgccaccagcatcgccacggcgaaggttccgccgcccaggccgaagccggtggtggcggtgaggatcaccgggctggccatgatcaacccgaccgaactggccagggcggtggggaaaccaacccgcccgcggagcaggtgctgggtgagtctggaattggacatcgacgtatcctcgacggcagcgttgctgttgttgttcttgcgtcaggccctgccagggcgcgccaggcgccctgcgggacgcgccggcgtcccgtacgctccgccggcaggcgaagcgtgtcgaacaaaaggctgccgcggagggcagcgaaagagccgaacgaatcggctcaccccgatttcatcgatatcagtaggcgatgcacaccgacttgttctcggtgtacgcctcgatcgccgcatggcccatctcgcgaccgatgccggactgcttga

SEQ ID NO: 332683 - DNA, 579 bp, Pseudomonas aeruginosa
atgtccgcctgggcgcgctggtatgagcgccactggcgcgactggcggccagccgcctatcgccccggagccaccctggccctggtgcggcgcaacctggctgcgtgcgacggcgaggcgcaggacggcaggctgttgctgcgtacgaaagagctgagcctcgaggttcgcgagcgggtccaggcgcacctgttcatgcatatcgtcagcaccgagttcagcctgttcgtggcggcgcccggggggccgccggccagcctggagctgcgtcacgccggttgcttgcggcgtcgcggcatcctttgcaaggtgcgcagcgggagcgggctcgagccgttgcgggaggccttgcaggggggcgaccgggccttgctggagcagctcatgccgctggacttccggagcttgcgcctctgccgcgacgacaggggctggaccgtgagcctggaacacctgggggcgtgcgaggtggtcaaccgcttccccgcctatcgccgctacatccctctggtcgccgagcagcgcctggccctgctgggcgccttcgcccaattgcagcgcctgctttctcccgcctga

SEQ ID NO: 332684 - DNA, 1299 bp, Pseudomonas aeruginosa
atgaacctcgactccactgccctcgcctatcaatcgggcttcggcaacgaattcagcagcgaagcgctccccggcgccctgccggtcggccagaactccccgcagaaagcgccctacggcctgtacgccgaactgctctccggcaccgccttcaccatggctcgcagcgaggcccggcgcacctggctataccgcatcacgccgtcggccaagcatccgccgttccgccgcctggaacgacagatcgccggtgccgaactggatgcgccgacccccaaccgcctgcgctgggacccgctggcactgcccgagcagcccaccgacttcctcgacggcctgctgcgcatggccgccaacgcgcccggcgacaagcccgccggcgtgagcatctaccagtacctggccaaccgctcgatggagcgttgcttctacgacgccgacggcgaactgctgctggtcccgcagttgggccgcctgcgcctgtgcaccgaactcggcgcgctgcaggtcgaaccgctggagatcgcggtgatcccgcgcgggatgaagttccgcgtcgagctgctcgacggcgaggcacgcggctatatcgccgagaaccacggcgcgccgctgcgcctgcccgacctcggcccgatcggcagcaatggcctggccaatccgcgcgacttcctggccccggtggcgcgctacgaagacagccgccagccgctgcaactggtgcagaaatacctcggcgagctgtgggcctgcgagcttgaccactcgccgctggacgtggtcgcctggcacggcaacaacgtgccctacaagtacgacctgcgccgcttcaacaccatcggcacggtcagcttcgaccacccggacccgtcgatcttcaccgtgctgacctcccccaccagcgtccatggcctggccaacatcgacttcgtgatcttcccgccgcgctggatggtggccgagaacaccttccgtccgccatggttccaccgcaacctgatgaacgagttcatgggcctgatccagggcgcctatgacgccaaggccggcggcttcgtgcccggcggcgcctcgctgcacagttgcatgagcgcccacggcccggacgcggaaagctgcgacaaggccatcgccgccgacctcaagccgcacaggatcgaccagaccatggccttcatgttcgagaccagccaggtcctccggccgagccgtgccgccctcgagacgccggccctgcagaatgactacgatgcctgctgggcgtcgctcgtatccaccttcaacccgcaacggagataa

SEQ ID NO: 332685 - DNA, 213 bp, Pseudomonas aeruginosa
atgaaaaacaaagttgaagacctccgtaatcatctcttcgccaccctcgaagggctgcttgataaagacgaaccactggatatcgagcgggcgaaggcggttgcccaggtgagttcggtgatcatcgagtcggccaaggtcgaggtgaaggccatggagttgctcgacgccaatggcagtaagtttctccagatcggtgaggaaccccggtaa

SEQ ID NO: 332686 - DNA, 537 bp, Pseudomonas aeruginosa
atgctctaccacaaggccgaacagctcggcctcagaaaaacggcagccttcctcgcgagtccattgtcccgccgtctgaatggctcgcagggctccgggcaccggttcgccaagggttccactccctggaacaaggggctcaaggggttgccttcgattgggcgtagctcggaaacccagttccagcctggcagcaagcccggcaattggctgccaattggcagtcaccggctgagccgggatggctacctgcagcgtaaggtcacggatacaggctatccccccaaggactgggtagccgtccatacattgctgtgggaagagcacaacggcccagttccagagggacactgcctctgcttcagagacggtaacaagcagaacatcaccctggacaatcttgaactcatcacccgcgccgaacgtatgcggcgcaacaccattcaccgctatccgccggagctaaaagacgcaattcgcgtggtcggcaagctcaagcgcaccattcgggagattgagcatgaaaaacaaagttga

SEQ ID NO: 332687 - DNA, 825 bp, Pseudomonas aeruginosa
atgaatttcgcgcggcgctacagcgtcaccccgttgctgctgttccccttcctcctcctgttcctgccggagtcgctgccgcgcctgctccgcgacgcaccgccctatgcccgcctacgccagctcagcgagcgcatggcgccgggctggcagccgccgccggcacaggccgacgccgagccggcggcgagcctgaccgtgctggagctgttccgccacggttacgcgcggccgaccctgctgctctgggcgaccttcttcgtcagcctgatcctgctctacttcatggtcagttggctgccctcgctgctccaggaaagcggcctgacacgcaatgcggcgaacctggcgacctcgatgttcctcttcgccggcaccctcggcgcgatgctcctggcctggctcgccgaccgcctgcgcagcaaggtccgcctgctggcggcgattctcgccggcgccgcgctgttcaccctgctcctcggcctcaaccacgaccagccgcgctggctgctggcgttcgtcttcgccgccggcttctgcatcatcggcgggcagttgaccctgaacgccttcgccagcaacttctacccggcccaggtacgcgccaccggcaccggctgggcgctgggcgtgggccgcttcggttcgatcctcggcccactgttcggcagcctgctgctgggcatgcacatatccgtggagaacatcttcatgcttgcggcgattcccgccgggctcgccgcgctactgatcctccaggtccgctcgcccgccgcccaggcgcagcgggaaagcgccgccgcgctggccgtcgaggaatcctga

SEQ ID NO: 332688 - DNA, 1425 bp, Pseudomonas aeruginosa
atgaccgctatccttcccatccaagaaagccgctccgcgcgcttcgccatgcgttgctcgaactgggccgagcgctggtttcccgactcctgggtgttcgccgccctggccatcctcatcgtcagcctggccgcgctggccatgggcgccggaccgaccgccacggcgaaagccttcggcgacggtttctggagcctgattccgttcaccatgcagatggccttcgtggtcatcggcggctatgtggtggccagttcaggccccgcctcgcgtctcatcgacctgctcgcgcgggtgccgaagaatggccgctcggcggtctgctgggtggcgctggtgtcgatgctcgcctcgctgctcaactggggcctcagcctggtcttcggcggcctgctggtacgcgccctggcgcgccgcagcgacctgcgcatggactaccgcgccgccggcgccgcggcctacctcgggctgggcgcggtgtgggcgctgggcctgtcgtcgtcggccgcgcagttgcaggccaacccggccagcctgccaccgtcgatcctggcgatcaccggggtgatcccgttcaccgagaccatcttcctctggcagtccggggtcatgctgctggcgctgatcctggtctcgctggtgatcgcctacatgaccgcgccgagcgccgccagcgcccgcgacgccaaggattgcggggtcgacgtgagcttcaccgctccggccaggctggcgccgacccggcccggcgagtggctggagcacagcccgttgctgatcatcctgctggtactgctggccggtggctggctggtccacgagttctcgaccaagccggcgatcctggcgatctccgggttgaacacctataacctgctgttcctgatgctcggcgcgttgctgcactggcgcccgcgcagcttcctcgacgcggtggcgcgcgcggtgccgaccaccaccggggtgctgatccagttcccgctgtacggctcgatcgcggcgatcatgaccacggtcaacggcagcgacggcgagaccctggcccaccatatctcgaccttcttcgtacagatcgcctcccacgacacctacgcgctgctgatgggcgtgtactcggcggtgctgggcttcttcattccctccggcggcggcaagtggatcatcgaggcgccgtacgtgatgcaggtggccaacgagctgcaataccacctcggctgggcggtgcagatctacaacgccgccgaggcgctgccgaacctgatcaatccgttctacatgctgccgttgctcggcgtgctggggctgaaggcgcgcgacctgatcggcttctcgttcgtccagttgctggtgcacatcccgctggtgctggtgctgctctgggccctgggcagcaccctggcgtacatcccgccggtgatgccgtag

SEQ ID NO: 332689 - DNA, 3342 bp, Pseudomonas aeruginosa
atgatggatcgacagtccaacttttcacatcttgtgtcgcttagcccggagctggcaaagctaggttcgcgggccgagcaatattttaaagaagatccaaacactagcctgctcaagtcacgccagttcggcgagctgcttgctcaagagactgcggcgcgatttggcaagtacaaggctgaaaccgagcaaacccagcaacagcttattcagcagctaggccggcttggcgtcccgcgtgaagtgacggacctattccatgttgtacggaaactgggcaatcgcgcgaatcacgaatttgctgacgatttacgcctggcgcttcaggcactgaagttcgctgcgcagctagggctttggttccaacgcacctttggtaaggagaacttcaaatccgggcctttcgcaattcccgaggccccagtagtcatttctgatgaggtacagaaggaactaacggcgctacgcgcacagaaggcgaaatttgacaccgagctaacggtcgctcaaacggaagcaagtgtggctaaccagcgcgctcaagctatgcaagaggaagcgaggctttgggaggtgttggctgctgaagaggaggctagcaagcagcagctgcaagcaaagctagctgaactccaggcacggggcatggccaacgcattcgccacgccatacttgcagcgtgctctcgcggccgcgtccaaggtggaaatggacgagtcagccacgcgagtgcttattgacgctcagcttgctgctgctggttgggaagttgatacggtcaatctgcgctacagcaagggtgcccgtccggaggcggggcgctttaaggccattgctgaatggccaaccgacaacggtccggcggactatgcgttgttccatggactagagttgctcgctctggtggaggctaaacgagcaagtcgcaacgtatcgggtgatatcgaccaggccaagcgttatgcccgaggtgtgacggcaactgactgcaaacttccgggtgggccctggggtaaatttagggttccctttgtttttgcgagcaatgggcgcccttatctgaagcagctcgaacatttgtctggggtgtggttttgcgatctgcgtcaggccaccaatttgcggcgtgccttggatggttggtacagccctgaaggacttaaggagctgctcaagcaagacatcccgcatgccgaaatagaactggaaaacatgccgttcgaattcggtttcgacttgcgtggctatcaacgcaaggccatcgaagcggtagaggaaagcctacgtgaaggtgagcgctactgcttgcttgccatggctactggtaccggtaagaccaaaacctgtatcgcattgatctatcgcttgctgaaaactcgtcgtttccgccgagtgttgttcttggtcgatcgagccgctctgggtgagcaggctgccaacagtttcaaagacacccgagtcgatactttgcagaccttttccgatgcctttggcatcaaggaaatcgatgaggccgtggctgatccggaaacttgtgtgcatatcgccacagtgcagggcatggtggcgcgaattcttggaaacgaaccggacaaggtaccgtccgtggacgcttacgattgcgtgatcatcgacgaatgccaccgtggttacctgctcgatcgtgagctgtcggaaaccgaattcagtttccgtgaccagcaggattacatctccaagtaccgtaaggtcgtcgagcatttcgatgccgtgcgtattggtatgaccgctacccccgctctgcatacctcggagatctttggtcatccggtttacttctacacctaccgcgaagccgttctggacggtgtgctggttgactacgatccgccgtgggtgattaagaccgaactgtcggagaacggcattcactggaaagctggcgagaaggtgcaggtctactgcccagatacccaagagattgatctgttcgaaaccccggacgagctctcctttgaagtaaccgagttcaacaaaaaggtcatcactgctccgttcaatgaggcggtttgtggcgagctggttaaacacatcaacccgttcgggccggataagacgctgatcttctgcgtcactgacgagcacgctgacctagtggttgataggcttaagaaagccatggcccagaaataccccgatgaggtaggtgatgatcacatccgcaaaatcaccggccagtcggacaaacccttgcagcagatacgcgattttcgtaacgagcgcctgccagccatagccgtgaccgtggatttgctgactacgggcatcgacgtgcccgctatctgcaacctggtattcctgcgcaaggtaaatagccggattctcttcgagcaaatgcttggccgcgcgactcgccgttgcgaggtcatcaataaagaagtgttccgcgtgttcgatgccgtgggcacctacagcgacatgttgcagaacaccaacatgcgcccagtggtggtcaacccgaacatcagtttcagccaactcagcgaggaactgcgtgagcagcaaggtgaacaagctcagacactgatccgtgaccagttcttggccaagttccagcgcaaggcacgccacttggatgagcgccagcaggttgcactagaggaaggcgttggcatgacgcccaaggaattcggcaagtttctcaaggaaaccccgctggtccaggttgtccaatggttttgtgataacccttggctcggcgagctactggatgccaaatcgggcaagccgcgcgatgccattccgatttctcagcagcccgataaaatcttgggtgtcgcgccttattttggcgaggcggatgactacctggatcgcttcgccagttaccttaaggaccatggcaacgagattccggcactggttgctgtgctgcagcgtccgcgtgagctgacccgcgccgatttgaaaaaactggcggttaccctgcaaattgccggcttcgatgagcgctctctgggcaccgcctgggcgcaacgcagcaacgaatccatagccgccggcatccttggctttatccgccaggcggccctgggcgacccgttggtacctttcgagcaccgtgtcgaccaagcactcaaccgcattcgccagcgccacccagagttcagcgcgttacagaaacaatggctgaacaagctgggcaagcagctcaagcgcaatgtggtgctggaccgcgaggtgctggatagcgggccgctggccgaagagggtggtttcggacgtatcgatcgcttcttcgatggccacctgcaggagctgctggccgagctcaacgaagccgtatgggcacagcaagcctga

SEQ ID NO: 332690 - DNA, 1545 bp, Pseudomonas aeruginosa
atgagccaagttacccacgatatcgtccagaaactctggaacctatgccatgtattacgcagcgacggtgttacctaccatcaatatgtaaccgagctgacctacctgctgtttctaaaaatggccaaggaaacgggtcgtgaggatcagttgcccaaaggctaccgttgggatgacttggagaccgccgcagcccgcgccgatctggacttctatcgtgccctgttgattcacctcggcagcaaggacagccaaggcagcgccatcacccggcagattttcgctagtgccggctcctttatccgtaagcctgccaccttgaccagtctggtcaaggccatcgacgagctggactggtactctgcccgccaggaaggccttggcgacctgtatgaaggcctgctggaaaagaacgctggagaaactaagtctggcgctggtcagtacttcaccccgcggccattgatcgacagcattgtcaaatgcatcaagccgcgtctattcgagaccattcaggacccggctgcgggcactggtggcttccttatcgccgccaaccactacctggccgagcatgctgatgttagtggcctgagtgtcgaggagttccagcgctaccgccgtcagttccatggcatcgagctagtgttggacacccaccgtttggcattgatgaacctaatgctgcacaacctgcagtccgatggtgagactggcgtgcgcttcggtgacaccttgtcgccggatggcgagaaattaccgccagccgatttgatcgtcagtaaccctccattcggtactgccaagggcggcggtctaccaagtcgtggtgatctgcgctacccaaccgccaacaagcagtttgcatttctccagcacatctaccgaaatctcaaacctggcggtcgcgccgcagtagtgttgccggacaatgtgctgttcgaggccggcgtgggcagcgatattcgccgcgacttgatggacaagtgcaatctgcacaccatcctgcgcttacctaccggcattttctacgcgcaaggtgttaagaccaatgtgctgttcttccagaagggcagccccagcgatccgcagcaggatcaaggctgcacccagcgcacctggttttatgacatgcgtagcaatatgcccagcttcggtaagcgcacgcctttcggtgcggctcagctcaagccatttgaggaggcctacggtgatgaccccaatggcaatagcccacgtgccgagaatgtcgagggtgtcggtgagcttagtcgcttccgctgctttacccgcgaatttattcggaatgaacgcggtgactcattggatatcagctggctgaaagacgctgacagtttggattccagtgacctgccctcccctgaagtattggccggcgaagccatggctgaactgacagaggccctgcatgagctcgatgagttgatgaaggcacttggcgcaggggatgaggtgcttgcccagaagcaattgttggcggagatgttgggtttggagatggtcgaggttcagggggatgagtga

SEQ ID NO: 332691 - DNA, 1344 bp, Pseudomonas aeruginosa
atgagtgagttgccgcaaggttgggcccgtgcagagattggccagctcagcgagcttattaatggtcgagccttcaagccgcaagagtggtctgaatcagggcttccgataattcgcattcaaaacctgaacaacgccgctgctaaattcaatcacttccaaggtgaattgtcagatagacacttggtgagaaaaggcgatctgctttttgcttggtctggtacgccaggtacttcttttggagctcacatttggcgtggagagaacgcagccctaaatcagcatattttcaaaattgagtttgatgaaaaggaaattgagcgtcgtttttttcgttatgccattaatcagaagcttgaagatttgattggttctgcccaaggtggggtggggctccgacatgttactaagggtacgtttgagaaaacgcttattgcttttccttcacgtgaagagcaagcccgtattgctcaaaagctcgatagcctgctggctcagatcgatgcacttaaaaaacgtattgatactatagctcctctgcttaaacgctttcggcagtccgttctctccgccgccgtttccgggcgcttgacggagagctggcgtgaatctaatgccttaacaaggcagggtgtaaaaagttgggaaaaaacaaattttggggctatttgttctgaaatcactgttggctatgttggcaaaatggctgatcaatacacagaagcaggcattccatttctgcgctctcagaatgtccgtccatttagattctcaaagacaaaccttctttatgtgtctaaggagtttcacgagagcatcgctaagtcaaagttgttcccgggggacctggctgtagttcgctctggtgcgccgggagtgacatgcgtaataccagatgagttagaggttgccaactgctctgaccttgttatcgctaggccctcagaaaggcttaactctcagttcggctgcatatttatgaattctgaggtcgcgaaaagaaacgtcgcagaaaatcaagttggggttgcgcagcagcacttcaatgtggggtcgatgaagcagatgccaattgagcttcctcctattgaagaacagctggaaattgtcaggcgtgtcgatcagctgtttgcttttgccgacttgcttgaaagcaaagttaaaaccgctaaggcacgtatcggcctgttgacccaaagcatcctggccaaagctttccgtggcgagctggtaccgcaagaccccaaagacgagccggctagcgtgctgctagaacgcattcgcgcccagcgtgctgcacagccgaaggcgcggcgtgggcgtaagactgttgcaggcaattga

SEQ ID NO: 332692 - DNA, 1044 bp, Pseudomonas aeruginosa
atggccatctggttggtacgggcgggttccgctggggagttcgaggacaagtttatcggtgaacgtcgggtctatgtgacctgggagggcttggatgtaaatctcaccactttgacgcagcgcgagcagttacattcagctttggccgagcgcttccctgatgccaaaccgaagaaactacagaactggaccagccaagtatggccattctcccaacgtatgcaggtaggggattgggtggttgtgccgctaaaaactcaaccggtgatctatatcggcgagattgtcggggactaccagtttgccggcgaaggccccgatccgttcttccattggcgttcggtgaagtggataggcgaggccattccacgttcgcacttttcccaggatctgctctacagcttcggcgcctttatgaccatctgccgtattcagcgtaataacgccgagggccggctcaaggccatggccgccaatggttggcagcctgaatccttgcagcaattggtcaaggacgaggccactgcctcggatgaagtggctgtggaacaggcggaaaccgacctggaacggaccggcaaagaccatatcgtgcggttgatcgagcgccgcttcaaaggccatcgactaaccaccttggtggcggccattctgcgcgcccagggctttagcgtctggcaaagcccggacggtgcagacggtggcgtggatattttggccagcaatgggttaatgggttttggcgaacaaaacatctgtatcgaggtgaagtccggcactggactgatcgaccggccgacggtagacaagttattaggtgccatgagcaagttcaacgccagccagggccttttcgtcgcctggggcggttaccgcagtaatgtgcagaaagagctggcttccagcttctttcgcctacgcctatggaatcaggacgacctactggaacagctattcctgcactacgaccacctggacgaaagtatcaagtcagaactgccgctcaagcgtatttggaccgccgtgcttaccgacgatgtttga

SEQ ID NO: 332693 - DNA, 585 bp, Pseudomonas aeruginosa
atgatttggtgggaaaaaacggtcgagtacaatttcgtcgcgcgtctggcgcgtatgagtcaacagtttttggctccacttgacggagaccatgaaagggctggagatgccctactggcaatcgcgagcagctggactcttattgagttcaagaaagacatcgactccatcaatcaggagctgacaaaattcgaaagatacaacgatgcgcacaaagctttgagtgagatcgacgatcatcatttttttatctttggcggattagacgatagcggatttgatctctatgccacgacctatttttccgaccaatattgtgaagtttattcaatacctgaaagaggagtggatttcgaatctttcaaagcctatattgaggcattcattgaatacaagaagccaattaaaagaagacaaggcggcaaacgcatgaaggcggaggactatgcaatggtggccggaatcaactcgtcgaatgaaataatccagtgcctatccttgtccgagttcaatattgtgtttggcctggatcaagagctcaatcaacagcaagcattaacctttgagcccggttcatcgctctag

SEQ ID NO: 332694 - DNA, 1128 bp, Pseudomonas aeruginosa
atgtctgagttcgaattagtccccgatgaccagcaggaaaacgaggatgacattgccgctccagtatcattcaaagatgctgtagttctcaatgccgattggactattgagacaatcaatcttcagatccaaaagggcaatattgatttgcaacccggatttcagcggcgagtcgcatgggacgacgaaagaaagagccgcctcattgagtccattattgtagggctccctgtgccaaacattgtccttgcagagaacaaagattcccgaggaaaatttattgtcatcgacggtaagcagcgacttgttgcggtgagcgagtacatgcaaagccagtataagctgaaaggccttgatatgcggcctgacctcaatgcgaaggccatcaatgaactgcctcaagaagatcgtgagcacttggagaatgcaacaattagggcgagcgttattagaaattggaaggacgaaaatttcctctatgttactttctttcgtctgaatagtggcagcttacccctttctccgcaagagcttcgcaaggcattgattggcggaaatctaattagcgctattgatgattacatgctggggagcgccccatttaaagccatatttgggaatggcttggacaaaagaatgagagattcggaattggtgctgcgattcgtagcgtacgaccgatctttagccgaatatcgaggcgacttcaaagagtttctcgatagcaatacacgctactttgaaaatgattgggggagtaagttaccggagatcgaagatattttccaacgactagatgtcgctcttgacgcagcgtacaacgtattcggtcaagacgcatttagaaaatggattggcgacaaatacgagcgcgtcatcaatcgcgcggtatttgactgtatatcccgcttttttgcacagcgcgacgtggctgctgaagcaattgcgcgcaaattagaggttgtcgaagcttttaaagaagtatgccaggttcaagtttttaaagactcgattgagaaaacacctaaaacagtcatggcgacttttcaacgcgttgatctttggggtgaaaaactagctgcttgcttcggaagaggttacgataaagttacgcacaggatcatttga

SEQ ID NO: 332695 - DNA, 615 bp, Pseudomonas aeruginosa
atgccaacccaatgtgccaattttgctcacttggaagcaaggctcactgatctgagggtcaaatttttagatgctcaaatcaatgctgaaacaaatgatccaacaacattctcgcctgacttggatagcattgctgcgtttaggctcttaatacatgcggagattgaagattttttagagcgaaaggcgaaagaaaatctagatagaatagaactccagttggtgaaatcagcgactggctcgtctcggatttttccagagctattttatatagcggctgtaacaaatcgtccgcttgacgccgttcttgcgtttgatgtgggggctttaaaaggccatatctcaggcataatcggaactgcacgaggcatgatcaaagagaataatgggatcaaggaaggatcatttaatactctgtcggtttttgcaggaaagacagcggacgaagttgactcgactctttcggcaagtcttaacagctatggaaaaagtcgaggcgatgtggcgcatcaaagtacaaggcactcttcgactattaatgcgcccagcgctgagttcgcgtctgctaaagacttagtggaggggcttgccttatattttgatttgacgagttag

SEQ ID NO: 332696 - DNA, 1077 bp, Pseudomonas aeruginosa
atggtgctgggtgatgaccaacacatgctcctgcccagccagcgccagcagacgcacgcgcagcagcggcccacgagccaggtcgaatggctggcggatttcctcggccacccgctggcgcaacgttgcttcgctcgccccggcgcaatcctccaggacaatgcgcaacggcatgttcgccaggatcgtctggcgcgcctgaccgtcgacctcctcgaagcgggtgcgcaaggtctcgtggcgcagcaccagccaatcgaaggcctgctgcaacgccgcctggtccaggacgccacgcacgtgcagtacgctggggagatgataggccgcgctttcaggctccagtttccagaggaaccacatgcgttgctgagcatgcgacaaaggcaactcggcgactcgcggcaatacttgcagcacaggggcagcgctcgccgcctgggactccagggaagcggcgaagtctgccaggaccggccgctcgaacaggatgcgcaagggtacgtccagctccagatcctggcgcaggcgcgagaccacccgggtggcgctgagggagtgaccgccgagttcgaagaagtgctcgtcgcgggcgatgccctcgacaccgagcagcgcctcccagatcgctgcgaccgaacgttcgagcccctcccgcggaggctctccggcctggtggcgggcagccgcgtccaccttcggcagcgccttgcgatccagcttgccgttggcgttcagcggcaagctggacagcacctgccaagccgtcggttgcatgtacgcaggcaagcgcccggccagccaggtgcgcagctccgccagaaggtcctcaccccgcatagcgtcacgccccaccaggtaggccgccagcagcggactaccgacgccatcctgcgccacgaccgctgcttccgccacatacgggtgtgcaagcagttggctctcgatttcgccgatctcgatgcggaaaccacggatcttgatctgctgatcggcgcggccgagatattcgacctgaccgtcgacgcgataacgcgccaggtccccggtgcgatacaggcgctcgcccgaacctga

SEQ ID NO: 332697 - DNA, 954 bp, Pseudomonas aeruginosa
atgagaagcaacaagcgcagcattcttacgcccgcggctccaatccttatcggaagcgccagatcctattgggcaacccacttttacagcgttttgaagtgtattgactcgcacaagcagctcgcccattcgcctcggaagttcaaagagttcccggtgtggaccttgagcttgttgagggggaatctccccctcaatttcttcaacgaagttgagtcgtatgtacagaattggggagtgcaatacttcctggccagcttcttcaaccaaaagctcggaggacacctcgtcattgagctcctcgagcggctggaggacttgtatgggatctgcttcaacagggacctggactcgttcgccttccatatctcaggaagggactctgcccttagccaccgattgaatgacagattcaccgaaatttttccttttcacgcgtctcaagattgcgtgtcaaatctcatcgcctactccgacctgtgcctgatcttggacaacagcttcaatggcggggcagtggccattttcggcgaggtggagggaatctatggaaccaagttccggagcgagaagtactggggcgctaaacaggaattctgtgtctttggaatcggtaccgtgcagggcaaccagaagcaaatctggtttgaagagactcgccacaatggtgttgaccgagtcctcttgatgatcgaaaagtcccatttcatcgtgatggatttctcgcagacaataaggtgcttgaaatggctcttcctgaatgggcccgagtttgaggacttcaccggcgatgacgagtttaggtggtttgccaatgagattagggcgcggtggtctgaccctatcgagtcggtcttcagcttcttggaaggttatatcgatggcggcgatctggtcggcttcatcaggaacaacgatggacctgcaatcatcacggacgtacaggccctctga

SEQ ID NO: 332698 - DNA, 1098 bp, Pseudomonas aeruginosa
gtggcacccagagacccggtaaaaacgcagcgcaatcgccagattaacgaactcacggcgcagataaatgaactcaaggaggacgtcctagagatcaccggctatcccagcgaacattcgttgaacgccacctatggcgggaagcacgctgagtacatcgacatcaagaacgaagtcatcgattcgcccgagcagttcatcgcgctttatctccgcgggttcctcgaggttctggagaacctcggacctgcggcgcggcctggcaacccctattacgacgcccacgcgcatatcaagaactccaagaaggtgcgtcgctggttcaagctgttcctcactcgaacctacctgcgtcagttcgatgctctggcccgcaagcgtccggaagtggaagatgcggagatatggataggtcagaagaatgcgtcctacggcatcctggtgaccccccggttcaagaacggagcctgggagaacgacaagagtgaaattcgacatttcaagccgaactactggaccatcggccacatcctgcagaccggattcgtgttaccggatgaagatgagcgcatggacttccactccatcgaccactatctgaaatttttccgccagaccttggtgcgcaactcaggctccgagcatgaaaaggcgattgccagccgctactgcaatttcgtgctcaatagcgagaacccactggatgtgccgctgctgattccagagctgcgctatggtggaaaggtggcgcgccatgagcatcgcctcgacttcaccatcattgatccttttaccctgtcaaaggtcggattcgagctttcgccctggtcaacccatggcaggctggagggcacccgtgaaaagacccaaaagcaaatcaatgaagaggcgcaggcaaactttgagaaggagatgcgcaagctcaaggcctatttccgcaagcgtggcatccccatcattgtctacacagatacagacctgaaggaccccgatgccatctttgacgagattgcggcgtacttgtctcccactcgcaaggccaagcagttggagttccacgccatggaggacttcctggcgttcaaacccggtcgctag

SEQ ID NO: 332699 - DNA, 546 bp, Pseudomonas aeruginosa
gtgagcgatacgcccgctgaggtctgcgaaaacctcctggcacgggcactcaccaatgacgatctggtcgcgttcctcgtcggcgagcagccctatttcatcgaaagccatagcggcgaagaggaaccgcaggacgtgtgccgggccatcgagcgctgcttgttgccatgctggcaaagcggtcgttttccctaccttccccgccgcttcgccgacaccctgctgaagatcctcgccacctatcccgatcgcaaccgggcgatctacgtcgcccagaactggatctggtactaccgcttctgcctgtcgaagaaacgcgcgaatccgcagggcccctacggtgatctgttcgaggtcgacctcggcgccgtcgcggtcgcgctgaagcggcagctcgaggcgaacaaggacgaactgatccgcgacacccgctgggcgggcgctacctggaacagcagcaacggcctgtggggtccgctcttgcgcacatccacgacggtacgcgacaaactcgacgggccggatttcgctcccgacaccccgtga

SEQ ID NO: 332700 - DNA, 207 bp, Pseudomonas aeruginosa
atgaatctgcaaacctacctggtcagccgcgagcacgtcttcagcatcggtatcgagaccgactccggcctgatctacgtgcgcttctacggcacagcggaatgcccggagccggtggcgtatcacaaccggctgttcaacgacgcgttgcgcttcggccgggagatcagccgcgaggaatatgaacgcggctttcccttccgctaa

SEQ ID NO: 332701 - DNA, 510 bp, Pseudomonas aeruginosa
atggccgaactgaccctccaggagcgcctgcagccgtcgctgctcgaccgcctcaccgacgacgagccgggcaacctcaaggaagccgcggagcgccgggtgctgaccctgagccagctgaaggcctcggtgctgcgcgacctggcgtggctgttcaacaccacttcgctgttcgaccacggccccgccgcacggatgccggccggcaactcggtgctcaactacgggctgccggcgctggccgggcacaccgcgtcgagcgtcgacgtgcatgccatcgaggcgctgctcaccgagaccatcgccaccttcgagccgcgcatcatccgttcttcgttgcgggtgcgcgcgcaactgctgcccggcgagatggaccacaacgccctgagcttcgagatcgagggtgacctctgggccgaaccggcgccgctgcgcctgctgctgaccaccaacctggacctggagaccggccacgtgcgcgtcgcccagggcgagcggaggcgtacatga

SEQ ID NO: 332702 - DNA, 132 bp, Pseudomonas aeruginosa
atggataccggcggcagcgccggcctcatggcggacggcgtaccgccgtgcgggcgcctcggggtcgtctgctgctatggtgcgcacaggcacgtcgccatcctctctcccggcgaatggaatcgagcatga

SEQ ID NO: 332703 - DNA, 246 bp, Pseudomonas aeruginosa
atgaccaaccgcaagaccacttctggcgatgtttccaagctcgcctctgacaccctccgagatcccaatgcttcggctatcgccaagagcttggctgcatctgccctctcgcaatcgtcgacttccaaggagacgggaaaggcgatggagacgaaggcatccaaggtgcttcagtcggaaaagtacagtgatgacaccaagacgctggctgcctcggtgttgtcgcaatccgataagcagcgttga

SEQ ID NO: 332704 - DNA, 210 bp, Pseudomonas aeruginosa
atgatctacccccatcccgcgattcagctccttgatctgctgccggtgctcttcggccgtttcatcaccgaaaaggacgccaaccaacgccccttcgactccaagatacagtggttccgtagcctcggagaacaacaagcatcgccattcattctcccccctccaatcagtcatcttctcaaagaacagctgccgaaaatgggtttgtag

SEQ ID NO: 332705 - DNA, 603 bp, Pseudomonas aeruginosa
atgatccgaggtaaaactatgcaagggattatgtttgtcatcggggcggtgcttgggctggtcaatcttgtggcgcccatcgctggtttcgtctggactggtgctctaggcgaatggtccactttctttgtcgctttgggtggggttttcagtggggtgttcctcatctccatgctgatgatgcccggcctgcttctggggggcatcgcggcaagctcacttgagcaaggaagacgaaatgtaggatggggcttcactgttgcatcgctgctgtggacgctccttgccgtttcagcgtggtgctatctagtccagaccattttgattggcagggctggatacggtgaatactgggcgttcgggcttctcgcatacggggtgagcctttcgccgctggcgaagatggcgcgtgctgacggaaacaatccgtacactcaattcacttggctgggaatcagcttcgctactaccgtgcacgttctctactccatcgtggaggaggagtttaatccgggggcgttcgttgtcatctatggggcagtgactgccattgtgatgatttgctcgctgctcatggctacggcagagcgccggagttattga

SEQ ID NO: 332706 - DNA, 255 bp, Pseudomonas aeruginosa
atggtaggggtgtggtatgacgacctggggtcgaaagacttcatggacgccacgatgacgattctcgtcaaagacgatcaatactacctagatcggagaaacggagatggtagcggtgggcggtacagaacccgcgaggggatttcgttcatcaagaatggcgacaagttcggtgcgaggtatgtggttacgcgggcagggctggaattgcacgataagcaggggttcatccgcatggctcgtcctgccaactga

SEQ ID NO: 332707 - DNA, 564 bp, Pseudomonas aeruginosa
atgagccgcacgttcttgtatgcccgagtcagcaccagtgaccagaccactgacaaccaagtgcttgaagtgaaggctgccggattcgatgtgcagtcccaacgggtagtggccgaaacggtttcgggctccattgcagcaagtgagcgacaaggtttccagaagcttctggagcggatggaagacggggatgtgctgctggtgacgaagttggatcgtctgggccgcaatgcgatggatgtgcgctccactgtggaactgctcgccagtcgtggcatccgtgttcactgtctcgctttgggaggcgtagacctcaccagtgcggcaggcaagatgactatgcaagtgctgtccgcagtggctgaatttgagcgtgatctgctgatcgaacgcacccaatctggactccaacgtgcaaaggctcaaggcaaggccctcggtcgccctgccgctgcttctactgacgaagtgcagttactcaaggctcaaggacttagccaatctcaggctgcaaccaagctcagtatcagcctcgccactgtcaaacgccgctggaacccctga

SEQ ID NO: 332708 - DNA, 579 bp, Pseudomonas aeruginosa
atgcacgccgacaccgacctgaccagccaagaaactttcgaactcgtcgttcgagagatgcgtatgcatgccgagtcgggccgcaagaactttactctgcgtgtgccccaggatatggcggtttacttgttcgcaggcgtgttgaaacggtcagggctctcgatggtggcgctcgagtgcctgctgtctgagcagaagatttccgggctcagtggctcagaggatggcagagtcctgcggcgctacatgagtggtgaaacccgcatgacctggccaatctaccggcgcctggccttctgggcgctggcgaacggctggatcagcgcatgggtcgttcgagacctgttgttcaggtcttttcagcgggaagccgcgcagctatctgcgcggatgctgctgcgtaagctcaaacgaggccacgggctggagtcgttgacctcggagtatgtcgttgggtgcttcgatcgcacctatgagcagctacagcgggcgtgcgaactggacgctgtgcggaatgttgagcgaaacagccgggccagggagtttgcggactccctggggcttgatctccagagctaa

SEQ ID NO: 332709 - DNA, 303 bp, Pseudomonas aeruginosa
atgaacgtcgattacgaaaccatccagaaaatccaaaaactcggcgacgacgtgttgatcggcgttgccgaggtagccgctttgaccgggttcagcatcctcactgttcggcagcgcaagctgccggggttggagccagtccccggcctctcccgccttcgctggcgcctgggcgatctgcgacagtggatgcggtctggccccatgaccggaatcgacaccactcaggcgccccctcagcaaagtcagggccgacccatcggacgccctacgaagaaatcgcaagttgagggtcgcaaatga

SEQ ID NO: 332710 - DNA, 621 bp, Pseudomonas aeruginosa
atgaccgacttcgagcacccaacgagagaaactgaatctcaccaggttccagtaatgaaacgcgctgagctcacctggtttcatgttttcaaatccatggttgataacgaattggccaagcttgggccggacgcctttgctgtgtactgcgtcatcaaatcgcattgcgatctggttacgggtgtcgcctttccttcggtggcaacaatcgcgggaaaggccgggatcagcgaacgtcaggtcatgcgcaaaatcaaatccctcgaggcacacggctacatcagcaagagccgcactaaggggcacaacagctatcgattgcgagaaaaaatccccatcaaagatgggcggggacggcaccaagctatggccagctgggactatcagccgtcgcgcctccgcgacgtcctagatgagctgaaagccatgctacgaagcggtttatcaaccggaccggccatccacatcgagcagcttcaaatcattcaaggagaaaatagcttgggtctgcagatcagtcacaagcacctacaggaccttgaacgcagcagccccgcgctgtacgagtcgctgatgtcgatacgcaacgccttgcagaagcgcaaagagctggatgattga

SEQ ID NO: 332711 - DNA, 957 bp, Pseudomonas aeruginosa
atggcaaagccctatcacatgctgcacattaccctgaagcccaatggtgagttcgtggagtcggagagcggtcgcctgttcttcgatgaccagcgcaagcgattcattgacctgtccaacgttcggttgctgcgttgcggcgtcgacacggttcgtcagttgtacaacggcatgattcgccctgaagtcatggcactgttcgagcagcctgaagagttcgtcaagtttgctggccaccagtgggccaagggcagggtagggcgcgactcgggctatcagtaccgcctgcagaacgccgacatgggtgtgatcctgctgatcaaaaaccacaacgtgaagctcgagaacatcggcgcgcacctcaagttcgagatctcccctcacgccctggatggggcggatccgcaatcacttcagcgcctgatggatgacctggcgcgggctgtgctgatgcactgcgaaaccaatcagtgtgcggtgcacctcgccctggacgtgcagggctgggagccacctcgtgacatcgtggagcacatgcattgccggtcgcgtcgggtgcgccagatcaccgggattgagcgcatagagttcgacagcagcgcctccgtctacggtcgcggtgagacgtacatgttcggctctgccagtggcctgcaactgtgcatctacaacaaaacgatccaggcacgggccaccgacaagctcgattactggagcaacgtgtgggcgtcgctgaatggtgatccgttcggtgatggtgacccggcgtacaagcctgaagaggacgtatggcgccttgagttccgcttccaccactcggtgattcagcagttctccgaaggctccacgctgtcctctggtgaggtgatcgggtgccgcacctatgccggcctatgcccgcacctgcaaggcctctggcgctacgcctgcgacaacttccgtgtagtggtctactga

SEQ ID NO: 332712 - DNA, 390 bp, Pseudomonas aeruginosa
atgaatagccaatgtcccgtcctcgatgccgacagcgccctgccttacttggggaagaccgtgctcgttgagttggcctgggaacaggaccccgaatcgctctggtgctgtatgcatatcgtgggcatcgtcctgccgctggccggtatccaggaagagccgtatttcttggtcaagcacgttgctggtgacgagccatttcccaacgagatgttctggtcgaacgtgcgcacgattcgggtgatgcggtaccgcgaccggcacggttccggcaacgtactgggccgcgtcacccaccctaacgactcgcgctcaagggccgcgctcccggatcgtcggaacagcctcaccattccgtcgaacggaagcacgggcggagcgaacccttga

SEQ ID NO: 332713 - DNA, 216 bp, Pseudomonas aeruginosa
gtgagcaaggagaaatggaatctggacctgtgcggcatcgccaccttcgcggagatgtgcagcgtgtcctacgacgaagcggcccagtgggcggaagacggcactgttccgagaatccagatggggtgcttccgcatgatcaaccttgcgcgcttccgtgatgacttggagcgcggcaaagccaccttcggtgcgggggactacagcaatgaatag

SEQ ID NO: 332714 - DNA, 216 bp, Pseudomonas aeruginosa
atggaactggaagagctgaactccggcgccctggtagggccgcagcaggacgtggagtcgatagagcattgggctgagcgtaatggtgtcgcctacggtatcgcccgagcctgggtgtaccggggcgttttgccttccgtgaaattcggcaagttccgcatggtcaacagcgctttgctccggagctggttactggagcaggagtggacggcatga

SEQ ID NO: 332715 - DNA, 2544 bp, Pseudomonas aeruginosa
atggataagaaagttttcatcagctactcgcatagagacgaacaatatagacttgatcttgaagagcatcttacaatgcttaaaaggaaaggaacgatctctatctggcacgacagaaagcttgtcgctggagatgactggaaagacaaaatagatgagaaccttgagtcggcggacatcattctcctgctgatcagctcaagcttcctagcatctgattattgctacgacaaagagctacagcgtgcagtagaaaagcacgaagaaggcactgcaaaaatattctccataatagtaagaccatgtgactggcatgacacttctttctctaaataccaagcggtccctcgagatgggaaggctataacactgtgggaaaacgctgatgttgcatggttggatgccgtcacttcccttaaagtactaattgaaaaattttctcctgaagctcaaaaaaaaaacatagagaaaccgactgagggagtgtcagtatcaccagcgcatgagctatggctagaagatacagaaatcattcttacccacagaaaggtagacaaggtcaaactcggaaacatttatgtttacccagacatcgagcttgacccaggactaaacaagtccttagagatagaaatattcgaatcaagcaagctgaccaaagacaaagggctttacattgtattaggagaggagcaacaaggaaaaacctccttacttaaaagaatatttcacgacacagccatttccggaaagctgccgctttatatcgatgcagaactagtcaaccgcaccgatctagagcgcctgatccaaaaagaagttgaacgacaatacattaacctgccccccgatgagttcatggctcatccagatagaattatccttctagataatttagatagaatcggactcaacagcaaacacagaaatctctttattgaaaacataaccgctcagttcgactgggttatttcgacctgccacgccgcgttcaactatatttctgcagaaataccagcactctctacctacaaagtggccgaccttctaggattcggaaacaaaaaaagagaggaagtcatcagaaaatggattagccttggagtagaggaatcgatagatgattccctgctctattcgcgctgcgacgaactaaagaaccagctaaatatagtcataaagagaaatattgtcccacccaaaccaatctacgtattaatgctaatgcaaatgttcgaagcatatgcacagcaaaacattgagctaacctcatacggccactgctatcaacagctaatatatcaatcattcgagaaggccaaaataagcggaagggactacgaaaaatatctaaacgtccttactgaaatatcgtgggaaatattcctaaataacggaggaataaatcaaaatcaaacagatgattttttccaaaattatggaaccaaatatctctccgtaaacaaagaagagatactaaaaaaactactcgcccactcaatactagcaaaaaagcaaggcacccttaacttcaagtacccctacatatattacttctttgttgggaaaaagatcgccgagggatattctgagagacaggaaatcagaggaaaagtgcaagacctactaaaggacttacacagggaagatttcgcaaatatattaatatttattactcaccatacaaaagaaagctgggtcctaaacaacataaaggaggtactctcatctctattccatgaaaatgaaaaggcaacattaaagaaggaccaactttcattcatggatgaatttataaaactaatcccagaacttgtagttgagcaacgagaaatacaaaaagagcgcgatgagcaaaatagcgcactcgacgcgatggaaagacacgatcgagataccgatctagacaaccagcccgacatattagccaacataaacaaatcctttaaaggaatggaaatcgccggacagataataagaaatcgccatgcgaccatgactagggaggcattgtatgatcttgctgctagcggtacggcaacgggacttagattcttagactatttcataaaaatatctgacagctctaaaacggagctaataaaattcatttcccaagtattagcagagcatccgaatctctccaaccgagaggtccaggagcatgctgaaagtgcctacctgcaccttactttcggggtcattagcggggtcgtaaaaaaaatctcatcatcaatcggttcaaaagaagctcacgaaatatacgaagcccttgaagaatcggaaaaaacccccgcccacacgcttataaaccaagcagtcgagttgcaatttaagcgaatccttaacatggactctctgcaaaagactacagataaactcaaaaacagtcccgtgtgtttaagaatcctgaaagaaatggttgttcagcacatatacatgttccctgttgaatataaagaaaaacaacagctttctaatcttctaggaatcacagtgcagggacagcgcttcatggatcagaaaaagcctggaaaagggtaa

SEQ ID NO: 332716 - DNA, 1173 bp, Pseudomonas aeruginosa
gtgtcgcagaacgacaagagtagagataatcaacacgagcgtcgtgcaaaagagatacttaggcggagtagtaagtgggtttgcgtgtaccccggctgtgatgagaaaagtatatattcacatgctgtatctgaatctatttcgttgtcgaccatatctgagaatggccatttattgacaattaagtctcagagaaaaggagatctgaaagaactgagcttcggtaaaataagtatgcatgatgcctctgcttttaatggattttgtaaccagcacgatgatatttttagatccctagacacccaagaaattcaggatgctaggagtctaatgctccaagcttatcgtacagttgtctcagagagtgttgatgagtcacggttgggtatattacatgccgatggttatgaaagcgtcgatttggataattttctaaatagtgtagatgttgcggaatttcctgaggtcaaggatgagggatttcgtcagtggttcaaagcggaatatactaagataataagctcggcggtgcgaagaacggacgatattcttaagcttccaaagcagattcttgaaaaagttgatatctttggacttcagtcgctggatggtaatagcgttgttactaccgaacagttgagtcactatattccgtatcgtcgcttaagtgtgcagttgcctgtggctgttaactgtatgatccatgcggccggaggtggcgagtttcgggacttcttctttgctgtaattccttacgccgattctacttttgtttttggcgttgtccccaaggcatgccaacaatcattgcttgataaaattatggagggtttctcatccgacccaggattaatagacttggtcgaatcggtgctagttggcagcaatgagtggtatatgaggccttccgttttagatggaatgtccagtgaaaaacgcgaagttttcctccacgactgcacgttttttaacgagcaccgtttatatgaacaatatgacatggttttgcttgaggatgcacgacggacgctagctcagaaaaagccagagttggtgcatgcgctgaggttagatcggacacagtatgtgcctatacgagatgggtataatgtcagacatcagagaatgattgcccaaatgtgtgcacagccgtttaagcttcgggaactatga

SEQ ID NO: 332717 - DNA, 894 bp, Pseudomonas aeruginosa
atggggtcagcgccagcggctggcgttcccagggcagttccggcgtcggcgtgcgcagcagcgcaccgggctcttccagcagcgcgcggagcaggacgcggaacatcaggtcgccgagatagggcagcggctcgcgccgtgcggtcagctcggcgaagacctgaccggcgctcggccgctcgccgtcgcggacgatctccagtgtcagccgttcgctcagcgacaggccgtcgcgcagggccggcagttcatgcagttgccgacgcagcgccggccccagcaacggtagcgccggggttggcgcggcggccagttgcgcccagcgcagtggcaccggatcgcggtaggcgtcccaggccgcgcgggccagcgccagggcttcggtgtccagcgggcgacgccgagtccatagccaggcgagcagctcaggcgccagttggccgatgccgacgaagcgctcgacgcctggcacgcggtcgatctcgatcagttccagatgctccggcggcgtctgcattcctgccagcacccggagcaggaacaactggtcgtaggcgtccgcctcgcaccagagcgccacccgcgagtattcgccgagccgctcgagcccggcgtattcctggcgctggcgggcctgggcgtcggccgggtcgaggtcgaaggcgcggctcaggtagtcgctgcgcagggcgaggaactcgggcaacggcaggttcggcaccggtcccatggtcagcgggtcggcgaacatccggaagtcgccgcgaaagccggcgagcttcaggccgtgggcgatatcgttgccgcagcgcaggtgcagggtcgcggcctcatcgccgccgaccaggtcggggtggcggctggcgaaggcgatggcgtcgacatgcgccttga

SEQ ID NO: 332718 - DNA, 366 bp, Pseudomonas aeruginosa
gtgatcaaggccctggacatggcctacgaacagcgcggcaggccacagcaggtgctgttccattcagaccagggcagccagtacgccagccgcctgtttcggcaacggctctggcgctatcggatgcagcagagcatgagtcgccgagggaattgctgggataactcgccgatggagcgcctgttccgcagtctgaagtcggagtgggtcccgtcaacgggttacctgacggcgcaggaggcccaacgggacatcagtcattacttgatgcaccgctacaactggatcaggccgcatcaattcaacgacgggttaccacctgcggtggccgaagaaaaactcaacccactgtccgggatgggttga

SEQ ID NO: 332719 - DNA, 1041 bp, Pseudomonas aeruginosa
gtgagcatcaccaagctccctgatggtcgctggttcgtcgatgttgagccgatcaagggcaagcgcttccgcaagcgattcaagaccaagggtgaggctcaacgcttcgaagctactgtgcgtcagaagtgcatcgatagccctggttggaaccccactccgaaggatcgacgacggctcctggaattactcaatctctggggtgttctgcatggtcacgcgctgagcgattacgacgggcgcgagctgctaatgcggcgaatgatggaacggctcaagaaccctatcgggcgggccttcacggccattcagtttgcggagtatcgagccaagcgccttgcggatggctacagccgaaagactctcaacaatgagctgtcgtacctgcgcgcgatgttcaactgcctgatccagtttggtgaggtggattacccgaacctactggccactctgaagccgctgaagctgcaagagaacgagctggcctatctggatcatgaccagatcgcggcgttgttcgatacgttgcgccagatgccgcacgtccacgtggagctgatatcagccatttgccttgccacgggttgccggtggggagaggcgcaggggcttgtgccatccagggtgaagggagctgccgtgcacttcatcaacaccaaatctaagcgtcgacgctcgataccgatttcacccgaactggagagcaggattctcgatcacttcaaacgcttcggacctttcacgaactgtcgcaactcgtttgatgaagctgtcaccaaggctggtctagagttaccgccaggtcagaaggcaaacgtcctgcgacataccttcgctagccacttcatggcgaacggtggcaacatcctgtccctgcaaaagatactcggccattcgaccctggcgatgaccatgcgttacgcgcacctagctccagggcacatgcaggacgtgctagcgttcggtcccagcagagattttcgacacttcttcgacactccaccggagtcggtcacggaagctggagaaaaagccttgtaa

SEQ ID NO: 332720 - DNA, 285 bp, Pseudomonas aeruginosa
gtggaggccgatccgctgattgatcgcaccgaataccgtcgctactacaagaccgctcagggcttctccggcaagaactgcgagatgttcctgggccagttcgtgagcctcattgcacgggagcgcgtgaacataaaaaaggctattgaggtcggcaagacgctgccgttctggcacgtgatcgaggatcactacaaggccaagggcttcacgactgtcgacctcgaaaagcacatgcgcaagctgccgaatgaccgctatttgcggcgggggtactccatctag

SEQ ID NO: 332721 - DNA, 1365 bp, Pseudomonas aeruginosa
ttgctcaaggccgtcaccgaccattacctggatcgcggctacgtcaccacccgcgcctacctgccacagcaggacctggcctccgggaccctgcgcatcatcgtcgtcgaaggccgcctggagggcctggacagctccgcgctggccagcccgcgcgaactggcgatgagctttccgggcaggaccggcgagttgctcgacctgcgcgaactggagcaactggtcgaccagttgagtcgcctgccgtcgcgccaggcgcaactggagctggtgcccggcagcgaggtcggcggcagccgggtgcgtctcaagggcgagcgcgacaagccctggcgggtctccgccacgcgcaacaacgacggcgacgtcagcaccggcgagcagcagatgggcctgggcctggactgggacagcccgctgggcctggccgaccagctcaacctgcgcgccaaccgcgacgcggtgaccgaccgctggcgccattccgacagccagagcctgttctacagcctgccctggggctggtggaccttcacctacggctacagccagagcgactaccgcacgcgcaacgaggccagcggcttccccttcaagctcgatggcgacagccgcagccatcagttccgcgccgaacgcgtgctgcaccgcgacggcgtgagcaagaccgccatgagcctgggactcagccaccagcgcaccaacaactatgtcgaagacacccgcctggaagaccagagcacgcggatcaccgagacccagctcggcttcaaccacggtcggcggatcggcagcggtttcgtcaacctcgacctcggctggcagcagggcatcggcgcccttggcgcgcagggtcgcggccacccgcaggcgggcgatccgaatgcgcgctacgacaagtacagcctgaccctcagctacctgcagccgttccagctatggggcgagcgcttcagcttcgacagcctggccaccgggcagaggagcgaggacgtgctgttcagcccgcagcgcatcagcctcggcggcaacagctcggtgcgcggcttcaaggaccagaccctgaccggcgacagcggcggctactggcgcaaccagttgcgctggcggcgtgcggtggaatgggcgccgctgcggccctggctgcaggaatacggcgtggccttcgcctacgacgtcggcgtgatccgccacgaccgctacaacgacggcgccagcgggcgcatgagcggcaacgccatcgaactggatgcccgcggccgctatttcgccgccagcgtcggcttcgcccgctcgctggagcggcccagcgccatcgagcggcgcgagcacccgatctatttccgggtcgacgcgttcttctga

SEQ ID NO: 332722 - DNA, 2160 bp, Pseudomonas aeruginosa
atggcctttctcgacgctctcgccctgcgcctgggccgccgcctgccgctggtgctgcagaccgaagccaccgaatgcggcctggcctgcctggcgatgatcgccggctaccatggccaccataccggcctgatggaactgcgccggcgcttctccgtatcgctcaagggcatctccctcaagcaactgatccagaccgcccaccgcctcggcctgggcacccgcgcggtgaagctcgacctcggcgacctcggcaagctcaagctgccctgcgtgctgcactggaacttcaaccacttcgtcgtgctcaaggcggtcgacgggcgcggcgcggtgctccacgaccccgcccacggccagcgccggctgggcctggaggaagtctcgcagagcttcaccggggtagccctggaactctggccggagagcggcttcgagaaacaggaggcgccgccgcggatcaagctgctgggcatgctcggcaaggtcaccgggctgtaccgctcgctggcccaggtgctgctgctcgccggcgcgctggaagtgttctcgctgatcagtccgttcttcctgcaatggaccatcgacaacgtcatcgtcagcgaagaccgtgacctgctcagcaccctagccatcggcttcggcctgttgctgctgatgcagcaggcggtcagcggggtgcgcgcctgggtgatgatgcacatgagcaccctgctcggcgtgcagtggcaggccaacgtcttcagccacctgctgcggctgcccgcgcagtatttcgagaagcgccacctgggcgacgtggtgtcgcgcttcggcgcggtgaacagcatccagcagaccctcaccgcggccttcctctcggcggtgctggacggcctgatgaccgtcgccaccctcggcatgatgctgctctacagtccgccgctggcggccatcgccatcgccgccatgagcctctacgccctcggccgctggatctggtaccggccgttgcgcaacgccaccgaggagcagatcgtccacgccgcgcggcagcagagccacttcctcgagacggtgcgcggcatccgcccgctgaagctgttccagcgccaggacgagcgccgctcggtatggctcggcctgctggtggaacagatcaacgccggcctgcgtacgcagaagctgcaactgttctaccagcagctcaacggcctgctgttcggcgtggagaacctgctggtgatctggctcggcgcgaccatggtgatggacggccagttcagcgtcggcatcctgatggccttcaacgcctacaagtcgcagttcgacagccgcgtcggcagcctgatcgacaagttcttcgagctgcgcatgctccagttgcagggcgagcgcctggccgacatcgtcctccaggccccggaggtcagccacggcgacatcctcccggagaacctccgcgagcgcgaggcgagcatcgagatccagggcctgcgctaccgctacgcggaacaggagccctgggtcctcgacggcctcgacctgcgcatcgccggcggcgagtcggtggccatcgtcggcccctcgggctgcggcaagagcaccctgttcaacgtcctgctgggcatcctcccgccagtggagggacagatccgcatggccggcctggaccttgcgcaactgggcctggacggcctgcgcgaactggtcggcacggtgctgcaggacgacgtgctgttcgccggttcgctcagcgacaacatcagtttcttcgacccgcagccggacatgccctggctgctgcagtgcgcgcagatggctgccatccacgatgacatccaggccatgccgatgggctacaacaccctggtcggcgacatgggcacagtgctctccggcggccagaagcagcgggtgatgctggcccgggcgctgtacaagaagccgcgcatcctgttcctcgacgaagccaccagccacctcgacgtacactgcgaacagcgggtcaacgccgccattcgcgcgctgcgcatcacccgcatcatggtcgcccatcggcccgagaccatcgcctcggcggaccgcgtgatagtcctcggccagggcaaggtaagcctcgacgaaagcaccgcgcgcctggccgaacgccaggccgccgcggcgcgggagcaggcctga

SEQ ID NO: 332723 - DNA, 1032 bp, Pseudomonas aeruginosa
atggatccgctcgacgaactggttgaaggcatcgccgagcacgccgaattcatcgcggctggtcacggcgaggcgcttggtcaggtcgccctcgccctgggcgatgtcctgcatggcacggcccatcaggtgcagcggctgcatcagcaggcggatcagcaggccgagcaggaccaggatggcgacgatggagatcagcgcggcggcgatggccgagacgcggaacttgctgagcatggcgtaggccttgtccttgtcgatggacagcgccaggtaccaggtcaccgaaggcaggcccttgatcggggtaaaggcgaggatgcgggtatgcccgtgcaattcggcctcgctgaaaccggtggcgatcttcggcgtgttctgcgggtagacctcgctcagggtcttcatcacctgctctttgtccgggtgcaccaggatcttgccgtcgccgctgaccaggaaggcgtagcccatgccgctgaagtccagcgaattgatgatctgtaccagggtcttcaggctgaggtcgccgcccaccacgccgagggtgttgccggcggccttcaccggcgtcgccgcggtgatgatcagttcctgggtggcggcgtcgacgtagggctcggtcagggtcaggccaccggccgctacggcgtccttgtaccagggtcggctgcgcggatcgtagccggccggcatcgggctgtccgggcgcatggtgaagacgccgtcctgctggccgaggtaggtgaagctgaaggtcgaggtcagggccggctgttcgagcagggcgctgacggcttccgggctgtggtcgcgggccagggtctgggcggtctgctcgaccagcaacagacggccgccgagccagttctggatgttgctggaggtcacgtcacccatttcccgcaggtagctttcgaggtcctcgcggatcgcgttgcgctgcaggtaatcgttgtagagggtgaacagtgcgaaagcggcgaacaccacgagggaggccgcgaggaggatcttgtggctgaactttag

SEQ ID NO: 332724 - DNA, 1977 bp, Pseudomonas aeruginosa
gtgagccagaccatcgatgcgatggtgcaggcggatccgcaactggcgtggctgaaggaggccgagcagcgcggggatgtggactggcgcagggtgcaggaggtgcacgatagctggaagtacagcaactcggggctgggggctgcgccgtcactggccattgccatcgttgcggctgcttacctcggcccggtgtatggccctatggccagcaatcttgccgttggcaccatcaataacggtggcgaccttggcaaagggctgcaacacgccaccagctccagtgctctcaagagctacgccatcgcggcggccacggcttacttgaccaccgagtacttcgacaaggtgctggacaccaagaccaacgtcgataccagcaaggtcacggtggacctgagtaccgtcagcggtgccagtcgcttcgccgccaaccaggcgatgcagaacctcaccagcacggccttgggtaaggctatgggacagggtggcagcttcggcgatgccctcaaggacagtctctacaatacctttgctgccgccggcttcaacgccattggtgacttcggcaagacccacaagctggaaaccggaagcgcgcaaatggtggtgatgcatgcgctgatggggggcttggccgcccaagcgcgtggcgacagcttcgctgctggagcgattggtgcaggactcaacgaagcactggtgaaggacctggacaaactggtcagcagctactcgccggaaaatcgcgaggcgatgctggccatggcctcgcaactgacggggctggtcggggtagtcgcgaaggaccccggtgccagttacaaggagcttgaaacggggagttgggcggcgaggaattctgtccaatacaactacctaaaccacgaagaaaaccaggaacgcttcgaggccaagaaggcatgtaacggcggagactcaaccgcttgtggccgcgtcgatgaattaaaccaactcgaccggagtcgcgatctggcactacttacggcctgttcttcggacggtagtagcacgacatgtacagcgctgcgtaaagaggcttgggaatctgcccagagtttgaaacaggccagttggactccagaagcacaagagcagtaccggcaagccatgcagaacccgcaactgatggcatacaccattgagggcgagctgcgcagcatctaccagatcaacgacccgataacggcagctgattccaagcggctggccgaggcgatggccagcttgggttctgacttcatcccaggttatggcgatggcaaggcgtttgtcgaagcgcaagaccccttcgactatacgatggccggaataggcttggtgccgggcattggggatggcgctgcgaagatcctggccaaggcgaaggcactttacaaggaaggtaaagtatccgaggctgctgatttggtcgagggactgggtaagctgccggctccgcaagggccaaaaggaactggaacggcgctgcgtgaagtagaagttagctctggcagcaaagggtcatggactaaggaactcaacaaaccagagccgaacacgatttataaagtggacgggaacaagacctatcagacagatagtcttgggcgtgttgagaaggttgagtccaacctctcgctgacgaagagtgaccggaatacttatcagcagtgcattgctggtaaatgcggggttagtggcgatgaaggtggccatctgattgcaagtatcttcaatgggccaggtgagaagctgaacctgcttcccatgaatgggaacttgaataaaggtgcctggaagtccatggagaacacttggtcatctgcgctcaagcaagggcagatggtcagtgtgaaaattgagcctgtctattctggctcatctgtgcgtcctgatagatttactgtcagatactctattgatggtggtcgccctgtcattgtcgatttcaaaaactcaccgggtggtatttga

SEQ ID NO: 332725 - DNA, 666 bp, Pseudomonas aeruginosa
atgcagcccacctcgtccacccgcaagccccgcgccagcagccaggcccggatcgccgcgatcctcgacgccgctcgcggcctgctcgccgacgaaggcatcggcggcctgaccatctatagcgtggccgaacgcgcggaaatgccaccatcgtcggtctaccacttcttccccagcgtgccggccctgctccaggggctgaccggcgaggtccacgccgccttccgcgcgtgcctcgaacagccggtggaccatgcaggcctgcgctgctggcgcgacctgtcgcggatcgtcgaggagcgcatgctggcggtctacgcccgcgacgcggcggcccgccaactgattctcgccagccacggcctggccgaagtcacccaggccgatcgccaacatgacgtgcaactcggccaggccatgcgcgccctgttcgagcggcatttcctgctgcctccactgccgaccgatatcgagatcttcagcctggccatggagctaggcgatcgcgtctacgcattgtcggtccagcgtcacgggatcatcgacgcacgcctggcggaagaaggcatgcgggtgttcgacgcctacctggggctctacctgccgccggtcctggaaaagcgtagcgaaccattaaccggatttatatccgatttaaatcgatag

SEQ ID NO: 332726 - DNA, 675 bp, Pseudomonas aeruginosa
gtgctgctcaagcgcctggtcaagaacatcgcctacgaccacgagatggacaccaccttcatggccaagccctatccgggccaggccgggaacggactgcacgtgcatatctcgctgctcgacaagcacggcaacaacatcttcaccagcgaggatcccgagcagaacgccgcattgcgccatgcgatcggcggtgtgctcgagaccctgccggcctccatggccttcctctgcccgaacgtcaactcctaccgccgcttcggttcgcagttctacgtgccgaacgcgccgagctggggcctggacaaccgcaccgtggccctgcgcgtgcccaccggcagcccggacgcggtgcgcctggagcaccgcgtggccggcgccgacgccaacccctacctgctactggcagcggtgctggcaggcgttcatcacgggctgaccaacaaggtcgagccgggcgcgccgatcgaaggcaactcctacgagcagatggagccgagcctgccgaacaacctgcgcgacgccctgcgcgagctggacgaaagcgagatcatggcgaagtacatcgacccgaagtacatcgacatcttcgtcgcctgcaaggaaagcgagctggaggagttcgagcactcgatctccgacctcgagtacaactggtacctgcataccgtctga

SEQ ID NO: 332727 - DNA, 1821 bp, Pseudomonas aeruginosa
atggtgcaggaggtgcacgatagctggaagtacagcaactcggggttgggggctgcgccgtcactggccattgccatcgttgcagctgcttacctcggcccggtgtatggcgcaatggccagcaacctcgccattggcaccatcaacaatggcggtgaccttggcaaggggctgcaacaggccaccagcgctgacagtctgaaagggtacgccatcgcagcggccacggcttatctcgtcagcccgcagttggacaaggcattcggcgtatccagtgacaacatcaacaaagtcaccaaaggattcaagctcagcacagttgagggaatcggtggatttgctgcctacagcattgcccaaggctttgctcaatcggtcatgcagcaggccgcctatggcggcagctacatcgacaacctcggtaatgccatggcaggtcaggcgcgcaacctgggaatggcggtaggtttcaatttcattggcgactcggtcaaataccctgatggcagcccgccgaaaatcatggctcacgccctgatgggaggtctgctggccgaagcctccggcagtgacttcaagactggagcggcggccgctggtgccaacgaggccatgatcaacctccttgggaaaatggtaggtggcgatcaaaacctcgaactgatggcctcgcaactcgttggcgtagccgcggcaagtgcggtcaatggcgatgtgagtctgggcgccgagatcgccaaaagcgggacggcgtacaaccggcagctacacccagatgaaatcaaattcgcatcggatgtggagcgcgtcaaacgttatgcccaggaaaatgggctgagcgaggacaccgcccgcaaagagcttctcagcacggccgccatgatggtggacaatggctggaaccaggccttggccggcacagacatcaacgctgcccgggctgctcagtatctgcgtacggagctgggcacaggcccggacagcaatctcttccaggtgacccaggctgactactacaacgagcgggtggggctgacggcgctattcaagaacaaggaggccctgaccagcgttctggaaaacatagccctagcgaatcccgcgagctatacgagggaccccgcgaaccgtgcggaagtgctgaatgccaaaggtgaaggtagccaagcgggctttgggctggcactggaagggatcgtcagcgcgccttcaaaaactgccttgtggttgatgggtgcgctaacctgttcaagctgtgcggagcgggatatccagaacgcttggaactcggttgcctcgttacctgaagacatccgtatgaaaggctatctggatgccttgcacaccatgcaaggccagggtgccagcgtggtgcgggacaacgccgcgagttcgactgcattgggagttgaggttgggctggccattgatggagggttggcaggggcaggcaagggcgtcgttacggatggtccgaaaggaatacttacactgaaagattttcctgatgtctctaccaagataagccagaagcagcttcgccatattgctggaacacagcagcttgaggcacggggaggcggtggtttcttaaacagtgtctctgatgctcaaaaagtgcttgatgcctaccataccggccaagtgaaaatcctagggagaaatgctcagggattcccagtagtcaagtttgagggcgttactggaactaacgttaatctcggtgttggtataactgatcaggcaaccaatgtatttattatcaagggcacaaagagtccaagtattgtccctacaaatccaaactggagtcccaaatga

SEQ ID NO: 332728 - DNA, 207 bp, Pseudomonas aeruginosa
atggccggccaggcgttccacggtggaggcgtcgaacagatcggtggcatagtcgaaggaggcccagatgccgttttcgtcttcctgaatatccagcgtcaggtcgaactgcgcagtctggccgtcccaggccaggccttccagacgcaggtcctccaactgaacctcgggcgtcaccgagcgtatctcgctctgatggttgaatag

SEQ ID NO: 332729 - DNA, 234 bp, Pseudomonas aeruginosa
gtgcggatcttcgagaccgaggatccgaaccacctctgggtcgagtgcgacgggcgcggcaaggcgctggtcccggggtatccgcagggctattgcgagaaccactacatccattccttcgaactcgagaacggccggataaaacgcaatcgcgagttcatgaacccgatgcagaaattgcgtgcattgggaatagccgttccgcaaataaaacgtgacggcattcccacctga

SEQ ID NO: 332730 - DNA, 840 bp, Pseudomonas aeruginosa
gtggaaaacttccatattctggcgaccgtgctttcgatgattctgggcttgtccatcaccagggttctgttgggcgccatgaccgttttcaggattcgccgcacggcacggccagactgggtcgcacttgcttgggcactcgtgcttttcctgttccaactgcagttctggtgggccctaaacgacctccccaccttaaagaatgccttttcgttcatcgagttcctgcttttggtctgcctgtcactatcgctgtttagtgcggcggcgttgatattgccaagtcgcagcgaagacgaggccgatggccttcaggtctactttgaacaagatggacgctttgccctattggcgatctgcatttatctaggattaggaagtacgaccaatatcctgttcttcaacgcctcaccactccagctatggggtgcgttggatttggtcatgttcacagtatcgctggcagcgttcttctctcgctctcgccgcttttacgcgccactgacactggcgtatctacccttggcgatgatagatatcgctgtttcgttgggagcgtggaaagttagcgcttttcaacactcagaggctactgcccgcttgtggccggtagctatcgctcattaccggccgctttcggcccctggctgccgtcagccgccgacagaaaaggccacaaggagttttgtgaagccaagccaaggacacgttcaacccaaaactaaaaatccatgtctacacaaaaccctaccgcgactcatagagctatcgcagagcagtgcagcgaagcgtggtatgctccaccgcacgctcagatatctgccaaaatgcagacaatag

SEQ ID NO: 332731 - DNA, 942 bp, Pseudomonas aeruginosa
gtggccgaggccgacgagagcgacgccagcttcctgcacctgcaaccgatggtcgcggtggtcaccaatatcgacgccgaccacatggcgacctacggcggcgacttcaacaagctgaagaagaccttcgtcgagttcctccacaacctgccgttctacggactggcggtgatgtgcgtggatgatccggttgtgcgtgagatcctcccgcagatcgcccgcccgaccgtgacctacggcctcagcgaagacgccgacgtgcgcgcgatcaacatccgccaggaaggcatgcgcacctggttcaccgtgttgcgcccggagcgcgagccgctggacgtctcggtgaacatgcccggcctgcacaacgtgctgaattccctggcgaccatcgtcatcgctaccgacgagggcatctccgacgaagccatcgtccaggggctgtccggcttccagggcgtaggccggcgcttccaggtctacggcgagctgcaggtcgagggtggcagcgtgatgctggtggacgattacggccaccatccgcgcgaagtcgccgcggtgatcaaggcgatccgtggcggttggccggagcgtcgcctggtgatggtctaccagccgcatcgctatacccgtacccgcgacctgtacgaagacttcgtgcaggtgctgggcgaagccaacgtgctgctgttgatggaggtctatccggccggcgaagagccgatcccgggagccgacagccgccagctgtgccacagcatccgccagcgcggccagcttgacccgatctacttcgagcgcgacgccgacctggcgccgctggtcaagccgctgctgcgcgctggcgacatcctgctttgccagggcgctggcgatgtcggcggcctggccccgcaactgatcaagaacccgctgttcgccggcaagggagggaagggcgcatga

SEQ ID NO: 332732 - DNA, 465 bp, Pseudomonas aeruginosa
  misc_feature (450)..(459): n is a, c, g, or t
gtggttaaagaaccgaatggcgtcacccggaccatgcgccgtatccgccgcatccatttcgtcggcatcggcggcgccggtatgtgcgggatcgccgaagtgctgctgaacctcggctacgaggtatccggctcggacctcaaggcctcggcggtgaccgagcgcctggagaagttcggcgcgcagatcttcatcggccaccaggcggaaaacgccgacggcgccgacgtgctggtggtgtccagtgccatcaaccgggccaacccggaagtggcatcggccctggaacggcggattccggtggtgccgcgtgcggagatgctcgccgagctgatgcgctaccggcacggcatcgcggtagccggcacccacggcaagaccaccactaccagcctgatcgcctcggtattcgccgccggcggcctggacccgaccttcgtcatcggcggnnnnnnnnnnggctga

SEQ ID NO: 332733 - DNA, 459 bp, Pseudomonas aeruginosa; identical to SEQ ID NO: 320152

SEQ ID NO: 332734 - DNA, 999 bp, Pseudomonas aeruginosa
atgaaaaccatcgtccgcttcgtgttgctcggcgtacttctcgcgctgtcacagaaaagcttcgcgttgatctgctggaaaccaggaacccatgaaaccgtggacaacgtccacatggacaacaatgtcgcggtaccttcggtcctgcccaaggacgccgtgctctggcggtctccgaactacagtttcgacatcaaatgcttccaggatcgggacacgggacccgagcaggtctacttctacctgagcccggacggccagggcgcgctgggttccgacctggaggtaggcatcaacctgaacggcgaggatctccgctgctccaccctcgccaaatgccggaaggaaatcggcatgcatttcgatggatgctggacggggcgaggatgcgaaggcagggcgaagaccatgcgggtcaacttcaacttcttcctttccaaacgcgtaggcccaagcaccggcaaggaaggccccatagcgggcgccaacgtctacccgattttccagttcgacggagaacacggcatcaatgccactgcgggccgcaacttccgcatgtacctcaatgggttgaacaagcttcgctacgtcgcctgcgcctcctcgctgggcatttccccgaagaccgtcgacttccagacgatacagtcctacttcgccgtccaggaccagacgatcaaggagcttccattccgcattaccgccagcaagaactgcaacagcgcctatgccctgggcgccatgttcatgcccgccagcaacacgacgctgtcggggacggatacgctgctggcgaaagataatccctccgtgggcatcaggctcctccatcaggaagaccgcagtgtcatcgacatcggcaaggagttcgagctggtgccatacagcaaagaccaacaggtagtaagaaacttcctcgcccaactgcgctggatgactggcaagcccactcccggtcagttcaacgcaggcgccaccatagaggtctactacaagtga

SEQ ID NO: 332735 - DNA, 630 bp, Pseudomonas aeruginosa
atggcacgaaatgcatttcacgcgcacgcaactgcgatcagcgttccatacctggttcatttcacaagagtggttaaccttccctcaatcatgcagcacgggctctatcctatgagccgaatggacgagatcggtgctgtgccgcaaatcaacgatgatctccgccttgatggccatcttggtggaatttcgttgtctatcggctttcctaactatcgaatgttttaccggcttcgccaggagaatccatgtgttcactggagtgttctcgttatcgatccaacagtgctttgggtgaaggattgtgctttctgccgccacaatgctgcagatgctcggatcagccatcagccacttggacaactgaaaacaatcgaggccttcgtgggaatgtacgcggagatcgaagggcttgattcccgcctgaaccagagactgcgggcctacgatcctacggatgggcaagcagaagttctggtgtttgacgtcatcgagccacaattcattctcagagcggccttcgaacatgaggctgtccgccttgaccatgaaggaattttcaatggcaggctccttgaaacgcatcgtacgggcagaggattctttgccgcacgtagctttgtgcgatag

SEQ ID NO: 332736 - DNA, 705 bp, Pseudomonas aeruginosa
atggcagaaagaccgatttttatccccaacaaagaaggcccggtgctggtacggacacgtcacgttcagttccagtggttccctggtatgtcagtttctcagaagcagaagtcaatcgactcactgcacgactcggcgagtaagcttcctggcattcccagaatccttgaagtgtcgagcaaatcccgcgaggagctgggagtggcgctgagtgccttcaatctctcttttacaaccttgaagcagaaccgcacgtttagcgttgagtgcgctttccaaggaagtaaggtcttcgagtgtggggggccctacatcgacatcttcggaatgacctcacgggaagctaaaaaggacgagcgactgcgttcttctgggcgtctggtgagctttcgttttttcggcactgaatgggagcttgagccgcgcaccgctttctatgactggctgtatatcaatgcactcaagaagctgccagaaattaccgaaaaattgctgaaatattcggccttcaccgacattgagttcaaccctgagcgctcgatcaattgccaggcctactcggttgcgctctatgtttctctgtatgagcgcaatttgctggaggaggccacatcgtcgaaagaagatttcctacgaatagtgcagagtgcgcccgtaagcaatgctatggaagatcaaaccattcaaggtggctttaaaatttag

SEQ ID NO: 332737 - DNA, 1980 bp, Pseudomonas aeruginosa
atgagcgaccagccgcttcacacatcgctattcgaggaagattatctgcttcgtgagctagggccagtcgcccatgttccgcaggttgctttgacagagctggttgccaatgcttgggatgccggggcttcgaaagtagatattgtcgttccaacaacgcgtggcggcactctcacggtcactgatgatggccatggaatgagccgagatcagtttcttcgacgttggatgatgcttcgctacgatcgactcaagcatcagggggcgaatgtggagttccctgctgggcgcgaacgccggcccagaaaagcatatgggcgaaatggcgttggccgacacggactgctttgctttgcggacgagtaccaagtcgacacttggcgggatggccgactaaatacattcgtagttggaacagagtctggcccgagtccttttgtgcttcgcagtcaggctaccggtgaacgagaaggggctggaaccaagctcacagtgtcagttgagcgccacctccccgacctggaagaaatccagactgtgctggcagctcgattcatccatgatccggaattccaaattcgcctcaacggcatcatgctcaccttcgaggtaatcgacgggagcgtgagcgagcacgtgctagcccttggcgaggggcgcaaagcgactgttatcgtcatcgattccaccaagcagaaccactcatctatacaccagggcgttgctttttgggtgggacgtcgtctggtgggtaacccttcatggtctatcggccaggtcgcaaatttcgatgggcgcacaaggtttgccaagcgatacaagataattatcgatactcaagggttcgagtctcacgtccttcatgattggacaggatttcatgcaacgccggcagtggatgagctctacaaggcagcgtctgagcagatcaacaagatcgctttggagctggcgaatgaggtgatcgaggccacctccgaggacgctcttttgcagaatcggagcggcttgcaggcgctggggcagagcgctcaagcggaggtggcggagttcaccaaaactgttgcgcaggctcacccaaccgtctccccagactttctggcaactgcagtgaaagctgtgatcaacctggagaagtcgaaaagtggctccgctctactacagaagcttgcggagctcgacactgatgacgttgaaggtcttgatcgtctgctcactgagtggtcgatcaaagatgcgctgcgggtactggacgagatcgacgagcgtctgcgcgtaatcgagtcgattagccgcctagcgggcgatcctaacgtagatgaacttcagaccctgcacccgctcatcctacgagctcgatggctctttggccctgaattcgaatcgccgctgtactgctccaacgccacgctgaaaactatcgctcgcaatctcttccagcgccacgatgcccagtttatcaatgagaagaatcgcccggatgttgtagttcttcctgataggagcacgattcagctaacggggattgagaacattgacccgcttgctccgtcagttgctcagttgcagaacatcttgctgattgagctgaagagaggtggatttactctgaccagaaacgaggtcaatcaggctgacggctacgctcaagatattgcgctgtgcggattggacggagcccctaagatctatgcatgggtggtcggacagaccatcggaagtggtgtgggaagggaaaaaaagctagtcgagaatggccaagaatacggtttcatccgggcgacaacgttcgataccctgattggaacggcgaacctccggttgatgcgccttcgcgacatacttaaagagcgctacgacgaactgccgacgaacgagctgatcgccaaggtgcttgcagtccaggagcaaacaacgctcgatttggcagcttcagatcagatcgcttcggcagagacagaacctgacttacaagactga

SEQ ID NO: 332738 - DNA, 198 bp, Pseudomonas aeruginosa
atgcgctccagcgccgagcatctgaggatgcagcgggatgaacgcaggctgaagatccacgcctttttggttgtgccgccgaatccatttgtggacgaggttggaattgaggctgtagcccaaggcgatgtggcgatggactcggaacactcttggatgacctgggctttgaacgctttgctagaggtacggcgctga

SEQ ID NO: 332739 - DNA, 1638 bp, Pseudomonas aeruginosa
gtgtggtctaacacttcgtatgatagccgctggatagttaaaattaataatgtcggcaaaggtggtcagggcgtagggcataaggttattagtaaagatggtacgtgtaccgcgtttcttaaagttatgcaggaagctggatctacggagcgacggcttaggttccatgatgaagcgcaagcttattctgcgctgaagtgcttgcaagttcctcgactactagaatcaaatgctcatctttacgaagacaaaaatataagcctttatattgttaccgacttcattgagggtgacactcttgatacctggcgctctagaattaaaaatttaagcctagatcgagccattacaattgtccttcagctgcttgatactattggccaggttcactctgctgggctagtgcatcgtgatatcaagccccaaaatatcataattaactctgatattgatgccgttccagtcttggttgattttggtattgcgttcaattttaatattgagcgcgacaaagcgattaccagagtcaatgatgggcttggcaataaatttctgcaacttcccgagcttctcagtggagttgcgggcaaaagagataaagtttctgatctcacatttatagcaggaattctattttatctcattactaaaagaaaacccgcaacccttcgtgatgggaatggaaagcttccccaccaacgttcagagtctcttcctcacttgagaggctttgagcgaagcggaatactaaatttctttgaccgggcgttcagtcatgatatcgacgatagataccagaccagtacagagatgatagtagaccttcacagagtcttagcgcgacaattgagccaagagccgattgataaaaaggaacgcctaaaacgactattggaagacgttcagtttagaaccaatggcgagcagtctcttaaaatcaacgaagcactgtcttgggcggtcagggcatatagtacagtcgcaaagcgtagcagtggaaatcttactgcgcaacaaacactcataaatgatgccatgattccaggctacgtgcgcttgacttggcacctcgcgggaaaataccgaataagtacgtttttatgggtggcgattattgggagtgaatatgtttggtatactattaagggtgaagtctatagggcaagtgtgaccgagcctttaagcagtgactttccagcagcatttatcgaaaatgccatcgatgaggacatgcttagaatcttgtcggaagacccaattgataatccaccagaattttctggtatgcaggcgattatagatcgcattacatattcatgggtaggagcgctagagctttctgaaactctaggcctgccagttgcattaattatatatgacgacagtcggccggtgacgcacagggagcacctgctagattgcgtgctgaatgacgagatagttcaacagactattcgcaagtgttttgtgctacttatcataaagcgttcagatgttcctgagggaataagcattccgactgaaagcgattccttcgggctgatagtacatgggcaattgactggatatgagcatattgcggcaaacacagaagccgcccggatgcgattttctactctaggaaaaaaatataattag

SEQ ID NO: 332740 - DNA, 1113 bp, Pseudomonas aeruginosa
atggatcaattcgagtacgacgcaatagtattagacacatcaacatttgatgctaacggacttcgacttgaaaaagggttgctcggaaaacttgggcaatttaaaaaaagccctgtcgatatcattattccggatgtgatccgtggcgagctaaagactcaccttgagcgaaagataaaagaagtacggagcagtcttgagaaatccatcaaggatgcaggcagccacatcatactccaagaaacccagctaaacactattgagatactaattcctaatgcaagtcaagctgaagagttagcggacaaaagaatccaagattttattgatgaaactggtgcaatagagcttgagtgtggaaagtacgtaaatataagcgaaatactaaaaaaatattttgaaaatctccctccgttttcggagacaggaaaaaagaaaagtgaattcccagatgcgatagcgttaactgcactcgaaaactgggcgagcgccaacaacaaacacattttgactatctcaagagactcggattggagaaaattcggcgaatcctccgagagaatcacaaatattgaggaactatcggacgcattggcactattcaatcgcccgaatgcaccttatgcctttcttgcaaaactggaagaagcgctcgatgctggcaccgctatgtctttcatcaagagccttgagagcggtctatcatctacgctagacgggttcacacctgaccaatacgcggagtgctacttgtcctgggagcctgaaggtagcaacggatggtttactggagtcgatttagacggcaatgagtttcgcctaatcgagcaaactgatgactatattgttttagaggctgaagccacaattagatttgaagcggagggagagtttacgctttcggtaagagactcaattgatggtgactacataccactttcatatgtcacggcgacgactgaaggtgagttcgagtcgaaaattttgatcaccgttacggggaacatcgaaggcgacctagataagcttgaaattgacggcgtcgagattctatccatccctcgtactgtcaatttcggtacacttgaacctgactttcgcgatgatgattaa

SEQ ID NO: 332741 - DNA, 1056 bp, Pseudomonas aeruginosa
gtgaaaaagccaacccccacgcacatcaggctattcctctgcattggcgtatcgatagctggatgtctctggtcgctctcctccatggcctattgtggcagaccagacagatctacaaagaaccccatgctgatactgaattggccaaccatcgtcaccttgaaggccgcaccgatcggtgagccgatggccacagcccatgcgcaagtcggctcatcggagagcttaggtggatggtcctggtgcggaagcgacggaaaaatcggagagttcggcctcactcctccccaaaccaatctcgttccactagatggaaacggtctctatgactctggagtgcctggggtcggaataaggatcaggcatcgagctacctacaactggacttcatcgcttgcggcccccttcactcactctaccggaaacgacggcgtcctacgctacgcaccaaacctcatcgtagttgatttcgtccgaaccgccatgggagtaggaaagggagaaaccaccccgttcaactacaaaaccaacttcttcattgataccaactatacaaaccctactagggcagtattcaacatagagggaacccagcttagtacaatactgacacacaatgtcttcttcactacatgcagcactcaaaagtcgaacattgatgtcaacatgggacgtccaacggcgtatgacatcaaaagaggggctgtgccagatcatggcttttcactggatgttgtgtgcgaagggctcaatccgagtgtcaagcctcctgtgaaggtctactttgaaggcaactcgatccaggatggcctgttgaacctcacaggcagaggagaagccggtgtagcccaaggagtcggcatttcgttgacgtccagtaagggagcggcattgccattcacccaagccagggccctgcccctggactggctggccagcggtgcagggacggagatgtaccgctttgtgggatcggctcgctatgtcgccactggcggaaaaatcaccgcgggtaaagctgactccattttgacctacatcctggagtacaactaa

SEQ ID NO: 332742 - DNA, 702 bp, Pseudomonas aeruginosa
atgtcagaaaatgagaaaccgctgaagtggctgcgcaagcaggatggggagtgggaatgggcagccaattacctcagggaccagcttgatgccgagtacatgagcaggctcaagggcaatgcgcttacccggttttcgacctacgagaacgtcgttgctgctatcaggcagatccaggaggacaggctggacctggtcataagactgcagggagctatccggcagcgtcgctatcgatccgacagcaacggcagaaaaccgctgacattcacgcttaccaaagaaaccatcacaaccctgaattccattgttaagcgggtgaaagaaaaccggagatccactgctgaacgggataaagtgaacgagaccgcagtaatcactgcgctcatagagaaggaggggcaagctaccgaagctgagagggattacgaaaagcagctcaaggaatcagtctcaagggagcgcaaaatcgctgctcaggcggctgcatccatgactgctcagcgggacgaggcattgaaacacgccgagcgatatctaaagcttctcgctcagtgggagctggcatggccagacgaaaagccacctgccgccagcgaggaagagatcgccaagattgtcgagccccgcatgaaagacctcaaagacgctctggcctacattgccgtcagagacgacctgactaccgagcgccccaagtaa

SEQ ID NO: 332743 - DNA, 663 bp, Pseudomonas aeruginosa
atgcctaacgatctgttacaacgaatcgaaaaccttccgccagaacaagcagtcgaaaagctgttcggtatcaccgccgaggagcttcgcaccgtagcgactcagtgctatcgcatggctgcagctgctggccctctgcaaccaaagggttcaggcggcacactcgcctggatctatggcacagaggcattgcgggcagtaaccattccgaaggggtggaagcctgccgatccaagcaaccaaccgcgggttgtgtccccagacaataaacatgcagtgactgtcatctgtggagactcaaacactggcgatcctcacgcggtaccactcacgcgaaacaaacgtgggagccggaccacacgcagcgtttactacaacgcagcgcagaccgacatgtttcccgtcgaccgtcgtgatcgccaacggcttccattggatgcagctacagagcagacactctggattctcttgttccacgctgatgtggagaaccaagtcatccattacgagctgtcccggccagtgaacatgggcgaaaacggcaaggttgacggatggcaacctcgctttatcatgccgcccctgaatctgaatgctcctgacgacttcgatggcccagattccagccccactatcgatattcctgtgacaccgagatcatga

SEQ ID NO: 332744 - DNA, 1110 bp, Pseudomonas aeruginosa
atgaacgacataagcgatttcaatccggcccgcttagtgctagcccgtcaacgtcgtggatggacaaagaaatcgctggcagatgcaacctcacttagcagcaaaacgatttctttgtacgagagcggtgaacagctacctacagaagagagcctgagcagcattgcccaggctcttaaatttccaccatcgtttttcagtggtcgagatgtagaggctcctacagaagagaatgctagctttcgctcattctctaggatgacagcaggacagcgtgacgccgctctcgctgccggtggtatcgcctacctactaagcgactggatcgatgcaaaatttcaactacccgctccctcgataccagattgctctggcatggatcccgaggctgcagccgagatggtccgagcagaatggggtttaggccagttccctattaagaacctggtccatctgttggagctgaaaggggtgcgagttttctctctggcagaggagaccaatcaggtcaatgctttctcatgttggaggcagggatcgacccccttcatatttctgaatactcagaaatccgcagaggccagtcgtttcgatgcagctcatgagcttggccacttggtactccatcgacacggaagcaacaaaggcaaggaggtagagcaggaggccaacgccttcgcctcggccttcctgatgccctatcaaagcatcttggctcacggctggaacattcgcactgtcaaggacatcattcgggcaaagaagctctggaacgtgtctgcgatggcattggcttaccggctccataaggcgggaattctgacggagtgggtttacagaagcatgtgcatagagctgtctacgatgggtgcgagaaccgaagagccggatccttcgccccgcgagacctctcaagtgctacagaaggtcctaggtcttgctagaagcgctggacagtcactcagtgcgattgcgctggagctcgatatcgctgcagacgatcttgtcccaatcttgttcagcatggctccgatagggataaatggagatgcgggttccaccaccattggcccacggcgaaagcccgaattacgcttggtgaagtcctga

SEQ ID NO: 332745 - DNA, 471 bp, Pseudomonas aeruginosa
atggctgacagcctcgaggctctggaagactgggcagggccgattcttcgcgccctcgagccaggccctcgtgctgccctggcgcgttcgctcgcccgcgatctacggcgcagccagcagaagcgcgtaatggcacagcgcaaccccgacggaagcgcctacgagccacgcaagaaacgcgaactgcgcggcaagcagggtcgtattcggcgcaagatcaagatgttccagaagctgcgcacggtgcgctatctgcgcgccaagggcgacgcccaggcgattactgtttccttcgctggtcggatcgcacgcatcgcgcgggttcaccagtacgggctgagggaccgtgctgagcctggcgctcccgaagtcagctacgcgcagcgtctcctacttggctttgatagcagcgatatggaaacgatccagaatggaattttggcgcacatagacgcaaactctcccatttag

SEQ ID NO: 332746 - DNA, 729 bp, Pseudomonas aeruginosa
atgaaagaatccctaacaaacagaaaatttgagaacatattaaaaataatagaaaaagaattattcacaaacgagtaccccagcatatgcagcctgcatgatatatccccagacaaggatagtcacaactgcattgcctgcaatctcgccggcaacgttataaacctcaaagacgctgcagacttactatcaaaaagcaccaaaagtctatcttacccagcagacgaagcttttgcagaaaaaacctatatattatggctgtatttgctatccgaaaatatacatgaagtattgaaattaatatcctacccccaagatattaaaaacaaggacttcaaaaatacaataaccataaaacggtgggcaaacttcctcaaacacccaaaagcatttctcctcactcaccaccctgcctattgtgatctcgccaccctaccatttgagcctcaccattcaggtctagaaggaatcacaataattgatgatgaatttatcaacaaattctactcaggagacaaaaacaacaaagagctttacacaatcttacagaacaaccaatcaaccttggtcttactccctgatctagaaattctcaccaagggtattgcagacgagctaaaccaacttagcgaaaaaataaagcacaacaatgaatactccaaaatcttaacagacaaagcctccattgaagattacttaagcggcgcccaagcagactcgtcggactag

SEQ ID NO: 332747 - DNA, 1911 bp, Pseudomonas aeruginosa
atgcttaagcgtaccctctaccacttccacttctgctgcggcctgggcggcggcgccgcaggcttcaaccgggcgcggccgcgggtcggcaacgtcgaggcccattgggaatgccttggtggcatcgacgtggacccggccggcctccgcgacttcgagcgcctggccggcgtcccgggcaccctgctggacctgttcacccgcgaccaatacatccgcttccatggaacggagccgcccgccggttggagggaggcaaccccggaggacatccgacgcgccgccggcgggcgccgaccggatgccgtgttcatcagctcgccctgcaaaggcgccagcggcctgctgtcggagaagatgagcctgaccccgaagtaccaggcgctgaacgagttgacgctgcgctgcatctggctgatgggcgaggcatgggctgatgacccagtgccgctgatcgttttcgagaacgtcccgcgcctggcgagccgcggccggcacctgcttgaccagatcaacggcctactcggcggcttcggctacgccgtggcggaaaccactcacgactgcggcgaactcggcggcctggcgcagtcccggaagcgcttcctgcttgtcgcccgccacgtcgagaaagtgccgcccttcctgtacgaaccagagaagaagtcgctccgcgccgtcggcgacatcctcgaccgcatgccgcttcccggcgacatcgaggccgccggcccgatgcaccgcgtaccgtccttgcagtggaagacctgggtgcgcctcgctctggtgcgagccggcagcgactggcgcagcctgaacgacctcgccgtcgaggatggctacctgcgcgatctgatcatcgtgccggagtaccaccggggcgtcctgggcgtgaatcactggggcgattcgtgtggcgttgtcgccggcgcgagccgcccgatgaacgggcggttctcagtcgcggatcctcgcgcgccggcaaacgccctgcagtaccagcagtactgcgtgcgccgctggactgacacctcgggcgccatcatcggcgtcaagtcgcccggccagggcacgtactccgtcgccgatccccgcggccagagtttcggcaagtacccggtcaccgactgggacggtccgtccggcaccgtgatcgcggccagtactaccggccagggcgcattcgccgtggccgacccgcgcccaggcggcgtccggcacaacaacgtgtttcgcgtcgtcagcatggggagccacgccggaaccgtcaccggcgggcactcacccagctccggcggccaggctgttgccgatcccaggtaccacaactggcacccaggggcgagcagccgcaaattgcacgtcggcgagtggggaagcgctaccggcacggtcaccggctcccagcaggtggccagcggcgcgctgtcgatcgctgatcctcgagcattcgaccggcagcctggcgatgcctgggtaggcggtggccactacggcgtgatgggctgggcccaggtgtccggagccgtctccgccagcgcccgctacgacaacggccgctggagcgtcgccgacccgcgcatgccggcggcgaacgaccgcctcacctgcatcatccagtcgcttgacggtacctggcaccggcccttcaccaccctggagttggccgcgctgcagagcctggtggacccggaagaacagttgatcctcgacggcctgagcgacagcgactggcgcgagcgcatcggcaacgccgtaccgccggccgcggccgaggccatcgccggcgtgatgggcaccaccctgctgctggccgagcagggcgaaaccttcatgctcagcaatacgccgatctgggtgcgcccggttgcggtggcgctgagcgtcgcgcaacaggaggtgcagcaatga

SEQ ID NO: 332748 - DNA, 2277 bp, Pseudomonas aeruginosa
ttgaccgtacctactaataccagcgttgttgagtacgaaggcaacggagttaccacagcattccctgtgccgttcaagttcccggccaatgatgaccttgtggttacgaaggtctataacgatgttgcaaatgttttggtgctaggaactgactacaccgtggttggtgctggtgcgcagagcggtggagcagttatcgccacaagcgctcctgaaattggcgcggtcatcaatattacccgagagcttgatactgtacaggaaacagaccttaggaaccaaggcagatatttcgcagaaacgcatgagagcgtttttgattatttgaccatgcttatccagcaaggatttgctgttcttgctagaactctgaagcgaccagtaggtaaagactattttgatgctgaaaatcgaagaatctcaagggtcgatgatcctgtagaggatggagatgctgctaacaaagtatggactcagcagtatgttggttcattgatttcgagcggtactggtccaattaaccttgcttctaacgtcatttacttttctccagaactggttccgcatgtccttcaggatctttctggaggttcttcctctgagggtgcggctctggtttctagggcaactgtcgctcttgattctgtttacaacctacaggcagcacggaagatttccaatcaactgatgcgcgttgctggatactaccccggtggatctgtatctggaaactcagcggctgctggtggcggcctgttccgatgggatggcgctagaccgaagtctcaacacaatggcggcaccatcatcagcccgaccgttccatggaacggactccaaagcacgttaggtgcatacctattgggatctggagaaacttcacctggcgagaatggctgctgggttcgtgttgctgatgatgtcaagcttgttgactttggtggggttgtaagtgagtccgtcgattcatccgctgctttttatgcagcgctgaagtactgcttatcgactaataaggaactctaccttccagaaggcgtagttcgcgtaaactctgctgctgtaatagatggcgccacaactattttctcgtctgtgaaaattcgaggtactttcaagacaagtggagtggctgctgggtatgtggttagcagagttggaagcctgatctatactaatggaaacagcgctctagacatttcgttcaacgactttaggaacgaaaactttgatatccgtggagtggcatttgtagatacctcgttctatccagcgggaacccctgtgaatccaaatcctgcaatcctaatcaggaagggaaatcctgacgcaagtagtaacagatacataactggcaacgttcttgaggatgttgctttcgttagctatcaagacgctgtgaaaactattggggttgcaacagggttgccgacctataactacgttggtccaacctcgttgaatcgtgtgtacttctataagtgcggaaccgctatgcatcttcaggattgcacgtacaatcatctattcctgaatgaatgtcttctctttgatctgtcgtcgcaagctatattcctgacaaagacggttagcgggactggcggcaacgtagatgtaacgttcagcaattgtgtgttcgaatcgatttgggggatcatgaatacggccaatgggttgacgtcttccacgaaacgtaacacggcagttttcaattcttgcaatagagaattctgcgggctgtacggcccgacaggcggaggcggaaacttcgcagggagtccgcttgggtatataggtcacaccgatgtaatgatcaatggaaattgggagagaggtcaggcttttggggaaactgctttaccggcaatcgattctggtgctgttattttcgcgagcagatatgttgatgttcttatgaatggcggccaagttggatctccagaatacgtcaacgttgttgacgtaagcgggacaattccagcctctggcagcctgaccaagacgttcaatgtgagcggatcgtttgtgttgaatgctgacgtcgcatatgacgacgggtttggcgggcaccagaatgtagttgcgtacggcaaccctactggctcaaaggcgcgggacgttacagggacgattatttctgctggtctatctgcgtcctacggggacggaccgtcgggtgcggctttcaccgttacgttcaataacgggactgcatcgccgatcaatgtgaagatccgggtcacgaacagagcaggcttgatcgttactgtgtcgtga

SEQ ID NO: 332749 - DNA, 2583 bp, Pseudomonas aeruginosa
atggcgactacgctaccggcaggaatcagtccttgcgctgatgcagtaagagcagccgcgggggatatggaggcgacggagattcaagagatcttccagttgctgcgtggacgcacccaggagattctcgcgagggaaggggcatacagtaccgagcaggcggcaatgcgagcagccgatgagctagctcgccaggctgagcatgctgccatcatcgaacgtcgtaacgcgctgctgaatgtgcgcgctcgagcgcagctagtcagctttgtacgcaacacctttgcagatcgtcccgaccttggcgttgagtcttttttggtggggacaaacgttgcacgaaaaggggctcgcctctctgttgcggcagagcagaaggcactcggcgatgcatacattggcgggatgctgaatgacctggagcgaggcgatttggttggcgtccttgctcggggggactccgaccaagacatcgctgacgctttgtggcgcattggcaacgatcaggatgtgtctgacctgaatcctcaggttgtcgaaatcgcacagatcatccagcgataccaagaagcggcccgccttgatgcaaaccgagccggtgccagtattggacgcatccccggctacatcgcccggcagagccatgatagcgagaagatcggcgccgccggattcgatcaatggctttccgatattctcccgcggctggatcctcgcaccttcgacggagtgtcggatgtgaatgagtacatgcgcgggatttacgatggtcttgtgtctggcgaccatctgcgcgctcaaggcgatgctcgaccgaatggattccgcggccccgcaaaccttgcgcgcaagatgagccaggagcgcgttctgcacttccgcgatggaattggctggcacgaatacaaccggctctatgggaccggcaacctgcgcgaggcggtattgcgcggccttgacctgtcaggccagaacacggcccttatgcgccggcttggcacaaatccggaagccaacctgaacatggccctggatgtgataaagggagacattcagagcagcggagattcgcaagctctttccaatttcaacaatatgcggaaagagctagggatgatcacgaatcgattccgcgaggtaagtgggcagactcgaatccctggtaacgctgctgctgcgcgtatcgctgctaacgtgcgtgcctggcagtcgatctccaaacttggtggcgccttgctgtcatcgttcaccgacctcccggtcgcagcaagcgagatgaaataccaaggccgttcgttcctgggcagtctttcggaaatggcaaccggtctgctgaaggggcgcggtagccgtgagcaacgggaaatcctctcaagcttcggcgtctatgcggactccatgcgcggcgagatcatgcgccggttttctgctgacgactcaatgggtgggcgtatgtcccgaggcatgagccacttcttccgactaaacggtctgtcgtggtggacggatgcgaacaaggccagtgccggactgatgatgtctcacaacctggcgcagagtcgccgccaagcctggggatcgctgaaccctgatcttcggcgcgcactgagcctgtacgaccttgatgccggtaagtgggatttgctccgcgagatggacactcgaatggctgacggtcgtgactacatgaccccggacggtgttgcggatatcaccgacgaacgcattgcacagtatctgggagatcaagatcgtcccgtatcgcctggggctatccgtgagacacggcaggatctagagcgaagcctgcgggcatacatcaatgatcgagtgacctatgccgtactcgaaccagatgcgcgtactcgctcgatcatgaaccaagggactcagccagggaccgtcccaggggatctcctgcggttcatcactcagttcaagagcttccctgccgcgtacatgcaaaagactctgggtcgtgaactgtacggtcgtggctatacgcctgctggcctgggtgagaatttccgtggtggacgagacctgatcagggctctgcgcaatggcaatggtgaacgtctggcccttgctcaactggtgctctggacgaccgcgttcggctatctatccatggcatccaaggatgttgcgaaaggtcgtgagcctagaaatcctgatgactacaagacctgggttgccgctatggcccaagggggagggctagggatcttcggtgactacttgtttggcgaggctaaccgcttcggaaactctgccttggaaagcgccgttggtccaacgattagcactactgctgacctgattaacctgtggactagagcaaaagatggagatgatacagcggcttcacttcttcggctaacccagaacaacaccccgttcctgaacctgttctacagccgtatcgtgctcgaccatcttttgttctactcgattcaggaggcgcttaacccaggatcgctacgcaggacagagcagcgcatccagaaagaaaacgaccagcaattcctgattcgaccatctcaaagctatatcgatacagccggcgccatcctcaactag

SEQ ID NO: 332750 - DNA, 1740 bp, Pseudomonas aeruginosa
atgacgatctacacacaggatgctcctgcgcttgaccggcgcacgctgctggacattccggcagatactggtgatgtgtttggggctgcgtttgaatccgcattctcgaccaacccttcatcctcgattgtgcgcatggaggagttgaggcaggcagaggagggccgagggttcactaacgacagtgactcaatcgtagttcagcctcgcctggagcctgacacacctctcctgagcgctgaggatgcaagagcccgtgttgcagagtctggtctggatatcaaggttcccgatcaagggatcaggcaaggtgctctcgacatcctgattgacaggcaccgtgcccaggcggcacgccagcagatcatggctcgcgccggctccgggactatgccggcgcagatcgctgcgtcgctgggcgcttctctgctggacccgctgaacatcgcttcggcattcgtgccggttgttggcgaggcccggtatgccaacctactggctagggcagcttctccgctcggtcgggccggtgttcgggctggcgtaggtgcattggagggggcggtcggcgcggcaatcattgaacctctacctctgcttgcagcggctcaggatcaaacggattacgggctttctgactcactagccaatatcgcgcttggcggtcttcttggtggtggcttgcataccgtggggggagccatatctgatgcgctgaagcgtcgagtagtaagtgagctagacgcgcagccatctgtagccgctgccatccgtcccgagcctacggcgcgtcgccaggtcgactatgggcgcctctttgatgacgacccggatgttgcgcttaggcagtcccttgcgcgcggccttgaagccgatcaggtaaacctttaccaggcagcacgcagccaggccatcgaagagattcggccatcccttgtgtccgagcgggtgggcaacgttgcagaccttcgggcggagttgacccgccttgaagccagagagcagacgcttcccgacacattcaagactagggcgaaggaattccagggaccgagggtcagccgcaagcaggcggaacgtatggcgcgagacgccatcgcaaccgagagcgaacagatatcggttcgacgtgagcagatcaatgcagagatagagcgcaaccgttctggcgagatggcgcgtcaagatattgcggcgctcaaccgtggcgaagtaccggaacgccttgcgggtcgcgtagaagccagggctgcgcagatcatggaaggttaccgccaaaggccgcttggggcggcggtaaaaactgcccgtcaggttgctgaggagtccgactggacgatccgcgatgccgcacttcgtacggctgttagtcaggcaatgactggccgcgatatcgctgtagccgatcttttcgacttgcagaaccctgccaaagcagcacaggcgatggacaacctgcgccgcccgcaagagcgcagggttgatcctgaaggcgctgccgaaagccgtcgtatcgatgagctgaagtcgacagatgatcttgaggatgcccgccaggccttggcagatgacgaggcactgtcccgcgagatccttgaacagttgccagaggatcagcgggccatggtagaggcaatgggaagagaagaattcgccctggctgatgccgaggctgcgaaggctgagaaatattccaaagcctatcgggctgctgcactttgtgagattgggagaggttga

SEQ ID NO: 332751 - DNA, 2100 bp, Pseudomonas aeruginosa
atggcagcacagatcccgcaatatcggcggagggtaggtcctgacgttgcacaggcgcctcgcgcgcttggccagagcgttgatgcatcaggtctcgcccaaggaatcaactctgcggtaagcgcctttgtgcaggtccagcggcaggagattgaggacgcgaaccgtaccgctgttcttgaggcggacaatgggctgggcgcgtgggaaaacgatacgctctttaacccggagtccggcgccttcacaaagaaaggacgaggcgctctgaacatcacgcagtcgactctcgagtcgttcgacaagcagcgtgagcagatctccgcaaacctggccaacgagagccagcgtgagatgttcaatcaggcggcattgcgtcgccgtgaaggactccaggccaagcttgggcagtacgagttccgtgagcaacaggtctacaaggacgaggtcgataagtcttctatccaattggcgatggacactgctgcgctgaactacaacgatccgcagtctatcgagcaaaaccgcgccaagatggatgctgtgatccagatgcgtggcgcccgcatgggttggtcgcctgaagagatggagaaccagcggcgccaggctaacagttcgctgtcgcaggccgtcatccagcgcatgctgatcgactcgccgcagaaggctcgagcctactacgaccagttcaagactggcatgtctgctgaggaccagatccgtgccagcaatggcattgaccaagcgtttcgtcggcaggaggcggaggcgcgtcaacgtatggttgagcagcgtcagcttcaggcaattgccagggctgaactcagtagccgtgtacaggatgcccaggccgcatacctacaaggctttgactatgccgatcctccatctctggcggacttccagaacgcctatggtgatcgcgcgcaggagcagtgggattcgttccgcaaggtgcaggaagtcgccccggctatccgggagtttgctactgctgatccgtctgagcgtgaggccattcttagccgcttccagccaactgctgacggcgtggctaatgagggcttccgcgaggataaccagctctaccagcgccttttgactgtaggcactgctctaatgaagaaacagcagcaggaccctgccgcctacgtggctcagtacagtcctgctgtgcgccaggccctggtcaacgcccaggagcaaaacacgccggaggcctacgaggcctatgcgaacgccgcgattgctgagcagcaacgcttgggcgtccagaacatcaagattctcccagatgctctagcaaaccagttcgccgcggaattcaacagtcgtgtcgcatcagggcagggcgataccgctgctcaacttatcgagcagtaccaggcgcaatggggcaagaacttcgggtctgtgatccggcagcttggttcgaagttgcctgctgaggcccaggttatcgcaaccggtctgccgaaggatgtggctgagcgcatggcaagcgttgctccgctgaaggaaggcgaccttaaaaaggccatggaagatgggcagttgaaggagatccagcaggctgtgcaatcggagatgtccgatttcgccgcaacccttatggggcagtctggcggcctcaacaccttcaacaccatgtaccaggccgcggttaagactgcgtccgcatacgttctgcaaggcgagaaaccagccaaggcggcgcagcgcgtagtcgctgggatggctggtgacaagtatgacctgttcggcacctaccgagtgcctaaggatctagacaccagcgcggtgagccgtggtgccgatgtgtctctggagaacctgaagcctgatgatctcatgccgcttcctggcaccccaggcgtggaagagtccgagaacatccggcaactgcactcggcggttatcgacaacggccagtgggttacgaacggtgatgagacaggccttagcctcacgctcaacggctaccgagtccttgggaaggatggcaagccgatcacccggacgtggagcgagctgcaagagcaaggcaccaaggcccccgcccaatatcgcgttgcacctcttggaattgttccatga

SEQ ID NO: 332752 - DNA, 243 bp, Pseudomonas aeruginosa
atgcctaagtcgtacagggtcttggagcgttcgtttatcaacggccagctcaaggagaaggactccattgtgactctggaaattgacagccccggcagcaacctagagttggtccctgataattctagtgccgacgagcgagagtccatcattgctgatctgaagctgtacggcattgatgctgacaagcgcacaagcctggagaaactgcgagcaaagcttgcagaagtcaaaggcgagtaa

SEQ ID NO: 332753 - DNA, 393 bp, Pseudomonas aeruginosa
atgcttttcgataagaagcttctgatgtcgaacgctcaggcgattaccgcctctgcggcatcgaccgatgttatcgaccgtggcgataccaaggatgttggtcgcgctggagatatcccgttgtgcatccaggtagtcgaggctttcaacaccctgaccagcctgaccattgagctgcaaactgacgacaactcgggattcggttctccgcgcagcctgttctcggtagttgtgccgctggccgatctgaacgtcggttatcagacgccagtcattgttcttccgcagaagaccgagcgttacctgcgtctgaactacaccgtgactggcacggctccgactactggcaaggtgactgctggtgttgtagccggggtgcagaccaatgcctaa

SEQ ID NO: 332754 - DNA, 996 bp, Pseudomonas aeruginosa
atggcaattctcacctcgaccatgcctaccctgatcgacaaattcagtcgtcaggacagcacccagaagatcatgaagatcgtggagctgatggcaaagcaaaacgacattctcatggatgccgaatatatggagtgcaatgacggctccaagcataagaccaccatgcgctctggcattccagagccgacctggcggatgtttaaccaaggcattcagcccagcaagtcgactaccgttccggtactggataccacgggcatgatggaagactatggcctggttgataaggctctggccgatctctcgggtaacgcagatgctttccgcgcctccgagaaccttggaaagctgcaaggctttaacaacaaggccgcgcgctacatgttctacggcaacactcagaccgaacctcaagccttccttggtctttcgccgcgctacaactccttggcagcggaatctggccggaacatcgtcgatgctggcggcactggctcatccaacacctcgatctggttcgtgacctggggcgaactgactacgcacctgctctatccgaaaggcagcattgtcggcttccagcatcgtttccttggcgaagataccgttaaggatgatgtgggcggcgagttccaggcgtaccgcgaccacttcaagtgggatatcggcatgtcggttcgcgactggcgcgccaacgcccgcgttgcgaacatcgatgtcactcagctgacctccgatgcgtctgccgggccgaaattgatcgagaacatgatcaaggcttactacctgctggataaccccatgcagggcgaaggtaaaaccgtgatctacgccaaccggaccattcagaccttcctgcatctgcaagcgatgaactccaagaatgtcaacctgacgctcggcgagtacgctggccgcaagatccctgaactgctcggcattccgatcaagcgctgcgacgaacttctcaacactgaagcccgtgtggtttaa

SEQ ID NO: 332755 - DNA, 462 bp, Pseudomonas aeruginosa
atgagcattggtcgtcctaccaagtacaagcccgagtacgtcacgacagctcgggcattggcaaagctgggcgcgactaatgccgagatggcggaagcgttcggggtctccctctctacgttcaatctgtggaaggtgcagcacgaagccttttcggatgccataaaaatcggcaaggacgttgctgacgctcgagtggttgatgcgttgtaccaccgagcaatggggttcagccatgtcgacacggatatccgcgttgtggatggcgcaatcgttgagacgcccatcgtcaagcactatgcccccgacactaccgctgcaattttctggctgaagaaccggcgccctgatgagtggcgcgacaagcatgaccttgagcattctggccagatcaagatggcggaaatgagtgatgaagagatccagcggagaatcgaagctctcagccgagaggattcgtaa

SEQ ID NO: 332756 - DNA, 249 bp, Pseudomonas aeruginosa
atgcttggatttaccactaaggctgaggcgcaaaagattggcgcatcccaccatggcagctattacggcatccccgtgtggataggagatgtggacagcgattgccccctggttttcaccaagtgggcgccctttgaatttgtcgttgacctcttctcctacatcgagggcatcgtgaattccatgctcggccaagagccgacgttcatgttcaaggttggtcgtcgcatcgacgggaaagatgactaa

SEQ ID NO: 332757 - DNA, 417 bp, Pseudomonas aeruginosa
atgagcatctctccctccgcactcgacaccctcaccaaaacaatttggggtgaggcccgcggcgagggaagggaaggcatgatcgccgtagcttgggtgatcctcaatcgggcatccattggcggctggtggggcaacagcatcgagactgtatgcctgaagccgtggcagttctcatgctggaatgccaatgacccgaatgctccgtacatgagaggccgcaaggctatcccaggtcatcaatacaccgcagcacgcgaagccgctcttgccgctgtagaagggcatgagaaagaccccacgcttggcgctactcactactacgcgcccaaggccgtgaaagatcccgcttgggccaagtctgcgactaagacaacgcagatcggcggccacatctttttcaagaacgtgaaatga

SEQ ID NO: 332758 - DNA, 258 bp, Pseudomonas aeruginosa
atgactcaccagtattttgaccgaattgatgtttgttcggcgtctccacttcaccagcaggaaggaggagatcactacaggttgcaggccatccagcccgttcaatacatccatgccaacggaatcggctacctcgaagggaacgtgatcaagtacgtctcccggtggaagaagaagaatggaatcgaagacctgaagaaagccaagcactacatagagcttctgatcgaactcgaatccaagcaggagagcgtctga

SEQ ID NO: 332759 - DNA, 384 bp, Pseudomonas aeruginosa
atgaccaactcccgcgccaagggcgcccgcgtagagttggacttcgccaagctgtgcttcgaacacctgggcatcaaggtcgagcgcaacctcgaacaatcgcgtaacggcggacacgatctgagcggcttggatggctgggcgcttgagatcaaagcgcgagcaaacgtgcctgggcggaaagaactgctcggcatgtggactcagacccttgaccaggcccagcgcgctaagtcgaagccggcattggccgtgaaggtagaccgccgcggctggaccgtctacgtggatttggcagacctcagtgactcatgggtgccttgcaaatcctgggctgccatcgagccagaggactttttccagcttgtccgggagggaatgtga

SEQ ID NO: 332760 - DNA, 177 bp, Pseudomonas aeruginosa
atgagtcttctcaagcatatctggtgggccgtgcgtcacggtgactggagcgccggctgggacccgcagtggggaagcaagcctggcgagccattcatctggtgcaagccgatgtactacgacggccatcactgctacctacgcgtcggctacttctggataggagtgacctactga

SEQ ID NO: 332761 - DNA, 231 bp, Pseudomonas aeruginosa
atgaggcggcgcgattggtacgaacaacgtatagacaagcgtgcagcgctcgatgctgccgaagagaagggcgaggttgccgatagcaaagagttcaggctcgcgctaatggctcgggtccatgccggcgagatcagcatagaagaggctcagtcggagttgcgcaaggtgaaacgcaacgccaagaagaatgggcaaaaaacccgatctcaggtttggaggtcggcatga

SEQ ID NO: 332762 - DNA, 1398 bp, Pseudomonas aeruginosa
atggatgagcgtcctcttgtggctatggaggccgagcagagtgtacttggcgctctgatgaagaaaccggatctgtgtgaggttgttggagcgtttctctcgcctacggacttcagccatgccgacaactcggtgatctacagcctgatccttgcctgccattcgaaggcaatcgtccctgacccgctgtcgctggccgaggttaggtcggaactgccgagcggggcctttacactcgcttacgccaatgatctatggcgtgaagttgccagcacagctagcgccgaaaacttcgccaggatcgtcgttgagcgtgcaaaggccagggaactgtacgaagcgggcgagcggatcatgaacatcgcccttcagagagggaaaatcccggaccaggtggctgaagcacagagcatcgttcttgatctcaacgcccaggacgatactcctgacgtggtgacactgcgcgaggcaatgctcccagtcttcgacgaaatggaggttcggtggaagggaactcagtcggtaggactaaagttcaacctgcctgacctcgatgccgtcatccagggattgcgtcccggaaacctggcgatcatcgctggtcgccctggcacgggtaagactgttctcggcgtggggattgctgacgaaattgccgttcgcaaccgtgggtccgcattgatcttctctctggagatgtcccaggccgaacttgcaaagcgctcgctagcatcgctttctggtgtttcgcaagcggcgatcgactcaggcaaggccctggagtgccaggactctattgcacgcatgactgccgctgtggaccaggtctccaggggggatgtgcggatttgcgacaagggagggctgaccttcagtcgtatctgctccatcgcccgattccagcatcgagcaaagccgctgagcctgatcgtcatcgattacctcggtctcatcacctccgatccgaatcaccgtcatcagaaccgcaaccaagagcttggcgccataagccgagggctcaaggctctcgccaaagaacttggaattccgattgtcgcgcttgctcagctcaatcggagcatcgaaacccgggctgacgccaagccaaagatgagtgacctgcgcgactccggcgagatcgagcaagacgccgacgtgatcatcatggctcaccgggatatgagcacccagcgtggacagaacggaatcactgagttggatgtagtgaagtgtcgccacgcaaaaccgggcttctgcctgttgcaattccaaggcgagttcgcgcggttcgtcagttgcgcacaggatcgtgaagagcaacaggaacagcaagttcgctcgcaacgtccttctgcccgatccatggtcgccgacttcaagccgcggggtgctcagtga

SEQ ID NO: 332763 - DNA, 795 bp, Pseudomonas aeruginosa
atgaccaacgtaattagtctaatcaagtcccaagggtttacccgtatggacaatgacctgtatgaggccctcattggggctgacctgtctggtcgagaacttagggtagctttggctatccaccgtttgacggttggctataacgtcgctgaggcacgtatagctgcgtccgtaattgctgatatgtccggcatccacagagaggatgtttcccgtgctatctgcgagctgatccgccagcgagtgatttaccgcactgggggtagccggagtccaatgggtttcgctccggtttctgagtggaaaatcgatgaaaagaacactcatcagaataagcagaaatcggtgccacagtgtggcgtttccaccacttccagtgtggcgttcttgccacacaataaagacagtaaagacaattcagttccttcggaacttgtcgacgctgtcgcttcgaccgagccaagtttggttctctacggatcgccgtctccggatcagcccaagtctgagcgcatcccgttctcccgtatccaggaaatctacaatcgggtttgcggtggcaagctgcccgagtgcttgaagctcagcgaagatcgcaagcgcaacattcgcaagtgctggaacctccagttcggaggtggctacccattccgcaagggtgagttctgggaggggtatttccatgactgcctcaccaacaaacattggcttggagagaacgaccgtggttggcgtgcagacattgagtttctgacccgagaaaagaccgtgttgaaagtcctggagggcgtgtga

SEQ ID NO: 332764 - DNA, 669 bp, Pseudomonas aeruginosa
atggcttccagcaaagacacccttgctaacaatttgttgttcttgatgtcgtcgacgcctgagctttctactcagcaagcgcttgagcagcgctcaggagtagggcaaacgaccattggtcggattctcaggagggatacagaggcgaaaatcgatacagtttccgatctagcacgcgcgttccgcgtctcagcttcagatctgatagaccctacctttattgagcgtatttctggcgcgtcgtctaatatctccgggacgaaaggcaccacgggaagagtgcctctgatctcatgggtgacagcacgcgccatgtacaacactatcgatagcatggacaaaggaaatgctgaggaatggctggactcgcccttctcgcatagcaaacggagcttctgccttaggctgcgtggagaaagcatgctgccagaatacaaggagggagaaatcatactgatcgacccggatgtcatcgccaagcataacgatgacgtgcttgcggtattgccagacgggatgattacgttcagacggctacaggatagttatgatggtcagtacctattgattatcaatcaatcgttcccagacagagtcatgcggctccctgagggcaccgttatttgtggcgtatgtatcggatcatggttcgaaagaagaacaaaatag

SEQ ID NO: 332765 - DNA, 828 bp, Pseudomonas aeruginosa
atggcgagcaagaagaaggcttcgcaggagaccgctttggtcttgagaacatgcagtgctgatctcaccagccacggagggtttcagtggcccgacaagatcggagcggtagtcgaagcccctgactgggaaaaggacaacaagtgcggtcacggcctgcatggctggctgttcggccagggcggccatggttgcagtagaactgtcggcgacgccgatgcgaagtggctggtggttgaggtgggtctctccgacctgatcgccctcggcggcaaggttaagtttcctcgctgcactatccgccatatcggggacagagcgagcgcaacccaattcctgatcgcaaacgaaccccgcgcggctggcgttgcagtgatcggcgccaccctacaggctggcgataaggagctctgccaggtgggcgcctatggcaccgccaccgccgggaactggggcaccgccaccgccgggtacaagggcaccgccaccgccgggaactggggcaccgccaccgccgggaactggggcaccgccaccgccgggaactggggcaccgccaccgccgggaactggggcaccgccaccgccgggtacaagggcaccgccaccgccgggaactggggcaccgccaccgccgggaactggggcaccgccaccgccggggacgagggcaccgccaccgccggggagaaaggcgagatacgcatccgctactgggacaaaaaggccgaccgctatcgcaccgtcatcggctatatcggcgaagacggtcttgagccgaacgtgccatacaagctgaatgcagatcacaagttcgtccgagcgtga

SEQ ID NO: 332766 - DNA, 330 bp, Pseudomonas aeruginosa
atgagcatcgttaaatggatggtaagtcatttggatgacaacccgcggctctgcgaattcgtgaaagagacaaatcacttctatataaagtcaaataaaagtcgcgaatcaaagatcagtcgttatcatgatttctttgatacagagcaggaagctctagatttcatccagtctagaaaacagagaaaggaagagaataaaaggatgaaaaggatccaagacgcagcgcctgatcttctggaggctctagtagatctgattgagtgcgaacacaccacaccagagctttgggaagcagcccgagccgcaatcgccaaggcaaccgcctaa

SEQ ID NO: 332767 - DNA, 237 bp, Pseudomonas aeruginosa
atgagcgagtggatcagcatcaaggatcgtctaccagaagtggcaattcgctttgataagccatgtgcgctggaaggtaaggaactacctcccctaaatcgtagccatcaggtgatcgtctttgacggctacgtagtaagggccatgcacatcgaatggttcgacggtggcgagcccgtaaatggaatcacgcactggaagccgcttcctgatgcgccgacgaaggagtgcgactga

SEQ ID NO: 332768 - DNA, 225 bp, Pseudomonas aeruginosa
atgagccaagagttcttcactgctgtctttcaagtaaaggacagtgagcagtttaaagaattagcaaaacagatcactgcgagtcttgcagaagaaaaagaacttagcggatcaattgttactgccgccggttggggtgacgaaatgaccgccgccgacaacatgcgcgcatggctggataaccgcggcgaggacactgagtccatcgagcgcggtgaggcctaa

SEQ ID NO: 332769 - DNA, 1068 bp, Pseudomonas aeruginosa
atgtccgcagaaaaccaactggtcgaagtaccagccaaagaaaccgctctgcaagtctactcggcagccaatggcctggatcccttcctggccaagattcgcgaagagatcgacggcttcgtgccggatgtgaccactcgcaagggccgagaggcaatcgcttccatcgcctacaaggtagcccgctccaaggcggcgctggacaacgtgggcaaggaattggtcgctgagctgaaggaggttccgaagaagatcgatgccgagcgtaagcggatgcgcgatctgttggattcctggcaggccgaagtgcgcaggccgttgaccgagtgggaagaagccgaagaacagcgcgtcgctgcccatcgctggaacatcgactggtttgctggccaggtggagtatgcccgcgacggcgatgccgcgaagtatcgagccgtcttgtcggaggttgacgctaaggttgtcgatgaggcatgggaagaattcgaggccgaggctcaccgggcaaaggcgcgagcgcttgactcgttgagtgcggcgctggccgatcgcgagaagtacgaggcagagcaggcagagctggagcgactgcgcgccgaagcagcagcacgcgagcagaaagagcgcgaggagcgtattgctcgggaagctgctgaagctgagcgtcttgccgccgaacgccgcgcccaggaagagcgagacgccgccactcgccgagaagctgaggcaaaggccgccgctgagcgccgcgaacttgaacttaagcttgccgccgagcgcgccgaacgcgaagccattgaagccaagcagcgcgcagaacaagcagagagtgatgcgcaacgtcgcgctgaagaagccgcagcggcagaacgcaaacggcaggccgatgagcaggcccgcatcgaacgtgaagcagctgcccgcgaagccgacaaggcccacaagaaagccatcaacaacgaagccctggcggccctgatcgccggcggcatgcccgaggaatgcgccaagcaggcgatcaccctgatcgctcagcgcaaggttcctcacataacgatcaactactga

SEQ ID NO: 332770 - DNA, 180 bp, Pseudomonas aeruginosa
atggatacgttgaaaccctgcaaatgtggctacgacggatccctggctgggatcaggcataaagagggatacctatctttgcactgcccgaagtgcaaccactcagttcaggcattcaccggcgagggcctggtagatgcctggaacaagtcggtcagcaaggaggtaggtcatgagtga

SEQ ID NO: 332771 - DNA, 459 bp, Pseudomonas aeruginosa
atgagtgaggtgaagcgtttcgaccatgtgaaccatgctcacattgatgactgtgaacatgttgagtccagcgaaggggcatgggtgacggcctccgactacgacgccctcgccgccgaggaccagtcgctaagggaggaagtcgcagccctgcgcgcaagggtggctgttgtgccggatgggtacgcgcttgtgccggttgagccaacgcgggagatgttcattgccatcaacaaggagaacgacaaggcctatgccggtggctgtcatcacggcgcacagtttgaatggctgtgggctgctgcgattgaagccgcccctcgcctcaacggcctgacggtcagcgaggggctgttgcgcaggctgtgtgagccactgctttcgcatgctgattacgtcgtagctcgcaacgaactccgcgccctgctcaacgaggataaggagaacggcaatggctga

SEQ ID NO: 332772 - DNA, 339 bp, Pseudomonas aeruginosa
atggctgaagaactaaaaccgtgcccgttctgtggatgctcgatgcgcctagagagcaaccgcgactggcataggatcgtaggcgagcacgctttagagtgcgccttctcggacagcgaaacaatggtggtgccggcaacaaaagagcagcgtgatattgctgtctccgactggaacaccagagccgtccccgcggaccatgtggtggttccgcgggaagtcctggagcgctccattgatcgctgggcatgctgcgccatgtcgcagacgccgggcgctgaagaggcatgggaagaactccgcgccctgctgagcgagcaggaaggagggaagcaatga

SEQ ID NO: 332773 - DNA, 147 bp, Pseudomonas aeruginosa
gtggacaacgacaacgaaaccatattggcagtgatagtcatcgttctcttcgtcctgggaatcttccgggtcgtcggggatatgcaggaactctacaggcagacagagctgaaaggacaggagttgagcagatggagcaagcaatga

SEQ ID NO: 332774 - DNA, 306 bp, Pseudomonas aeruginosa
atggagcaagcaatgagagacgagtttgaagcgtgggcgactaaccgatgcgtctctatcatgaaagcgcccgaggcgatgatgttcttcggtggacgccgagttcctgctggctgctacatcatggctgacacagagcttgcatgggaagcctggcaagccagccgcgcggctctgagggtggttttgcctgcaaagcgctcatacagcatgtacgcaaccaagcatgagtgccacgcgttcaacgacgccatagagaaggtaaaagaagccctccagcaagccggaatcgaggtggcgccatga

SEQ ID NO: 332775 - DNA, 210 bp, Pseudomonas aeruginosa
atgaagacgtttttgaagatgctcgcatattgcgtgcttgggacatccattggcattgccatcagccaatggttcatcttcgtcctagagatgaggcttggcgccgtgctcgggtacatcgttggccttggccctgtgctgcttgtgctttgcattttgggcagcttcctccaatggctgattcataagaacttggagaaaaagcaatga

SEQ ID NO: 332776 - DNA, 1524 bp, Pseudomonas aeruginosa
atgaccgaacacaccgctccgacggcgcccgtcgccgatgtctgcctgctgctggagggcacctggccctatgtccgcggtggcgtctccagctgggtcaaccagttgatcctcggtctccccgacctgaccttctcggtgttcttcatcggcggccagaaggatgcctacggcaagcgccactacccgatcccggacaatgtgctgcacatcgaggaacacttcctggaaaccgcctggagttcgccgaacccgcagacgcgacagggcagtagcgagaccgaaaaggcgttgcgcgatctgcaccgtttcttccactacccggagacgccggacgtggaggagggcgacgcgctgctcgacctgctcgccgagggccgcatcggccgcgaggactttctccacagcaaggccagttgggaggcgatcaccgcaggctacgagcgctattgcaccgatccgtccttcgtcaattacttctggaccctgcgctcgatgcaggcgccggtgttcatgctcgccgaggcggcccggcggatgccgcgggcgcgcatgctgcactcgatctccaccggctacgccggcctgctgggctgcatcctgcaacgtcgctggggctgccgctacctgctcagcgagcacggcatctacaccaaggagcgcaagatcgacctggcccaggccaactggatcgcggagaaccccgacgagcagctgagtaccggactggatgccgaggtcagctacatccgtcgcttgtggatccgcttcttcgagcgtgtcggcctgctcacctatcgcgccgccaatccgatcgtcgccctctacgaaggcaaccgccagcgccaggtactcgatggcgccgagccacggcgcacccgggtgatccccaacggcatcgacctcgatgcctgggccggcgccctcgaacggcggccgccggggattccgccggtggtcgggctggtcggccgggtagtgccgatcaaggacgtgaagaccttcatccgcgccatgcgcggggtggtcagcgcgatgccggaggcggagggctggatcgtcggtccggaggaggaagatccggactatgccagcgaatgccgcagcctggtggccagcctcggcctgcaggacaaggtgaagttcctcggtttccgtcggatcggcgaggtcctgccgcaactcggcctgatggtcctcacctcgatcagcgaagcgcagccgctggtgatcctcgaagcctgggctgccggcgccccggtggtgagcagcgacgtcggctcctgccgcgaactgatcgaaggcgccgacgccgaagatcgcgccctgggtcgcgccggggaggtggtggcgatcgccgacccgcaggccacttcgcgggcgatcctcgccctgctgcgcaatccgcagcgctggcaggcggcccaggcggtcggcctgcaacgggtcgaacgctactacaccgaggcgctgatgctcggacgttaccgcgggctgtaccgcgaagccacggagattgcatga

SEQ ID NO: 332777 - DNA, 867 bp, Pseudomonas aeruginosa
atgcctttcctgtatcgccttgcctcgttgttgatcgccctcctcgtcctgccggtgcaggcggcggaaatgcgagtcgccctgttgcgcacctcgggagtggaaaccctcgatgcgctcaccgtcgacggcggctcctgggtgcgccgggtgccgctcagccataccgcggtgctgatcgagcaccatgccgccaccctgctcttcgacactggcctggggcgcgacatcgacgcccagttccgcgccgacatgccctggtgggcggcgccgctgttcgcttaccagaaagtcgtcccggcgcgcgaccaactggacgcagccggtatccgcgtcgatcgcatcctgctgtcccacgcgcactgggatcacgcctcgggcctggtcgacttccccgaagtaccggtctgggcaccctacgaggagatcgccttcagccgcatcgccaccccgccggccgccttccccagccaattccgccatggcgtgcgctggcgaccttacagcttcgatccgcagccgttcatgggcttcgacgaaagcctcgacctgtttggcgacggccgcctggtgctggtccccctgcccggccatacgcccggctcggtcggtctgttcgtcaccctcgacagcgggcgccggctgttcttcagcggcgacaccagttggcgactcgaaggcgtcgaaggcccgcggcagaaattcttcgccggccgcgccctggtcgatcgcgatcccgcgcgcaccctcgcgcaactggcgaagatccgcctgctgctccgcagcgacccgcgcctgagcgtgattccggcgcacgatgcgcgggtccaggccgccctgggctacttcccgcactggctggaatag

SEQ ID NO: 332778 - DNA, 1665 bp, Pseudomonas aeruginosa
atgacgacaccgatctctcccccgccgcagtggtcgcggcgccgccaggaaaagcagcggcgcctcgagcgcgtgcgcggcctggctgacggcgcggtgctgccgcgcgaacgcctggtcgccgcgctggaggcgctgatcgcgccgggcgatcgggtggtgctggaaggcaacaaccagaagcaggcggatttcctctcccgttcgctggcgcgggtcgatcccggcaagctgcacgacctgcacatgatcatgcccagcgtcggccgcccggagcatctcgacctgttcgaactgggcatcgcgcgcaagctcgacttctccttctccggcccgcagagcttgcgcatcggccagttgctcgaagacggcctgctggagatcggcgcgatccacacctacatcgagctgtacgcgcggctggtggtcgacctgatccccaacgtggcgctggtcgccggtttcgtcgccgaccgcgaaggcaacgtgtacaccgggccgagcacggaagacaccccggcgctggtggagcccaccgcgttcagcgacggcatcgtcatcgtccaggtcaaccgtatcgtcgacgacccgcgcgacctgccgcgagtggatatcccggcgtcctgggtggacttcgtggtcgaggccgaccagccgttctacatcgagccgctgttcacccgcgacccgcgccacatcaagccggtccacgtgctgatggcgatgatggcgatccgcggcatctaccagcggcacaacgtgcagtcgctgaaccacggcatcggtttcaacaccgcggccatcgaactgatcctgccgacctacggcgagtccctcggcctgaagggcaagatctgccgacactggaccctcaacccgcacccgacccttatccccgccatcgagagcggctgggtcgagagcgtgcactgtttcggcaccgagctgggcatggagggctacatcgcccagcgtcccgacgtgttcttcaccggtcgcgacggctcgctgcgttccaatcggatgttctgccaactggcaggacaatacgccgtcgacctgttcatcggcgctaccctccaggtcgacggcgacggccattcctccaccgtcacccgcggacgcctggccggtttcggcggcgccccgaacatgggccacgacccgcgcggccggcgccactcgacgccggcctggctggacatgcggggcgaacccgaggccttgctggagcgcggcaggaagctggtggtgcagatggtcgagaccttccaggacggcggcaagccgaccttcgtcgagcgtctcgacgcgctggaggtggcgcgccagaccggcatgccgctggcgccggtgatgatctatggcgacgacgtcacccatgtgctcaccgaggaaggcatcgcctacctgtacaaggcgcgctccctggaggaacgtcaggcgatgatcgcggcggtggcggggatcagtccgatcggcctgcgccacgatccgcgcgagacccagcggatgcgccgcgaagggctgatcgcgctgcccgaggacctcggcatccgccgcaccgacgcctcgcgcgagctgctggcggcgaagagcatcgccgagctggtcgagtggtccggcgggctgtaccagccgccggcgcgtttcaggagctggtga

SEQ ID NO: 332779 - DNA, 888 bp, Pseudomonas aeruginosa
atgttcaccggctccggctcgttcgtcgatgccgagccaaacctcttcgatgttctcatcgtggatgaggcgcaccgcctgaatgaaaagagtggcttgtatgccaacctgggtgagaaccaaatcaaggagctaatcggggcgtccaagtgcacggtcttcctcatcgatgaggaccaacgcgtaacgctgagcgacatcggtagcaagcaggctatacggcattttgcagaagctaagggagcagtcgtcgaagagtacagtctggcgtcacagttccgctgcagcggctcggatggctatcttgcgtggctcgataacatgctggacattcggccgaccgccaatgatcacctcgacccaagcgactacgacttccaggtgttcgatagtcctcaagcgctgcatgaggccatcgaagcccagaatgcccataacaaggctcgagtagtagcggggtactgctggccttggcgcagcaagaaagatccatcagccgatgacatcgtcattggcgattaccgacgacaatggaacctaagccaagacggtagcctatggatcattgccgaccgctccatcgagcaggtgggatgcatccatacctgtcagggcctggaagtggactacatcggcgtgatcattggtcccgacctcattgtacgtaacggacaagtcatcacagctcccgaggaacgcgaccagcacgataagtccatccgcgggtacaaaaagctgggcaaggccaatcctgaacttgcccgacgagaaactgatctgatcatcaagaatacctatcggacgctcatgaccaggggcctgaaaggctgttacgtctactgcacagacgcggaaaccgcagcctttttccgctcaacgttgacctga

SEQ ID NO: 332780 - DNA, 453 bp, Pseudomonas aeruginosa
atgcggttcccgaacttcagcgagcccccgtccgtgagcagcaccctccccttcggcacaggcgatgcctcctaccaagccgctggcggcattgacggcctgcgccgcctggtcgacgacttctaccgattgatggacgaactgccggacgcagccgacctgcgccgcatgcacccggaaaacctggaacagtctcgcgacaaactgacctgtttcctcagcggctggctgggcggcccaaggctgttcagtgaaaaatacggctccatctccatcccgtccttccacgcccaatggccgatcgacgaagcccgcagcgccgcctggctgggctgcatggagcgcgcaattgccctgcagcccttctcgccggagttcgccgaatacctgctgacacaactgcgcgtgccggcacacagggtggtgcaagcgagccggacgcggcacggctga

SEQ ID NO: 332781 - DNA, 1404 bp, Pseudomonas aeruginosa
atgaagcgctcgaatacagttgcgtttgtatccgccggtatgttgtcgcccaagaagcgcgatcatatgctcgcccgccgacagctctatcttaactacggtgcattatcgctagccacgatcctagattccatggggacctcgaccctggttgtacatggcgaacatgacgagcccgccgacgtgcttgccatgctgctcgataaaggcgtatttccttcccagttgccggtaatgctatccatccccagcttctatgcccttccgtgggcacagaccttttgccggctagtgcgcggtgctgatccggatgcccggatcattgttggtggacgttgggtcgttgggccggatcctgattggttgcgtgcgaaactgccggaggtggacctggtcgttccaggactggcagaaccgcttatagcaagcctgctcacgaacgcgccggacttgcgtcgcctgcctgcgccgacaccagacgtggtcttgaatcatccgctggtatcaggcttcgagcgctatcaacctagcattgaggcatcgcgcggctgtgggatggggtgcgctttctgtgaggagcgggatatccggctcgagaagctgcgtgcgccggagcagattgccagaacgcttgcggcagtcgctagccagtatggcggcggcgagatccggccctatttccaatcatcgatgtttgcccccaatgaaaaatggggtaccggcttagcgaatgcagtccgggccgccggccttgatgtctcgtggcggacggaaagccgtgtcgatgcgctcacgcctgaaacgatcgcttgtctcgccgaggccggaatgcgggtgctcgatctcgggctcgaaacggcgtcaccgactcaaatcctaaacatgcgcaaatcgcccgatccggatcgctacctagagcgagcgtccactttactcagggcatgcagtgatcacggcattgccgccaaggtcaatgttttgctttatgccggggaaacgaccaagactctcgacgaaacgcgttcatttctcgatgagcacaaggactcgatcgccggagtttcggttggcccagtcgtggcctatggtccaccgaaaaccgcgaacattcttatacatgaatggtccagaagcggtgcctcgccggttgacccaagtagcgcgaacgacagtgggatatcaatgattcatctcagccatgatttcgatgccaagtcggcggaggccgcaagcttagaactgtctaggcgctatatggatgcagatgcatatttcaatctgaagagtttctcctattatccacgtgattacgcgcgcgcggacttcgatcgcgacgttgcagcaagcgaaacatcgcagttgccgtttcgcacatcccttcctagctgcgaaaaaagccgatag

SEQ ID NO: 332782 - DNA, 612 bp, Pseudomonas aeruginosa
gtgctatttgtaagcattgagggcattgacggtagcgggaagaccgagcaggttaagctgcttgttgagcacctcagaaatatcggtcgaactgtactacagacaaaggagccggatgggggccatttgggtacggaggtacgggcgatcctaacgcactccgaccgccaactcaccccgacagagcagctgttgttggtaagtgctgcgcgatttgatcatgtgcgcagtgttatccggccagcgttggcgagtggccagtgggtcatatctgatcgtttcatcgattcgacttatgcgtttcaagtcgcagtgtccgacgccgacctccgacagctgtttcgctccacctgcgatatcgtcgtgggctccacactcccagatcttactatcatcctcgaccttccccttgaggtcgcgcgcggccgacgggatcagcgccgcaacggcgttctcgatccggcggaagcgacgcgggacttcgctgtcatccgcgaagctttgatcgcaatggcacgacaggagccggaacgctgccatgtcattgacgcagatcagccaccggatgcggtggcacgagacatctggcgcttggtcgaaccttttctttga

SEQ ID NO: 332783 - DNA, 2703 bp, Pseudomonas aeruginosa
atgaacccgcagacccgtaacctgcttatccagcgcgtgattgactcgcttggcatcttggcgcctggttcgatcttcgagcggttcggggtcgtgtttatcgaacatttgcgtgatgtgaaactcgtacagcgagggtcgtcggtcggcggcagtccagtcggtggcgcgctagatgcagtgtcggaagacgggtgtctggtagtcgaggcgtctatcgtgcagggatacttctccggttcgatggtcaaaccttggggggatcttgatcacaccctgtccttggcgccccgcgccaaggacatctatcttctgagctcccaacgcgcgcaaaccggcgtaatcgaagcgatggtcaacacggccttgcagcaagctcggatggctgggcggcacctccatctcatggacagccggtcgatcgcggaggcaatcatcgatacgctgatgctgcgggatgacgcgattgacgaccttgcccaactactgcccgtcttggccgatattcgcgatgaccaccccgcgtcgttgcgcgcgcctccagtcagcgctctttacgtacggaatgcagcggttgacgctgagcttgatcgacggctggaaatatcgaagtgtgttgagatcggcggcattggtggcattggtaagtcgcaagccgcagccgtgtgtctactgcgtagcgaatgccgtttcgaatacaggttttgggtcagtggtcgcgacatcgacagtgttgagagactctcgtcggtcccggtccagcgcggtggcgccgagcgtaatgtcagtgctctgctgcgtaggaacagcacattcctagtcgtggacgatgccaacccgagcctcgagataggacagctagccgcactgtgtgggcaggactctcggattctgatcacacgtcaaaatccgtcacctggagcgttctttatgcctaccatggaagagatgccggctcgtgaactactcggcaaaggactcgatacccagccgtctatggagatgttccagacgatttggcgcgcagtcggcggtcatcctctcagcttagtgatgcttaatgccgccgcgcacgagggcgtgtcgtggaacgagctcgccgaggactgcgccaatgttgccaaactgccgattggcggagcacggctcgctgaccgtattctcggacggctgaaacctgcactagaggaagagctgtgcttgttccaatgggcgggccagagtcactgcgatcgcgcgttcttcaagtacgtcgtggggcctctgcgcttgaaagcattcgagcgccacggtctaaccgctcccgagaacgaagcgtcaattcggatccatgatattgttttcactgccctgcaatcgttgaactggctttctgacgagaaggcacgacaaatcgacgatcgcctcgaggcgttcatcgtccagcagatccaccaggacggacacggcctgcagctgatcgcttcacagctaaggagcaagatcgccagcaatgtcacgaatggtgatcgacgtcccgccttcctatacgccttgtcgatggtctggatgggcagcgccattcagattcatttgctgcctaacccgcgtgaagaggcacatcggctcaagtctctgagcgcggctaataacgaggtggccatcttggtcgttctcgagtcaatcgaagcaaaagagcgctatctacggcaaggggctgggtcagcggatgcagcagcatggctaagaacggtcgtgcaagcctatggcgaccttgcggccatgactgatctcagcccgcgtcaaaccgctgaaatcaagcaccaccatgcaaagacgctccgtggcttgggggaacatgccgaagccgagcgcttattcgaagaggtggtcgccagctattcgctgaatgacgcgaaacttcaactggtgcggtctgtcggctgcaggcttgaaggctatgagaaggcaaagcaatacgcgtcagagatcatctctgcgaagctgagcagcggcagcgtctctccctcattgctgatggcgctgggtgatgttctcaatggcgcacgccagacttgggctggtgagctcattgaacagtatgaggaactgtttctgtcggaagcgctttacagtgccgccatcggtataccgcaaggctatcactctgtcgcgagcttcgtccgcgcactggtctggcatgcaccggagcgagtcgacagcctgcttgcgcgcctacccgaaccaacaccgttgatgttggatgatgaccagagccgcggcggctatgcggagattatgctgctcgcagcaggcgccggcgacgagcccatttacctaaaccgagctctagaagcttttgagacgctgaaagcgccgaaccactatcagaagcgcaaatggggcgaagcactttacaagctcggccgctatgcggaggcagaggctgttctcgagacgatcgaagacaagagcggctggatctggttggctcataatctgtcgcaggtgaaacttgagctgggtaagttcaaggaggctctcgatctcgttaacgactccgtcacgggagcgaccggcgtaaacgaaaaataccgcagtagcttccttctgcagcgagtaaaggtgaagagcgcgctacatcaggatccagcagacgatatcgctgagggccgtcggtacacaaccaacccaggccttctcgagcagttttccgcattctga

SEQ ID NO: 332784 - DNA, 210 bp, Pseudomonas aeruginosa
atgaaaacctgtaccgtctttggggatatgcagtctgacagtaccgccgaacaatacccgaccgtgaccctgtgtaataactgcgtcgagcaggacgccctgtctaaggatgatcgtcgaattatcagcctgggagcctacgatgagtccttcggcgacagctgtgagtggtgcggaaccacaaccgaggaagagggtgcggtacagtaa

SEQ ID NO: 332785 - DNA, 264 bp, Pseudomonas aeruginosa
atgagggtggtgctaatgctggtgataggcgcgctggcgggatgcgccggccaggtcgagcctgagccgcgcacggtgcgcgtagaagtgcctgttgcggtgccgtgccgagtgccggcggtagaagtgccggcctgggcagcggctgggctgaagaagagcgacgacctacagaccaaggtccgtgcgctgctggccgagcggcggcagcggattggttacgaggcgcaactcctggctgcgaaccaggcctgtcagaattag

SEQ ID NO: 332786 - DNA, 369 bp, Pseudomonas aeruginosa
gtgatctccgcccgtcctttatcggtcgcgctggcctgcctgctactgctcggcctcggcgccgccggcggtgtctggctcggcgcgcggcactaccggccgcagctcgatgctgcgctggcggatctggtcgcctgccgcgccgccaggggaggcctggaggacgcagtggcggagcaggtccggcaggttgccgcgctgcgtcaggctggcgagcagcgcgcccgggatgccgcgcaggctgtggatcggggacggcagcaggccgcggagcagtatgccgaagcccagcgcctggtacgtgagcgaaccgccggcgggcagtgtgcggccgccgaggcggtcattgatcaggagttgggtctatga

SEQ ID NO: 332787 - DNA, 630 bp, Pseudomonas aeruginosa
atgcctatcactgagcagcaactgctgcaaatcctcccgaacgccggccctcgcgccggcgtttttgttggtgcgctgaaccgcgggatgacgcgcttcggtatcacgtcgcctgtgcgagtcgccgcgtttctggcccagatcggccatgaaagcggccagttgacccgcctggtggagaacctcaactacagcgcgcgcggcctggctgcgacctggccgattcgctacctcggcgccgacgggcagcccaacgcgttggcgcagcgcctggcgcgcaatcctcgggccatcgccaacaacgcctacgcctcgcgcaacggcaatggcgacgaggcctccggcgacggctggcggtaccgcgggcgcgggctgctacagatcaccggccgggcgaactaccgcgccgccggcgccgggctgggccagccgctggagcaggaaccagagctgctcgagcagccggaattcgctgcgctgtcggcggcctggtggtgggccagtcacggcttgaacgacctggccgaccgcggcgagttcgccgccatcactcggcgcatcaacggcggcacgaacggccaggcggagcgcctggcgctgtgggagcgggcgaagagggtgctgtcgtga

SEQ ID NO: 332788 - DNA, 1125 bp, Pseudomonas aeruginosa
atggcatggtattcaaccggcaccgtcgcggtgacagaaaatagcccgaccgtcaccggcaccggaactcagttttcttctaatgtccgggtaggcgacgcctttattgcccctgacgggcgcctctacgaagtgagcaacgtcgccagttcgacggtcatgtcgataaagcccaactaccggggcagcacggctagcggccagccctatgcggtggcgccaatcctgggttacgacaaggagctgagcgatcgattcaacctgatagcgaaccagtggggagggacgctggccggcattcagccgtgggcaacggcaccgacgccggcccaggcgaggagctcgctcgagttgcgcagcgccgcccaggccgatatcggtacaacgcttggaaacgccatgccggtcggcgcattcgggattggttctgagcgtcctgaccgagcaccatcgattcatcgttatgcgacaagcgtcgagatattcgattcgacaactgttgactccgtggcaactggcattagcaacggatctgtgttgacgatcggctacgacggatccgacttgcgaggagcgcagatgtttttcggccaggtgccggcatctacggtcaaaggtcggtgcgggaaattctcgtctgcccctattttcgagttctacacgactataaacacgacgagagcaaccgacgggacgcttcgtgctgcatcgccagtcgtgcgtatcgccaacgttgatgggagcttgagaccggacctcaacgaactggacttcgagcctgcgggggcttggggtgtagccaacgcagaggcccgcggcgttactgttcaacggctcgccgttggcgtctacaaggtctctggtagcctggggctagcgaaagagggctggcgcgtgatcgaccctgcatctcccgacggcggtcgcccactcggtatcactgacagcgaacaggctgaggatgggacggtcaccatccggctcttcaaacagcgctggacactcagtgacgacggcgaaatggtgctcgggaagggcgccccactggatgtcccgctcaacagttggatcgatgtccgattgtcgatgccggcacctcccgagatgcagcccgagactctatga

SEQ ID NO: 332789 - DNA, 327 bp, Pseudomonas aeruginosa
atgcatgtattcgatgctcagtcgcgtgtcatgttcgacagtaatcgcgagattgtacggtttgttggaggggcgcaggagtgggagttatacgcacataaccctaattggcccggaggtatgcacatgcaaacatgggcacttccatatccatatgggttgtccacctattttctggtgagtcattttaatctaaagcatatctatactctggaaccccctcgtatagggttcctgtacaattcccgggccatgattttcgtctcctcgttagttccggatgagatcggatttaagttcaactggccactcattgttgtcgcgtaa

SEQ ID NO: 332790 - DNA, 648 bp, Pseudomonas aeruginosa
atgaacgatcgccacgccatttccccttaccccatccgaatgcctgttgatctgcgagccagacttgaggagagcgccagagatggggcaaggtcgctccatgcagagataatttctcgtcttgaggaaagctttcaggcccactccagtccggctctagatcgcatgctggcgattctcggcctccagagaatctacagagttcgcgcttgcgcaagcacgagcgacgcacttgatgaccttctttttgtgataaaccacgcaagccctataaaagcggtttggctcgcggttagggagggcgaacacaatcactcagcactgacagtggtaattgagatcggcgactttatcctgcttgctgatgaaaccctcctcaccatagagcggcggccacgcgagcttgagattcaagctttgatcgcggccttagataggcggggcatgcttgagggagccactcagtttccattgcagcgaatagttaagaccgctgacaagtccccagagactgcattcgaaacgattgcggacaacgattttgccatgctttccgttaagtctctcccccagttcttgaacctattcctggaggctccaagggatttttctcaggaatgtctcaatgattatcttgccaatggctag

SEQ ID NO: 332791 - DNA, 447 bp, Pseudomonas aeruginosa
gtgagctttgatattgatccacaacagattcaagatgccctgggcgatgggaagcagatcaacatacagaacatgctcgccttatcgctaagcggtcagccttgcgacatcaccttccggaatcggaaaccgctgatcgatgttgtgatcgaccgagagctgcattacgcgctgatgtatggggcgggtccggaaaaaatctcgaagatgctgccagggatcaagctgaaaggcggcgggagcttcgacttctccgatgtctggactatcaatccaatgccgaaaggtgggatcagcaagcaagaactcgactcggttgacctttcggatgctgatacccccatcggcccaaacggggagtcgatgcgcaaaatgatcagtgatacgtaccactgtgagactgctgaagagacggagtactacctccggcgtttctacgcttcctag

SEQ ID NO: 332792 - DNA, 444 bp, Pseudomonas aeruginosa
atggctgacctccgcccggtgacgttcaccgtacccggcgagccggtagggaaggggaggccgcgcatcggtcgtgtcggcgcccacgccaggatgttcacgccggcgaagacggcgaactacgaaaccctcatcgccctggcggcgcagcaggcaatggcagggcgtgagcctatcgccggtgccgtgctggtggagctgcacatcacggtgagcattccggcctcctggtcgaagcgaaagcgcgcccaggccctggcaggccagatctacccgacgaagaaacctgacaaggacaacgtcatcaaggcgatctacgacggctgcaacggcatcgtgtgggtggacgatgtccaggccgtggatggataccagcggaagcgctacggcgaaacaccgggcgtgcgagtgaaagtcgtccctctcctcgagggcgagcagtga

SEQ ID NO: 332793 - DNA, 891 bp, Pseudomonas aeruginosa
atgtccgcaaccgccctgaaagccgccgcgaccggcaatgtcgccaacaatggccagccgaaaacgctggcccacctgatgactgatccgaaaatcaaagcccagatggccctggcgcttccgaagcacatgaccgccgatcgactcgcgcgcatcgcgctgaccgagatccgcaaagtaccggccctggcgaaatgcaatcaggagagtttcctcggcgccgtgatgcaatgcgcgcagctcggcctggaaccgggtaacgctctcggccatgcctacctgctgccgttcggcaacggcaaggcgaaagatggcctgtcgaacgtccagttgatcatcggctaccgcgggatgattgaccttgcccggcgctccggccagatcgtttcgctcaccgcgcgcaccgtgcaccagaacgaccagttcagctatcgctacggcctcgacgaggacgtccagcacgttccgggagaaggtgaacgcggcgtcatgacccacgtctacgcggtcgccaagctgaaggacggcggcgtgcaattcgaggtcatgggtaaggccgacgtcgacaaagtacgcgccaccagcaaggcatccggaaacgggccttgggtcacccactacgaagagatggccaagaagaccgtcatccgccggctgttcaagtacctgccggtcagcatcgagttgcagaccgcagtcaccctggacgaacgcgccgacgccggattggaccaggacaacgcgtccatcctcaccggcgaatacagcgttgttgacgaccagtctcaggaccaggtcccggacggcgtgaacaccgagacgggcgaaatcaccgaacccgccccgggccagcagtcggacaccggcgacgacgggctcaatctcgagtaa

SEQ ID NO: 332794 - DNA, 525 bp, Pseudomonas aeruginosa
atggttcaaatcggcgaggttatcaacgacctgctggaaaaaggtgtcgtgaccattgatgggctacaggaaaacgatgccttcatcagcaccgtttctgaggtctgctccatcaccttgcgcaaccacgaggaagagaagctcaaggcgcttcggaatgcggtaaaaaactctgccttaccgacctgtccacctgacgactaccgtcagctcttcctcaactttgtagatgtctgcacacctacccacatcaagcttctgaaactcttctacaacccaactaagtggtttgctgaacatgacatcacgattccgaactggagcatgggtgggttaacgagtgtcgttgatctcgggatcccagaactgaaaggccatgaagaaatccgaagcgctatatggaaggacctatatcaacgcggccttataagtaccgacagtcttgctgccaccatgagcagagaagggatgctcgctggacggactactccgctcggatcgaagctcatagactttcttagctga

SEQ ID NO: 332795 - DNA, 237 bp, Pseudomonas aeruginosa
atggcgacggtcaacccctggcgtcggttcatcgggctcttaccgggcggcgcgcgcacggtgggggaggtgatcgacgtcgacgagggcgccggcacctgccgcgtccgcctgcgaaacaacgttgtgatcgcggctcggggcacggcggtgccggccgggcagatggcgttcatcagcgatggcctggtgaccgggccggcgccgcagctcccccagttcgatatcgaggtttga

SEQ ID NO: 332796 - DNA, 606 bp, Pseudomonas aeruginosa
atgcgcagtgtctgccacacgcggctagcccccaccccctcggtcgagatatcggtggccaggcagagtccgcgccacgtcgcctgttcgtctctgacctcgaccagcattcccggcccggcaccccgtcgtccttctggaacagcgggatgcgccgcgtctcgatcgcctggttaccgcccttcgacagctcgcagcacctcggtgccggtcatccagtcctccatgacgtcgggcgctgattccttgccggcggtagtggttcatggtggtcggcgaggcctggcgcaaggtgggagctatccggcccttacgctctccggcctggtcgctatgctgcccgaggtgatcacgcggctgacggtcgattcgtcggcgtcgagcgtggctggaggcctagaaatcctgggccaggttatggagtggcaactgcgggctgtcggccaagcgcaaggcctcagccaagtcgatgatccggcccagtcgaggcattgcctgtcacactgtgacaggtctgtgactggtcaccatcacgccctgcatcgggagcggccaactcgccagaggccgggcaattctgcgggctcagcatggcctcaaaattga

SEQ ID NO: 332797 - DNA, 957 bp, Pseudomonas aeruginosa
atgaacaatcgcaagacctacacccacctcccccaatctgacattgctctccagatcgagcgacttgtccaagtcatcgaagactctgactcaccggcataccgaatcaagcagactcgtacgggttacgagcgtgtcgaagagaccaggctctcccggtacttgatgcacatcaagcagatggtagacctgttcgatgatcgtgtgccctacgactacagcgagcacctgaaagcgttcagggaggcctgtcagggcgtcgggctggagcatggcgctggtggtcctgcctgtctgaatgagaacggtacgggctacctagatcaccatcgcagcatgaacgtcctggtcgcccggatccgtcagttgactcgtgaacagtggtatctccgccggaagcatgaccgccgccaccaagccaggaagcaggagatccaagtctgcgactacgccgatgccttatgtgagctctactcgcgtatcaccatcatcagggtcgacttccattaccgtgctgaggcgcaggccaggctacgtgccgagcacgtgttcgatgacctggatgatctgatctatgagcacagacggaacccgatcttcgagcatctcatcggccacatctactcggtcgagcaaggtgattaccacgagggcaggggctaccacatccatgctgcttacttcttcaatggcaacgaggtgcgtggcgatgtctacaaggccatccagctaggcgagttgtgggaagacatcacccgtggccagggctattcgcatagctgtaaccacgacaaggagcagtacggagacgagtgtggtatcggtcgcatcaagaggagtgatcgaaggattcggcgccatgtacacaaggtggtgaagtatctcgtcaaggatgctcagcatctgcgcttgaggcccgagggagctcgatgcctaaggacgggaatgctccgatag

SEQ ID NO: 332798 - DNA, 672 bp, Pseudomonas aeruginosa
atggcattgatcaactgtgaagaatgcgaccgcatggccagcgaccaggcggccgcttgcccacactgcggagcgcctatcgctaatcaggtcgccccagttcaaaccgtgccacacactctggtcagccgcagtgttggcttctggctcggcgtgggtatttttctgttcccgatcatcttcgtctggtttttgctgcgctcaggtcacagcaccaccagtcgtgtgattggctttgcctggctggcgctaatgttgttcggcatggccaatagcgagcgcagcaccacccggccagaggctacggtcaggactcagagccagccggccaaggtggccgtgcctgcggagcctctgcacgaatacaccgcccagcaactggctcagacctacgaccgcaacaccgtcgcggcggatcagcagtttaagggcaggcgcttcaaggtcacaggtgtggtggactccatcaacacagatctgtttggcaacccgtacgtcaccttacgtggtggggtaaaccagttcatggagcctcagtttcaactggatgaggcgcacgccaattacgctgctggtctgcaaagcggcatgcgcatcagtctggtgtgcacggggcgcggcgatgtagcaaaaacgcctatgtccaaggattgtgtgccggatgctcgatga

SEQ ID NO: 332799 - DNA, 1311 bp, Pseudomonas aeruginosa
gtgaatttagagagcctgcgactgcagaactatcggcgttttgccgattttgaaatcgacttcgatccagagctcacggttatcgctgctcgcaacggccagggtaaaaccaccattctggaagccattgctgctgccttcggccccttcgttggtgcttttgacatgggcaagtcgaagcatattgagcgtactgatgcgcgctatgtgtgcatcggcgatggttacgaaaacgagcaaaaatttcctgtggttgtggatgcacagatgcgcgcaccgggcatgcagtggcaacgagcactgctcagcgccaagagccgcacgaccaccaaggaagctgcgccattggccaactggggtaaagacctgcagagccaactgcgtaacgatgcgggtgtcgagttaccgcttgttgcctactacagttccaggcggctttgggtcagccacaagaacacgtctagcaaagcggtactgaccgagagtcgtaccgcaggttatgaagactgtctgtcgtcgctatccaactacattcagctacagcaatggatgcgcaaagcaacttatgccgtcattcagcagcgcgagcagccgggctacgcgctatcgaatctggaaccacggctgcaagggattagaaatgctgtcgatcaggtgctggcggaagaggggtggagcggctttcactacagcctggtatttgaagacttggccatgtcgcacccagatcatggtgcattacccctcagtttattgagtgatggggtgcgtgccatgatttcgctggcggccgaccttgccttccgctgcgcgcggctcaatggtcaattcaaggagctggcgccccagaaaaccaccggcattgtattgatcgacgaggttgaccttcacctgcatccggcttggcagcagcgcgtcatcggctcattgcgtcaggcatttccgcgtttccagttcattgtcagctcacacagtccgcaggtactgaccacggtcagtcgcgagcagatccgtgtagtacgacgagataaccaaggtaattggctctcggaaaaaccctcgcatagcccattggcccaggagtcgggtgatgcactggcatacgtgatggatgtcagccctaaaccccctttggacgtagtgactaaggcccacgcatacgagcaactggtgcgtagtggcaagggcaatgagagagaagcgctgagtctcaaaagtgaactggacgcgcaaggttatgaaattccccaggcgcaggcagcgctctgggcgtttttggcggagcaggcagggaagcagaagcatgattga

SEQ ID NO: 332800 - DNA, 1191 bp, Pseudomonas aeruginosa
atgcgtatcgaatccattcgcttgaagaactacaagagcttccgcgaagccagcattaccaatatgcccagtctgtgtgtggtggtgggcgccaacggcacaggtaaaagtaccctgttcggggtgtttggctttctcaaggactgcttactgttcaatgtgcggcaggccttgcagcaacgcggggggtttcaggaggttctgtcgcgcggtgctgatccgtccgaaggcatcgagatcgagatcaagtttcgtttggaaatcgcaggcatcgaccgcctggtgacctatgttctgcatctgggcgaggagaaaggccgtcccgtggtattgcatgaagtgctgcgctacaagcgtgggcgttatggctcgccattccatttcctggacttccgccggggggttggttacgcgatcaataatgaagaggacttcaaccgtccggatgaagagttggagcgcgaagaacagaaggttgcggcggattcactggctatcagtgggttgggccagttcgagcgtttcaaggcggccaatgcttttcgtcggttaatcgagcactggcatgtttcagacttccacatcagtgccgcacgcggcagcaaggatgccgtgggcgtggacgatcatctgtcggtgacaggtgacaacctgcagctggtggcccgcaatatctacgagaaccatcctgaggtgttcgaggccattcttggccgtatgcgtttgcgggtgccgggaatcaacgaggttattcccaagctgacggaagacgggcgattgctgttgcagttccgcgacggggctttcaaggatccatttatcgaccgctatgtgtcggatggcaccatcaagatgttcgcctatctggtgctgctgcatgacccgaatccccacccgttactgtgcgtggaagagccggagaaccagctctatccctctctgctcggtgagttagcggaggagttccgtgaatacgcccggcgtggtggtcaggtgctggtgtctacccactcaccggatctacttaatgccctgcagctggatgaggtgttttggctggtcaagacgcagggctatacccggatcaatcgcgctcaggatgatgcccagattgccgcctatatgaaggaaggcgatcagatgggctacctgtggaagcagggattctttgccggggtcgatccgcaatga

SEQ ID NO: 332801 - DNA, 576 bp, Pseudomonas aeruginosa
atgacgacactggttttctgtctggaggaagcctcggccaaagcgatgttacagggtgttctgccaaggttgctgcccgaggatattgcggtgcagtacatcgtctttgaaggcaagcaggatatgcacaagcaattggttaagcgcctgcgtttttggcagaagccggatagccgttttgtggtgatgcgcgatcaagatagcggcaactgcaaggtagtgcgtcagcagttgctggacttgtgccgcgaagcggggcgtgaggatacgctggtgcgcgtggcttgccgtgagctggagagtttctatctgggggatttgcaagcggtcgaaacgggccttgcactcaagggcctggcacggcagcaaggtaatcgcaaattccgtgagccggatgcgttggtcaatgctgccgaggaattgggcaagctgaccaacaagcgttatcagaagctgggcggctctcgcagcgtaggcccacatttgcgcctggatgacagcaatacctcacggagtttcaaggcgctggtcgacggtgtgagaagaatcagtaaggagatgtgcagtgacgcttaa

SEQ ID NO: 332802 - DNA, 807 bp, Pseudomonas aeruginosa
atgaaacggatactcagcattctgctgctcgctttttgcaccgctgtccaggccgatggccttgtggaccattacgcctggggcaatatcgctttcccggatgagacctctactgctggtcttcccgaagcgatcccgtgcgtcatccggaaaaccgccaacggacaacccggactgaaatgcacctggctggagacctcgcgcgaggtgcttatctggaatccccagcgacagcaggatgtacgttacgtcaaccaggtaagcggtacgtgcctacgcggtaagtgccggaccagcaatgcgatcgtgggtgagtggaatcaagacggctatttcgggctgtcgatctggtaccgcattggtgtcagcactgacggcaagccggtggcctaccgcgtcgacacctcgcgccaggtgtcgtatgccgaggcaggctctctcctgtaccagttctacctggatatcggcgtccctgatgaccgacttgttggcacgttcgatggacgctatgagggcggttacgcagcttggcaagcacagaaaggggaagcacgagcaacaactcagcagtcgacttcagcctccagtcgctttaaatggccagaagttaagagtgcttggtgcaacccccgcatggacgatgactgctacgtcaatgaggaacccgtggcgatagaagatctcggcaagtggctccctgcaattcgtcctgaagaaattgcggaagttgaacaggaaggcgggtactgcgaaaccatcctctgcttcagtagcgccgacaaaccactgggcttcaagccgcaataa

SEQ ID NO: 332803 - DNA, 354 bp, Pseudomonas aeruginosa
atgatcgtagtaaccggcctgaatgaagcgcagattgagaacctcgtgagaagcagagcgtccttcgagatcaatggtctcaggggcaacttcatggccggcatcaagctggtcgaaaccaagattgaaaaacaggggatgacttgtagggtcgtgagcgatacgaagagcgcagccgctcagggcggtgcgctcggtgttctcgccggcctcgctgcgactccggtgacagtgacggtgctggggatcgcagccgtcgccaatgcggggcatcgactgctaacccgaaatcctgactacgaaatcctgaaggactacgtgaatcagcggctccgggttatctacaaaaagtag

SEQ ID NO: 332804 - DNA, 306 bp, Pseudomonas aeruginosa
atgaacagacagtgcttgatctgcgactccagcgccgtgctgacacgggaagcagccaaaggactgaccctactggtcgggctgctcaatggcgtgataaagggcgctcagcgctcgcatgagggaagcggccatgccgatgttctctgcggtctggcagcagtcgcccccgcttacccggagacgcagaaggcggcagaagatgtcgcgcggtttcacttcaccggcttcgactgcctgtgcctacgctgcggcgctttgttcgacgagacagcagaaaatgaggggggccttagccccggctga

SEQ ID NO: 332805 - DNA, 1263 bp, Pseudomonas aeruginosa
atggcaacacatgacccacggaaggtactggaaacgctgcgtaaccatctgacgcagcctgaggcgaatgttgcctttctacttggtgcaggaacatcttgtgcggtacgggttcctgtcgctgtggaggcagcgagcgatcagcctcatcaagagaagcagactgatgcgcctttaactcggtcgttgatacctaacgtcgctgagttgaccaagatttgtgtgaaggagattcgaaagctagaccctgagggggaggcctcgcgattcgggccggcatacgacgcgattgaacttgaaatccgccccaaagatcgacctacgaatatcgaggacatactgtcctgcgttcggcggaagctgcaggcaataggcagcggagatactctttccgggctgactgccagcgatctctttgagctcgagaagactatccgggaaacgattgcggcccaggtcaatccagacccgtcgagctttcctgaaaaactgccacatgaggacttcgttcgttggatcgcgcgtatgccacgcgcccgcccggtcgagatcttcactaccaattatgacgtgctgatcgaaacggctcttgaggcagagcgagttccagcgttcgatggcttcgtgggttgtaaccggccatttttttgccatgacagcttaacgcgaccggagagtgcgccgggtgctgcttggacgaggctatggaaagttcacggctcgatcaattggcgtctcgacaccgtgcgcggtcgccagcgtgtgattcgaacagaaccgcacggggagggggaaatgatcctcccatctcatcataagtatgacgagtctcggaaacagccgtactcggcgttgcttgacaggcttactcgcgttctggaacgagatgacgcgatccttttcgtatgcggctacagcttttccgatgagcacattaacgcgatcatctttgacgctctggaggcgaaacgccgtccccacgtaattgctctccaatatgcggatcctgatgagggctcagtcttagcggaccgttcagctcggttcttgaacctcatggccctcggcccgcgcatcgcgcacataggtggtcgccggggagagtggcggctggaggaagttcgtattgcctctcaaattggacaggcattccaactggatgagattgcggagggggaaatgtctaacggaactggaacgatgctactcggtgactttgctcgattcgccgagttcctcggttcactgaccaggcctgcttga

SEQ ID NO: 332806 - DNA, 1803 bp, Pseudomonas aeruginosa
gtggccagcgtagacccaacatacgtcggccaggttgcatctgtcgccgggggcatagtgagggttcgccttcgacgggatctgcccactaccctcgtcttggtcgagggtgagtcttaccgtgttggtcagatcggggggttcttccggatacctgtcggctacacgcagttatatgcagtgtgctcccaggttggcgctgacgcggtgccgctttcctcggccaccgagcttgccatcctcgagcgtgatccagcaaaggaggaaggcctggcaggttatcgctggatgaccattatcctgtttggcgaatctactggcggacagttcgagcgcggtgtcggccagtacccaacagtcggtgatgaggttcactttgtcaccagcggcgaccttgcaatcatctacggccgtgggccgtcctcgggtggactgacgattgggaacgtggcctccaccagcggaattccggcaacgctcgacctggaccgctttctcagccgtcattgtgcaatcgtcggttcgacaggggcaggcaagtcgaatctagtgtctgtcatcttggaggcgctcgcttctgtcgagtttccatcggccagagtcttggtcattgacccccatggtgaatatgcgggagtggcaactggtcgctctgttgtcttccgacttacacctggcgaaggcgaacagccgcttgtagttccttattgggcacttcccttcgacgagcttctgtcgatcacgtttggtggcatgtctccgaccaacgaggcagcgatccgggatatggtccaagacatgaagcgtgaggcggctgtacacctccaaaacccgccgccagcggaggcgatcacagcggatagccccattcctttcagtatccggcaattgtggtttgatcttgacgattttgaacgtcgcacgttccgaacggagggcggccagcgagtaccaaccgaggtggaacgagccggtaatccgcagcagttaatctctaatgtctacccgatccatgcgcccggtgcgaaagaaccgttcaaaaacccctccccccgcggtatcggaaggcaattggagctagctcgcagtcgccttaccgacacgcgctacgcttttttgtttagcccagggggcttcacgccagatttgaccggaaggataggcgctgacattgacgggttggtcgcgtcctgggttggtcatgaaagaccgctcacaatccttgatgtttcggaactgccttcggatgttgcgagcgatgttgtcgggttgctcctgaggattgtttacgacacgctattttgggcgggctcactgagagttgcggggaggacgcaacctctcctaattgtcgtcgacgaagcgcatagattcctgcctgaaggtggtgatagcagctgccaccgtattcttacgcgagtcgctaaagaaggccgcaagtatggagtcggccttgcggtcgtgacacaacgccccagcgacgttgatgctaccgttctgagccagtgcggaactatgattgcgcttcggaccaccaacccgggagataggagtcgagtcgctgccgctttcccggatgatcttggaggacttgtagatctgctgccttcgctcagaactggcgaaggtctgttcgttggggaggcgatgtttgttccatcccgcgttcgggtgcacctgacacgagcaccggaagggggcgcggaccccaaggtttccgcaaggtggaggacggatccaagaccggatgcgactctctatggactagctttgcgcaattggcgccgccaggtaaaggactga

SEQ ID NO: 332807 - DNA, 213 bp, Pseudomonas aeruginosa
atggatctaatctatgttgattcttccaacgtcgaccagatcggctacgacgagtaccaaagcgaggcgcacgtcatcttcaaaaacggccgccactatatctattccgaagtcactcaggaaatctgggagcggttccgggacgcatcttcgaaaggcaagtttgtgcacgaggagttcagggctaagggatatccctgccgggagatttaa

SEQ ID NO: 332808 - DNA, 609 bp, Pseudomonas aeruginosa
atgagctgcaagccgatgacttctaatgcgaagaaggtttacgatgcgctggtgaacgaatttcccgatgctatggaggaaattactagaatcagcaggaatcattctgcaaataaagacttcattatctgtgctgataaagctttcaattttgatgttcttcataatgtttgtggtggcgggaaaaaggaaaaatctcctgatgccctgtttttgaaaggggatgctctttgttttgttgagtttaaagagggtaagcacgaaagatctgatattcgacaaaaaattcatgaaggcataattacactatttcagtactccaatgcgagggggattttaagtcgctctgattttctggggctggatattaggtatgctgtcgttaagaggctggattataagcctgagagtggtgcatttcttattgcgctggaaaagactaaagattatttcgatctgaagaatattgaaggatttttggtgagtaaaaccgcagttaggtggtatcctcggtcaatattagaacttttgcactcggttagtggaaggacaattcagagtattggatttattaatgctgatcagagtcgttctgatttgtcgatttaa

SEQ ID NO: 332809 - DNA, 1293 bp, Pseudomonas aeruginosa
atgaagctgaccatcaatgggattgggacagttgctagggcggagattgagctaaataatcttacggttattgctggcgagaatgacactggaaaaagtactgtcgggaaagttcttttttcattggttcaggctttctctaattttccaatagctgttaagaaaacccagcaacatgcaatgcagcgtgatctggatcagctttactttgagattagacgtagcgttgatttatatgagaatccagaaattagaaatctgttttcatcattgcgggcgtcggctcttcaagatctggacttacctatagctgcagttgtatctgtcgctaccgaaataatagattcgggaacctcttcgccagcctcacgagataggattaaaaaggtccttaatcgtatgcttgatgagtataatcaagggcttaatgatgagaaggcgatttcgaggtttgtgcatagagcgcttaaggcggaatttgctggtgagatagtaaataaagtcactggcggtgcggctaaggtagagctttcagatggtgcaactaagatcctagaagtcgttctggatgataagaaggttctcgattttaaaggtggtgagccgctcggggttcgggatgcgacgttagttgaaggtcctgcaattcttcagtattaccctgctatttcggagtttaacgcgataggagagcgggcggcgcgtcttcgacgtggtgccattccgtatcactcagttgatctggctaccaagcttcaaataggcaagcaaagttatgatttgttgaactccgataaggcggactcgcttgatgggttttcagatatttttgagggggaaatgtattatgatcgtgagttgtctagctttattcttgataaaggaacggtaaagataccgtctaacaacgtcgcctctggtatcaaggctgttgcagtcctagaacttctcctgcgtggggattatattggctcagataccatgttgattctagacgagccggagaccaatcttcacccaacctggcagataaaatacgcgaaaataatttgtgagctttgtaaaagaggcgctaaggttttagtgaccacgcatagcccgtatatgctggaggcattgcggggttatattgataaggttgatgaagtttctgcaaagttttacttctctcgcaaggatgaggatggaaaggttttgtatatggatacattcggagacatttcccctattattggggcgttagcgcagcctttgaccgacctagttgatgagctgcaagccgatgacttctaa

SEQ ID NO: 332810 - DNA, 219 bp, Pseudomonas aeruginosa
atgcccctagcgaaactctcgctccccaccctggcactgtgcgtcgggctgctcggcgcctgcccgccgacgcctcgccagccgcgcgcggcccccatcgttccggccagcggccccgaccttcggggcaagctggacgactggcaacagcagttcaccgacccgctgctgcgacagatgatcggctacgcgccggcgctatccggcgcgcaagcctga

SEQ ID NO: 332811 - DNA, 309 bp, Pseudomonas aeruginosa
atgagcaagcaacgacgtacgttttccgccgagttcaaacgagaggccgcggccctggtgttggaccaaggctacagccatatcgacgcctgccgttcgctgggggtagtggattcggccttgcgccgttgggtgaagcagctcgaggcggagcgccagggtgtgaccccgaagagcaaggcgttgacgcctgagcagcaaaagatccaggagctggaagcccggatcaaccggttggagcgggagaaagcgatattaaaaaaggctaccgctctcttgatgtcggacgaactcgatcgtacgcgctga

SEQ ID NO: 332812 - DNA, 843 bp, Pseudomonas aeruginosa
atgcagcatccacccgttttgactttgcctaccagctcggccaatgacgagcacgttcaagcgccagtcccaccaccaactatcactgcacccacgccagaagaactggcagcacgccttcgtcgcgagggaaaatcctacgctgaaatcatcgcggccactgggctttctgagcgcaaggtaagaaaacttgtgaaatatataccaaagcaaatcgccacttcgctgaacaagtcggtgagtcgcgtatacgagctcgcaattcgtgcacaaggagtcaaagactatgagctccggagcattctgcacgaggaatacggctgtaagtggaacgctgttgaaggacggtatgagggctctcttgactccagcgtgatcaagcgtgtcaaagacaaggtgcgtgaacgctccacctccaatggcacccaaccaaccttcgttatggattgggtagacgaccaagcccctaccgcaagtcgcctgctccttgaacagttagcgttgaacctgatggctcgcgttgatgaagccgtaaacgaattcatggagctccatgctgtttgtgcctcagaggacagtgaagtcgctgacttggctcaacgaaagcaagcatatgctgctcggtatcacatcctgaagcttgtcagcggactcggtacagagccgaccactacgctccttgaacgcacaaccaaggtcacgaatgctcttcagggtactccagactatgaagtgccatttgcgcgaaatactgaggataggcgccagatgccagagccgactggtactgatcacttccttgacttcgttgaatcacaaggatggttggcggtgaccaactaa

SEQ ID NO: 332813 - DNA, 243 bp, Pseudomonas aeruginosa
atgaccatgcaagtgctgagtgctgtggcagagtttgagcgtgatctgttgatcgaacgcacccatgcaggcatcaaccgtgcgaaatccgaaggcaagaagctagggcgtccagaggcggtgagaactacaaaggatgtgcaggaatgcaaagctgatggcctgagtcagaaccaaactgctgagaagcttggtatcagcttggccaccatcaagcgccattggaacaaagcagcagcgtga

SEQ ID NO: 332814 - DNA, 453 bp, Pseudomonas aeruginosa
atgcaatgggtatgtgattcttgtggtggacgcatcaacgaagcgcatgagggctggcttgaatggttgaatcgtgaagagaacggcaggagagtcaatcactccccacgcatagtccatattcgccctgcatctccgggacagaggggttgccagtacaatcaacaggccgaattccagcagcaagagaaccttgtcaatgatttgtctctaactcaggtaactggtgacgatggcttgatgaccctcctcagcttcgtttctgatggctatttcgagaaggagcaggtgctggaaatcatcaagaggctgcacgtaccggactatgatctggttcgacaccattttgatgcagcaattggtgaaggggtttttgaacccaataccaagcccggctactacggagtagacgacattcaggcagtgaagagctggcttgaaagacaagagtga

SEQ ID NO: 332815 - DNA, 1137 bp, Pseudomonas aeruginosa
atgaaaagctatgtgctttgggcgaacaagggtgggatagggaaatcaaccctgacttttcagttggcatgtaaatatgcccgaatgaatcaagatgaaccagttttcattatagacttgagcccgcagtgtgacgtctcaaggatggtgctcggtggtgggcatcatgatggtgagggcaagattctcaaagttatggagtctgcagggcgtaagactgtataccaataccttcgtagctgtgtgcgtgatgttccgtcgggattaggttggccagatgtacaccaattcatagttaaaccaaatgagctcagggatgaggatgcaattccgttgccggagaatctccatttgttctgcggggacttcgacttggagcgtatcaccggtgcaatagatcaaatgcctgaggctgaaggtcgtggagggtttgttgagactggctccaactattctaagccgttgctggcgagaagttttcttagaaaggccgtcaaagatattgagcatgtctatcctaattctgcgatatttatagatactgatccatactactcagtggtcactactcatattggtctgctggcagcggatagttggattacagcctactctcctgcatcacaagcaagtcagtatgctgtatatcgtagccttgagtttcttcataatgcgcgtgacagcctttcgtcattgattgagtcgcagaaagaagctcatccgaagccgtggcatgattcaagggaagggcagattgaggcgcctgagctacatgtgcctcatttcgagtttctaatcagcaacatgacaacgtcgaagtctgctaagggtgaacctaggtactcgagacctcagcagttgcacgctcaggcgatagaaagagtgaacgaaaatgtcgtcgaggttgccagagatctaggcttgaagctggactataagtccgatcatttgtggtcattgcagcggttgggacttatctgtgactacaacggtattgacatgagttctgtcacagttggccgccgttatccgcagcctgacgtagaggggagctactcagttgcgagatcagaagacaaccgccttcaggttgatgcttacaatgcgaggcttgaagagtttgttagagagttgtga

SEQ ID NO: 332816 - DNA, 927 bp, Pseudomonas aeruginosa
atggtcaaactagcagaaataaataagttaatagctgttgagccagaggactataaagagtgcatagactcaattgagcatacacaaagtacaaaaaatctaaaaaccatcttaagatttcaccaccttaagtttgatggcaacggccgcccaatgtctagggccctcgccgagctactgtaccaatacataattcactattgtatttctgcgaaaaacagatcgtctccaattacagcgaaggagtcggctcagcttacgaaagaagctcgaaaattatttcgtcaccccgacgttaccgatacgagtcctgatagaacaggagaggctggcgaaacattactattcttcctcatggagtcaataatccaagcaccacaaatcgtatccaaaatggaactcaagacaaatagaaaactcgaggccaatggatcggacgggattcatgccagatggaactctgaggatcagatagttgatttctattttggtgaatcaaagctatatcaaaacatagatgccgctatcaactctgcattagaaagcatagaaagcttccatgcagacgagatatataagcatgaattcacaatgataaccaagcacttcaagtatgcagacccggaagtacaaaaagcagtcaccgagcacataaagctaggcgaaccgggaccagatgcgagaataaaccacgcatgtctaataggctacaactggaatgcatatgaaaatcaaaataacaaaagcagccgcgaactttccgcagaattcaaagagaaattcttgctagaaacctcatcaatcgccgaaaagctcgacaacaaactaaatgggttcacgagaaagcaccttcgctttgatatatttttcatgcctttcccttccatccagaacttccgaaacgagttcaacgaagcgctagattaa

SEQ ID NO: 332817 - DNA, 2505 bp, Pseudomonas aeruginosa
atggaaattaatacagacgacttccaaaatgatataaacaagttgttcgcccacagcatatatcacttactaccagcaaaaaaagaatcaagcagactttcgccagaggaaattcgacgacttatcgggctagcgtcaatcctatctctatcagacgtcccagacaatctctcacttgcatacgaaataatcagtagactcatagagtgcgattccgaccaaaaagacaaaatcacacaagctgccgacataatattatctagaattggaaactttccaggcagagagctactaaggaaacgatacaaaagccttagcaccttctctcccgccatgcttttatcattggaaagacttgccagagaagttgaaaacaccactgaggacggcataaccctaacggacttccaacataaattctacacaaacttggaaacacagaagtccctaagcatttcagctcctacttccgccggaaagtctttcatcctaaacttagacttaatcagaagactaaagaccggaaaggaagagaatatagtctacatagttccgacgagagctctaatctctgaagtctcagcacgaataaggaaaactgtaaaagacagagaaatagccggaattgtaataagaacagcaccatttgcggtaaaagaaacagcccacctaaagaatgtgatctatgttctaacaccagagcgcctgttaagtctcctgaaaccagagaacaataaaaaaaagatcacctcaatttttgtagatgaagctcatgagatccagaaggggaacagagggataactctacaaaatgctgtagatctagcactaggcctccacccatatgcctcagtactatttgccagcccactcatcaataatcctggttatttcttaagcttatttggaagacaggaccaagggctattctttactgagactagatcaccagtttcgcaaaatattcttctaatatcagaagcaccgagacagccaaacaagatacagctatcacttcttgctgcaaataaaaatatcgacttaggtacaacaccagtaaatttcagattcagagggtcaaaattcaggcagcgcgcggagtttgctaacgaaataaccctcaacaatgaatcgacaattatatttgcaaatggccctggcgatgctgaaacagttgcagaagaattattaaccatagacagagaatataagccctctgatgaagtaaaagactttataagctttataaagtctgaagtacatgaagaataccccctagccagaactctagaacaaggtatcgctgtacattatggagacatgccatcgattgtcagagctggcatcgaggatctattcaagtctaccgagataagattcctttgctgtactagcactttactacaaggcgtgaacctgccagccaagcatattgtcattgagaaccctcatagcggtgacaaaccgatgacacgatcagattttctaaatctttcaggccgtgcaggcaggttacttcaagaatttcatgggaatatctggtgcattcgaccaagcgactggagtgaatcatcgtatacgggagaaaaactacaagaaattaagtcatcgatgtcaaaactaatggatgacggaggagaattaatcaataaactagtttcaggagaaatcggagaagacagcaagaaccttgccgaagcaggctttagtcgactatatcaagaaacaagaaccttaggcgaagaggaaattatattaaaatacaagacagaggataaccttgagactctaacaaaaaatttagatcatataaaaagcctcaccataactcttccacaagaaatattagattctcacagcagcttaaggccagatcacttacaggttctgtacgataagcttttcggcgcaatctacacagagcaattctctctgataaatccgtttcaacagggcggatacaaaagaatgtgcagcgcaatagaaataatttccgaagtatttggatgggccgaaaacccaaaatacagaaactttatagcctatcaggcccatcagtgggcaaccggaacaccaataggctccctgataaaaagtcgcgttaacttcagaaaaagagaaaacgaatccgaaaagacctcaacaataatcaggcaattcttaaaagttattgaaacagagatcagattcaaactagtaaagtatttcagtgcatatgaggatataataaaacattgcctcatagagaaaggctttagcgaagaaagtgcaaagcaagctccttaccatacattccttgaatttggctcatgctccccaatcgaactaagcctaatgtctcttggcttctcaagattcactgcaatacgcctaaaaaatgcagttaactggggaaactcagaagagatagaagactatctttttgcactatccaagataaatctatccaacataaacatgcctagagtttgcataaaagaaataagagacattcttggccaatag

SEQ ID NO: 332818 - DNA, 888 bp, Pseudomonas aeruginosa
atgagtacgcgaagattgacgacagtcagctgcgacaccccgatcgagcaggtagtggaaatcatcaggcgtgatggcgctgtcgctatttgcaacttcgtctcggaagaaaccttgaagtctcttaccgaggacctggacagctatctgggcgttaccccctgcggcatggacccttacttcgccggcacccagactcgacgtaccgcgcggatcctggcgaaaagcgactccgccgtggaagtggcactgaaccccctgttcctcgagacggcaaagcaggtattgcagactcccacccatgtctgggtagggaacgatcgggtcgagatcacgcccgatatccaactgagcatgacccaggcgatacagatcgggcctggacaaggtcttcaacccctgcatcgcgacgatgccacttcgctctggcggcatccgcagtatggtcgcgaggctcgcttgcagctcatgctggcgattaccgacttcaccgaagagaacggcgcgacgcgggtcattcctggcagtcatcaatgggatgacgaacgtatgcccacccaggaagaaaccatcggcgcagaaatgaaggcaggcactgcgcttctctggttgggatcggtatatcacggcggtggcgccaacagatccgacgctcctcgcacaggcctgaccatggcctacgacctggccttcctgcgcctggaagaaaaccacttcctttccatacccgtcgagcgcgttcggcaactccccgcgcaaatgcagcgtctgctggggtggagtgccagttccacgctactgggatgggtggagatcgatggtcagatgcgtgacccgcaagagctgctgggcatgccctccttttccgaggcagggaaggggttctag

SEQ ID NO: 332819 - DNA, 711 bp, Pseudomonas aeruginosa
gtggctaatagcgattggctcgtttttgttgacgaaagtggggaccatagcctggactctattgatcaggcgtaccctgttttcgctctcacgttctgtctgattcataaggatgagtacctagaccgccttgttccgagaattaagaggctaaaatgcaatctgtttggtcatgacaaggttgtttttcatgaggcggaaattgtccggaggaaaggggttttccgttttatggggcaggtagagcgggagcagttattagagcaactgacccttataatccaagagatgaattttcatatctatgcgatggtcatagataaagttcgtcataaagcgcgttacgtacagccagagcatccctatcatttagctatgaagttcgggcttgagcgtatatatcgacatttgaatgatttggggcaggctgagacgactacttatttcatatttgaggcgagggggtataaagaagacgcagagcttgagttggccttccggagggtttgcgatggcgagaactgggtgggtcagacgttcccattccagatcgttattgcagataaaaagactaattgcgaaggactacaattagcagacttaacggcgcgtcctatcggtctctctcaccttaggcctgaccaacctaatagagcctatgatgttctgcggcagaaaattggacggtatgggcggaaggtttttccatga

SEQ ID NO: 332820 - DNA, 378 bp, Pseudomonas aeruginosa
atgacaatagtcaatccgtacggcagaaaaacaacatatcactttcaatttatccaaggtataaaatacataacgtatatcgaaggcgaaccctcgcccaactgccccagcagcaattccaccttcacctacgatgaccagggcctgctcaccagcaaacgcgacaacaacggcaacctgaccacctaccagtacaacgcccgtggcctggagacctcgcgcaccgaggccgccggcactgcgcaggcgcgcaccatcacaaccgactggcacccgaccctgttcctcccggtgcaggtcagcgagcccggccggatcacccgctaccagtacgacgccgagggacgcaagaccggcgagaccgtcaccacccgctga

SEQ ID NO: 332821 - DNA, 969 bp, Pseudomonas aeruginosa
atgttgaaacttaaagaacatcctatcacaacaataagcatgctctttttaatcactcaacataactttgcattctcctctgactcagaaattttttgctggactacagcaggcggccctggagaccctagcaaatgcaccacaaaccctgtccctcactgcgaaaaagcagtacaaaagaagcaagacaacgcacctttaggttataaatatcaatatatatataccgaagtatatcctgcaggatctgtgctctactcgaaatgccactacacagagacagtacccacaggccaagtcttcacaaaccaatacctaccaggacctgtcctgtacaacctatccagctgccagcaccctaattttatcaatggatcatgtctagagggagttcctccaaaaacagactcatgcgccagccccagtatttacaatatctatactggtgagccagattatacatatacagtgccagcagaccccagatccccgcctatcagtgtacactatgacggcaaaaataatttatggagacataatttctctgattttctaattagtatccaaggaaatacatacatctcgctcagcgacggtaggacggcaactttcccctccctccataagcatcctgaaaccctgacaaagacagaaacaggatacatttacgactccatagaaaacaatcgacttgagttcgataaaaatggaaaactaataagcaaaaaaatcaacaaagtagagtacacagtcactcaatcaccaaacaataaactgatagtttcctccaagacaaaattcaccactacgatcacccaagacactagacttcaaccgcttttaattgaatctgaaatcaaaaaaatcaagtttatatatgacaactctttaaaccttcgaaaaatagacaacaacaatgcctccctcaccacctttgactatgcgcagacctcccaaaatggaagctaa

SEQ ID NO: 332822 - DNA, 330 bp, Pseudomonas aeruginosa
gtgatccagggtatcaagcgcatcgtcgccatcgaaggcgaaccctcgcccaactgccccggcagcaattccaccttcacctacgatgaccagggtctgctcaccagcaaacgcgacaacaacggcaacctgaccacctaccagtacaacgcccgtggcctggagacctcgcgcaccgaggccgccggcactgcgcaggcgcgcaccatcacaaccgactggcacccgaccctgttcctcccggtgcaggtcagcgagcccggccggatcacccgctaccagtacgacgccgagggacgcaagaccggagaggcggttacaacgaactag

SEQ ID NO: 332823 - DNA, 1278 bp, Pseudomonas aeruginosa
gtggtcgacacgccccaggtagtccaccagcccatcggcacgtgcccgggtcaggtcgccgctgcgatagacccgctcgccgttgccgtacggatccgggacgaaacgctcggccgtcagcgccggccggtccaggtaaccccgcgccacaccttctccacccaggtagagctcaccggccagacccagcggcagcaggtccaggtccgcgcccagtacataggccctgcgacgtcccagcaaggtaccgataggtgcgtaagccgcaccgcacggatcctgcggacgcgccttccacaacaagggcgtgaccaccgtctcggtcggtccatagccgttgaacaggtagtccgggcgcaggctttcccaggccagctcgtagctggcctgcggcaccgcgtcaccgccgaagcagtacacccgcaccggcggcgggttgccgtcacgctcggcatgctcggccagttgctgcaggtacaccggcggaaagaccccgatggtcacaccgtgacgatgcatctgcgcataggtctcctccggcagccagatactgtcgtcgcgcaccagcacccgcgctccgttgatcaacgggtgcatccagccttcatgggcaccgtcgaaggcgaacgacatgaaatgcagctcgcagtccgccgggctcgtctcgtagcgctcgccggtcgcacggatatgcgacaccagcggtccgtgggataccgccacgcccttgggcaggccggtcgaaccggaggtgtagatcacgtaggccaggttttcctcggccagatcgacctccggcgcaccctccggacgatcctgccattcgcccggatcgtccaccgccaggctcgccaggccggcgggcaacggcagacgctcgagcacgtcgcgctgggtcagcaccagcgccgcgccgcaatcctccagcatgtagcgcaggcgctcggccggataggcgatgtccagcggcacgtaggcgccgccggccttgagtacggccaggaacgccaccatgatctccgccgaacggcgcatggcgatggccacccgcacctccggacccacacccagttccaccaggcgctgggccaggcggttggcctggctgtcgagttcgccatagctcagccgctgctcgccgaacagcaccgcaatcgcctccggcgctcgacgcgcctgctccgcgaccaactggtggacgaacggccggctcggatagtcctcaccggtctggtcccagcgcgccagcagcaggtcccgctcggaacgatccaatag

SEQ ID NO: 332824 - DNA, 675 bp, Pseudomonas aeruginosa
atgagcgagaccgaagcagcaccaggctggctgaacgagaaggacagaggagagtggcaatgggcagcaagttacctatcgagccggtgctctccgtcgctgcaaggcaagatcagcttccttgccgacagtggtttcagccatctggtcagatcgatccatgccctcgaatccgaggctgaaggtgtaaagctcatcgagcgattgagaaacgccatcagacaaaggcggtatcgattagccaaaggcggcagaaagacttgctccttcacgctcccactcgaaaccaagaccacactcaaaagcctcgccaaagggcacaaaacaaccgaaacagcgctgattcagcgcttgatcgaagtcgccgcccaggcagccgcagaacagaaagaggtgatgcgtcgcgacgctcaaatggccaaagtcacacgcaatgcgcgcaagcttacgcaggagctggacaaagttcggattgatgagaccagaaagcagctgcaccactgcatgaagcagctcgcgcggtgggaaacctttctaaaagaagaactgcccgagctatcctacgaagacgaagcagccgcaacagctcttgcagaacgccgaatgcgtgtagtccaagaggccatcgatgcctccgtcgccaagcatgagatgctgagcccgaggtcagtctga

SEQ ID NO: 332825 - DNA, 1308 bp, Pseudomonas aeruginosa
atggctaatcttctggctttttatgaagacctagaggttggtgcagagtctaggtttttcctgcaagccctgatatgccgagagcaggcactcttgaccgcctcgttcaaggtcaaaccagttgcgagactcctctgcttgacggatagattggtcagagacgcagtgcgggagttagccgaagctgggctgttagtggccaaaaaacaggctgacaaggtgggtcgtccggggcaggaatatgaggcgtcgcaatacctcctcgatctgcttgcccagccaagaggtagttcgcttactcatcgggacctggtcctgcgtctctttaatgagccggagatttatgccgagggacctcggcctgaaacagataccgggagcgagaaggttgcgcgcaaacaggtatgcaaggacgggcggccggcagcacctggggcttgtggacgcctggggacagccacgagagtgcttttggctgcccttttaacctttgccgatcagtgcggggttgtggccggggtgggggaggcgaagcttcgtgcaatgacgggcctgaatccgattgcgctcaaacatcaggtgaggcgactagtcagcctgggcttcatacgtgttcatgtgccgggtgtatccaatggtttcttcgttggagccaaggttcccagtacctactacctgaaccttgaccacacgcagatgagggcgcggcgccctcattgcgcagtgctggtttacgcggaagctaagcagtcccgttatgaacggttgaccagcgggcttacgcagcctgatgtagcaagagctcttctcgctttgggacctgctgcgctggatgtcctctatcacaagctggcctggtacacgtcgcatctgctgtccctgacatggggaaggccaggcgaaaggtacggcgaaattcctgcttctctggagggcatgattggtcgagagttagatcaactgaaggtcggtaagccggggcaggacgaggctggctactactggcctggagtgctcgatcacttttttgaggtggcgtttgagtgggccgagcatttgaagcagaagttcaatggcaaggcatggtcggggtaccaaccccaggtgattaggctgatacctgtgccaaagccagaagggcgcgatgatgccttggaggtcgtttctctgatcgtctatccggctcccgagaatcagaactgctgcattgtgtacaaggatgtccggggcgggtttcttcgtgagttcgacagcgaggctgacctggatgtgtggaaccgctatgagtttggcttgctaaccgagtag

SEQ ID NO: 332826 - DNA, 1008 bp, Pseudomonas aeruginosa
atgaccaaacaaaacgccaacaccctccaatcccagtccgatatcgcaattcgaattgagcgcctcatcaacgccatccagcgtacagatagccaggcctgccgaatctcatattcaaagcatggagatgaacaggtcagagaaaccatgctttcaaaatacttcgatgggatcgtgcagatggtcgcgctgctcgacggagatgtggcgtatcagtacagctggcacttgagccttcttcaggaagcctgccaggccattgggattgagcgcagcccctttggcatcacctgcttgaacgagggtgaaacgcgctatctgagcaccagtgagacgctgaacgagctgaccaagtgcatccgtacactccttgcccaaaagagattcaagcgtagggagcacgatcagcgctaccaggcgattcagcaagaggtcgaagtcgatcgctacgttgatgccatgtttgatcgctacgcccggatctgcgtgatcagggttgatctgtattaccgtgcagaggtccaggcgaggttgcgtgtggagcgcgtattcgacgatctgaatcggctgatagctgagcgtgaacgcaacctaattttcgaccatgaaattggctacatttgcagcgtcgagcaaggcgaggaccggggctatcacatccatgcagcgttcttctttaacggtgctgaagtgagtgccgatatctacagggctcagcggatcggtgagctatgggagcgtattacccgtggtcagggctacttccacaactgcaacctcgaaaaagataaataccaagacaggctggggcttggcctgatccacaggcgggacctgaatgggcgggctaacgtgctttgcgccatgcgttacctggtcaagaatgatcaacatctgcggctcaaaccggtaggagctcgttgcttgcgcaaggggcaggcaaggaaggtttccgggattcctaatcgatccattcccctgcgaggtgccgaacaaacatgtcgatga

SEQ ID NO: 332827 - DNA, 930 bp, Pseudomonas aeruginosa
gtgccgaacaaacatgtcgatgagcccagcctgccggccgatcacccgttcagcgaaaccaacctgaaccctggcctaaatggtcgcgacatgcgcaaggtgtccgacacagatgctgggacagtggctgcactcgctttgaaacggtcattggagacgattcgcgctgaggcaagtactgtcggccgcattcggccgctactggatgctacggtcgggaagctagctgagcgtgcatctgatgcagaactggttcggctgaccaaggctaccaacggctggcgcttcgaccgcaaggccggcagcgccgaaatccacgcccggcgcatcggccgtaacgagctggctgcattgcagtcggtcctagcctatcacgacgcgcagatggactacgcctcgaaggaccgcaacagcaacggcgcgctggaatatgcccagcagatcttcagcacgcccggcaagcatgacggcctgttctgggaggacgaagagggcggcgagatcagcccgctggggccgctgttcggcaaggatgtggtgggcgatgcctggtacggctaccacttccgcatccttgatggccaaggctcgtcggccccgggcggcgcctacagctacctgatcggcaaccagatgagccgcggcttcgccctggtcgcctggccggcgaaatacaacgatagcggtgtcatgagcttcatgatcagccacgacgaccaggtgttcgagaaggatctggggccacagggcgacaagattgccaaggccatgaaacgcttcgatccggatgacagctggaagaggtggatgtcagcgccagcgaatgacggccggcgcgcaccgccgacggcaggctgcgtggaaactatccagtgctgttccgcgttggtgcgcgcccgcatcaaaacaggtcttaacgcacaggtttaa

SEQ ID NO: 332828 - DNA, 1266 bp, Pseudomonas aeruginosa
atgagctcacctaccgaattcccgctttgcgaagccccgccatcctcgcgcaaagggctgctgcccattgccatggtgttgttcagctttaccttcttcaccggcaccatgttcgccggtggcaagctgggcatggccttcaacttcgtcgacatgctgtgggtcgccgccatcggcaacacgctgctggcgttgtacgcggcggccttggccttcatcgcctcgcgcagcggcttgaacagcgtgctgatggggcgcttctgtttcggcgaggcgggcagccggctttccgacttcatcctgggcttcgccgaacttggctggtacgcctggggcaccgcgaccgtggcgatcgtgctggtcaagttgctgggcctggcgggtggtttcaccgtgccgctgatggtgctgttcggcctgggtttcagcattaccgcgatcatcggcttcaagggcctggacctgctgtcgcgggtgtcggtgccgctgatgttcgcgctgctgctggtttcgatgtatatcgccaccgccgatgccgggggctttgccggcctggcggcggtggtgccgcatgaaaccatgaccttctcggcagcggtgaccatggtcttcggcaccttcgccagcggtgccacccaggccaccaactggacccggttgtcgagcagcgggcgggtggcggtggtggccagcatcgtcgccttcctgctcggcaacggcctgatggtggtggccggggcctggtgcgcgatggtctaccagcaggccgacatcgtcgaagtgatgatgctgcaaggcctgtcgttcgcggcggtggtgatgctctgcctgaacctctggaccatccagggaccgaccatctacaacgtttcggcagcggcctgccacttgctgcgcagcgagcgtcgacgcatcgccacgctggtcgcggcagcggtgggcatcgtgctggcgattggcgggatgtatgaaatgctgatcccgttcctggtgctgctgggctcgatcattccgccagtgggtggggtgatcatggccgacttctggtaccgccaccgcggcaagtacccggcgctggcctcggtgcagctgccgcgctacaacttcttgggcctcgggtcctatgcgctgggtgcggtgctggcctacgcctcgccgtgggtcgcgccgctggtgggcattggcgcctcggccctgtgctacatcgtcatgcttgaactgagcggccggcgccgggcgctgggccaggcgggtgtcgaaccgtga

SEQ ID NO: 332829 - DNA, 1218 bp, Pseudomonas aeruginosa
gtgagcctggcgctggacgaaatcctgcacctgcccggcctgcaggacatgaccgtccgggccggcgcgcgcaacctgcagcggcgggtgcgctggccgtatgtggccgagaacgaaggcattgccgagtgggtgatgggcggcgagctggtgttcgtcaccggcatcaaccacccacgcggcgaggccaacctgctgagcctggtggaagatggcgacgccgtgggcattgccggcatggtgatcctcaccggcggcacgttcatccacggcattccgcctgtagtgatcgagcgcgccgagcaactggggctgccgctgatcgagcagccgtatgcgctgaaaatggtggtcgtcactcacctgatcggtacggccctggtgcagatgacccaggtgcggcgctcgcgcaatgacatcctcggccagttgctgaccggcgactacccgagcctggccatcgctcggcagcgggccgcgcaccttgagctggcgctggacgagccacggcgcctggtgacactgcggctgtctggcgtcgatggattgttcgagcgccatgggctggcccagggcgagcgcgtgtggcagggcattcgccaggcgctggaagatcagcttgaggcctggtgtcgtggcaggccggggactgtgaccgcgcaattgccgggtgacctgttcgtgttgttactggccgatgcccacggcctgcacgccaccctggccgcgctgcaccggcagttggcgggcgtggtcggtgaactgggcctgttcatgggcctgtcgcgcctggccgaggattgcgcccactaccgccaggcgctcaatgaagcgcgccaggccttggaagtggcgcagaacctgcgcccggccaccggtttctgcgacttcagcgagttgggcgtgctgcgcctgctgcaaggcatcgtcgatcgctcgctgatcgacgacttcgtcgccgaaacccttggcccactgatcgcgcccggccgcaagcacccccatgtgctggtgcataccctcgacgccctgctcaaggaaaacggcaatggcctgaaggccgcccagcgtctgggcctgcaccgcaacaccatcaaccaacgtattcaacgtatcgaacaactgagtgggcagtcactcgacgacccgctatttcgtatgaacgcttcggtcgccatgctggtatggcgcatgagcgaagcccaatgcaaggagtaa

SEQ ID NO: 332830 - DNA, 1242 bp, Pseudomonas aeruginosa
atgaacatcatcaacgcccgtctgcgtggcaagtcgggcctgtttcgtatcgaactgaacggcgaccgtatcgccgccatcgagccccaggccgatgtggcggtgctggccaaccccgacgacctggacgcccaacagaacctggtggtggcgcccttcgtcgagccgcacattcacctggacgccaccctcaccgccggcgagccgaagtggaacatgagcggcaccttgttcgaaggcatcgaacgctgggccgagcgcaaggaaatcaccacccacgacgacatcaagcagcgctcgaagaagaccatcgacatgctggtggaccatggcattcagcacgtgcgaacccatgtggatgtgaccgaccccaagctcaccgcgctcaaggccatggtcgaggtgcgcgaggaagtacgccacctggttgacctgcaaatcgtcgccttcccccaggagggcatcgagtcgttcgccaatggccgggccctgatgaccgaagcggtggccatgggcgccgatgtggtcggtggcattccgcatttcgagaacactcgcgatcagggtgtgtcgtcggtgaagttcctgatggagctggctgagcgcaccggttgcctggtggacgtgcactgtgacgaaaccgacgacccacagtcgcgcttcctcgaggtgctggccgaagaggcccgggtacgtggcatgggcgctcgggtcacggcgagccacaccacggccatgggctcttatgacaacgcttactgctacaagctgttccgcctgctgaaaatgtcgggcatcaacttcatctcgtgcccgaccgagagcattcacctgcaagggcgcttcgacacttaccccaagcgccgcgggctgacccgcgtggccgagatcgaccgcgccgggatgaacgtgtgcttcggccaggactccatcgtcgacccgtggtacccgctgggcaacggcaacatcctgcgcattctcgaagccgggctgcacatctgccacatgctcggctacgaagacctgcaacgcagcctggatctgatcaccgacaacagtgcccgcaccctcaaccttggggagcgttatggcatcgaggtcgggcggccggccaacttgctgctgctgtcggcgccggatgattacgagatggtccgcagccagggccacgcactaatttcggtgcgcaacggcaaagtgttgatgcgccgcacgtcggcgcaggtcgaacgctttgcctga

SEQ ID NO: 332831 - DNA, 1257 bp, Pseudomonas aeruginosa
atgttatcgaagcagacaatcgggctacgccgcgtggtcgtgaccggcatgggcatcgtctcatgtctgggcaacagccctgcgcaggtcctccaggcattgcgccaggggcgctcgggaatcgccttcaacctggcctatgcgcaagcggggctgcgcagccatgtcagcggccggctggaggtcgactttcagcgcatcgaccggcgccaccggcgcttcatgggcgatgccgcagcctatggctacctggccatggccgatgccatcgccgatgcacggctgacgcccgagcaggtggccgacacccgcaccggctgcgtgatgggctcgggtggcggctccagcgaagacatcgtcgaggccaaccagctgctgcacagccagggcgtacgcaaggtggggccgtaccgtgtaccccgtaccatgaccagtacggtctcagcgtgcctggccagtttcttcggcatcaagggcctcaactattccatcgcctcggcctgcgccaccagcgcccattgcatcggccacgccttcgagcagatccagttcggcaaacaggatgtggtgtttgctggcggtgccgaagccgagcacttcagccagagctgcatgttcgacgccatgggcgcgttttccaccggctacaacgaccggccggccactgccagccgcccttatgacgtggcccgtgatggcttcgttatcagcggcggggcaggggtgctggtgctggaggcgctggagcatgcccaggcgcgcggggcgaccatcctcgccgaagtgatcggctatggcactgcctccgatggccaggacatggtttcccccagcggcgacggcgcactgcgcgccatgcagatggccctggccagttgcgccgaaccggtggattacctcaatacccatggcaccagcacccaggccggcgacctggtggaactgcaggcggcactggctgccttcgacggtgaactgccgccgttcagctcgaccaagtcgctgagcgggcacgcgctgggggcggccggggtgcacgaggcgatctatgcgttgctgatgatgcgccacggtttcatggcggcttcgcacaacatcgaacagctcgacccgcaggtcgaggggctgcccttggtacgcagcgtgcgcgaagggcagcaggtgaattgcgtgatgtccaacagcttcggtttcggcggggccaatgcctcgctggtgttcagccgtcgggggctggaggcgcagggcgcacattga

SEQ ID NO: 332832 - DNA, 1326 bp, Pseudomonas aeruginosa
atgtcgggtacgtcgcagcagccggtcgcgccggagcaattgaaacgcgtggtctgggccgcgtccatcggcaacttcgtcgagtggttcgactttgccctgtatggttttctggcgaccaccatcgcccagttgttcttcccctcgggtgacagcaccacggcgctgctcaagacctttgccgtgttcgccgttgcctttgctttccgcccgctcggcgggctggtgttcggcatgctgggggaccatttcgggcggcgccgggtgttgtcgatcacgatcctgctgatggccgcagccaccaccctgatcgggctgctgccgacctatgccagcatcggcctggccgccccgttgctgttgacgctgatccgctgtgtgcagggtttttccgccggtggcgaatacgccggtgcctgcatttacctcatcgagcacgccccggccgggcagcgcgcccgctatggcagtgccgcgctggtgtcgaccttcgcctcgttcgcggccgccgccatcgtcacctatgccctgaaccgctggctgacagcagagcagatggcaaccttcggttggcgcctgccctttctgatcgccgcgcccctcgggctggtgggcctgtacctgcgctggcgcctggacgagacgccggcgttcaaggcgctggctagcgccgagcgtgccgtgcatgcaccgctgggccagacattgcgcgagcagggcggggcgatgtgctgcctggcggcgttcatctcgctgaccgcgctgtcgttctacatgtgcaccacctacttcgtgacctacctgcaactgcaaggcggccagccgcagcccacagcgctgttgatctctttgctgaccttgctgttcgccgcagcctgctgcccctttgccggacgcttttccgaccgcgttggccggcgcccgaccatggtcacggctgccgcctggctggtgctgaccatttacccggcgtttctgctggcgcgctccgggttgttctacccagcattggcgggggcattcctgttggccatcggcgcggtgctgtgcggtgtggtcacggccgtgctgttgtcggaagtgttccccacccgcagtcgctacaccgcctcggccatcacctacaacatggcctacacgctgttcggcggtaccgcgccgctgatcgccacctggctgatcgagcgcagcggtgacccgctgtcgccggcctattacctggccggtatcgccctgttcgccctggcgggcgggctgtcgttgccggagacggcggggcgccccttgagccacgccgccgatcaacccgccaaccccttggcataa

SEQ ID NO: 332833 - DNA, 2091 bp, Pseudomonas aeruginosa
atggcccgtataggcgtagatgtcggcggtaccaacacagacctgatcctggaaaccacggagcgcgactccatcggccggcggatcttttcccacaaggtccccaccaccctcgaagaccagtccatcgctgtgatgcgcgggattctcgagctgtgtgccaaggccggaatcggcgccgaagaagtggacctgatcgtccatggcactacggtggcgaccaacatttccatcgaacacaatggcgccgaggtgggcatgctcaccaccaggggcttccgcgacattctgcacattggccggcacaaacggccctacaacttctcgctgcagttcgatgtgccatggcagagcacaccgctggtgcgtcggcgtaaccgcatcgccatcaacgagcgcatcctaccgccccatggccaggtcgagacgccgctggacgagcaggaagtccgcgaggccgcgcagttgctcaaggcccgtggcgtgcaggccgtaatcatcggcttcatgtacgccttcctcgaccgctcccatgagctgcgcgccaaggccatcgtgcagaaggtgatgcccgaggcgttcgtctgctgctccaccgatgtggtggacgtgatgcgcgagtacgagcgcttttccaccacggccatgaacgcctacgtcggaccgcgcaccgcccactacctgacccacctggccagccagctgcgtgaaaacggcatccaggccgacctgcgcatcatgcagtccaacggcggtgtggccaccgttgaaagctgctgcgagcggccggtgaacatcctcatgtccggccccgccggtggcgtgatgggcgggcattacttcgctgggctcgacggtgagcgcaacatcatcaccgtcgacattggtggtacctcggcggacatctcgaccttggtcgatggccagatcaaggtgatgaacccgcgcgactcctacgtgtccgggcacccggtgctggtgccgatgatcgacctgatcaccatcggtgccggtggcggatcggtggccttcatcgacccggccggtggcttccaggtcggcccacgctcggccggttccaaccccggcccggcctgttacggccgcggtggcgaggagcccaccgtgaccgacgccaacatcgtgttgggccgtctggacccggaccagatgctgggcggcgacctgaagatcgacccggcgctgtcgttccaggccatcgaggcgaagatcgccaagccgttgggccttagcgtgcaccgggcggccctgggcatcctgcgggtggtcaacaacaacatggccctggccattcgttccaactcggtggcccgtggtatcgacccccgcgatttcgtgctgatgccgttcggcggggcagggccggtgcatggtccggcgctggccgatgaggtcaatgccaagtcggtgctcatcccgccagcgccgggcatcaccgctgccgcaggcctgctgaccaccgacctgcagtacgaggccctgcgctcgttgctgtgcaccctgaataccatcgacgacacgcaattgaatcggctcgaaagcgccttgcaggaactggaagccaatgttcggcaacaactgcgcaacgatggcgtggacgatgcctgcatgcagctgacccgcatcgccgaatgccgctacgacggtcagggcttcgagttgcgtgccctgatccctggcggcagggtggaccaccaggccattgcccaggtcatggcgcatttccaccaagtgcatgagcaggactacggctattgctacgccgatgccccggtggaagtcgtcagcctgcgtgtcatcggccattcccagtccgagaagctggcctggcagccgctgccggcggcggtcgacagcgacaccggccaggccttcctttacgagcgcgacacctggttcgacgatggccagtgcctgcccacgccacgctatgaccgcagcaagctgcacgccggccagtacatcgaaggcccggccatgctcatgcagcacgactccacctcgctggtgccgccgggttgggtggccagggtgagcgcccacggcaacctgatcatctcccgccagtaa

SEQ ID NO: 332834 - DNA, 1761 bp, Pseudomonas aeruginosa
atgaatacgcaaccggtcgatccgatcaccctgcaagtcatcagcggcgccttgaagaccatcgccgaagagatgggccacgtgctgtaccgcatgtcgttctcatcgatcatccgcgagtcccaggacatgggcgccgggctgttcgacacccgctaccagaccatctgcgagtccgaatccacgccgatgcacatcggctcgatcccggcctacctgcgcggcatcgaggccaccctgcaaggtggcgcctggcacgagggcgatgtggtggtgcacaaccatccctatcacggctccagccacagcccggacctggcggtgatcgtgccgattttccatgaaggcgagctggtgggcttttccggcaacaccgcgcaccacatcgacatcggcgcagctacgccggggttgatcatcgacgtaggcgacgtgtacgccgaaggcatgctgatggccgggctcaagctctatgagcgcggtgtgcgcaacgaagcgctggtgcagatgttccgttacaacagccgtgcatccgaccagctgattcgcgacatcgaagcccaggtggcctcggcgcagctgggcgcccggcgcttcaaggaactactgacccgctacggcaaggacttcagctttaccgcgatcaaccagttgatcgactacgccgaaaccatcatgcgccagcagatcgcgcagattcccgatggcgactaccgcgccgaaggcttcctcgacgacgacggccgcaaccgcgagcggcgcctgccggtggtggtcacggtaaaagtgagcggtgatgccctggaggtggacctgaccggttcggcgttgcaaaccgaaaccgcctataacgtgccgttcgaaggttcgtgcaaggtggccgcctacgccgccttccgcaagctgctgctcgacgctgccacgctgcccagcccggtgccgtccaacgaggggtcgttccgcccgatcagcgtcgtggcgccgctgggcacgattttcaacccagtgttcccagccgctgccgaggcgcgcttcacccagtgcaaccggatgatcgatctcatcatcaaggccctggccccggtgctgccggagcgggtgatcgccggcagctcggcgtcgatctccttcgctgcctattccggggtgaaggccgatggcgactattgggtattcctcgaagtcaacgaaggggcatacggcgggcggccgaaatccgacgggcccgatgccatcgacaacctgatggccaacacccgcaacaaccccatcgaagacctggggatgcacctgccgatgatctgcgaccgctacgagctgcgtgacgatgtgcagccaggcgctggcaagtaccgcggtggcatcggtgtggtaaaggcccagcgggtgctcacggcgggcttcatcacccacgaaagcgaacggcatttcgatgtgccctggggggtgttcggtggctgcgacggggtggtaggcaagaccgagatctacaatgtcgccagccccgggcaggtggtgtcgatgccgtcgaagttctccgggtacgcgtccaaggcgggggatgtgatggcctactactcgccctgtggcggtggctatggcaacccgctagaacgcagtgccgagcaggtgcgcgaagacgtgctggatgacttctgcagcctcgaacaggcctttgaggtgtacggagtggtgctcgacgagcaggtgcgcctggacatcgaggccacccgcgcccggcgccagcaactgcagggctga

SEQ ID NO: 332835 - DNA, 1482 bp, Pseudomonas aeruginosa
atgaacagccccgaattgacttctgtctcaccgactccggccgtctcccgtcacaacctgttggaaccgtcgattcttccggtacaacgacgacatcgctcgatcggtaccctgggtttcacctggatctggatcggtatcgcgttcatgatcgccaccttccagctgggtgctacgggtgttgccggcctgccgctgccacaggtcgtagcgatcattctgctggccaacatcgtcctggcgctactgatgaccctgaccgcggacatcggtaccgaacatggtttgtctttcgcggtgtatttgcgagcgccgttcggcgtgcatggcacacacattccgtcattgtttcgcggcctggtcgcggcgatctggttcggtatccagacctacctcggcgccctggccctgagcggtatcgtcgagtacttgaccgggttcgacaactgggccttgtggtatgtgatcttcgcagtggtgcaaatcatcaataccgcgctgggtatcaaggcggtagagtttctctcgtccatagcagcgccggcgatcattgccatctcggtttggatgtacctgaccctcgatgtgctggcagtcaccaaaggggtcaatatctggacgttcgtcggcgacaagcagctgaccatcattaccctgttcctggctaacgtggctttctggtcgaccttggccatcgacattcccaatatcacccgttacgtgcggacaccagtcaatgctcgggggttcctgtctcgtaaccggcatatctttcttgctcaactggtcgcattaccgctgactcagacctggatcgcggtcattggcgcggcatctttcgtcgccgccggagactggaatccaatcaatgtcatccaggcccagagcaccgggctgagcctggtcgtgctgatggtcctggtggtgctggcacagtggtcgaccaatactgcagccaacctgatcccggcggcgctgaccttcgtcaatgctggagcaccacgagtcagatacccgactgcagtgatgatcgcgggagtcatcggtacactttcgatgccgtgggccatcctcgataacctgttcgccttcctgttttcgtatggatcgttcctctcggcaattggcgggatcatggtggctgactattacctgattcggcgacgccggttgaacgtgccgcagttgtatgagctgcaagggcaattccactattggcgcggtttcaaccctgccggcttgttagcgtgggctgcggccagcgtgttggcgtactgttccggtgactgggcatttgtagtcggtttcgtcagcggtttggtgatccatgccatgctgatgaagttctggatcgttcggcgctatccccagcaagagctcaccggcaatggcgcgcagtggctggccagcagtgtcggccacgactggcgctacgatgccagtaccgatcgcttcggccttacgccatcagatcaggcgtga

SEQ ID NO: 332836 - DNA, 951 bp, Pseudomonas aeruginosa
atgacatccaattcattgttggcgagcattgataccaaaatgagcattaatatccgctttgatctcaagcagataaaagccttcgtccgcgtcgcgcaactgctgcatttcaagcgcgccgccgatgccctgttcatcacccagccggctttgagccgcctgatcaaggcgctggaaagcgagctgggggcggagttgttcatgcgcaccacgcgccatgtggcgctgaccgaggccggtcggctgttcttgcaggaatgccagcaggtgttccgccatatcgaacgcggtatcgacctggcgcgtagcgccgcggcgggggacatcggccacctgaccgtggcctacaacgacttcgccatcaacggcgcgctgccgggcattctcgagcgcttcaaggacctgcacccggatgtgaccgtggagttgctgtacatgccctctcacgagcagtacaaggcgatccgcgattgcctgatcgacgtggggttcctgctggggccaatgaccgagccggacatcgcctcattgccggtgaaccaggaacgcatggtggcaattctgccgtcacggcacccgctggccggacaggccactttgcgcatcgaacagttgcgcgacgagcgcttcatcttcggtgcgcccagtggctggagcctgttccgcgaccaggcgtttcagctgtgccagcgcgccggtttcagcccgaacattcaccaggaggccaccaccagcatcggtatcctcgggctggtggcggccaacatgggggtgtcgctgtattcggaatgcgcctaccggatccagcgcgaaggcgtggtcatcgtgccgctgcaggacgagcatgcccaggtgcagaccatcgccgcgtggaacgaggaataccagagccctaccgccgcgcgtttcaaagccctactagggcaccgagctgcggagcttcacgcctga

SEQ ID NO: 332837 - DNA, 690 bp, Pseudomonas aeruginosa
atgtcgcaagacctgatgaccatgctcgaacgcgccttcgaagaatcgaccaagctctacaaggagcgtggcttccagcgccgtatcggcttcggcaagcgcccggcgctgatcaacgtcgacctggccaacgcctggacccgcccaggcaacccgttcacctgcgaaaagatcgacgacgaaatcatccccggcgtgcagcgcctgatgaaggtgttccgtgccaaccacttcccgatcgtccacgtcaccacctgctaccagaacaccgaccgccatgaccccaacaccgacatgggccagtggcacaacaagatcccggtggacgtggtcaaccaggccgatgagaacctctgggcgatcgactcgcgcatcgcgccagtcgatggcgagttcgtgctggtgaagaagcgcgccagttcgttcagcggcacctcgctggccgggtacctgcgctcggcaggggtcgacaccatcctggtgaccggcgtgacggcctcggcttgcgtgcgtaccaccctgtgcgacggcctggccgaaggcttccgcaccatcgccgtgaaagagtgcatcggcgaccgggtaccgggcgcggtggcctggaacctgtttgacattgatgccaagttcgccgacgtggaaaccgtcgacagctgcctggattacctggctagcattggcaaacgttga

SEQ ID NO: 332838 - DNA, 189 bp, Pseudomonas aeruginosa
atgcttctacttcgatttctactccacctgctcatcttcatcggcgcgctcgcggccgctgctacggtggtgctgagcatcttgctcatgctgcgcttcccgccgctgctgctcgccgtggtcctggcctgctggatgctgaatcgcctgctcagattgctctgcccacgcccgggcaatccctgctga

SEQ ID NO: 332839 - DNA, 1005 bp, Pseudomonas aeruginosa
atgaaagcaacgtcattgaacggcagcacccgcaaagcccgcccggccctgcgcctggtcagcaccaaggagcttccgcgcgaggactggctgcagatccgtaaacaaggcatcggcagttcggatgccgcggctgccgtgggactgaatccctacaaatcgcagctcgaactgtggctggagaagaccggccgcgacactgcgctgcctaagggcgatacccaggatgaggaaagcccgatgtattggggcaacgtcctggaacccatcgtggcctggcactacagcaagcgcaccaagaacaaggtccgccgcattaacgccgtgctacagcatccggatccggagctgccctggatgctggccaacatcgaccgtgaggtaatcggtgccgacgatgtgcagatcctcgaatgcaagaccgccggcataaacggggcacgtctctggaaggaaggcatccccgagtatgtcgagcttcaggtgatgcaccagctcgccgtcactggcaagcaggctgcggatgtagccgtgctgcttggtggccagacgctggagatccaccgcattgagcgggacgagcagatgattgctcgcctgatcgagctggagtgcaagttctggcgctacgtggagaccgacacaccaccgccagccgacgggacggcatccgcggaggcagcgctacgctgcctgtatccggaggacaacggtcaggtagtcaacttcagcagccatgctgggctgactgccgcctatatcgaactgaaggccctgcggcagtcgatggccgacaaggaaaagcgcgaggccgagctcaagcagatgctgcagcaggccatgggcgacgccagtcgcgcggagttctccagcggctacgtcagttggcgcaaggccaaggacaacatcggtttcgatgtcgcgcaactgctcaaggacaagccgtacctgcaggccaagtatccgttgctgaagcccggtgcgcggcgcttcctggtcggctga

SEQ ID NO: 332840 - DNA, 330 bp, Pseudomonas aeruginosa
atgtcattgcagtgccctcgctgtcactccccaaaaatcgcttccttccatcacgccatgagagtcggcgccgccgtcggcacccttggcggtattgcacgtagcgtcagcgcagccctgggaggtggccaagctggcgcagctatcggcgcgttcgccggacctgtcggtatcaccctaggttccgtgtctggtgtcattctcgccggcctggccggcggcgtaggcgggtgtgcgctaggcgcccagcttggcgagtcgctcgaccgccacgtcctggcccacaatctctgtctgctctgcggtcatcgcttcaacctgccagtctga

SEQ ID NO: 332841 - DNA, 642 bp, Pseudomonas aeruginosa
atggctcaatctagcggtagtgctggatctgttctcacgccaaaggatctgggcgagattgttccccacagcgggcgcttccccgctgcggtagaacgtgcactgtttttcctgctactggcgccatgggaagactgggccgagatgaccgaagtggactggcggggtttccggctgccttgggtctataccctcgacgatgacctgtgcgctttcccgcacccgccgccccaccctgagcggctgacgtgggagccgtgctccttccaagtggaccacgacgagtgggaggaagccgaacgccctatgtggctgcgaacttgggcaaccgccgaggatgtgcggcaggcactggaagccaggtgggagctgctgcgtgtagctagcccccaagcgtcggagcttttctcaactcctgtcgaacacttcctggtccgtgcgtttctttctgacggcatcgatgaagtgatggcgcacctcatcatgattgaggccgcgtttggcgccgaggaagaccacaggcgtaagctgcgactaacaggtgataattacgacgaatcgccgacgcgcagggttgctgcaagactgagcgccgccatcgtcgagcctggcgcagcgaaggagcatcccgtcgccgtgtga

SEQ ID NO: 332842 - DNA, 918 bp, Pseudomonas aeruginosa
atgatgaggttctctgaaattgaggcgttcagggccgtcatgttgtcgggctcaaccactgcggccgcgcagacgctgcacacctcacaacctaatgtgagcagagcgattgcgctgcttgaacaaaaaaccggcttgaaacttttcgagcgattgccagggcgactggtgcccaccagtgacgcccggtccttcttcaaggaggtacaacgaagctttgcggggctgcaccatctggacgaagccgccaagcggatcaagcggttcagcggtggcgcgctgacggtcgccgcagtacagatgcttgcgctgggcctggtgcccagggtgatgcagcagttttgtcaaaatctgcccgaagtcagcgtgtccatccataccggccacgcaacgacagtggcacgctgggttgaagatcaaacctgtgatgtcggcttggtctcccaggtcaataacaactatggcctggcctatgagcacctgtatgaggtagacgccgtctgcgtgatgcctgcagaccatcggctcgcacgcaaggacgtgataaccccccaggacctggcgaatgagcctttcatctcgctgccccgcaccgaacatggctactcactggtcgacacccattttgaaaacgccggtattgaccggcacattcgcctagagacctcttacagttcaatcacctgttcgctggtcatgcaggggctaggcctatcgatcgtgaacccgctcgcctcattggattaccgccattcgggcatggtgacgcggccttttctgcccaccgtaaaacatcaggggtacatcatctaccccaaagagcgcgcgaacgatcggttgatttcagacttcgtgacgaccgtcaaagacgtgctggcccgcgaactcgagagcctcgggtgtaaagcgccggcgtag

SEQ ID NO: 332843 - DNA, 1032 bp, Pseudomonas aeruginosa
atgaaaaaaatcaacacctttgcattggccagcgccattacgcttagcagcggcgcgtatgcgcaagacacgctctatttcgcagggtattccggcgactttcaaaagacctttgaaacggtcatccttcccgagttcgaagccaagcatgatgtcaacgtcgtttatgtgccgggcagctcgagtgaaaaccttgccaaattgcaagcgcagcgagccagtcagcaaatcaacgttgccttgtttgacgacggccccatgcattacgccgtgcaatttggcctgtgcgataacttggcgcagtcgccggtgtatcaggacatctacgatatcgccgcagcctcgaacttcaagggtaaggcggtcggtatcgggctggtggcgacgggcattgcctacaataaagcagtcttcgccaagaatggttgggcggcgcccacatcgtggtccgacatcgcggaccccaaatatgccaagcgcgtcgcctccaaccctatctccggtacgttcggcctaaataccttgatcatgttctcccgcatcaacggtggcggtgagcatgatatggacccaggcttcaaagccgttcgtgaaaatgtcgcgcccaatgtattggcgtggacctcttcgaatgcccaattagcgcagatgttccagagcaacgatatcgatattgctgtctggggtagcaaccgtgccgtggcgttgaaaaaaacaggctttcctatcgagtttgtttatccaaaagaaggcacacccgccattattgcttcggcctgtgtagtttccgggaataagctcgcagaaaaatctcaagcgctgattcaatacctggcgtctcccagtgtgcaggccaagttcgccaccgagggcttcggccccgtcaaccggcaagccaagctcgaagagggtttggccgaagaggtcccttatggcgaagagaagcttgcgcagctggtgccgatagactgggacaccgttaaccgtaaacgtgctgaatggacaaaacagtggagccgtaccgttgagtga

SEQ ID NO: 332844 - DNA, 1071 bp, Pseudomonas aeruginosa
atgagtaatttgattatccgagggctctcgaaaacctattcgggcggctttaccgctgtgcgcaacttggacctagaggttaagagcggtgagttcatctcgctgctgggtggctcgggatgcggaaaaacgacgacacttcagatggtcgcgggatttatttcccctaccacgggttctgtccatctcggtggcaacgacatcaccagcatgctgcctgaaaaacgtgacatgggcatcgtattccaaagctatgcactgttcccgcatatgaccgttgccgaaaacgtcggcttcgggttgcagatgcgcaaagtgcctaaacaagagctggcgacgcgtgtcgaagaagcgctcgcgatggtccgtctgtcggggctcggggcgcgttatccacgggagttgtccggtggccaacggcagcgtgtcgctatcgcacgggttttgacgatccgtccgagtgtcttgctgctcgatgagcctatgtcgaacctcgacgctaagctcaggggtgaaatgcatgttgagctccgggcgctccagcgccggctcggcattactactatcttggtcacccatgaccaagtcgaagccatgacaatgagcgaccgaatcgctgtgatggccgacggttgcatcgcagagctgggtaagcctcaagatgtctacgaccagcccacctccagcttcgccatgcgcttcctgggtcagaccaatattctcatgggcaaggtgaagtccatctcccagggacaggcattggtccacctggacggcatcgtcgtgcccgcgaaccggcagcagctcaaggtgggcgacgacgccatgctgttcatccggcctgagcgcatccgcttcaccccgcccggcgttgggaaagccgaggggcgtattgcatcacgtttgttcctcggtggcctgtggtattacgaaatcgaaagcgccttgggcgcgttgaagatgacagcaccgaacaatggcgagcgccagcctcaagaaggcgaaacggtcggcatcggttggggcgacggcgacctgcaggtcgtatccgcggaggccgcccatggctga

SEQ ID NO: 332845 - DNA, 870 bp, Pseudomonas aeruginosa
atggctgacactacctaccgcgccaatggtgctcagtgggtactctcgctgcccgcgctcctgttgtttctagggttgctcgtcgtacccatcgcattgactggcatgctttcattcaatgtgttcgacgccatgagtggcactcaaaacagttataccttggccagttacctggaggtactcagcgacagtttctattacgagctgtttgcccgtaccgctttgatgtcactgggcgtcaccgccgtctgcattgccattggcgttcctgaaacgctgatcctttcgcgcatgcggcccgcatggcaaggtggctttttcgtcgtgatactcggcccgttactcatttccgtggtggtacggacgttgggatggtcgctgttgttgggacgtgaaggttttatcaactcagcgctgatggcactcggtctgatcgaccagccactacagctcatgtttaccctgaccggggtagtgattgccctgacccatgtgatgatgcctttcatggtgatctcggtatggagcacgctgcaaaaagtcgatggccagattgcccatgcggcccgctccctcggggccggcccggtgaccaccttcaggcgcgttgtgctgccgcagctgatgccgggtattttgtctggcgggatcatcgtctttaccttgtctgcctcggccttcgccacgccggcgatgatcggcggtcgcggcgtcaaagtcgtcaccacggcgatctacgatgaatttctctccacgatgaactggccattgggcgcttccattgcggtgctcttgcttattgccattgtcttcgtggtgatcggcagcaatcgattgatcgagcgaaaattcaagcaggtgttcgtatga

SEQ ID NO: 332846 - DNA, 810 bp, Pseudomonas aeruginosa
atgagtgatcgcagcctggaaagtaacggaccctttgcaatactcttccacacactgttcgtcagtttcattgtggcgccgctgttgatcattgtattggtctctttctcagacaagggctatatatcgatgcctttcgacggcgcctcgtggcggtggtacaaagccatttgggacgccccggagttgatcaatgcgttttggctctcggtgtggctggggcttggcgcggcgacgattgcgtccattgtcgcggtacccgccgcgatagctattgccaaataccgtttcgccggacgcgaagcacttacatcattgattctctcccccttgatgattcctcatgtcgtgcttggtgtagcgtttctcaggttcttttcagtggcggggatttcgggttcgttcatcgggctgttattggtgcatgcattgatcgtcacgccttactcactgcggcttaccctggcggctgtcatcgggattgatcgcgatgcggaactggcggcacgctcactcggcgcctctaaatatgtgtccttttggaaagtgttgtttcccttgattctcccaggcgtggccggcggttggttattggccttcattcaaagtttcgatgaagtcaccatgacgatattcgtctccaccccgggtactacgacacttccggttgccctgtatgaacggatcgcattgatgaccgacccggtgacgacttcggtttccacggtaatgattgtgggaacgatgatcctcatgtttttgctagaccgtattgtcggtttggacaaagtattaatcggtaaaaaatag

SEQ ID NO: 332847 - DNA, 1137 bp, Pseudomonas aeruginosa
atgagcaaagaacacatgatcgtagtgggcggtggactcgtcggcgcggcaattggctacggtgccgcgcgcaggggccttaaggtcaccgtcctcgaccaaggggatgccgcattacgcgcctctcggggaaattttggcctggtctggttatcgagcaaaggtggtgggatgccccgctatgcgcaatggacgcgcgatgccgtaagacagtggccggaactgcaccgggagttgctcagcctgacgggtgtcgatacggggcttgagcaaacgggcggcttctggcttgggttcagcgaaaaagaggtacaagcgcgggcggacttgcttgagaaaatcaacaaagcagtgggtgatatcccctatcaaatgatgggccctgcagagctgaggcagcatttgcctgggctaggccccaaggtcgtcggcggaagcttcggtactcatgatggccacgccaaccccttgatgctgctcagggcactgcatgcgggtctgaaaatgaagggggcagatatcatttctggcgttgacgttgttgcggtctcgcaggaccccggtaccggtaaattcacggcgcgttcccgggatggccaatcctggaacagcgacaggctcgtactcgccgctggtatcgggatctccgagttggcatcgcaagtggggttgcatgccccaacccgcccgacgcgcgggcaagtgctgatcaccgagcggctcaagccgtttatcccctacccgacgaacaaggcgcggcagaccaaggaagggtcggtgcagatcggctcgacttcagaagatgtcggtctggatgatcgcacgacacctgacaagatcagctggctcgccgaacgggctgtagatacgtttcccgccctcaaggatgtgaggctcgttcgagcatggggcgccattcggcctttaacccccgacggctacccggtgtaccagagttcgacgacgtgcccaggggcctatgccgttatttgtcatagcggcgtgacactggcggcaatccacgcctacgtcatcgggccctgggtcgggggcataacaccctcacccccgaacttcgaagggttccacagcgacagattcctagaccccaacgcgagttttacccatgaccactaa

SEQ ID NO: 332848 - DNA, 336 bp, Pseudomonas aeruginosa
atgaccactaagccgcttttttctgtttcgaacgcgcctgctgggcggacggtaaaaatcacattcgaggggcaagaattgcgcgtcgccgagggcatcagtgtggctgccgcgttgctgacccaaggcgcccgtgatttccgctccagtatcgtcggtaatgtttcccgcgctccgtactgcatgatgggtgtttgctttgaatgcctcgttgaaatcgacggcgtacccgcacggcaaagttgcatggtcccggtgcgcgacggcatgcatatcaagcgtcaactcggcgctgtggcactggacctcggcgaaatgggagggtgccatgaataa

SEQ ID NO: 332849 - DNA, 1371 bp, Pseudomonas aeruginosa
atgaataatgtcccggtagacctggtggtcgtcggtgccggcccagctggaatggccgcagcctgccaggcacgcgcccaggggttgacggtggtcgtgctggacgagcaaccagcgctcggcggccagatttatcggcggatcgagtccgctcctgaagccatacaacacatcctcggcgcggattacgtcgcaggccgagcccttgctcgtgaattcaaagccagcggtgctatccacatcaccggtgcggtggtctggaacgtggccgcttcgggggaaatcaattacatcgccaatggccataatgaagacatcgtcggcaagtatgtcgtactggccagcggcgccatggagcgaccattccccatcaaaggctggacgttacctggtgtaatgggcgcgggtgccggtcagatcatgctcaaaggggctggtgcactgcctaccgagcccgttgtcctcgccggttgcggtccgctgctctacctcttggcttggcaatacctcagggcaggcgtggcgatcaaggcgttggtggacaccacaccacagtcggcttatgtccgggcgttgcgcgaagcggctggtgcgctcaaaggctggcgtgatcttgccaagggcatgaagctgctcgcgtcgatcaagcgtcacggggtcaaggtttactcgggcgctaccgacctggcaatcgtgggggaccatgcggcccaaggcattcaattcaaacatcgcgggcagcgcacgtccgtcgcgtcttctctggtgttactgcatcaaggggtggtcccgaatgcgcaactcagcctctcgacgggcgccgcgcactattggagccccgagcaactttgctggttgccgcataccgatgagcatggacgcctgggcgacaccgtgatctacgtcgccggtgatagccgaggcatcgtcggcgccaaggcatctgctgtacagggacgcttggcggccttggcaattggggcgcagcttggaagtttgcagggcttgggacatcaactggccggactggctcagcagttggaaaacgctacgagcatcagaaagttcctggatgttctttatcgcccccaagaggaaaatagaattcccgcagacgataacgtgctggtgtgccgctgcgaggaagtgactgctgggcagattcgcagctatgtagcgttgggctgccatgggccgaatcaaaccaaggcatttggccgctgcggcatggggccatgccaaggacgtttctgcggtttaaccgtcaccgaaattatcgcgaaaacgcgcaacgtcgatcctaacgaggtcggccactaccgcgttcgcgcccctatcaaacctattttactgggcgaacttacacattag

SEQ ID NO: 332850 - DNA, 360 bp, Pseudomonas aeruginosa
atgagtgatatcgttcgcatcgaaactgacccgcgccgtagccgggtcgttatttataatggtgtgatttatgtcggcgggatgaccgccgatgaccgcactcaagatatcgccggccaaacacgcgatacattggcgaaaattgaagcttatcttgagaaggcgggctcagacaaaagccgggtgctgacagcgcaaatctggatcaaagacctggcccgtgacttcgacagcatgaatgaggtctggaacgcctggaccgcaccgggttgcgcccccacgcgcgccaccgcccagtgcgacatgggcgcgccggatgtgctggtcgagatcatcgtgaccgccgcggttgctgagtaa

SEQ ID NO: 332851 - DNA, 303 bp, Pseudomonas aeruginosa
atgagcgcgcttcccgaggccgagaaggccactaccgcagatgtgacgagcttcatcacgaaccagaatccgcccatggacttgttccacatcagccctggcgtgccctgcgactatgccctggaacaggcctcgaccctgttggggtgcgtgcacaagctgatcctcgcgggggctgtggatgaagatggcgacatgatctgggccgcctattacctgagtgggcttgcccaggcgattctcgcggatgtggaggctgggcggatgcggaacaagcgggagaagactgttctgaaggcctag

SEQ ID NO: 332852 - DNA, 1113 bp, Pseudomonas aeruginosa
atgctcaaaggtctggctatcacgcccccggtgctcggacgcatctctatcggtaaggtcgtcaagaagaacggcaagcgccttccggagaaggatgaccagttcaccatcacctcccaggtacaaggcaatgacggctggttgctgcacccgctcaatgatgagctgcgtcagggcaaggaagacaagctgcgcagcatcccggtacgcctgctgttcaacgaaccggagctgaactttcgcgccgactacaccctgttcgaccggcaatccgggcggccgctgtgcgtgggcaacggcgagatctgcaagcgggtcacccaggacggcatgcagtcactgccctgcccttcgccagacacctgctcgttggccaaaggcaatgcctgcaaaccttacggccgactgaacgtgatcattggtgacgacgatccgctgggcagcttcgtgttccgcaccaccggcttcaacagcatccgcaccctcgccgcccggctgcattactttcaggccatctccgggaaccgcttggcgtgcctgccgctcgaactgcgcctgcgcggtaaatccacccggcaaagccatggcacgccgatcttctacgtcgacctgacggtacgcggcggtatggacattgccgagacgctgcaggccgccaacgagctcgatgcgcagcggcaagcagcaggattcgttcaggccgccttggatgaagcggcgaagcgtggcttcggcaatggcgcgttcgaggacagtgaggaagatgctggtgccatcgccgaggagttctaccccgccgaagaaacctcatctccaaccaccaatacttcccagcgttccgcgaaaaccagcctggctgagaagctggacgcacaagcccagctccataccccaccgacagatcaccatcaaggagcccagcatgcacccgcacaagctgaaggccagcgaatcgaccggcacctacctggtcgagtcgccggtcaccgaaaccgacatcctgctgatggcccggcagttggcgaatctgcgtctgcgtcgggagcgagcactgacttcaccgaaggaagtattcagccacctgcaggcgcagctgggcgactacgagcatga

SEQ ID NO: 332853 - DNA, 969 bp, Pseudomonas aeruginosa
atggcacatctcgtcgaaaccatggcctacgctggcgctaccccgtggcatggcctgggcaatcagctcacgcaaaagcaacccatcgaagtctggcaacgcgaagccggcatggactggcagatcctcgaaagccccgtgcatttcaaatcgaatgccgtcggccacctgggcgcgatccactccttccccgagcaaaaggtgctctaccgctccgacagcaaggcgccgctgtcggtggtctcacagcgttaccacaccgtgcagccccgggaagtgctcgaattttatcgtgacctcaccgaggtttccggctacgagttggaaacggctggcgtactcaagggcggtcgcaagttctgggcgctggcgcgtaccgggcaaggcgcggcgctcaagggcaacgaccaggtgaatggttatctgctgctggcgacgtcctgcgacggcaccctggccaccaccgccactccgaccaccgtacgggtggtgtgcaataacaccctgaccatcgccctggacggcaccagtcgggcgatcaaggtgccgcacaacacccgcttcgaccccaatgcggtgaagaagcaactcggtatcgccgtttcgcaatgggacggcttcatgtaccgcatgcgggcgctggccgaacgcaaggtgcaatggcatgaagcattggggttcttcatgaatgtgctgtgcgagaccagcccgaccggcgcgctgccggagcaactgcccaacgaacgcgccttgcgcaaggtccaggagttgtacgagggtcgcggtcgaggcagtcagctggactcggcacgcggcaccgcctggggcctgctcaacgccgtaaccgagtatgtcgaccatgagcgccgtgcccgtagcaacgaataccgcatggactcggcctggttcggccagggcgcacagattaagcaacgcgccttagatgccgcactgcaactcgccgcttaa

SEQ ID NO: 332854 - DNA, 330 bp, Pseudomonas aeruginosa
atgtcattgcagtgccctcgctgtaactcccccaagatcgcttccttccatcacgccatgaaagtcggtgcagctattggcactgtaggcggtgttgcgcgtggcgtcagcgcagcctggaccggtgggcaggccggcgcagccatcggcgcgctcgccgggccggtcggtatcacactcggctcagtgtcgggcgccatcctcggcggtctggcgggtggcgtcggtggatgcgcgctcggcgctcaactcggcgagtcgctcgaccgccacgttctggcccacaacctttgcctgctctgcggtcatcgcttcaacctgccgacctga

SEQ ID NO: 332855 - DNA, 2310 bp, Pseudomonas aeruginosa
atgccagaagcggttgtcgccacgccggtagctggaagcatcacccttcgactcctagagctttgtcagttccggcggcttggcaaggtccagctaaatatcgataagaaaactactattcttgtcggagccaacaatagcggcaaaacatcggttcttgcagcgctacgccacttcctttcagatggctctcgcttcggcgctttcgatatcagtctgtcgcagtggccgaagttgcgagcgcttggtaaagcttgggaattgctgaaggaaaacccgtcgacagtgattggatccgaagagcaatggatcgagcagcttggagtcattcactcggctatgccgacgttggacctatggttcgatgcggaggctggcatgttccactatgtcgccccgtttctctcaaaattcagctggaaaggaggggccgttggggtacggttgcgtctggagcccgctgcaagcgttgacgagttgaagcagctggcttgggcataccacaccgcgcgactgccggtgaaggatatgggggcggattcgcttgcctggcccattgacctcctcgacttttggttgcgcgagccacaaaggttgggtcaagtccgagcatacaaattagatgcagacaaaaatccactggacgggctcgagacctatgccgctcagactctgccggcagacgccagtccaattgagcgcaaaaatctacagaaattgatacatgttgacttcgtagcagcgcagcggggtcttggaggtgaggaagctgattctcgatctgcttctggcccccatcgtgtcggcatgttctccaatcaacttctcaagtttgctcgacaacacctaaatattgctacaacaggtcatgggcatcgcgcagaccttattaaggcggtcgcggaggcacagcaggaactggacaagaaaattcacgaggcgatcgctccgtcggtggaagaggtcagagaactcggatacccagggctgcacgatccccaagaaattcgcttccgcacgcgcatacagacagctgatttgctcgaccatggtactgcagtccaatacagcatgcagaaggactcactagaagagcttcttcccgagtactccataggccttggataccaaaatctccaatcgctcagctatcaactggtttctttcaaagcggctcgactcaagcctgaaaaaggtgccccggtacccgttcatctagtattggttgaggagcctgaggcgcatcttcatgttcaagtgcagcgtatcttcccagataaggctcacaagctgatcagcccgaacgaaaaagaagcgtcaggacttaaaagccagttaattatcagtactcactccagccatctcgcgcacgcagagagttttgatcgattacgatacgtccgtcgcatagcaaagagcgcagaaaatcccatgccgaccactgaggtggttaatcttgggaaaattttcggtgatgaccaaaagacccgtcaattcgcagagcggtatttccgcgttcagcatactgaccttttgtttgccaatgctgcaatcttcgttgaaggcgttgctgagcgcatgctggtcccgcttttcatcgaacgagattttgaagttctcaacagccgctatctgtcgttcctagacatcggcggtagtcacgctcatcggcttaagcctctcgtggaaaagcttcgcattcccacggtcatcatcaccgacgtcgaccccgttgaggagaaagctgggaagccgacgaaggatggtgagccgaccaccactctagttgcagtggctaatactggccaagccgggctgcaatgcgggaacccgacgctgcgcggttggcatccgaaactgcagcagctcgaagatttcaaaaacccagtagaggtacaacttgtttggagcgaagtctctgaatgtttagtgcgcttcgcctggcaactgcccgtggctgaagcgggcgaccattggcctagcacctttgaagactcacttattctcaagaacattccttggttcaaaggtcttatggatgagaaggtcgacggctatggcaacaaaattaagccgcccaaaggcgcactcggctccgtagctcgacgcgttgccgaccatgaaaatatttcggatttggtcgcatctctacacaaactcatgcacggctcattcaataaaggagacttcgctgcaagcatctttgagatgattgcggcggccgaaccaattgcttgccctaagtacattgcggatgccttagaatggcttcaaaaacaattggatcccaatccggagttggtgccatga

SEQ ID NO: 332856 - DNA, 1947 bp, Pseudomonas aeruginosa
atgactgcggttccgacccttggcaacgatcgcgatgccggcgtagttgatgaaatctgtggctaccttacggaagaaccgccgcgcagctatttcctttttgcgggtgccggttccggtaaaactcgtactctggttgaagttcttcggcgacttaccggcgtcatcgaacacgataaaggcaataagttagcacggcgtctgcgaatgtacgggcgctcgattagggtggtgacatataccaagaatgccgtctcggtcatcaacggacgcctcggcgacaacgacttagtctgcgtatcgacgatccactcattttgttgggagctcatcagcggcttcaacgatgatattcgagaagcacttgttgccgttaaagaagctcaacttgcgaaagaaactgccgaggcgcaagccaagccgagaggcattacgccagctaaacagcgagatcttgacgaaatcaaggatgatatcgaggcctttagagcgaccgaagtgttcatctaccatcctgatcgcaacacgtacggccccggcgcacttgcgcacaactatgtcctcgacgcgacagcgtggctgctccgaaataaacttacgctccaaaccattctcaaggaccgccaccccataattcttattgatgagtcgcaggacacaatgaaaggcatgctggacgctttgatggggcttgcagagcaggaagggagcgacttgactcttgggctgctcggtgatcaccggcaacgcatttatgcgcacgggcacgccgatctttcaagtcttgtcccgcaaaactgggcaacgccagagctgcagatgaaccatcgcagccagcgccgaatcgtcactctcattaacagagtttgggaagctgagcttgatggccggacgcagcctataaacggtgtggagcagcatcctagaactgaaaaggccggaggagtggttcggatcttcgtgggggatacttcgcgttctccggagaacaaagtgatcggtgaacgttggtgctcagatcggatgcacggagccactggggacgccgcgtggtatcaaggccagtatcagttgctcgcgctggagcacaagctcgtcgccactcgtggctcatttctcgatgtgtatgaggctatggtcctgctagatcctgacgccgcagcgccttctggcagtggtgataacaaggggccttctgcagtgcaggttctcctaaacgagcttgctcagcttgaagcatgcgtagatattgacggtgccgtaaacgagttaaaggtcacagaggtatttcgtcggtatggacgcctcgacaacctaccggaggaatgtgtctcacgagcgagtcgcgtggaggagatgctgaatgccatcactgcatttgccaccgcctgcggcaattcaaactcaactattgcagaagtgctcgcaccagtcttgagcgcacacttatttgaagtcgatcatcgcctctcggaagcatatgcggacaagtcgccacctcttccggcaccgggccggggggaagaggaatccaaacaggccaggatgcggcgtgggtggtgtgcgctgttcgccgcaccttggagtcaactcagactttaccaaacttacctcgccgggaattcagttcttgcaacgcatcaggtggtgaaaggttctgagtttatgcacgtcatggttgttatggatgatgctcttgctggtggtttccttatttcctacgacaagatttttggtggtgtggagcttagcaagcgggacaaagagaacgcagagcagggcaaagaaacgactatcgaccgcaccttgcggttgttttacgtaacctgcagccgcgctcaggagtcgcttgccctggtgctctggtcgtccgacccagcagcggcacttgatagaatcaaggaaagcaactggtttaccatagacgaggtagagacaataccttag

SEQ ID NO: 332857 - DNA, 1257 bp, Pseudomonas aeruginosa
atgggtgcccaagctactcgcctctctgacctcaaagtcaaaaccgccaagcctagtgaaaaggactacacactaactgatggcaacggcctccagatgcgagtgagaagcaatggctctaagctgtggaattttaactatatccatcccgtaacgaagaaacggataaacatgggtctaggaactttccctgaagtgagcctggctcaggcgcgcaagcgaaccgtcgaggctagggagcttgttgcccaaggagtcgatccgaaggaacagcgcaacgctaaccgtcaggcgaaaaaagccgcgaccgaacatacctttcagaacatcgcgacggcttggtatgagctgaaaaaggactcggtgacacaggcctacgctgaggacatctggcgctccctcacgctacacatcttccctgatttgggcaccactccgatctcagccatcaacgcccctcaggttatcaacttgctccgaccactcgaaaccaagggcagccttgagactgtgaagcggctgacgcagcgactcaacgagatcatgacctacggggtcaactcgggactgattcacgcgaacccccttagcggcatccgctccgtcttcaagaaaccgaaaaagaaaaacatgccggcactaccccccgatgagctgaaagagctcatggtggcaatagccaatgccagcataaaaagaacaacccgctgcctgatcgaatggcagctccacaccatgactcgaccaatcgaggcagcaaccacccgctgggcagatatcgacatcgagaagaagatctggacgatccctgcggagcgtatgaagaagcgccgcacgcacattgtcccgctcacggagcaggctctcgcgctcctggaagctatcaaaccttacagtggacatcgggagtatgtgttccccgcagaccgaaacccccgcacccactgcaacagccagaccgccaacatggcgctgaaacgaatgggcttcgagggacgcctggtcagccacggcatgcgctcgatgggtagcaccatcctcaacgagcatggctgggatcccgagttgatcgaggtagcactggcccacgtcgataaagacgaggttcgcagtgcctacaaccgtgcggactacatcgagcggagacgcccgatgatgacctggtggagtgagcacatccagggagcagcaacgggcaatctgtcggtatcagctatccaggagaatagggacaaaaaagtcgtttcgatacgttga

SEQ ID NO: 332858 - DNA, 123 bp, Pseudomonas aeruginosa
atgaccatgcgcaaggctctgaccgctatcgcactcgtcgcgctgtttggcctggctgctgttgccgccggcggcgcgctccagccgttcaagaacctgttcatctgggaggtatgccagtga

SEQ ID NO: 332859 - DNA, 837 bp, Pseudomonas aeruginosa
atgaagcggattcccgctgctgcaatgctgtgcctgctcgccgtcctggcgggctgttcgaaggtgcctgccggcaacgtcggcgtgatcgtcaacctctacggctccgagaagggcgtggagacgcgcgaggtcggcactgggcgctactgggtaggcgtgaacgaggaactctacctgttccccaccttcacgcagaccgagacctggggtggcgaggaagcgatcagcttccagaccgttgagggcatgaaggttggcggcgccgtcggcatcacctactcggtatctcccgacaaggtgacgacgctgttccagaagtaccgggcgggtatcgacgaaatcacgaacaagttcttgcggaacatggtgcgcgatgccttcaacgatgttgcctcgaagcttccagtcgagagcgtctatggtgccggcaaggcggacctgctgctggccgtcgagaagcgcgtgcgcgaccaggtggcgcccatcggcatcaatatcgagcgcatctactacgcatccgacctggtcctcccgccgcaggttacgcagagcctgaacgcgaagatccaggccacccagatggccgagcagcgccgtaacgaggtcgcccaagccaaggcagaagccgacaaggaacgcgctcgggcccaaggggaggcggacgcgaagctgaccctggccaccgccgatgcgaaggcgatcgagatccgcgcccaagcgctgcgctcgaaccccgacgtcgtgaccctcaacgcggtcgagaagtgggacggcaagctgcccacctacatggccagcggctccccgcttcccttcatcggcatcagcaagtag

SEQ ID NO: 332860 - DNA, 387 bp, Pseudomonas aeruginosa
atgaccaccaccgccaccatcacagcacacggtttcaccggcttcctcggcaaaggcctgtccctgcgtgagcttcagtgcgtcctgggcatcgctgcgggtcgtacctcgaaggagctggcccgcgacctgggcatgcagccgggcacggtgggtaagcgcgttctggcagcgaccaccaaactcggagtcacccgccgtgccgccctggtggctgaagccatgcgccgcgggcttatctcgcccgccgtgatcgccctcgccttcctcgtcgccggtcagccactgctcaacgatgaccacatgatgcgcagccgccgtggcggcgaaaggaagatcgaaactcgtctgactgctcgccgcgatggcgtggcctgggtggcgtga

SEQ ID NO: 332861 - DNA, 285 bp, Pseudomonas aeruginosa
atgagcaacgtacaaccgatggcaccccgcaaggtcatgaccaggctggagcgggagtttctcaaggtggccggccaggagctggcgcaggtcaaggtgggcggtgctgctgccttggctgcgctgctggtcatgatcgccaactggcacggtgaccgcggcactctgggttttcacgactacggccggctgtggctgcaggacggcaatgcgaagggcgccgctgcggaaacgctgctgcgcgatctgtttggcctgaaaggcacgccgaagggggccgcatga

SEQ ID NO: 332862 - DNA, 333 bp, Pseudomonas aeruginosa
atgaaaatgccagaacgccctgagacctgggctgcgctgcttgcgtggctgtctgcgcactatccgcagttgtacgccgccggcctgtccttcgtggtcgcgctgacgcgagtgatctacggcggtggaacgcggcgccaggcgctgctcgaggcaacgctctgcactttgattaccttgggcctgattccggtccttgagtggttcggcctgccacagaacatggctaccgctgctggggtgttcaccggtttccttggggtgaagaagatcgctgaattcgctgatcggatcgccgactggaagtttccgcgtcggggggctggcgaatga

SEQ ID NO: 332863 - DNA, 612 bp, Pseudomonas aeruginosa
atgaagatcaccgccgatcaactcgaccgtgctaccggctgcggcggcgctactgcttcggtctgggtcgaacacatcaacggcgccatggcccggttcgagatcaacacacccgagcgtgttgcgatgtttctcgcccaggtcgggcacgaaagccagagcctcaagcgcctggtggagaatctgaactactccgcagaggggctgctcaagacctggccgaagcgattcgccccggtagaggctcgccagtatgcccgccagcccgagcgcatcgccaaccgcgtctatgccaacaggatgggcaatgggtcgccggatacgggcgatgggtatcgataccgtggtcgtggcctgatcatgatcaccggccacgacaactacgccgaagctgcccgcgcactggcgctgccgcttgtggcgcaaccggagctgctggagcaacggacctgggcagccatcgccgcggcatggtggtggaagtcgaggagtttaaacgaactggccgatcagggccgtttcgagaagatcaccctccgcataaacggatcgtttaccggggccgaggatcgcaaggcccggctcgaatgggcgcgcgccgcccttaactga

SEQ ID NO: 332864 - DNA, 231 bp, Pseudomonas aeruginosa
atggacaatcagcacaagaaaatcaccggctaccgtgacctgagccaatccgagattgatggtatgaactcgatcaaggccttggagcaggacgcagggcggctgttcaagcagatcggcgagatcgatggcgtcgatccgcgactgcttgccctggccaaaacgaacttgcagcagggtttcatgtggttcgtgcgttcgatcgccaagcccgccgatccattctcctga

SEQ ID NO: 332865 - DNA, 198 bp, Pseudomonas aeruginosa
atgaagaaaaccaattgcgccgcgatgctatcggcactggtgctcgcgtcgtgtacgtcaaagcccgctgtcccgcagacggagtgcaccaggctcccggagcctccggcagcgctgatgcaggaagagccgtccttgctgccgctgatggacaagttgtttctgatctccgagccggagtcgagcgacgcgaactga

SEQ ID NO: 332866 - DNA, 330 bp, Pseudomonas aeruginosa
atgtccaggctaaagactctcgggttccgcgtggcggcccagggtgagcgactgaaggttgcggcgcctggttcgtggcggaccggtaagacctcaaccgagcgaggctacgactaccgatggcagcaggcccgtgagcagtaccttcgcgatcatccattgtgcgtgtactgcgcgcgcaagggcttggtcacggcggccaacaccgttgaccacatcgtggctcaccgaggcgatacggacctgttctgggacaaggacaactggcagccgctatgcggaccctgtcactcctcggtcaagcaggccgaagaggcggcagggttctaa

SEQ ID NO: 332867 - DNA, 255 bp, Pseudomonas aeruginosa
atgcgaacccaaccacaccccgaaggcgttgagatcaacccgcaccggccgtggggaccacaagacgtgcagggatacagcgcggaagtggtcaaggccatgaatctgctggagccgcttctacaggccggactgctggccctggtgcctgaccaatggagcggcggcaagttgaccttcctcaccccgtcgagagctgcgaggcagggatggaggccgccacaggctgaccaagggggagaggcacgcggctga

SEQ ID NO: 332868 - DNA, 492 bp, Pseudomonas aeruginosa
atggcgttaacagacaaacagcgacggtttgttgacgcgaaggcccgaggagcatccaacaaagctgccgccgaagccgctggctacgcgccttccagctctgcggccgctggcgcccgacttgccaagcaccccgaaatcatcgccgccctgaagatgttaaaggggcggcgagatgttaaagccaaggagccttcgccgaagcagggcgaggaccatgaagcgccgctcggcgatgagcaggaacctgatggcgagtacctggattgcctgccgtttacggaggacccgctggtctggctggtcaacctgatgaatgagccgcgggcgaaggtcttcgatcgccgcagcgcggctcagaaagctgtcgacttcttccatggcaagaagggcgagatgggcaagaaggaacagaaggccgaggccgcgaagcaagccggcaaaggcaagttcggccagggcaagcctccactatccgtcgtcagggggtaa

SEQ ID NO: 332869 - DNA, 1680 bp, Pseudomonas aeruginosa
atgctctggaccactgcctgccctgactggtggcggcgcttgagtgctggtgaatccatcattccgccgccgctctttcctgaggaggccgaggaggggctcagcgtcttccgggaactgaagatcgtagacgctcccggctccccgacaatcgaggccgcatgcgccccctgggtgctcgacttcgccggcgccatcttcggcagctacaacaatgagaccggccagcgactgatcactgagtacttcctctgcatcccgaagaagaactcgaagtcgaccatcgcagccgcgatcatgctgaccgccttgatccgcaactggcggcttgaggccgaattcatcatcctggcgccgaccaaggagatcgccgacaacagcttcaagccggcggcggcgatggtgaagcacgacgaagagttgtcggatctgcttcatgttcaaccgcacctgcggctgattacccacaatcagactggagccaccctgaaggtagtggccgctgatagcgatgtggtcggtggcaagaaggccgtcggcgtgctgatcgatgaggcctggctgttcggcaagaacccgaaggcaccggacatgattcgggaggccactggcggcctgctgtctcgccctgaaggtttcatcatctggctcacgacccagtcgaacgagccgcccgccggggtgttcaggtccaagctgacctatgcccggggcgtccgtgacgggcgcatcgaagacaaccggtttctgccgatcatctacgagttcccgaaggagatgatcgagagcggagaggcgcgccggccagagaacttccacctggtcaacccgaacatgggctactcggtggatcggcctaccctcgagcgcctgtttatgcaggcagaactcgacggtgaggccgaggtgcgcgggttcctcgccaaattcctgaacatcgagatcgggctggcgctgatgtccgacagttgggtcggcgccgcattctgggagccgcaggcgctgccaggcctttcgctggatgccctgattgagcgctgcgaggtgattgttggcggcgtcgacggtggcggcctagacgacctgctggcgctgacgctgttgggccgtgagcgaggggggcgccggtggtttcactgggcgcatgcctgggcgcacccctcggtgctggagcgccggaagtccgaggctccccggctccatgacctcgcggcggctggtgatctgaccctggttgagaaaatcggcgatgacgttgaggagttggcggcgtatgtcgctcgggtcaacgacgccggtctgctcgacaacgtcgggctcgaccctgccggcattggcgccgtgatcgatgcgctattggcggcggggatcaccgaagagcagatagtcggcatctctcagggctggaaactgaccggggccatcaagaccacggaaaggaagctggccgagggtgtgttgatgcactgcggtcagttgcttatggcctgggcctgcggcaacgccaagggcgtgccttccgccaacgctttcctgatcaccaagcaggcttccggcaccgcgaagatcgacccgttgatgtcgacgttcaacgcggtatcgctgttgtccctcaatccggaggcgcgcggcggcatggatgactacctcaacaacggcttctttggactcataggctga

SEQ ID NO: 332870 - DNA, 1218 bp, Pseudomonas aeruginosa
atgacatttcgctggtacaaccctcgcacgtggcggatgttcggctacaccgacccagccacgggtgattacgtcgaggtagaccttgaggtcggcggcaagagcacaaaggccggcgtgcgagtgaccaccaagaccgcgctgtcgatcagcatggtctggtcgtgcgtgaagatcctttcggagtcgctgtcgggcctgccgctgaagctctacgaggatgtggacggcgaacggctgctggtgtcgcgaaaggatggagcgcagaagctcctccgcaagcccaacccattcatgacgaggctgaacttcctgaagttcgtggttgtgaacatggcgctgcgtggtaacgccttcgcactgatcgaacgcaaccgccacggcgagccgatcggttggattccgctcagtatcgacctggtgaccatcgacaccgacgaggaccttctctactgggtgcagcccaaggatgggaaaccattcccggtttctccggagaacatgctgcatttcaagatattcagcatggacggcattgtcggcttgtcgcctatcgagtaccaggcggagaccatgggcctggccaaggcgggccagcaatggtctgcgcgcttcatgcgtaaaggcggcttcacgggtggctatgtcatctacaaggagttcctgaccgacaagcagcagactcaggtcatggccaggtttccggacgtccgtaaggcggacgcggacgacatcggcaagatggccatcctgcagggtggcccgaccatcgttcctgccggcataagccagaaggatgctcagttcatcgagtcccagcagttccaagaggaagcgcttgccggcatctacggcgtgccgctctggctggccaaccgcgccggcaagacctcgatcatgggttccaacctcgaacagcagttgactggcttcaccacctttggccttaaaccatacgccgatgcagttgaggatgagctcaacgacaagctttatggtgactcggaccgcttcgtcgagttcgtgctcgaaggtctgcagcgcgctgacagcgccggtcgcgccactctgttcgctgcggctcttggtggctccggtggttccggctggatgaccatcaacgaagttcgccgcaaagaaaaccttccgccacttgatggccctgaatacgaccgggtctcccggtgggagatgcagaccaatgctcagcaaacttga

SEQ ID NO: 332871 - DNA, 645 bp, Pseudomonas aeruginosa
atgctcagcaaacttgattgccccttcgaggtgaaggccgctgacgaggcgggcaacttcgagggctacgccgcagtgttcgacaacgtcgacctcggcgatgacgtgatcctcaagggcgccttcaccaaggtgaagaccgctcgcaacggccggttgaagctggcgctgtaccacgatctgactcggctggtcggaacctcggagttcacccaggacgaccgagggctgttcctcaagggccgagtaaacctggcagtcagttacgcacgcgacgcctacgagctgatgaaggacggcagcctcgacagcatgtcaatcgggttcaacaccatcgaagccaacttcgagcagcgcgccgggcggcaggtccgagtcatcaaggccgccgaactctgggaagcgtcgttcgttccgttcggcatgaaccctgaggccgaagtcctcagcgtcaagtcggacatccggcttttcgagaacgccctgcgcgaacgcatgggcctctcgcagaaggaagcggcagcagtcgcttcgctcggctaccccgcgctccgccgtgacggcggtagcgaggccacggcgatcgtggaagagctgaaagacatttcaaccctgttcaccacccattttggagtatcgccatga

SEQ ID NO: 332872 - DNA, 1215 bp, Pseudomonas aeruginosa
atgagcgaagtgaaagaactgaaggactccctggagctgcaactgaagaacggtttcgacgggctccagaagaagtacgacctggccatcaccgaggtcgagaagggcaaccaggttgccactgagctgaagaaggaaattcagacccagaaggacgaactgcagaaggtcatcgaccaggtgcaggatctggagcagaagggcgtcaagctgcgcggcggccccggcgaaggcaagagcttcatcgatatggtgaagtcgcacgacggctacaaggcgctgcaacagaagagcgcgaatgccgccgacatcgaggtcaccaagtcggacctggcgtcgatgaaggagaccaaggtcaccagtgccggcatcgttgtgccgaactacgacccgaccatccagcccggcatccgccaggaactgcgcatccgcgacctgctgaccagcatcccagtcagtggccagagctacacctactaccgagagttgctgcacacccgtggcgcggcgccggtagccgaaggtgcgctgaagcccaccagcaacgtgaccttcgagccggtgaccgaccgcgtcaagaagctggccgtgtggatgccggtcaccgacgaggccctggacgacgttccgcaactgttcggctacatccaggagctgctgcgctacgacctcaagctggaggaagaagcgcaaatcctcaagggtgacggcaccggcgagaacctgaacggcctgatgacccaggcgaccacctacgacaccgccctgaacaaggctggcgacacctccatcgacatcgtgcgccgcggcatctaccaggtccgcaagcagtcgaagctgtctgccgacggcgtggtgatgaccgaactggactggatgaacatcgagctgcagaaggatggcgaaaaccgctacctgttcgccaacctgcagggcctggtcaccccggtgctctggggccgcccggtgatcacctcggacagcatggacgaaggcgcgccggcgaacggtgaaaatccggccaccggtggcgagttcctgatcgccaacttcgcccgctcctcgatcctcttcgaccgcatgtcgttcctgttcaagatgggtctgatcaacgatcagttcatccggaacgaacgggcgctgctggttgaggagcgtctcggtctgggcgtgcgtcgtcgcgaggcgttggtgaaaggccgcttcgcggcgtaa

SEQ ID NO: 332873 - DNA, 204 bp, Pseudomonas aeruginosa
atgaagatcaaggcactttggggtttcgtaggtgacgcgaagaagctcggggcggagtcggcccaggttcgcgcgggccaggtgttcgaggaagtcgacgatgagtatgcacacgtcctgatcggcaaggggctggctgctgaggtcggggaacagaccaagccgaaagagaccaagccggcggcgccgaaaggggccaagtga

SEQ ID NO: 332874 - DNA, 324 bp, Pseudomonas aeruginosa
atggagatcgactgggatgccgatccatccatcctggcgaaggtgaagcttcaggccagggtcgagacggacgaggaggacgagctcgtaaagggctatgtcgccgcggcgctttcccatgtcgagcagcactgtgactgccggctggtcgaaggtgagcccactgctccggatgagatcggcctgacgccggatgtgtggcaggcagtgtatttgcttgtcgcgcactggtacgccaatcgtgaggcggttgcgctgggcaccatcgccacttcggttccgctcggtgtcgagcgccttctctggtacaggaagagattctga

SEQ ID NO: 332875 - DNA, 327 bp, Pseudomonas aeruginosa
atgagagctggtccccttcggcatcgagcggatctgctcgaactgcagcgagttcctgacggcgggggtggctattccgagcagtgggtcttcctgcgcaaggtgtgggttgagatcaccctgccgactggtcgggtggcgaccgttgcaaatcagttgcaaccggtcatcagcgctgagatccgagcgcgcccgcatggcgatcttgtcgttgggcgccggttgtcccacggcggcatcacctacgcgataaacgcggtccttcccgataacgagaacagcatgctcaggctgctgtgctccaacgttacccctacaccgaggtaa

SEQ ID NO: 332876 - DNA, 195 bp, Pseudomonas aeruginosa
atggtgcttcgagcaacagcgcaactgagcggtgccgtgaccgccaacaagggcgatgacgtaagtcatcatcccgctgaaatcctcaacccactgatggcgcgtggcttggtattcgacgacggcaaggactaccccagcgcctctgtgccgcccacctcgaaggccaggaagcggccgcgccgcaaggggtga

SEQ ID NO: 332877 - DNA, 573 bp, Pseudomonas aeruginosa
atgggcaggcgctctcgcataaagggcgacttcaagctgcgcggcgtgctgcgacggatcgcagcgcttgaccgcagcgacctaccaaggggaatggcgcaggctgccgacctggtgttggccacgcagcagaacatgatcccccgggacaccggcgaggccgccgccgcgcttcaggtgcggatcagccggaacggcctggatgcccggattggcatcatcggcaagcgcgacaaccggcgcttctactacctgaagttcgtggagtacggcaccaagggctacagcggtacggtctaccggcgtcgggatgctggcgcggtgggcggtgagcacaccgtcaacagggatcgcagccagttctccggccgcaatcgtctcgggcgtcgtgcgaccaagaacaagtcggatggcgagaacttcttcggctactacccggatattccggcacggccggcgcatccatggctgaggccgagcatcgacatgaaccgcgacgacatccggatcatcatccgcggcgccatcagcagcaccttggcgcgcgcggcgaaaggagccagcagtggctga

SEQ ID NO: 332878 - DNA, 387 bp, Pseudomonas aeruginosa
gtggctgacaatggatttcctctgcagcaggccgtctaccagcgcctgaccgccgagctgagcgtgccggtgtacgacgcggtaccggcggacacaccttacccctacgtcacgattgaccgggaggtggctcgcaataccagcccgatctcaggccgcaagcggaagctgcgtctgctgtacctgagcgtctggagtgaccaccagggccaggccgaggtgaagcagatcctgggcgccatcgaggatgcgctcgacgagcgaccactggcgttgtcggtggggcgcgcggtctccgtgcgggtgaccgacaccgacaccaatcgcgagccggacggccggacctacatggggtcggcgacggtgcgcgtcatcactactacctga

SEQ ID NO: 332879 - DNA, 501 bp, Pseudomonas aeruginosa
atggcagaagacaatctcaacacggccgccggctgccgcgtggccatcggcaccaaaacgccggcggacaccgaggccgattacaaggccgacacctacgtcgacatcggcgagatcgaggacctgggcgagttcggcgacaccttcagcagcgtgaacttcacctcgctgggtgatggccgggtgcgcaagtacaagggcaccgctgatgccggtgacctgaccctcactgtcggtctggacaatggcgacgctggtcagaacgccgtcaaggtggcacacaaggaccgctcgaaaggcaactacaacctgaagatcaccctcaacgacggtgacccgtcggccactccggtgatcctgccgaccaccttctacttcggtgtgaaggtgatgaacaacaccgtggcgcccggcagcgccgacaacgtggtgcgccggaacatgaccttcggcatcaacaccgacattctggaagtcaccccgactccggctggcccctga

SEQ ID NO: 332880 - DNA, 345 bp, Pseudomonas aeruginosa
atgagtgaagccctgcacggcaccgtcacgctggtgatcggtgcccgtacctacatcctgcagccgaccctggaagccgcgttgaagatcgagtcgcgcttcggtggcctgcgcccggccatggagtcgatgcgcctgctgagcatcggtgcctgcgctgatgtcgtgatcgccgccgccggcctgaagccggaggagcacacgaccctcgccacgcaggttttcgagaccggcgtggtcaaggtctcctcgcagctcacggaatacatcaccggcctgctgagcccggtaccgccgagcatcgccgaacggggaaagcccgaggcggccagcacagcgcagtga

SEQ ID NO: 332881 - DNA, 228 bp, Pseudomonas aeruginosa
gtgaggaatggcagctacgtcgactacctgttcggcgtggccaccggctggctgggctggccgcctgacactgcgtggcgcacgcccatcccacagatcctgatcgcgctggatgcccgcctggactggatgggtggcggcaaggcccagcagcaggccgccccgaagaagaagggcagcgtcgccgaccgcttgaaggcgttcctgcggggacgccaggaaccatag

SEQ ID NO: 332882 - DNA, 3258 bp, Pseudomonas aeruginosa
atgtccgaccaagaagtccaggggatgctgatccaactggaggccaccaccgcgcagttgcgccgggagctggcgagcgcggacagcgtggtcgccaaaacgacccaaagcatcgaccgcaacctggcacaggtagattctgcgtttgatcggacagcccaaggtgcgcagcaagccggtacgttgatccgtggcgccttcgcggcgatcgcgggcgccggcctggtcggtagcatcatccaccaggtggacgcctacgggcagattgccgaccgcatgaaggcggcaaccggcagtgtcgaggaatacatccaggtccagcagcacctgctgcgcacggcgcaggagacctatcggcctttggccgaggcgcaggagctgtacatccgcacggcggacgtgatgcggtcgctgggcttcgacacccagcagaccctcgatatcaccgacagcttcagctttctgctggtgaccaacgccgcatcggcggataaggcgcagtccgcactgggcgcctactcgaaggcgctgcagaccgggaaggtcgaggccgacggctgggtgtccattcaggaggccatgccgaccatcgtcaatgcgatcgccacggccaccggcaagagcgcggagcagattcgcaagctgggcgtcgagggcaaactgtccctcgatgacatcaacaccggcttgctgaataccgtcgaggccaaccgcaaggcagcggccgatatgtcggtcagcgtgcaggacgccctggtcaacatccagaacgccctcggcgatttctttggccgcatggaggagagcaccggcgtggtggctggcttggccagtgtcatcagcctcgtcggcgacaacatcggcgcggttgccgccgtgatggcgggtgcgggcgtttcggcgctgacggtatacgccgcccgcggcgcgctcgcgatcaaaaccgccctggctgatcgtgcagcacgaatcgcccaggccgaggccgtcatgcagtcggcgattgccgaccagcgcaaggccgagacgcttaccattctggccgcccgggaggcggctgcggcgcgcggtaccgccgtacagacccagatgtcgatccaactggcgcaggcgcggcagcgagaagcagcggcgacggcatcggtggccgcggcacaggcggggctgcgtgctgcctcggctggcttgctgagcgtgctaggcggcccgatggggctggccctgctcgccggcaccgcggcggcctcgttcctgctgctgcgcgacaacgccgaccaggcaggcgtcagcctggacgacctgcacaagcctgtgcagcaactgcgggaggagttcgccaaactcaatcgagaccagcgtgaagcctcgctggtgaagtggcagcaggagcagatcaacgccaccgacaaggtgaaggaagcctacggcaccctgtcgcagtcgattcgttcggcgatggttactgcgccggcgcgggactccaacggcctgtatacccagcagttgcgcgactaccagtcgctgatcgaccggctgaaccaggcgcgggcctctggtgaggacctgtcgccaatcttgagggaggtgggtgagcgcatgcaggtgccggccggcaccgtgcagcaatggctcacccaggccggcgccatcggggatgccgatcaccgctctggcctgatcgccgaaaccttgcgtgtgctgaccggagtcacccaggaaaacaccgcagcgaccaacgccaacaacgctgccaagaccgggatgagcggcgccgggcagacctatctggagacgttgcagaagcaactgggcggcctgcaggacaacaacgacgccatcaaggcggcgaaccgcttcatcgcggacaacaccgacctgaccgagaccgaccgccaggcgatcctctcggcggccaatgcgatcgaggcgcagaagaaggccaaccaggcggcaacggccagcagcaaggcgcgcaccaagtccttgcaggacgaggtcaaggcgctcgacacactgatcgacaaggcgcttccggagaagaagcgactggaagatctggccgatggggtgcgggttctgcgcaaggctcaggccgaaggcaagatcaccaccgccgagatggagctcggcatcaagaacctgaacgaggcctatgccgacggctcgatccagaagcgcatccagcaggagcagaagctggcagagcagcggcgcaacagttccgaggcgtaccggaaggccatggaggtggtgctgcaggcgcggcaggatgcgatcaattccgacgtggctggcatcggcctcggggatgatcagcgcgaccaggcgcagcgcctcgatgcggtgacgaagaagtacgccgacctgcggcgcgaactggaggcgcagcaggaagatgcgagccgccggcttggtccggccgagtatgagcggcgccttgcggacctggctgacttccaggcccgcgagctgcagatggaggtcgacggctacgaggcgcgcctcgccgcccagcgagactaccgcaacggcgcccgccgcgcttggcagaacatccaggccgacgcggcggacgtcgccggcgccacggatgacatgctgaccaccggcttcaacactgcgagtaatgccctggcggacttcgccaccaccggaaagatgaagttccgagacttcgccagcagcgtgatcaacgacatggcacggattgccagtcagcaggcagcgactggcttgctcagtggtctgatcggtgtgggcgtgtcggcagccggcgcctacttcggcggcgggtcagccacggccggggcatcgcaatccggttacaccggcaatgcatacgccaactgggccgctgcccaggccgacggcggcgcctgggcgaatggcgtgcagttcttcgccaatggcgcggccttcgcaaactccatcgtcagccggccgaccgccttcggcatggccggcgaccggatggggatcatgggagaggcggggccggaggcaatcctgcccctggctcgcggtgcagatggttcgctcggtgttcgggccgtgggcggcggcggtggtactgcgctacaggtcaatgccccggtggcggtcactgtcgaggaccgcagctctgagggcatggaactggaccagcaggcgctgcagcagaacatgcagctgcagatgaaggcggcggcggagcgcgctgttgcggattcgtggcgccctggtggcgtcagctatcgaaacatggccgggaggggctga

SEQ ID NO: 332883 - DNA, 339 bp, Pseudomonas aeruginosa
atggcgatcgagactttcatctgggtgcccgacgacgaagctgacgtcgacggcaccctgcgcacgcgcacgtcgcaattcggcgatgggtatgcgcaggagtcgggcgacggcctcaatggcgagagccaaagctggtcgttgacctttggcgggctccccgatgaggtcgggcccatcctcgacttcatccgtcggcacaagggatatcggtcgttcctgtggaccccgcccggcggcgagctgggcatgtacaagtgcaaggcgtaccgcaagcagcggcgctctggcgcgatcgaggtcctttcgctcacctttgaccaggcgttccacccatga

SEQ ID NO: 332884 - DNA, 747 bp, Pseudomonas aeruginosa
atgagcctcatcttgcagctccagaagctggagccaggcgccgagatcatgctgttcgaactggacggcagcgagttcggcgccgacgtgctgcgcttccacggccatgctatcccgcataccccgcaggagctggccgccgccggcgccaatgcggaccaactgccggcgaagtcgatctggtggcagggcgaggagtacgccgcctggccggtgcagatcagcggcctagaggcaaccggggatggtacggcggtacgcccgacgttctcggcgggcaacgtcagtgggcgcatcaccgcgttgtgcatcgccttcgatgacctggccaactttcaactgaccatccgcgagacgctggccgagttcctggacgcggagaatttcccggccggcaacccggatgcagatccgacccaggagtcgatcagcatctggtacttcgaccagaagaccggcgaagacgaccaggtggtcgagtgggagctggccagcccgggggacgtcggcaacgaagccgtcggccggcagatgaccacgttgtgccactggtgcatgaccggcggctaccgggggcccgactgcggctacaccgggccgtactacgacatcgacgacaacccgaccgacgacccgacaaaggatcaatgcgccgggctctatcggtcctgcaataagcgatggggagcgggcaatcagttgcccttcggcggattcccggccgtgtccctgatcgcccggagctga

SEQ ID NO: 332885 - DNA, 759 bp, Pseudomonas aeruginosa
atgcgtaagcagatcctgagcgccattcaggcgcatgcggccgaggagtacccgcgcgaggcctgtggcttggtggttggcgccggccggcggcagcagtacgtccgttgccgaaatacggccagccagccgcgggaagagttccgcctgcacccggaggactacgctgcggcggaagacctgggcgaggtggtggccatcgtgcacagccatccggacgctaccagcaggccgtcaccgcacgacctcgccatgtgcgaggcgtcgggcctgccctggcacatcctcagttggccggagggcgacctgcggaccatcgcgccgcagagcaacatcccgctgctgggaaggccgttcgttcatggcgcctgggactgctggcaggtctgcgccgactggtaccagcgcgagtggggcctggagttcgagcgcttcgcgcgcgaggacggctggtgggagcaggtcgatgggccgagcctgtatgagcagcacttccaggcggccgggttctgcccggtcgaccagccgcggcgcggcgacatgatcgtcttcgaggtcgggcgcacgcagcacccgaaccacgccggcatctacctcggtaccgacgcggctctgcccggggaggacagtaaggtcttcggcgccgggccattcctgctgcaccacctctacggcaagccaagcgagatcatcgtctacggcgggaactgggctgagcgggcgcggttggtgctgcggcaccgtcaagccagggcatag

SEQ ID NO: 332886 - DNA, 573 bp, Pseudomonas aeruginosa
atgctcggttctactcctacggtcatcaagctatccggccctctgattcgggaatttggccgcgagcacacgcgatttctcgacaccgggtcggtgcaagaggcgttcagcgctcttcgaaataccctgcctggctttaaggaagcgatcgccaggcttcgggccttggggatgcggttcgcgattttccgtaatcggaagaatgtgggcgaggatgcttttgctgggagcggagcgcgggagattcgcattgtcccggtgatcgcaggcagcaagcgcgcagggctgctgcagacaatcgtcggtgtggcgctaatggtcgccagtatctggactggacctactacctttcagatcggcgcggcgctgacgttgggcggtgttgctcagatgctcagcccccaagccaagggcctgagccagtcagccgccccggagaacctgcccagctacgccttcggcagtgcgaagaacaccaccgccagcggtaaccctgtgccgctctgcttcggcaaacgacgctggggtggcgccatcatcagcgcctcggtctacgccgaagacaagacctga

SEQ ID NO: 332887 - DNA, 147 bp, Pseudomonas aeruginosa
atgctgcgtatcctgctgatcgacgacacgccgaagaaagtcggacgcctcagggccgccctgctcgagagcggtttcgaagtggtggacgagtcggggctgaccatcgacctgccggcggggtcgaagcgctgcgtcccgacgtga

SEQ ID NO: 332888 - DNA, 1668 bp, Pseudomonas aeruginosa
gtggggctgcgactgagcatcggcgaggccagcgcctgcgggcctcgcacggaaaaccaggacgcgctgcgggtggtcaccccggcgccggccctggccgccagcaagggacacctgctggccatcgccgacggtgtcagccagtgcgccgatggcggcctggcggcgcgcagcagcctgcaagcgctggccctggattactatgcgactccggaaacctgggccatcgtgcagaccctggaccgcctgctgctggcgcagaaccgctggctacaggccaacggcggcggccagccgctgctcaccaccctcaccgccctggtgctgcgcggcacccgctacaccctggcccacgtcggcgattgccgggcctacctgtggcgcgacggcgagttgctccggcagaccagcgaccacgtctgggaacagccgcacatgcaacacgtgctgacccgcgccctgggactggaccagcatctggtggtcgactatctggagggcgatctggagcccggcagccagtggctactggtcagcgacggcgtctgggcgacgctgggcgacagcggcatccgcagcatcctgcgcaacgccgaagagccgcagcgcagcgccgaggctctggttcgcgccgcccacctggcaggcagccaggacaacgccagcgccctgctggtgcgcgtggaagccgtgcccgcaggcagcctcggcgacgccctcgcgcaactgggccactggccactgccgccaccgctgaagcccgaccagctcttcgaaggctggcgggtccggcagttgctcggcgaatcccgccagtccctgctctaccgggtcgaggatggccagggccaaccctggctgctgaagacccttcccgccgcacgtgccgacgatccgctggcaacccaggccctgctgctcgaggaatggttccttcgccgcgtccagggccggcatttccccgagctgcacggattggcgcaacgccagcatctgtattacctgatgcgcgagcaccccggagagactctcgccgagcgcttgcgcaaccatggcccgctgtcgctgccggagtggctggggctggccaaccagctgctgcgcgggcttggccagttgcatcgacgcaacctgctgcaccgcgacctcaagccggaaaatctccacctcggccgcgacggcgagctgcgcctgctggatttcggcctggcctggtgtccgggattgtcgcgcgaagacccccatctgctaccgggtacgcccagctacctggcgccggagtgcttctccggcacctcgccctcggtgcgccaggatctctacgccaccggcgtctgcctctaccaggcgctgaccgggcgctatccctatggcgagatcgaagccttccagcacccgcgcttcggtcgccccgtcccgcccagccgctatcgccccgacctgccggcctggatcgacgacctgctgctgcgcgccgtcgcctgcgaccccgcacagcgcttcgagaccgccgaggaatggctgctctcgctgcaacagggagaagcgttgccggtcgcggcgccccgcccattgctggagcgcgaaccgctgcagacctggcgcgccatcgccctgctgtccctggccgccaacctggcgctattcctggtctggctgaagggctga

SEQ ID NO: 332889 - DNA, 2451 bp, Pseudomonas aeruginosa
atgaagaagatcaagctggtgatggtcggcaacggcatggccggggtccgtaccctggaagaactgctcaagctcaactcggacttctacgacatcacggtgttcggcgccgagccccatcccaactacaaccgcatcctgctgtccccggtactggccggcgagcagaccttcgaggaaatcgtcctcaacgacctcaactggtatgcggaaaacggcatcaagctcctcctcgaccgcaaggtggtgcagatcgaccgggtccgccgcagggtggtcgccgcggacggcagcgaggccgagtacgaccgcctgctgctggccaccggctcggtccccttcatcctgccgatacccggcaatcggctgcagggcgtgatcggctaccgcgacatcgccgacacccaggccatgatcgactgcgcccggccccacagccacgcggtggtgatcggcggcggcctgctcggcctggaggcggccaacggcctcaagcaacgcggcatggacgtgaccgtcgtgcacctctccgactggctgctggaacgccaactggaccgcaccgccggcaaactcctgcaaggcgcgctggaagcccgcggcatccgcttccgcctgaacacccagacccaggaactgatggacaacggcagcggccgggtctgtgccgtgcagttcaacgacggcgacgtgattcccgccgacctggtggtaatggccgccggcatccgccccaataccgagctggccgaaagcgcgggcatcccctgcaaccgcggcatcctggtcaatgacaccctgcagacctacgacccacgcatctatgcggtcggcgaatgcgccaaccaccgtggcatcgcctacggcctggttgcgccgctgttcgagcaggccaaggtctgcgccaaccacctggctcatctcggttacgcccgctaccagggctcggtgacctcgaccaagctcaaggtgaccggtatcgacctgttctccgccggcgacttcatcggcggcgaaggcagcgagaccatcaccctttccgaccccatcggcggcgtctacaagaagctggtgatcaaggacgatgtactggtcggcgcctgtctctacggcgacaccgccgacggcggctggtacttccggcagatccgcgagaaccacaacgtcgcgcagatccgcgaccacctgatgttcggcgagaacgccctcggcgatgtcggccaccagggccagaacagcgccgcgagcatgcccgacacggccgaagtatgcggctgcaacggcgtctgcaagggcaccatcgtcaaggccatacaagaacacggcctgttcagcgtcgacgaagtcaagaaacacaccaaggccgccagctcctgtggctcctgcgcgggattggtggaacagatcctgatcagcaccgtcggcggcgccgccgacgtcaagccgaagagcgagaaggccatctgcggctgcagcgacctcaaccacgggcagatccgcaaggccattcgcgaacaccggctgaccagtctcgacgccgccatgcgcttcatggactggaagaccccgaacggctgtgccacctgccgcccggccctgaactactacctgatctcaacctggccgggagaagccaaggacgatccgcagtcgcgcctgatcaacgaacgcgcccacgccaacatccagaaggacggcacctactcggtggtaccgcggatgtggggcggcgtgaccaacgccgccgagttgcggcgcatcgccgacgtcgccgacaagtaccaggtgccgatggtcaaggtcaccggcggccagcgcatcgacctactgggggtgaagaaggacgatctgccggccatctggaaagacctcgacatgccctccggacatgcctacggcaaatccatccgcaccgtgaagacctgcgtcggcagcgagttctgccgcttcggcacgcaaaactcgacgcagctgggcatcgatctggaacacgacctgttcaacatgtggtcgccgcacaaggtcaagctggcggtctccggctgcccgcgcaattgcgccgaggccgggatcaaggacgtcggcatcatcggtgtggactccggctgggagatgtacatcggcggcaacggcgggatcaagaccgaggtcgcggagttcttcgtcaagctcaagaccgccgaagaggtgcgcgaatacaacggcgccttcctccagctctaccgcgaggaagccttctacctggagcgcacggtgcattacctgcagcgggtcggcatggagcacatccgcaaggcggtggtcgaggacgcggaaaaccgcaaggcgctcaacgaccgcctgcaattcgccctgtccttcgagcaggacccatggaagcagcgcatcgaacagccgcaattgaagaaggagttcgaacggattccgctcaagcaactggaaaacgtctga

SEQ ID NO: 332890 - DNA, 1035 bp, Pseudomonas aeruginosa; identical to SEQ ID NO: 327828

SEQ ID NO: 332891 - DNA, 1119 bp, Pseudomonas aeruginosa; identical to SEQ ID NO: 327829

SEQ ID NO: 332892 - DNA, 1131 bp, Pseudomonas aeruginosa; identical to SEQ ID NO: 327830

SEQ ID NO: 332893 - DNA, 738 bp, Pseudomonas aeruginosa
atgtggagggccgtcgtgtctgaatcccgtctcgacctgccgaacatcgacgccgcattgctccagccgccggacatggaacggctactggcacccgaacgttccacccatgcgccacgcttcctgctgctctacggctcgctgcgcgaacgctcgtttagccgactggccgccgaagaggcagcccgcgtgctgcgggcgttgggcggcgagacgcggctgttcaacccgtcgggcctgccgctggtggatgacgcgaccgaggatcatcccaaggtcagggaactgcgcgaactcgcgcagtgggccgagggtatggtgtggagttcgccggagcgccatggcgcgatgtccggcctgatgaaaacgcagatcgactggattccgctgtcagtcggcgcggtgcgtccgactcagggcaagacgctggcagtgatgcaggtgtcgggcggctcgcaatctttcaatgctgtcaatcagatgcgcgtgctgggccgctggatgcggatgctgaccgtccccaaccagtcctcggtcgccaaggcgtatcaagaattcgatgaagcgggacgcatgaaaccgtcggcctactacgaccgcattgtggacgtgatggaggaactgatgaagttcacgctgctcacgcgcgatgcgtcgccgtatctggtggacaggtatagcgagcgcaaggaaagcgccgaggcgttgaccaagcgcatgcagcaggcggtaatctga

SEQ ID NO: 332894 - DNA, 423 bp, Pseudomonas aeruginosa
atgagccacatcacgatctaccacaatcccgattgcggcacgtcacgcaacgtcctcagcctgattcgcaacagcggcgaggaaccggctgtcatcgaatatctgaagacaccgcccgaccgcgacatgctgaaggcgctgatcgccgcgatgggcatcccggtacgcgcggtgctgcgcgagaaaggcacgccgtatgcggaactcggcctgggagatcagaagtggagcgacgagcaattgatcgacttcatgctccaacatccgatcctcatcaaccgacctatcgtggtcacgccgctgggcacgcgcctgtgccgcccgtcggaaacagtgctcgacatcctgccgcaaccgcagcgcggcgcgttcaacaaggaagacggcgagccggtagtggatgtggagggccgtcgtgtctga

SEQ ID NO: 332895 - DNA, 1233 bp, Pseudomonas aeruginosa
atggacaacaccatcccgcgctctcgcggctggctgattccctcgctcggactgacgcagatcgtcgcgtgggggtcgatgttctacgcctacggcgtcctgatgcagcccatgcaggacgaactcggcctgtccaagcccgccatcgtcggggcttattcggtggccttgctgatctcgggactgctttcgaccgcggccggcagcatcatcgaccgcatcggtggacgtctgctgatgggaagcggcgccttgctggccgccgtcatgctcgcgtgcctctcgcgggtacacaacgcgacggagctttacctcgtgtgggccggtatcggcgtggccatgagcgcgaccttgtaccagccggccttcgcggtcatcacgcaggtccatggcagcaactatcgccgggcgatcacgcacctgacgttgttcggcggtttcgccagcacggtattctggccgctgacgcaaacgctgttgcaacacgtcggctggcgcgaggtctggttgatctatgcggccgcgaacctgctgatctgcctgcccatccatgccagcctgccaaagggacgcggcccggcacacggcacacccccagcgcggacggaaacccgatcccgcaatctcaccgcggtcatgcgcgaaccggtgttctatctcgtcacggcggctgtgacgctgaatgcactggtgttcgcggcgatgtcgctgcacatgatcccagtcttgcaggcacatggcatctctgccgcaaatgcggcctgggtcggtgcgctgatcgggccaatgcaggtactcggccgtgtggtgcaagccacggtcggcaagcgggccagcacgcgccaggtcggcatggcggccatcagtctgctgccgctgtcattgctcctgctctttgcttccgagcagtggctgccggtgtatgtcgtgtttgccgcgctctacggcatcggcaatggcgtcatgacgatcgtacgaggcgccttgcccgccgagctgtacggtcgggccgcttatggcgccatcagcggcgcgatggcgacacccgtgcagatcgcagtggccgccggccccttcgtggcctcgctgctgtattccgccggcaacggctatcccggcacgctgctggccctgaccggcatcagcgcggcgggcgcgatcctgttcggctatgtgatcaggcatctgcgccagcaatccatgcttctctcgaacgaaggcacctcgacatga

SEQ ID NO: 332896 - DNA, 324 bp, Pseudomonas aeruginosa
atgaacgaagatcaagccgtttccgccctgagcgccttggcgcacacccagcgcctgcgtgtgttccgcgccctggtcgtcgccggcccggaaggactcacgcccagcgtgctggccgaccagctcgacgtggcccgcaacaccttgtccttccatctgaaggaactggcccacgccggcctcgtcagcatcgagcagcaaggccgcaacctgatctatcgcgccgaatacgaccacatgaacggcctgatcggctacctgaccgagcattgctgccaaggcggagtgtgcgaggtttccgaatccacccgctgcgactgctga

SEQ ID NO: 332897 - DNA, 261 bp, Pseudomonas aeruginosa
atggcgaacgcacatgaactggcccgcggccacaaacggctgcgcgccctgattgagtttgcggtgagcgaaggctggcacgtcaagcgcacacggggcggacacctcaagttcaccaaggccggctgcgccgccatctacaccagctcaacagcgagcgactaccgggcggatctcaacgcccgtgcacagatccgccgcgccgagcgcgaggcccgcatggcccgggccgtcaacgccgagggatgtggtcatggctga

SEQ ID NO: 332898 - DNA, 561 bp, Pseudomonas aeruginosa
atgtccgcaccgaacccactcaaccaggccgtcatcgcgcaggcactctacgacctacgcaacgggcaactgcgtcgctgcaaggcgatggggttcggcgaggaagagctggatgcgctcaagcatccggcgctgatcagcgtgctggccaatgccaacgtctcctggtgctctgtctcggtgaaccgggaagtgctccggcgattgctcaaacaggcgcaggacgtggagaaggagatcgccaccgtcgatcgcatgctgcgcctgggtgccagtaccgaaatggtgagccgcttctacgggctgacacatcaggaagtcgcacttcggcgcgaagttctcggcctgcccaaacgcaaggggcgccatccggttctggacgaggagcaggacaccgagctgtggcggcgctggaaggtcgtgaccagcagcaggaacgtcgagctggaggatgagacctcggttcttgatgcggcaatggacctcgccgaaggcatggagctgccgctgtcggtggtctgggctgcgatcaagaactggatcgatcagggactgggttga

SEQ ID NO: 332899 - DNA, 780 bp, Pseudomonas aeruginosa
atggcaaccaacgaacctctgcaactcaatctcggctctttgcgcagcgcgatgtcgctgacgcttcacacccaccacgcatcgcgcatctggcatggccgcgccgccgccgaggggcgacccggcatcgtcggcctgaacggctacatcgccgtgatgaacaagatgaagcgcggctcggaacaggatgacccgtacagcgactggtggatgttgcgcatcgaggaaaagctcgaccaggccaagaccacgttgcaatcgctgcgcgagcaggtggaccaggcattggccggcgtgccagcggcgttgagcctgggcgagaacctcaacgtgcaaccggtgaagctccccttgttcgtgaacgcgcagctcggctttgccgcggtctatctcctggccgactatgacgacatcgcccgcaagctgatcctcgcccatcacaccgcgctgatcgatcgctcgacattggagcggtggctcaacgaaggcgctcacacgctgcgcagcctgttcagcctggcccagcagtaccgctactcgggatgcacccgcgacgacttcgcggccaagaacgccgcagcgcgggcggcgctggagaagttcggcgacttgccgcaggacgtgctcgaaggcgctcgccgctcgaagtttgcgccgcccgtcgtgcgccgcggcctgcaacagcgcagtgatagcgctgccgcagccgcacctcccagcgacgaaggcactgccgccgatccggccgaggccagcaccggcgaggacgaacaggcatga

SEQ ID NO: 332900 - DNA, 528 bp, Pseudomonas aeruginosa
atgagcgacccgaaccgcgaacctcgctacttccgtggtctggaacagccagccttcatgcggctggaacacgcggcctctctaaaaggccttttaaagccttttaaaggtaaaggggacttcgaggcctgggccagccagtgcttcgccatgcgcgacgagttgattgccctggcgcagcgacaggtgctgccacaggcgtgcgggcatcccttccacctgcttcccgtcgagctggcccagcagataactggcgcgggaacgacgttccttcgctggcgcaagcacgaccgctcggccatgggcgtggcgctgtggcaggaactggtggcgagcaccagcacgccggtcaacctgctggccgacctgcacgcgatcgagttacagcgcatcacgttgaacatgcagatcagcctgctgcacaccttgggcaggcaggcgcaggaatgcgccagcaaagcggccgaagcggacaacgcatacctgcgccggctcaagtccaccccaaccgcaatgcgcgatcggtga

SEQ ID NO: 332901 - DNA, 441 bp, Pseudomonas aeruginosa
atgagcacgcatttttctggcgaaggcaatatcggctcgccaccggagtaccgcgaattccccaatggcaacgacgagcccaaccgcctgctgcgcctgaacgtctatttcgacaaccccgttcccaagaaggatggcacctttgaggaccgtggcggcttctgggcgccggtggaaatctggcaccgcgacgccgagcactggcagcgcctctaccagaagggtatgcgggtgctggtcatcggccgcatggagcgcgagccctggacggacaacgaagatcagccacgcgagacctggcaagtcaatgcgcgcagcgtaggcatcttgccgtaccgcatcgagtctgtggtcctcagcccgaagccacaggaggcagaaccgaagccgcaggccgaccaggaatcgaccgcgccgaaagagacgaagcgccggaagtga

SEQ ID NO: 332902 - DNA, 2022 bp, Pseudomonas aeruginosa
atgcggctgttcttgtgcgagaagccctcccagggcaaagacattggccggattctcggcgccacacagcgcggtgaaggctgtctcaacggttccggcgtcaccgtcacctggtgcatcggccatctcgtagaagccgctacgcccgaagcctacgacgagcagttgaagcgctggtccatcgagcagttgcccatcattccccagcattggcgggtcgaggtcaaaccgaagaccgccacgcaattcaaggtcgtcaaggcgcttctggcgaaggcgacccagcttgtcatcgccaccgatgccgaccgcgaaggcgagttgatcgcccgcgagatcatcgaactgtgcggctaccgcggccccatcgagcggctgtggttgtcggcactcaacgatgcgtccatccgcgccgccctcggcaagctacggccctcagccgagacgctgccgatgtaccactcggcgctggcgcgatcccgtgcggattggctggtgggcatgaacctcagtaggttgttcacggtgctggggcggcaggccggctacgacggcgtgctgtcggtcggccgcgtccagaccccgacgctcaagctcgtcgtggaccgcgaccgcgagatcgcagccttcgtgtccgtgccgtactgggccatcgtcgtgtccctgtccgcaggtgtccaggctttcaccgcgcactgggttccacccaatgcctgcaccgacgacgcaggccgctgcctgcagcagccggtcgcacagcaggccatgcagcagatccgcgctgcgggcagcgcccacgtagtgtcggttgagaccgagcgcgtgcgcgaaggcccgccgctgccgttcgacctgggcaccttgcaggaggtgtgttcaaagcagctcgggctggacgtgcaggaaaccttggagatcgcccaggccctgtacgagacgcacaaggccacgacatacccccgctcggattccggctacctgcccgagagcatgtttgccgaagtgaccaccgttctcgacagcctgcttaagaccgatccctcgctgcgctcgatcataggccagctcgaccgtttgcagcgctcgcgcgcctggaacgatggcaaggtcacggcccaccacggcatcatcccgacgctcgaaccggcgaacctctccgccatgagcgagaaggaactggccgtgtacaggctcatccgggcgcattacctagcgcagttcctccctcaccacgagttcgaccatactgtggccaagctttcgtgcggtgggcagaaccttgcggccacgggcaagcaggttgtcacgccgggctggcgccaggtgctggccgagccgcagtccgaggacggcgatggcgacggcgacaccgcggcccgcgcccaggtgctaccggcgctgcacgaaggtctggcatgtcaggtggccgatatcgatctgaaggcactcaagacgctgccgcccaaaccgtacacgcaaggcgagttggtcaagtctatgaaaggcgtcgccaagctggtgtccgatccccgcctgaagcagaagctcaaggatacggtcggcatcggcaccgaagcgacccgggccaacatcatcggcggcctgatcgcccgcggctacctcgtaaagaaagggcgcgccatccgcgcctcggatgcggctttcaccttgatcgatgccgtgcctgcggcgattgccgaccccggcaccaccgccgtctgggaacaagcgctcgacatgatcgaagccggccagctcacgctggatgtgttcatcggcaagcaggccgcatggatttcgcagttgatcgcgcagtacggcaacgcgtccctgtctatcaaggctccccaagggccgacatgcccgcagtgcggcgcacccacgcgccagcgcagcagcaagagcggcccgttttggtcgtgcagtcgctacccggactgcaaaggcacgctgccggtcgaatccggcagctccaagcgcgccgcctcgcgcccgcgccgtagcggccgcaaaggctcctga

SEQ ID NO: 332903 - DNA, 213 bp, Pseudomonas aeruginosa
atgtcccagcaagcctctttcggccagttggccttgatccattgcggcaagttcctgccgctcgaagtcctgcatagcgccgccggccactacatcggcacgcgcgataccgaaggtcccgtttcgcgggaatccagcgagtacttccgcagctatgtcgcggctcaacgtgccctagaaagaggcggctggtcccagctcgccacgccctga

SEQ ID NO: 332904 - DNA, 393 bp, Pseudomonas aeruginosa
atgaaccagcttttgccacaggaagtcgtcgatcagatcatgcgggaagagcagcatttcgccgccgcgccccaagccttcttcgaggcctggaagcgcggtgtcgagatcgctggcccgcaatggtttggcgacggcacacgcgaaggcctgaaccaggccaagagcaagtgggatctgcgtcccgacatgctgcgtgccaacgacgctctcggcgtcctgagcagcggagaacgcatgttcctgtccgccatgttcagcttctacaacgcgcgcgagggcggtgccatgctcaaacgctgccacttccaaggactgtcggacttcgacggtctcgatctgcaacgccgcaaggtcatcgccgacctgctggtgaactacagcggttggtga

SEQ ID NO: 332905 - DNA, 738 bp, Pseudomonas aeruginosa
atgacccagaatcccaacccctttgtacgcggctactggaatctgaaaatcgtccgaacgctgtgcatcagctacgaagacggaagcccgcatgtgtggcgaaacatccacgcgagccaacagcacctctccgacgaggagctggtttcttccccctgcatcgtcaccagcgacttcgcggtggtcaggaatggcactgtgcctgtcagtgccgaactgatggccgaatgcgatgccattgaaggcgtcagcggcgaaggcgtggtgggtgcggtggtttatgccatccatggcgacgacctggacggtcgcccggtccacgtcggtgatacctattcggccgaggccgcgcgagacgtggtgcagcggttgggtttcgagaccggctattacagccgatgctgggaaatcagcagcgcgcacatcagccaggaaaccggccagtacctggccagcctagcggaccttgcgacaccggaggcctttctgttcatcgccttccgggttccatacagcccagcgatcggcgtcaagctgatttccacgccctggacagacaagaacctggagtatgccgagggcatcagtgcggagcagcttcggcaggaacaccgggacaagggcatgcctgacgacctggcgaacattcttgaattggccggccaggccgatgtgcgcatcctcatcctagacgctgacgcacccgcgctactgggcctgccactggccgagatctag

SEQ ID NO: 332906 - DNA, 279 bp, Pseudomonas aeruginosa
atgttccccgatctcatctcgcctacgcctgacttcgagaatcagcttggagcctgcgttaacgccatgagccagaacgacgccatcggccagattctggtgttcgagcgcatgagcggcacgctgcacatgcgccatatcgacagcgccgatctgatggacaccgacattgacgactacgaaatggtcgtgtttgacggtggcaatacaaccggcgacacgtggaaacacgtgttcttcccacgtcagcgcgaacactatttcgtgtacgaagcctga

SEQ ID NO: 332907 - DNA, 930 bp, Pseudomonas aeruginosa
atgaacaccacgtccaacgagaaatcgtatttcgacctccacacatcgggcatcggctacatccagcgtgtccgtgaagtgcccgtcaggggcggccgccgtgcgcagcccttcctggcatgcaccatcgccgcattggtcggccccgccagggaccccagctaccgctacttcgatgtcaaggtctcgggtgccgaggccaagaagctcgttcagcgctacatcggcgttgacgattccaagcagcgcccgctggtgcgcttccgcctcggcgacctttggggcgatgcgtacatccgcgacaagggcgaaaaccagggcaaggccgccgcgtccctcaaggcgcgactgctcaaggccgagccgatcgagcgggccgaactggcttcaatcgagcagcacgagctgattacccgtggcatcggctacctcaaccgtccgaaggacgtcacccccaaggatggcgatccgttcctgtcatgctccatcgccgcattggccggacctgtcgatgaaccggaatatcggtacttcgacacgatcgtcgccaccctcggggccgagcatctggttcgccgatgcgtgcaggccatcgaaggggatcgcaaggtgctgatcgccttccgtctcaacgacatgaagatcgatccgtacatccgtaccaagggcgagcacgctggggcaccggccgcaagcctggagtcgacgctgatccacatcggtctgatcaagatcgatggcacccaggtctatccgatgagccaggcgcaagccgaggcgccaacggtggaggacgcacccgcgcccgaagccgacaacgccatcgacactgccgccgacgccgtttccgacctacccgtcgagtccgccgagcgcgagcccgagggtgaagtcgaggagcaggagccggccttggtcgcttcgttttga

SEQ ID NO: 332908 - DNA, 828 bp, Pseudomonas aeruginosa
atgtctctggcatcccgttttgctccgcaatccccgatcctgcgctccgatcgcccactctcggacgaccgtattcgtgccgttgttccctcgatctttgccgacgctccgcatgggagccggtccgatcggtatgcctacataccgacctcggtcgtgctgaccaggttgcgccaggagggtttcgagcccttcatggtgtgccagacgcgcgtgcgcaacgaggatcggcgcgagtacaccaagcatctcatccgacttcgccatgcaagccagatcaacggcgacgaggcgaacgagatcatcctgctcaacagccacgacggcacgagcagctaccagatgcttgccggcatgttccggttcgtctgccacaacggcctggtctgcggtgacaccaccgccgacatccgcgttcctcacaagggcgacgtggcaagccaggtgatcgaaggtgcctacgaggttctcgaaggcttcgagcgcgtgcaggacgcgcgcgatgcgatgcgcaccatcaccctcgatgagggcgaagcggaaatctttgcgaattccgcgctcgcactcaagtacgacgacccggccaagtccacccctgtcacggagagccaacttctggcgcccaggcgctgggacgaccgcaagaacgacctgtgggccgtcttcaaccgcgtccaggagaacctcgtcaaagggggactgaatggacgctcggccaatggccgcaatcaacgcacccgtccggtgcaaggaatcgaccagaacctgcgcctgaaccgggcgttgtggctgctggccgaaggcatgcgccagctcaaggcgtga

SEQ ID NO: 332909 - DNA, 690 bp, Pseudomonas aeruginosa
atggcaaccacatcggcgcccgagcaatcggtatcgcccatcattgttccgggccagctcacgctgcgcaccatacgcggcaagaacggcccgttcaccgtcggccgccttgtcacccccatcggcaagttcgcggtcaaggatgcggagctggagcagtaccccgaaggaaaatacgacggggaattcatcatccgctacatcttcccgaagtcctatccggtcggcgacggcatgcggttcgagatccgcgccaacctggacggaatgacgctcaacggaatcgacaaactgagccgcgacgaagcccgaagcttcgccacccaggacgtcgatccactcgatgaagagctggggacgcagcctgcagcaacgccggccaagtctgccaaggcctccacgcccgccaagcacgcacccgtgcaggcgtcggcggatcctctggtcgataccacgcccttcggtgtggatgcgccgacgcccgctgcggcggctgcccccggcagcaccgaagatggcgacgccgctctgttcggtctgctgtggccgctgggcgagtccgtgaaattggattcgaccatcgaccgccgcgccctgcgcgcgcagatcgcccgcctgggcgaactgggttttgcgttggacttcaagacgcaggagtggagccgtcaggccgaactgcaacctgcgtga

SEQ ID NO: 332910 - DNA, 342 bp, Pseudomonas aeruginosa
atgtccaccatcgctttcgatgtaccccgttccgcgctggatgaatccgcatggcgagctgtttgcaagacagccgccgagcacgcccagcgtggttgcggcctgtcctgggatcattgggtcacgcttttcagttcggagatcgacgcgcaagctagtcggttgccggaaagccagcgagctcaggccctggaaatcgcagcccacgaatgggactacgcaacacccgccgagcggcaggaagcccaggactggaatgcggagcatggctattgctcgcatgggatcgagttcggctactgcccggccggttgtgatcgcgacgatgacgactgggactaa

SEQ ID NO: 332911 - DNA, 408 bp, Pseudomonas aeruginosa
atgggctggtatttctcaccccaatcgcggtctgaactgatcgcggaactgatcgcaccgcaagagaccgagcgcgccagcgtcaaggtcatcgcccacgcgctgcgcggcaacgtcctctggtctgtcgcggaagtgacggccaaggtcgaaggcgtacatcgtgatctcgcgccgggccaatccctgcgctacatccgctgcgatctgcttgaacgcagcggcggccagtggggttacaagccgctggacgagtccatgcacccgtactactactcgtgcccgctgtcctatctggaccttgcaccggagcagtctgccgaatggcgtgcaggcgttcgcgcctaccacgctcggcgacgcacacccacggctgtcacggcacccgccgcaacgctgatggtctga

SEQ ID NO: 332912 - DNA, 261 bp, Pseudomonas aeruginosa
atggacctgatcctcgctgcgctctccccctcgctgctggcgctcgttgaagggagtttgtccaacgacgaagtgtcctccgacgaggagatgctggagtacttcatcagcaacggcctcaccgagaaacaggcgcggcaggcactgacctaccgcgaccagtacctcaacaacatctacctggacggcttcacgccgatcaccgcggtggacgaggtgcttcacttcaacccgcacacccggcagttcgagccggactga

SEQ ID NO: 332913 - DNA, 306 bp, Pseudomonas aeruginosa
atggcatcccgacacatcgaaacctactgccaggacctgctgtttccggtaggtgcactcatcctcagcgaaggtatcgaccgcctggtccgcgccggtcgtcttgacccgattccgtacttccgtcgccatgtccgtggcgactggggggacgtcagcgacgggcaatggcaagccaacggcatcgcacttcaatcgggtgctttgctggaatcgcactacgtgattcatcgtgcgctgcgcattcgcatcgtcaccgatgcgaaacgccatctcacatccatcgtgctgccgtccgaagactaa

SEQ ID NO: 332914 - DNA, 780 bp, Pseudomonas aeruginosa
atggctatggtgatcgaagcagcatatgcagatggtactggtgcagccaacgcactgcatatgtctcaggcgcagtgggaagagttgcaacgggcgtactgcgtcggtgatctgctgatgccttgctgcaacgctccagcgattcccaaggttagtgctaatgggtaccccttcttcgcgcatctaggaggtgcgtgcagtacttccgaagaaagccaatggcacctggcggccaagatacttgtgcgcagcgtgcttgaagatcttggattccgtgcctcggttgaaatgccgggttcgggtgatgcaggtcgctggcaggctgatgtctggggtgagcgcaatggggttaggttggctgtcgagatccaaagatcgtatcagtcgctccgtgactaccgtaaacgccaagagcggtaccgcgaggcgggcatcaagtctctttggttgctgcggcaggagcgatatagcactctcaccaagagcatgggaaaggagcgtctgcgcaccgagtttgggggcaagttcccttcggccggccacttcggcccgtgcctttctgacctgccggtcgcgatgcttgagctagatccggccccaacggtcaagggtgccggattcttcaacgcaacccttccaaacatacttgaagcagtgcttagtgagcgctttctttgcatcaacggtctatggtgtatcgataacctagactcgatgaataacgccgccagactcgcgcgcgagcgtttcgcagccaatcgcttggctgcaaagatgtag

SEQ ID NO: 332915 - DNA, 1815 bp, Pseudomonas aeruginosa
atgccgtcgcgtaacgtcggtacagcctacctggcgcaggctgccgagttggctggaaatccagggcagttggcagcttacaactctcaaggacattgtgtggtactcgctggtcccgggagcggtaagaccaagacactcgtcctaaagctcgcccgcatcctggccgaagacgtcgaggcccctcgtggcgttgcgtgcatcacttatagccaggagtgcgctcgcgaactcgctcgccgaattgaaaacttgggacttcagcaggcacctaatcttttcattggtacggtccatgggttctgtctgcgtcatctcttgatgccgtatggacgcctggccggcctgcccatatctttcccactttcggtagccactcaacgagtcagtgatcggttgttgaagcaaactggagatgcgcttttcggccagaaccatccgtacaaagttattgacctcgggcggcatcgccgttccgtgctcaatcgaaatagcgtcgcttggcgtagcgaggaggaactcgctgcctgggccgaggcctacgaggccgctctgcgcgacgaggggctgattgactacgatgacatggttgtcttcggccagcgtttgatcgccgagcacgactgggtactacctctggttcaggcaaaattccccgtgctcgcggtggatgagtaccaggatttaggcgtggcactgcatcgcatcgtcaaacgccttgccttcgacgggggtgtccgacttttcgctgtcggggatgcggatcagtcgatatatggatttacgggagctgatggcgcgttgctcatggaattggcggctcgcagagacattgagcctgtccagcttcaattaaattaccgttctggtgcagggatcgtgactgcgtcagagatggcgcttggagaagcccgaggctatcaagcgagcgatcctgcgcgacaaacgaccatcgaatttgtcctgcgcccgggtggtatggcggaccaggctgcgcacgccgtcgcgcagatcattccggcggccttagcctccaagccgggacgaacactgggcgatatcgcgatcctatacaaagactatcgcgcaggcgatatcgtggctgaagctgtggcaaccggtggtctcgatcacatccgtgtggataccgcagcaccttaccgcaaggttgccctaacaagttgggtagaagattgtgcggcgtggtgcgcgggtggctggcgtgttggacgcccacaattgcgtggactactcgaccgctatcgcgcatttcatcgggcgagcttggacgattcacaggccaagcgcgaagagcaagagctaaccgccttgctatgggagctgcgtgctgaccagcaacctgcgcgagaatttgttgcttcgctgcgcaacggtgtagtggatcatctgctggcggctgaattggcgctcgctgatcagaaggagcaactggatcgcatgacggcagcgctcgctgaaggcggtgcactggcttcgctagacatcacgagtttgggcggtcgggacggttcgcccgatcacctgaatctgctgacactgcattccgcaaagggctgtgagtacgacgtcgtcatcatggttggactcgacctcggaaatctgccgtggcgcaatgaaactccagagaagttgcgcgaaagtcgccggctcttctatgtgggactcacacgtgctcgcgacgaggtccacatgctgtattcgggcttcgttgatggccgctatggccctatgcgctttgggcgctcgccattccttgatgagctggaggcgcgaatgcgtgccgctggcatttga

SEQ ID NO: 332916 - DNA, 1785 bp, Pseudomonas aeruginosa
atgagggtttctcgggtcaggttgatcaatttcgccaatttctcggatgttgatgtcgagacgggggaaagtatcgtcatcgtgggagagaacaaggttggcaagagcaatttcattcgcggcctgcagttgatccttgatccgggcttgtctgaacgcgatcgacaactggggcttgaacatttctgggacggacttggcgaagacaaggttggtgcgaccattgaggtctctgtggatctaacggacttcacaaacgatccccggctgatggctcacctcaacgattgcgtgattgatcctggcccacccatggtggcccgactcacctaccgcttccagcctaaggcgggcctggggcgcgccccggaatcgttgaaggactatgagtatgtgatcttcggtggcaacgatcccgaaatgcgtatcggcggcgcacttcgccggatgttgccaatagatgttcaggtagccctgcgtgacgctgagaaggaccttgcgagctggcgcaattcgccattgaggccactcattgaggatcttgccgcgtcgttggatgatgacgcccgtgaggagattcagaatcaggtcgaccaagcacagcgagagctggctggacacgaggaagtggtagcgacagcagaacggatcagcgaacggctgatcgcaatcgccggggggcaacatgctgtcccggtatcgctcggacttgcacctacacgagtggatgcattgctgcgtagccttcggctgcttatcgacaacggtgttcgcggtgtcggcgatgccagcctaggaacggcgaatctgatcttcctggccttgaagagcctcgaactcgaccgtctcgtctccgagggggagcgcgaccacacattcttcgtcgtcgaggagcccgaagcgcacctgcatccgcatgtccagcgtcttgtctatcgctactttctcggcacaagagcggaagatgaggacgaagcccctccactgacgacaattctcactactcactcgccgcatatcgcaagcgttacaccgattaggtccatcgttctcctgcgtcataacgcaacggacgggaaaaccgtcgcggtttcgaccgcgaacacacctttcacacagagggatgaagacgacctccagcgctacatcgacgtcactcgcggagaaatattattttcccggggagtgattctggttgaaggggacgccgagcgcttcatcattcccgcgttcgccgacgccctcgggattcctttcgacatacttggaatcactgtgtgctcggtcggggggacgaacttcactccttatgtgaagcttttgggccctaaagggctaaatattccacatgtaattttgacagatcgcgacccggtcaatggcaaacctccactagcccacaggcgattaattaatctcttaaacgaggtcgatgacgaatatggttacgatgacctggatatagatgaggtgctcaaatacgccgcagagtttggatacttcgtcaacgagagcacgctggaatccgacctatttgccgccggaatgaccgaggcgatgaagtcggtaatcgagcaggagttgccgctgaggcaagtcacccgggacgcattgcaagagtgggtggatgatccggatcaggtcgatgaagaccggctgctgaagttgattgaacggattggcaaggggagatttgcacaggcacttgcgccgtcggtgtctgaggacgtttgcccggcctacattcgctctgcgctggagcatatccgcgatgccgtcgcgtaa

SEQ ID NO: 332917 - DNA, 462 bp, Pseudomonas aeruginosa
ttggccacgcccgaacccgaggcgcccgagtacatccccgtcgtgcgctacggtcgctacacgctggtcgagctggcacccagagcggcgcaacgcgacctgctgttgcagaccatcgacgtgtccatgcccgaagatgcccgcgccaccgtcggcgatgggctgcggcatgtgctcaagcgcagcggttacagcctgtgccagacggcgcacgcggtaatcgagctgtacgcgctgccgctgccggcggcgcacctgcacctcggccccatgaccttgcgcgatgcgctgctcacactggctggcccggcctgggaactgcacgcggatgatcgcgcacggcagatttgcttcgaacggcccgccgacagcgcggtcatcgaacccgcatccgagccacccgccgccgaggcggtgcagacgttcccgctggagccttcggtttcgggaggccagccatga

SEQ ID NO: 332918 - DNA, 651 bp, Pseudomonas aeruginosa
atgagcgccccacagtctgcccggcgcccggccgccgtcgtgatggtgcagagccttctgtggctctggctgatcggcctcagcgtcttcgtagccttgggctaccagaccatgaacgaccaggccgaccaggaacggctggattcccgcctgcaacgcctggaagcccgggcggcgggcctggtcgagtcgatcgaggccatccagcagcgttcggccgtcgcaacggcggcagacctcaaagacacccgccaagtcttggaagcacgcgctgcccaggttgagaaaacgctgagcggctatgccgctgccgacgaccttcaggcgctgcgcgcggaggtcgagcagatcaaggcgcgccagaccgctgcgcccgttccgcgcgccgcagcacccgcccagccgcgcgcatcgggcaaggccgccgccaagcccgaaccgccgccgctgccgttccgcgtcgtcggcgccgaattgcgcgctggccagcgcagcgtgtccgttgcgccgagcagtgcggacttcacgcctgaccagcttcaggtgctgctgccaggtgatgcgctcggcccgtggcacttacaggcgattgagggcaacaccgccgtgttccaggccggcaaccagacccgtcgcgtggcgattccctga

SEQ ID NO: 332919 - DNA, 726 bp, Pseudomonas aeruginosa
atgaatccgtcgatcatcctttccgcgctcctgctggcatccgcccaattgcccgcctgggcgcagcagccggtcaccgccccggcccgcaatgcgcagaaccaggagcgtccgctggtcgcccgaaccccggacgaccaggtagcaggcgactggggcctccaaccgcaggaatgggcgctataccgcgagctgatggacgggccgctgggcatctattcgcctaacctggaccctctgtccgccctgggcatcgaggcccgcaccgacgaggaacggcggcgctacgcagaactgcaggtgcaaatcgaagcgcgccgcgtcgagaagctgcttgcctatcaacgtgcctacgacgaagcctggcagcgcctgaaccccggcatgcaacgggtgaacctgcctgacgacaaacccagcggcggcgcagtgcgcggcggcggccgcacggcggtgttcgtcaaggacggctgcgcggcctgcggacagctcgtgcaacgcctgcaatcctcaggtaccgagttcgacctgtacatggtcggcagccgccaggacgacgcgcgcatccgcgactgggccaagcgcgcacagatcgacccgacacgggtgcgcagcggcaccatcacgctcaaccacgacggcggccgctggctgtcgctgggtctgcccggcgatctgcccgcggtcgtgcgcgaggtgaacggccaatggcagcgccagccctga

SEQ ID NO: 332920 - DNA, 591 bp, Pseudomonas aeruginosa
atggcagcgccagccctgacggcgcggtttcgcgtactggtgatcgctgctggcctgtacgcctgcgccgtccatgcccaggaggttccgcctccggcctatcagcttgccgcccaacgtgcgggcattccctccacggtgctctacgccgtggccttgcaggagagcggcatccggcggaacggacgcatcgtcccgtggccgtggtccctcaacgtcgccggccaatcgcgccgctatgcgacccgcgccgacgcctgcgccggtttgcagcaggcgatgcgctccacgccgcacacgcgcatcgacgcgggcctgggtcagatcaacctcggctaccacaagcaccgcttcaccagcccgtgcgacttgctcgatccgtaccgcaacctcgccatcgcctccgagatcctgaaggagcagcacatcccgggggagaactggctgctggcgatcggccgctaccaccgccccgcggggggcgagcccgcagcccgctaccggcggagcgtttcccgccacctcgcccgcgtgcagggcacgcgcccaaccgccgcggtcctcgccgcgcgccaggagaccaccccatga

SEQ ID NO: 332921 - DNA, 549 bp, Pseudomonas aeruginosa
atgacgaaatcccatctggcccatctcgcggcgaaaggcctgctcgtgctgctggcgggtctgccgctggcctcgcgtgccggcgagccgctgatcttggtcgaagaccgtggcggcacgtcggcgctgccgtactacgaagccctgagcctccagccgcgcgccaacactccggcccgatcgcccatccctgcgactcagatcccggccacgccggcggatgaggccgcgatgttgccggtgcgcagcgccaagctcacgcccggcaccgtcgcgcggcgggtgatcgaggccccgggcctgcgtcccttcgtggtcgtgggcgacgacgaggcttcccaggcctggttgcgccgccatgcagcctcattgcgcgagcgcggcgcggtcggtctggtggtcaacgtcgagaccgtgcaaggcctggcgcggctgcgcgcactggcgtccggcgtgccgcttgcgcccgtgtccggcgacgacttggccgagcgcttgggcctgcggcactacccggcgctagtcacggccaccggcatcgagcaatga

SEQ ID NO: 332922 - DNA, 2187 bp, Pseudomonas aeruginosa
atgtcggggaaacagccggtcgaggttctgcttcgcccagcggtggagctatataccgtcgcggcgtgtgcaggcgccgcgtttctgtccctggtggccccgtggtcgctcgcgctgagccccgccatgggtgtcggcagcgcgctggcgttcggagcctatggcgcgatccgctaccgcgatgcccgcgtcatcctgtgctaccggcgcaacatccgtcgcctgccgcgctacgtgatgaccagcaaggacgtgccggtcagccagcaacgtctgtttgtgggacgcggctttctgtgggagcagaaacacacccataggctcatgcagacgtaccggccagagtttcggcgctacgtcgagccgacgccggcctatcggctggcccggcgcctggaggaacggctggagttcgcgccgttcccgctgtcccggctatcgaaactcaccggctgggacgtgcctttcaatccggtgcggccgctgccgccagtgggcggcctgccgcgcctgcacggcatcgaacccgacgaggtggacgtcagcctgccgctgggtgagcgcgtgggccactccttggttttgggaacgacaagggtgggcaaaacacgtttggccgaactcttcgtcactcaagacatccgccggaggaacgccgcgggcgaacacgaggtcgtgatcgtcatcgaccccaaaggagatgccgatctcctgaagcggatgtatgtcgaggccaagcgcgcgggccgcgaaggcgagttctatgtcttccatttggggtggccggacatttcggcacgctacaacgccgtaggccgattcggtcgcatctcggaagtcgccacccgcatcgcggggcagctctccggcgaaggcaacagcgcagccttcagggaattcgcgtggcgcttcgtcaacatcattgcccgcgccttggtggaactggggcagcgcccggactacatgctgatccagcggcacgtcatcaacatcgacgcgctgttcatcgagtacgcccagcactacttcgccaagaccgagcccaaagcctgggaggtgatcgtccagatcgaggccaagctcaacgagaagaacatcccgcgcaacatgattgggcgcgagaagcgcgtggtggcgctggagcagtacctatcccaggcccgtaactacgacccggtgctcgacggcctgcgctcggcggttcgctacgacaagacgtatttcgacaagatcgtcgcgtctttgctgccgctgctggagaagctcaccagcgggaagatttcccagcttctggcgccgaactattccgacctggccgacccccgcccgatcttcgattggatgcaggtcatccgaaagcgcgcagtcgtctatgtgggcctggacgcgctatccgatgccgaggtcgccgcagcggtcggcaactcgatgttcagcgatctcgtttcggtggcaggccatatctacaagcacgggatcgatgacggcctgccgggcgcatcggctggcacgcgcgtgccgatcaacgtccacgcggatgaattcaatgaactgatgggtgacgagttcgtgccgctgatcaacaaaggcggcggcgccggtctgcaggtcaccgcgtacacgcagacgctttcggacatcgaggcccgtatcgggaaccgcgccaaagcgggtcaagtgattggcaatttcaacaatctgttcatgctgagggtcagggagacggccaccgccgaactgctgacccggcaattgccgaaggtcgaggtctatacgaccaccatcgtctccggcgcgaccgacagctcggacatccgcggcgcgacggacttcaccagcaacacgcaggaccgcatcagcatgtccagcgtgccgatgatcgagccgtcgcacgtcgtcgccttacccaagggccaatgtttcgcattgttgcagggcggccagctttggaaggttcgcatgccgctgccggcaccggaccccgatgaggtcatgccgcaggatctgcaacaactggcgggctacatgcgccagagctacagcgaggccacgcagtggtgggagttcaccagttccccggcgttgcaggacggggccttgcccgacgacctgttggatgatgccgctgcggccgaacctggcccggtggccaccgacgacagcgccggcaatgaggcctcgccatga

SEQ ID NO: 332923 - DNA, 750 bp, Pseudomonas aeruginosa
atgaaggatgccgcctcgaccgcgcagcgggagcagaaccagcgccaaggcctgatcgtcggcaccatcaccttgccgttccggctgctgggggtgctgatcggctcgctgctgttctccattgtcgtggagtgcgtcggaatgcacctgttctggaaggacgagggctggcgacactcccagcagatgttgcagtacgagttggggcacctgtccaaccacttcacgcgcagcgtggtcgtgcaggaaccggggcgcacggcgcacgagctggtggataccggatacgaatgggtgttcgtgcgctcgggcttgctggagcgcatgagccagaccgccgagcgcgcccgtgcacccagccacgggcagacacgcaactttcgctactacatcagccaggcctatgtctggaccgagagctacctgatcgccgcagccttcacgacgctgaccttccttgtgcgcctgctggtcctggtgctcacgttgccgctgatcctcaccgcggcattcgtcggcctgatcgacggcctagtgcggagggacgtgcgccggttcggcgcgggccgcgaatcgggcttcatctaccaccgcgcgaaagcaagcctgatgccgctggccgttctgccctgggtcacgtacctggccttgccgatctcggtgcatccactgctgattctgctgccgagcgccgccttgctggggctggccgtgagcctgaccgcgggcagcttcaagaaatacctttag

SEQ ID NO: 332924 - DNA, 2625 bp, Pseudomonas aeruginosa
atggcaagcattcattcggagtaccaccgcttcttggcgcacttggcgcaacgccaggtgcatgacgacgtgtgccggctcgcgcatctggtgcttgatcacctgcaacctctggctgaagttggtgcagcgcgccgtggacgctccacccgcatggcgccactggccgtcgcccatttggcgcagatgccggtcgcgtaccagggagatggccacggacccgaagtcgggccggcgctggggcgcctgcgccagcttgaggtgggaccgtttcgcggattcatgcggcaagagacattcgacctcagccacgacatcactttggtctatggcgccaacggtaccggcaagagcagcttctgcgaggcgctggaagtggcgatgctcggctccatcagcgaggcccaagtcaagcgggtcgaccaacggacatactgcaacaatgcccggttgcgtcgccatgtcgcgcccgtcctgtcttccggagcaccagaccaggcccaggctgtgcagcccaacgaagcggagtaccgcttctgcttcatcgaaaagaaccgcctcgatgacttcgcccgcatcgcggcgcgtactccgggcgatcagcggcagctcatcgctaccttgtttggcgtggatcagttcagcgacttcgtgcgcggcttcaatcccgcgctcgaccaagacctgatgctcgtcggcgcccaggctactcaactcgcgcagcggcgcttgcagttggcgaactctgaacagacgatcgctgcttatccgcaaaagatcgcggcggtggagaactccgagcaagcgctggcgcaacgaatgtcgcccggcgcgacgtaccaggcttgcgttgactggctgctcggcacaccggagcagcaagggcggctgccgtacgtccaggcgcaactggttgccgtcccacctgccgttcatgaggtgagccaagcgcggctgcagacgctgctggatgaggcttatcaccttcaaggcctgtggcaggcggccaccggacagctttcggcgcgtgctggggaagtgtcgtacgctaagctctacgaggctgtgctggccttgactgacggggcgaccacctgtcccgcatgcggaaccggattggctgctgtcgcacaggatcctttcgccaaggcccgcacgggcctggagcagctcgcgcagttggccaccctccagcagcaggaagccggcctacggacgcagttgagcgaggcggtgcgggcgctgtgggacgagatgcgtcgggtagtcgcggttggcgcaaacgcttgtcctgcacagttgcaggcagcaggcctgcctccattgccgcctacctcgacaggcgcctggcttggcgcatgggtcgatggcgaccggcgtgcctggaacgctctgctgcaggtcacggaaatcatcgagcgcgccgacgcgcaagcccgcgaagcgcatgccctgcgcggggcgctggcccgggagcgggacgcactggaccagcaccggctggagatcgaacggctgcggaccatacgcatgacagccgaccaagaaatggccgctgcccgccagaccgtggcccaatttgacgaggcgaaccgtgagttgatcgagtcggtcgcaaccgaagtgccggtagtcgcgcaccacctgcgggtcaaggccgcctacgacggcttcttgcccgaaatccaagcctacttggccgcattgccgggcgtgctgctccagggcctcggagaacaggcacgcaatctgtacaacgcattcaatcgtgctgatccgcctggcgacctcttgcacgcgttgtggctgcctgtcgccgaaaacggcaagatcgaagtagagttcaccggtgagcctggcgtgcgctatgacgcgctggtggtcttcagcgaagggcatatcaagtgcctgggtctggcgattctgctggcgaagaacatcgcgcaggggtgccccgtggtcattttcgatgacgtcgtcaacgcgatcgacgatgaccatcgtgacggaatctggcgtaccttcttcgaggatggcttgctcgtcggcaagcaggtcatcctcacctcacacgccgaggagtttctgcaccggatccagcaggaattgggcgcccggcgggccgggtccatcaagcgctacaagttcctcccgcaccagggcgagcatgagctgcgcgttgacagcgatccaccgacgaagaactacgtcctgttggcccagcaggcgttggcagccgatgagaagcgtgaggcgctgcgccaggcgcggcccgcgctggagagtctgactgaccgtctctggacttggctgggccggcgagcagatgggcgcatcgaactcaagctaggcgggccacgctccccctgggaattgaacaacaaatgcgcaaagttgagatcagccgtcgatcgcatctccgcgcagcatgctggcgcgccagacgtcgttgtcgctttgacccggctgcttggtgttggtgcaggaagcattgaatgggggtgtctcaacagcggtgtccacgattcccagcgagaccacgagttcgaccgctccttagtgagagtcattgtcgaatcgattacggcgttggacgctgcgttagatgttctgcagaaccgatga

SEQ ID NO: 332925 - DNA, 1053 bp, Pseudomonas aeruginosa
atggaatgcttccggatcgatgaaagtggttataccggctttgacctgatgaaccctgagcagcggttccaaggagcgacggccatcgccattgaggatgacgaggccgggcgcctgatccgggagcactttcccaagcttcaggcggacgaactcaagtaccgggcgttggctcggcgcccagccaatcacccccgtctgatggcgctgcagcgcgacttgctaaccgaccacaagtgcgtgacctacgtctgcgacaagcgctacctgttgctgctgatgttcctggactacgcggtcgagccgttctactacgagcgcggcatggacttctacgaagacgggcagaactactcgcttgcgtcgctgctgtatacggttggaccgacgctcctcggcaaaggcgcgctcgaccggctgttggtcagcttccagcgcgcggtgaaggaaaagagctcggaggcgcttgggaacctgatcgatgcggcgtgcgcatcgcgctggtgggaactgccggaagcgcttggcccgcttgcgcagttcgctgcccctgaatgcctgaaggcgatcgtcacgccgggcgtcaacaccgatgctgctttcgtggtgctgcagtccctggtcagtcggatggaaatcatggctgacggcccgtatcgggtcgagcacgatcagtccaagaacctgctcacttatcacgacctgctgcagcggtacatccgccatgagaaaccgatcacgtttcgtcaatcggagatcgccagcatcacctttccgctcaagcttcagtccgtgactcagatcgattcaaagcacagtcctgcagtgcaagtggcggacgtgatgatcggcgcggccatcgaagcggcgaatacgcttaccggacaacgcgccggggtactggatgccgagaaggtcatggcgctgtacgccgatcatcaactgatccatatgctgccctcgatcgacttcgaggagcaaaagcgtttccgtcagggatcccaagcggggcaggtcatcgactattttgctgagaacttccacaaaccgtaa

SEQ ID NO: 332926 - DNA, 675 bp, Pseudomonas aeruginosa
atgagcgtcgttgcagaccgtctcggcgtgtcgacccttgtgggtacgcccaaagagattcaggctcaactcgctcggtcgcaggctgaccacgtgctggtggtggcgttcgaccacatcaagcccagtgttttcgcggcattggcggaaaacttcaccaacgtcgcttcatccatgttcgaggtgctgcttgaacgtcaggaccgcgaatcgctcgaacggctggcagaaatgctcgtgccgcgcaatccgctgtcgccccggctgctcaaggaagcgagcctgctggtgcaggcgcgtaaggcggtgttggaaagtggagactggttgaccgccgcgaacatcgcacaactcgcggaactgagcacccggaacccgagcgctcagcccaataagtggaagaagcaacgccaaatcttcgctatcaaccacggtggcatcgattactttccggactacgggctggatcgtgacgctggtttccgtccactgaaatcgctggccaaagtgattgaaaccttcgaaggacacaaagacggctggggcatggcttattggttccgctccgaaaacagcttcctgggtggaaatcgtccccaggatctactcgcttcggcaccggaccgtgtcattgcggccgctgtggatgaaattcttgaaatgacccatgactaa

SEQ ID NO: 332927 - DNA, 903 bp, Pseudomonas aeruginosa
gtgcaccccaccacgctttatgtagtcggcaatggattcgacctgtggcacggcattccatcgggcctcggacagttcaaggagtatgtcctggccacagaccgggacattcatcgcgaggtcgaggactaccttccagccggagacgactggtgcgacttggaattagccctggctgaactggatgccgatatgctggtcgacaacttggggcacttcatgggggcctatggtgccgaggactggagtgattcagggcaccacgactttcagtacgaggtggggaacgtcgtcgagcgactgtccaaggggcttcggacgcgctttgccgaatggatccgagacttgcccatcccgacacacgacaccgccccgcgacggcttgcgacgctggatccacaggcgctgttcctgaccttcaactacacgagcacgttggacactctctatggcatcgatctggcacgtgttctgcacatccacggccgatccgatgcggcagacgatgagttggtcttgggccacgcctggaatccccaatcccgcccctcgctcaacgaccgtccggatatcgaggagatcgatacccgggtggctgaagccaacgacatcatcgacgactacttctcagccaccttcaagcgttccgaggaactgatcgcccagcataggacgttttttcaggcgttgggagccatccagaaggtcgtcgtgcttggccactctctgtcccccgtggatgcgatctacttccaggcgctccttcagcagcccagcgttgccgcggcgcgatggacagtcgcatgccgcagcaaacaagagtggcctgataaggaacaacggctcgtcgccctgggtttgtggccgggtgctggacagccatcttcttgggacgcactgtag

SEQ ID NO: 332928 - DNA, 381 bp, Pseudomonas aeruginosa
atgttggctccgatctggctgcgcgccgcgcatcgcggcgtgcccacttttctcgtgacggccctcctgctgggccagtccccgatggcgttggccgagccccccacgcagcgccaggaactggtcgcggcgctgcgccagctcgacgcgctggagcgcaccgtcgccgacagcgccgcgcatgcccccatccagccgggagagcgctaccacttcgattacccgcggctgctggctgacctagcgcgcgtgcgcgccggtatccaggcccacctctcaccttcgcgtgcccagccgcgcgacccctccgaactggccggcgactaccgcactgagcgggccgtcgagccatcgccgacgaccgcggaggtcaagccatga

SEQ ID NO: 332929 - DNA, 234 bp, Pseudomonas aeruginosa
atgaacggcgcccaggtctcggcatttcaagccaacagcggcatcgcgccttccgcgatggcgaccgtcttggtcggcgtcgtgttcgcggtcctgctcgtctggggcgtctgggccatccgaacggcctacgtggggtggtccgagagccacctcaaccagcgccagttcctcggcgtctgcatccgcttcgtcgcgatgtacctcgtcctgagtttcttcctcctctcctga

SEQ ID NO: 332930 - DNA, 360 bp, Pseudomonas aeruginosa
atgcaaaaccgcatcctcacttcccgttttgtccagcgcgccaccgtggctctgggcgccgccgcgctgcccgcgctgtcgttcgcgcaggggttgccgcaactggagaacccgacccgcggcacgggcaacggcatcatggaaacgatcaggaactacggctacgacatcatcatgctcgtggccctgctggttgtggcgtcgatgttcattggcgtgtgctaccacgcctacggcacctacgcggaaatccacactggtcgcaaaacctggggccaattcggcctcacggtcgccatcggcgcggtgctgctcgtgatcggcatctggctgctcaccgaagccaccggcatcctgtaa

SEQ ID NO: 332931 - DNA, 411 bp, Pseudomonas aeruginosa
atgtccgagcagcagcacgtccgtgctgacgggacggtcacgttccttccgcaccggctcaaccgccatcccgttgtcgtgcgcggcctcaccgccgacgagctgtggatctgctgcggcctgtccggcgccgccggcctgctggtcggtgcgccgctgtcctgggtgttccgcacgatcgcgctcgcgcccacgttcgtcgtgctgggcgtggccttcggcgtgttcatcgggggcggcatcctgcgtcgcctcaagcgtgggcgtcccgacacctggctgtatcggcaactccagtggcgcatcgccacgcgctatccgctggtggcgggctgggtgggcggccatgtgctgatctcacgctccggcttctggaccacccgaaggtctgctgcaaggggggcacgatga

SEQ ID NO: 332932 - DNA, 690 bp, Pseudomonas aeruginosa
atgagccgcttcaagaacgagatcacccatctgcaggcgcacatcaagacgcttcgcctgggtgctggcgcgctggtcatcgtcgccctggtcatgggcggcggctggtggagcgctccgcgcgacctgaccatccacgtcccgcctgatctgcgctccggcagtacccgcaagtggtgggaagtgccgcccgaatcggtctatgcgttcacgttctacgtgtttcagaccctcaaccgctggccgacgaatggcgaagaggactatgcgcgtaatctccacacgctctcgccgtacctcaccccatcctgccaggccttcctgcgggcggactacgactatcgccgctccacgggcgagctgcgtcagcgcgtgcgcggcatctacgaaatccccggtcgcggctacggtgacgaccccacggcgcgcgtgcgcgtggtgtccgaccgcgactgggtggtgacgctggacatcaccgcagacgagtactacggggcggaacaagtcaagcgggctttggtgcgctaccccgtgaaagtcacgcgggtggacatcgatcccgctcgcaatccgtttggcctggcgctcgactgctacgagggtgcgccccagcgcatcagcacaccggagccgtcgcgcccggcacctggcggcctgtctccgcaagcgcctcaaggagaaaccccatga

SEQ ID NO: 332933 - DNA, 918 bp, Pseudomonas aeruginosa
atgaagcaccttgtactcgcactgctggggctgctggccgtcgcctcggctccttttgcccaggccgtggagatccttcgctgggaacgcatgcccctggccgtgcccctgcgtgtcgggcaggagcgcgtcgtgtttatcaaccggaacgtccgcgtgggcgtgcccgcgggcgtcggcgagcgcttgcgggtgcagagtgcgggcggcgcggtgtacctgcgcgcgagcgagccgatcgagcccacacggctgcaattgcaggatgccgacacgggcgcgctgattctgctcgatatcgcggccgagccggccaaggacggcgaagccgagttggagccggtgcgcatcgtcgagggcgacagcgccccgacgcgctatggcgatcaagccgacggagcagacgacgccccggcgcgcgcccaggaccaggcaggcgcgcgggcagcgcggcgtgaaaccccggttccggtcgtgctgacgcgcttcgccgcgcagaacctctacgcaccgctgcgcaccgtggagccgctgccgggcgtcatgcgggtgaacctgcgccgcgatctcgacctcggcacgctggtgccgacgctgccggtgcgcgcagttgcgctcgcctcgtggcgtctggaagaccagtgggtcacagccgtgcgcctcaccaatagcagcggcggctggatcaccctggacccgcgcgtgttgcagggcgatttcctcaccgccaccttccagcacgaagcactcggcccgcgcgggacgccagaggacacgaccgtcctgtacttggtgacgcgggggcacggcctcgcgcaatcgctgctgccggcgatcaaccgcttcgacccagccgtgcatctgccgcagcccgaagccgaggccaccgacgacaaggaggcccgccatgcgcagtaa

SEQ ID NO: 332934 - DNA, 1431 bp, Pseudomonas aeruginosa
atgcgcagtaacggactcctgaagtggttaatgatccccgtggccctgctggtgctgttcgtcgccatccggctgttttcgggtggaggctcgtcggcgccgcccgctgcggatgccggcgccaagctcacgccggaggagatgaaggcgctgggcatcgagggcgataccccccgcgataccgtggcgacgctcgtggcgcaagtgaagcagttgcgcaccgaactgcagacggcgctgtccgacaacaagtcccagcgcgaagagaaccagcgcctgcgccaacgcgagaactcgatcgaccagcgcatcaattcggcgctggagaccgagcgctccaacctgcgccgcgaccagcagcaggcagccagcgaacgccagcagaccgagggactgctcgccgacctgcagcggcgcctggaaggcatcggcgggcgcggcggcggccacgccgatctacccgtgggcctggggctgcgtaacggcgacgaggcaggcatggaaggcggcgtgcgctgggtcgagccggacgacgcgaagcccgctgatgggcgtaacggcagtcgcggcacgggtggcggcatgagctttccgacgagcttcggccccgcgcagagcacgctggaaaccacggcacaaaccgtggcgaacgcgggcgcccgcgccgcaggcgtcaagagcgccaagccggtctatacggtgccgaccaactcgacgctgatgggatcggtggcaatgacggcgctgatcggccgcgtgccgatcgacggtacggtcaacgatccgtatccgttcaaagtcctggtcggtcccgacaatctcacggcaaacggtatcgacattcccgacgtggcgggcgccgtgttttccggcacggcctcgggcgactggacgctctcttgcgtgcgcggccaggtgcgcagcatcacctttgtgttccatgacgggaccattcggacgattcccgaagaccgcgacggcaaccagcagaacaaccagcagcagaactctcaaagtgggggcctgggctggatcagcgatccctatggcattccctgcgtcagcggagagcggcgcagcaacgcccagcagtacctcggttcgcaggcgctgatcaccgcggcgggtgctggcgtggcctcgctcatcgacagcgacagcggtcagatgtcctacgtgggcgcagacggttccatcggcagcgtcggcatttccagcaacgaggccgtaggtcgcatcctggccggtggcgtgcgcgacatggccgattgggtgaacaagttgtacggccaggccttcgccgccgtctatgtccaacccggcgcaaaggtcgccgtccacctcgaaaagccgctcgccatcgatttcgatcccgaaggtcgcaaggtcgatcaccgtgcaggagaaagccatgctctcgaacttgaataa

SEQ ID NO: 332935 - DNA, 441 bp, Pseudomonas aeruginosa
atgctctcgaacttgaataagggcctggcgctggcccttgccgtcgcggtgctcggcggctgcgccaccagcaaggaaaagctgctgccccacggcgacagcacgatgatggacatctggcagcagaacgccggtgacggcggcggtggcgccggccaggtggcacgcaggcaattgctcgacgcgcgccagagcctgcgccggccgctgaccgagatggatgtacaggccgcgcccgccgagcagatgcgctacacgcgcacagcgcgcaacgaggtctatcgccagttccagcgcctgccgaatcccgacctggtgatgtacgtgtacccgcacctggcaggcacggacccggtgcccgtgccgggctatacgacggtttttcccttgtaccagcgcgtgcagtacgccatgccgggcgagcgcgtggaggactactga

SEQ ID NO: 332936 - DNA, 2883 bp, Pseudomonas aeruginosa
atgcgctggaaactcccctggcacaagtcggccgcgccgaagctggccgcatccggcgcaggcgatgacgagcggccggagggctggcaacgccacgtcgaggccttgcgccaggccggcatcccagaacccggcacggcggtccatggccgcaggccggcgaccgtggccgacgagcaggcgctgtacgacgtcgcgccgtcgttcgcggaattcctgccctgggtggagttcctgcccgattcgaagtccatgctgctggaagacgggcaatcggtcgcggcattctacgagctggtgccgctgggcaccgagggccgggaacccggctggctcgcgcatgcccgcgacgccttggagaacgcgctccaggactcgttcgatgaactggacgagaacccctgggtactccagctctacgcccaggacgaacccagcttcgaccagtacatgcagaccctgcgcgactacgtgcagccgcgcgcccgcaatacggctttcaccgagttctaccttcgcttcttcggacaccacctgcgcgcggtagcgaagccgggcgggctgttcgaggacacggtggtcacgcggctgcgttggcgcggccagacgcggcgcgtgcgcatggtcgtctatcgccgggccaccgggcaggcgagccgccgcggccagacgcccgagcagatgctgaacatcgtctgtgatcgcctgtgtggcgggctggcgaacgccggcatccaggcccggcgcatggtcgcggccgacgtccatgactggctactgcggtggtttaacccgcgtcccacgctgctcggccctggggtcgaggaccgcgaacgcttctatgcgctggcacgctaccccgacgagacagaagacggtgagatcgagctggcgagcggacgggatttcagccagcggcttttcttcagccagccacgttcggacgcggagcacggcacctggcacttcgacggcatgccgcatcgtgtgctggtcactgaccggctgcgcatgccgcccggcacggggcatttgactggcgaaactcgcaaaggcgatgcgatcaatacgctgttcgatcagatgcccgaggacacgacgatgtgtctgaccatggtggcgaccccccaggacatcctcgaatcgcacctgaaccacctggcgaagaaggcagtcggcgaaacactggcatcggaacagacgctcaaggatgtgcaggaggcccgctcgctgatcggcagcgcgcacaagctgtaccggggaacactggcgttctatttgcgcggccgggatgaagccgaactggaccggcgcggccttgatctggcgaacgtgatgcttaacgccggtttgcagcccgtgcgcgaggacgatgaagtcgcgcctttgaacagttatctgcgctggctgccgtgctgctacaacccgagccaggatcgacggaactggttcacccaactgatgttcgcccagcacgtggcgaacctctcaccggcctggggccgcagccagggcacgggccatccgggtaatacgttcttcaatcgaggcggcgggccgatcacctttgacccgctcaaccgcctggatcggcagatgaacgcgcacctgttcctgttcggccccaccggctccggcaaaagcgcaacgctcaacaacctcttgaaccaggtcacggccatctaccggccgcgcctcttcatcgtggaagccggcaacagcttcggcttgttcagcgatttcgccaagcgcctgggcctgactgtgaaccgggtcaagctggcccctggctcgggcatcagcctggcgccgttcgccgacgcgcgtcggctgatcgaaacgccgagcgacgtgcagacgctggatgccgatgtgctggacgaggacatgccacccgatgcatcggccatggaagcggacgagcagcgcgacgtactcggcgagttggaaatcaccgcacggctgatgatcaccggcggcgaggataaagaagaggcccggatgacgcgggccgatcgctcgctcatccgccagtgcatcctcgacgccgccgagcattgcgtggccgagaagcgcacggtgctcacgcgcgacgtgcgcaacgcgctgcgcgagcgcggccaggacccaacgctgccagagatgcggcgcgtgcggctgctggagatggcagatgccatggacatgttctgtcaaggcaccgatggcgaaatgttcgaccgcgacggcacgccgtggcccgaggccgacatcaccctggtcgatctggcgacctatgcccgcgaaggctacaacgcgcagctttccatcgcctacatcagcctgatcagcacggtgaacaacatcgccgagcgcgaccagtacctgggccgcccgatcatcaacgtgaccgatgaagggcacatcatcaccaagaacccgctgctcgcgccctacgtcgtgaagatcacgaagatgtggcgcaagttgggtgcctggttttggctcgcgacgcagaatatcgacgatctgccgcgcgccgcggaacccatgctcaacatgatcgagtggtggatctgcctgtcgatgccgccggacgaggtagagaagatcgcccggttccgcgaactctcgcccgcgcagaaagcgctgatgctttcggcgcgcaaagaggcggggaaattcaccgagggcgtcatcctctccaagagcatggaagtgctgttccgcgccgtgccgccgagcctgtacctcgcgctcgcgcaaaccgaacccgaagagaaggcagagcgctaccagctcatgcagcaatacggctgcaccgagctggaagcagctttcaaggtcgccgagaagatcgaccaggcacgcggcatcgagtcgccggccttggaactgtcgtaa

SEQ ID NO: 332937 - DNA, 765 bp, Pseudomonas aeruginosa
atggagcagaagcgtccttccattccgatacaagtccaggcgttccgccgtcgccacaggcggccccgctggccttgggccttgactgctgcgctggtcgcgctgctgctgatctggctcgtgtcccggtcgcccggcgaatcctcatcgcagtcgcccacgccggctagcacggcgcagatggccgggccgccctggaaaatgggcaaccccgagggccgtttcacactgacgctctatgccgatctggaatgtccgttctgccgggagtacttcccgcagctcaagcgctgggtcggcagcaacgccgacgtgaccctgcaatggcatcaccagccgctggctgcgcacgagccggccgcgttggccgaggcgcgtctggtcgagtgcgtcgccgaagccggcgggcatgctgccttctggcgagccgtcgagtgggtctatgcccacacgcgcagcgacggcctgggactgcccgatggcctgcgctaccccgaatcgacgccggccgtcgagcagtgcatggcaagcgagcgggtcgacgcggccatccgcgcccaggccgcggaagccacgaaaagcggcgtgacggccacgccgtcgctgcgcctgctcgatcgccagacgggtcagtccatcctgctgcagggaccgatcgaaggcgatgccttgctgtcggccatggacatgctgtccgctgatgaaccacccgccacacccgccaccgaaatgcctgccgacgttgtcggcgacatgcccaggtag

SEQ ID NO: 332938 - DNA, 495 bp, Pseudomonas aeruginosa
atgtctctcgtcgtcaatgactcctgcgtggagtcgctttccgctgtcgcagcccagcgtgaggactggatcatccagcaggctatcgcgctgctggagagacggatcttcaaagtcggaccgtgcctcagccgaccggccgccgtgcgggactacctgcgtctaaaactggtcgctgagcccaacgaggtattcgcaatcgttttcctggacagcatgcaccaagtgttggcctacgagccgatgttcaggggcacgatcaattcgactgcggtctatccccgtgtcgtcgtgcagcgtgtattggagctgaaagccgccgcagtggtcttcgcgcaccagcacccctcgggtgtcactgagccgtcgagcgccgatcgtgcgctgacccagcaactgcaggcagcgctggcgctgatcgatgttcgggtactggatcacatcatcgttggccaggggattccgtactccttcgcggagcacagcttgctgtag

SEQ ID NO: 332939 - DNA, 447 bp, Pseudomonas aeruginosa
atgccagcatcttttcccaggttcgcgccaagctggcgagcccttggcctggccgttgcactgccggtgtccttgggtgtctttagtccggccacattcgctgccgatgtgctggtcatcaccgacagccgccatccggtcaagaccatgggcggcgagcggctgatcgagctggacgaagcgcaccggatcgaagcggagctttctgcggaactgcccgccgaacccgagcaggcgaccgccatcgtcaagcgccgactgaacagcggcggcaccgatctccaacgccgcatcgcttccgcctaccagggcgtcaccgacgcgtggagcctgggcatcaccagcatcccggccgtcgtggtggatcaacgctacgtcgtctatggcgaaccggatgtggcccgcgcagtcgctcgcatcgagcagcactggagggcccagccgtga

SEQ ID NO: 332940 - DNA, 948 bp, Pseudomonas aeruginosa
gtgacccgcccattcgacctgatgcgccgcctgcgtgctggcgtggcgtccgttctgctgctcagcgccacgggcagctacgcgctcaacaccgcaaccatcgtcggctcggtggcatcgccagactgcctcgaataccgcgtcgtcgggatctgctactggctctactgcacctggacgggctgtacggtacgcacgtccatcaaggtccgccactacatccccgatgcgatcgtctccagctacagcaacaccggcgaaaacccctggatcgaagtccggccgatgagcacgcccaacccatccgcccaaaccggcggggacggaacgacgaacgaggaccacgaaaacaacctcgccaagttcaagaacgcggacgtcatcgggcacccgggcgtcgaggtgttcaaccagttcgtgtcgtcctcgggctacttctgcgagggtgcgggcacggcgttcatgccgtacttgctcggcaccctggacacgctggcctggcgctacaacgtgcccgagatggcctacccggaggcgctaattcccggcatgcgtgaggtcggtgcacgcaccacgatgaacctctggggcaacgtgtatccccgcgggggtttcctgcaccagaccgacgaccacaaggccagtgcagtggtggcccagcgcgcaggcgatgtcgtcacgcgccggggacagatccacgtttatcagccgctgctcgccaactcccgcgatggctactggccggctggcgcgctcatggagagcgatgcctcgacgggcaagtggcaggaactcacgccagtcctgtcctcgtcctgctcggtcttcccgcgcagcggcgccctgacacaggcccggcaaggcgattacgcctgggcgctgtggcggccctatgcgtgctgcgaacgccggggccaggtgtttctcggcagcgtcgatttcctctga

SEQ ID NO: 332941 - DNA, 1398 bp, Pseudomonas aeruginosa
atgaagttccgtcctgcattcaatccgttctcccgccgggtacgtcgcacgaggatcgtcatggcggtggccggtgcgctcgcgctgacgagcggtgtggcctggagccaactgggctaccagaccggcggcagtgtcatcggcgatgacgtcatgtactcgatcggcggcggaaacgccgtgtcgatgggacgtgcggctggcatgcgctctctcggggtcggcgtgggctggaacagcaacttgatctgcggtgacatgagcatccagaccacgttgaagaatcagctcaacggcgtcaccaacggcttccagcaaatcatgtcatcggtgatccaaagcgccaccagcgcggtggcgtcgttgccggcactgatcattcagcgggccgatcccggcctctacaacctgctcaccaatggcgtgttgcaggcacggctcgatttcgaccgctccaagctgacgtgccgtgccatggcggagaggatggccgagacggcgggcgggcagctcggctggagccagatggcagaaggcttggcgctgcgcgatgcggtgtcgagcacggatgcggtctcggccgtcgagcaggccgagacgcgccgcggcaatgacggtgtgccgtgggtcgggggcagcaacgcgggaggctccggccagcccgcgatcaaggtcgtcggcgatgtcacccgcgccggctacaacctggtcaacggccgcggcgtgaccgatacatcgtccatcgcaccgaccagttgcagcagtctctcgtgccagacctggacctcgccgcaggccgccgtcgagtgggccacgcgcgtactcggcgagaaggaacagcgcacttgcgatgcctgcaccaagaccgagacgacgcccggcgtagggctgacgccgttgatccaagaagaatacgacgccaagctgcaggcgctccaggatctggtgtccaaggcgaagaacacgacgcccgagaacctgcgcgaggctggcagtgcatcgctgcccatcacccgcggcgtgatcgaggcgctgcgtgacgagccggaccagcacctgctgtcgcagcgcctggcgtccgaggtcgcgctgtcctccgtgctggagaaggcgctgttgctacagcgcacgctgctcacgggcaagaaagagcccaacgtcgcggccaacgagcttgcggtggaggccgtgaacaaggagagcgatacgctcgaccgcgagatccagaacctcaaaacggaactggaactgcgccgcgagctggccaacaactcgccgatggccatcattcagcgccatagcacgcgcgcttcgggttcgcgcggcatctacgagggcgatccggtgcccgaccgtctcgaccaactccagaagggcaatccgggaggtcggccatga

SEQ ID NO: 332942 - DNA, 360 bp, Pseudomonas aeruginosa
atgagcgaggctcgcatgacttggcgtccactacgctggctgttcagccggcacgcggcgaaaaccctgctatggcttgtgctggtcgtggccgccgccgtaggggccaacgtcgcgggcatctacctggtcggcagtgtcgcggcctgggagcggtggctggcggcgtccgcagggtatttcttcatctggcgactgtgcctgtacggcggtacggcctatggatgggtctggatgcgccgtcggctgctggcccgcgaagacagcacgcaggcgcgacgtcggctgatccgcgcagaggtcgccggcgtccttgccattgtggcgctcgaagccagcctgttgatgcaggccgcttga

SEQ ID NO: 332943 - DNA, 1518 bp, Pseudomonas aeruginosa
atgacgcttttcacgaccgactacctggagtactacctcaccctcgtgtcctggatcgtcaacaacggcatctgggccgtgctggtgtccagcggggtgtttgcgctgccctttgtggcgatcgtcatccaggaatggctcaaggccagagcggagggcgccgacgaaggcaacaagggcgtgctctcggcggcgcgcatcgagaaccgagtatttgtggccatcgtggtcgtgatgttcgccggcattccgttcatcgacgtcgacctcagcactatccagtacgacagctcgcgctcggcgcagtgccaggtcagcgtgccgcagcccgcgcaaactggctggtcgcagtccttcagcaccatcaacaaccagtcggcgaaggttccggtctggtgggctttcatgcacgcgctttcgcgcgccgtcacgagcgcctcggtggctgcgatcccgtgcggcacggatctgcggcagatgcggatggagatcgatgccacacgcatcgacgacccggtgctggcccaagaagtggcggatttcacgcacgattgctatggaccggctcgcgccaaattgttcatggcgcggccggagctggacgaaacgcagatgaacgatgtgacctggatcggttcgaggtttttcacggacacgggcggttactacgacagctaccgctctagcacggcgcgcgaggcatggccctatgacgacacccgcgacgctgggcttgcgcaggttgccaatggtggcggctacccgacctgcaggcagtggtggtccgacggcagtaacggactgcgcgcgcggctgctggggcaagtggacccaagcctgctgaatcgcctggcgggctgggctggattcctgagccgggccgaggtggacgactccgtgatccgcgccatcgcgtcaccgcggcagcagaaattgaaccaaggcagcgtctatacggactacggcggtcagatcgacaagacattgcccaatgtcgtcaaccgtgccaccagcgatgttggcttggcggttggggctctcgccgccttcccggcaatggacgtagtgcgccaagcactgcccatggtgctcgcgctgctcaagatggcgctcgtgatctgcattccgctagtgctggtcgtgggcacctatgacctgaagatggtcgtcaccgtcagcaccgtccagttcgcgctgttcttcacggacttctggtttcagctcgcacgctggatcgacagcaccatcctcgatgcgctctacgggtggggctttggctggaaccggccgcataccaacttcgacccgctggtggggctgaacaatgccttcggcgacatgcttttgatgttcgtcaccggcacgatgttcttggtcctgccgactttctgggtggcagcgcttgggtgggtcggagtaaaagccggggtaatcgctcagaacctggctgtcggttccaaggaagcacgcgacagcgcgggatcaggcgtaaacaaggttaccggcaaggtgctttga

SEQ ID NO: 332944 - DNA, 378 bp, Pseudomonas aeruginosa
atgaacacgacaacccgcatcagcaccgcagaacgcctcggccgcagcgttggccgtggatggcgcgcctatgcgcgcggcgagcgaaggttgtcgtgttggctcgcctccaaggggatgccgcttgccggggccaccgtgctcgtatgggtagtgaagctggtcgcgctgggattgctgttctacgccgcgttctggctggcgttggtgcttctggttggggttgccgcagcatggacggccagcaattcgacggtcaatgatgatcgctggacgcaaccggacgaactgcgaaacggcgaggcaggctttggcctgtattcgtccagcggtcagcggatcgacccgcacgacccgaacgatccgttcaacgactga

SEQ ID NO: 332945 - DNA, 459 bp, Pseudomonas aeruginosa
atgcaacggcatggctgggcattgctgttccacgactgtgtgatcgagcagttgcagaagctgcacgcagccgcacggcgcgcgcaggagaacgacccggagggcttcgagtccaacgccaacgtcaagctcttccgggccttgaaccagttgatattagatgtggtgcccggtgatccggcacgcgacgagtaccgccagggcaacaccctggggctggcccaccggcactggcgaagggccaagatcggaaggcggttccggttgttcttccggtacgactcgaaggccaaggtcatcgtgtacgcctgggtcaatgatgagcagaccttgcggtcttcggggagcaagtcagatccctatgccgtgttcgagaaaatgctcggacgtggaaatccaccagacgattggaacgtattggtgcaggcaagcaagcaggattggagcaaactggaatag

SEQ ID NO: 332946 - DNA, 318 bp, Pseudomonas aeruginosa
atgcctgccattcatgaagttgccacgctgacctccaaaggccagatcacgctgcccaagcccatccggcaggcgctcggtgtcgatgccggcggcaaggttgcgttcgacctgcgtgacggagaagtcgtcgtgacccgtgccgacgccgagcacgaggaccccgccatcggtgcgttcctgagtctgctggcccgcgacatcgaggcgggccggaacgtccatggtctgcccgaggatctaactcgcgccatgctggagcaagcgggtcacggcgtgaagctggacgaggaaatcgacggcgaagtggaactctga

SEQ ID NO: 332947 - DNA, 1839 bp, Pseudomonas aeruginosa
atgctctttctgttccagcggaaacgacctccggtcgctgccgctccgtcgccagcgcccgccctcgatctcccgaaagggctgctgcggcccgagtcggccgcatcgctgctggccacgccgcgccggcagaagctgctggaatacatctggcagcgcacctccctctcgcgcaagcagttcgtcaccctgtaccgcacgccgctggaacgatatgccgagctggtccagcaatttcccgcttccgaaagccaccatcacgcttacccgggcggcatgctcgaccacggcctggaaatcgtcgcctacagcctgaagctgcgccagtcccatctgctgcccatcggtgccagccccgaggaccaggcggcgcagtccgaggcctggaccgccgccgtcgcctacgcggcactactgcacgacatcggcaagatcgctgtcgatctgcacgtcgaactcgccgacggcaacacctggcatccctggcacgggccgctgctccagccgtaccgcttccgctatcgtgaggatcgtgaataccgcttgcatagtgctgcaacaggtctgctctaccgccaactgctcgatcggcacgtcttggactggctcagtggctacccggcgctatgggccccgctgctctacgtcttggccggacagtacgagcatgccggggtcctgggcgagcttgtcgtgcaggctgatcgcgcttctgtggctcaggagctgggtggtgatccggcccgcgtcatggcagcacccaagcacgcactgcaacgcaagctgctcgacgggctgcgttatctgctcaaggaagagttgaagctgaaccagccggaagcctccgatggctggctcaccgaggatggtttgtggctggtgagcaagacggtttcggacaaactgcgcgcacacctcctgtctcaggggatcgatggcattcctgcgaacaacaccgccgtgttcaacgtgctgcaagaccacggcatgctccagcccacctcggacggcaaagcggtctggcgcgcgaccgtgaccagcacgaccggctggtcccattcgttcaccctgttgcgtctcgctcccgcgctgatctgggagtctggcgagcgaccagcacctttcgcaggcacggtagagatcgacgcgacgcccgcggaaaacgacgccagcatgtcggctcccgcgccaaccgtctcggtgaacccagcgcagggaggtcaagagcctccaatttgggaggacgacagcaccaccatcgtttcaccgcccgcggcccagcccgtgcccgacgtcatggaggacttgctcgcgatggtgggcttgggtgagtcggccggcgttggtcaggatgccgaagagttcctccaccctcccgcgccagcaacagccgcgacgtccattccatcacctgtacccgcgcctacgcctgggtcatcggcaacgaagccatccgcggaacagttcatggtttggctgaagcagggaatcacctcacgacggctcatcatcaatgacgcgaaggcgctcgtgcatacggtgaatgacacggcctacctggtcagcccgggtgtgttccaacgctatgcgcaggagcatcccgaagtggccgcgctcgccaagcaggagaatcaacaggattggcagtgggtgcagaagcgcttcgagaagctgcagctacatcgcaagcaccccaatggcctgaacatttggacctgtgaggtcacgggcccgaggaagtcccgccgactgcatggctacctccttgaagatgggtccttggcattccccgaaataccgcccaacaatccctatcttgctctgactcaggaaggatga

SEQ ID NO: 332948 - DNA, 2652 bp, Pseudomonas aeruginosa; identical to SEQ ID NO: 292063

SEQ ID NO: 332949 - DNA, 1866 bp, Pseudomonas aeruginosa
atgtcagccacttctttcggtgcatcctcggcgaatatcagccggggacgcgttgcccgctatctgcgcacggagtctggtgctgcggtgctgctggtgatcgtcacggtcgtggcgctggcgtgggcgaactcgccgctatccgatgcctatttcgcgttgtggcacctggacgtcgggtttgacttcgggccgctgggcctgcacatggatctgcatcactgggtcaacgacggcctgatggtggtcttcttcttcctgatcggcctggaggtgagtcaggagtttgcccacggatcgctcagggaccgcagccgtgcccgtctcgctctgatcgcgggtgtcgcaggtgtcgtgcttcccgcgctggtgtatgtcctgatcgtggggctggccggaagtgagggcctgcacgggtggggggcggtggtcggcaccgatacggcattcatgctgggcaccctggcgatcgtcggcccgcggctatccggtcagttgcgcgtgttcctgctcaccctgaccgtggtcgatgacttcctcgccgtgtccatcatcggcatcgtctatagcgaggagattcggatcgtcccgttgttgatcgccctcgccagtctcgttgcgttgtggtggctagggcgcacccgccagtggcgggcaatgccgtatgtgctgatcgtgatcgtgctgtggctcgcaaccgtgtactccggcatccatgcctctctcgccgggatggccgcggggctgctgatccccgcctacgcgacgcaacgtcacaaggtcgtcgcggcaaaacaactgttccgcgacttctggcagtctccgagtgccgcatcggcccgcgcggtggactgcgggctgtcccggggtatctcggtgaacgagcgattgcacgagttcctgcggctgccgacggcgctgctgatcgtgccggtgttcgccttggcgaacgccggagtggacgtgcgtggcgggctgctcgccgaggccttcggctcgccagtcacgtggggcgtcatcgcagggctcgtgctcggcaagctcctgggcatcgggctcatcactctcgtcgccgtccgtctcggcctgggccggctgcccgagggcgtcggggtggggagcgtgttcggtggtgcggcactgtccgggatcgggttcaccgtgtcgctgctgatcatcgggctcgcgttcggcacgacctccgacctgggccgccaggcgacggtcggcgtgctcgtgtcgatggtgttcgccacgttgctcgggtggctgatcttcaaggtcgccgcccagcggtggggtgagaagaccgctgacctgccgatggtgcttgagccaccggtcgatccggagatcgatcacatccgcgggccggaggacgcccagctcacactcgtcgagtacgtggacttcgagtgcgcgtactgtgcgcacgccaccggttcgtgggacgatctgcgcgcccacttcggggacgacctgcggtatgtggtgcgccatctgccgcaccacccgcacgggccgattgccgcgcgggcgtccgaggcagcggcgaaccaggggatgttctggccgtggctggacttcgtgttcacccgtcagcatgcgctggagcgcgagcatctgatcggctacgccgccgagcttgggctcgacgtcgaacggttcatcgcggatctcgacagcaccgcggtgatcgagcgtgtcgagcgcgacctcgccagtgcggtcgccagcggtgcgcacgccacgccgacgttcttcgtcgagggtcgtcgtctgcgcggcagctacgacgcccgcactgtcaccgcggcgctcgaagccagtcgccgcggcccccgaactcaggaagtcccgtcctga

SEQ ID NO: 332950 - DNA, 1314 bp, Pseudomonas aeruginosa; identical to SEQ ID NO: 292061

SEQ ID NO: 332951 - DNA, 1308 bp, Pseudomonas aeruginosa; identical to SEQ ID NO: 292060

SEQ ID NO: 332952 - DNA, 831 bp, Pseudomonas aeruginosa; identical to SEQ ID NO: 292059

SEQ ID NO: 332953 - DNA, 276 bp, Pseudomonas aeruginosa
atgccacatagcccggaagaaaagaagcaagccctgacgcgcatccggcgcatcaaaggtcaggtcgcgactcttgagcaagcgctcgatgcaggtgcggaatgccctgcaattcttcagcagcttgcggccgttcgtggggcagtcaacggattgatggcgaccgttctggagagctatctgcgggaagagtttccccgtagtgacatcaggagcgattcgcagaacaagtccattgacgagaccatctctatcgtccgctcctatctgcggtag

SEQ ID NO: 332954 - DNA, 891 bp, Pseudomonas aeruginosa; identical to SEQ ID NO: 292054

SEQ ID NO: 332955 - DNA, 609 bp, Pseudomonas aeruginosa; identical to SEQ ID NO: 292053

SEQ ID NO: 332956 - DNA, 408 bp, Pseudomonas aeruginosa; identical to SEQ ID NO: 292052

SEQ ID NO: 332957 - DNA, 906 bp, Pseudomonas aeruginosa; identical to SEQ ID NO: 292051

SEQ ID NO: 332958 - DNA, 1977 bp, Pseudomonas aeruginosa; identical to SEQ ID NO: 292050

SEQ ID NO: 332959 - DNA, 816 bp, Pseudomonas aeruginosa; identical to SEQ ID NO: 292048

SEQ ID NO: 332960 - DNA, 375 bp, Pseudomonas aeruginosa
atgaacgaccgcacactactcgaactggcggcgcgggcggcggggatgcagatcaatgagcagcgtcaagccgaacgtgattccatagtcgatccagcaaaagccagcctttggattgtcgatgggtgtacggcctggaacccacttatcgaaagccaccacgcgtttattctggcggtgcagcttcgcctggacattacgttctacaacggatttcaggaggtggccgccgagccatcaaatggtgacgggatgaacccttgccaggaggtgttcacagaaaacccgtatgcggcaactcggcgagcaatagtccgcgccgccgccgagatcggcaagtcaatgacccagccgggcgccactagctctccctga

SEQ ID NO: 332961 - DNA, 411 bp, Pseudomonas aeruginosa
atgaccgacatcaacagggcgacggcgacgcgcaatctcgacgcctactactacggcttcgatctaactggatgcgacttggtggattccgtgctggagcaagtcgcgcgtgcaggtaaggcattccatagcaccgatgattggaacgaagaggatctcgacgggttgagtcctgtcgataagatgcaggcggcggcgaatgcctcagcgaaaacaatcatggcgctgattgccgaggtggaacatctgcgcaaggacgcagcacgctaccggtggctgcgggatagctgcactcgccaatgggacgtcatgtgtagagacattgagatagttatcaacggggatggagccgaaggctgtgaagatctggacggcatcatcgacgcagccctagaaggagcaacgcaatga

SEQ ID NO: 332962 - DNA, 378 bp, Pseudomonas aeruginosa
atgaccgacaccaaaaagctgaaggaactggcggagcgggctacgcctgggccgtggtctgcggcctgggaggaagtcgatgacactgcatggccgaatctgtttcctgtaatccaagcgggcaatggcgaagtcgtgatcggtaacgaaggcttttacaccgatctggagcaggacaaggctaacgccactttctgcgccgccgccaacccacaagccatcctcgccctgctggacgaaatcgacaggctcaagtcggagaacgaggagttgcggggagcgttacaggccgtagtggatgatccaacctggcgcagtaacgacaacaccctgtggccgaagatcatcaaggcaatggacaaaggagccaccaaatga

SEQ ID NO: 332963 - DNA, 210 bp, Pseudomonas aeruginosa
atgaagacgtttttgaagatgctcgcatattgcgtgcttgggacatccatcggaattgccgtcagccaatggttcatcttcgtcctagagatgaggcttggcgccgcgctcgggtacatcgttggccttggccctgtgctgcttgtgctttgcattttgggcagcttcctccaatggctgattcataagcacttggagaaaaagcaatga

SEQ ID NO: 332964 - DNA, 315 bp, Pseudomonas aeruginosa
atggagcaagcaatgagagaagagtttgaagcgaacgcgaaagtgcgttggtctactgattacgacgactttggcgatggcctgttctccatacaggctgatggccggtacgagtacgagcacattcaatgggattgggagacttggaaagccagccgcgcggctctgagggtggagttgccggacgacggcatcgaggactgtcaacgtgactggcagaactcctgccgtgacaacttcgataccggctactgctatgcgactgaccggatcactcaagccctccagcaagccggaatagaggtggcgccatga

SEQ ID NO: 332965 - DNA, 147 bp, Pseudomonas aeruginosa
gtggacaacgacaacgaaaccatattggcagtgatagtcatcgttctcttcgtcctgggaatcttccgggtcgtcggggatatgcaggaactctacaggcagaccgagttgaaaggacaggagttgagcagatggagcaagcaatga

SEQ ID NO: 332966 - DNA, 639 bp, Pseudomonas aeruginosa
atgagtgaggtgaagcggtatcacttggaggcgttcatcgacaactactacaaggactatcagttcatcctagcatccgactacgacgccctagccgccgaggccaaggcgctaagggaagaagtcgaaaaagcacagaatgcgctcgctttcactgaacagtggcacggggttcggtatgagcgtttatggcactgggctcatgccgaactggacgaagaacagaagcgacgctacttcaacatcgtggcgaacggcaccgcagaacatagcgagccaccaacctacgcgcagcagctttgccgaatgaaacatcggtacgaatgtgcagagaaggaagtcgcagccctgcgcgcaagggtggtggttgtgccggggcgaaagggtgggcaatccacaattccaggcctgcacagaaaccgtggctggaacgcctgcctcgacgaactggcgcgcatcaacggtatgacggtcagcgaatcagcgctcgacacgctgcgaaaagccgcgtcaggagaggtcaagcacctgaataacggactgtgccctgatgacattgaggggcacgaagcgcgcgatccggactgcccggtatgcagagcgctgatcgagacgggaaaggagaacggcaatggctga

SEQ ID NO: 332967 - DNA, 768 bp, Pseudomonas aeruginosa
atgagccagaacaacgccgctttcctccacatgaccgccgacacgctcggcaagagcctgctgcagggcctgatccaggaaatccgcatcctgccggacgtgtggcagaagctgtccgaagccaagcagaccgatgtgatcgagcgcctggaacagcaggtgcgcaacgccgccaccatcgcggtgcacaccattgccggcagcgatcgcgacacggtctacggcaagctcgaatccttcaccgccaaggacaaggtgaaagcggtcttcaccgtgagccccagcagcccgaaccaggagcaactctttggtgctgtgcaccaggactgtctgctgatcatcggcggcgccgctgagttcctcgacggcatgaaggacgtgaaggcggatccggaccagaacccgctggacctgaacggcggcgaccatgacatggaagaccccggcgcctggggcggtatgcaaccagcagacgacagcgacgtcgtcgatgccgagttccaagaactgccgcaactcaccgtcgagcgcttcgccggccacaccctgggcgagatcgccatcggcgtcgccaccaagaaggacgtgttcgacgcggcctggctgcaatcgcgcttcgctctcaccaccgaggaagccgagcgcgtcgttctccagctgctggaccagggcgtcatcgtgctcgagcaggagaacgaggaatcccgcgaactgaacacctaccgcgtcatcaagaagccgggggatatcgccctcgacctggagtga

SEQ ID NO: 332968 - DNA, 894 bp, Pseudomonas aeruginosa
atgagactgatcagcgcgcgccaggcttggcacgacgccttctacgagagtcggagctcagtgctggcggtggcggccgacaaggccgcgctgggcaagaagggccgggtggccaacgagacgcaccccgaccgcaaggacaccaatgggcgtagcgcccacatgcttgccgccggcctggtgcaggctgccatccgctcgctgccgaagccgctgcagcacttcggccacacgctgtactcgccgctggccaatggtgacgatgtggcgatcgcccacggcctggtgtggatcggctccggcctcggccaactgacccagcgccagggcgagcgggcgtactggatggcgctggcggcgatcaactcgcacaagcgcgccgtcaacggccgcgacacgctgcgcccgggcgaggtctgcctgttcatcgaggagcgcctcggcgtgcggatggatgcgcataactgggcgcgagactgggcggggtgctgggagcgcttggcaaaccacatcgaccggctcgatgctcaggcgctgaagccggtcgccgaggtggtggcgaagcagggcggattgcggagggggccgggctggcgctggctgcaagtcgaccggaatttggtcgctgagcaacgggcagccgcttatgcagcgcagcgtgacagtgcatgcagtcgcctgcgcgagcgcctgctgcgcatgaccgacgcgcaattggctgcatggttcacgcgggtgaaggcctacggcgtggcataccgtgcggaatggggtgacgacgtgctggagcagccccatgtgcatgcgcgctaccacgaccgggtagcggcttactgggagcagttgcaacgcctcgggagggtgaagaaaaaggtcaagaaagcagcagcttga

SEQ ID NO: 332969 - DNA, 192 bp, Pseudomonas aeruginosa
atgaacaacgaagtcgcgaacagccagtcgataatcctcaacgcgctgatcgccgcgctgcggaactcaggcaacttggatgttgagaccttcaaaaagaagatccaagagcaaaccgccccggggacaaatagtggcttccaccaaggcacgatcgacgtggccatacacattgcagagggtggaaagtaa

SEQ ID NO: 332970 - DNA, 2058 bp, Pseudomonas aeruginosa
atgactacgtacgccaccggtaatccgctgggctctaaagacccgcgtgatttgtacgacaacgccgagaacttcgacgcggcgatgaatgaccgtacgaatgttgcgtggagagacaggttcggtgtttcgcggaaaacctggtttggcatcgaggatcaggtaaacacctccctcgcccgatctgggttcgagttgccaccgttgcagtatgtcgatggttccccgttgaccgtagatcgctcgacccagatcatcgagcgggatggcaatctttatagtgtaaaacttccatcttcgttccctgtcgttctttctggcaattggtctgaagatgaagttttacttgttgtgcgtggcgatcagcctcttcgtcaagaaatcactagcacgtctcccagcgaaggatcttcgatcattggtaactcaactgtatctgtatcttcagttgcagatatacaaaatcagactaaaagaacagatcttaagctctctttgtcttcatatcatccgcttggaacgtctggtggtggggactttatttggagcccatctactcctaaatctcagcatgacggaggaaccatctttagcccgactgtcccatgggatggttcgcaggccaccctttcagactacttggatggcgatggagaatcagacccttctgggtctggatgctggctgaggatttttgatgatgtgaagctggagtattttggtggggtggttagtgagaccatagactcatcagcatcgtatttggcagctcttaggtactgcatttcaaataacaaagaacttcatcttcctgatggggttgttcgggtaaattcaacagccgtaattaacggatccaccactctgttttcgtctgtaaaaattagaggtacgttcaagacgagcggtgttgctgccggttatgttgttagccgagttggtagcctgatatatactaacggaaacagcgctcttgacatttcgttcaatgacttcaggaatgaaaatttcgatatccgtggcgtggcatttgtagatacatcattctatccagccggaacccctgtaaatccaaatcctgcaatcgttatcaggaagggtaatcctgacgcaagtagtaacagatacataactggcaacgttcttgaggatgttgctttcgttagctatcaagacgctgtgaaaactattggggttgcaacagggttgccgacctataactacgttggtccaacctcgttgaatcgtgtgtacttctataagtgcggaaccgctatgcaccttcaggattgcacgtacaatcatctattcctgaatgaatgtcttctctttgatctgtcgtcgcaagctatattcctgacaaagacggttagcgggactggcggcaacgtagatgtaacattcagcaattgtgtgttcgaatcgatttgggggattatgaatacggccaatgggttgacgtcttccacgaaacgtaacacggcagttttcaattcttgcaatagagaattctgcggtctgtacggcccgacaggcgggggcggaaacttcgcagggagcccgcttgggtatgtcgggcatactgatgtaatgatcaatggaaattgggagagaggccaggcgtttggtgaaactgccttgccagcgattgactctggcgctgttattttcgcaagcaggtacgtggatgttctcatgaatggcggccaagttggttcgccagaatatgtcaacgtcgttgatgttagcggaacgattccagcatctggcagcctgacaaaaactttcaatgttagcggttcgtttgtgttgaatgctgacgtcgcgtatgacgacgggtttggcgggcaccagaacgttgttgcgtacggcaacccgactggctcaaaggcgcgggacgtgacgggtacgatcatttctgctggtctatctgcgacctacggggacggaccgtcgggtgcggctttcactgttacgttcaataacgggactgcatcgccgatcaatgtgaagatccgggtcacgaacaaagcagggttgatcgttactgtttcatga

SEQ ID NO: 332971 - DNA, 1440 bp, Pseudomonas aeruginosa
atgacgcaatccgatcagaaagcgccgccgtattacccgaaaagccacttgttggccgccagcggtgttgcagcgctcctcagtttggcactactggtgttcccctcgagcgaagtcgaggccaagaggaccacgctcaatctggagcttgaaagcaacaccgatcgcctccttcaggagaaagacgacctcctgccgcaatcggtcaccaattccagcgacgaaggcacgcctttcgctcaggtagaaggcgcctccgacgacaacaccgccgagcaagactcggacaagccgggcgcatctgtagccgatgccgacaccaagcccgtcgatcccgagtggaagaccatcaccgtcgccagtggcgatacgctgtcgaccgtattcaccaaggcaggcctttccacctcggccatgcacgacatgctgaccagcagcaaggatgccaagcgcttcacccatctgaaggtcggccaggaggtcaagctcaagctcgaccccaaaggagagctgcaggcgctgcgagtcaagcagagcgaactcgagaccatcggcctggacaagaccgacaagggctactccttcaaacgcgagaaggcccagatcgacctgcataccgcctatgcccatggccgcatcaccagctcgctgttcgttgccggtcgtaacgccggcctgccctataacctggtcacgtcgctgtcgaacatcttcggctacgacatcgacttcgccctcgatctgcgtgaaggcgacgagttcgacgtgatctacgaacaacacaaggtcaacggcaagcaagtggcgaccggcaatatcctcgccgcccgcttcgtcaaccgtggcaagacctacaccgccgtgcgctataccaacaagcagggcaataccagctactaccgcgccgacggctccagcatgcgcaaggcattcatccgtacgccggtggatttcgcccgtatcagctcgcgcttctccctgggccgccgccacccgatcctgaacaagatccgcgcacacaagggcgtcgactacgcagcccccatcggcacaccgatcaaggccaccggagacggcaagatcctcgaagccggacgcaaggggggctacggcaacgccgtggtgatccagcacggccagcgctatcggaccatctacggacacatgagccgcttcgccaagggtatccgcgccggtaccagcgtgaagcagggccagatcatcggttacgtgggcatgacgggcctggccaccggcccacacctgcactacgaattccagatcaatggccgtcacgtcgatccgctgagtgccaagctgcccatggcggacccgctcggtggcgcagatcgcaagcgcttcatggcgcagacccagccgatgatcgcgcgcatggatcaggagaagaaaaccctcctggccctgaacaagcagcgctga

SEQ ID NO: 332972 - DNA, 1440 bp, Pseudomonas aeruginosa
atgcgcaaacctgctttcggcgtatcggcgctgctgatcgccctgaccctcggcgcctgctccatggcgccgacctacgaacgtcccgccgcgccggtggccgacagctggagcggcgccgccgcccagcgccagggcgcggcgatcgacacgctggattggaagagtttcatcgtcgatgccgaactacgccgcctggtggacgtggccctggataacaaccgctcgctgcgccagaccctcctggatatcgaggcggcccgcgcgcagtatcgaatccagcgcgccgaccgggttccgggcctgaacgccgctgccaccggcaaccgccagcggcagccggctgacctgtccgccggcaatcgctcggaagtggccagcagctaccaggtcgggctggccctgccggagtacgaactggacctcttcggtcgggtcaagagcctgaccgacgcagccctgcaacagtacctggccagcgaggaggcggcgcgtgcggcacggatcgccctggtcgccgaggtcagccaggcctacctgagctacgacggcgccctgcggcgcctggcgctgacccgtcagaccctggtcagccgcgagtattccttcgccctgatcgaccagcgccgcgcggccggtgccgccaccgcgctggactaccaggaagcccttggcctggtggagcaggcgcgcgccgagcaggagcgcaacctgcggcagaaacagcaggcattcaacgcgctggtgttgctgctgggtagcgacgatgccgcgcaggcgattccgcggagtccggggcggcggccgaagctgctgcaggacatcgcacccggcacgccgtccgagctgatcgagcgacgcccggacatccttgccgccgaacatcgtttgcgggcgcgcaacgcggatatcggcgcggcgcgcgcggcgttcttcccacgcatcagcctgaccggcagcttcggcacctccagcgcggaaatgtccggcctgttcgatggcggctcgcgctcctggagcttcctgccgacgctgacgctgccgatcttcgatggcgggcgcaaccgtgccaacctgagcctggccgaggcgcgcaaggattcggcggtggccgcctacgaggggaccatccagaccgctttccgcgaggtcgccgacgccctggcggccagcgataccctgcgtcgcgaagagaaggccctgcgcgccctggcgaacagcagcaacgaagccctgaagctggccaaggcacgctacgagagtggcgtcgacaaccacctgcgctacctcgatgcgcagcgcagcagcttcctcaacgagatcgccttcatcgacggcagcacccagcggcagatcgccctggtcgacctgttccgcgcgctcggcggaggctgggacgagggacggagcctggtggtacatcgaggcggcaggagttga

SEQ ID NO: 332973 - DNA, 3132 bp, Pseudomonas aeruginosa
atgtccgaattcttcatcaagcggccgaacttcgcctgggtggtggccctgttcatctccctggccggcctgctggtcatttccaaattgccggtagcgcagtaccccaatgtcgcgccgccacagatcaccatcaccgccacctatcccggcgcctcggcgaaggtgctggtggactccgtcaccagtgtgctcgaggagtcgctgaacggcgccaagggcctgctctacttcgagtcgaccaacaactccaacggcaccgccgagatcgtcgtcaccttcgagccgggcaccgatccggacctggcccaggtggacgtgcagaaccgcctgaagaaagccgaggcgcgcatgccgcaggcggtgctgacccagggcctgcaggtcgagcagaccagcgccggtttcctgctgatctatgcgctcagctacaaggaaggcgctcagcgcagcgacaccaccgccctcggcgactacgccgcgcgcaatatcaacaacgagctgcggcgcctgccgggcgtcggcaagctgcaattcttctcttccgaggcggccatgcgggtctggatcgatccgcagaagctggtgggcttcggcctctccatcgacgacgtgagcaatgccatccgcgggcagaacgtgcaggtgccggccggcgccttcggcagcgcaccgggcagttccgcgcaggagctgacggcgaccctggcggtgaagggcaccctggacgatccgcaggagttcggccaggtagtgctgcgcgccaacgaggacggctcgctggtccggctcgccgatgtcgcgcgcctggaactcggcaaggagagctacaacatttcctcgcgactgaatggcacgcccaccgtgggcggggctatccagctgtcgcccggggccaacgcgatccagaccgctaccttggtgaaacagcgtctcgccgaactgtcggcgttcttccccgaggacatgcagtacagcgtgccctacgacacctcgcgcttcgtcgacgtggccatcgagaaggtgatccacaccctgatcgaagcgatggtcctggtgttcctggtgatgttcctgttcctgcagaacgtccgctacaccctgatcccgtccatcgtggtgccggtgtgcctgctgggtacactgatggtgatgtacctgctggggttctcggtgaacatgatgaccatgttcggcatggtcctggcgatcggcatcctggtggacgacgccatcgtggtggtggagaacgtcgagcggatcatggcggaggaggggatttccccggccgaggccacggtcaaggcgatgaagcaggtatccggcgccatcgtcggcatcaccctggtgctctcggcggtgttcctgccgctggctttcatggccggttcggtgggggtgatctaccagcagttctcggtgtcgctggcggtctcgatcctgttctccggcttcctcgccctgaccttcaccccggcgctgtgcgccacgctgctcaagcccattcccgaagggcaccacgagaagcgcggcttcttcggcgccttcaaccgtggcttcgcccgcgtcaccgagcgctattcgctgctcaactcgaagctggtggcgcgcgccggacgcttcatgctggtgtacgccggcctggtggccatgctcggctacttctacctgcgcctgccggaagccttcgtgccggcggaagacctcggctacatggtggtcgacgtgcaactgccgcctggcgcttcgcgcgtgcgcaccgatgccaccggcgaggaactcgagcgcttcctcaagtcccgcgaggcggtggcttcggtgttcctgatctcgggcttcagcttctccggccagggcgacaatgccgcgctggccttcccgaccttcaaggactggtccgagcgaggcgccgagcagtcggccgccgccgagatcgccgcgctgaacgagcatttcgcgctgcccgacgatggcacggtcatggccgtgtcgccgccaccgatcaacggtctgggtaattccggcggcttcgcattgcgcctgatggaccgtagcggggtcggccgcgaagcgctgctgcaggctcgcgatactcttcttggcgagatccagaccaacccgaaattcctttacgcgatgatggaaggactggccgaagcgccgcaactgcgcctgttgatcgaccgggagaaggcccgcgccctgggggtgagcttcgagaccatcagcggcacgctgtccgccgccttcggctcggaggtgatcaacgacttcaccaatgcggggcgccaacagcgggtggtgatccaggccgaacagggcaaccggatgaccccggaaagcgtgctcgagctatacgtgcctaacgctgctggcaacctggtaccgctcagcgccttcgtcagcgtgaaatgggaagagggaccggtgcaattggtgcgctataacggctacccgtcgatccgcatcgtcggtgacgccgcgcccggcttcagtaccggcgaagccatggcggaaatggagcgcctggccgcgcagctgccggccggcatcggctacgagtggaccggcctgtcctatcaggagaaggtctccgccgggcaggccaccagcctgttcgccctcgccatcctggtggtgttcctgttgctggtggcgctctacgagagctggtcgatcccgctgtcggtgatgctgatcgtgccgatcggcgccatcggcgcggtgctcgcggtgatggtcagcggtatgtccaacgacgtgtatttcaaggtcggcctgatcaccatcatcggtctttcggcgaagaacgcgattctcatcgtcgagttcgccaaggaactctgggagcaggggcatagcctgcgcgacgccgccatcgaggccgcgcgcctgcgcttccgaccgatcatcatgacttccatggcgttcatcctcggcgtggtacccctggccctggccagcggcgccggcgcggcgagccagcgcgccatcggcaccggagtgatcggcgggatgctcagcgccaccttcctcggcgtgctgttcgtacccatctgtttcgtctggctgctgtcgctgctgcgcagcaagccggcacccatcgaacaggccgcttcggccggggagtga

SEQ ID NO: 332974 - DNA, 1065 bp, Pseudomonas aeruginosa
atggtgttgccggtggaggtcctgacggtgcaggccgagcccctggcgctgagttcggaactgcctgggcggatcgaaccggtgcgggtcgccgaggtgcgcgcgcgggtggccggcatcgtcgtgcagaagcgcttcgaggagggcgccgacgtcaaggctggcgacctgctgttccagatcgatccggcaccgctgaaggctgcggtgtcgcgcgccgagggcgagctggcgcggaaccgcgcggtgctgttcgaggcgcaggcgcgggtgcgtcgctacgagccgctggtgaagatccaggcggtcagccagcaggacttcgataccgccaccgccgacctgcgcagcgccgaggcggcgacccgctcggcccaggccgacctggagaccgcgcgcctgaacctcggctacgcctcggtcactgcgccgatctccgggcgcatcggccgcgcgctggtgaccgagggcgcgctggtcgggcagggcgaggcgacgctgatggcgcgtatccagcagctcgatccgatctatgcggatttcacccagaccgcggccgaggccctgcgcctgcgcgacgccctgaagaaaggcaccttggccgccggcgacagccaggcgctgaccctgcgcgtcgaagggacgccctacgagcgccagggcgcgttgcagttcgccgacgtggcggtggatcgcggcaccggccagatcgccctgcgcggcaagttcgccaaccccgacggggtcctgctgccgggcatgtacgtgcgcgtacgtacgccccagggcatcgacaaccaggcgatcctggtgccgcaacgggccgtgcgccgctccagcgacggcagcgcccaggtgatggtggtgggcgccgacgagcgcgccgaggcgcgcagcgtcggtaccggcgtcatgcagggttcgcgctggcagatcaccgagggcctggagccgggtgaccgggtcatagtcggcggcctggctgcggtgcagccgggggtgaagatcgtgccgaagccggatggtgcccaggcgcaagcccagtcatctgcgccgcaacagtaa

SEQ ID NO: 332975 - DNA, 4248 bp, Pseudomonas aeruginosa
gtgtcgaccccctcgctaaccccgtcgccgcctcccgccggcgacccactgaccgtacccgaccgaccggcagccaaggctggcctgctgttgctggtcctgttgatgctcggcctgctgctctggcagatgagccaggagctgcgccagcaggaaggcttcgaacacgagcgagccgcggcccagctcgatcgtctcaacgaccgcctgtccctgaccctcgaactcaaggcgcgcaccgccctcgccctgctcccgggcgtgccccccagcgagcgtggcgagatccagaacaggctgttgccacgcatcagcgatgcgctgccacaggtgcgccagttgcaatgggtggacagcgccccgcagacgggcagcccgtcgccggaaacgacgctgcccgagcagttgcgccagcacgccggctccggcctctaccactattgcctcgacccgcgcgacggcgaatccctctacctgaccctgcgcgaacccggcagccgccgcgacagtggcttctggctgttgcacctggccagcgacagcctcgcccagtggagtcccgacctccccaccggcaacctgctctggcgcctggaagaccaatacgccgggcgggtgctctggcataccccagggagcacggcgctgctcgacgacatgcagaccctcggcgtggaaccgctgcgcaacagcgactggcagcttcgcgggctctacgacagcacgcgagtgcggctcggcctgctgccgggaatcggcggcgagctggcgatcttcctcctgctggtcggcgtcaccgtgtacatgctgctgcgcctgcaccgcgagcagcaaggcctgcgcgccatgaccctggcctcgcagcgcagcctgcgccaggcggccacggcactggcggcgatcgacgagcgggtgctggtgacccgcgccgacggccgcctcagctacctcaatccccaggccgaacgcctcttcggcatcagttcggcccaggcccgccagcatcacctgctgggcctgctgccggacctcgagccaggctggctgacggacgccggtggcgacggcgagacccgtagcgagttgctgccgctgcgggtacgcggcgagccgcggacgttcaccctcagccgccatccgctggccagctatccggcgctcgccgaccaggcctggaccctccgcgagcagatcctccagggcgggcaggtctgggtgttgcgcgacgtcaccgaggaacagcacgccctcggcgtcctggaggaaacccggcggcgctaccaggacatcttcgaaggggtcggcgtggccctctgcgtgctcgacctctccgccctgcgccaggctctggtggaacaaggcctggacagctgcgccgcactgcgcgcctggctcgccggcgaacccgggcggcagcaggcgctgctggagcggatccgcatcaccgagatcaacgatgtcagtcgccgcctgctgcagatcgagtccaccgaacaggcctggcagcgcttgctcgaccacggcccgctacaaccggacagcctgcgcctgcaggtgatcgaggcgctcatcgaacgccggccggtactcgaactggaagccacgctgcgctgcggcaagagcacgccgcggcacctgtggttgcaactgcgcctgccggaaaaccccggcgaatggcatgcggtgaccctcagcctgtccgacgtcaccagtcgcaaggaagtcgaactgtcgctgatcgagcgcgagaagttctggtcggacgcggtccaggcggtgcccgataccctctacatccacgacctgcacgcgcgccgggtgatcttcagcaaccatcacctgggccagcaactgggctacaaccaggaagaactggcgcggatgggcgagaacttctgggaaaccctgctgcaccccgacgaccaggaatactactggcgcatccgcaacctgcagcacgtggtcggcgacggcctgctgctcgacagccagctgcgctggcgccaccgcgacggccgctggcactggttcgacatccgcgagcaggccttcagccgcgaccgcagcggtcgcgtggcgcgcctgatcggcgtggccaaggacatcaccttcaccgtcgaggcgaacaacgcgctgcgcgagaacggccgacgctaccgcatgctggcggaaaacatcagcgacgtgatcttctccaccgacgccgaactcaacgccagctacgtcagcccctcggtacagcacgtgttcggctacagcccggaatgggcgctgctcaacggcctccatcagaccgccaccaacccgcgccagctcggccgcctgaacggcctgctgcgccgcgtgcggcacgccatcggcgaccgccagaagctcgccgagctgcgggaaaaccctggccagcatctgttcgccctcgactgcctgcgcgccgacggacgcaagattcccatcgaactgcggatcgtcctgatgtgggacgagcacgaccgcttcgaaggcctgctcggcatcgcccgcgacatcagccagcagcgccgcgccgaacgcgagctgcggatggcggcgacggtattcgaacactccacggcggcgatcatggtcaccgacccggccggctacatcgtccaggtcaacgattccttctcgcgcctgaccggctacagcccggccgacgtgctcgaccagcagccgcgcctgctcaccgccgaccgccaggaagccaaccagctcaagcacgtgctcgccagcctgcagcacagcggcagctgggaaggcgagatcctgcagaagcgcaagaccggcgaactctatccgtcctgggtcggcatcaccgcggtgcgcgacgaggaaggcgacctggtcagcttcgtctgcttcttcagcgacatcagcgagcgcaaggccagcgagcggcgcatccaccgcctggcctactacgacgccctcacccacctgcccaaccgcacgctgttccaggaccgtctgcataccgccctgcaacaggccgagcgcaacggccaatgggtggtgctgatgttcctcgacctcgaccgcttcaagccgatcaacgactccctcggccacgccgccggcgaccgcatgctgcaggaagtggcgacccgcctgagcgcctgcgtcagccaggacgataccgtggcgcgcatgggcggcgacgaattcaccctgctgctgccttcccagggcgaccgcgagatcgccctgaaacgggcgatccaggtcgccgagctgatcctcggccgtctggcccggccgttcaccctggaaggccgtgaattcttcgtcaccgccagcatcggtgtggccttgtcgccccaggacggcgccgaactgagcctgctgatgaagaacgccgacacggcgatgtaccacgccaaggagatgggcaagaacaacttccagttctaccaggccgagatgaacgcccgcgccctggagcgcctggaactggaaagcgacctgcgccgcgccctggaactgggcgagttcgtcctccactaccagccgcagttcaccggcgacggccgccgcctgaccggcgccgaggccctgctgcgctggcagcatccgcgccgcggactggttccgccgagcgagttcattccggtgctggaggagatcggcctggtcgcccaggtcggtgactggctgctggcggaagcctgcaagcagttgcgcagctggcacaaggccaaggtgcgggtgccaaaggtctcggtgaacctctcggcacggcagttcgccgatggccagttgggcgagcggatcgccgcgatcctctacgagacaggcatcccgccggcctgcctggagctggagctgaccgaaagcatcctgatgagtgacgtcgccgaggccatgcagatcctctccgggctcaagcgcctcggtctggccatcgcggtggacgacttcggcaccggctactcctcgctgaactacctcaagcagttccccatcgacgtgctgaagatcgaccgcagcttcgtcgacggcctgccccacggcgaacaggacgcacagatcgcccgggcgatcattgccatggcccacagcctgaacctgatggtgatcgccgagggcgtggagagccaggcccagctggacttccttcgcgagcacggctgcgacgaggtgcaaggctacctgttcggccggccgatgcccgccgagcagttcggcatgctctacgccagcgacgtgctgttcatgttcaacgagggctga

SEQ ID NO: 332976 - DNA, 597 bp, Pseudomonas aeruginosa
atgagcaaacctactgcgaaagcccccggccgccacggcggccagggacagctgcggatcatcggtggcgaatggcgcagccggcgtttagtctttcccgacgggcccggcctgcgaccgaccccggaccgggtccgcgagaccctgttcaactggctggcaccctatgtcgaaggcgcacgggtgctcgatcccttcgccggcagcggcgcgctgttcctcgaggcgttgtcgcgcggcgcccgcgaagggctggccctggataccaacggcgaagcggtggcggccctgcgcaaccacctcgacgcgctcaagtgcggcaccgcccaactggtcctcggcgatgccgtgcgctacctgggaaaccaggctccgagcgccttcgacctggtgttcctcgacccgccgttccatcagaacctgctgcaggacgcctgccgcctgctcgaaacccgcggctggctgaaccccgacgcctggatctataccgagagcgagagcgtcccctcgtccctcggcctgcccggaaactggcggctgcaccgggaaaagaaagccggcaacgtacattacgcgctctggcagcggggagcctga

SEQ ID NO: 332977 - DNA, 1911 bp, Pseudomonas aeruginosa
atgagcgacgacacgaaaagcccccacgaagaaacccacggcctgaaccgccgcggcttcctcggcgcctcggcgctgaccggagccgccgccctggttggcgccagcgccctgggcagcgcggtggtcggccgcgaggcccgggccgcgggcaagggcgagcgcagcaaggccgaggtcgcccccggcgaactggatgagtactacgggttctggagcggcggacattccggcgaagtacgcgtgctcggcgtgccgtcgatgcgcgagctgatgcgcataccggtgttcaacgtcgactcggccaccggctggggcctgaccaacgagagcaagcgggtcctcggcgacagcgcgcgcttcctcaacggcgactgccaccatccgcacatctcgatgaccgacggcaagtacgacggcaagtacctgttcatcaacgacaaggccaacagccgggtcgcgcgcatccgcctggacgtcatgaaatgcgaccgcatcgtcaccattcccaacgtccaggcgatccacggcctgcgcctgcaaaaggtgccgcatacccgctacgtgttctgcaacgccgagttcatcatcccccatcccaacgacggctcgaccttcgacctgtccggcgacaacgccttcaccctgtacaacgccatcgacgccgagaccatggaagtggcctggcaggtgatcgtcgacggcaacctcgacaacaccgacatggactacagcggcaggttcgccgcctccacctgctacaactcggagaaggccgtcgacctcggcggcatgatgcgcaacgagcgcgactgggtggtggtgttcgacatcccgcgcatcgaggccgagatcaaggcgaagcgcttcgtcaccctcggcgactcgaaggtgccggtggtcgacggccggcgcaaggacggcaaggacagcccggtgacccgctacatcccggtaccgaagaatccccacgggctgaacacctcgccggacggcaagtacttcatcgccaacggcaagctctcgccgacctgcaccatgatcgccatcgagcgcctcggcgacctgttcgccggcaagctggccgacccgcgcgacgtggtggtgggcgagccggaactgggcctcggcccgctgcacaccaccttcgatggccgaggcaacgcctataccacgctgttcatcgacagccagttggtgaagtggaacctggccgacgcggtgcgcgcctacaagggcgagaaggtcgactacatccgccagaaactcgacgtgcagtaccagccggggcacaaccacgccaccctgtgcgagaccagcgaagccgacggcaagtggatcgtggtgctcagcaagttctccaaggaccgcttcctgcccaccggtccgctgcacccggagaacgaccagttgatcgacatttccggcgaggaaatgaagctggtccacgacggcccgaccttcgccgaaccgcacgattgcatcctcgcccgccgcgaccagatcaagacccgcaagatctgggaccgcaaggacccgttcttcgccgagacggtcaagcgcgcggaaaaggacggcatcgacctgatgaaggacaacaaggtcatccgcgagggcaacaaggtccgcgtctacatggtctcgatggcgccctccttcggcctcaccgagttcaaggtgaagcagggcgacgaagtcaccgtgaccatcaccaacctcgacgagatcgaggacgtgacccacggcttcgtcatggtcaaccacggcgtctgcatggagatcagcccgcaacagacctcgtcgatcaccttcgtcgccgataagcccggggtgcactggtactactgcagctggttctgccacgccctgcacatggaaatgtgcgggcggatgctggtggaaaaggcttga

SEQ ID NO: 332978 - DNA, 981 bp, Pseudomonas aeruginosa
atgaagcaaatgaccttcgccgacgccgagtacgccggcaagcgcaagcagacccgcaaagagttgttcctgatcgagatggatcaggtggtgccgtggaagggtttgattgccctgatcgagccgcactaccccaaggatgaaggtggtcgtccggcgtatcagctgatggcgatgctgcgcgtacatttgatgcagaactggttcggctacagcgatccagcgatggaggaggcgctgtacgagaccacaatcttgcgccagtttgccgggctgaacctagagcgtattcccgacgaaaccaccatcctcaatttccgtcgcctgctggagaagcacgagttggcggccgggattctggctgtgatcaatggttacctgggcgatcggggcctgtcgctgcgccagggcaccatcgtcgatgccacgctgatccatgcgccgagctcgaccaagaacaaggacggtaagcgtgacccgcaaatgcaccagaccaagaagggcaatcagtattacttcggcatgaaggcccacatcggcgcggatgccgagtctggcctggtgtacagcgtggtggggacggcagccaacgttgctgacgttacccaggtcgacaaactgctgcatggaaaggaaaacatggtcggcgccgacgcgggttacaccggcgtagagaaacgcccggaacatgaaggccgggaggtgatctggcagattgcggcccgccgcagtatgtacaagaagctgagtaagcgcagtgcgctgtacaaagccaagcgcaagatcgagaaatccaaggcccaggtgcgcgccaaagtcgagcacccgttccgggtgatcaagcgccaattcggctacgtgaagacacgcttccgtggcctggcgaagaacaccgcgcagttggtgacactgttcgcgctgtcgaacctgtggatggcgcgccgacatttgctgacgaatgcaggagaggtgcgtctgtaa

SEQ ID NO: 332979 - DNA, 165 bp, Pseudomonas aeruginosa
atgcagattgcattctttccgatccagcccgagccggaccacatgctaactgggcgtttgttttggtatgaagcgttggctataaacgcctattttcagaagcacgacaacactctgccacctcttaacgtgatcaaaagtccggacccggttgtgtttgtttag

SEQ ID NO: 332980 - DNA, 351 bp, Pseudomonas aeruginosa
atgacctggatagtgacaaagtacctgatcactgcattgatggtggtcttggtatctgaagcggccaagcatggcgaccgtattggcggtatcgtcgccgccctgcccatagttacggcgctgaccttgatctggctgcacatcgagcatcagccgggacagaagatcgccaaccatgcctggtacaccttctggtatgtgatccccacgctaccggcgctgttgatgttcccgctcctaatgtctcgcttcggcttctggctcgcactggcgggttacgcatttgcaacgtgcctatgtttcgtcctgtttgctctagcaatgcgccgcttcggcatcgaattgctgtga

SEQ ID NO: 332981 - DNA, 288 bp, Pseudomonas aeruginosa
atgagcgatcaagaacacgcccatcagcaccaaagtcatagcgatatcatcaaaaggttgaagcgtgccgaaggccacctgcgcagcattgtcggcatgatcgagaccggtcgcccctgcgtggaccttgcccagcagctacacgcagtagaaaaagcgatctgtcaggccaagcgcactttgatccaggaccacatcgatcactgtctggagcatgcgctcgcggccgctgaacagggggacatcaccgcgctgagcaacttcaaacagatcaccaagtacctctga

SEQ ID NO: 332982 - DNA, 663 bp, Pseudomonas aeruginosa
atgttcaataccaagcttccaacccagtgtgaattgccaaccagccgccagctgctgcgctccactgtgatcgccgtgggtgttgccgcagcgttactggtcaccgtagtgatgccttctgaatatgccatcgaccccacgggcgtcggccgtgtacttggcctgactcagatgggtgaaatgaaagaaattctcgccgaagaagcggctgcggatgcagctgtcccgccagcagcggccccggtcgtacaagcccccgcgtctagtcaggtggcgcctcaggagcaagttgcggcagcaactgtggctgagccggttgcagagccgcagcccgccctgaagtccgatgaagtgactgtcacgctgaagccgggcgaggccagtgaaattaagctggagatgctggacaaggccacggtcagctacgagtgggcaaccgatggcgttccggtcaatcacgacacccatggcgagccctataacggcccgaagggctattaccacagctacagcaaggccaagcaggtcaaaggtgataaaggcgaattcactgccattttcgacggcacccacggctggttctggcgaaaccgtagcaaccgtgacgtgacgattacgctcaagaccaagggtgagtacctgagcgtcaaacgcgttatctaa

SEQ ID NO: 332983 - DNA, 1308 bp, Pseudomonas aeruginosa
gtgccgtttgtccggctgtcaactatccacctgggaattccggcgcggcgaaagccggtgctaaaccttgtctcttcgagtccgcccctgtccgacaagaccaataaagcgtggagaccgcatgaccgacgcccgccccttccgccctcgccccacctcgttgtcagccgccctgctgctgggcgcctggatcgcccagccggccacggccgcctatgtcgaaaccggtcggcccggcgatccggccagttggcgctccgccgaataccagcaggactggggcctggaacggatgcgggccgaccaggcctatgccgccggcatcgacggccagggcgtgaagatcggcgagatggactccggtttcgacccgagccatccggatacccccgcctcgcgctaccagccggtgacggccagcggcacctatgtcgacggcacgccgttcagcgtcagcggcgcgatgaacggcaacaacgactcccacggcacccacgtcggcggcaccctcggtgcctcgcgcgacggcgtcggcatgcacggggtggcctacgcggcacaggtgtacgtcgccaacaccaaccagaacgacagcttcctgttcggcccgacgcccgacccgaactatttcaaggccgcctaccaggcgctggccgacgccggggtgcgggcgatcaacaacagttggggcagccagcccaaggacgtcagctacgagaccctcgacggcctgcacgccgcctatgcccagcactacgggcgctccacctggctggacgccgccgccggcgtctcccgccagggcgtgatcaacgtcttcagcgccggcaacagcggctacgccaacgccagcgtgcgctccgccctgccctacttccagccggacctggaaggccactggctggccgtgtccggcctcgaccagcagaacggccagcgctacaaccgctgcggcatcgccaagtactggtgcatcaccacgcccggccgcctgatcaacagcaccatgcccggcggcggctatgccaacaagtccggtacctcgatggccgcgccccacgccaccggcgcgctggccctggtcatgcagcgctatccgtacctgaacaacgagcaggcgctgcaggttctgctgaccaccgccacccagctcgacggcacgccgaccggcgcccccaccgacaccgtcggctggggcgtgccggatctcggtcgggcgatgcatgggcctggacaattgctcggccgcttcgaggccaacctcccggccggcctgcgcgacgaatggagcaacccgatttccgatag

SEQ ID NO: 332984 - DNA, 240 bp, Pseudomonas aeruginosa
atggcgccgcacatcaacgtctcgctgttcgcccgcggcatcaacatccacttgcagacccggctgtacttcgatgacgaggccgaggccaacgccgcctgtccggtgctcaacctgatcgagcaggcgccgcgtcgcgacaccctgctcgcgcggcgctgcgaagtggacggacagctcgcctaccgtttcgacatccgcatccagggcgacaacgagacggtgttcttcgacttctag

SEQ ID NO: 332985 - DNA, 2436 bp, Pseudomonas aeruginosa
atgagcgcccccctgccctgctaccactgcggcttgccggtccccgccggcagccgcttcgaggcccgcgtgctcggcgagacgcgggccatgtgctgtccgggctgccaggcggtggccgaggccatcgtcgccggcggcctggaaagctactaccggcaccgcagcgaaaacgccgccaatcccgaggcattgcccaaggcgctcagcgaggagttgcagctctacgaccgcccggacgtacagggcggcttcgtccgccatgagggcgagctggcggaaaccagcctgatgatcgaaggcatcagttgcgccgcctgcggctggctgatcgagaagcacctgcgccagttgcctggcgtggccgaggcgcggctcaacctgtccaaccatcgcctgcacgtgcgctggcaggacagccagctgccgctcagccagttgctcggcgaactgcgccagatcggctatgccggccatccctaccaacccgaccgcgccaccgagcgcctggccatggagaaccgccgcgccctgcgccagctcggtgtcgccgggctgctgtggatccaggtgatgatggcggtgatggcgacctggccggaattcaacctcgacctttccgccggcatggaccgcatcctgcgctgggtcagcctgatcctcaccacgccgatcgtcttctactgctgcggccagttcttccgtggcgccctgcgcgacctgcgcacccgccacctgaccatggacgtctcggtgtcgctggcgatcggcggcgcctacgtcgccggcatctggtcgacgatcaccggccagggcgagctgtatttcgacgcggtcggcatgttcgccctgttcctcctcgccggccgctacctcgaacgccgggcgcgggagcgcaccgccgcctccaccgcgcaactggtcaacctgctgccggcgtcctgcctgcgcctggacgccgccaaccagggcgagcgcatcctgctcagcgaactgcgcgtcggcgaccgcgtactggtaccgccaggcgccgtgctgccggccgacggagtgatcctcgacggccagtccagcgtcgacgagtcgctgctcaccggcgagtacctgccccatccacgccaggccggcgacgccgtcaccggcggtaccctgaacgtcgaggggccgctgaccgtcgaggtcggcgcccttggcgacgacagccgcctgtcggccattgtccgcctgctggaacgcgcccaggcggacaagccgcgcctggcggaactggccgacaaggtggcgcagtggttcctgctcatcgtcctgctggtcgccgcagcggtcggcgcgctatggtggcaggtcgaccaccagcgcgccttctgggtggtgctgtcgctgctggtcgccacctgcccctgcgccctatcgctggccacgcccaccgcgctcaccgcggccaccggcagcctgcacaagctcggcctgctgatcacgcgcgggcacgtgctggaagggctgaaccacatcgacacggtaatcttcgacaagaccggcaccctcaccgaaggccgcctgacgctcaagcaggtgctacccctgcgcgatctcgacgcggatcgctgcctggccctcgccgccgccctcgagaaccgttccgaacaccccatcgcccgcgccttcggccgtgcgccggaggccgccgacagcgtcgcaagccatccgggactgggtctcgaaggcctggtggaaggccgccgcctgcgcatcggccaggccgccttcgtcagcaacctgggcggcagcgccacgcccgcgatgcccggcgactccggacagtggctgctgctcggcgacgagcagggaccgctggcctggttcggtctcgacgaccgcctgcgcagcgacgcccccgccctgctcgccgcctgcaaggcgcgcggctggcgcaccctcctgctatccggcgacgcctcgccgatggtcgccagcgtcgctgccgaactgggcatcgacgaagcccgcggcggcctgaccccggacgacaagctggccatgctcgaacgcctgcacggcgagggccgccgggtgctgatgctcggcgacggagtcaacgacgtaccggtgctcgccggtgccgacatcagcgtcgccatgggcagcgccaccgacctggccaagaccagcgccgacgcggtgctcctgtccaaccgcctggacagcctggtgcaggctttccggctggcgcgccgcacccgccatatcatcatcgagaacctggcctgggccagcctgtacaatggcctggtcctgcccttcgccgcgctcggctggatcaccccgggctgggcggcgatcggcatgtcggtcagttcgctgctggtggtggtcaacgccctgcggctgacccgaatcccttcgccgaggtccgtatggccgcgctctacatcctga

SEQ ID NO: 332986 - DNA, 477 bp, Pseudomonas aeruginosa; identical to SEQ ID NO: 318939

SEQ ID NO: 332987 - DNA, 1482 bp, Pseudomonas aeruginosa
atgaataggtggggcctgggcgtgctgtggctggtcgccgctcttccggtggcggccagcgtcaacccggcgctgagtccggacgtaccgagcatggcccgcgagcagggcaggtcggtactgctcagcgagcaggtgatcgacctcagcctgagcgacgcggtctatcttggcctgcgcaacaaccgtggaatccgtagcgcctacctgcaacggatcgcgcagaagttcgacctgcgggtcgccgccgacgccttcaacccgaagctggtggtgcgcggcgactatcgcgccaaccgcgccaccgaagaccgcacgaggaccagcaatgtctcgcccaccgcgaccctgcttggcgaatatggcactcgcttcagcctggcctgggtgaagcagttccgcaccgccgacgaggccgggcgctaccgcagcgatggcctcgacctgaccgtcgtccagccgttgctgcgcgatgcgggctgggacgtcaccaccgcgccgctgcgcctggcacgtctctccgaagacgccaatcgcctgcaactcaaggccagcgtgtcgcagaccatcagccaggtcatcggtgcctaccgggagctgctgcgcgcccaggagcaggcgcgcatctctcgcgaagccctggcgcggacccaggagctgctcgaggtcaaccgggcgatgatccgcgccgggcgaatggccgaattcgagatcgtgcagaccgaggccgacgtcgccagccaggagctcaacgtcgaggagtccgccaaccaggtcgacagcgcacgcctggccctgctgcaactgctggcgctggacctgtcgacgcagatccgcgccagcgatgcgctggccgccacgccgatcgaggttgaccgccagcaggcgatcaggaccgccctgcagcagcaaccggaatacctgcaacgcctgatcggcagtcgccaggccgacctcaacctggtgctggcgaagaaccagcgcctgtgggatgtctcgctggtgggcggcgccagccagatccgcgaccgctacagcgagggcggtggcgacaattcacgcagctgggacagctacgccggggtacaggtggaaattcccatcggcgacctcagccgccggcaggccgaggtgcgcgcccaggtcgacgtggagaaccagaagatcctgatcgaggatgcccggcagaccctggagcagaacgtcatcgatgcggtgcgcgacctcggcacgcgctggcgccagtaccagatcgcccagcgcgccaccgccttgtcgcggcgcaagctggagatcgagcgggaaaagctgcgcgtcgggcgttcgagcaacttccaggtgctgagcttcgagaccgacctgcgcaacgtcgagaacacccaattgaatgccctgatctcgtttctcaatgcgcagacgcagctcgacctgatcgtcggcatgaccctggatagctgggagatttcgctcaatgaccactga

SEQ ID NO: 332988 - DNA, 1944 bp, Pseudomonas aeruginosa
atggcgctctctgatctgaccgtccggcaggcgaagaccaccggaaaacgctacaccctctccgacaacgactgcctgggcctgatggtctcagccgcaggcggcaagtcatggcaattccgctactactggctgggcaagcaaaagcgcctgtgcctgggcggctatcctgctctcagcctgcgcgaggcccggatcgagcgagacaaggcccaggccctgctcgccagggggatcgatcctcaggtcgagcgcgaccagaaacggcacgcggccaagctggcgggcgaatacaccttcaagaccgtcttcgatgcctgggtcgagcatcgccgcaaggaactcaaggaaggccgtcaaagcacgctgtcgcagatcctgcgcatcttcaacaaggacgtgttgcccaccctgggaagaatgtcgatctacgacattcgccgcccccaactcctgggcgtcttggcggcgatcgagaaacgcaaggcgttcaccaccgccgagaaggtccgcacctggttcaaccagttgttccgctatgccctggtcattgccgaggggttggaagtcaacccggccgccgacctggacgtggtggcagagcccaagccccccgtagcccacaatccctacctgcacctgcccgagatgcccgagttcctccagaagctccggctctacaacccccgtggctggcagacccagcttggcgtccggctgctgttcctgaccggggtgcgcaccggcgaactgcgattggccgaacccgaacagttcgacctcgacaggggcttgtggatcatcccaccgcagatcgtcaagcagctccaggatgaaatgcgcaaggcagggaagcggccgcaggatgtgcccccctatatcgtgccgctatccctgcaggccatcgagatcgtgcgctatctcctgggggtgatgcggccggcgcagaagtacttgctgtcacaccgcagcgaactcaagaagcgcatcagcgagaacaccctcaacaaggccgtgcagctcatgggctatgaggggcgcctgaccggccacggcatccgcggcactatctcgacggcgctcaacgagattggctacccgaagatttgggtggacgcgcagctttcccattccgaccccaacaaggtgagttcgtcctacaaccacgccaagtacgttgagccgcgccgtcggatgatgcaggactgggccgatcggctcgacctgctcgaacagggcgaagtggaagccgcgagcgcgcatctgaccatccgtatcgacggggtgccggcgatggcagaagtggaggaagcggtggatgcgaccctcgcgatggccgagcccactcctcccggcgtcccgcccgtcgtggccacgcctattgtcgtaaccccgagcaacggcggcatcacgttccagcggctgtctcaggtaccgccgcctccgacgcatgccccagagccggaagtgtccgcgatccagcgcgagcgcgaggaaatgctgaccatctacgagtctccaagcagcttgccggtcccgctgttcggcaagctggccggaaagtccaaggaccagatcaaccgcgaactgaaagcgggcaagttgctgtccatcagtttgggcaatcgggggcagcgtgttcccgattggcaactggtgccgctcaagcacaagctggcccaggtgctcatgaaccagtgcccgcacgcggattcgtgggatctgtaccgcatgctgacccagccgcaccctgacctgggggaccgcgcggccattgatgcggtcacgccgaccaacgtgccggcgatcatccaggtcatcatgggcgactaccagcactatgcggatatgcccgaggccattgccccgtaccccatccccgaggatgtgcggcaaagcgttcgtcggctggtggatagcgcagtagttctagacggagcatag

SEQ ID NO: 332989 - DNA, 969 bp, Pseudomonas aeruginosa
atggttggaagtggttgggatcgagtaccaattgactcgcaaagcatcgatgcgccgctgtcgcgcgcggcggtgtttctcacgttgacagtcgccgagggccacgaggcccttcaggcggtcgccggcgtcttggacgggctggacgacctgatcaaaacggtgggcttccgcgatctcaacggccggctgtcgtgcatcactgcactgggatcggcgctatgggaccgtttccagaccgggaagcgcccgaaggaactacggcccttcgtgcccatcgagggtgccaagcacaccgcgcctgccacgcccggcgacctgttctttcacatccgtgccgaacgcgaggacctctgttttgaattcgagcgcctgctgctggaccaactgggcagcagcgtgacggtggccgacgaggtggtcggttttcgctacttcgactcccgcgacctgcttggctttgtcgatggcacggccaacccgaccgggcacgacatcggcgcctcgacgctggtcggcagtgaagatcaggcgttcgccggcggcagctacttggtggtgcagaagtatctgcaccaaatgcagccgtgggctcggctcgccaaggacgagcaagagcggatcatcggccgggagatcgtcagcaatgtcgaattgcccgacgcgacgagcggccagaaatcgcacaagaccctcgccacgatcgtggacgacgacggcaccgagcacgacatcctgcgcgacaacatgcccttcggccgccccggccagggcgaatatggcacctacttcatcggctactccaggcatctgtgggtgacgcagaagatgctggagcgcatgttcctcggcgatccgccaggcatgcacgaccgcctgctcgatttctcgacggcgcacaccggcgccgtgttcttcgctcccgcaccgcgcacgctgagcgaactcgtggaggcggtgcaagcgtaa

SEQ ID NO: 332990 - DNA, 816 bp, Pseudomonas aeruginosa
atgtgccagaaggacggcctggctgaattgttgatttctgcattagcagaagcgtcaaacaatctgccacaattaaccacgttaaagataacgacgttaaacttcactctttcctgcaacgctggtttgcctttctggacagatcgcttattgggggccctcatgcatgacgccaccagccagttttcccatttcaggcttgctatcgcgcccggagtgccatcctcttgcctcacaacgcttcttgccctacagcgcgcggaggaaccagaagtcaccatcacgttctttgagacctcagccgatgatctgttgacgggccttgaggaaggccgctacgacgctggaatgtcgcttcggaacgctggtgctccggccgtgaaaagccaaccgctctgggtggagaacgtggctgttgcagtgccgctggggtcccccttagttgcccaggcgaagatcacgcttgccgagcttctggactatccggtgtttcgctggccggcggagacttgcctactgctggatcagcgactgtcctttcttccgttgagccagcagagcattcagcatgtgacttcgttcgagatgatggcgctttgggtgaccgctggctacggagtggggctctccgcgcaatcgcgcattgagcgtgcccatgcgtgggggatcactatgcgaccgctttcagacggcccctacgagatcgtgacatacctgcagcggccccacggacgagccaatgttgtttctgagcggttcgagcacagggcaatgttggttgccagggacagggcggcttgctcgaataccccatag

SEQ ID NO: 332991 - DNA, 891 bp, Pseudomonas aeruginosa; identical to SEQ ID NO: 292045

SEQ ID NO: 332992 - DNA, 1014 bp, Pseudomonas aeruginosa
atgggccatgaaatgaccggcgaagtgatcgaagtgggatcagacgtcgaagtcgtgaagaagggcgacatcgtttccgttcccttcaatgtggggtgtgggcgttgctacaactgcaagcatatgcgctccgatgtatgcgagaacaccaaccccgaaatcgactgcggagcctacgggttcaacctcggtggctggacgggggggcaaggtgattatctcttcgtaccgtatgcggatttcaatctccttcgcttccctgacaaggatgccgccatggaaaaaatccgcgacctgacccttctctctgacgtattacccacagctttccatgggttcgctggcccggactggccagccgcaccggcctacgtcgtcggcgaaaacatcctgatcttcggtgccgggccggtcggcagagcgggtgccgcctgcgccagacttctgggtgcaggcgccatcatcgttgccgattacattcaagagcggctggaccttctcaagccacacggcgtggaaaccatcaacctttccgacggcgtgccgatcgaggagcatctcgaacgcattaccgggcacagggaggtggatcgcgtcatcgactatgttggtgtggactgccgcgggtttggcgcggaggctgacaagatcgtggagagcgctgttaccaacgcaatgctcaaatatgtccgcttcggcggaatgaccagtacggtcggtgtgtactgcgcaaacccgatctcgaaagacccgaaagccaagaaaggccatatggatctggaatggtccaacgcctggatcaagtcgccgcgaatgtcggctggtcaatctccgacggccaactacaaccacgcgttaatgcgggcgatactgaacgatcgcatgccttacctttcgccgatgatgaacactaaattcatcaagctcgaagacgcgcccgccgcgtacaaagagttcgacgcgggttctgcatacaagtacgtcatcgacccgcatggttcagtgcggcattaa

SEQ ID NO: 332993 - DNA, 513 bp, Pseudomonas aeruginosa
atggttggaatcatcgacgaacaaggcacgcgttacgccacctggacctacgacgaccaaggccgcgccatctccagcgaacacgccaacggcgccgaaaaggtcaccctcgcctacaacgatgacggctccaccaccgtcaccaacgaatacggcaagcaggccacctaccgcttccaagtgatccagggcatcaagcgcatcgttgccatcgaaggcgaaccctcgcccaactgccccggcagcaattccaccttcacctacgatgaccagggtctgctcaccagcaaacgcgacaacaacggcaacctgaccacctaccagtacaacgcccgcggtctggaaacctcgcgcaccgaggccgccggcactgcgcagacgcgcaccatcacaaccgactggcacccgaccctgttcctcccggtccaggtcagcgagcccagccggagcacccgctatcagtacgacgccgagggacgcagaaccagtgaaggaatcatggcgaaccaatga

SEQ ID NO: 332994 - DNA, 528 bp, Pseudomonas aeruginosa
atgaccgaagaacgcctgctgcgccgcgacgaaatccccctggtctgggagatcgatcgcagcgaagtgatcgaacacctgtattccgtcgaggccggccaactggtgctgcgccccgagttctacgacatgcgcggctggccggagggcgaggccgagcactacacgccgatcctgctcgactgcttcgaccgcggcggctggttcctcggcctgttcgaccagggccgcctgatcggcgcggtagtcctcgacccgcgccgcctcggccccgagcgcgactggctgcaactgaagttcctccacctcagccacgcctaccgccgccgcggcctcggcgcccacctcttccacctcgccgccacccaggcccgccacctcggcgccagcgcgctctacgtttcggctacgccgtcgcagaacacggtggatttttatacgagactcggatgccggctgtgcatggaaccggatgaggagttgtatcggttggagccggaggatgttcatctggtgttcaatctatag

SEQ ID NO: 332995 - DNA, 1035 bp, Pseudomonas aeruginosa
atgtcatctcaactccaagacgctctaggcatgttcgcctttctcgctatcgagctatcggttttattcattggcattagcttgctggtcggagttcttcaacgtcacatcccaccatccaaggtggaagcgttactgacttccagtgggaagcgaggctattttcttgctgctggtttaggagctataacgcccttctgtagttgctcgactatccccatgttgaaagggttgattcgggcacgggccggttttgggccgatgatggtgtttcttttctcatctccgttgctgaatcctatcgtcgtcggcctgctggttgccacgtttggatggacacttactgctatctatgtgctcgccgctttggtggtcgcggtaggtgccggatggctgcttcacacgcttggcttcgagcgttatgtgcgccggacggcgacacaagagagcagtggatgtagttcatcagcaagcccgtgcagtgctacatcgaccgcatcgagttgcggcaccaacagctgcgacaccactccgaagacggcttcttgcggggctgataggaagacaacagtctctacgtctagcgaatgctgtgacagtcaacccactgtcacggttaagaaagaagggaagtacagtggtgtgtggcgggaagcttggtcggactttatcgatgtgttgccttacctgctcatcggtattgcgattggcagcgtgatctatggtttcatgcccactgacttattggagcagtatgcaggcccagataatccctttgccattccagttgccgctgtcatcggcgtgccgttgtatattcgcgctgaagccgtcatacctctggcagcggctctgatggccaaaggcgtgggtgccgggacggtgctagcgttgatcatcggcagtgccggagccagcctgactgagctcattctgttgcgctctttgttcacgctgaagcttttagcggcgtttttagcagtcatttttgctatggcgatgattgccggttacgccacctacctgtttttctga

SEQ ID NO: 332996 - DNA, 1164 bp, Pseudomonas aeruginosa
gtgcagggtgagttcgtgcggttcggcaagcgtgacgttccctatcgtgatctgcccatccacggcaagcgggtcactctctgggtggtccgccgccgatacacctgccgggcctgcaagacaacattcaggccccagctaccggagatggtggacggattccgtatgacactgcggctgcatgagtacgtggagaaggaatccttcaaccacccctacacctttgtggcggcacagaccggcctggacgagaagacggtgcgcgacatcttcaacgcccgcgccgagttcctggggcgctggcaccgcttcgagacgccccgcatcctgggcattgacgagctatacctgaacaagcgctaccgctgcattctgaccaacattgaggagcgaaccctgctcgacctgctggccacccgccgccaggacgtggtgaccaactacctgatgaagctgaaagaccggcagaaggtcgagatcgtcagcatggacatgtggaacccctaccgggcagcggtcaaggctgtgctgccccaggcccgtatcgtggtcgataagttccatgtggtgcgcatggccaacgatgccctagagagagtgcgcaagggcctcagaaaggagctgaaaccgtcccagagccggactctcaagggagaccggaaaatcctgctgaaacgcgctcacgaagtctcagaccgggagcgcctcatcatggagacctggacaggcgcgttcccgcaactgctggccgcctacgagcacaaggagcgcttctacggcatctgggacgccaccacacggctccaggcagaagccgccctggacgagtggatagccaccatcccgaagggccaaaaggaagtctggagcgatctggtcagggcagtgggaaactggcgcgaagagaccatgacctacttcgagacggacatgcccgtcaccaacgcttacacggagtccatcaaccgactggccaaggacaagaaccgtgaagggcgcggttactccttcgaggtgatgcgggcacgaatgctctacaccacgaagcacaagaagaaggcaccgactgcgaaggtctctcctttctacaagaaaaccatcggttacggactgccggacttcgcagaggaactcaactacggagtcgatctatcaaccatctga

SEQ ID NO: 332997 - DNA, 159 bp, Pseudomonas aeruginosa
atggcgtcatacctgactggcataaccctgactacactgggcctattgcgccggaagcgccatctgaaatggcaaaaggcggaaagcaaaacattgataatgagtatgttcgagatgttctggctcaagggaaaaactgcaacccttgcgagtacttaa

SEQ ID NO: 332998 - DNA, 612 bp, Pseudomonas aeruginosa
atgaagaaccacgaaatactcgagaagaacgtcggcctgctggccatcttcatggtgatcgccgtcagcatcggcggcctgacccagatcgtgccgctgttcttccaggacgtgaccaataccccggtcgaaggcatgaagccgcgtaccgccctggaactggaaggtcgcgacatctacatccgcgaaggctgcgtcggctgccactcgcagatggtccgcccgttccgtgccgagaccgaacgctacggccattactcggtcgccggtgaaagcgtctgggaccacccgttcctgtggggttccaagcgtaccggcccggacctggcccgcgtcggcggccgttactccgacgactggcaccgcgcgcacctgtacaacccgcgcaacgtggtgcccgagtcgaagatgcctgcctacccgtggctggtagagaacaagcttgatggcaaggacaccgccaccaagatggaagtcctgcgcaagctgggcgtgccttacaccgacgaggacatcgccggtgcacgtgaagccgtgaagggcaagaccgagatggacgccctggtggcgttccttcaaggcctgggaacctctatcaagagcaaacggtga

SEQ ID NO: 332999 - DNA, 249 bp, Pseudomonas aeruginosa
gtgctgtacatcgcctcgatgtgggtcaacggcatcacccagggtctgatgtggcgcgcggtcaacgaggacggcaccctgacctactccttcgttgaagcactggtcgcaagccacccgggcttcatcgtgcgcatgatcggcggtggtttcttcctcaccggcatgctgctgatggcctacaacacctggcgcaccgtgcgtgctgccaagccggccgaatacgaagccgccgcgcagatcgcctga

SEQ ID NO: 333000 - DNA, 195 bp, Pseudomonas aeruginosa
atggagcgcctgttccgcagtctgaagtcggagtgggtcccgtcaacgggttacctgacggcgcaggaggcccaacgggacatcagtcattacttgatgcaccgctacaactggatcaggccgcatcaattcaacgacgggttaccacctgcggtggccgaagaaaaactcaacccactgtccgggatgggttga

SEQ ID NO: 333001 - DNA, 228 bp, Pseudomonas aeruginosa
ttgacccacaactgggaccgggacggctacacccagggcgacggctacggccacctggccatcgaggtcgaggatgccgccgtcacctgcgcccgggccagggcgctgggctatcgggtcacccgcgaggccgggctgatgcagcacggacgcagcgtgatcgccttcctcgaagacccggacggctacaaggtggaactgatccagaagggcacccagttcgattga

SEQ ID NO: 333002 - DNA, 780 bp, Pseudomonas aeruginosa
atgactgcgacagacagaacgcccccgccattgaaatggctctgcctcggcaaccgtgatgcgaacgacggattcgagctcttcgcccatggcatctatgcgaggaacggcgcgttggtcggcagcaagctctccctgcgcgaacggcgccagcgcgtcgacctgtcggccttcctttccggcgcaccgccgctgcttgccgaggcggcggtcaagcacctgctggcacgcctcctgtgcgtgcaccggcacaacaccgacctcgaactgctcggcaagaacttcattcccctgcatgccagcagcctgggcaacgccggggtctgcgagcggatcctggcctcggccaggcaattgcagcagcaccaggtcgaactctgcctgctgctggccatcgacgagcaggaacccgcctcggcggagtacctgacgtccctcgcccggctacgcgacagcggcgtgcgcatcgcgctgcacccgcaacgcatcgataccgacgctcgccagtgcttcgccgaggtcgacgccggcctctgcgattacctgggcctggacgcgcgcctgcttgcccccggcccgctgacgcgtaacctgcgccagcgcaagagcatcgagtacctgaaccggctgctggtggcacaggacatccagatgctttgcctcaacgtcgacaatgaggaactgcaccaacaagccaacgcactccccttcgccttccgtcacggcaggcactattcggagcctttccaggcctggccgttcagcagtccggcctgctga

SEQ ID NO: 333003 - DNA, 1551 bp, Pseudomonas aeruginosa
atgaagctcctcgctgtccgccgcctcctgcgcatccagcgcgtcgtcatccgctaccgcctggacgacctgatcctcgaactgccgatgctgccctggtggctgcgcctgctcggtgccaccctgccctggcgctggctgccgcggcgcaagctggaactgacccgcggcgcgcgcctgcgcctggcactgcaggacctcggaccgatcttcatcaagttcggccagattctctccacccgccgcgacctgctgcccgacgacatcgccaacgaactggcctggctgcaggacaaggtgccgcccttcccgccggagctggcggtcaagcgcatcgaggaacagctgggcgcgaagatcgaacaggtcttcgcccgcttcgaacgcgaaccgctggcctccgcctcggtggcccaggtccacgccgcgcgcctgaagagcggcgaggaagtggtggtgaaggtgatccggccgaacctggaaccggtgatccgctccgacatcgcctggctgttcatcctcgcccgcctcgccgagcgggtctccagcgaggcgcggcgcctgcacccggtggaagtggtcagcgactacgagaagaccatcgtcgacgaactcgacctgctccgcgaggcggccaacgcctcgcagctgcgacgcaacttcgaaggctcgccgctgctctacgtgccacaggtctactgggactggtgccggcccaaggtgctggtgatggagcgcatctacggcatcccggtgaccgacctggaaaccctgcgcgaccagcgcaccgacttcaaggcactggccgagcgcggcgtggagatcttcttcacccaggtgttccgcgacagctttttccatgccgacatgcaccccggcaacatcttcgtcagcacccgcgcgccctggagcccgcaatacatcgcggtggactgcggcatcgtcggcagcctgaccgacgaggaccaggactacctggcgcgcaacctgatcgccttcttcaagcgcgactaccgcaaggtcgcccaactgcatatcgactccggctgggtaccggcggaaaccaaggtcaacgacttcgaggcggcgatccgcaccgtctgcgaaccgatcttcgagaagccgctgaaggacatctccttcggccaggtcctgctgcgcctgttccagaccgcgcgccgtttcaacatggagatccagccgcaactggtgttgctgcagaagaccctgctgaacatcgaaggcctcggccgccagctctacccggaactcgacctgtgggccaccgcccagccgttcctggagcgctggatgcgcgaacgggtcagcccgaagcagttgctgcgcaatttccagcaacaggtcgagcaggtgccgcacctgtcgcaaatggcccgcgacaccctcgaacgcctgtcacaaccgctcgggcgcctggtgggcgcggtgctgctggtcggcgccgccgaggtcggcctgggccagcagctggaagcctggccggcgtgggtgatgctggccggcggggtattcctgatcctgcgccgctag

SEQ ID NO: 333004 - DNA, 1005 bp, Pseudomonas aeruginosa
atggcactcaaaaaagaagggccggagtttgaccacgatgatgaagtgctcctcctggagcccggcatcatgctggacgagtcgtctgccgacgagcagccttctccccgggcaactccaaaagccaccacttccttctcttccaaacaacacaagcacatcgactacacgcgcgcgttggacgcaacgcagctgtatctcaacgaaatcggtttctcgcccctgttgacgcccgaagaggaagtccacttcgctcgtctggcgcagaagggcgatcccgctggtcggaagcggatgatcgagagcaacctgcggttggtggtgaagatcgcccggcgctatgtcaatcgcggactgtccctgctcgacctgatcgaggaaggcaacctaggcctgatccgcgccgtggagaagttcgatccggagcgcggattccggttctcgacctacgccacctggtggatccgccagaccatcgagcgggccatcatgaaccagacccggaccattcgcttgccgatccatgtggtcaaggagctcaacgtctacctgcgtgcggcgcgggaactgacccacaagctcgaccacgaaccttcacccgaagaaatcgccaacctgctggagaagccggtcgccgaggtcaagcgcatgctcggcctgaacgaacgggtgacttcggtagacgtctctcttggtccggactcggacaagaccctgctggatacgctcaccgacgatcgccccaccgatccgtgcgagctgctgcaggatgacgatctcagcgaaagcatcgaccagtggctgacggaactcaccgacaagcagcgtgaggtggtgattcgccgcttcggcttgcgcggtcacgaaagcagcacgctggaagaggtcggccaggaaatcggcctgacccgcgagcgggttcgtcagatccaggtcgaggcgctgaagcgcctgcgggagattctggagaagaatggcctgtcgagtgacgcgctgttccagtga

SEQ ID NO: 333005 - DNA, 1149 bp, Pseudomonas aeruginosa
atggagcttgtgtgggctactgaggatttggtgatcgctggacaaccctatcctgggttccccatcctcctgtgggacacgatggagagttgtgtcccggccaatcaattcttccgtcactacctgcttcgcggaaccattggctctaagcgctcctggcccagcaccgggcgcgcgctgtacgacttcttcagtttcctccaggcccatgagctggactggctcgacgttgatcgtggcgaggccaagagccttgttgcggcctatcgggactactgcctggtggcgtgcgaactggcacccagcaccactcgccagcgcctgcattacatctgcaagttttacgaattcgcgctgaaggaggggtgggtgaaacgcctgcccttcgcctacgaagagcgcaccgtcaaacgtgaagcgggcttccttgcgcatgtcgatgccagtggcggcaaggccatggcaaacgatgtgatgccgcgtcgccccaaggccttgcccaagtttttgagcatggccgaggtcaaggcgctcctggccgcagcggagaacccccatcaccggatgatgatgcgcctggcgctgcatacaggtctgcgccgtgaggaaatcgccgccttcccgttggcctatgtcttcgatccggacaaggcgatacgaaccgaacgcaacctccgcattcgtctcgatccgtttgacggcagcggcatggtgaccaagggcagcaagccacgcgaaatttacatcagccgccagttcatggccgaactctatcgctatgtgacaaaggtgcgcggcgagcgtgcctcgctgagcaagaccccgcaaagggcgctgctcctcaaccagttcgggcaaccctacggtgaggacggcaagagcctcaaccggatcatcagcgaggccggcaagcgggctggaatcaaggtccatacgcacatgctccggcatagctatgccacccataccctggtcagccttcagcgtaaccctgcgagcggtctggagcctctggtattcgtgcagcggcaactcggccacagctcgattcagacgaccatggtgtacctgcacctggtcaacgaaatggccgacgaggcggtgctggcctatgacgacgagttgaatgcactggcaggggcggcctga

SEQ ID NO: 333006 - DNA, 1677 bp, Pseudomonas aeruginosa
atgggcaagcgcaaggtatttgccaagaccgacctcagcatccctcaagtcgaacacagtcacgacgcggtaggaaatgtagtcatcctgcccgaggccatccctccgaagaacaccacggtcgagttcgggcggagcagctctggcctccgtcgcttcgattttgcccgctggtacgactctggcatcgaccccattacctacgcctgccagcgccaggtcgagcgcttcctcaccgggcaggatagtgccgtcacggcccgaactgtggttggctactgcattgggctgcgctatttcctcgactattgtgtactacgggcgacggcttttagccgtgacctggccctggccgatgtgaaccgggacctgatcgacggctacctcggccatctggccgggctgggcgtggcgatcacagctcagaagtccctctatacgcagaccaagcccgtgttgctggccttggggcggcgtggattgatccatctggttacctccggcgatgcgaccaccttcccgcgcaatcccttcccaaacagtaaccgcaagtacaagggtgagacggcgctatcaaagcgcgagcggcaagcgttcacggtggcactgaggcaagcaatcaagccgatctgggccgacgacgcgcctgtgactggcgaactactggcttgtgccctgctggtggtggcgctgcacaccggacgcaacgcgacacccctgctggaaatgggccgcgactgcctgcgcccgcatcccaaggacaacaccgtgttcttggtactgtggaagcggcgcggctacaactccagcaaggtagcgctgcgcgccgagtcggacaccgagcgtcttctggagtccacgccgagcgtgagaatcaacgtggaacgtctgatccgccgcgtgatggctctgactgaacctctggatgcagaggccccaggcgacctcaaaggccgcgtatggctgtatcgcgctcgcagcggcaagggtgccggtcaagtcacggcgctgagcgcaaatatgttggctcaagcgacaaaccgccttgtagccgagcatagtctgaccgacagcaacggaaaaccgctgcgcatcaatatctctcgcctgcgcaagaccttcgccaaccgcattttcgagctggccgacggcgatctcgcgacaaccgccgcggccctcggcaataccctgcaggtggccgaccagaactacctcaagcccgacgagaactcccgtcgcaactggcagttcatgggcggggtactggtgcaggagctgctgactcgaaccatcggcgcgacctacagggacactcccatgggccactgcgccgactcagaaaatggccagtacgccccgaagcgcgagggcgcgacgtgcatgaacttcatgaactgcctgcgctgcaagcactacgcggtgaccgccgaggatttgtacaagctgttcagcttctactttcgtgtgctggccgagcgctcgcgcatggacaagcgacgctgggcacgagagtacgcccatatcccccgcttgatcgaccactacatcgttgccgaggggctgcggcgcggcatcttcaagcccgcggccgtggagaccgcccgtgagcgtgctcgcaccctgcctcacccattctggtcggttgatctgatcgacagcctggaggtctttgcatga

SEQ ID NO: 333007 - DNA, 1896 bp, Pseudomonas aeruginosa
atgagggaaaacaccctgttggcgctacctcactccgaccttgccgctcagccgggagatgtacgtgggctccctaaatccgaacgcgacgctctgatcatcactactactcaggtcgacgggcagggggtcattctcagccgctatggtgacgacgcttggcagctcgacggcttcaccagcaatattcgtgcaaaccagaagcgtctggacttcggcaccgtgccgcaggcatttcgggcggtgatgaaggagatattgtaccgttacctgcggcgtgggcgtcgcggagtgggccgacctaaaggcggcgtggtgcgacagttcttgtctgatacaaggccattcctgcgccacctggaggcgctccaactcgaccacctggacgcagtgacgcccatggtctgcgccacctatgtgaatgcctgcaaggcgtaccggcagacgcaccgctccaagggcaagccactgtcgcagagtgggttgcatagccgtttcagggccgtcgaagcgctccatgaactcagccagtacaccgacgaccgaatgcagcagcatccctggcccgagacttccgcgaaggcgatggcgggacttactggcagcggagccccccataagctgggcggcaagacaccgctgattcccgatgatgtgttctgcatcctgttcgagcaggcctgccagcaggttgagcgcggcccgcagctgcttgatttgcgtgacgagctggaaaccctcgcggcacagcgaaaggggttgtcagtattcgacatcagtagggtgaagaaccgccaactaggcgcccttggttgggagggcggtctaagggcatttaacaaggctctaacccacctgcgcacggcatgctacatcgtcttggctagcacctcaggttgccgcaatcacgagttggccaacctgcagtcgggtgcgcaccaccgcacccaggacgatgaaggcaccgtctaccactggatgcgctcacggtcggacaagaccgatgcaggcgtacatgactggatgatccccgaagctgccgtacgtgccctgcgcctgatggagcgctgggcagccccctatcaggccatgatcgccgcagagatcgtgcagcgccgacgcaccaacccacatgatccgcaaatcgccgaggcactcaagcaccgccatgcgctatttctcggcgtagcgatgggaggcagccaggtacgcacgctttcgagtgcgacttgggatcataacctcaaggcattcgccaaggattgcggactgatctggaagcttgccagccaccagttccgccgcaagttcgctaactacgctgcacacagccgcttcggtgacctgcgctatctcaaagagcatttcgcgcactggtcgctggatatgaccttgggctacgccatggacgacagttgggggcagcaccttgaccttgaactgtacgacaatattcaggcggaattggaagacatcaagctcggcgtcgtcgataactggctgggtgacgcccccctggccggcggctatggccgtgcgctcaagcgatggcagcgggagccgcagaacctgcttattttcaaggatcacgcctcaatgctgaaatccattgccgagagcaccgcgattcgcagcaacggccatgcctggtgcaccgcggacaatgatggctgcatcggcaatacccttgagcgcacccgctgcggcaactgcaacaacgccgtgatcgaacgcagccatgcccccatttaccaacgactttacgatgatctgaaaggtctgctgcattgcccggacatcggcgagggcggccgccaacgcgttgagcgcgacctgaatcgctgccgtgacgtattggcccagttgggcatggcaccggagactctgatcgcatga

SEQ ID NO: 333008 - DNA, 426 bp, Pseudomonas aeruginosa
atgagtccaaaggaaaagacagtcaaaaaatacaagccagccgaggatcgtgaaaaagatctcaagctcgccctctaccgcatccagaagggccgtgcccacaccggggaaaccaaagtcaccatcgcagcagtagcccgcgaagcgaaagtatcgacggcgctgatccacaactactatccaggcattgccgaggctatccgcgaggctcaggggcgctccagtcgcgccatgcgtgatgtgaagcaccaagatttgcttgccgagcgcaagaagtccgctgactaccgtcaggagatcgaggaactgcgaaccaaggtcgcccgcctcgcatcgatcaacgaaattctgctgaacgaaaatggagtgctaaaagccaagctgaaggaccgaaaagtggtcgatctggaatcatctattcgatga

SEQ ID NO: 333009 - DNA, 402 bp, Pseudomonas aeruginosa
atgaaccaggaggcattccagctagcagcgctgtcggctgccgaactggtcgactacctgcgcaccacgaaggggacgaccttttcagttgagcgctatgccgaggtcttcggtctaagtccgagcgagtttgccacccagttcactgcctttcgtcgcagccagccagatactgccgtcacatccgaagccgaagcggcacaacgtgttatcgcggatgccctacgtgtggtgctgacggtaaccgagaatggggtagctatcgagcgggcgatgtcctggttccgccacgagccattgccaactttcgagggacagactgcggagcaactggtcagtcagggccaagttgagcaggtgctgcagtttctggcctcctggcaggccgggagccaaggatga

SEQ ID NO: 333010 - DNA, 417 bp, Pseudomonas aeruginosa
atgagtaattacgccaacctgcagaccggtccgcagccgatctatcatttgtgctatcgaaccatcctttgcactgtggatgagcggtacgacattcgcggctatgtgctggcagaattggtgggagcttgcctgaggcaccgcgccactctgtctgtagagcagcgtgcgtactttgcgcgttatgcgcagccggaggcgttggcctatctggaaagacttacggccaatttgctgtttggccccaagggacgcttttcgcccgaggaatatcgctactcacagacggaggatctcaaaccagacagctccatccgatccgtaccggtgagcatgcgctgctgggcgcgctcgttacgttccacgagtaatattcctgggccattgttagctgagcatcaccgaaaaaggacgtga

SEQ ID NO: 333011 - DNA, 669 bp, Pseudomonas aeruginosa
gtgattgagcagatcgaagatgccaagtcgcagttgaggtcgaacggttgggctacctttcacatgcacgactcaggacttgagtcgatggaaagaactgccctagaaatcgcctatagcttcggagatcctcgcgcatctcgccggcgtggcccactgattgactatctagttccgaccgaacaacaagcagccaaccctcgatccctcagtgcccgctatggactgagcgaatttccttggcacaccgacggagctcactggactacacctccacggtatcttgtcattgggtgctatgaagcggatcagcaggctgctgacactctcatctgtgaaggtcgtctctttgatccattgaactcgatagcagctcgctcagctgtcttcaggattatcaatggcggcaatagcttctacgcctctgcccggggcccatctgatcgctactaccgctatgacccaggctgtatgacgcctacaaatgacagggcccgagaaatggtgagcgctatagatcaagaaaagccagtgcgcgaacacaagatcgagtggagtgttgggaagttcttgctgcttgataactggcgctacctgcatcgacgtacagcggcgactggaaacgccaagcgaaagctcctaagggtaacagtcatggagagtttctga

SEQ ID NO: 333012 - DNA, 978 bp, Pseudomonas aeruginosa
atgcacaatgcaaaaggcagcacgaaaaaaccgcacaaagaaatccctccggctatttcagcagaggcgctgcttggaaaatcccggctgtatgcctcacgagccttgcaagctaaagcgtcaaaggattccgaggtctatcaaatctgggctgcgttggcactagagcttcttggcaaggctcagttatctggtatccacccttgcttggtagtcgaaacggaaaataccaacagccttctcgaagcgtgcggtatcgagactgataccaaggtcaagacaatcagtgctcatgtggtattcgctcgcttaaaacacacggtagataagttcggcacaccgcatgcggaggcatgcaagataatttcatcccgcagaaatgccgaactccattcgggtcaagcggcttttactggtatggccgataaggattgggaggggcagttctggtctacagcccaactcatcctggcctcgatgaccttggagctagaagattgggtggggagcgactcaacgatccctgccactctggctcaggatttccgcacaatcaaggtagaagctgcgaagcagcgcatagtcaatgctcgtaccatttttttaagccctgatggtaagaagctcggtaaaaaagaacttgaggcgcttcgacagcactcgcagacgctccagtggcattcatactacaaaaccttccggtaccttttggataactactgggaagccccatgcccagcatgtgagtgcaaaggtttcatgggcggagaccgtgtgcatgaagaggtaatcgatcaagacttcgaaagcggctacgaaacagtagaaaggatcttcactcccgtggagttctactgtccatcctgtgatctgcgccttgatggcgctgaggaaatggaggcagcagagtttgaggaggagtacaccgaccaagacgaacgagaaattgagtacgaacctgactatggcaacgattag

SEQ ID NO: 333013 - DNA, 2847 bp, Pseudomonas aeruginosa
atgagccaggcttggccttaccccggcgcacgctggtggaaattcgattttcacacgcacacccctgcatcgaaggatacgagtgcttggcaagcagctatcggcacgcctgatgaactaacaccacagaagtggctgctcaagtacatggccgccgaaatcgactgcgtggcagtcactgaccacaacagcggtgaatgggtggaccgactcaaggtcgcttacgccgaaatgaagcgcttagccaatacgggcaacccgccggaagggtttcgcgaactatatctgtttcctggtgtggagatatccgttcagggtggcttccatttgctggccctattcgacccatctgcctccagccaaatcattagtgatttgctggccaaagtggactactccggtacgcgaggcgacagtgatggcgtcacccgcgaaggcgcagccaaggtagtcgcacgcgttattgctgagggcggtatcgccattccggcgcatgtggagggagacaaaggcctgctgcaagtcgagccgaacacgcgcaaatgcctacttgatgcaaccaccgtcaaacaggttctacaagagccgggaatcctggccttggaatggaccgcatgcagcagtcctagccctgtcgtgctggaggaaatgaagctgcgctttgccagtgtggtgggtagcgattgccacagtttccaaggctcggccattcctggctcacgttatacctggatcaagatggcgaagcctagtctggaaggtctgcgcttggcgctgctggatgggcaggaagtttcagttcgccgtagtgaccaaagcaatggctttgcaccgttcaatacgcccgaacacttcattgagtcggttgaaatccacaacgcacgctacatggggcgcggcaaagcagccgccagcctaccactgaacccctatttcaatgcactgatcggtggtcgcggcaccggaaaatcgaccatcgtgcacgccttgcgcctggcctatcggcgggaaaacgaattgtcgcgaacatcggaggccggacagaccttccacaagttcagcgcgatcgccaagaccagaagtgatgatggcggcctgcgcacagacacagtcgtagatgttcgggtacatcgtgatggctcgacctatcgcctgacttggcgacaggacggccaaggaaatgtggtggaagaatgggataccaccacttcggacttcaagccttcagaaagccagggaatcaatgagcaacgcttcccagtaaggctgttcagtcaggggcagattgcagccttggctagcgacagccagcaggccttgttgaaggtaatcgacgatgccgctgacactcggacgcaaaaagcggcgttcgaggaggccaaaagtgcttttctggcatcccgggcgcagatgcgcgagctggagggtaagcttcaaggccgtgagtcgctaacgctatccctgcaggatatacagcgcaagctcgctcgcttcgagggtgcggaccatacggtgatactgaaaaactaccagcgcaccactcaacaaagccgtgagcttgagcgccagcttgaagcatccgccgaactggctgccaaattgcagattttcgctgctgatttgcagccggaagacctgcaagagggggtatttgatgcccatgatgacagcacggcactagcgctcgttcaagcactgcaagcggctatcgacaaagcgaggcaggaggtcgagaacactgcttcagcactgcaagcgcgagggcaagccctcagaggagaactggaggcatcggcttggttcgctcgaatcggctcagctaagactgcctacgagcagctcaaggccgatctgcaacagcagggtgtcagcgaccctagcgagtacggacgtctggtgcaggaaaagcagcggctggaaaccgaactgaagcgtttggaggctttgcagaagcaacatgttaacctgcgcgagaaagcgatgttgcagctggaacaggtgcagtctgcgcgccgcaccatcagtgctcagcgcaacacgttcctgcaggacacgctgcacgacaattcctttgtacgtatcgaattgatcccgtacagccgagatgtacagtgcattgagcgatcactgcgggaggtgcttggtgcagcagacggtaagtatgctgacgacttgtaccaagagcaggacggctccagtccgagggggttgatagcagaactgatggtcgcagccgatcttgtcgaaaaaccaggtgaatgggacacacctaactttgagcagtcactgatggctcagaagaagcgtctgtctcaggcatgccgtggcaaagctgaattcggtggatggttcaataaatttttgaaagccgagacggacaagcgcccagagtttcttgaccacatcctgtgttggttcccagaagacggtctacaggtagagtacagtcgcaagggtgacggccgagactttcagtccatcgggcaggcctctgctgggcaacgtgcggcagccatgctggcctttctgctagcacatggcaccgagcccctggtgcttgatcaaccggaggacgatctggacaaccaccttatctatggactggtggttcagcagattcgatctaacaagctgcgtcgccaattgatcatcgtgacccacaacccgaacatcgttgtaaacggcgatgccgagttgatccatgtactggacttcaaccaccagtgccatgtgaagcagacaggctctctacaagaacaggtaatgcgccaagaggtatgccaagtgatggaaggcggtgaagaggcatttgagagacgctaccagcgtttgggaagagaggtttga

SEQ ID NO: 333014 - DNA, 204 bp, Pseudomonas aeruginosa
atgctcgcctggcgcaccagcctcgtgctggaacaggccttcgaggacctgcatcgccatttcccggtcgaggctgtagaccgcctgggtggaagggtcgcggaccatcgcgaggatgcgttgggcgtcgctgctcaccgcctgcttggccttgtaggcgtcgaagacgatctgcgcgcaactgagcactacgccaacggctag

SEQ ID NO: 333015 - DNA, 651 bp, Pseudomonas aeruginosa
gtgcggcggatcgtcagcggggtcactgccagccaggcgctgctggatgccgccgtggaggccgacgccgacgtggtgctggtgcatcacggttacttctggaagggtgagaacccctgcgtggtcggcatgaagcaacggcgcctgaagaccctgctgaacaacgatatcagtctgctcgcttaccacctgccgctggatctgcatccggaggtgggcaacaacgtgcagctcgcccggcagctcggcttcgaagtggaagggccgttggagccgggcaacccgcgttccatcgtcctcctcggttcgcttgccgagccgatgcagcctgccgatttcgctcggcatgtgcgcgatgcgctggggcgtgagccgctgctggtcgatgccggtcagccgatccggcgcatcgcctggtgcaccggcggcgcccagggctatatcgaccaggcgatcgccgctggcgtcgatgcctacctgaccggcgaggtttccgagcagaccgtgcacagcgcgcgggagaacggcatcagcttcatcgccgccggacaccatgccaccgagcgctacggggtacaggcgctgggcgactacctgggcaagcgcttcgccatcgagcacttattcatcgactgtcctaatcctgcctga

SEQ ID NO: 333016 - DNA, 630 bp, Pseudomonas aeruginosa
atgcccatcactgagcagcaactgctgcatatcctcccgaacgccggccctcgagccggcgtttttgttggtgcgctgaaccgcgggatgacgcgcttcggtatcacgtcgcctgtgcgcgcggcggcgttcctcgcccaggtcggccacgaaagcggccagttgacccgcttggtggagaacctcaactacagtgcccgtggcctggctgcgacctggccgagccggtacctcggcgccgacggccagcccaacgccctggcgcagcgcctggcgcgcaacccccgagccatcgccaacaacgcctacgcctcgcgcaacggcaatggcgacgaggcctccggcgacggctggcggtatcgcgggcgcggcctgctgcagatcaccggccggtcgaactaccgcgccgccggcaccgggctgggccagccgctggagcaggaacccgaactactcgagcaaccggagtgggcggcgatctcggcggcctggtggtgggccagtcacggcttgaacgacctggccgaccgcggcgagttcgccgccatcactcggcgcatcaacggtgggctcaacggtcaggcggagcgcctggcgctgtgggagcgggcgaagagggtgctgtcgtga

SEQ ID NO: 333017 - DNA, 1950 bp, Pseudomonas aeruginosa
atggtatatggaggatttgtcggagttgatatattttttgttatatctggattcttgatagttacacatatagtttcatcgattcaggatgatcgattctcattcggagaattctgggcgcgaagggctttgaggattttgcctccctacctacttgttctttttgtttgctctgcgattgcgccatttatacttgtgctccccagggagatcaatgagtttggcgatcaagtaatttactccgcattgatgctcgttaaccattatttcctaggtcagcaaggttactttgatgggctgtcagaaacaaagccactgcttcatctgtggtctctttcagttgaggaacagttttatatagttgctcctgtagttatctttttattatatgtatcaacctcaggattgggcaaaagaaaggcgtcggtcatttcgctctttactgtctcatgtgtttttgctgtttctctttatggttgtatagcgcttagtggtgatggtgctggtaaaaactattccttctttttgatgccgcttagagcttgggagttcattgctggaggcgctatagcatttgctgtgccatttgcccagcgtctaggtaggctggcgttggaaattatttcaattgctggcgctgttatgctgttttatgcgatctttgtcttcaatggcaaaagtccttatcctgctggaaaagctgtagtgccagttattggtgctgctcttataattctatgcggagtttccaatcacaaaattttagtctcaagaattctgtcgtttagagtttttgttatgattggtcttgtttcttatgcctggtatctttggcactggcctttgctgacttttggaaggatatatagctttgggcataaaagcatagctctagatttgtcgatggttgcgattgcatttgttcttgcgtgcattacatacgtttatgttgataagaaggttttgaattggagaaagtcgcttaagcacggagctagctggaagcattcagcttatgctgtagctttttgtattccggcgctattgtcgggagtgtatatttctaaatatatgtcggtatcggttggtaatgggtttacagaggcgcagattccaaggcctccatcaagtgctgggaattgtaaccttcatttggcagaaagcccatcaaagtgcttgtcgatagctagcggaaaagagatcggtcttttagttggtgactcgcacgcagatgccgcatatcgtggaatagcacgtcatgcgtcctcgtccaattcagtcattgcaacattaagttccggcgggtgtgctgcaattttcaatgttcacataaataacccagacgttgctatgcgtgagcgatgcgaaaatggtcgtaaaaatgccataagaatgctgaaggatattaatccaaaatatgctgtgctgttttcaagttggtcaatttatagtggcagagggtattactcgctcggtggtgtaggtcctcaaacgcctttgtctgatgtgaagagaggttttgtttccaaggttggagaaacgatagatttccttaaaagtacaggggttgaaagggttttaataatcgggcctgttcctatcttcaagacctctgcccctaactgcgtgatacgttctcttcactatagaattagccctgacaaaaactgctcggtttcacgtgatgaggttgagaaatcgagaaaagatgttgtcttgtggttgaaagaagcggcagatgataggtctggcgtgaaatttatagaccctataaatgctttttgtgatgaatcaaaatgtagaagctatggtgatgaaggtgttctttatacagacactaatcacatcagtgatgcaggccttgagagggtttacaaaaacagtaaacatgcctttgactggctgatgaatagcgatgcgcgctcagttggtgtaagcggttcgctctga

SEQ ID NO: 333018 - DNA, 2241 bp, Pseudomonas aeruginosa
atggactacgataccagcggtttcccgctcggctcgaaagaccctcgcgtcttgtacaaaaacgccaagaatttcgactatgcgatgaatgatcgcgaaagcgtttcgtgggttgaccgcttcggggtatctcgcaagacttggttcggtgtcgagcagcaggtaaatgactacctagcatctcaaggattcgagccaggcgttctggagtacgtcgacggctcaccgctgaccgtagaccgtccgacccaactgatccagcgcggggacaacatctacagcgtcaagcgcccggcatcgttccccgtcaatctgactgggaactgggcgacggaccagaacctcctggttgcgcaggttgaccggacgctgcaagacaccctggctaccagcgctggcgcagggatgatcggctatcgcgagcgcaccgtagccgaccgcctgaacgatactgcgaacgtaaaggactacggagcaatcgcagatggcgcttatcacccgctgtcagagcggttcgcaacactcgcggatgcgcaagtggtttacccacacgccactgcgctgaccgacagcatcgactgggcggcgtatcaggcggcaatcaactccggatctccgcatgtgcatgcgccaggcggccactacgtcatgaatcgcggaactctcgctgagcgggatattcggtataccggtgatggctatgccacacacgtggatttcagcctggcagatggacccggtagctgcatgctgacgcagggcgagcttacgcaaatcggcgacctgtcggtaagcgtagtgaaaggggcgcgcacattaacctttgctgccgccccggaccttgtatcaggtgatgtggtcgttgtgtacaacccaactaatggatcgtggctggctgaccgcgatccgtatcgcgctggtgagatgtggaaggtccattcggttagcggcaacaccgttacgatctacggcaacagttcgtcggtgtacctgttcaccgaggttgacgtataccgcctgcgcggcgtgcgtgtctctgttgaccagatgcatttctcgccgtctgacacatattccattgcgccgttcaaggttgttttcggcgatggcgttagagtttcgaactactacgccagcgatgtctcgctttacacggggctagaggtagagcgttgttttgacgtgtcgatcaatgcctcctcaactccaaacatgtctccggccgtcaacgatgaatatggcatgactatctcgaactgccataacttctcagtttacggtggttacgcggcagcaaccaggcatgccgtggcgctgggcggaatggatgacgtatgctgtgtgcccaatcgtaacggcctgatatacggcatgcacattgaaggtattgatatcgcgtcggatattggtgcaggtgatatgcacggcaatgccgacaaaatcacgtacgacaactgtgagtttcggaacggtgtaattcttcaagggcgcgatgccaccgtccgtaacagtacgatctacggagtatcaagtacctccggagaagcgctctacggaaccgaagtttatggcggaacgtacacaatcgagaacaatcgttttatcagttatggaaatggagcttctttcggcatcatccatatttcaccggggacaagccaacgcgaagcgctgctcatcatcgcgagaaacaatacgttcgaattgccgaacgcgacaggatcgaccaaggtgttgttcctgcgtggacgcaatagtcctctcccttgcagcgtgaacatcgatggcatgcatgtccacatggcgcctgttgcgatgcagtgcttccttttcgcagatgaccaagttgcggccactctgaacagtaactatctcatcgtggatggagtatacgggccaagcggcacctatttgctgtacccaaccgcaaagaacgcaggtatagcaacccgacagatgcgccaagctggcgcagtgaacgtgaccaccacggcatccgctacggtcgcagctccagctcagaccattcgctacccgtattccaaaatgcccaatgttagcgttcaggtttcaagccagtcgggcgctgatcagagcgctatcggatcgatcacgcctgtgccgattgcgtacaatgttcagcccggcagcattcgtccagccatcatggcccctagtggatcatttgccgccggcgggtctgcgcgtcttcactggtctgcgagcctagatgatatttga

SEQ ID NO: 333019 - DNA, 237 bp, Pseudomonas aeruginosa
atgtccgatcaactgcgtagctggctgaccagcgccacacctgaagagcgcgagcgcgtggctcgccttgctggcacttccgtgggtcatctgtatcagctcgcaggaggccatcgaaaagcgtctcctgagcttgccgagcgtctgcaggatgcgtcgagcgggaaagtaaccattgccggccttcgtcctgacttggtggccctggcagagaagattctccacggcgccgcctga

SEQ ID NO: 333020 - DNA, 768 bp, Pseudomonas aeruginosa
ttgggcacatttagctgcctgctaaaaaatggcatcttggccggcatggatatctacgaaatcagaaagcagaacctcatcaggctcatcggaagccagcgcaagagcgcttgtgccgagcgctgggaaatgagccccgcccatctgagccagatcctgtctgacaaaacaaaaaagaacctcggcgatgacgtggcccgacgcattgaagcgctccagggcctcgcaaggggatggatggatctgcctcacgaaaagctgtccgaaccggccgtgccaatcgaggcggaacttatcggaccaattttcgcctgggatgatgaaacccctctggaggatgacgaggtggcggtgcctcttctaaaggacgtagaagttgcggccggttcaggtcggtctgcggatgagttcaagaccagcaagaagatccgtctcggcaagtacacgctgcgcaaccagggcgttcagttcgacatggcggtttgcgtgacagtccgcggaaacagcatggagcccgcccttccggatggcagtaccgtcggcgtcaatctggggtgcaagtcgatcaaggatggcaaggtctacgtcatcacgcatgcatctgaactgcgggtcaaagcactgtaccggctacccggcggcggcatccgcctgcggagtttcaaccaggctgagtatcccgacgaggagtacagccaggaagagttggccgaaaaaggcatcagcgtactcggtcgcgtattctggtcgtcggtactttgggactga

SEQ ID NO: 333021 - DNA, 315 bp, Pseudomonas aeruginosa
atgcgcaagattctggtagctaatcgcgatgggcaaaagacgatcgaagcggaacattacgccactttcgcggcgtatgtcgaaggcacgaattaccaattcgttgtcactcgcgcgccaggtgaatctggctcgaaagttacccatcgtaagtctggatattcgctcggtcccgtcgagtctagccacgtagccgccgccaatttcgaccagaaagaagccggcaaactagcccttgccgccattatcgcgaagcacggcgaagcgcgcgtagctagctctctgcgccgaatcgagtcaaacccgccgacctaa

SEQ ID NO: 333022 - DNA, 204 bp, Pseudomonas aeruginosa
atgaacgacttcgcgctgctggacaagctgaagcatctgcgtggcctcgacactgctgaactggcaatgatggcgggcattgtttctcgcagcgaaacgccaaccgccgaagcgctgatcatgaagctgagcgaaaccatcaacgaactacgcgcagaggttcgttcgctgaagcctgtcccgaacatgaagcgcatgcgttaa

SEQ ID NO: 333023 - DNA, 495 bp, Pseudomonas aeruginosa
gtgaacaccgaacagttcatccgggagtccgccgcgcgcgggctttcccgccgcgccaccatgcacgcgctcggcatgggcccctggaagttccgggagctactgaccctgatgccggagatcacctggccggcacgcggatgctcaaccgaccaccagcgtgcgaacgagcagaagcgcgggcgctgcacgccggcgcaggccgcagcgctggagcgcgcgcacgaacgctggagcgagagccgacgcttcaccgtcgacggcgtgaccgggaccatcgccgaactggtggagcacttccagagcccggtccacgcgacgaccgtccgccgccgcgtcgccgccggcatgagcctgcgcgacgccctcatcaccccgcgccagcagcccaagcccaggcgccggcatccctggatccgctcacagaaggagcacacattctccgactgttcagcgccagaaggctccggcatgaatcgttactttgagaattga

SEQ ID NO: 333024 - DNA, 1665 bp, Pseudomonas aeruginosa
atgtcctctacccaacaccaactgatcgagcagtgcgccacccgcctgcgcggcatcgtcgaagccctggacaacatccacgacaccagcccgcaccgctggtcgacggacctcgacgacgttcactcctcagccgagagcctgctggccctgatcaaggaccaggcgccgacgcaagccgcccagggcctggccggcgccgccctggcgcaaccctccccagtgcgctcgagtctcttgatcaacggataccagttgcgcgccgccctggacttcattgcgccggatggcactgccgagcaactggaaagcgaggcctgcatcgagtggcgccagcaggatgccgatttcctcgaagcaggcctatacgccttctgcgctgagtatcccgaagaaggcggcgtcttgttggatgaggagccaaccactgcgcaaccatccccgttgcagtccgagcaggcagaggcggagcggccggaggttgtggcgtaccggactatcgggcgacatacaaagcaccagcatccccactacgcactgaactactacaagcagaacgcggaagatcaagctgcccactggcgtgagcgcggctgcgaggtgagcgaggacgaactgatgaccgtcgcccagcatgagcgcatcgtcggggcgctgcgggcggagaacgcgaagctgagcgaagccctggaccgctggccgctcatccgcgacagtctgaagctgagactcgccgacgccctggccagggtcgcggagctggaagggaagttgacggactgggtgcacgaagggttccggctcaacgaggcgctagcggtcgccaaggctcagcacagcgtgccggatgacgacatgatattgcagatttttgccgataatgctgagcactcggaacaaggcgacgagcatggctactgtatcgtgcgcgaacagcatgctcaagcaattgcgcgaaaactgctcgccgccgcgcccggcaactcggctcagcacagcgtgccggaggggctagccctgatcccggttcgcgagacggaggcaatgcacgatgccgtgatggcgctgctgtacaagggcgtcgcccgcaccgatacgcagaagctgctggatgcgtacatcgccgccgcgcccggcaaggctcagcacagcgtgccggaccacgccgaacttcttcaagcgctggagcgcactcatgctggccacatggttggccatgatcagtccgaccagccgaaaggtggctacagcgacggttatgtgaatggcttcggcgaatgcatcaaggtcgcgcgcaaagtgctcgccgccgcgccctcgcacagcaccccggttccgcaagcgtggatagacgtgctggccgagcgccgccggcaggtcgaggccgagggctggacgccggagcacgacgacgagcacgccgatggacagatggcccgcgccgccgcctgctacgccctggccggctccagcgctccgaacgatggaaccgccgccctgttggtgtcgctggcatggccctgggatgaacagtggtggaagccgagcaccccacgccgcgatctggtaaaggcctgcgccctggcgctggccgagatcgagcgcctggaccgggcaggcatatcgcaaagtccccagccgggagccaccacggcctcttcctga

SEQ ID NO: 333025 - DNA, 1194 bp, Pseudomonas aeruginosa
atgtggtatcacggcatcttacagccaacgctgtggcaactgattgtcgcgactttggcgctgacccatgtcagtatcatcagtgtgacgctatatctgcatcgccattcagctcatcgctcggtgcaattgcaccctgcgctaaagcacttcttccgtttctggctgtggctgacgacgggaatgaacacccgtgcgtggacggccgttcatcgccggcatcatgcctgctgcgaaacgcccgacgatccgcacagcccgaggttcaaggggctgctcacggtgttgctgcgaggtgccgagctgtatagagccgaggctcgcaatccggaaaccttgcagacctatggccgaggctgcccggacgactggctggagcgtcgcctctacagtaggtttccgaacgccgggctgggcctcatgctcggtgtggacttggttttattcggcgtcgcggggctgacagtctgggcgctgcagatgatctggatcgccttctgggctgccggtgtgatcaacggtctgggccatgctttcggctatcgcaccttcgaatgcccggacgattcgagcaatctgctgccgtggggagtcctcgtcggcggcgaggagttgcataacaaccatcatgcctacccgggctcggccaagctttccgtgcaggcctgggagtttgatctgggctgggcgtggatatgtctgctgagagcactcggactggctcaggtcaaccgtgggctgcccaccatccagtgggactgtgacaagcgagcgctggatctggaagccagcggagtcatcctgcgcaatcgtctgctggtcatggcccaatacgggaaacgggtaatgcggccgctggcacgcgaagaaagcgctcgctgtgatgcggcgacccggcatttgctgcggcgcgccagccgtttgctggtgcgggacccagacaggctgagcgatctgcagcagagcctgttccattcagctgtcggcaggagccaggtgatgcagctagcctgcgcgcatcgcctggcgttacagcgcacatggagcgatgcgggggctgacctgggcgaagtacatgcggcgttgaaacgctgggtaaccgaggcggaagccagcgggatacgtccgttgagggagtttgccgggctactgtgcagctacagcctgtacgctccgcggcagatcgtgccgtag

SEQ ID NO: 333026 - DNA, 2019 bp, Pseudomonas aeruginosa
atgccactcttcaagctcgaacacagtaagctcgtacaccggaccgatatcgccttctacgttgtcggggtactggtgctggccgtttggctcggccttttctgccccgcagaactgcgtctggaatgcctgctgctggccgcgttaggtctggtggcatggtcgctgctggaatacctcctgcatcgctttgtcctccacggactatcaccctttcgccaatggcaccagtcccatcaccaacggcccggcgcgctgatagggctatccaccctgtccagtgcggccctgttcatcggcctggtctacctaccagcgctgctcgcactcggcccctggagaggctcctcgctggctttgggcatcatgtcaggctacctagcgtacatcctgacccatcacgccgtgcatcacttcgatcactctggcaacgcctggctggctcgccgccagctatgccaccatctgcatcacagcgcactctggcaagccgggcacttcggggttacctcggcgttctgggatcgcctattcgccagcgatcgcctgcccccccgaacagcctccggcaagtggcgcaacgtcgccgagatcaccacccgccacgcccgcagcctcagcgcgcgcaagtcgtcaaaattgctcggccagttgttccgtggcacaagtagccgtatgaacgctcggctgtgggacggcacactcctgcaactggggcccactgccggtactcaggccccattcaccttggtctacaggcatgcggacggcgtacagaagatgatcctaagcaatagcgacccacagcgcctggccgaagcctatttccgcgacgacttcgacatcgagggcgacctcttcgctgccctggcgctcagggagcacatgcaaacccagcgcaaggtctggcaccgacgcgcacgcctgttgttcggcgccatcatgctgccgagctcggtcactacggaatccgacagacagaaagggttcttgcgccaacagattacgacggggatgcactcggacgcagaaaaacccgacgccaccaccttccgctacgacctgtccaatgcgttctacggactctggctggatccggcgatggtctactcctgcggctacttcgagcaaatcgacgatagcctcgaacaggctcaacgggccaagcttgagctgatctgccggaaactccagctgcatcccggcgagcacctgctcgatatcggttgtggctggggcgcgttgatcctccatgcagcgcaataccacagggtacacgcccatggcatcaccctaagccgggaacagctggccctggcccgcgaacgaatagacgcggcggggctccaggcgctagtgacggtggaatgctgcgactaccgcgacctaaaaggtcagcaggtatacgacaagatcgccagtgtcggactgtccgagcaccttggcccggacaacctgccgctattcttcgacacggtacaccgccttctcaaggattctgggctgtttctcaaccagggcatcactcagtgcccggacggggggcaacggaccgcgtcagcccgcctgatcaatcgctatctcttcaccgacggccagccggataccctgggcagccttgtgcgcaggatggaacaggcgcagttggaagtcaccgatgtcgaatcactgcgccgtcactacggcctgaccctgcgcctttgggtctctcgcctagagcagcggcaggggcttgccgtcgaatatgtcggcgaacccacctaccgggcctggcgcctgttaatggccgccagcgcgctggtgttcgaggccggggaactgggcgtcttccaaatcgtaacgagccgacacaacggagcccccagctctctgcccctgacccgccgccccttgtatcgcgacgactgctccattcagaggctcagcgaggcagtggacgcaacgccatccgctcacccgcctcgcgcaaacgccgacaggcccggtcgcagtcgaccctgctcggtaccacgaaaatag

SEQ ID NO: 333027 - DNA, 495 bp, Pseudomonas aeruginosa
atggttggctacagccaccaggtatcggccgttttcaacctccgggcgcaggccgaaagcgctcgcaaacgtctggtcgaccgaggcctcggcctcgaacagttaagcatcctcggcgctgaagacgttccacttccaacaacgcgccggcgttcgttcatccaggtgctgtcaagtggcgcagccggcgcgctagcggggctcctcgtcagcacgctggtcacattcgctctgacgcgaaccgaggccagcctgttcggtgatgcaccgttggccttgctgggttggagcagcgccctgggagcgctgttcggaggagcggtcggcgcatcggtggatgtcagccaagtcagcggtcccttcagacaggctatcgcccagggccatgtcgttctgctggcgaatacccgttcggaaatcgagtccctgctcgtgcgtgatgtcatcgagagttccgtgggggtcggcgtgcacatggacatcagtctgatctga

SEQ ID NO: 333028 - DNA, 363 bp, Pseudomonas aeruginosa
atgaacatcgacgacgatatctacgtaccccggctacttgccgaaggtcatctacccgaaggacggaccctgcgcgactacttcatcgcccacgcaccggcggaaccccaggggtggttccagccgcggatgccggaagaaccgctgaagaagttcggcggcgacaacggcgtcgagtactccacgttccgggaagccaaggaggcaggctcaaacagtttcacgcaactgaacgtggaggaaaccgaaaactggaaaagggagttcgacaaacagcgctatgtccagtggccattggcctgggccgacgccattctcgaagcgcggcgcgccgccactgcgggtaaaaagactccgacctga

SEQ ID NO: 333029 - DNA, 720 bp, Pseudomonas aeruginosa
atgaccaatgacgtttctcccctgcagaaccatctgctcgccgcgcttacccaggagatacaagagcgtctgatcccgcacctggagcgagttacactgccgctcggcaaggtcctctatgaatcgggcgatgccctccgacatgtctacttccccaccgacgccatcgtttcgctgctgtatgtcatggaggacggcgcctccgcggagatatccgtcgtcggcaacgaaggactcatcggcgtggcggtgttcatgggtggggaaagcactccgagccgcgccattgtgcaaagcgctgggcatgcctaccgattgcccggacagaagctgaaggacgagttcaatcggcatggcgagatgctgcagttgatgctccgctacacccaggcgttgatcacccagatggctcagaccgcggtgtgcaaccgccatcactcgatcgaccagcaactctgccgctggctgctgctgtcgctcgaccggctacccagcaaccagttgagcatgacccaggaactcatcgccaacatgctgggggtccgccgcgaaggcgtcaccgaagcggccggcaagctgcagaaactcggcgtgatcaagtacagccgagggcacatcaccgttctcgaccgtccgcaattggaagcgctctgttgcgaatgctacgcggtggtcaagcgcgagaccgatcgcctgcttccctatctgcccgcccgatga

SEQ ID NO: 333030 - DNA, 135 bp, Pseudomonas aeruginosa
atgagcatcctgctgggtaatgccttgacgggcaccatcgaggcattcagcaccggcataggcaccgaacagtggcgtacacccgaagcggtgacccagctcatccgtgatctgcgcctggacatcgccccctag

SEQ ID NO: 333031 - DNA, 264 bp, Pseudomonas aeruginosa
atggacaagcacaccaagcaagcgccgcgcaatggtaatggcgccaacagcccccccgagcaccagtccggccagccccctgccagccccagcaaggcggaacgctactccgagcgcaagccctctgaacagaagccggagtcagacgccaaggcaactcgcgatcccgtgaagaatgggcaacaaccgcaggccgcccgcggtgacgacgacctgatgagccaggaagccgggcaccaggggccgtcttcacaacagaaatga

SEQ ID NO: 333032 - DNA, 8265 bp, Pseudomonas aeruginosa
gtggtgcccgccgctgaatggctgctggataattaccacgtggtggaagagcagatccgcgagatccgcgacgacctgcctcccggctattaccggcagttgcccaagctcgcgtcgggcccctttgctggctacccgagggtcttcgggttggcatgggctttcgtcgcgcataccgacagccatctcgatcttgagttgttgcggcgtttcatcgccgcctaccagcgtgtccaaccgctgagcatcggggaactatgggcggtggcgatcaccttgcgcatcgtccttgtcgagaacctgcggcgcctggtggaccaaatcggccagggaagggccgagcgggccgaagccgatgccctggcagatgcccttctgacgcccggctgcgccgcctcggcactggcaacggacatcgcccggcgctcgccggcagccttgtcggagatcttcgccgcccagttggccaggcgcctgcgcgatcaggacccgaagacaaatccagcgctcaactggttggacgagcggctccaacagcaaggcagttcggtggagcaggcggtgcagcacgcgcagcagcggcagggcgcctcgaacgtcagcgtgcgtaacgtcattaccagcatgcgcctgatctctgccatcgactgggcgaaactgttcgaaagcgtgagcctggttgatgcccgcttggatgcggacggctccttcggcaggatggacttccccacccggaacctctatcgcagcgccatcgagcaactggcccgcagcgctccgctcagcgaactggctatcgccgaacaggcgctggcgaaggcacactccaccgcggcgcccggcatactgggcgaacactggagcgagccgggctaccacttgatcggcggcggacgtcgcgcgttcgaagcccatatcggcttccggtcgccgccgtcattgtggctcggtcgtctcggcggacgtctggggatcctcggctatgtcggcgcaacgctgctgctcagcgggcttctgctcggcgtgaccgtctacgtcctgcaggtgccggggctgggagacggtgggtggcagtggctggcgctggtaggtgccctgttcgttccgttcagcgaggccgcggtggcgttggtcaaccgtgcggtaaccggtggagtgggagctgccatcctaccgggactggaactggccgatggaataccggaggagcttcggaccctggtcgtggtgccgaccctgctgggcggcgaagcggagctgctggagcagatcgagcaactggaggtgcattatctaaccggcactcgcggcgatctcagcttcgccctcctggccgatggcattgatgcgcgacagtccgtgctcgagcgcgacgttcggctgctgaaactgggcgccgcagcgatcgaacggctcaaccggcgtcatgctccggcccccggcgggccgcgtttcctattgctgtaccggcagcgccggttcaatccgcaagaacggcgctggataggctgggagcgcaagcgtggcaagctacatgagctgaaccgcctcttgcggggcgcgaccgacaccagcttcgccagcctcggcgagtcaggaccgacggtgccttccggggtgcggttcgtcattaccctggatgctgacacacgtctgccacgtgagacgttgcggcgtctgatcggcaagatggcccaccctttgaaccagccgctgttcgaggcggcgactcagcgcgtagttagtggctacgctatcctccagccccgggttacgccggcactgccgcttggccgagaaggctcgctttatcagcgggtgttctccggaccgggtggaatggatccatatgcagccgcggtctcggatgtctaccaggacctgttcggcgaaggctcttacaccggcaagggtatctacgatgtagatgcctttgaagccgccatggccggccgcatcggtgaaaacagcgttctcagtcatgatttgttcgagggcatattcgcccgtgcaggactggcttccgatgtggaggtggttgaggaagcgccggcgcgcttcgatgttgtcgctcaacgcttgcatcgctggacgcgcggtgactggcaactgctgccatggatcatcggtcattggcgcggtgaatgggcagtgccgtgggtcggccgcagcaagatgctcgacaacctgcgccgttcgctgcttgcgccttccgccgcgctcgcgctgctgttttcctggttgctgccgatgcctcaggcgttgttcggcagcctgctactggttgggagcctggcactcccggcctgtctgccggtgtgcctaggactgtggccacggcgtcgcggtatcggcctgcgtcatcacttcagcgcctgggccgccgaacttcggcgcgctctgttacagacgctgctgtccctggcttttctggccgatcaggcttggcgcatgggcgatgcgatcgtgcggacgttgctgcggatgttcgtcactcgtcgccatctgctcgagtggaccacctccgcgcagtcggtggggaaaccgcgtcccgggttggctatcagctatctacagatggttggcggtacctccctgatacttggcgcggcggcactggtgctgtatttgcagccgtcctccctggctctgggcgtacccttcatgctgctctgggcactggcgccggccttggcggtatacagcagtcgagtgccgcggccgtcgaagcgcaaggtcctggcgccggaggaggcaatggggctgcgtttgatcgcgcgacagacttggcgattcttcgaaacctttgtcggcgccgaggataaccggctaccgccggacaatttccaggaccagccaaggcccgtggtggcacaccgtacctcgccgaccaacatcggcctctatctgctttccgcggtcgccgctcgcgacttcggctgggcgggcacgcaggaaacccttgagcgcctggaggcgaccctggcggccatgcagcgcctatcgcgccatcgggggcatttcttcaactggtacgccacgctcgacctgcatgtgcttgagccggcctatgtgtcctcggtcgacagcggcaacctggccggtcatctgatcgccttggccaatgcatgcgaagagtggctcgacgagccgctgtcgccggcttggcgcaacgggttgggcgatacgctggcgctggtgcggcaggggctcgatgggcttccccgtggcgccggacattggcggcgactacgtacgaccgtggaagagatccaggcgcagatcgatggtccgcagtccgccgagacgggcttggcaggattgcggcggctcgcggagaaagccgtgagagatgccgtggcatcggccccccggggagtggacgcagtttctgatgagcttctgttctggctcgacgcactgaggaactccgtggtcgaacaccagcgtgaccgcctgctttccgctgcgccgttgctggaggctcgcgtgcggagcgtggcgaagcaggcccgggccttcgtcgccgggatggatttcgcgttcctcttcaataccgagcgtgacctgttttctatcggttattccctggccgacaacagcctggacagcagttgctacgacctgttggcctcggaggcgcgcttggccagcctgatagccatcgccaaaggcgatgtccctacccgccactggttccgcctgggtcgtacggcgacaccggtggggacggcatcggcgctgatatcttggtctggctcgatgttcgaatatctcatgccatcgctggtcatgcgggcgcccgtcggcagcctgctggaacagagcaatcacctggtggtggaggtgcagcaggcctacgggcggaagaaaggtgttccctggggcatctcggagtcggccttcaacgcgcgggacctggagttcacctaccagtactcgaacttcggtgtgccggggctggggcttaagcgcggtctggccgagaacctggtggtggcgccgtatgccacggggttggcggcgatgatcaagccgcgtgcggcgttgtttaactacgcgcgcctggccgaactgggtgcgcgcgggcgctacggcttctacgaagcgctggacttcacgccgtcgcggctgcccgacgcgacggcggtggcgctcgtccacagctatatggcccatcaccagggcatgagcatcgtggcgatcgccaacgccctcgatgaggggcggatgcgcactcgcttccatcgcgagccgatgatccgtgcggttgagctgctgctccaggagcgcattccctccgatgtcttcctggcccatccgcgcgctgaggaagtgcgcgtctcgtcatacgaagccggaatcgaggcctcgacgcttcggcgcgtagcattgacgccgggcgagtcaccagttacccacctgctttccaacggtcgctattcagtaatgctgtccgcttcgggcgctggctacagtcgctggcgtgacatcgccgtgacccggtggcgagaagatccgacgcgcgacgactggggctactatgtcctcctgcgcgacgttcatgacggccgcacgtgggcggccaccacccagccgagcgggcaggtaccggtcagcggagagatcctcttcgacgaagaccgggcggaattcagccgccacgacggtagtctgagcagcgtgctagaagtcttagtctcgggcgaggacgacggcgaggtgcggcgcattaccctggtcaacaacggtcgtcgttcacaggagatcgaactgacttcctacgctgagttggtcctcgcgccggctgccgctgacgatgcccatccggcgttctccaagcttttcgtgcagaccgagtacgtcgccgagtacgccgccctagtggctacccggcgtttgcgctccggcaccgagacgccggtttgggccgcgcatttcgcggtggtggagggctccctgaccgcacctgtcgaatacgagtccgaccgtgcccgcttccttggccgcggaaggaccttgcgcgatgtcttggcggacctgcggcagccgttatccggcagcgccggcacggtgctcgacccggttttctctctgcgccggcgattgcgtatcgcgcctggggaaatggcgagggtgtccttctggatcgtggtcgctgagacccgcgaggcgctcttcgacctgatcgacaaacaccacgagcgcagcggcttcgaccgcgccaggacgctggcctggacccaggcgcaggtacaattgcgtgatctcgatatcgccgccggagaggccgccgatttccagcgcctggcggcgccgctgctgtatgccgacgcacgttaccgtgcgccgcccgagtcgatccggcacggttcagggcctcagtccgggctctggcccctggggatatccggagacctgccgatcctgcttctgcgacttgacgacagcgacgaccttgaacaattgcggcagatcctgagggctcaccaatactggcggacgaaaggcctggaggtggacctggcagtcgtcaatgagcgcgcttcgtcctacatccaggatctccaggtggcgatcgagaccgccgtgcgcagcagcccgtcgcgtacccgtgagggcgaagacgcggcgcggcgcggtcaggtgcacaccttgcgcgccgatctcatgagccaggagggcagggcgctgttgctggcggtcgcacgcgtggtactgctcgcccggcgagggccgatcgccagtcaactggccgccctgtgctcctccaggcctataccgactccggctgcgactgctggtacggcgcgactggtggccagcgacgaggggggggcggataagacgagtctgggtgaggctctcgagttcttcaatgggctaggtggcttcggcagtcgcggccaggagtacgtgattcttctggaaaagggtgaaagcacaccagcgccatggatcaatgtcatcgccaatccccggttcggcttccaggtctcggcggagggcagtggctatacttgggcggagaacagtcgcgaaaatcaactgacgccctggtccaacgatccggtcggcgatccctgcgtagaagcgttctacctccgcgacgaggacagccgggcgctgtggagcgtcactgcgcggccgattcgcgacgatgggctctacagcgcacgccacggattcggctacagccgtttcggccatcgctgccagggcatcgacatggatctggtgcaattcgtcgcgctggcggacccgatcaagatttcccgactggtgctgcgcaacctctccggcaagtcacgacggctgtcgttcaccagctatgcggaaccggtactcggcagcgcccgggcgacatcggcggccttcatcgagacctgccaggatgtcgaaagcggtgcgctgcttgcgcgcaacccctggaacgccgcctttcccgggcgtgtcctgttcgccgacctgtgtggccgccaaagcagctggagcggtgatcgtcgcgaattcctcgggccgctcggtgacccctcggcgcctgcggcgctgctcggcgaggcgggactttccggatgcacgggggccgggctcgacccgtgcatggcgcagcagtgttcgatcgagctggcaccgggggaggtggtggaaatcgtcgcattattcggccaagcggactccctggctcatgcccgtgatctggtcacgcgataccgtcggactgatccggaagagacgctggcgggtgttggtaggcactggcggaccttgcttggagccgttcaggtgagcagtcccgagcgttcgctggatatcctgctcaacggctggctgctgtaccagaccctggcctgtcgcgtctgggcgcgctcggcgttctaccaggccagcggcgcctatggtttccgcgatcaactgcaggatggcatggctctgtccctggccgctccggcgctgacccgcgagcatcttctgcgcgccgccggtcggcagttccgcgagggtgatgtgcagcactggtggctgccgcactcgggacagggggtaaggacgcggatttccgacgaccgggtctggctggcgtatgctgcctcgctgtatctcgaggcgacggccgacatcgggattctcgacgaagtcctgccgttcatcgaagggccgccgttgcaagagggcgagcaggacaccttcttccagccgatgctgtcggagcagtccgcgtcgctattcgagcactgtgcacgaggcctggaccagtgtctgacgctgaccggtaagttgggcttgccgctgattggttccggcgactggaacgacggcatgaatcgcgtcggtgccggcggcacaggagagagcgtctggctcggctggttgctgctggagactctcgcgcgcttcgatggctatgcccgttcgcgtgaccctgagcgagcccgtcactggcgcgaacatgccgggcggttgcgtctggccatggagcgcgaggcctgggacggccactggtatcgccgagcgaccttcgatgacggaacctggctgggttcgaaggatggtgaagcctgccgcatcgattcgatcgcacagtcctgggccgtcctggcgggcgccgacccactgcgggcgggaatggcaatgaccgcactggagaggtacctgctacgtccagtcgatcgattggcgctgctgtttacgccccctttcgacgagaggggcacggatcccggctatatccgcggctacccactgggcctgcgggagaatggcgggcaatacagccacgcggccatgtgggcggtcctggcatttgtccgccagggcaaaggggacaaggcggggacattgctttccttgctcaatccaatcaaccacgcgctcacaccggaacaggtggaacgctatcgagtggaaccctatgtggtggccgccgatatctactccgaggcgccgcatgtcggccgtggtggctggacctggtataccggctctgccgcctggatgtaccgcgccggactcgaaggtttactgggaattcgccggcagggtgcctggttgctgattgatccgtgcattccggtgacatggtcgggcttcgaggtaagcctggaggtggagggggggcactacgagattcaggtggagtccggagaagggcgaagccacggcgtgcgcgaggctttcctcgacggcgtcgaagtggagtgtatcgatggccaagtgcgggtgcctctcgattgtcagcgacaccgcttgcgactgagcctttag

SEQ ID NO: 333033 - DNA, 561 bp, Pseudomonas aeruginosa
atggggcgcacctcgctcgtcttcctcaagtggcagctcaagcacagcagtatgagcatgacccagctctacgcctccaatccgctccaggatctgacgctgttcgatgagatcctgcagcagatgacggagttcaagatcgacctcattgagtcctggcttgatgaccagcctttggcaggtggtgccgggagcaaaatcgttgagttgcgtgcgattccggtcaaggacagggccgccttgctggcccaaacggcacctcatgcgaacattcgcgcaaccggtcacggatggtgcattgccactgagcgtggttgcggaggcgctgggttgtacgaggccaccaggtgccctgggtgcaaacactcggtgatcgatgagacgtttgcaggcacttggcaaggcatctactcccagcaacgggagctaatgaaaattgaggacgcagggccggcagtgaaacagcgtgcagagcgcgacctgcaggtcgccctcgacgtgatcaatagtcttgggttgtcgccggatgaccaggagcttgaggaggctgtgaatggctag

SEQ ID NO: 333034 - DNA, 672 bp, Pseudomonas aeruginosa
atgaagaaaattacggtcgaggtctggtccgactttgtctgtccctggtgctggatagcaaagaagcgcctggagcaggcaattgatgctctcggggaccaggtcgaagttgaaatcgtgccacgcgcataccgcttggccaaaggcatgagcccgatcccttttaaagaggcgctcgtacaaaaaacaggcagccagggccgagcggatgtgttcatgagggccattcgcggagctgcttcacgtgagggtttggactatcgatttgacgtcatgcgcttcggggacacgtccgcggctcatcagtacgtcaaggccatcgccgatccggcgttgcaggtccgctatgtagagcggctctatttggcgggaactactgagggcaaggacatcttcaacgcacgagttctgcgagatctggcgattgaaataggtgccaccgacctcatcggctttgattcggcggaggccgcaatcctgagcgatgaaacagcagtaagcagcctcggtaccggcattccgttgttcgtgatcaatggtaatcgctacatctccggcgctcaggaacccgcagtgtttaccaaagtgctccgcgccgcgattgaagagctttcgagtgatgaagaggcaatcagtgcaaccagctgttcgatttctggctgttcgcactga

SEQ ID NO: 333035 - DNA, 1446 bp, Pseudomonas aeruginosa
atggccctcatgttcccgcgcttggcgcgcaactttgcacgcaacggctacttccctaccgatgaggtcaccctcgaacgcgctctgcaggccctcgctcccgccccgtcgggcaggatgaggatctgtgatccctgcgccggtgagggggttgccctggctgaggcagcacacatcctcggccgcgacaaggtccaagccctcgctgtcgagtacgaccgcgagcgcgccgaccatgctcgaggcttgcttgaccgagtgctgcacagtgaccttttcgacaccatgatcagcaggcagtcgttcggactgctctggctcaacccgccttatggcgacctggtggcggaccactccggtgcgtcgcagtaccagggcagcggccgcaggcgtctggagaaagcgttctaccagcgctgcctgccgttgctgcagtacggcggcgtcatggtcctgattgttcctcactacgtcttggacgatgagctgaccggctggttgagcaaccacttcaccggcctgcgcatatacgcagccgcggatcctaccttcaaacaggtggtgatcttcggcatccgggtccgtcgacaggacctggcccgggcggacgccaatcaggtgaggtctcgcctgcaggcgatcggcgcgggccaggaaaaggccgaggaaattccagcggcttggccgtgggaaccctatgtggttctgccggccaccagcgagctggagcacttctatcgagtaaccctggagccggagcagttcgccggcgagatccagcggctgcgaggtctctggcctgacttcaacctgcacttcgcgcaagcggggctgcagccccgccctccagtccgcgagctgtctcgctggcacctggctctggccttggccgccggcgcgatttccggcgtcgtgcgctcgaagtcgggccgcatcctggtcgtgaagggtgacacctacaaggacaaggtccgcaagaccgaattcaccgaagacgaagacggcaacatcaccgaggtgaggatactcacagaccgtttcatcccgatcatccgggcatgggaaatgacaccctcctcggtcaatcagggccgcgtgctgaccatcagctcgtcggctgcgaccacggaagaggctgaagagccccaacctgagccggcccccgaaccgctgctgttcagccctggccaagtcgtaatgaccgctgccgtgagccacctggtggaaaccggtcaactcaacccagcgcctttgctgaaccgccatctggcgggagattgggggacgctggaccaggaagactggaacaccaaccagagagccctgaagttcggcgataggctgctgtcgtcctacgacatcgacgccggcggcgaatccaggctctggatcatcactgaggccaatcgcagttcgaccaccctgttgctccctagcgactactga

SEQ ID NO: 333036 - DNA, 171 bp, Pseudomonas aeruginosa
atgatcgagctgcacttgctggactgctcggccgggcaatggggctacaagaccattccggagaaagcaggcccgttctactacggctgtccgctggagttcctggacctggctcacgatgagaccaaccaggagtggcgagaccgtctgacgcaagaacaccaagcctga

SEQ ID NO: 333037 - DNA, 1476 bp, Pseudomonas aeruginosa
atgcacaacgagtcccgccctgaagcccccttgcgggtgctggtggtcggcgccggcttcgccggtctcggcctggcgatccgcctgcgacaggcaggcatcgacgattatctggtcctggaaaaggccgccgatgtcggcggttgctggcgggaaaaccgctacccgggcgccgcctgcgacgtcccctcgcatctctattcgttttccttcgagccgaaggccgactggtcgcgcaagttcgccccgcaggcggaaatcctcgactacctgcggcattgcgcggacaagtaccgtctgcgcgagaagatccgtttccactgcgaggtggaggaggcccgtttcgacgccggcagcggcgaatggcaggtgcgctgcgccgatggccagacgctgcgcgcacgggccctggtctgcgccaccggccagttgagccggccgctgctgccgcgcctgcccggcctggagcgcttccagggtccggcgttccactcggcgaactgggacgccgaggtcgagctggccggcaagcgggtcgcggtgatcggcaccggagccagcgccatccagttcgtcccgcggatcgccccgcaggtgcaacgcctgtcgctgttccagcgcagcgcgccttacgtgatcgccaagccggaccgcacctacgccgactgggaacgccgcctgaaggcgcgctggccgtggctgcaacgcctggatcgggggctcaagtacctgcaccacgaatcgcggatgctcgccttcgcgaccttcccggcgctgatgaaggtgatgcggctgagcttccatcgtcacctgcaccggcagatcgccgatccgcaactgcgcgcgcggctggttcccgactacccgctgggttgcaagcgcatcctgatcagcaacgactattacccggcgctggccaggagcaatgtcgaactggtcgacacgggcattcgcgaagtcaccgaagacgccgtggtcggccgtgacggccgccggcacgaggtcgacgcgatcatcttcggtaccggcttcgccgccaccgagttcctcgccccgatgcgcatcctcggcctcgacggacgcgacctgcggcaggcctgggcggatggcgcggaagcctacaagggcatcagcgtcagcggcttccccaacctgttcatcctttacgggccgaacaccaacctcggccacaactccatcgtctacatgctggaaagccagttcccctacgtgctcggctgcctgcgccagctccaggagcagggcttgcgctacctcgacgtgaagcccgaggtccagcggcgcttcaacctggaggtgcaacaggggttgcgccataccgtctgggagcgtggctgcgacagctggtacaagactgccgccggcaagaacaccaacaactggccgggctacaccttcgtctatcgctggcgtacgcgccggccggagcttgccgactatgacctggcccgctga

SEQ ID NO: 333038 - DNA, 825 bp, Pseudomonas aeruginosa
ttgctcggcgatgcaggggaaaccctggagcgcctgctgccgctgctcgagcagaaaaagcacggcgcctggcgccgccgggtcgagcgggcggtgacggccagtcgcgaggaagcccggcgccaggccgaagagccagccgacccgatcaacccgcagcgggtattccgttccttgtcggagcaactgccggacgatgcgattctctgcggcgacagcggctcgcataccaactggtacgcccgcgacatccgcatgcgcccgggcatgctcggctcgctgtcgggcaagctggcgaccatgggcagcggcgtgccctacgccatcgccgccaagctcgcctatccgcagcggccggtggtagcgatggtcggcgacggcgccatgcagatgaacggcaacgccgaactggtcaccgtgcagcagtactggcagcgctgggactcgccgaccttcatcgtgctggtgctgaacaacggcgatctcaaccaggtgacctgggagcagcgtgccctggccggcgacccggagttcagcccggcgcaggaagtgatcgatttcccctacgcgcgttatgcggacatgctcggcttcaagggcatccgcgtggatcgcccggaggacatcgacgccgcctgggccgaggccttcgccgccgaccgcccggtgctgctggaggtggtcaccgacccgaacgtgccgccgctgccgccgcacatcagtttcgagcaggccaagcacctgcttggcgccatgctgcaggacgatcccaagcgctggggggtgattcgccagagcgcccggcaggtcctcgcgcggcactga

SEQ ID NO: 333039 - DNA, 906 bp, Pseudomonas aeruginosa
atgtcgaacgaacagcttgcacatctaacccagccacaacgcgatcggctcgcgtttgtggagttgcgcgtgcgcttcatcggggagatacgccgccaggacttggtcacgaggtttggcatccagtccgccgccgcatccagggatctggcgctgtacaaagagttggccccgggcaacatcgattacgactccaagggcaagtcctacgtcctggggccggacttccggcccgtcttcgacttcccaccggagcgggtgttgtcgtggctgacccagggctttggcgatggtgagccgatgcggctcaaggcgtgggtggccagcgagagcccgtcacggctcacgtatccggatctggatgtgctggcgagcgtgacccgtgcgattcaccaggggtgtccgctcggtatcgagtaccactccatctccagtggtcgcaccgagcgggagatcgtcccgttcgcgctgatcgacaacggcctccgttggcatgttcgtgccttcgaccggaagtcccaggagttccgggatttcgtcatcacccggatcaagcgcccggtccttatgagggatgcagatgtgcagccccatgagcgcagtgatcaggacatccaatggacccggattgtggagctggagatggtgccgcacccggaccagccccgccctgaaattacggagatggattacggcatggttcgcgggtcactgcggatgaagctgcgtgctgccaccgccggatacatcttgcggcagtggaatgtggactgctctccggaccacagtttgcgcggttatgaattcaggctctggctgaaagatcatctggcgctgtacggcgtcaagaacgctatgttggcgccgggataccgctcgcccgaccaaaacaagggagatcaataa

SEQ ID NO: 333040 - DNA, 2079 bp, Pseudomonas aeruginosa
gtggcctacgacccaaaacgcgcgctggaactgctccgcatcggctccggacgcgctgatgccactttccgcgacggccaagaagacgccattcgtcatatcgtcgacggcaaaggccgcttgctggtcgtgcagaagaccgggtggggtaagagctttgtctacttcatcgcgaccaagttgctgcgggaagctggagccggccctgcgttgttgatctcgccgctgctggcgctgatgcgaaaccagatcgcagcggcagagcggatgggggttcgcgccgccaccatcaactccgataaccaggatgaatggaaatcggttgaagccaagctccgtcgaaacgaagtggacattctgctgatagcgccagaaaaactgggtaacgactggtttaacacagaggttctggctggtatcgcaggccagatttcgctgatggttatcgatgaggctcattgcatttccgattggggtcacgacttccgtcctcactaccgactgctggaacgtatcgccagaacgcttccagccaatctgcgcctgctggccacaacggcaacagcaaacgatcgggttatggaggaccttgtggctgtgctcggtcccaatatgaaggtgctgcgtggtgatctgaatcgaagttctctgacgctgcaaacgatgcgtttacccagtcaggctgtccgtctggcatggatcgcgcagcaactcagttcgcttccagggcacggcatcatttacacactcactatccgagatgccaatcaactggcggattggctcaaggcccggggctttgctgtagaggcctatacaggtaagacaggcgaccggcgtgaggagctagagcaggctctgcaggagaacaaggttaaggcacttgtagcgaccaccgcattgggtatgggctacgacaagccggacctggcattcgttatccattttcagatgcccggctcagttgtcgcctattaccagcaagtagggcgcgcaggacgagcgctggaatccgcatatggcgtgctcttgagcggagatgaagaagaaggaattaccgactggtttatccgtagcgcgttcccaactcgccaagaggtagacgatgtcctgggggctcttaatgaagcgccggaaggactttcaatacccgatctcatgacctgcgtgaacatgagcaaaggccgcatcgagaagacgatcacggcactctctctcgaatctccagcgccgatcgccaagcaaggtatgaagtggcagcttactgcagccgagctaggagacggattctgggcgcgagcagaccggctcaccaggttgaggcgtgccgaactccagcaaatgcaggaatacgtctctcagccttttgggcagcacatgggctttctgattgatgctcttgatagcgattcaagcactgtcagcccaccgtcgttgccgccgctgtcagaagacgtagatcagttgttggttcgggaagctgaggaatttctttgtcgcacaagtctacctatcgagcctcgcaaaaaatggcccgtggggggaatgccgcagtacggaattcacaccgcatccaccattccgtatcaagcgcagccaggcaaggccctctgcgtctggggcgatgccggttggggtggcttggttcgacagggcaaataccacgacggccacttttccgatgacctcgttgctgcgtgcgtgaagatgattcaagagtggaatccgcagccgagcccgacctgggtgacctgcgttccttcgcttcggcatcccgaattggtaccgaatttcgcgcaacgcttggctgctgcgctgggtctgccgtttcatatggtcatcgcaaaaacagacgcaaggcccgaacagaaaacgatggcaaacagtacacaacaggcgcgcaacattgatggttcgctcgcactcaatggccagcccattcctcccgggccagtcctcctggtggatgacatggtggactcgcgctggacgctgacggtgtctgcatggctgctgcgcaaaagcggtagtggcgcggtttggcctatggccctttcacagacggggcacgacgaatga

SEQ ID NO: 333041 - DNA, 1410 bp, Pseudomonas aeruginosa
atgacgccagtcctctcacccaacacccaggcgatcctgctgctgactgcgccgctcattgccggacgaggcactgcgtcatcggatctgctctcgcctggtgaatacaaacgtctcgcgcgtcatttgcgcgagatccagcgtcagcctgcggatctcctctcgccggacgcggctgagatcctgcgtgcctgccaaccggtgattgacgaggtccgcctgcagaaattgctggggcgcggattccttctgagccaagtgatcgagcgctggcaggcacgcgccatctgggtggtcagccgcgccgatgcagagtatccccgccgtctgaaggcccgcctgcgcgaagacgccccggcggtgctctacggctgtggagacatggcgttgctcgaaaccggcgggcttgccgtcgttggatcgcgccatgtggacgacgcgctcatcgactacaccatggcagtaggccggctcgctgctcgggcaggtagaacgcttgtctccggcggcgccaagggtatcgatcaggccgccatgcgtggcgcgctcgagggtggtggaaaagtttgtggcgtgctggcggacagtctggaaaagaccaccatgaaccgcgagcagcgcaacctgctgctcgatgggcagttggtgctgatttcgccctacgacccgagtgccgggttcaatgtcggcaatgccatgcagcggaacaagctgatttatgcattggcagatacctcactggtggtgagctccgaccttaacaaaggtggcacttgggcgggtgctgtcgagcagctcgacaaactcaagttcgtcccggtcttcattcgatcgacgggcgagtcttccgccggattggatggattacgaaagaaaggcgcacttccttggccgaacccgcaagacgtggattcgttcgaggacgtgttcaacgtggcgatgccaacgccgacgaaatccccacaggttggttttgcgctgtcttcaaacgaagaactaacgtcggctgacgccaagccaacggcgcccgtgccactcgacgcagcgtcagcgccccaggccgagagcgagccatcggcgtcggtcgacgttgtgtccgatgcgcggccacccgcaccagcattggaagagccgccatcagtcacaccaggggctttggcgtcgacagacgatgccaaggaatctgcgcggccggaatcgagcccagccgaagtgctcttcgctgccgtgcgcgccacgattaagcagctattgagaacgccgatgaaagacgccgaagtggcggccgcgctggacgtttccagcgcgcaggccaaggcgtggttgcagcgtctggtcgacgaaggcgtgatcgaaaaacggaagaagccagtagggtacgtcgtcaagcaatcgagtctgttcgagtga

SEQ ID NO: 333042 - DNA, 2487 bp, Pseudomonas aeruginosa
atgcccttaaccctgccacagctagaacgccacctcttcaaagccgccgacatcctgcgcggcaagatggatgcctccgaattcaaggaatacatcttcgggatgctcttcctcaagcgctgctccgacgtgttcgaccagcaccgcgagaagatcatccaggaggaaatggcagctggcttgaccgaagccgaggccatcgagagtgccgatcaaaaagactggtacatggaagaaggctcgttttgggtgccgccgcagtcacggtacgaatacctgctgaacgatgcacaccaaaatgtcggtgattttctgaacaaggcgctggccggactggaaaccggcaacaccagcctctacgacgtgctcgaacacatcaacttcacccgcaaggtcggacagagcaagattcccgacatcaaactgcgacagttgatcacccatttcagcctgcaccgcctgcgcaatgaggatttcgagttccccgatttgctgggtgctgcctatgaattcttgatcggtgactttgcggattccgccggcaagaaaggtggcgagttctatacgccacgcacggtcgtgagcatgatggtgcgcctgatcaaaccggagttgcagcaccacatttacgacccctgctgtggctccggcggcatgctgatcgcagccaaggaatacatcgacgaacaaggtcaggaaggccgcaaggctaacctgtacgggcaagaggccaacgggaccgtgtggtccatcgccaagatgaacatgctgctgcatggcatcagtaccgccgacctgcacaacgaagacacgctggccaaaccccagcacgtcaagggcggcgagttgcgccgctttgaccgcatcctaaccaatccaccgttttccatcccctggggcaccaccgacaaagaccaaagtggtcagtccacctgggcacccgagttccgttccgagcgcttcggctacggcgaagtgccactcggtgccaagaaggcggacttgatgttcctgcagcacatggtggccgtgttggcggatggcgggcagattgcaaccgtcatgccccacggcgtgcttttccgtggcggggaagaaaagaccatccgcgccggcatgatcgaggacgatctgctggaagccgtcatcggcgttgcccccaacttgttctacggcacgggtatccctgcatgcatcctggtattacgccaacgggtacagaacggtgcggagcgggtcagcggcaaaccgaaggaacggcaaggcaaggtgctgttcatcaatgccgaccgcgaatacttcgagggtcgggcgcaaaacttcctgatgccggagcacatcgagaagattgtcaccacctttgaggccttcaaggaagagcctggcttttcggccatcgtggacaacgccacgctcaaggccaatgtctacaacctcaacatccgccgttatgccgacaactctccgcccccagaaccgcatgacgtgcgtgcccatctgctgggcggcgttcccaaggccgaggtggcgcacccggcgaagaaggcgctgttcgatgcacacggcctgaacccgacggacttcttcgttgagcgggacgccacctattacgacttcaatcccacgttcagcgcgaagaccgagctcaagccggccattgagtccaacgccgggctgcaggccaaggaggccgccatccgggccgcgttcgaggcttggtgggccgcccacagccagcgcattaccgatttggcaggagcacaaagtttcgtagcgctacgcaatgagctgctggccagtttcagcacctcgctggagcagattggcctgcttgacccattccaggtgcgtggcatcgtggcgggattctggaaccagtccaaatacgacttcctcactctgatggcgcgcggctcgcacggcgtggtcgatgcctggcgcaccagcatcgtcactgcgctggaagacaaggcgaacaaggagagcccgctggaacacaagctggtcaagttcctcatgggcagctttgtggccgagctggaagaactggagtccaaaaagctggagctggaagcgcagatcaaggcagccaacccggaaaaaggtgacgatggcgatgaggctgccgaagcggaagaagcggacgaagacaacgccgtggatgaggcgcagctcaaagcctggaagaaggaactgaccgcgctgaagaaactgatcaaggccagaaatgacagcctgacccaagagctggacaaggcggtaagtcaactcgacgaacaatcggcgcgcagcctgttgctcaccatcttgcacgacgacatgaagcgcatcgtcgagcgctacatcaccaatcaacgtcagcaaatcgtggcggcgtttgagaattggtgggacaagtataaggtcacgctcacggagatcgagcgcgaccgcgatcaggcggccaagcagctacaggaattcttgagggggctgcgttatgtctaa

SEQ ID NO: 333043 - DNA, 1323 bp, Pseudomonas aeruginosa
atgtctaaaaaacactggcgtgagctaccaattgggaaatgtctaagtgagtcatttgccggtgaatggggggctgaacctaatccggctaatgctcgtgtcttgcgcgccacagacatcaataacgaaggtcagatcaatttgtctggcggcgcgcctaggcgaattcccgcaaaaaaactggcagataaacgattgcaggctggcgatattttgttggagggatctggaggtagccctgaacaaccggttggccgagttgctttttttccgggtgtcgaagggaaatgcgattttctttgttctaatttcttcaaaactctgaggccagatccatttaccgcaaacccgaggttcttgttttggaagctgatgtggttttacaagcagcctcggctcttgacgctgcagcaacaaacaaccgggctgattaaccttaaattcgatgagtataaggaatcgactgtttctgtccctgaggatatcagcgaacaaggaaaagttgccgaggttattgacaccctcgacaccgccatccatcagaccgaggccatcgtcgagaagctaaagcaggtcaagcagggcttgttgcatgacctgctgacccggggtgtggatgccaatggcaaattgcgcccgagttatgaggctgcacccgatctttatcagaagacagttattggatggcgccccaaggactgggagatctgccaagtttcctctgtgttatctggtatcgatgcaggaaagagccctgattgccaagatattccagcgaagggagatgagtggggcgtgctgaaagtcggtgccgttcatcctgacggcttgaaactaaatgaaaacaaggtcgttgaggaggcccgcctcaagaatcccgcttatcttgtgcgaaatggcgatttgcttctctcacgagcaaacacgtttgagctggtcggattggtttgttatgtgacgaaccatcctgagcgcctgatgctgtcggataagactcttcgactgtccgtaaaagccaatcggatgacgacgactttcctgttttggcaactgcagcaccccaagacacggacgcagatagaaatagccgcaacgggcaccagcggcagtatgaagaacatcagtcagggtggcgttgagaaactctggatttcgcgccctctgatcgacgagcaagaggaaataactaagcgactcgtcgctgcttcggatagatgtcgtgatgagcaggaaaagttgtcgaagatgcgcgaaatgaagtccggtttgatggacgaccttctcaccggccgcgtccgggtcacgccgttgctggcgcaataa

SEQ ID NO: 333044 - DNA, 3339 bp, Pseudomonas aeruginosa
atgggatgggaacttgaggacgtagaaaagccgttcgtcacacaactggaaggtctgggctggacgcatatcgagggaagcattgacgaccccgtggtcaccgggcgtagcagcttcacggaagtcatccaggaaggcgtgctgcgcaggaagctggccgaaatcaacttgcgcgaagtcgatggtgctctcgtgccttggctcgacgatgaacgcctgtctgaggcagtggctgcgatcacccgcattgcgcggcccaaactgatcgaggccaaccaggcggccaccgaattgctcttgctgggcatcaccgtcgatggcctgcctagctgggatggtggccgtggccagaccatccgctttatcgactgggacacgcccgagaacaacaccttcaccgtcatcaaccagtaccgcgtcgattgcccgccgggctacaactgtggcaaggcctttatcgtgccggacctggtgttgctggtgaacggcattccgctagtggtggtggagtgcaagagcccgtccgttccggaaccgctggccgaggccatcgaccagttgcgccgctacagcaaccagcggcacgccaaccacgaggtggaagacaacgagggcaacgagccgctcttcttcaccaaccagttgttgattgcatccagcttcgacgaggcgcgcgtgggaaccatcggcggcctgttcgagcactttgcaagctggaagacggtggcaccggcgcgggaggcagacgttgcggccagccttggcgttgagcatctttccgagcagcaacgcttggtagcgggcatgctcaccccagcaaacctgctggacatcgtgcgccacttcaccctgttcatgcaggccggtgggcagaccatcaaggtggcttgtcgctatcagcagttccgcgccgtgaacaaggcgatcgaacgcctgcagaacggcaagacccgtctgcaggatggcgagtatgaccggcgcggtggcgtgatctggcacacccagggttctggcaaatcgctaaccatggtgttcctggtgcgcaagctgcgcacgaatgccgccctgcgccgtttcaaagtggtggtggtgaccgatcgcaaagacttacaggaccagctaagcgccacggcaacgctgaccggcgaagtggttgaggtggccacgtccacagtggccgtgcagaagctggtgcgccgcaaagggccggggctgctgttcgccacgatccagaagtaccgggacccagatgccgccggtgagccgggcctgaccgaggaggatattccggaaggctggcacgacggacagatgggcgtgaaggagccaacggcggcggcctatgtggccaagcctgcggcgaaaacgtttgaagtgttgaacgaggacgagaccatcctcgtgcttgtggatgaagcgcaccgcacccaagcaggcgatctgcatgccaacctgctggcggggctacccaactgcgcacgtatcggcttcaccggcacgccgatcatcatgggtgacaagaagcgcacccacgagatcttcggcgagttcatcgaccgttacacgatcaaagaggccgaggaagacggcgcgaccgtgcccgtgctgtacgaggggcgcacggcgcaaggtgcagtcaaagacggggccagtctggatgagttgttcgaggacttgttccgcgagcgcagcgcggaagagctggaggcaatcaagcagaagtacgccacaaagggccagatcttcgacgccccgctgctgatcgcggacaaggcgcgtgacatgctgcgccactatgtgaccaacattctgcccaatggctacaaggcgcaggtggtggcctacagtcgcttggccgctgtacgttacgtggccgcgtttgaaacggccaggaccgaattgctggccgaggccgaagcgcttccacccgaagataaggcgctggatgacgaaaccctgtgtcagcgtccgcccaaggtgcaagccatcgtgcaggcctggcgctatcgcgacacgctaaagaagatcgagttcgcggcagtgatctccggtagcaacaacgacgatccggcctggaaacagtggaccgacgcagcggccaacgagacacgaatcaagcgcttcaagaggccgctgttccataccaagtcggaaaagaccgacgcgctggccttcctggtcgtgaagtcgatgctgttgaccggcttcgatgcgcccatcgaaggcgtgatgtatctcgatcggccgatccgcgaggcagagttgctgcaggccattgcccgcgtgaaccgcaccggctttggcaagcgctgcggcatcgtggtggactactacggcgtcgcccaacacctgaaggaagccctggccgcctacgctgacgaggacattcagggggcattgcagagcctgaaagacgaagtgccagcgctgcgcgatcggcacctgcgtgtggtggacctgttccgcagccgcgacatcgagtcactggatgacgtggagacttgcgttgaagtgctggcggacgaacggcttcgcgcggagttcaccgtcaagctcaagcagttcctgggttcgctggacatggtgctgccgcgcccggaagggttgcctttctccaaggacgccaagactctctcgtacatctacgcgcgggcccgcaatcgctataaggacacgccggttctcggtaaggatgtcggcgccaaggtccgcaagctgatcgatgaccatgtgatttccttgggcatcgatccgaagatcccgccgattgcactgaccgacgcggagttcgacacgcatctgtcgcgccaggcgaatgaccgcgccaaggcctccgagatggagcacgccattcgctcgcacatccgcaaacatctggatgaggacccggtgctgttccgcaagctcagtgagcggctgagtgagattctgaaaacgctggcggatcagtgggatgagctgattgctgcattgcagaaaatcatcaacgaaatgcgtgccgggagctgcagtgacgacgcggcacccgccgacatgccggagcattacctgccgttcctgcgaatgctgctggaggccgtgctggggagcgagcccccgacggatgagcaattgctcaagattcgagacctgaccgtagagctagtcgacatgattgccggcgaactgaccgacaccttctgggaaccacacaagcggccagctcaggacgctttgggggcgcgcatcttcagaacgctgcgcacttcgaggctgattgcgcccggtgatgtctcagccctgaaggatcgcttgctggaattggcccgcgccaaccatgagaggttgatcaaggcatga

SEQ ID NO: 333045 - DNA, 696 bp, Pseudomonas aeruginosa
atgagcgtgctgaccgtagacgatctctccttcgagctgaaacccagcagtcggcgcagaacgctgcagatcaccgtggatcgcagcggcgatttggtgctgtcggcaccgcccgatgtggaagaggaacgtttgcgcgagttcgtcctggaaaagcgcttttggatctacaccaagctggcggagaaagatcggctgcaaaaggcagtaccgaccaagagttacgtcgatggcgagggctttctgtatctgggccgaagctaccgattgcgactggtggatgaacaggatgtggctttgaaactgctgaatggccgtttcctgttgcgccgcgatctggtcgaaaacgcccggccccatttggttcagtggtacagcggccgggccaagctttggctgtgggacaaggtgcaggactatgtggcacgcatggaggtccggcctgttggcgtgaaggtgcaggatctgggttaccgctggggatcatgcggcaaaggcgattggctgtactttcactggaagaccatcctgttgccgccgcgcatcgccgagtacgtggtcgtacatgaactggcgcacctgcatcaaccgcatcacacgccagagttctggcagcgggtcgaacgcgcactgcctgatttcgagcggcgaaagatctggctggcagaacacggcacggacgtagaagggatttga

SEQ ID NO: 333046 - DNA, 1995 bp, Pseudomonas aeruginosa
atggcacagaactatttcaacaatgaccatttcaagctgctgaacaagtggaagggaacggtctatgacaagaccaacccggagcagcagcgcgtctacgaggagctggggcaggcctacgatgtcaccaagcagtgggcagaggcgctgcaacagcaacttttcacggatgggtggaccaagactgttcgaaagcccactgatcaatggcagaagaagttcattccctacaactgggcccggatttacccatcaaatagcgcgcctgaagggctggcctacaccgtaggcatcgacgccgaccttggttttatggtcaagatcgacctcgtagatagtaaggtcgatgacccggtattgcgcaagaagtacgagcagattcgaggaccgttgaagtcttcgcccattgtggccatcaagtctgccaacgacggccttgcgctggattttactgcgctggtcgactggagcgcggaggccatcaagaacttcaaaatcagctacgacgatctggctgatcagttggggctatctgctgatgctgacaacgcaagcctgctggcgcacttccaagggcacgaggatttcgtcgaacgccaaccactgtggaccgccacgacgacagagctattcgggcgacttgcccgtgcagtcaacgagatggggttggactggtggttcacccgggccacaaacagccagctgcgcttcggacgcaaggaaaagggagcggtcaaaggtggccccgtcggatggctgttcttgcgcaaggatggcatccgggtcagctggtctgcctttgccgggctggatgagttggcgcctaccgatctcaccagcgagctggttcagctcttcgaggctgctgacaaagatgaaggcagttggccggcgaagctcggaccgcgtgcggggcgcaacggctactggcccgatgactacgacattgaagatgagcccaaaagcgacaagccgccaaagaacgtcatctactacggcccgcctggaaccggcaagacatttgatttgcaggccttgctcaagaaagagtacaccgatgccgaatatggcgagcgctacgagtttgtcaccttccatcagtcctacgggtacgaggaatttgtcgagggtctgcgccctgtgatcgctaagcgtggcaagaagcgtgcagcagacactgaggcagccgccgcgtcggatggtgaggtgcgttatgagatcaaacctggggctttcttgaggctgtgtgaccgggcgcgtaagaacccgtcgcggcaatacgcgatggtgatcgatgagatcaatcgcgggaacatcagtaagatcttcggcgagctcatgacactcgtggaagtggacaagcgcgagggtgcgaagtatcccgtctccgtgacgctgccgtactcagcggagagtttcagcgtgccttcgaacgttgatgtgatcgggacgatgaacacggcagaccgatcattggcattggtcgacactgcgcttcgccgtcgattcgagttcgttgaatcaatgcccaagccctcgattctggcaggcgccatcgtcacccacaacggcgtggacatcaacatcgagcagttactgatcatgctcaacaagcggatcgaggtcctgtacgaccgcgaccacacggtggggcatgcctacttcacacgcatcaaagacctgaaagatgaagatcgcttcagcgagctgaaggcagtgttccggaacaagatcattccgctgctggaggaatactttttcgaggactggcagaagattcgactggtcctgggcgataaccagaagccgaagcaggagcatcagttcgtccatgaaatcggccgcggggaggatcttctggcactcttcggtcgtgagcacgagctggatcagtacgcgattcgttctcgctatcaactgaacactgctgctcttgatgagcctgatgcgtatgttggcgtttatgcagccaaaccagacgtggccgccggatga

SEQ ID NO: 333047 - DNA, 1338 bp, Pseudomonas aeruginosa
atgaattccctcacgatctttgagttcgacaaggtcgtcgaagcaaaggccggagcggtcgggcttgctgtgccaaagcgtgtcttcgcatggctggaaacgcagtcccttagaagtaatgaagattcccctggctggctcaagccgacccagttgaatagccagcgggccatacaggtcaccagctatgtcggcgttattcgcgccccttgcggatatcagatcgaggtattaccaaagaccggaagggatacttcgcctgagcaggcgcgtgcgctcctgatcgagatgttgaagtgcctggccgggtttcgacacatcagaacagccaacgcagacttggtcgcggaacgcatgcctctcctggaggtgttcatccagcagttcctgatggccgtcggttcactggtcaagcacggactgcgcagtgactacgtcgtgcgacaagataacctctttgcacttcgtggccggctgttggtggcacgacagatctcacagaatttggtcaggcgagatcggttctttaccgagcatgacgagttttcgcaggaccgcgcagagaacagattgattcacacggcgcttcgccatgtgctgaccctgtgccggtcacaggagagccagcgtgtcgcgcgcgaactcggtttcgtcttcgcagatgttccgctgtcagtcgatgtcgccctagacattcagcggatcaggctggatcgaggcatgggctactacgagtctgcactggactgggcgaaactgatcctgcagagcctcagccccatctctggcatgggaaagcaccatgccccgtcgctgctgtttccgatggaggctttgtttgaggcgtatgtcgagaagcacttggcgaggcagttacgcgatgacttcgtcttgacggcacaggcaagcagtcagcacctcgttgctcatgacgcgcagcgatggttccgcttgaagcccgacttattggtcaagcagcagcaaaccacacgattggtcttggacacgaagtggaagctgctggattcggcgaaaaagaacagacgagagaaataccaactcagccaggccgatttctatcagctgtacgcctacggacatcactacctggacggcaacggggacatcgtattgatttatcccaagacggatacctttgcagaaccgctgcctgtcttcgaattcccgaaggcgaatgggatgcggctttgggtgctgccgttttgcctcacaaagcgccaactcatgttgccggcttcgccagcattcgacgtcactttcattcaggacaattcaaacaaagcctgggccgacaccttggacgctgtcccggcttga

SEQ ID NO: 333048 - DNA, 510 bp, Pseudomonas aeruginosa
atgtcgcaactgtccttttcctcgttcgatgacgctttgctggtgcgtgacgccctggggcgctacctgccggcatcggtggatcaaattcttgaagcggcgcgccaggccatcgagatgaagatgcagcgtggcgctgagttcacttccccggcgctggtcaaagagtacctgcgcaacaagctggcaggttttgagcatgaagtctttgcggtgctgtttctggatacgcgccaccggctgatcgagtaccgggagatgtttcacggcaccatagacagtgcttcggtgtacccgcgtgaagtggtcaaggaggcgctgcggctcaacgcggcggcggtgatcctctcgcacaatcatccgagcgggaatcctgagccaagcagtgccgacaagacgctgacgcagcggctcaaggaagcgttggcactggtggaggtacgcctgctggatcacatcattgtggcaggaggagccacagtgtcgtttgcagaacacggactgatctga

SEQ ID NO: 333049 - DNA, 993 bp, Pseudomonas aeruginosa
atgccgcgcgccaggcagcggcgcgctggttacggcgagcagttgatggcccggctgtccgccgatctgacgggtcgatttgggcgcgggttcagcccggacaacctggaaaacatgcggcgcttcttcgtcgcttacccccttgaggtaatttccgagacactgtctcggaaatctggagacagactacccaaaaagaattccgagacggtgtctcggaaattcgacctctccgagctggctcaggtcttcaccttgccgtggtcgacctatgttcggctgctgtcggtcaagaatgaccatgcccgccagttctacgagactgaggcgctgcgcggcggctggagcgtgcgccagctagaccggcagattggcagccagttctacgaacgcacggccttgtccaaggacaaggcggcgatgctggtcaagggcgcagcgccgaggccggaggatgccgtcaggcctgacgatgcgatcaaagacccctatgtgctggagttcctgaacctcaaggacgagtattccgaatccgatcttgaggccgcgctgatccagcggctggaggattttctgctggagttgggcgaagggttcaccttcattggacggcagcgccggttgcgtatcgaccagacctggtatcgggtcgatctgctgttcttccatcgcaagctgcgctgcctggtcatcatcgacctgaagctgggcagcttgacccatgccgatgtggggcaaatgcatatgtactgcaactatgccaaggagcattgggcctacccggacgagaatccgccggtgggcctgatcctgtgtgccgacaagggctatgctttggcccggtatgcgctggatggcttgccaaccaaggtgatggcggcgaactaccggacggtgctgccggatgccgagttgctgcaaaaagaactggagaacacgcggcgtctgcttgaatctcgcggaacactgtccctcaaggacgacaagccatag

SEQ ID NO: 333050 - DNA, 942 bp, Pseudomonas aeruginosa
atgaacgactccatccacggcggcctgcgggtgtgccagagcaccccgctggtccagttgcaggatcgcggccgcttcggctgccgccatctcggcgtgacccagggcggcgccctcgactggctgtccatgggctgggccaactggctgctgggcaatcccctggacgccgcggtgatcgagatcgccctcggcggtttcgtcgccgaatgccgtgccgacggctggttggccctggccggcggcgacctcggcacgaccctcgatggccagccgctaccggcctggggcgcgttcgccgtgcgcggcggccagcgcctggccttcgcccacccacgccagggcgcccgcgcctacctggcggcgcccggcggcttcgccggcgagcgccagttgggcagcctggccacggtggcccgcgaaggcctgggcggcccccgcgccgacggcaaggccctggccgcaggcgacagcctcggctggctggccgatggcgcgcgaccgcgcgcgctgcccctgcccagcgaacggatcatggactgcaccggcgaagcgcgcctggagctgatcctcggcgcgcagatcggcgacttcccggccatgagcctgttcgatgcgttcaacggcgactggcaggtggatacccgcgccgaccgcatgggcgtacgtctgctcggcccgcgcctggaatgccggcagcagtcgatgatctccgaaggcatcgccctcggcgcggtgcaggtgccgccggacggtcagccgatcgtcctgctcaacgaccgccagaccatcggcggctacccccgtctcggcgccctcgccccgctggcgctggcgcgcctggcgcaatgcctgccaggccagccggtacggctgctgccgacggtgcaggaggcggcgcaccgcgagcatcgacgcctgctggcggcctgggacgcatag

SEQ ID NO: 333051 - DNA, 3258 bp, Pseudomonas aeruginosa
  misc_feature (3166)..(3175): n is a, c, g, or t
gtgaacgtacaacagagcaagttcaggctgagccgctgggcgggcgcgacactggcgctcggactgctgctgtccgggctgggcgcctgggggctggcgctggtcaacgagcaacaggcgcggatggcgctggaacgcgaggcggaactgctggccgaggcggtgacccgccgcgtggaactctaccagtatggcttgcgtggggtgcgcggtgccttgctgacggcgggcgaggcgcacatcgaccgcgaactgttccgccgctacagcctgacccgcgacatcgaccgcgagtttcccggcgcccgcggcttcggcttcatacgccgggtggcggccgccgacgaggccgggttcctgcgccaggcgcgggccgacggccagccggagttccgcatccagcaactgactccgcacgatggcgagcgctacgtcatccagtacatcgagccggtggcgcgcaacggccaggcgttgggcctggacatcgcctcggaagccaatcgccgggaggccgcccgcgccgccctggagaccgggcaggtgcgcctgacggggccgatcaccctggtccaggccagcggcttgcgccagcaatcgttcctcatcctgatgccgatctaccgcagcggcatcactccaccgccggggccccagcgcgaactcgaaggcttcggctggagctatgcgccgctgctgaccggcgaggtgctggccgggttgcccatcgacaacgcggcgatccacctcgaactcagcgacgtcaccggcgacggcgctgccgtgcccttcttcgtcaacggcgccgcggcgccggctcaacgcctgttcggccacatgctgcggcgggagatctacggtcggcactggcagatggcgttcagcgcactgccgctgttcgtccagcgcctgcaccagccttcgccgcgcatcctgttcctggccggcagcctggtcagcctgttgctggcggcgctggtcaacgccagcgccctcggccgcctgcgccggcgtcgggaggcggcgacccaggcgcggctggcggcgatcgtcggcaattcggcggacggcatcatcggcgtcggcctcgacggcgtcatcagcgactggaatcgcggggccgaggcgttgttcggctaccgcgaggagcaggcggtcgggcggcgggtggtggacctgctggtgccgccatccaaggagaacgaggaactcgacatcctcgcccgcatcgcccgtaaagaacaggtggtcagcttcgataccgtgcgccggcaccaggatggccacctgctcgacgtggcggtgaccgtctcgccgatcctcggtccggacggcggcgtggtcggcgcctcgaagaccgtacgcgacatctccgcgaagaaggccgccgaggcccgcatccgcgagctcaataccggcctggagcaccagatcgccgagcgtaccgccgaactgcgtcggttgaacgtactgctcggcagcgtgctgcaggcggcgtccgaggtgtcgatcatcaccctcgaccgcgacggcatcatcagcggcttcaatctcggtgccgagcggatgctcggctaccgcgccgacgaggtggtcggcaaggcctcgccgaccctgctgcacagcgagcgggagttgctcgcccgcggccaggagctgggcgaggagggtttccgcgtgctggtggcgcgggccgaacaggagggcgccgagacccgcgaatggacctatctgcgcaaggacggctcgccgctcagcgtgacgctttcggttaccgtcctgcgcgacgaggctggggcgatcaacggctacctgggcatcgccgtcgatgtcaccgaatggcgcaacgccgagcgcgagatggccgcggcgcgcgaccagttgcaaatggccgccgacgtggcgcgcctgggcatctggcgctggaacctggccgacgacagcctgcagtggaacgagcgcatgtgcgagctgtatggccagccgctggcgttgcgcgacggcggcctggtctacgagcattggcgcagccgcctgcatccggaagacctcgagcgcaccgaggccagcctgcgcgcggcggtggaggggcgcggcaactacgatgtgatcttccgcgtggtgctgcccgacggcggcatccgcttcatccaggccggcgcgcaggtcgagcgcgacgccgacggcaacccgctgcaggtcaccgggatcaatatcgatatcaccagcgaccagcaactgcaggcgcgcctgcgcgaggccaaggagcaggcggacgccgccagcgcggcgaagtcgtcgttcctggcgaacatgagccacgagatccgcacgccgatgaatgccgtgctgggcatgctgcaactggcccggcagaccgatctcaacgaacgccagcgcgactacctggacaaggccagctcggcggcaacctcgttgctcggcctgctcaacgacatcctcgactactcgaagatcgaggccggcaaactggtcctggaaatgctccccttcgagctggagccgctgatgcaggacctggccgtggtgctctccggcaaccagggcgacaaggacgtcgaggtgatcttcgacatcgatcccgagctgcccagcgcggtggtcggcgaccgcctgcgcctgcagcagatcctcatcaacctggccggcaacgcactgaagttcaccgcccgcgggcacgtcctggtgagcttgcggcgtctggcgcacgacgcccacctggtgcgcctgcgggtgctggtggcggacaccggcatcggcatcagcgcggaacagcagcagcgcatcttcgaaggtttcacccaggccgaggcgtccacctcgcgacgcttcggcggcaccggcctcggcctgttcatatgcaaacgcctggtcgacctgatgggcggtgaattgcgggtcgagagcgcgccgggcagcggtagccggttctggttcgacctggacctcgacgtcgcccacgaccaaccgctgcgtgcggcctgccccggggccggcgaaccgctgcggctgctggtggcggacgacaacctggtggccggcgagctgctcgaacgcacggtcggcgccctcggctggcgcgccgactgcgtcggcagcggcagcgaggcggtggcgcgggtccaggcggcgatggccgagggcnnnnnnnnnntaggcggtgatcatgatcaccatgggcggtggcgcgggtccaggcggcgatggccgagggccgtcgctacgacgtggtgctga

SEQ ID NO: 333052 - DNA, 309 bp, Pseudomonas aeruginosa
atgcccttcgtctatctcggcctgactcgtgacgccggaacctcgaaaaagaccggcaacgcctacgacatttcggtcgttcacttcgctgtcgatgcaacgcaatcgacccgtcccgatcgcaagtttgcccttggtctggaaccgcaaaatctgccgatcgcgcctgaagctgtgagccagtttcagcgcgttgagccgctgtcgtcggtgaacttcgagttcgagccggaccctcggaacatgcagcgtaaccgcatttgcggcgtgaagccggtgccgaaagcggctgctcaggcggcgtcgtaa

SEQ ID NO: 333053 - DNA, 237 bp, Pseudomonas aeruginosa
atgcgcacggtgagcttccagggctcgaccctttcggccagtgaacgccgctcgcttgagcttcgccagcgtgccatggcggcggtaagtcaaaccgttctgcagcagcaggttgcggccacgctccaggcgctggagcagcacaaagagcagggcggcaagcccgaaaaggtctggtcgacgatctccaacgaaaagggcacgccgttcttgggcgacgtgttcgggtggccgtga

SEQ ID NO: 333054 - DNA, 552 bp, Pseudomonas aeruginosa
atgattgacccaaccgacaagcaaacccaacccctccccctggagcagccgaagcgcgggcgcggtcggccagccaccggcaaagccctgtccgacgcagagcgggcgcggcgctaccgggcgaacaagaaaaagcgtgacgatcaaccgtcacgaaaagagagcaaggaagggaaactggcgctgtaccaaacagtgatccagcaagctgagcaaatacaggcgcttgagcagcaactggtgcagcagcgcgaggaatacaacgaactggtgcaaaagctcatgactgaacgcgaccagctcaagcgcgacctggctgccaagccaaggcgtcaccgcgatcaacctgccgccgaactgccagagagcgcctacgaggacgaacccgaggcgaagacctggacgctccagggacgcagcggaagcggcaagtggcagaacctggccgcaggcctggaccgcaaagaagccagccggcaactggatcgagtgatcgacaacaagctgctgggatccacgaagggccgccaataccgactggttgaagaataa

SEQ ID NO: 333055 - DNA, 276 bp, Pseudomonas aeruginosa
atgcatctggttgcaaccatgcgcggcaagcgctttcgggatggtgttgaggaagagtttctgggcggttttatccagctcgcgaacaacgggcagccggtcagtaaggtgtcgtttgacgacctgcgtaccgcgggctattcgatcacttgggaatcgccgacggtcgtttcgctgacgtacaagggcttcgatatcggttacgtggtaacggatatgccgctggtatccgcagcaaaggacatcgcagtaaccacgcctgtgcaggcgccttga

SEQ ID NO: 333056 - DNA, 822 bp, Pseudomonas aeruginosa
atgcttcttttcccgcgtgacgttccacgtcgacagacagatgacgatcaggaagcacagcgcggcacctttgaacggccagcgcttccagatcggcacaatgtcattggcggccagttcctggcctgcggccgaggaccgcgtatgcgacttccagaatccgtagaactgtttctgatactcccggatgctggtattcacgacctcgccgcgcagaccgtcctggaccttccggatatagcgatcattggtgccgaaagctgtggctttcttacagcgatacacgacctggacaagatcacgaattgcacggttgatcttgccgtaactctgagtaatcaacagcacatcggccagttcgtgacgatgaagcgaataccactcttcaaccggcacaggcgtgccgcgcagcggtatcgaaaggtgacattcatcgatcacatacagcggcccgaatccttcatcaggatgccgccaagggtccgcataatgatcaacccggctaaacgggcgtactaccctactctcctcctcaccactctcattgttgaacacctcaacagtagaatcccgaagctcgatcaaatgccaagactccgggaaaaacgccttgaacttatccatatccaaagccaagttcgtgatgacctttcgcccttgattcaacgcaggaacaacatgatagacaacagcctcatgagactttccgccaccaggctgccccaggatcaagttaatcattacgacccccagcggacaaacgggatagtttgtaacaggaatcggacgaccagagcgccgacaataagcgttatagcctga

SEQ ID NO: 333057 - DNA, 1377 bp, Pseudomonas aeruginosa
atgggcatttatcgccggtatgcggcagcgtttctagcattcgcgttttttctctcctctgaagtttcgtattccgcgactcgaaagagcgtcaccgtgcctagtgcaagtgttgttgcgcgcggtggcggctctccttctgtttctggtccatctttaaagattcctggccagcctggtgttgaatatattcctcgatctggcggcggggcttctggtgttccgataaagatcatcccgacgattgatttctctatcccaaggactattaaaggtagtgtttcttcgctcaagggtggaattgctggcgttgctgcaactgcggccatgtcaatggctcttgatagtatcgggggctttattgatgagaatggtaagccggttaagaaagtaagtgacgccccttcgggggccgtggcgggcgtttattacgctaggccgccgcaaacggtcgggggtgtttatcttgatcttaagtatgggctgactcgccagcaggcctgcgaatatgaggttacccagagtggcaactgtgtaattagaattaatggcattgtgggttcttctattatttacgccaatagttgtgaccctggcgtgtggtttaatgtttcaactggcaagtgcgatagtttgtggaagcctggcgagcatacagagtcgttgactggcccggattatgacgatattacggattcactttctggtgtggttgatccgaattggcttaaagatttgctaacggcgacgtgtgaagggtctttgaatcctgccgcgtgctatgagcagatgtctgaaaccacgcatcttagcgggccttcatcggtgaacggccccaaggcctcgacgacgacgacgaccacgaatcctgatggcactaccagtacgacgacgaaggacactcaaactaagtatgagattaagtatggcgataactatatcgactatacggaaacgaccacgaccacgaccacgaaagacggtgataaaaccgaagagacgactacgaccgacactgatgacgtgacggcagaaattcctcccgaagagaaagaggaggagggcggtagttttgaagattccgaatttccggaagttaagccgttctatgagcaaaaatatgaggatgggttagagggtgtatggcgtgacaagcgcgccgaatttgaagatacggagtttatgaagtttctccaggggttcattccgtcgttttcggggcggtgtccggcatttgggctggatatgaatattgcgtcctgggcgaactatggttatcagcaattcgggtctatctgctatgtgcttgatttcgtgaaggcgattcttatggtttcggccttgttcttgtgtcgcgctctgatttttgggggttga

SEQ ID NO: 333058 - DNA, 135 bp, Pseudomonas aeruginosa
atggctgatattttcggtgcggtagacttttccagcgtttccacctgggtcgtaagtgccggtgttgcgatcatcggtattgcgatggcgttcaaagggatcgacctgggcaagcgcggcgttaagaaggcctaa

SEQ ID NO: 333059 - DNA, 237 bp, Pseudomonas aeruginosa; identical to SEQ ID NO: 333053

SEQ ID NO: 333060 - DNA, 1137 bp, Pseudomonas aeruginosa
atgttcatcgactggcttagcgtttcacaagagcaccctcacgaccttccggtcgtgtgcgacgtgttcacgctcacagtcgatgccagtactcatgaggttctgagcacccgtcagccgtggttcaagcatgagggtagctactccacttcgatcaagattagcgtccagggtcgcaaggttcgtgttgagggaaaccccagtcgaatcgaccgtcaagacaacctttttggctacgtcaccatcgagcagtgcatcgccgtctacaaccagcttctggctgagtacggccttcccgctttcacccggtgtactgaaatccatctccgcgacggggcttccggcgctcgccctggtgattgggttgctgatggatgcgctatcgaccgcattgacctgacgacaaatgtttccgtaggggagggcaacgtgctcgcctacctgcgtggcctctccacccagcgtattggccactccgttggctacctgtatccgaatggccggaccgttgattggactgctgccggcaaaaggaaaggtggtgtccgcctccagtatcgaaaggcgtacgacaaagcctttgaaatgggcgagcaccttcgcccgcgcgttctgcgcatgttcggcgatgaatcgccagagctggcctacgtggaccagctgatttcgtactgcaaccagcatggcgttgtgcggcaagaacaggaactgaaacaagagttcctgagccgtgagggtcttcgctactggggccttttcaacgaaaaccgtctccgcgacatacacgatgaattcctggcggtggacaagaaactgaaggtaacggccatggaccttgcgaccatttcccagcaactgattgccgagggtgttgttaccagcacctatgcggccaacatgaccgcgatggtcgctatcaattggagcaacgggcagcctttcgacaaggataatcgttccctccagaagcatcgcgcacgtcttcgccagatcggtatcgacatcgctaacccttgcgataccagccgcttcacgcccgtcatcgtgcgtcaggctcgcgatgtcacgaagacctacgaccttccgattccggactggtatcgccgtcctgtcggccatctgcggttggtggcctga

SEQ ID NO: 333061 - DNA, 330 bp, Pseudomonas aeruginosa
atgacccttgcagcaaacctgaaaaaatttcgggccgcccgaggcttgacgcaacagcaggtatacgaggccgcaggcgtgagcaagtccagctatacgggctatgaagcgggccatggaatgccatccgcagacaaagccctggccatggcaaaggtgctgggcgtaaccacagacgaactcttgatggacgagagcgaactactgatatctgacgacatgcgtccgatattgcggagattcgaagccctgccggtagagatcaggaatcaagcacggatagcactgaaaggagtgctattcgggtacgagcaagaagcacttcgttag

SEQ ID NO: 333062 - DNA, 552 bp, Pseudomonas aeruginosa; identical to SEQ ID NO: 333054

SEQ ID NO: 333063 - DNA, 1206 bp, Pseudomonas aeruginosa
atgactgcggcaacttgcggatgggtcaccatgagcatgcgggagctggatcgcctcaaggtcatcgaggcaatcatcgagggtcggttgaaacctgccgctgcggcgcagcgtctgcgcctgacgacacgtcaggtgcaccggctggttctgcgttatcgcgaggacggcccagccggcctaacatctcgtcgacgtggtcagccgagtaaccggcagttgtcgccaggtctggagaatcccgccattagcttgattcgacggaactatagcgactttggtccaactctggcccaggaaaaactggtcgagtgccacggccttaagctggccaaagaaacggtacgacggatcatggttgatgccggcatgtgggtaccgcgcaagcaacggccgcccaaggtctatcagccacgcaaccggcgcgcctgttgcggcgaactgatccagatcgatgatggaaagccgctggccttctacagcgacaaagccagcgtgttccgcagtaaccacaaggcgcctcagggcggcgacggctatacccagttcggccgagcgatgtacgagttgaacatcgagagctgcgccaacagcagccaggccaaaggtcgtgtggagcgtgcgaacctcactctgcaggatcgcctggtcaaggagctgcggcttcgcggaatcagcaacatggccgacgccaatgcctttgcagcccactttatggccagctacaacgcgcgttttgccaagccgccgcgctctgagcatgactgccatcgcccgctgcacagtgatgaagatttggagctgatcttcgcctggcgagaagcgcggcgggtttcgcagcggttgaccgtgcagtacgacaaggtgctgtatctgctagcggacactccgcagtcccgtcgcctggcgggtgatcacgtcgatgatctaccactacccgaatggccgcatcgagcccagggtggacggcaccgccctcccctttaccacctacgacaaactctgcgagatagaccagggtgccatcgtcgagaacaagcgcttgggtcatgtgctgcaagtcgcccagctcgtccaagcgcagcgcgacaatcggcgctcgcaatcggtaccgggaaatccgcggcagtcaacgcaaggcaagatgctgtcgaagaaggcgcagcgagaactgatgccggaagatatcgccgctgccctggataa

SEQ ID NO: 333064 - DNA, 1503 bp, Pseudomonas aeruginosa
atgagccattccgtccccaacgcgctgatgaccggcgccgactatctcgacagcctgcgcgacggtcgccaggtctacctcaacggcgaacgggtcgccgacgtcacccggcacagggcgttccgcaacgcctgccgcagcatcgccgggctctacgacggcctccacggcgagcagcgcgacgtcctcacccgggtcgatgcccagggccgccgcagccaccgcttcttcacccccgcgcagaacgccgaggacctgctcggcgcgcgcgaggcgatcggctgctggtcgcgcatgacctacggcttcatggggcgtaccccggactacaaggcggcgttcatgtccgggctggaggccggcgccggcttctacggcgactaccggcagaacgcctgcgcctggcaccgcgccttcgccgaccgcgggctgttcctcaaccacgcgatcatcaatccgccgctggaccgcagcaaggcgatccacgagatgcgcgacgtgttcgtccacgtcgaacgcgagaccgaccagggtatcgtcgtcagcggggcgaagatgctcgccaccggcagcgccatcaccaacgccaccttcgtcgccccggtcgcctcggcgcagatggaagccggcaaggccgaggacttcgccctggtgttcttcgcccgcatggacaaccccggcctgcgcctgatgtgccggccatcctacgaggagcgcgcgagcagtcccttcgactatccgctgtccagccgcttcgacgagaacgacagcgtgctgctgttcgacaaggcgctgattccctgggaggacgtcctggtctaccgcgacctgcgccgcgccaccggcttctatgccgagtcgggcttcgccaacctgtacaacttccagtccggcatccgcctcggggtgaagctggagctgatgatcggcctgctttccctcggcgtgcgcgccaatggcacccagggcttccgcgggatacaggctgccctcggcgagctgatcgccctgcagcacctgctgcaggcgctgaccaccgccatggcccgcgacccggagcgcaacgccgccgggtcggcggtgccgcgcctggagtacgccaatgccctgcgcatccaggtgccgcagatctggaagcgggtccgcgagctgctggaaagcgccctcggcggcgccccgctggtcaccgtctcgggcgccgccgacctgcgcgacggcgaggcgcggcggctggtggacagctactaccgcggtgccgagctggagccggagcagcgcctgaagctgttcaagctgatctgggacgccaccggcagcgagttcggcgcgcgccacgcggtctatgagagccattattccggcaatgccgagcagatccgcctcgactcgctggcctgggccagccgtcgcgggcacctggcctactgcgaggcgatggtccagcgctgtatggccgactacgacatccacggctggctgcgggggccctggcagcatgactga

SEQ ID NO: 333065 - DNA, 306 bp, Pseudomonas aeruginosa
gtgcgcgaccgggcctcctacgccttcgccctggtctcggtggcggcggccctggaacctgacggcgagcgcattggcgaactgcgcctggcgctcggcggcgtggcccacaagccatggcgcgtcgcagagctggaggaacgtttcaggggccacccggcgaaccgggacagctatgtccgcttcgccgaagcgctgctgcgtgacgccaggccgctggcccacaacgccttcaagatcggattggcgcgcaacgccatcattcgcgcactggaagaagcccactcgggagggatcggccaatga

SEQ ID NO: 333066 - DNA, 1188 bp, Pseudomonas aeruginosa
atgaatcgtagggatttcttgatttcggtagggactattgctgccttcggttctattccctttatgcgccgcctcactccacccaaggctatggcgattcggaatgcctacagcctttggtacaacagaccggctactgtggatatccccggtggattctgtctgggatatgtgacttccagcggagaggttagcgttgttggggtaactgaccgactattgctgggtaagaaagttcgtttgcacacatttgatgatgcaagcgaccatggatcaccgtctttgctcaaggtcccaagtggaaagcatgcgggtcatatcttggcatgcttcagcaaccatgcgaccccgcttctgtgtgcccgaaccacccggcctgagtcgattgagtcatgggaagaaacgcgcataattgatctgggacgctcgacttatgtttcattggctgcgcttgcggatggtcaaatcatccttatgcatacgttgcaagagcgtaccggaaagtattcgacaggcgagtggcggcgtgtcgtcgccaggaccacgcaggatggcggtgacacctggagtgagccagtgcagattgcagggttcggtccaggtaccttcccttattcgacgcccctggctgttgccaaggatggacgatgcgcaatgagttatgccatctattctgcggtcgagaagcgtcaccaaggtcttacggtcattgttactggtgatgcatttcaatcgaaggtcgagattcctgtagaccttggtacagaggcgtcggctgatactgttccctacgaaaccaagtggctatccgaaagagtaatcgcggtgtcgtatagccaggtgagcgatgctggaaagatagctctcggcagggtcgcactggtggatgttacgcgtaggcaattactttccaacactccggtttctgaggtcgcagtgcatacctatgcgggcggcgtagctatcgcagctgacggtctttcagtcgtctattccccagttgctggaggaattgttcgtcagaacctggaaacaggagagactgtcagcctagtggaggctggtgacttttcttctccatcgttcattacctcacaaagtcaaacattgatcgttgcgctgaagaacccatcgatcaaaacgacaaggctcttctcggcagaggttctcgtcatgcctggtacatag

SEQ ID NO: 333067 - DNA, 336 bp, Pseudomonas aeruginosa
atgaagcccgccgttctcctcgcattgttgctcctgtcgctactaggcggttgcggggattcgtcgtcggacggcaagggcgcttccggaccgttgtccctgcgctgcggggacttcggcaaggtcgaggtactcgacggcttcgccagcctcaagctgcccgacggcaagaccgtccagtcgatgggcggcgacgtgcgcagtctcgccgacggccaggccctgagtgcgatttcctataccgacggttcggtgctgtaccgcgaagcgggcgagacgcccggctacctgttcgccccggccaaaggccagcggaagagctgcgaaatgcgctaa

SEQ ID NO: 333068 - DNA, 348 bp, Pseudomonas aeruginosa
atgcctttgaagcagttttccagtgcactcgttctcgcggtcctgctcgccggttgcagcagcaacggcgacggcccgtccaccgaaggcgccagcgtagccaccggcagcgccagcgcgcccgcggccaccccggcagcggatggccgttgcgacgccaacgcggtgcaggcctatgtcggcaagcaggcttccgcggccatcgtcgaggaggcccgccgcgccgccggagcggaagtcgcccgggcgcagcgcccgcacgatgcggtgaccatggactacaacccgcgccggctgaacatcgatgtcgacgacacgctggtgatcaagcgcctgtcctgcggctga

SEQ ID NO: 333069 - DNA, 195 bp, Pseudomonas aeruginosa; identical to SEQ ID NO: 322272

SEQ ID NO: 333070 - DNA, 1479 bp, Pseudomonas aeruginosa
atgaagatcctttatggtccaccggggacggggaaaacgtggcgggctgcccgcgaggctgtcagggctttagagccagagctttattcggatgcccttaaagaagcagatcctgactcagcgttacgtaggctccacgatagcctggtcgctgacggccgaattttgtgggtgactttccatcccagctattcctacgaggatttcgttgagggataccgaccaattgtcgatgatgccggccaattggcttaccgtgtcgttgacggaccgttcaaatcgctttgtctgcgggccagattcgaaacagatctgcagattggtgagcaattgaccgatggagcaggccgaccggcagggatcgtggtggagaaagacgccgggggatgggtggttcgtgtcactcccaaccggtcagatgaggtggcttccacgattgatagatacgttccaaggtacgtaattgatcgtgtcctcgccatggattatccaccccagattttctccattccgggaaaaagcctcctcgagctggcagattatggtatcgacccgaatgatcccgatgtacctgagcctcagggagatgagaccgaaacaacccgtgtaggctcggtcgtccgcaagatcgtggctgcgcgaaccggtatgttttcgagctccgatctgagtaattcttcccactatggttcggttgtcagacggcttcgtgagttgcaggcaaccggtccggctgccggaagctcggttgcccttgtgatcgatgagatcaaccgggcagaaccttcacgggtgttcggtgagctgttgacactgcttgaggctgacaagcgtgaaggaatgccggaagaaaagaaaatctggctgccatattcgaagaccctgttctcggttccggccaacgtatcaatcatcggcacgatgaacacggtggaccgctcgctgaccgcactggactttgcgatgcggcgtcgatttgagttcgcacttgtacccgcagagtctgagttggtgccaggtgactatggtggtgtggatgtccgtgctctgttgagtagggtaaatggtcgggtaactattttgcttggcagtggatacgagttcggccatgcctttttgatggaagggcgactggaggccatccgtttatcgatgtcctgggccgaggagtccgacagccgtctccgtactctggcccacgttttcaaagccaacatcctgcctacactggctgagtatttccatgatgactggagccgggtccgggcagtagccggcgaggtgagaagcgggacagagagcatcatcctgtttgagaccccgctgcgggatccgcagttcttcgcccgtctgccggatgaatatgagttctccgagacgaagtcgctgacctacgcccgttggtgggatccctgcggcgatgactgggattcggagcgattccggagttttgtggttgctcttgcggcaggcgaatag

SEQ ID NO: 333071 - DNA, 1239 bp, Pseudomonas aeruginosa
atgcctgtcccgtttcctgctggagtcgaccatcgtctgatggccgaccggctgatgcgtctcacggccgctgcaccgtttccggcattccgttggaagcggggcgtgctgcatgccggtgaggccgttggctgtgtccaagttggccgattgcggatcaatatcctgcccaagctcgacagcgatgagttggaccgggataagctgtttctgctgaacctgctgcgctcaactggttatctgagttatttgcatccagaaagtgccgaggtccgcgcaacatttctcgacccgctggaggtcatgatctccgaggcaattgctgaaatcgctgccacttggcgggagggtgcccccagacggtatgaggagaagcgcgaagacctgcatagactgcgggggcgtattgatttcacccaactgtctacgcgcccgcctggccaggtggttgttccggtacgtcattccccgctcggagtggacaaccgactcgcccaggcaatcaagagcattgccctacacttgcatcggataacccgcaacggggtaaatcggcagcgcctgggagcagttctggacaatctctcgaaggtgaagagcacacctgtagagttcagccatctggataccataaccctctcccgatatgaggcgcactggtccagaacgcttgccataggacggttgttgttggcggggcagtcccccgatccgactttcgggggcagcaatgaggcgttctcgctactcttcccattgccacatctctatgagcgggcactacggaaagttctggctacagtcatcagtggaagtgacatccgggtgagccatcgcagcgagcctctgtttctgctggccgactgtgatgatcagcgaggagttatgcggctaaggcctgactatgtctttgagagagggggaaggcatattgcggttgccgatgcaaagtggaagcgtgtacaggcctcagcttctgctcatggcatcgcacgagaagatctctatcagattcatgcctatctgtcgcgatacaaggtgaaggacgcgatgatccttgtgccctgggcgccctggatgtcgccaggctggaccaaggtctaccaggatcccgatagtggtgcccgcgttcatctggtgggcacggatatcgagggtctggtcagtcgcagtgcgacgacacgggagatggcctattcggcgctttccgatgtgctcggaggagtccttccctgctag

SEQ ID NO: 333072 - DNA, 615 bp, Pseudomonas aeruginosa
atgtggaggctgcagaccattccaagggttcacaaccagaacagctcaccatctactgaagcgccgcagactgtggacccggttgccctccgcagtgcaaacatggcgagaatcaggggtcggaatacgatccctgagatgcagctacgcaaagccttgtggcgtgaagggcttcggtaccgcgtacagctcagggtggaaggtacacgacccgacatcgtcttcacgtcctgtcggctagcagtgtttgtcgacggctgcttctggcatggttgcccgcagcactatgtaatgccccgctcgaagatggagttctggtcgacaaagctggccaccaacaccaacagagaccgtattcaaacccgccgcctgatttcaaatggctggcgtattctgcgcttctgggaacatgaggttgaaaccgaaccagagcgggtggtggcagagattattgcggcctacagggaaccagccatcccattcagggatagacgcatggtcgtccatgtagaacccgccaacccggacgggacccaggagctatggatgatcgaaagcctcttggagtcagaagaaggcagccaggaactacgttcaagaaaaccccgaagatga

SEQ ID NO: 333073 - DNA, 2013 bp, Pseudomonas aeruginosa
atggtccgagtgttcaatgacaaccacccctccccctccggcaatctacccatcgcgcgccaaagcgatatcaccgacttcatgaatgaagccgagatccagggctactacctagatcatctggcccgcaccaccggagatacaaaactcacaaaagaactgtctgagttgcccaagggtggtatacccggcctgagaaaacgtctgcgggagcttgaccagaactttctggatgagctggcctcccgcaggagcagtaccgagtatgtgtcaacgatcagaaagctgggatcggcggttctgggccagacttcggttttaggcttccacaatgcaaccaagctgcctggcagcggcacctcatatccaaagctaggcccactgatctggcatcatgacggcgaagtttctagcactgcccggatctttgatgcgccactggacgacaagctcgtgcgcgcctgcggtgcacgggcgcgaaagctttgggacggcgaaatcgaaaagctctcgacaagagcaactggtgccggacgcggccagttggcatccgcggccgatcggatcaaccgattcctagagttcattgatactccggcgatgcgcagtatccggtctctatggatcgattggcgtgcaacccgcgaagcgctgagaagatccttctttgaagatccacttctccaatgcagcctacggtcgatatatgaagacggaaggcaggtagcagtgctgctaggcggccccccctgccaaggattcagccgtattggacgaggcaagatacgtagcctgcgcgagcagagcgtccacgtccatgaagacgaggattccgtcgacagccgtaatcagctgatgcatcagtacgttctctttgtagctgcgcttgctcctcaggtcttcctgtttgagaacgtgcgtcatttccaggcagtcgtgaaatccgaaggtatcgaattcgatgcggcagatatcctggcggaggcgatcgagtcagtatctacccgagggctcggctatgcggtgtcccgacggatcgtggtggcctctcagcacgcagtacctcaggctcgtgagcgcttcgtcatggccggtgtccggaaagaccttagcaatcacctttcagggactgatgccgcctcttggtgcttgtcattgcaacgccgcgagccggttcctctacaggttgctcttgaagggctgccagaacccgagttcagcaatcaggatacgcaacagtccgcgctggcgaagtatgaagacttccagaccatcaccgcccctgacggcaatcaggccagtgatgtgttcagaaactgggcatttcgcggcccgtcagtcgacgcacatcttgcccgcccccccagaccggatgatggagccttctttgcacttatgggccctggaaaacggtggatggactatcgctgtgatgatgcccccacacttcaaaggcttgcagcggttctctcatcgattcggaatgccctggagaccacaccagatctcggttcgcggctgggcgtctcacaggaagaagtcaaaagcctctccgaaatcacggacggctccctgagccttcgtctgcttctggagagcatccctccgcatccaggtgagttgcagcatcatcttctaacagcaacctatttgcgcaagcgcgaaggttcccatggcgactggctgtcacgcatggatccggcacagccgtcgaagaccatagtcagccatatggccaaggacacttacgcgttcgttcatccgttccgcccccgcacactctctgtccgcgaagctgcacgtgttcagtccttccccgacgactatcgtttcgggagcgttggccttgtggatggtttccgggtcgtgggcaacgccgttcctccgctgctgagcctgcagttcgccgaacgggttgcacaggtgctggcattagtctatcaacagcagaacaatgtggaggctgcagaccattccaagggttcacaaccagaacagctcaccatctactga

SEQ ID NO: 333074 - DNA, 315 bp, Pseudomonas aeruginosa; identical to SEQ ID NO: 326731

SEQ ID NO: 333075 - DNA, 261 bp, Pseudomonas aeruginosa
atgagtgaggtcatcaacctgcaggcgctgctgcggcgcctggacgagcaagcctatgagcagctctgcgtcgaagctgcgcgccttgccgaagagaacgagcacctgcgcaccgagctgacccgcatggaggaatgtgccgaagggtggtgcaacgaggcccagcatctacaccagcaactggcggaggccaccggtggccaagccgctatcacccaatccggcgcactggtcgtcatcccgatggagcgctgcgcatga

SEQ ID NO: 333076 - DNA, 924 bp, Pseudomonas aeruginosa
atggcttacttcacaggaacagcgaacaacccggccgacttgctcgccaagctgcgcgtccacgccgagtcgctcggctgggtcaccgaccgcgcctcggcatcggaatggctttgtcacaacgccgacggctactggtcgttcaacgccggttccaatcaatggcagctcgcgggcaatacggggttcgacgacgggcttgcgtggaatgcgcagcccggcaactcggtgcagaacaacccgtattcgtcgaaagaagcaaccatagcgcagctcagcgccgggccattcacgcgctatcacctgttcgccaccgctgcctatctgcacctgcacgtcgaaatcgctgccggtcagtttcgtccagtgatgatcggctccctcaacaagcgtggcgtcggctatacgggcggccagtatgtttgcggctcgttcctctacagctctggccaggcgctcacaaacaactggtcatcgcatccattcgatggttaccacattcgatacagcggcggcggcagcatgctgcggctagacagcctcgacggtagcccatcgccggactggttgccgttcgactacacaacgaacgtctcccggcgcgtcgtcggccccggtcgcggaaactacagcagtcagtaccatcccgacgtggggctgatcgacgggagcgccaacgagctgaacagctcgaccaacgtggtgccgtgcgccatctatgcgttcggcgctcagcagcgctcgcggtatgtgggcgaggtgccggacttcgggctgtgcaacatggccttcctcgcgcctggcgatccgttggtggtcggcagcgacacctggcgcgtgtacccgctgctccggcgcggaaccgctaccgatttcggcaacaccagcgcctgggtcggctactgcttccgagtgcttgagtaa

SEQ ID NO: 333077 - DNA, 1704 bp, Pseudomonas aeruginosa
atggcgacgtttccggggttccaagtgccgaagcctgtggaggggatcgttgccggcatcacgccgaatatcgacgtcctggagctgaaccaggacatcagcctggcagcggttgcggcctcgacctgggccggggtctacggggcgcatcagccggtcgaggtgatccattcgtcgtaccaggctgtccaccaaagcgccctggaagagaactactacaaccgcttgtggctgattccgaccacaatggagctgggcaacgtcgtcagcacccaggtacgaccggcatcagtctggaacgcatatttcagtccgcgcacgctgaccgccatcgagcgggaagatgcagacggcatcacgctatccggccaggcgtcgccgccgctgggttttgccgccctggaagaacgcacttggacggtcagcattggcacggacggcccgcccgtcgtcaatgcgcggatcgtctggaggctccagggcgagccggacctggtcctggtcatcaccggcaatcgcatcatcgcttggacgttcgcgccggactggggcgacagcatcgtcgagcgcctgagcgcctcgacaaatatcctgcaaagcgaatcagccgtgacccagcgccgagccatgcgcctggcgccgcgccgggagttcgaagcgaacatgtacgcggtggaccgcgagcggcagctgctggacatgacgctgttcggctggggcgcacgcatttgggcgctgcctatctggcatgatatccaactgctccaggaaccgctggcggccggctcgctgaacattccgtgcggcacggccggcctcgacttccgcgacggcggtctggcgatgctgcgcggcgaggacgcttttacttatgaagtcgtcgaggtcaggacggtgaccgccagcggcctggacctagtccggcccgtccaagccgcctggggaactggctcgcgactgtacccggtgcgcaccgcgcagctgaccgaacagcccacgctgacccggctgaccgataccgcgcagtctgcgcgggtgtcgttcctggtgatggagcccagcgcctggcccgaggtaatgccggcgacgacctacaggggtcggccagtcctggagcagcgcccggacgaaagcgaagacctgacgtcgagttatcagcgcctgctgtccaccctggacaacggcagcgccattccccgcgtgaccgacgtcgccgggatggcgctgccggtcatcggccatcgctggatcggcatgggccgagccgagcggtcggcgttccgcagcctggtctatgcgctgcgcggccagcagaagtcgctatgggtgccgacccacgccgacgacctgaccctggtcgccaccgtctcgcagctggccaccgcgctggacgtgcgcaatatcggctatgcccgtttcgccaacggccggccgggccgtcgcgatatccgcatcgagctgtacgacggcacggtctatcaccgccgcatcctcaccagcaccgagttggacgccgacaccgagcgcttggccatcgacgccgccctgggccggctggtcgagccgaccgatgtagcgcgcatctgtttcatggcgctctgtagcgccgccaccgacgtggtcgagatcgagcacgtcaccgatagcgagggcgtcgcaactgccgccctgacgttcaaaggggttcgtgacgatgagttttaa

SEQ ID NO: 333078 - DNA, 822 bp, Pseudomonas aeruginosa; identical to SEQ ID NO: 330252

SEQ ID NO: 333079 - DNA, 240 bp, Pseudomonas aeruginosa
atggacccgatcacaatcaatctcgtcatcctggcggcgtcgtacatcctgtccagcgtcctggcgccgaaaccgcagaagcccaagccggcagcattcgatgccgctgacttcccgctatgcgaggaaggggaagaccaagcggtggtgttcggccagtgctggtcgaagtcctggatggtgctcaccgtggacaatcgtcgcctgaaggccatcaagaccaaggcgagcaagaaatga

SEQ ID NO: 333080 - DNA, 2208 bp, Pseudomonas aeruginosa
atgggcgctaaacccaaggcgcagatcgtcgcctggcggtattacttcgatatccactttgccctgggcaagaaggtcgacgaggtgtgtgcgatacgcgcaagcggcaagaccgcttggaagggctcgatcaccagcaacggccagattcgcatcaacgcgccggagctgttcggcggcgacaaaggcgagggcggcctcgacgggaccctggacgtgctgttcggcgacgaagatcaaggtgtcctgccacgcttggcggcgatgctcggtggccttgtgccggcgttccggggaatcagcacctgcttctattccggcttggttacatcggttaacccgtatccgaagaagtgggagattctgcgtcgaggcgggaaccgtttgtgggacggcaacccctggtatcccgaaaagcagttcatctggctggcggacggtcagatcaaggcgatgaacccagcccacatcctctacctggtctacaccggccgggatttccgggggctggcccgcacgcggatggacgaagccagttggcgggcggccgctgacacgctgtatgccgagggcgttggcttgtgcttcgagtggacccgctcggacagcttcaagaacttctgcgagacggtcaaatcgcacatcggcggcgaagtctacccgaaccgccagaccggacagatcagcatccggctcctgcgtgacgactacaacgttgcggacctgccgctgttcgacgaagacagcggccttctggaaatcacccaggagaagaccagttcgacatcgcttgcgccgagccaattgatcgtcaagtacattgaccagatcgacggggagcaacgccaggtcatcatcaccaacaacgcggtcgccgcgtcgcagggccgccggtcgtccgaagaaatcgagttcataggtgcgccgaccggcgagctggccgggcgcttcggtgagcgggaaatgcgcctgaagaccgcagggctaaagcgctacaaggccatattcgaccgccgcgcccgcagcctgaaccctggacagccgttccgcatccgttcgacccggcgcggcatccccgaaaccgtcgtcagggtcggccggatcgaggacaacttcctcggcgacggcaagatcgcgctgacggtcgtccaggaccagttcaatctgccggcgactaccggagtggcaccgccaccgccgggctggattccgcccgaccggacacctcgggcggtcactgtgcgccgcctgatcgaggcaccctatcgcgaactggccggcgtgatcgatccggcaaatctccagctcctggacgtgagcgcgtcctacttggccgcgctggccgaggcgccgaccagcctgtcgcagagctacaccttgaccgaccgcgtcggcagctctggcgcgttcgttgatcgcggaaccggggactggtgcccgaccggattactcgccgccgagctgccgctggcggccggcccgagcgtcgtcacgctgacgaacgccagtcggctggaggacgtcactgtcggccaggccgctgtggtagacgacgagatagtccgggtcgatgcggtcaactatgtcagcggcacggtcaccctggcgcgcggctgcgccgataccgtaccggccaaacacctggccggggctcgggtctggttctacgacacgttcgaagcggtggacgagacggtctacagccagggcgtgacgctccaggcccggctgctgacgaacaccagcgagggccaactggccccggcgctggctgccaccgacagcctcaccctgaccgggcgccagggcaagccgtatccgcccggccagttccgcatcaacggcagcgcgtacccaacgaaagtctacggggcgctgtcggtgagctgggcgaagcgcgaccgcattgggcaggccgaccagctgatcgataccactgtcggcaacatcggcccggaagctggagcgacggtgacgctccaggtctacagcggcacgacgctgaagcgcacctacgccggcctcacatccagtagctggtcctatccactggccgaggacatggcggatggtccgctccaggacgtgcgccttgtcctgcgcagtgtccgcgacggcatcaactcttggcagcagcatgacatcacaatcgaacgacacggccttggcttccgcctcggcgaggaacttggaggcgtagcacaatga

SEQ ID NO: 333081 - DNA, 225 bp, Pseudomonas aeruginosa
atggacgaggtacttaggcaaaggttgcgggctgaactactggaagtggggtttctcaaccagtgctgccttgatctcatggaaagcatggaggctgagttcagtctcactaaggaccagcgcgagtgcatcgagcagctcagccgattcttacgggagggcatcggcaagctgaccgctctgtctgaacgggtagccgacggcgatatcgtcgtcctgtgctga

SEQ ID NO: 333082 - DNA, 1746 bp, Pseudomonas aeruginosa
atgtctgttcagcaggtaagttcggcattagaaaggtttatttccgagcaggaagctaaagctattgtattaaaaggagactgggggactggtaaaacttacttgtgggattccgtgctcaagcaaaagaaagagaaaatttcacgtagaaaatattcctatgtatctctttttgggctaagtaacctttctgatttgaagcgtgggatattcgaaaatgtagtttctagcgagactgctgatgtcagtggtgactttagaagcttgatggaaaatgttgcaggagtcgggcaggcattagatagagcttttcggaagggggtgaaggtcactgcggaagcggcttctattccctttgttaaagggctggggggtgtcgtagatgccgtttcatttgccagcgtttctgattcactaatttgcattgatgactatgagagaaagagtccaggcctttcgggacgagagatattaggtttaatttctcatcttgttgagaagaaaaattgcagcgtaattttaatattgaaccaagggcaaatcgcaggtgatgctgcagagtatttgcagtttagcgagaaggtctttgactatgaggtggaattctctcctactgcggaggaagcggctaatattgtttttaactatgatgatggttatgaaagaaagattattgaaaattccctgattctaggtatatcaaatatacgtctcttgaagaagataaagtacttttctggggcgttaaagagtgtgcttgaagagtatcctgatgctgtatctaaccaagttattaatactctgactttggcggtttggtctatatattcaagtgatccagataaaatttccatttctgctatcagagagttcggtggtggtgggtttgagaggtttttcgaagaggccatggaaggtgaggatagtgaagttataagtcctaaaaataaatcttcgaatctactcaggaaatacggatttcttagttgtgatgaattagatgatgcggttatttctctagttgagaagggctatcttgatgaggtcggtcttagggggcttgcagaaaaagcagctgaaaatgttaggcatagtgaagatattcagctgctgcaagaaacgtggggagtatataggtgttcttttaggaataatgaggaggagctagtagctggatttgaaagggctatagccgcatgtctaaataaaatgagtgttatggacttggactccatttgctctatttatagaggactgagacgcgtagatcgcttggagcaagtggtcaatagctatttggaggggctgagggagcaaggggtggttgtagatagaagagaaatctttaggtggccaagggatatatatttatctgaagctctaacggcttatatagatagttctagagttgcaaaaagctttggcgattatattgttccgtatgcggggactaatggcttggatagagatgattatctgagtttgtctcgttgtgaagtggatgatttttataatttcttcgttggtgcggattccgaaaatcttcactcttggatttctttctgtttgggttttgcaacgatcagagcatcagatgatgagtcgcagcgggctttcgaacagatatttgtgagggcatttgaagcgatgctaagaataagggcagaatctaatctgaatactcttagaactgatgtgtatatgagttatcaggacgcttatgacgcattggttcgaaaggattaa

SEQ ID NO: 333083 - DNA, 1134 bp, Pseudomonas aeruginosa
atgaacgaccaatactttccggtcttgaaggccaaaaaaggcgagctagatgctctgagcaatctttcccaaagcgttcttgctagaacaacgccgatcattgaactcacaaagcttggcggacgacagctggaagctgcccagaagcggactgatactcccttcaaagattatattgaaaagtgctcagccgaaattgcgaaagcaattcctaaaaaacagttaatgctcgatattttccagtggccagaaaatttcctgatcgagtcaggcgagcatatcttgaattatgcaatcgaccagcttactgagaaaggaattctcccctgccctttaattggctatgaccgctgggaaacccctgaatataaagaggcgatcaagtctatccgactcggtaaggatcagtttttcagcattcgcttggatagcgtagcgttagaggacatgcttgaccctgattacttcaatgaagttattgaagacatagtagcagagaccaatctgatcccgctaaatacacctgtgattattgacctcgaagacattactaagaaatctgtcaacgacgccattgagacgattgggcgtgcctatgaacatatgcgttcactaggtttcacctatattatttcggttggcagctcaattcccacatcggtaaatcacgcagtaaaaacgccagactcatcagccacaattttcaggaaagaggtgctggcctggaaaggcttcttgcaggcatatcctacagcaagcctctactttggcgactatggtgttcgtaatccaagagcggctgataacattatcgcccctgatatgaatggaaaaatcaggtacacgatagaaaatagctacttcatagctcgtggacactcattacggcgagaaaacaaagcagcacagaacaatgtgcttgcccgagctatcgtagagtccccacattacatgggggagaacttcagctggggggattatcgaattatggaatgtagcaaagaaaagtttgtcggaaacccgaccacatggatatccattgacaccaatcatcatattagtgccctgactactgagatatatgaattcgccagtaaaattgctgcagcggcaacaagagctgcaaaggtctga

SEQ ID NO: 333084 - DNA, 1227 bp, Pseudomonas aeruginosa
atgaatactattgaagcaaaagtcattcgaaccgaagagcagtacagagagtacttcgacaaggttcaagagcttattcataaaatgccgatacctggcactgatgaaagtgacgaccttgagcttctgtccgtgctaattgaggactatgaaaaaaataaatatcccgtagaggcacccgacccaattgatgccattttattcagaatggaggaaaaaggtcttaaacaagccgatttggttccctactttggaacacggagtcgagtgtcagaaattctctcacgaaaaagacctctcacagtcccaatgatcagggcattagccataggacttggcatatcgactgatacgttaattggactttctgaaatagagaacactcctaaaaaagaaagtatcgactggaaaaaatttccagttgccgagatggtgacaagaggatggattcaaaaggctacggacaaagcgaaatccagtgccgaagaaatagtaaaaaagttcattttcgagatggggctccaaactggaggagcatcctttagaagaactctaaaaggtgaagcagcaacccccaccaccaattacactctgtacgcatgggtcgcacgaataattcaaaaatcaagagaaactcgaaaaacaatcgaataccaaaaagaatcaataaacaacggtttcattaaagaattagcacagctaagtagatttgaaagtggccccttgctagccaaaaaactactagaagaagcaggtatatctgtagttatagaaccacacctaaaaggaaccatgctcgatggtgctgcgttattagatacagacggaacaccaataattggcctaactcttcgcaacgacagaatagataacttctggtttacactgatacacgaggttgctcacatatggaagcatatggatgacaactcagaagcaatattagatgacctagaaagaccatcagaagacaaaagagaagccgaagccaacagaattgcaagagaagccttcataccgagatccatatggaaaaggtcagatgcctatttaaaccccagtaaggagtcgatattcgaccttgctagaaacttaaaaatacaccctgcgataatcgcgggcagattgcgacaagaaagcggcaactacaatctcttctctgaccttgtagggcaaggcgaagtaagaaatctgtttaaatccgaaatgcagggtgaaatgttatga

SEQ ID NO: 333085 - DNA, 264 bp, Pseudomonas aeruginosa
atgaaattgctagggcgtgagaagctcgtaaccctacggggggaaagcgagcacatagataagtggatttctaactgggtgagcgaaatttcgcacgcccactggaagcactcctctgagcttctagagcagtaccccaaagcccaaaagctggaagagaaccacttttccttttgcgtctgctcatcgggatactttctagagttgaaaattgcctttgcccaaggcattgcgatcattactaagcttattaaaaaactatga

SEQ ID NO: 333086 - DNA, 738 bp, Pseudomonas aeruginosa
atgagtgagtatggggtcttggtaaggaatggcttggggcagactgtaatagatggagagtttcataacctttctcttctgttggaaagaaatattgaagtcgagacaagtcagtggttctcactggattttccatatgcggtcacatcagctgcacctcctgttctagcagttcaagcttggaagaataaaattctttacttcgactcagtacagtatcgaggtgggccgggaaactggacaggcgccactctgagtttttcagggtatggaaaacatacatccggctccgtaagaattagagtttatgcctacgcattgcctttgctgagaggatatggacttcgtgttcgaaactcggcgggaagtgtcgttttcgattctctaagacttcccttggtttttagtgcggaactgggcggggcgccagaagattgggttagggtatctggggaaccgattataggagctggccgcatagacatatatcgcccagcgacatggggtcagcctgccgatagctacattgcagtaggcatggcacttgacgtggaatttggcagagtggcggtatctggtggtacggctaatgcaattatttatatacgctggggtttcactgaggagggagtgccaaggcttatgcagcatgcatataccgggcttccaagttcttatcctggaattccagctgctgtttattatgctatgccttcaattccgataataaaggcttga

SEQ ID NO: 333087 - DNA, 2166 bp, Pseudomonas aeruginosa
atgactgataaatttgatgaggcgcgggacgcagttaggcgacttgactggaaagcgtttagaaggtggttagatgctaatccaacagcctctgaaaagttttcagagactctgcagattatctggcaatcggactccatggtgagacgaagatctggtgatgacggcatcaagagagaccgttttcttgagaagctcagtgactatttcacagaccgcggagtctcgacagccgccgactcaatatcggagatgcgtactgaacttttgaaaattgaccgcggctatgtagaaatccactcagttgtacctaaattggactcagctaagttcaccccagagcagcggatatcagctgcctttgctgctctagacattgtgcttcgccaagtgctggatgattttgatcgaaaaatagacgccacgaatggagtattggatgtcggtcgcaacctaaaggctctgaaccatgaggtatacgacccaaactcaattactcatggccttacattagccgccggtgatgtcgttatgctggaggcataccagcagggatggttcgacacagcaggttgtattgcgctccctaatttagagcccgctgaggatggctccgctgatgcagtaatggcgaatctgtggaacgctaatacgtggcgaacctggaagaacatagatgaaagagtaagatttcttgatggaagtcttactcaaatctctgaagatctagacaactggaaggctaaagttttggcagaaggtggcccaaagatcgaaagtgatcttgatgtcgctttcgagttccaacccgataagaaccatgagacgtttgaggttttggctaacgagagattcgacactttttcagaacaaaacctattcaagctttaccgagtagcaagtcccgataagctggtcgaccaatccggcgattttgtggagttacctccaaccggctatgtatccactgacgagatacataccacacttatgtttagccaattcactaagctagacatctcaaaagcaaactcagacacgctctcaattcctgaaattcttcgggggtatgcagtcctaaagaaccatatagtgcttttggaacgtgaacaacatacatatttccccctaaccacttatgacaacttacatgcagaactgatgcgctgcggtttgactgcacatgcagccgactcattcattgggcgcgcaacgttccaacgatccagccgtgacttatatgatcagccgttagtgaaaacaacgaacaacagattctacatattcggagcctcgttgttacttgctgatctcacaaaaattctattctcaagcttggcaaattttggcactagctttgaagaaaagggggaaatgtatgagcaagcaaccatcgaaatgcttcgcggacatggtttcaatgctcgaaaccttaaggtcagcagaggaaacaagaaagagcatgagttcgattatgatgttgcttttacctgggaagactacgtatttttcctagagtgtaagaacagaggattgccaatgagcaaccctattgcaacctatcacttcaacaattcaatatctggacacatagcacaagtaaagcgactgcaacaagggctcatagattatccggacattctagaaaaggactttcctgaagccgtgggcaaaaaggcgatattttgcttagtaaatgccatgccatttgcaactggagagatccatggcatttacatggtagatgattcgatcctatcaagattcttcagctcaccaacttttggagtgaccgctggtcagcttgatggaaaaggcccccagaagcgcactgatctgatgaggatttggactgggtcaaaacccacgccacaggactttatctcctatcttgcaaggccaccacagcttgttctagcaaaggaaaactatgaactcgcaccaagcatttgccctttatcgttaagtgcctgcgtgaaaatttctgattatcgacgtaaagacttaaactcacatgagatttctgaactttttaagtctgggctgtcagctccaaaacgcaagcagccccaagcaggtgttaaaaaaaataaaactagcgataaatccaaaagaaagaaggctattaaggcatccaggaaagcccgggccaataataaaggttaa

SEQ ID NO: 333088 - DNA, 1308 bp, Pseudomonas aeruginosa
ttgaagctacacgtagccagcacccttgatgaactcgaaatgatgctgacgagcttcggcagtgatgtcctcttccgcggccaaaattcgcattacggcgagccaggtgaaccatcggtgggcacctcgttcgacaggaaggggtgcataccaagcgaaatgctgaaatggtgccgctatagccagaacgtcttggacgctttcatccaggggcaccgaggcgactttgcctatcagcaggcgctattgcagcactatggatggcgttccttctatgtcgactgcacctccaatccggctgtagctgcttggtttgctagccatagctattcggaggagccaaaactagagatcagcgaagactgcgacgagcgtccggtctggttgaaaaagcgaatggccaggtacgactttaccgaaggacaaggccatctatatgtactcgacaagcaggccgtggccgaggtaggcctggtcgacctggctacgctgacggtagatgggttccggcctcgcaccgtggcccagtcagcctggctcatcggccccctgcgcaataagccaattcctcagaattgctacattgcacagatttcagtccctcgaagtgtccttcgtgactatgctgccagccaaggcctgatggacaccagtaccctcttcccccctgcctccgaagacccgattcttaaagcgctgctgggcctaccttgggatgaaatcaaaatcgaggatggcatcaaagatctgcctgcattcaggcgagcgctcgacctccccgaataccacccgagctacttaaaaatcgcgcccgcgagcacagccttctatcggggagcgaagattctcgatactcaggattcgattgatggcagtgctgagggcgggattttggtgaacatccctgaccttgcgctttatggctctgcggacagaaacacccctctccgctttccccacattgacaagctgatcgatgaacatgggactgtggcttttgaggcggacaccttaatccaacatgcccagctaggtgatctaacactttatcaaaagggtgtcggagtgctgcgacgcgagcccgacctctttgaggtatgtgagttgactgttagtcatcctggacttgagatgacgggtgccggctttactgcgggctggttttatcgcaggcaagccaatggactgtggactcgagaggaaaacaagttggaatgctcttgtggcagcgagatcgtccatggtcgacatttatccgtactccacatcgctgaggaatatctgatggatcctgagccattcagctga

SEQ ID NO: 333089 - DNA, 2985 bp, Pseudomonas aeruginosa
atgtctgtcgcttttgatgttcagagcaacgtaggctcactttggcatcgctgggatccgcacatccatacgcccggaacggccctgaatgaccagtattccgggcccgatccgtgggaaaaattccttagcgccattgagtcgtcgaacccgccgattcgtgccctgggcatcaccgactacttcggcatcgagcgctatgagcaggtcgttgatcttaagaaccagggacgtctaccgggcgtaggcctgatcttccctaacgtcgagctgcggctcggcatcgagacggccaaggcatccgcggtaaatatccacctgctgttctcaccgcaggatcaggatcacgttgagcgcattaagcgcttcctgctcgagttcgagttctcctacctgggagaaccctatcggtgccatcgcgacgatctcatccgcctaggccgcgctcacaagccagatctgacggacgacgatgctgcaagatctgtaggggccaaccagttcaaagtcaatttcgatcagctcaagcacagctggtcgaagaacgagtgggttcggaaaaacgcccttatcgctgtcgctggcggcgaaaaagacggctcttccggtctccgcgatgcgacaggctcatttgccgcacaacgtaaaaacatcgaagggctggcacacattgttttcagctccaacgccaaacagatccggttttggctgggcgaagagtcagcctcgattgaggagcttgaggctcagtacaacggctgcaagccgtgcttgcacgggtctgatgcgcacactgtagacaaggttggccaacccgatggtgatcgccgttgttggatcaagggtgatctgactttcgattcacttcgccagacctgcatcgaacctgcagagcgagtctatatcggtgctgagccgcctcgtggcgccctggacagccatgtgatcgagtcagtatctgtcacaaacgcgccctggatcgtgaacggcgacgtcgcattgaatgctggccttgttgcagtcataggtgctcgcggatctggcaagactgcgttggccgatttgattgcagccggaggcctagcgctttccccccatttgaacgatcgatcctttatccagcgggcaaaacagcacttaggcgacagtgaagctgaactgctctgggcatctggagaaacgaccaagaatcaacttgcccattgcgacatggatgagtatttggctacctcttatgttcagtacctgtcgcaacagtttgtcgatcaactctgctccgctgagggcctcgacgacgctctggtcgcggaaatagagcgtgtaatcttcaatgcgcaccccctaactgagcgccagggtgctgactcgtttgcggagcttctggagatccgcctcgaaacctcacgccagatgcgtgagcgccaacagcaagcactggccagggtgtccgccgagctgaccgaagagcgcgttaggaaggacgggctcaaggccctagagaaggatcgtgacgagaagaagcgggctattgataaggacaaaaccgaccgcgaagcgttaatccccaagggcgatgaagagcgcgcccgacgccatgagcaagtctcccttgccgttgatgccaaacgacagcaagtggaccgcgcgatgcgaaaacatcaagctctgctccatttgcagaacgatgttcgtgatttccgcacccgacaagccccacagattctcgcggatcttaagagcgatcgtgagtacgccggattaagcgcagctgattgggacgcctttaaactcgactatgtaggtccagtcgactcgctgctgcccgaccacatctcgcgcgccagtcgtttgatttctgagctgcaagggccagcgagaactgatccagcggttcaggagaatcctgaccctacaattgcactaattccggccgatgcgactctcgcagatcagtcgctgtccttgctggagcgagagctggctcgcattcgcgcccttgttggcgtcgatgcccagaatgctaaacgttatgcggccttgtcggacaaaatcaccaaggccgaggccgcactcaacaaagttctccagatgattgagcgtgcccaaggcgccgatgaacgcatacgcaccctggttgatgctcgccgcagcgcatacgcgtccattttcgaggccatcgtcgaggaagagaaagagctagttgatctctattccccaatcagggctcggattgatgaagcggccggctccctctcaaagctgtccttctcggttcgccgggtggttgatgtagccggatgggcagctgcaggtgagcgcctcttggacttacgaaccaatggccccttcaaagggcgcggcgagctgttgcgtttcgctcgcgcagctctgttgccggcctgggtatctggtgacgctgagcaagcagcatcggctttactcgatttcgttaagtcaaatgagtcagccctcaagactcatattcccgaaggcgccgacttccgcgcatgggctcgggacatctccgactggctttacagcactgaccacatcaccgtcgggtatgggctgaaatatgacggcgtcgatattgagcagttgtcacccggcactcgaggcatcgtgctgctcctgctgtatttagcgattgatgccgaggatgaccggccgctgatcatcgatcagcctgaggaaaacctggaccctcaatcgatcttccaggagcttgtgcatcggttccgagacgccaagaagcgacgccagatcatcatcgtgacgcacaacgctaacttggtcgtgaacactgacgcggatcaggtgatcgtggcccagtgtggatcacatagacccggccaattgccacttatcacctacgagagcggtagcctcgagaatccgcggattcgacagcgcgtctgcgacattctggaaggcggggaacgtgctttcaaagagcgcgctaaacgactgcgggtttcattctga

SEQ ID NO: 333090 - DNA, 1071 bp, Pseudomonas aeruginosa
atgtccacccctcccgcggcgccgctgcgcattgccctggtcggcgaccacgacccgcacatcaccgcccaccgggcgattcccctggccctgcgcctggccggcgaggcactcggcctggagatcgcattcgactggctggccagcgaccgcctgcccgccgagccggcgctggagcgctatgacgggttctggtgcgtgccgggcagcccctatcgcgacgccgacgcggtgctgcgcctgatcgcccatgcccggggccggcgccggccgttcctcggtacctgcgccggcttccagcacacgatcctcgagttcgcccgcaacgccctcggctggcaggcggcgacccatggtgaggagcatccgcacagcgaccaggcggtgatcgccgccctgccctgcgctctgctcgaagcccgcgaggaagtccgcctgctgcgcggctcgcgcctggccctggcgtatgccgccgactggatcgaggcggactaccattgccgctacgcaatcgccccgcgcttcgccgcggaacttaccggcggcgcactgcgggccagcgcctggagcgccgacggagcgatccgcgcggtggagctggaacagcatccgttcttcgtcgccaccctgttccaacccgagcgggcagccctggccggcgtcctgccgccactgccgaaggcattcgtcgaggcgtgccggacgcagcgccgcgaccgcccccggcgcggcccgacaccttattacgcagtgatcttcagctcccatcgcagcgccgtcgacgacggctacgccgaagcggccgagcgcatgctggaactggccagccgccagccgggctatctcggcgtggagtcggtccgcggcgccgacggtttcggcatcaccgtctcctactgggacagcgaggcggcgatccgtgcctggagccgccacgcggagcaccgcgacgcccaggcgcgcggccggcgcgactggtacgccggtttcagcgcgcggatcgcccgggtcgaacgcgaatacgccttcccggctcagccggacaccgcgcagtctccggcctcgtcctga

SEQ ID NO: 333091 - DNA, 399 bp, Pseudomonas aeruginosa
gtgttcaccgcgcgcagcgagacggtggtgcgctacgccgggcttggcgccggcgtctactgcatgctctacggcgccgcctgcgcgctgatcggcgcggcggcgcgggtcctcctgccggacctggcggtgccggagaacgcctacgccgagatcacccgcgaggtactggcgccgggcctgcgcggcctggtggtggcggccgcgctgtcggcgatcatgtccaccgccagcgggtgtctgctggcggcggccaccgtgctgcaggaagacatctacgcgcgcttcctgcgccccggtaccaccagcgacatccgcctgagccgttgcatcaccctgctgatgggggggcgatgctggtcctggcgtgcctggtcaacgacgtcatcgcggccctga

SEQ ID NO: 333092 - DNA, 438 bp, Pseudomonas aeruginosa
atgccgctgatgtggatcgtcctggtgctcgcgctgatcaccgggacctggctgagtgtacaaagcaaccacgcgaccttgagcgccgagctggccgaggtcgacaccctggccaggagcttgctgctttaccgctccaggctggcggagtacgcacacgccaaccccggtttcagcggttcgccggcggactccgttcttggtctaccggcctggttccgcaagccagtgcgacttcagggctacatcgccgccggcaccagctacgccttcatcgcctcgccgccggcagggttggcggcagccgtggatgccggtacggaatccgacctagttggcgtcaggcgcaacggccagttagtcacacgccgcctcggagccactgccattgcgctccctgctcccatccccgagggcgcggtggtcgcggtcaaataa

SEQ ID NO: 333093 - DNA, 1329 bp, Pseudomonas aeruginosa
atgaggaataagcgcagcagtggattcatctcgatcgaactgatgatcgccctggtcgtgatcgccatcgcgaccgccggcggcatatcggtcctgatgagctacctggacggcctggacgagcagcacgcggcccagcagcaacagcaggtggccaaggcagcggagaagtacctgaaggacaacttcagcacggttctggccagcgccggcgccacggccccggcggtgatcaccgtcccgatgttgcgcaacacccgttacctgcccgcaggcttccgcgacaccaacatctacggccagcaataccaggtactggcccgcaagccggcggccaaccagctcgaaacgctgatcgtgaccacgggtggacaggtagcttccgaactctcgatccgccggatcgcgcagctcatgggagccaccgggggctacatctcgaaaaccaacaccagtatcgcccagggcgccgcctggcaggtggccttgagcaatttcggtagcgctcccggcgctggacacctggcgacggcgctgttcttccaggacggcgccattgccaacgagtacctctaccgcaatgccgtcccgggtcatcccgaactcaaccggatgaataccacgctggacatgggaggcaacaatatcgccgcggccggggcgatcacggccagcggcaacatcaccaccagcgcggacatcagcgcgcgcaacgtgacagccactggcacggtgaaagccggcactgctgacgtcgccggcgagacgtacaccggaggctggttcaggacccgtggtgacacgggctggtacaacgagaagtggggcggcggctggtacatgagcgacagcacctgggtgcgctcctggatgaacaagaacgtctacaccggcggcgagatgaaggcgggcaaactcaccgccgagggccggacggaagtcggcgaatacctgcagctcaaaggcgtggccaccgaaggggccgactgctcgccgaacgggctcgccggcattaccagcaccggactctggttgtcctgccagaacggaaagtgggggcgaaccgccgcctccatgcgcatgaataccactgcgggcgtgatcaaggactggtgtacgttgcacggccaggacagcggcatgatgtactacgactatgtccgctacgcgatcacctgcggcggccgattctgcgcggtgggcttcaaccagacctttggcaccaactactcgttcggcctgatcaccgagatcggcccgggcttcaactatccggagccctacaaaacccccgactcgaccaacgtcaccgttacctgcgtgaactag

SEQ ID NO: 333094 - DNA, 618 bp, Pseudomonas aeruginosa
gtgttgcgggccgcaacacccagcttgccggcggcgccgaggtcgatccctggtgaagtggttcgggccgaatcacccagctcgccgccggcgctggggtcggtccctggtggggtgattccagtggaatcacccagcttgtcggcggcgccgaggccggatcctggtgaagtggtgccagtggcaccacccaactcgccgccggcgccgaggccggatcctggtgaagtggtgccagtggcaccacccagctcgtcgacggcgccgaggctggatcctggtgaagtggtgccagtggcaccacccagctcgtcgacggcgccgaggcctggtcctggcggagtgttgccagtggcaacacccagctcgccgccggcgccgaggttggttcctagtgaagtggttccagtggagccacccaattcgccggcggcgccgaggtcgatccttggcagagtgtttccactggaaacacccagttcgccaccggtgccgaggtcaggacctggcagagtgatgcgggccgcatcaccaaaaaacacgacgcccgaccgagactttctcatggctcatcaccccgctcggatggcacgctcgatccgtgcctgggccgaatga

SEQ ID NO: 333095 - DNA, 756 bp, Pseudomonas aeruginosa
atgtcgaagtcgttgatcaatgaagcggtcctgacgcaggtgatcaaccacctgcgcaacggccagctcaggcgttgtgccgagatgggactgcggccggagatcctggcccagctccaacagcccgccgtcatgagcatcctgaccaataccccggtttcttgggtagacgtcagagtgaacatcgacgtcatggagaaaatcctggccacagccgagcgcagcgcgcaggaagagctgcagatcgaacgcgcactgaagctgggagccaccacaacgatgattcagagctttttcggtctgtcgccggaggacaccgccaccaagcgcttgatcttggagatccacccgcgccgcggtcgctggcggcaacttgacgaacagaccgaacgccagatttggttccgctgggagcacctgatgcaagaaaaccaggtccgccttgaggacagcatggagttgctggacatcgcgatgatcctcaccgaggaagtcaacgccggagtcgaacaagacagtccagagttcatcagcctcgccatcgtttggtctctcatccagagctggttgaaagacagcctctaccaaccaaacaggaaagaacaggccaagcccgccaccctttacctggccaacgtcagcgctcacctcccctcgcctacggctcacccgccacagagcccccgcttggagattgagtctgcgcagcagcaactcctcaacctggttcagtccgaaggcgatacgacaccatga

SEQ ID NO: 333096 - DNA, 705 bp, Pseudomonas aeruginosa
atgatcggcgagcgccaggtcgtagtcgcgaccgcgcaggtaaagcggtgcccccagcgcagccacctgctccagcaatggctgcgggggatcgagatcgccgcacagggccggtttgccggcgcgcaggataccggctttctcgaaagccacgctttcgcgggtatcgcccagccagtccgcatggtccaggccgatgctggtgatcagcgccaggtcggcgtcgatcaggttgaccgcatccaggcgcccgccaaggccgacttccagcaccgcgaagtccagcccggcgcgctcgaacagccagaaggcggccagagtgcccatttcgaaataggtcagggaaatctcgccacgtgcggcctccaccgcggagaaggcgtcgcacagttgcgcatcgccggcctcgacgccatcgatccgcacccgctcgttgtagcgcaacaggtgcggcgagctgtagaccccgaccgacaacccctgctcacgcagcagttcggcgagcagggcgcaggtggagcccttgccgttggtcccggtaacggtgaccacgcgtttcgccggccttcccaggccgagccggcgcgctacctcgcgggaacgctccagacccatgtcgatggccgtcggatggagttgttcgagatagctcagccaatcggccagggaacgctgggtcatgcggatacggggctcggcgaatga

SEQ ID NO: 333097 - DNA, 426 bp, Pseudomonas aeruginosa
atgccggcgcggcaggaaggcttcacgctcctggaggcggtggttgcgctgacgctcctggcagtggtcggcggtgcgcttttcgcctggctcaacagtgcctttcggagcatgcagcgggtcgaggcggccgagctgcgcattgagacggcccgggtggcgatggcctatctggagcgcatgaaccctgcgctcgaacccgcaggcagggtccggctggggcattaccggctggagtggcgaagttcgccactgtccgcatcgaaagcggcggtgggccgccatagcggcagtccgggcatctacgacgtgaccttgttcagggtcgtcgccaacatccgggccggcgatggaacgccgcagacgctgcaactggagcttcccgggtacgtggtcatcccagcgcgactgggtgatggaccatga

SEQ ID NO: 333098 - DNA, 987 bp, Pseudomonas aeruginosa
atgaaaaaagccttagtcatcggtatagatgattacccaaccgcaccattaaagggctgtgtcaatgacgcagttgcgattgctgaactattagagaatgacgggagtggcgacccaaacttttccgtcatcaaactagtcagtaacgaacaaaaagtcaccagcgagttactgataaactccatcgctgagctttttagtggggaggctgatacagccctcttatatttcgccgggcacggaataattgtccctgaaaccaacgccgggtacattgtaagcagtgatgggcgacgtggcgcatggggcacctcactgtcagaaatactcgcactggcaaataaatcccaccccaagattaagtcctgcgtgataattctcgattgttgtcattcgggttacgcaggagaagtcgcgggagtagacggaaatgcatcagtaattggcactggagtaactatcttaactgctagccatcgtgaaggtggtgcgatggaggaagatggccgagggatctttactgacatattacttgacggccttagaggtggatgttcagacattcttggaaacatcacaccagccgcaatttactcccatgtagatcaaacgctcggaccatgggagcaacgccccatgtacaaagcgaacgtacagcactttgtcactttaagaagagtagatccaaaggtaccaaaagaagtattgcggagacttgtaaaatactttccaagcaaaactgatatttttgcgctagacccatcctttgagcctgacagagaaaatattccagacgagttcaaacatatccctgtaaacgaagagaacgtaaaaatattcaaagaactccaacagtgcaatcgctacggccttgtggttccagtagatgcggaccatatgttttatgccgcaataaattcgacgggatgcaagcttaccggactaggagcccactacagaaaactagcagagatgaaaagaatataa

SEQ ID NO: 333099 - DNA, 1350 bp, Pseudomonas aeruginosa
gtgttgcctgtttccgactcgccccacaaggaccaactgcacctgcaactgggtgtgggcctgagcgcggagcagatggcggcgctgacccacgacatcgtgtggctggaagaggtcgaggtgaacggcgagaaggtcctcgcgccggtggtctacctggcccaggcggagggtcggttggcacccaacggtgcgctgatccagggccgcgacgtgacgctggtgagcggcggcgacctgcataacgtcggcaccctgtacgacaagaagaaaggcgacttcggccgcaaggaaacccggcgcgacgaagtcaccgacgtcaaggcggtgggcagccagatcagcagcggcggcttcatgcccagcagtctgggtgcccagcttgccgttcgctccgcgctgaacaccgtggtgaacggtggcaagttcagggacaacgtcgcgcaagctgccatcagtatggcggcggacgcgctaagcggcgcgatcttcgacaaggtcggagatgcgttggtcggcagcggccttcccaagaaggtagcggtccatgcgattgtcggcgggttgatcggcgaggctgccggcggcgatttccgtaccgcagccctggctgctggcgccaacgaggcattggtaagcctcgtcggtgaaaagatcttccctggcgaggctcatgagcgcgtgctggcgatgacctcgcagttgatagggatgacagtggctgcggcggccggaggcgataccaaggcccaagagaaagccgcttgggtggctcagcaggccacggtgtacaacaacctgaatcacgcggcggcggagagcctgctcaaggaaatcaaggattgtcgcgcggcaggcggctgtggcgaggagaagttgcaaggcatcctcggcaagtacgaaaagctgtcggccgagcgttcaaacgctatcggccagtgtgcttcgcgccagtgtgtggacgacatcgtcgacagttcgatccggatggacgatccggtttccaaagagctgctcagcctactgcggcaaaccacctacgatacacccggcttgttgcagggcaatcccgacgcggtcgtgtcgcagacgccgaatccaagtggctggggagatctctttgccctggacaagcaactggcgttcgccaagaacctcaaggaaggctggctgacaccggaggaaacggctgatctggatcgctggaatgcgtccacttcctggctggatcgcactgctggccgacaactggatcccaaggagaaggcttacctgctctcggagctggggggcgcggcggctatggcgcttcttggggggggagtgttgggagtggagcaggtggaataa

SEQ ID NO: 333100 - DNA, 141 bp, Pseudomonas aeruginosa
atggcggcgctgacccacgacatcgtgtggctggaagaggtcgaggtgaacggcgagaaggtcctcgcgccggtggtctacctggcccaggcggagggtcggctggcacccaacggtgcgctgatccaaggccgctcatga

SEQ ID NO: 333101 - DNA, 669 bp, Pseudomonas aeruginosa
gtggcggagcagctccgtggccttcgacctgacgctggacgtgcacgaggccgaggacggtatctgggcatcgttcggctatgccacggatctgttcgaggcctcgaccgtcgagcgcctggctcggcactggcagaatctcctgcgcggcatcgtggccgaaccgggccggccggtcgccgagttgccgctgttgctggacgaggagcgcgattgcctgttgcgggcctgggcagagaacgccgacgagggtgggttgccgcccctggtccagttgcagatccaggagcaggcccgtctgcgtccgcaggcgcaagcactggcgctggaggggcaggccttgagctacgccgagctcaacgcccgcgccaatcgtctggctcactgcctgatagcgcgtggcgtcggtcccgatgtgctggtgggaatcgccgtcgagcgctcgctggacatggtggtcggtctgctggcgattctcaaggccggtggtgcctatgtgccgctggacccgacctatccgcaggaccgtttgcgtcacatgctcgaggacagcgccgtcggcctgttgctcagccaggagcatttgctgcccgggctgcctttgcacgaagggctggaggtgctctccatcgaccgcctggaacgggacgcatcggtgtctacggatga

SEQ ID NO: 333102 - DNA, 480 bp, Pseudomonas aeruginosa
atgagcaacaacacccaagcccaagatgccaaatatttcgacctgcacaccaccggtatcggctacctcaatcgcatccgcgaagtaccgatccgccgaggtgaaccgttcctcgccgtaaccgtcgcagccctccatggcgcggcagacagcgtggaatactcctacatcgactgcaaagtggtcggcgcccaggctgaaaagcttgtccgccgttgcaaggaagcagtcgaggccaagaagaaggttctgatttccttccgtatcggcgatatctgggcggatcccttcatccaccagaaaggcgagaaacaaggcaggcccgacgcaagtctcaaaggccggctgctcttcatctcctggatcaaagtagatggcaccaccgtctacgatgcgaaggaagaagctgaaaaagcccagcaaggccaaggcgaaccgcaaggtgaacccgcagcccctgctgaacaagccgctgcttga

SEQ ID NO: 333103 - DNA, 780 bp, Pseudomonas aeruginosa
atgatcaacatacccggccagttggccattcgaaccatcaacggtcgcaatggcgagttcaacgtgggaaagctctcgacctcgatcggggagttcgtcatcaaggacgctctcctggaccagcacatcgaaggcaagtaccgcggtgatttcgccatcaccgagatccgtccctcctactacaccaccggcggccggctggtcgtcgagatccgcgcgaagctcgacagcatgactctggacgacgtggacaacctcagcgacgaggaggcagagcgtctctctggcaatgaggtggatccgctcgacgaagtgcccgcgatccagcaacccactgccgcaccggcggcaccgccgaagtcgccccagaaaccgaagcctctgcgccccgctgcaaccggggacgacgcgcctttcggtatggaccctccggctcctgcagagcaggccgccactctggacacagacgcagatgcagaactgttcgggacggtctggccgctaggcgaaatcgtcaagctggacaccacggtcgaccgcaagcgactacgccaacaatgtgtgcgactcggcgcgctgggctatgagctcgacttcaaaaaacaagtgtggacccgcaaagcgtgccctctccatgttggagccaaagccggggtcaatcagtcgctagacgatgactacgagcgccgcacggcagcccggagtgctgctacaacctgttccacccaccaggctatcagcgcaatggctgtaagcgctgctgctattggcgttgtgtag

SEQ ID NO: 333104 - DNA, 696 bp, Pseudomonas aeruginosa
atggccgaccgcatcgaaagcctgatcagcaaccagcgtgaactgaccaacgcggtatcccacgaattgcgcacgccgatctcccgcctgtccttcgaactcgagcaattgaacaagcaggtcgacgccgaagtacgccacgacctgatagaggacatgcgcgccgatctcggcgaactggaggaaatggtctccgaactgctgacctacgcccgcctggagcacggcaacgtcgggagccaccgggaaatcgtcgacgccgcgagctggctggatagcgtcgtcgccgacgtcgccctggaagccgaagccgccggagtcacctgcgagatcagcgcctgccaggtcgaacagatccgcatcgagcctcgcttcatggcgcgcgcagtgatcaacctgctgcgcaacgccattcgccacgcacactcgcgcgtcgaaatcgccctcctcgatcaaggcgacagctgtcagatacgggtcaacgacgacggccccgggataccggcggacgcccggcagaagatcttcgaacccttttcgcgcctggacgacagccgcgatcgcagcaccggcggcttcggcctgggcctggcgatcgtccgccgggtcgcgcaatggcacggcggctatgcggaagcgctggaaacgccgcagggaggcgcctccttccgcctgacctgggagcgaccccgttga

SEQ ID NO: 333105 - DNA, 228 bp, Pseudomonas aeruginosa
atgctggaccagcaccagcacatggtcgtcctcggccagccgcaacaggctcacccgcagcagcggcccacgctccaggtcgaacggccgcgcgatcgtcgtctcgacctgccgagcgagggcgccctcctcgagcggccccaacgcgacgatatccagcggcaatgccatggatgcggcgatctcctggcgcgcctcgtcgccgtcgaggcgaaaacgggtccgtag

SEQ ID NO: 333106 - DNA, 843 bp, Pseudomonas aeruginosa
gtggcgtatgtctgtcggctgctgggggtcagccgatcggggttctacgaggcaaacaggcgtgccgacacgccagcatcggtttgccccgtgaccgtgcagctcaaagcgtcgtttgatgcgagtggcggctgctatgggagccgtccgttacgtaaagcgttgcgcgccaagggtatggaaatcggcgtttataaaattcgtcgcttgatgcgtgccaacggcctgcgttcggcttggaagcgtaagtttgtgcacacgaccgatagcaagcacgacctgccagttgccgacaatgtactgaatcgtcaattcgagcctgaggcggtaaacaaggcctgggtagcggacattacctacatccggacccgcagcggctggctgtacctggctgtggtattggatttgttctcacgcaagatcgtgggttggtccatggccccgaacatgcctgccgagctggtgtgtagtgcaatgcagctggcaattgctcagcgtcaaccgccacctggcctgatcgcccactcggatcgcggtagccagtacgccagcgcaagctacagagcgttgctggcgcgaaatgacatgcagcaaagcatgagccgtaaaggtaactgctgggacaactcagtgatggaacgcttttttctgagtttgaaaatggagcgggtatggcgccgcgactacgccaatcacgcagaagcgatacgtgacatcgtggaatacatcgttgggttttacaacaacgagcggctgcactcgaaactgggatatctgccaccgaccgtttacgagcgggcgatggcgtcgaaaccacctatcgaggtgtccggaattagttga

SEQ ID NO: 333107 - DNA, 297 bp, Pseudomonas aeruginosa
atgaccaccaaacgcaggacattcgacgacagcttcaagctgcaagtcgtgaagatgatcaaggaccaggggctgaccgctccgcaggtctgtcgcgatctgaatattggtgagacagccgtccggcgctgggttcagcagtacgaggctgagcaattgggtcagcccgggatcggtaaaccactaacatccgaacagcagcgaatccggcagctggagcaggaaaaccgccagctcaagatggataacgatgtattaaaaaaagccaccgccttctttgcccgcgagctgaagtaa

SEQ ID NO: 333108 - DNA, 168 bp, Pseudomonas aeruginosa
atgctgcgcctgattctcgacaacgaaagcaagataaagcagttattacagattcggatggatgaactggcgaaactggtcggtcagtcatcggtgcaaaaatcggtgttaagtgcctatggcgatcagggcggctttgtgctggctccgcaggataacctcttttga

SEQ ID NO: 333109 - DNA, 1035 bp, Pseudomonas aeruginosa
atgaatcttaggaaggacaaccactacattccacagctctacctgaagcagtgggcaaccaatggaaaaatcccaacttatcgactgttggttccaaacgaaaattacccaacatggaaaacacactctttaaagagtatttgtttccatcagcacctctatacttacatcgcaacgcaaggtgagacagacgaactagagcgctggcttgatcgcgagttcgagtcgcctgctgctgacgcgatagaccgagttgtgcgagagctgccgctgacaccaaagcactggaaaaacctagtgcgctttgccgtagctcaagatgtgcgcacccctgcacgtatgaaagagttcataaaacgacaggaagacaccttacccgacctactcaacgacaccgtagaaaggtcagtccgtcgtttagagagtgcagtgagagagaaccggccattgccacaggcaaagcaattattaatagatgactttccagcacgagtggtggtagagcgacaaccagacggtagcgggagagtttgggcggagacgttcattggccgccaaatgtggctctggaacataaaacacattttgtcgagtacattgaagaggctgccaaaacataaatggactattcttcatgcgcctcggggatgcacttggcctacttcagacaaccccctaatacggcttaattattatggagagggaaactacgactttcgagggggatggggtgttgaggatggtgagattttattacccctcagcccaaaacatctactctacaccaggatggggcggcgcccaccatataggggatttgaactagacgctaaatccgcccaacaaatacgcagaatgatcattgaccatgcagatcgctacatattttcggtggacgaaagcaacattgcggaaattaggcctcggactgtatgtacaagcaccttcaagcgcgaacaaggattttggcgcaattggaatcgagatcagtctgccgcagagctagatataatgcgtacgacttcgaacgagtga

SEQ ID NO: 333110 - DNA, 471 bp, Pseudomonas aeruginosa
atggaaatcaatatcggaatcggcgaacaggatcgcgcagccattgccgagggcctgtcgcggctactggccgacacctacaccctctacctgaaaacccacaacttccactggaacgtcaccggcccgatgttcaacacgttgcacctgatgttcgaaggccagtacaccgaactggccgttgccgtggacgacatcgccgagcgcatccgggccctgggcttcccggcgcccggcacctacgccgcctacgcccgcctgtcgtccatcaaggaggaggaaggcgttccggaagccgaggagatgatccggcaactggtccagggccaggaagccgtggtgcgcaccgcccgcagcatcttcccgctgctggacaaggtcagcgacgaacccaccgccgacctgctcacccaacgtatgcaggtgcatgaaaagaccgcctggatgttgcgcagccttcttgccagctga

SEQ ID NO: 333111 - DNA, 279 bp, Pseudomonas aeruginosa
atgcttccgttcaacggcctggcttcccgcgtgacaggccggcggggctggctgcaagccatggatttttcaggctataatccccgccttcaatgcgaagtgggcccggatgcgggtgcttcgccgttgccgttcaccgggcagcgcgggagatgtccttccgggggcgtaccgatggttccggtgctcggtcagggccggcgagagcccggcaatggtcgccaggcagccggcggctccacagaatccaagacttacgagaagcgaaccacaccatga

SEQ ID NO: 333112 - DNA, 1422 bp, Pseudomonas aeruginosa
atgaccgcagcacatgccgcccaataccctaaaccttcctattggcaggaatttcaaagcctatctatagcagttgccactgcttatttcggtcttaatttcaaggcgtatggacgcaacgggcaatggcaggggggcattgatgcatatgcgtacacgagtgacggccgaatcattgcagtgcaaagcaaaagcaaggatgcggggtatggcagcgtcctgactcccagcgacgtcaccaaagcagcggccaaggctcatgagtttaaattcaagattgacgtgctcatcatcatgacgagctcaagagatgataggaagctgagtgaccgtgcgcttgaaatcactcaggcccagcaggctaaaggcgagttctcggttgaggtgtgggggtggcagacgattgaagagatcatcgggaagcatgagtccatccgccgaagacactttgcttacactctccctaaaactagcacttggcaatggattgcgcgagcaagctttttgggggcactgattggcctgtttggctatttcgcgaacgagtaccttgattaccgcgctcagacaaaacaacgccaaggtgaaacgggactgagcgtcaaaggatttatcgagcagagtgatcgcctgagtgcagcctactcgaattgtcagggagagatgggaaagaacatttttctgtcttcattcgaattcaaacgctattgttctgagcccgtggataagcagcttcaagccatgcacgctcagctgcaagagctcgcgcttgacatagattcagatgtctttgaacgaatgaaagaaatgctgaagatcttggatcattaccattaccaaggtaggggggctagcttgctgacggcctcctatgaagacatctatcgaaagaatatgctcaatctttgcggaaagaaaactgacgagctgttctctgatgagctacgacgattgcttaaagattcagccgtgcagcaactggagtattaccacgcactaagcaactttatctatccaagcttggccgctatgaaagctcaagttgtcgcctcggcgcaagtaacacgtggccagaaagttgcacctagcgtattggttgaagcgaatgagctcaatcgattgtttttagagaatcaagcctatcatctcgaggaagtaaaatatccgttcacgctttctgccgtgaaagtttggtcttcaccaaaacttggaattactgatgagtcagggctaacggaagcgattgaagcccagcgggaaaaagacgtgctcctcggcggcgccataagcatttactacggccaccaccaagaagctcgccaactgattgagtgtggtgcgatgaagcccgagctcattcctctgcttgagaaaagagaggccgaaattaccgacttggcgtcagcctcacccaagtcatag

SEQ ID NO: 333113 - DNA, 147 bp, Pseudomonas aeruginosa
atgtcccagcttgagatgttcgaaaagcccgaagggggggaagaggtcatttaccgtatgaccatcaccaccaagtcggggaaggtgattcgacgcgctaacggccaaccgttccgcatcgtcattcgccccaaagcgaccaattga

SEQ ID NO: 333114 - DNA, 879 bp, Pseudomonas aeruginosa
atgattgacttgagggactacagccaggcacagcgggaacgtttggtgtacatagatttccgcctgtatttcacggggagtgtctcccgagccgacctgatggatcgcttcggggttggcgccgcagccgccactcgggatttcgcgcaataccgtgagattgcccccggtaacacagaactcgatacggtggccaagcattacgtgatccgcgagaccttctcgcccttgattgcgcattcgcctgagcgtgtactcgcagctctttctcagggatacggctacgacctggagggcgagaagccgcttatcctcaacgagtctgtttcgttgctcagcaagccgaaggtcgagatcctcgcgccaatcactcgcgcgatcagcttgaatcaggtggtgaagatcagctacacgtcgggctcgggcgagtccgagcgtgaaatcgtacccttcgcaatcagctgtgatggcttgcgctggcacgttcgggcctacgatagaaaacgcgggaagttcgttgacttcgtactagctcgaatcggtcacgctcaggttcagttgggacaaaagcctagcgacgtagaagacccaaagcatgatgatcagtggaatcgcatgttggatttacccctcgtcccgcacccagacaagaactgtaagcagatcgtgatgtgcgactatgacatgcctgacggcgtgctccggctgcgcgtacgcgctgcgatggcagggtacgtcctgcagcaataccatgtggactgttctccagaccacagcattgtggacaatgcttatcgcctctggctgagcgaccccttggctctgtatggagtggagagctctatgttcgctcccggatacaaaaaaccgaatagctaa

SEQ ID NO: 333115 - DNA, 663 bp, Pseudomonas aeruginosa
atgaaaatcgcagtactcgtagccatgcttttggctacagcagcaacggccactcaagcagctaacaacgtcatgccctgttcgaagccgtggaacctgaaaaactcgccatttgacggtctattcactgccgcggaggggccggccagcacatgcttgccgctcgatgctcctaaagtcgctcgcctcgtcatgcccaatggtgaggtgcggttcgtctctggcttcaagccggtcacctgtggtgatgatggaatctgcgccttgggcaaggatttctatggcagcgcgcccaaggggaactatgtcgtcgcggcaggttggtacatgggagtcgacacggccggcaacccggtttcctatgccaatggcacgggccccggcttcaacgggaaacgtcagaccgccaactctctaggcaagcgagagcctggtgaaaaattccatgccgtctgccctatcaacgacagcgactactgcaccgtcgatacggccttgggccttgtcactgtgaaactggccagcctgccagttattggcattccggccgtcaacgaagcggatgtggcagccaaaggagggaactgcgactccctgcccatgtgctacgacaagaacggccatcagatcggcgtgaatgccgacatgctccctaagaaataa

SEQ ID NO: 333116 - DNA, 924 bp, Pseudomonas aeruginosa
atgctcaaaggcttggccattaccccgccggtgctcgggcggatttccatcggtaaggtcgtcgagaaaaacggcaagcgcctgccggaaaaggacgatcaattcaccatcacctcgcagatccaggtgcgcgacaactggctaatgcaccccatcgacgaggagcttcgcaaagctcaaggcggcaaaattcgaagcattccggttcgtctgctgttcaacgcccctgatctcaactttcgtgccgagtactgcctgttcgataggcagacgggccgccccttgtgcgtcggtaatggagagagctgtaaacgtcgcagcaaagagggaattgactctctcccctgcccttcgcccgacggctgcccactagccataggaggagcctgtaagccgtatggtcgactcaatgtagccataggcgatgaggacacgctgggcagcttcgtattccgtacaaccggcttcaacagcatccgtacgttggcagcgcgcctgcagtatctccaggctatttctggggatcgcttggcctgccttccattggagttgcacgtgcgaggcaagtccacgcagcagagccatgggctgccaatcttctacgtcgatatcaccgtgcgtagtggcatgtcgatggatcaggccctgcagcatgctcgagaaatcgaagaggcacgaaagcagtctggatttgaccagaacgctctggacgcagcggcgcgattgggcttcgccaacggcgccttcgaggagagcgaagaagaaggagaagccatagtggaagaactctttcctgaacctccaaacaccacgaccacatcgccgactactgcagacgcacttgctaacgactgcacgcgccccacgctaacggcacgacttcgcgatcgtgccaaggcgagcagtcaacaactcactgattaa

SEQ ID NO: 333117 - DNA, 195 bp, Pseudomonas aeruginosa
atgcttagcctcacccgcagcgtcggcaaaacgatccgaattggcgatgacatcgagatcgtcattcttcgcatcagaggtaaccaggtgcgcgtcggagtctccgcaccgccccacatcacggtgcatcgagaggaggtctatcaacgtatccacgcagataagcagcaagacacttcaccggccgccttttaa

SEQ ID NO: 333118 - DNA, 180 bp, Pseudomonas aeruginosa
atggggctgctgaaatttctaggtctgctgtttatgctggtcagcatcttcgccggcagcgcagctgtagtggcactgatgattcttgccgtgcgctactggccgttaatgctagtcatcgtaatgactctcgctgtgtttcagcttgcgtccaagcgcacgcgcgctgctcggcgttag

SEQ ID NO: 333119 - DNA, 1011 bp, Pseudomonas aeruginosa
atgaacacgaaatcagcaaacctgcaagaatttaccctgacaatcctaggggaaaatcaccctccgattcgccagaaggtctttgacagtaaagacttcatcttgcccggcactcgggttggcgttgaaaaccgtgaacctaaaagccgtaaagagaagatggacgcctgggttcaggccccactgtctgagcggcaaattgagatcacgggaatgatggggaagccgaacccgttccaccatctttccaaggcggttgatacctcccagctcacgctttcgattcctcaccagggcatcaagatcaaggtcgaagacttccgcgaggaagctctgaaggctgctcctgaaggaacgaagataggcgtagctttcgacacctacgcaaaatcgcaatacgaccgctcttattctgatctggtcagcgatgctcgcaacaaggtgatcgcccggttcaaggccgcattcgcggagaaccttgatcacgacccgatgagcgatgagtaccacacagacaaggatattttcctgcaccatcctgtctgggcgcctcaaagctcaattaaggaatacaagtcgctcgcgaagcaaggtcatgtgtactcccaatacctggccggtgtattccttgcatcgagcgctggtggctacaaggctgagtgtgttgagtacctgctgatggcgtacgaaaacaagcagcccgaagctatgcgtgtactcgctgagttcctgcatttcaaaaacgactactacggtgctacgcagtgtgcgcttctgtctattgacggcggcgatgactactcgaaggaaatcgttcgtgaagtgctgggcaatgcctctcaccaggtgatgcagacgagtcgtggtgtagcaccactcagctttgtgatcatcgagacactccgtgcaaacggattcgactcgatcctgagagagcatttcaccgagttcaatcctgatccacagtctgaaattcgtattcctggttttctcaaagggggccggtcatga

SEQ ID NO: 333120 - DNA, 627 bp, Pseudomonas aeruginosa
atgaagcaaagacctcggatctactacaccgaaagccagaaggcgttgatgtgggatcgttggaaagcaggtgattcgctccagcagattgcgcagctattcgaccgaaaccattcctcgatccaagggattcttgcggagacaggcggcatccgcccaatcgcgcgacgacgttccaggttggcgctaacactggttgaacgcgaggagatttcgagagcacttgccgttggccagtcgattcggcatatcgcgatgcgtctggagcgagccccatccaccatcagccgtgagatcaaccgtaacggtggttgccgaagctaccgcgccaaccaggctgatcaggcggcatgggacagggctcgtcgcccaaagctttgcaagcttgtccagtccccaaagttggcgcagcttgttgcggagaagcttcagaaccagtggtcgcccgagcagattgctgggtggttgaagcgtacttacccggacgtggcctaccaggtgtcgcacgagaccatctaccgcagcctattcatccaggcccgtggcgcattgaagaaagaattactggagtatctgcgccgtagtcgttatacgccggtcacgtcatcacacccagaaaaccggtaa

SEQ ID NO: 333121 - DNA, 360 bp, Pseudomonas aeruginosa
ttgtgcggcagcaagaacagtcagatcgccacgctggttgagcgccacagccgctatgtgatgctggtgaaagtgaatggaaaggacaccgagacagtggtgaatgcactgatcgagaatgctcagcgattgcctcaggagctctaccaatccctgacctgggatcgaggcaaggagatggctgctcacaagcgattcactctggcgacggatatccaggtctacttttgtgattcacagaatccttggcagcgcgggacgaatgaaaacaccaacggcctgctacggcagtacttcccgaagggcactgatctctgctgtactcgcaggacgcgctggacaaagtcgctcggcagttga

SEQ ID NO: 333122 - DNA, 984 bp, Pseudomonas aeruginosa
atgaatggaaactctgaaaataaactatggattagacttgggttactggccgttacattgccactatgcttcatatttccatacgtcttgctcctcacacttatacttgcgtgggaaattttcgtaaacttcagatcacccaagatggaaagcgtaccgccaccccgaacatgggccgacgcgacatctgaggacagcgactggctcgatctattcctcaaaggctgcgagtctccggccgaagagaaatttctaaagacaatggttaaggagttcaatttttatccgaaaaaaggagttctagtctctccaagactatccatgcaaattcagttcaagtttggaaagtatcgatttgatttcttactgaacaacaagtacatcgtcgagattgatggtgcaacatatcactcatcccccgagcagattgagcgcgatcgtatccgagatgaatactctgcggccaatggctatagtgttctacggataccggcaagtgtagttttcaataactcatccgaagctatccggcgggtcaaggactttgctttcgcgcccgccacggcggtagcccccccaagctcaaagcctatttctagacgaaaacctgtatcgcactacctcaatgacctcacaaatggcgtatcgagtttcgctcagagcatcagtgacgcaagcttgaagaagactgccacttcagattttaggaattcaattagccatgagcagatctttctcggcgccatggttagcaaaatcgagtcagaaatacgcatcatgagtctttctcctgaggagagaaagtttcacgatgatatgtacgaaaagcttacgcaagggcatacaaaaaaactcttgcagaaacctttcactggacacctgttgtgctaccaaaaccagttggtaattgcgaagttcagcaacagatcgactcagagtgtgctgatgcacttgaagagcgcaacaaacgttttgcggatctga

SEQ ID NO: 333123 - DNA, 732 bp, Pseudomonas aeruginosa
atggatggagttcatcggcaaattgtgcggcgccagattcactgtggtagctgtgctttggcaagccattgtttgccgtcttcgttatctctcagtgagattgatattctcgatgaaatggtcaggcgtagtaggccgttagagcgaggggagttcttgtttcgtcaaggcgaagagtttaggtcgatattcgtgattcgcacaggcatgataaagaattactgtattacagacactggtgtggagaagataacaggttttcaatcgccaggtgagattctcggttgggctggagtggattgcggagaatatccaatgtctgctcaggcgctcgaacctacatccgtttgcgaaatacctttcggacgactggatgaattggctgaggcgatccctcagttgcggcgtcaattgatgcgggttatgagtcgggaaattcgggaagaccaacaaatgatgctgcttttgtctaagaagtcttctgaggagcgaatcgcaaccttcttgctgagtttgtctgctagatttcgagctcgagggtattatgcgcatacacttcgtttaagtatgtctcgtggagaaattgggaattatttgggggtggccatggaaacggtctctcgatcttttacgaagctgcagcagttgggattgattcgggtaagtggtaaggaagtgcagatagttgactatatgaagttttgcgagctggccggtggcgaggggaagtag

SEQ ID NO: 333124 - DNA, 876 bp, Pseudomonas aeruginosa
atggatcgccgaactgtctttccgatactgctcgcgttactgatgccatttctaggtggctgtacaaggtcgctgatggaagatagttggcccgtcccgccggacgatattgtcaattatccgcccccgcagctggcgccaaacccagcaaaatttgaacagctgtcgcttgcttcggaaaatgcggaaggattgcgagtactcatcaacaagcacagcactgacagcagtaagagagactggggcagcggtgatttcaccacagtggggactattgcagccgtaggtggggcggtggctgaccagaccggcctgatgaatactggcgcggttatgtcgatcctcgggctgacggcccgtgaacgctacaaatacaacatccagagtgcctcctatgtcggagcacgaaaggctctagagtgcatgctgagtcatgtgtctaccaccaataacgatgaggtggagtggggaatgattcagcaaggcagtgcggaaacgcagcaggccgctagcgagctgccggcaacaattgtgcaggcgacattaaaagtgaaagaaagcctcatcactcggttgcagaccatccagagcgagcctgtgaaggctgctgacttcaagggagtgttggatcagcaacaccaggcttacaacgacatggctgaagctgaaaaaaagcttaagcagacggtcgataaggacaggcaagcgctagttcaaatgaaggcggtagggttcaccccctctgtgacagacagcgcgaatgctaatcgaatctctaaggaagagaggttagtgccgctggagcgtcaggtgagtaccgggaaaaagcttgtagctttgccggcagcaatcaatgcctgcgtggcgggatactag

SEQ ID NO: 333125 - DNA, 720 bp, Pseudomonas aeruginosa
atgcaagacttgcaagaagactcaggacccacgcccctcccacctgaccttgttggatcggaccaaccatcgctgaataacgacctgttaccagacgaagttgcggcaggttccaatgttggagcgctaggcacgcggtcgcccacggctgaagaaagtgccatcggcaagcaggtgctggatggtgccccctcagcgtgcactcccttcgaagtggcgagctacttttgggccgttggccaaggatatttcggtgaagatcgaaagccgtatgcatcagcctggccatctcgctggaacccggtaatcgtcgagttcttcaaggcaacgcaaaccaagcccgacggcgatacgacctcgtggtgtgcagccttcgtcaattactgcctcatgcgggccgccaacggccgcacgctgcctactgactcagcgcctccaactaatagcgccagagcgctgtcattcaaaaactggagcaagccgacgacctcacccgagcctggtgacatagtcgtgttcgataacatcaccgatggcgaaggcggaaaaggtcacgttgcctttttcttggctgatcagggcgaccacgtactggtgctcggcggcaatcagcgtgatgggactccccctcgatctacaatctgccgtaaggcctacaccaaaaacggctcgatcctgaaagtagtcagctaccgcactgattcgcagctgcacccataa

SEQ ID NO: 333126 - DNA, 189 bp, Pseudomonas aeruginosa
atgccccagcccagacgacgtattcccgagtccttcaaacgcgaggcggtaaaccaggtgcttcctggtacgccgcgtcgccatgtatcgctttcattagcgaccttcttggcggtcgaagcctcgaataggaagtcccccatcgacggtatgagcctgacatttggcctcgcccggatagatatttga

SEQ ID NO: 333127 - DNA, 1050 bp, Pseudomonas aeruginosa
atgaaaactgtagatactgtttcagccgctttaagggaatatatttcaaacgctgaagagcatgagttcctcagagatcatgacgccagattcgaaaaaataagaacttcggtaaataaaaaatcagccgacctgcgtcctccacttaacgtaatatctaaacgcctttacaagatagccgaccactccttttactgcctagagctttttcaatacaagtactatttactagcaaagggaatacttcacgccctagaaagcaataacccactgtcactggcaaacaattgccgttcactactagagcagatagccacgctaaattattgcatgcaagccgtcgaagagatgatcaacaacctgaaggaccaaggcacgctagataaaatcaacaatataattttaaaagcagagacgaccctaaagagaacctatgctggccaaggaagtaaaaagggtatccctaaagaagaggaagccatccatgtaagctcctcaataaaagaactgcagaagaaaatcaacgacgcagaaagcgcgtatgactatctatgcgaattcgtccacccaaatcatggaaacaacctactgatttccagcggagtgataggaaagggaattatagggagccgcggaaattcagacgaagccataaagaggatcgcatctatcagctacaatctcttggattttagccgaaacgtgaacagtatcgcttacccttaccttacttggcagacgcaccactatgtagaaatctgcctccaaaaaggagcaaaaatcaccaacgtcttttcaactaaaaggccaatccctcaaggcgacggacgctcaaaagaaaccgcgttcttctttaaaaatgcgagaacaagccaagaagcaacaaatttaagctaccaatatctcattgaaaccgggcacagcatcgaccttcaaaaaaagataattggaggcatcgaaaaggaaaacggaaaactatacatttatgacaactggaaaaccaattccggcacaatctggttcaaaatcccaggacacgagggcatttaa

SEQ ID NO: 333128 - DNA, 2874 bp, Pseudomonas aeruginosa
atgagcgagctccctgagtctgtcagatttctcgacagcgctgcctcctccgcggcaaaggctaggggagtcgaaccaacgtttccaaccgaggatccggttgatgtagcgactgctttgaagtgcattaatgcgtttcaaatccgcgtggacgaagagacacttgaggctcttgatgatgaaagcaaagcgagacctttggtagctgcagctcggattttgcagtcaacggcacagcacttacggcaggctaaaaaacgtcccgtggacgatgattttgacgacctgctaggtgacgagaatctatcgattgatgaagatctaaacgatctttcgttttatgctgcactcgcttttgctatgcacggtaattttccaagtgctcgtgctgtactggctgatgtcgatccgagctatatcaggaagagtcaggtttttcgcatggttgcagccatttgcgaaccctctagttacgatgttagatatgagtcggacgagataaatggctcaaatgaggctgagttcaagaggtttcgacgcttctggaaacgaactttctaccacagctccgtgtcagctcgcgccgaagcattcgcatccgcgctcagaatattttctcaagtatccatggctggaaccctcgcggagggtgcattattgcttggagggcggatggccgcttaccaagccaaacgattagcgactattaatctgctagatgctgcatcagaaattccgtatgggttcgtcagaaatactattaaaagtggcatggtaactctgctgccaccgcagcatattcttctgagtaaagagcggattgctaagcatagacgtaatacactattaactctgccgacgagcacaggcaaaacttttattgctgaagcatgcatcgctgccgatttggctgataatggcttgtgtgtctatgtggctccgtacgttgccgtaggggagcaagttagaagctcgctcgagaatcgtcttcgcgaaattttccctgttatcccgatgtttggcggatttcaatccgaggctgttagtagtttcgctgagggcgaggttattgttgctactccagaaaggtttgacggttggcttcgtgctggagaagatattgaccggcttcgaactgtaatcttcgatgagattcatattttagaaaatggggccaggggtgcgcgcgtggagggtcttatttcacggattcgactcctacagcggactaattcaaagctgcgtattattgggctctcggctgtgttgacagagccagaggcggtttgcgcttggcttggtgtgacagcacaggatctacaccaaatcgggtggaggcctactgctcgtcgattggctatgtgccgcgcgaatggggacatgtattggattcatgggacagatacactccgccctgcggaagagaggccaacgtcagagatctctgagcctattagaatcaacctgccgggaaaaattacaccagctcaattccccaaacctaacgagaagagcgcagctgccaacgtcggtgcgatagcacgagatcttttgagtcgactgggttcgccaggtctgatcgtctgcccaagaaaggttgacacacgattactcgctcgagaattgctagccggtcgcgaggaagtcgaggatgacgaagtggcggggattgctgctagcattcttgaacgctacccctatttagactttctcgttgagtgtcttaagcgtggagtctcgtaccacaacgcatcattgcctttcgatgtgcggcgcgatatagaaaaattgactcgcgagcgtgtgttgtcggtggtttgcgctacaactacgctcgctgaaggcgcagatcttccgttccggtggaccattgtcgctcactggcttactagcatgcgcgataccgggacggatatgaagtcgatgatatttcgcaacattgcgggtcgttgcggtagggcaggtgcgttttccgaaggcgatacaattctcttcgaaaacctaatggggcctccttcccttcagaataggcgaaatatcaaacagcgcttggaggaagtcatgtttgcatcatcgcctctagcgtcgaccatgggagggaattggcgtgaaaatccacctgaggggaagagtttcttagaggcaaccattagcgcgcagctgcttgcgtgtattgcagagcatcccaattccgaagatatagtatcggaattgactaacgcgtcttatgcggggcagaccgatggcaaacagaacgtaaaaagaatcttgtctgagactgcacaatcaattctggatgatcagcagccaggcggagcaatggcagttgttaatagtccgataaggcttacagattttggtcgggcggccaacctaagtgggttctcgcctgggacatgcaggttaatgatggagtttctttccgaacaatcctttgaggtcggcgcggggctctatagcgagattttgaggcggtttagttcggtgccagagcagtcaaatacgacgttgcagatgatattcgagagggataatcataggaatgttgttaaagctagcaatatcgaagaggtattggaaggtctgctgttgaggaaaagtctacgcctgatatttgaagggctgcgtaagaagacctcgaaggcgatgccggaaactgtagagacaatgttcgaagatttcgtgtcgtttgttaacggtgtaatagcgaattttcttccgtggactcttagggggcttggtaaactcagcgctcatggcagtaagtcggccgcgaatataaattggtcacaacaggcgaaggatcttgagtttgcgctgagggctagggttgataatgttgaattcgacgacccatcgattcctgttgaatag

SEQ ID NO: 333129 - DNA, 777 bp, Pseudomonas aeruginosa
atgccaaaggcttttacaaagatttcctcgccatcgtctaatggatggccgatacagcttattcggggaaatcccgattgctcagcattttacaaatggatatatgccgagcttgataaagtcacaaaagaatggccggcgaaaatcacgaaagacactctaaccaccggccgaaagggaaatctcggcgagtttctgtcggctagagtcgcgcatgctagtgggttatctggtaagaaaaatgggtatacgctcgcacttatgggggcactgactccccatcaagatggtgctccgactgggctggatattaccatcgtccatttagatccagggggggacgagagtaaggatcgtctttacataatggaagttaagactactggcgctccccgtcttacctatgctaatgagctcgttaaggactacaaaaagctactaggcaaagcggccgtcgcagggtccttaggccaaaggcacaactggctgatgggctacctgatggttgtgcatgagtttgaggaagacgagcttgaacgagtgagtaggcttttcttacctcaagcgaaggactgtaaaggcattcggcttttaccaaccttagtgcatgatcgcacagtaggagactctgcggcgattaccgcattggatgctgtcgccgagaagattaagaaacaaggatggggggcgaaaactattgagccttggagtatcgcaatagataacctcattaactgccttgttcatctttccaataacggaagtactatgccatga

SEQ ID NO: 333130 - DNA, 1086 bp, Pseudomonas aeruginosa
gtgagtaggataagtgccggactagctgctcaactggtgaatttccttgccagtcaaaatctcgacacagtgcgactctgcaaagagtccggaatcatcatcgacgaattaagatcaccgagtaagtttatttcaagatccagcgtacttcgactaatggagctagcagaaattgagagcggcaacccagacattggactgaaggcgtaccagcaccttcttccaggcgcttttcaattagtaggatatgcaatgatatccagcgccaatttaaaagacgcactattggcattagtgcgtttttctacccttctcggaaacggctttaccgtcaacctcacacaagaagaagatggcatacgcctgtggtacgctgacaatacagaagatagaattaagaaatcccgagtctttaatgacgtattactatcatcaactcttggactatgccgctggatgactggaggaaaacttcctgcagcacgagaaattgaatttatgtaccctaccccgctagatatttcagagcaccagcggatttttgactgtcccttacgcttcggcaaaaatcgaaacagcatcctatttgatcaagatgcactgtctatccccctaagcactgccaatgaagcactcgcactactccacggcaacctagctgaacatcaaaaatactccttaaataatggatattacagcgagcgcacacgagccctgttcatcaaacgcctcgggagcctcccctgcgatatgggctccgtagcaaaagaattgaacatcagcactcgcctcttacaacgcgaacttacaaaagagggaaaaagcttcaaagagatttttaacagcactcgaaaaaaactagccgagcactacttaaaaaactatccatcctactcactggagcacatatgcatactgcttggatttaaagaaatcagcagttttcacaaggcttgtctacgttggttcggcactccacccgggagctttaggagcaccaacgcggggactcacctacctggagagctcagtaaaacactcgcccctaaagcaacccctgaccgcccttttgtgaaagagccgtga

SEQ ID NO: 333131 - DNA, 1701 bp, Pseudomonas aeruginosa
atggacaacggacacacctttgctcactactggtcgggtcaggcgcccttcatcgccagcttcgtcctgcagcaactgcgcttatacgttgcgcaaaatacttggttcagcgggcacgaccaaagccagtggttcgacgtacctgtcgaggcgttggagcaactgcaggcggactaccaacaacagtgggccgaacttggccagcaattgctgagctgccagccgttcgcattcagcgatcgtcgcttcgccagtggcaactggagcgaaccgctgttcggttccctggctgccttctacctgctgaattccggtttcctgctgaaactgttggagcttctccccatcgatgagcagaagccccgccagcgcttgcgttacttgatcgagcaagcgattgccgcaagcgccccaagtaactttctgctgagcaaccctgatgccctgcaacgcctagtggaaacccagggcgccagcctactaagtggcctgttgcatcttgccagtgacctgcaggaaggcaagttgcgccaatgtgacttgggcgatttcgaagtcggcgtgaatctggccaccacccctggtgccgtggtactggaaacccctatgttccagctgatccagtattcgccgctcagcgaaacgcaataccagcggccgatattcatcgtcccgccggcgatcaacaagtactacatccttgacctcgggcccgaaaactctctaatccgccatctactggagcgaggccatcaagtttttctgatgtcctggcgcaacttcactcaggaacaggccgacatcacctgggagcagatcatccaggacggagtgatcagcgccctgcgcactacccgggccatcagtggtgagcgccacctgaactgtttgggtttctgcatcggcggcaccatgctgagttgcgctctagcggtgctggcagcgcgtggcgaccaggacattgccagcctgagtctattcgccacttttcttgactaccttgataccgggccgatcagcgtcttcgtcgatgagcaactggtggcctaccgtgagcgcaccatcggtggccatggtggcaaatgtggcctgttccgcggtgaggacatgggcaataccttctccctgctgcggcccaacgagctgtggtggaactacaacgtagacaaatatctcaaggggcagaagccgctggctctggatctactgttctggaacaacgacagcaccaatctgccggggcccctgtattgctggtatctgcgccacacctacctgcagaacgacctcaaatcgggggagttggatctgtgcggcgtcaagttggatctgcgggccatagacgcaccagcctacatcttgggaacccatgacgaccacatcgtgccctggagaagcgcctatgccagcacggaattgctgggaggttcaaagcggtttgtcctcggcgcctccggccacatcgccggggtgatcaacccgccagataggaacaagcgccattactgggtcaatgaacacatagcgccggtagctgacgactggctgcagggagctcagcagcattccggcagttggtggggggactggttcgcctggttgaccggctatgccggcccacgcaagcctgccatcactatgctgggcaatgccgaataccccccgcttgaacatgcgcctggccgctacgttcgacaataa

SEQ ID NO: 333132 - DNA, 780 bp, Pseudomonas aeruginosa
atgagcatcaaggaaagcctgtccctagccggtaagcgcggcctggtggtcggcatcgccaacccgcattcgatcgcctggggctgtgctcaggcgttgcatgaaatgggagcagagctggctgtcacctggctgaatgacaaagctagggtgcatgttgaacccctggcgcaacaggtgcatgccactgtgagcatgcccctggatgtaacccagaccggcgagctggacgctctgttcgagcgcctcgcagagcaatggggatcgctggacttcgtcgttcactgcctggctagcgcgcccaaggaggaaatccgcggacgcctactggacagttccagcaccggcttcctgcaggccattgatatttcctgtcactctttcattcgcatggcgcgcctggccgagccgctgatgccccgcggcggcagtctggtgaccatgagttacttgggcgcccaggagacgatcgaaggctatgccctgatggggccggtcaaggccgctctggaatctagcgtgcgctacctggccaccgaactggggccgcgcaacatccgcgtgcatgccatttcccccggccccatgccgactcgggcggcatccgggctaaaggacttcgatcacttgttggaaacctcgaccaatcgcgcccctttacgccgcctagtcactttggaggaagtcggcggcctgtgtgcctggctggttagcaacgctagccaaggtcagactggcggagtccacttcgttgatggcggcctgaacatcctcggttga

SEQ ID NO: 333133 - DNA, 525 bp, Pseudomonas aeruginosa
atgcccgaagacgaccgcagtgctccacgcctgatcaagaaatacaccaatcgccgcctatacgacacccacaccagtgcccatgtcacccttgccgacatccgtcgactggtcatcgatgaagtgccgttccaggtagtagacgcgaagagtggcgaagacctgactcgaagtatcttgctgcaggttattcaggaggcggaaagcgacggcgagccgatcttctctagcgacatgctcaagggcatcattcgcttctacggcccgttccagggcatgctcggcaactatctggagaagagcatccagaccgtgatcgacatccagacgcagacaggggtgcaatcctctcaggcctggagtgactttatgcacaagcaggtgcctgtcatgcaggatctgatgagccagtatgtcgagcagtcgaagaagctctatctgggcacccagaacttgttcggattgttcggtggcattccgcccggcaattctgggcagaagaaaaaaggcggtgatgaccaatga

SEQ ID NO: 333134 - DNA, 711 bp, Pseudomonas aeruginosa
atgaaattcaggggcgtgttcaagcatgcagatggcggcttcgttgccagcatcgggcacaagggcaagcaggtgtatctcggctggttcagggggttcgaggaagccaagcaagccaggcttgaggcagaggtcaggctgttcggggcggtatttgatcgtcgcgagattgatgtctgcgaggaccacgccaagataccgttgcatgggcgcaacggggcgttctacggctacgccttggtcgatcttgacgacctgccgaaggtggctgcgacagcttggactgtcgaccctcgcggctacgttgccggcaggccggagggcatgaagtcctcggtgaccatgcaccgctggatcatgttcggcgatgcgaagggaagcggcgtcgaccaccgcgatggcgacaagctgaacaaccgcaggagcaacctgcgcgaagcaacccagggtgagaacgccaagaacacccgcctggccaagaacaactccagcggcttcaagggtgtttcgaagacggcggagggccgctggcgcgcacgcatcaccgtcggtcgcaaagaaatccggctcggcaacttcgatactcgggaagaggcggcggccgcatacgaccgagcagcgctgcaactgcatggtgagttcgcatcgccgaacggcgaaacgccgggcgtgcgagtgaaagtcgtccctctcctcgagggcgagcagtga

SEQ ID NO: 333135 - DNA, 315 bp, Pseudomonas aeruginosa
atgtcgacgagcaagttaacccccgagcaagagtcaagatcacgcgatttcgaggcgctgttcttgagccggcttctgtcggtgggccagaaagtcgtcgccgattcagtcggcttgagcgagtcggctatcaccggatggaagaaggacggcctcatcgagcgcttctgcaaggccgcctcggtgcttgagcttcagatcgttccccagcatgcggtggtcgtcagcgcggactatctccgttcgctggagacgctggccgagttgggcctcaaggccgagaagaagcggccaggaccgctgggttgggactga

SEQ ID NO: 333136 - DNA, 204 bp, Pseudomonas aeruginosa
atggcaagttcgccactcgaaaaagcaatccttgccgtggggtctgcgaaggctcttgcgcagaagatcggggtcaccccgatggcggtcactcagtggaaggtccgagggattccggccaaccgggttcattccatcgtggaagcctgcgctggagcagtcaccgccgaagaactgcggcctgacctgttcaaggctgcatga

SEQ ID NO: 333137 - DNA, 621 bp, Pseudomonas aeruginosa
atgggaactgagtcccagaacgtccagaactggttcaaacgaggactggccaagggcaaactgctcaaggcggcatcggtacttggcgtccgcccggagtggctagagtacggcgaagagccaaaggtggcgactgagcgggtcgacattgcacctctgccagttccactcgcgcagaagatagccagctaccgctcactaatcagtattgagcggttcgatgtcgccggctcaatggggcctggcaccgagccgccagacttcaacagtgtcgtcgactcaatgacgctggacgctgcctgggtgaggcaaaatctggtctacacctcaatcgacaatatcaagctgatctccggtcgcggcgacagcatgtcgcccaccattcggaacggcgacccgctactggtcgatgtggggattacggcggttgaatgcgacgcgatctacttcttcatgatggccgggcaattgcacatcaagcgaatccagcgccacctcgacgggctcagtatcctgtcggacaacaatcgctaccggccaatcgaggtggcggcggatcgcgaaggtgaactggccatcttcgcccaggtgatctacgggtggaacgggcagaagttctga

SEQ ID NO: 333138 - DNA, 648 bp, Pseudomonas aeruginosa
atgcggatgatgtctcttgctcttggagcactaatgctgctggctggctgcgaggtgtctcaaaacatggctgttgagaagggaaaggacatggtggcctcggccctcaaggacccagactcagtaagcttttctggggtttacatgcttgagaccgacgttatcggtgacactcattacgggtacctatgcggagtagtgaactctaagaactcgttcggtggatacaccggaaatcgtcgattctctgcgcgctttcagtattcgactggcgggcagttggaggtgagctatctgcagttagaggaggggcggaacgcaaaggaaatgtccgatggcgtcacttttttcgaatccttttattggagaaagcggtgcctgccaggagaggcggagcccgtaatcaccaaggcgccagagccgaaggggagtttgatggcgctccgggtcgggcagcgctcactgcctaccaagcagagaataatcacccgcctttcgcctgacttggctgcggcaacttcactcccaattgaaaaggggcagatcgttaccgttcaggaggccaaggagggctggattcgaatatcgaaagacccagctagtccacagtggattgttccagagcttgtggattgggcatcaccatag

SEQ ID NO: 333139 - DNA, 213 bp, Pseudomonas aeruginosa
atgaacatcagcgttttgaacttcacggcctacaagatcgacgtcgatccagccagccgaaccacggtgggcatctcagcattcgatgcggacggcacttctgtgctggagaacttcgacatcgagcagatcgttaaccactttggcgccgaggctcttctcgatgagatcggggagcaggtcgcccgccgccacttcgacattgagggataa

SEQ ID NO: 333140 - DNA, 264 bp, Pseudomonas aeruginosa
atggccgctacctacgggcgcagcccggcagagatcgccgaggacatggtgctgaccatggcctcccccatcttcaacatcagccgcgagtttgcagcgcgttattgcgagcagcgctttgagctcgaatcagccaagcccattcgtgagcaggcagcggaactgctggataggtgggaaggcacgaacgcgaatatcgccgcagcgatgcagctttggccggtttggtgctacgccactcgtgcgcaccggtccaacacctga

SEQ ID NO: 333141 - DNA, 249 bp, Pseudomonas aeruginosa
atgcgacgtgtcatgactatgaaggtggtgtgcgacaggaatggtcggcgcacgggttacgaagaaagtggcgaagcactcttccaccagtggggggtcgacttcgaagagttcgagactggggcgggcaactacaccgttgctgtcgttgagcgccccggaggcaccgttgaactcctgcagcctcaccttatccggttcctcgacaaggcgccggacttccccgatacggaggacatcaccatgtag

SEQ ID NO: 333142 - DNA, 153 bp, Pseudomonas aeruginosa
atgtggacataccgcgagcgccgcaaccgcgcggctttcagcagtgcccagcacgcctgggacttcgccagagacccgctctgggaccagccggagccggaaccggagcccgaggacgaagagcaggaggatgacgatggcctgggcgaatga

SEQ ID NO: 333143 - DNA, 183 bp, Pseudomonas aeruginosa
atgaccacccgtcccgttcgctcgatcatcgacgaccagctcgacgacctggtgatgccggccggcgccgatatcgccgctgtgctcggcctgccgcgcgagaccctggtggtgaacctgccgcgccgcatggcgctgaccatcaagcgcggccggaagtgcctgggggtgcgtcgtggctga

SEQ ID NO: 333144 - DNA, 603 bp, Pseudomonas aeruginosa
atgacccagattttcgtggtcatcgaccgcatgcccgagttcgtctactcctgcggagagttcgaaaagctttcgggctggggcgggcgtggccgccacctgatcgccaacgacagcgggttctacgacttcctcaaggaggtccccggctccaccgatgccttcgcggggcgcaagttcacgattcggctggatgacggaggcacccttgaatgccatgggcaggtctgggatgcagcgcacccaaacccgccggagccaaccgtacaagtcggtatcagcacaatcgagaagctgcatcactgctacgtcttctccggcggccggatatccaaggcaaagctggaagagtggctggcaagcaatcgacccagcaggaactatcggaagtacgaccctgccgagagtctcgaggcgttgcgcaccaggttcttcagcaacacctatggcttgcgcgcggtgggtgcccagcgcgcccgccgactccgtcgtcaggggcgcgagattcactgtctggaaggcgtccgcttctggagccctgcgttcgaacgcagcaagcgcgacatgctcgccaggagggcgctcgatgaatgcgaagcgtaa

SEQ ID NO: 333145 - DNA, 687 bp, Pseudomonas aeruginosa
atggccaacaactactacgaagccaccggcgttctcgtgctcgaccgtgtgacgcccgtcatccaggcgctgttcggcgccttcgcgctggacgagagccaccccggcaacgggcaggcctacatcgcccagatcgccgagaccaccaatccgcaatggccggacgtgctcgatggcctggaagacctggccacgcaactcggtattccgatgccggacgacgaagggctgtcgatcccgccgctgctcgaactgctcgccgtgcacttccgtgccgatgaggacgaagagctggggaacttgatcgaccgtcattcgttcgaggacaccgccgatctcgacgcattgtttctgatcgccacccggttcgatgacgggcaccacctgaccgccatccagttcgagggctgctggtactgcagcaagccgcggctgttcgagttcggcggcaacggctgctacctgagccgcgaggtccgcttcatcagctcctcctcccaggccctccagctcggcgaccaattgcgcaagaccattgtggccgccgacatcgaagaggcttcggccctgatcgcgctggagaccatcaatctgctggcgggcgtcagcgacgagccattccgcatgaatttgcgccggcgcgtcgccgagcgattggcccaaacgccaacgatcagcgtcacctga

SEQ ID NO: 333146 - DNA, 261 bp, Pseudomonas aeruginosa
atggacccgatcctggcaacgcttccgccctcgttgctggcactcgttgaagggagtttgtccaacgacgaagtgtcctccgacgaggaaatgctggcgtacttcatcgacaacggcctcaccgaggaccaggcacggcaggcactgacctaccgcgaccagtacctcaacaacatctacctggaaggcttcacgccgatcacttcggcggacgagccgcttcacttcaacccgcacacccggcagttcgagccggactga

SEQ ID NO: 333147 - DNA, 648 bp, Pseudomonas aeruginosa
atgcccgcaaacacttcttccacgctgtaccgcatcgacgaatgcccggacgtgatggccgacgcctgcgtcggcgatgaccagggcaacctgatcttcctgtccatctgggcgcgggacaccgccgtccagcagttcctcgctcgcctgaccctcgggcgcgacgagcagggactggaccagttccacgtcatcaccgaccagggcggcagcgtcccggtattcatcggcaacgtcgatcgcctggaaaagcgcatcacgcgcgcgtaccggcggacgctgttcggctcgctgtccaacgtgtggctgttcgaccggcgctgcgtcaagcccgacaaggccaacgccagcgcattggcactgctgccacgcgacagcgcccacaggcttgaccgcctgtggatgctggtgcgggacacctgcccgttgccgctgctcgatcactggcgcgagaccgtgctggaactgctgcaaacccgcgagatgctggcccgccttccgttcgccctcgggccgctggaaggccatcggctcgccatcgacgtgccggcgctgaccctggcgctcggctccctgatccgcagcgacgcgctcaccgcctatccgtatccggccaagatttggacgccggaagcggtagcggcttga

SEQ ID NO: 333148 - DNA, 1110 bp, Pseudomonas aeruginosa
atggccctcatgttcccgcggctcgcccgcaatttcgtcaagaacggatatttcccgaccgacgaacccacgctcgaaagagcgctcaacgcactgatgcccagcgacgggccgatgtgcatcctcgatccctgcgccggcgaaggcgtggcgatcgccgaagccgcccatgccctcgggcgcgagcaggcaaaggcgttcgccgtcgagttcgacgcggagcgggcgcgccatgcccgcggcctggtcgatcactgcctgcacgcggacctgatggacacgatggtctccaagcagtccttcgggctgctctggctcaacccgccgtatggggacctgtccaaggacgtcaacggcaacatcggctatcagggccagggccgtgcccgccttgaaaagctgttctaccagcgcacgctctcgctgctgcaatacggcggcgtgctggttttcatcgtccccggctacgtgctcgacgcggagttggtcggctggctgacgcgccactacacggacctgcgcatctaccgagcggtggagacgcagttcaagcaggtggtgatcttcggacgccgggtgcgccagcgcgagcaggtgcccgatggcgtcaaggccgtgcgcaatctgctgttgcaggtagggcaaggcgaagtcgaagccgaggaactgccgagcgagtggccgttcctgccgtacatcgtccccgccagcccggccgagccagagcatttcttccgcgtgacgatggagcccgagcagttcgccgatgaggttggcaggctgcaaggcttgtggccatcgcaggacacgcacctgggggctgcgcagcaatcgctgcgtccaccggcgcgggccttgtcccgctggcatctcgccctggctctggccgcgggtgcgatctcgggggttgtgcgctccaagaccgggcgcgtgctcgtcgtcaaaggtgacacccacaaggacaagacgctccagcgggagttcaccgaacgcgaagacggctccatcgccgagacccgcatcctcaccgacaagttcgttcccgtcatccgcgcgtgggacatgacacctggctccgcgacacggggcgaggtgttgaccattcgctga

SEQ ID NO: 333149 - DNA, 321 bp, Pseudomonas aeruginosa
atgatccccaatccgttcaagcggcctgcgccgcacaagcaaccgttgttcgcaccgagtacgttgaagttgagcgagaaggtgcattggctggcccggcgaggcctgatcgaccccttggcctatgtccagcgccatgtgcgcggggactggggcgagatcgatgaggccacacgccaagccaacgacgtggcgatccaacaggacaacctaatgatctcgcagttcaggatcacgccggacctggcgctgatcgtcaagaccagcgaggaccaccagaccacggtggtccagcttcccgaagagcgggacctgatctga

SEQ ID NO: 333150 - DNA, 306 bp, Pseudomonas aeruginosa
atggcatcgcatcgcatcgaaacctactgccagcggctggcgttccccatcggggcgctcatcttcagcagaggtgtagaccgcctggtccgcgcgggtcgcctggacccgatcccgtacttcaggcgccacacccgtggcgactggggcgacgtcaacatccagcaatggcagacgaacagcagcgcgcttcaatcgggcgcgtcgctggaatcgcactacgtgatccatccggggctcgccattcgcatcgtcaccgattcgcagcgctgcgcaaccgtcatcgtgcttccgtccgaagactga

SEQ ID NO: 333151 - DNA, 912 bp, Pseudomonas aeruginosa
atgaagcatcctgtactcgcgctgctggggctactggccgtggccgcggcacccgtcgcccaggcggtggagatcctgcgttgggaacgcatgccactggcagtgccgctgaaggtcggtcaggaacgcatcgtattcatcgaccggaacgtgcgcgtgggcgtgcccgcaggcgtgggcaaacgcctgcgcgtgcagagtgcgggcggcgcggtgtacctgcgtgccagcgagccgatcgagcccacgcggttgcaactgcaggacgccgacacgggcgcgctgatcctgctggacatcgcagccgaaccgcccaaggacggggaagccgagctggagccggtgcgcatcgtcgagggtgacagcgcaccgggacgctatggcgagcaggccgacagtgccgaggccccggcacgcgcccagggccaggcaggtgcgcggaccgcgcggcgcgaaactccggtccctgtcgtgctgacgcgcttcgccgcgcagaacctctacgcaccgctgcgcaccgtcgagccgcttccgggcgtcatgcgggtcaaccttccccgcgacctcgacctggacacactgatgccaacgctgccggtgcgcgcggccgtgctcgcgtcgtggcgcctggaagaccaatgggtgactgccgtgcgcctcaccaacaccggcgccgactgggtcgcgctcgacccgcgcgtgctgcaaggcgatttcctcaccgccaccttccagcacgaggcgctgggcccgcgcggcacgaccgaggacacgaccgtgctgtacctggtcacgcgcggccgcggcctcgcgcagtcgctgctgccggcgattcaccgcttcgaccctgccgtgcatctgccgcagccggacggcgacgagaacgccaaggaggcccgccatgcgcagtaa

SEQ ID NO: 333152 - DNA, 441 bp, Pseudomonas aeruginosa
atgaggcagatgaagatattcacgattggattcactaagacctccgcgcggtccttcttcaccaagttaagtgcttctggtgccaagcgccttgtcgatgttcgcctgaataatgtttcgcaattggccggcttcgctaaacgcgaggatcttcgatatttttccgaggcgttgtgcgggatggaatatgaacatctaccagcacttgctccaaccaaagacatgttcgaggaatataaaataaaagggggagattgggatatctacgccaggaaatttctggatttaatgtcgtcccgaaagattgagtcaatcgataaagaaaagattgataacagttgcctgctttgcagcgaagacaagccccatcactgccatcggaggctagtggccgagtaccttgcaggcaaatggccgaatgttgagatcgtgcatctttag

SEQ ID NO: 333153 - DNA, 1215 bp, Pseudomonas aeruginosa
atgactccgaccggtaaccgaatcgtgactttcgagaagcccttggaaatgaaggtcaacaccttcaaatttccagagctgataacccctcaagggaaaagcgcaccccatggcgctatcctcaaaatagttaccacaaatatctgtggcagcgaccttcacatttatcgcggttcgtttgctgttcccaagggaatgaccatgggccatgaaatgaccggcgaagtgatcgaagtgggatcagacgtcgaagtcgtgaagaagggcgacatcgtttccgttcccttcaatgtggggtgtgggcgttgttacaactgcaagcatatgcgctccgatgtatgcgagaacaccaaccccgaaatcgactgcggagcctacgggttcaacctcggtggctggacggggggccaaggtgattatctcttcgtaccgtatgcggatttcaatctccttcgcttccctgacaaggatgccgccatggaaaaaatccgcgatctgacccttctctctgacgtactacccacagctttccatgggttcgctggcccagactggccagccgcaccggcctacgtcgtcggcgagaacatcctgatcttcggtgccgggccggtcggcagagcgggtgccgcctgcgccagacttctgggtgcaggcgccatcatcgttgccgattacattcaagagcggctggaccttctcaagccacacggcgtggaaaccatcaacctttccgacggcgtgccgatcgaggagcatctcgaacgcattaccgggcacagggaggtggatcgcgtcatcgactatgttggtgtggactgccgcgggtttggcgcggaggctgacaagatcgtggagagcgctgttaccaacgcaatgctcaaatatgtccgcttcggcggaatgaccagtacggtcggtgtgtactgcgcaaacccgatctcgaaagacccgaaagccaagaaaggccatatggatctggaatggtccaacgcctggatcaagtcgccgcgaatgtcggctggtcaatctccgacggccaactacaaccacgcgttaatgcgggcgatactgaacgatcgcatgccttacctttcgccgatgatgaacactaagttcatcaagctcgaagacgcgcccgccgcgtacaaggagttcgacgcgggttctgcatacaagtacgtcatcgacccgcatggttcagtgcggcagtaa

SEQ ID NO: 333154 - DNA, 975 bp, Pseudomonas aeruginosa
atgcgtccgaggaagaaggatagacaccttccgatgtgcatgtttcagcgagggccatccttttatttcgtgagggatgggaagtggacgaatcttgggagggactatcgctccgctcttcttgagtacgcgaagctcaccggcggcgccagcaaggatgggatgatcgacctgatcgacagggtgatggatcacattgcgccgtatcggtcagcgaacacgattacccaatatcgggctgtagccgaacggctgaaggacatgttcgcagagttccagccaagggaagttctgccgaagcatgttgctcaggtaaagacacatatggcgtcgacaccgaacatggcgaacaggactctcaccgttctccgcgttgtgttcgcgcaggctcttgagtggggggaagtggactcgaatccttgcattgggatcaaacctcactctgagaaaaagcgcggccgctacctcaacgacaaggagctgctatccattctcgacaactgcagcgagtacatgcggtgcatcttcgagcttgcctacctcaccggtcagcggatcggtgatgttctgtcgatcaagctcgatgacgtgagcgatgacggaatcgcatttcagcagcagaagacgggctcgaaggtgctcatatcgatgaccccggacctagatgccgtggtgcaaagagcgaaagcactaccgcgccctgccgatgcgaagaacctcatctgcaacaggaaggggaagcaggtggactatgcgacaacgagagatgcatggaagagggctcgagaggcggcgggcgtcaccgatgcgcgaatccatgaccttcgcgcgaaggccctgactgatgcgaagaaacaagggaaagatgccaggaagcttggcggtcacaccgacccccgcatgacagatcggtatataaggcagagagagcatgaggtggcagagccaccgacaatgccgaggaaatcgggttag

SEQ ID NO: 333155 - DNA, 123 bp, Pseudomonas aeruginosa
atgaagaaagccatttcccgactggcggcagcagccgtcatcggcgccagcctggtcgcgctacacgcagtgatcgaactcgcgccagcattcgcagccctgcaatggggctgctcgttctag

SEQ ID NO: 333156 - DNA, 318 bp, Pseudomonas aeruginosa
atgagctacccactacccggattgcatatgcgcacgaaacccttccgcccgccgcgccggcatgagatcgccggcctccgctactaccgcactgcctcagcctacaactggctcgggatcacgatggcccatccgacccgagcaatccagttgctgctcgagcagtgcgagccagacgtgctctcgccgatgttcaacatcgagatcgacgcgatcctgcgccaggccgacgagtacgcaaagaccggccaggcgctcgagcgcgagcaattgcgcgaaatgctcatgcacctgatctcgaaagccgcgggcgactga

SEQ ID NO: 333157 - DNA, 207 bp, Pseudomonas aeruginosa
atgagtgaggtccatagcatcaccaccgagcaccttgccggtgcttcagccctggatggcgaggaactgaccatagcccttctgcgagagaacgaagacctgatcaagaagaacaagaggctcagcaagccatggctgatgttcttctttggggcggcctatggggccgctgtcgcagggaccaccgtctactggagcctgtcatga

SEQ ID NO: 333158 - DNA, 570 bp, Pseudomonas aeruginosa
atgtccgcagaaaagccgcgggagcggccaatcctgttcaacgaccagatggtccgagccatcctggaaggccggaagacggtgacgcggcgcgtcgtaaaagacaccgggttctacgccatcgacgcggcaattcatggcaacgaggtcgcgctacgagaactagaggccctgtcgacgcgctgccccttcggccagcccggcgaccggctgtgggtgcgggaggcctgggcgcagatcaacgtggtccaggcgcccggcgaaacctgggtggtttaccgcgagtgcgacaaccggaccgactacggcggaccttggaagccgagcattcacatgcgccggcgcgatagccgcatcctgctggagatcaccgccgtgcgcgtcgagcggctgcatgacatcactccaaaccagtgcatagctgagggagcatggcgagagaaggataaggagctaggccgtggccaggaagctatagccgcattcgccgatctttggcgctcgactggcggcgactgggacgccaacccctgggtctgggtcatcgagttcaagcgggtgacgccgtga

SEQ ID NO: 333159 - DNA, 675 bp, Pseudomonas aeruginosa
atggaactactcgccagggcaaaggcccactacctcgccgccgtgtcgctgttcatggcgcataacgatatccgctactacctcaacggtatcagcatagaaccggcgtctcagggaggcgttctactgatcgcaacgaacggccaccacatcggcgtcatgcacgaccctgacggttgggccagcagtaagatcatcatcagcccaagcacggcactcgtcgccggcatgaagaagcgcaacgctggtacggcgttcatctacgaacgcgctggggtgatctccgattccgactggcccgttcctgatgatgtgaaacagtttgcgccgttcgatcccggcaccctgatcagcgcgcagctcgaactggtggatgccaagtacccggactggcgccgaccgattccggctcaggggatggggtcgccgatcaccgcggtagatcctgcgtacctgggaacgttcgagaaggtcgtgaggatattcaaccggggcagcgcaccgaacctcgtactgcgacaggccgatccgaactctctgatccgctgcacgttccctggccatgagcacttgcagaacttcttcgccggggtgatgcctcgccgcgccgatcacgaagaacgatacgacggcctgcccgacttcctgggtctcaaggcgaagaaggtggcctga

SEQ ID NO: 333160 - DNA, 918 bp, Pseudomonas aeruginosa
atggcggccaaatcgttcaagcaaatggtttcaacgaaggagatccggcgcgccgatgcatacaaggtccgcctcgaagacctccacgaagagccaggactcaactggcggcgttacaccgatgcgttccacaagtctgttgaggagctcgcggaactcatcgccggcgggatggaggtagatcccctcgaggtgcgccctcgcgaagagggaggcgtctggatcgttacaggtcaccgccgcacaagagcttggcgcctgctcgacctcgcagggcgcctccagcgagatccgaagaccggagaattcctcgtcagcgtagttccttcgaaggcaaaggacaggcgccagcgcctggcgcgcgtaagcaccagtcaggaccagttcgaactgacccctctcgactacgccgaaggctgtcgccggatgcatgaagaggaaggcatgacccctgcagagatcgccgcggagatcaaaaagacgcgccagcgagtcgagcagttcttgaagctatctactgcgagcgagggggcaaaagcgctcatcgacgcggggaaagtatcggcgtcgacggtgaccaggctggttcgaaagcacggcccggatgttgagggaatcatccttgagaggctggagaaagccaaggagcgaggcaagaagaaggtgactccagcggcgatggttgaagctcccgcttctggatcgccggtcgtcccggattgcgacgctgttgtcgcgcctccccctgctccaggtccacacgacgacctgatgaaggtagttcgcgagattgtccgatccttccctacggaggtccgcgcaggccttgccgagggcgccgaggcgatcaccgtcactttcagggcatcgcagatcgagcgattgaccgagatcctcgccaaggctgaagaagcctag

SEQ ID NO: 333161 - DNA, 219 bp, Pseudomonas aeruginosa
atgattggcaccgtacataaagaacagcctctgaccctgcacagtcgcatcggctccgcagatggtgagcatcactcttacaccatgatggtgaccgagccactgcgaactcctgtggtcgtacgtgacgacggcaagaccttcatgttgacgtggagcgacctgatagacctggcgcgctctgcgtttgcagaggatgacgcagaaaagcaggcatag

SEQ ID NO: 333162 - DNA, 255 bp, Pseudomonas aeruginosa
atggccaagaagcagaagcagcagacgtacgaggtcacgccgactgatcgcctggggatgcgggtgtccgcgatgatcaactcaccgaaggcgcaggatctggggaaggtgacgattcaccggctggacactgacccggcggaagcgtgggatgcggtgatggaagtgctggctgagacggacggtatcgacctggtgttcaacgacgacggcaccgtgacgctgaggtgggataggcaggaacgggaggggtag

SEQ ID NO: 333163 - DNA, 237 bp, Pseudomonas aeruginosa
atgtggtcaaggaggtatcgaccgttaacgtaccgggaagtgacaggcgttctgaaaaagcttggattcacccttcgtaaccaggagggaagtcatgagcaatgggtaagagagggtagcccttttcgcaaggtgaccgtcgataagccgaaatcccctttccatggcgacctgatcaggtacatggctttgcaggccggagtaacaaaaaaagagttttactccctcgtagattaa

SEQ ID NO: 333164 - DNA, 324 bp, Pseudomonas aeruginosa
atgtctaacaatcctttcgttcttcgatgctacgctgagaagaaggacggcttgtggatcgcagcatgcccacagttcacgttggccgcccaaggagatagcttcgaagaagccaagggtaagctggaagaacagatcaagtcctacattgtcgaggcacttaccatcgacaaagagcatgcagctgagctgcttggtaggaaggctccgttctccatgtggctacgctaccagttcatctccctggtagccgctgtgcgccaaagccggcgccgcaaaatccgcttcttccaggaacctgccctgcaatacgttcgctgctaa

SEQ ID NO: 333165 - DNA, 756 bp, Pseudomonas aeruginosa
atgatcgatatcacgacaatccgccgtgcgaacgcgctaacactggccgaaaaggaaggcggcacagtcgcattcgctgctcgcatagatcgcgagcctacccaggtgagccgcttgattggctcgaaccccaccaagaacatcggcaacaagctggccaggcacattgaggagaaattcaatatgccgcgcggctggctcgacattcagcacaccccggaacaacaccagcgggtggctgagccgaccgccgagtatcgctccggcggaaatctggagtccctatcagcgtggtcggacggagacccgctcgcgccggacgaggttgaaatcccatacttcgatgaggtcgagatagcggcgggcggtgggcgagtgcctgacctcgaactggccaagcgcaagattcgattcccgaaggcaactctgcgcgaggctgccgtcgacaagagcacctccgtctgcgtgaacgtcacaggcaacagcatggagccgcttattgcagacggctcgatcatcggcgtcgacctctcggtcaacacgatcgtggacggcgagatctacgccctgaagcatgacgacctgctgcgggtgaagttcgtctatcggttgcctggcggcggcatccggttgcgcagctacaaccgggacgagtaccccgatgaggagtacaccagggaccagatgcgcgccggcgacatcagcgtgatcgggtgggtgttctggtggtcagtgatgaggcgtcgcaagcactag

SEQ ID NO: 333166 - DNA, 354 bp, Pseudomonas aeruginosa
atggggatcatcgacaggttgaagagtatggtcgggctggaaaaagaggaggcttttcgtcggtggtctgctactgagcttgcagataagaaagcctatcttgagagcaagtccccgggctcattcactgctgcggaccattacctgtctgctgagtgggtcattcagcgataccttccagaaggggatgagcctacagatgagcagtggtcgaaaaaaatcaaagagataaggcagaagatcgacataaatataaaaatggctgctgctggaacactgcacaataaccaatcagattcgtcagatgacgacgatccagagtttaagctatggctggacgagcacctgaaataa

SEQ ID NO: 333167 - DNA, 519 bp, Pseudomonas aeruginosa
atgtctcgcaccttcagcaaccgcacttctgtctccctcgagcgaatcatcaacgaaacaggcgacatcacccactgcctgatcactatcggtgacaagacgatcgaagcccctttcaccattgggcataccgagctcgaggagattgttgaggaggccacaggcgtggtgctcaatgttcgtgagcacatgtttgtcaccaactcatcccgcgctcagatggagcgagaaggtggtcgcctcgcggatgtgttgctgacactccctgccggcacagtagcgcgcgttctggacgacctcttcttctggattggcgccaagggagatttgctttgggcagagtacttcccgatcggggccgccccgtcagaaatcaatcctggtcagatcagcgagttcggagagatcgataccgatgacctctatgaggtggcggccagcattcgagaatggctcagctgcccgaagcagctggcggttgacctcgaatggctgcgctctgtcgaacccgaggactag

SEQ ID NO: 333168 - DNA, 240 bp, Pseudomonas aeruginosa
atgagcatggaaaccacgcccagtccgctcgaagaattctacgttcagtggctctactacgacgccaggcgcggaggaacctgtacacacgctaccagggaggacacgaacaaggccctgtgcggagtaatgacggtcgacggcgccggtcagacgctggcggacactggcggcgccgttgcctgtcgccgttgcaccaaggccctcgcgaagttgggcatcacacctaatcgtgaatag

SEQ ID NO: 333169 - DNA, 261 bp, Pseudomonas aeruginosa
atgacaacgatcgacacgaacctaactgcggagatgctgatgaatcagcatgcaaaagtcgacggaggctacaagccgttcaccgtgcgcctttgcaacggaaaaattggcctcgccactgccacgtacaaccacaaccagtcgttcgagaccaagcaagcaattgccagacgcatcgcagccctctggaacatcgcccaaggcattcctaccgaggatctggagaaagcggcggcgtctggtttccggttccgcaaatga

SEQ ID NO: 333170 - DNA, 312 bp, Pseudomonas aeruginosa
atgacagcattgcgcaatacagccaaggccaagcggttcgtggcggacatgatcaagctccgcgggattgaattcgcgcggattggcatgatggttgaggtggatggtgacctcggcacgatcggcggcatgaacagcgacgcgaatctgctggtgcgcttcgccaatcagctcaagaacggcaagcatctgcacaactgccatcccacctggaaagtgaagtacttcgatgagtcggggaaggtcattgcccacttcgatgactcccaatgcgtacttcgtcctgcacaacccgaacgaggactgaagtga

SEQ ID NO: 333171 - DNA, 231 bp, Pseudomonas aeruginosa
atgccctggcgctacttcctgatcgtcctggcaagtaccgtcttgaccacggccgtgctcgttcttaccgacccggccaactggggagaaaaactcgccatgggcatcttctccttcgtcggcgctgttagtactgccctgggaatatcgttctgggggacacccgatactccgacggagcaggccaagtctggtgtcccaacagctcagcacccggagcgcaaacaatga

SEQ ID NO: 333172 - DNA, 483 bp, Pseudomonas aeruginosa
atgacccgcgaggttcggaaagtaccagcgggctgggtgcaccccagcaacggcgtttaccccgacggctctgtctgttacgacccgctgttcgacggcgcaacattcgccgcgaaagcagcagcatgggataagtgcgcgtcggagtgggctcgtggcgaattcccaggctacgcaacggaagagtcgaagctgaagccctacgaagcctgggatggtccccggccggaccctgctcattacatgccgctatggactgaagcagagcggactcacttcgtcttgtacgagaacacctccgagggaacgcctctgagcccagccttcgcgacggaggaggagttggcgcgatgggcgacagaacactgtgctgctgcgtattacccggaccgccgcctgacctacgaggattggctcagggtgatcaagggcgacgacgtcgatcaagcattcgctgaaacacctggtggcaagcatgagtga

SEQ ID NO: 333173 - DNA, 999 bp, Pseudomonas aeruginosa
gtgtctaaagcccagcgcgacttccgcagtccggagagtattgagcaggagctcctcaccagagatgcgatctcgcccttcctgaagagccgtggctttcagggtgttgaggacgaacggatcatctcaggatcagctgtacagcagttcatctcggccaaggatcctgaggggcgggcgcttaagatgcgggtgcgtctctgctggcaccgcggcgacttccgtagcaacaagcgaaaatactctggcgcccagcttgcagtgcggcctcgtgagggaggctgggatgccacgctcgattttctcgctgagcgcgaccgtgcccatgggatatcgcacaaccttctgctacagcgggacgacaacgatatcgtctatgcagcactcatcccggctgaccagattggccccatctggcacaggcagtgggcagtcagcgacgagctgattcgcactggccgcacaggccggatgaagagaaaccacgcagagaacggcaccagcccagccctgtatcttcaggatgaccggtctgaacatgctcacctggttgcagatgccctctggcagtggccaggtgtggtggacgtcgtgaagttgccggtcctcgcgccggcgccaatagagctcggagacgacaccttcgatgattgcccagtaccagactatgcggacctcggccgcgatgccggccagcggacgaaggccgttcggtcggaggtgaaacgagaccctcgggtgcggcgagcagtactgcagcgtgccggcggcgcttgcgagcggagcgggtgtggtatccgaaggaccttcgatggtttcctcgatgtgcaccacatcctgggcgtggagaagagcgatcgggtatacaactgcgtagctctctgtccaaattgccatcgtgaggcgcactatgcgcccaactcggccgacctaaacactgagttgctggagtatgcggcacagttccaggtgaagggcgccggagcaagggatgcatga

SEQ ID NO: 333174 - DNA, 399 bp, Pseudomonas aeruginosa
atgatttaccgagctgtggcgtattccactagccctgaatgggtcgatcgctcaactatggaaagggtcgttttcatcgaggcggccgaccggaacgaagctcacgaccacctgcacctggtgctgtctgtgctgtggcgagtcgctcccgagtccatcgattactacaacctcgtggatgagccggcgatgatcgccgaatctatcggcggcgaggagacgggcgaccatcgcttcttcgaggtcggaatggcctacggtcgcgccatgtacactggtgggctgaaccagcccttactgctgctgcaccagaatcttgatcgaatgatgagcgccttcctcaccctgcctcatcgtggggaaactgggctgcgtatcgccctgggcaaattcgattaa

SEQ ID NO: 333175 - DNA, 453 bp, Pseudomonas aeruginosa
gtgagcgaccaaaatctccccgaacgcatcaaggcgacgttgaccatcgagctcgatttcgccagggaagatcagccactgatcgcggatgtgctccaggacatcatcggcaacctcggcttctcgagtcaggggagcggctcccgcacagcgcagagtcactacagctacaagctggaatcgaacctaccgtcgcaaccgatgacgatggacaggctgttcagcctgtacgacgagagtattgagccgggggagccgacggctctagagctgttcgctgaatcgcagcacccgaatgtggatgaggcgaatgcgtggtgggagcaactgacggaggctcagaaggattggttcggcaagcaataccctgacgtcaagttactcaccaaggcctgggatacctaccaaagcatggactttgcacagcgcgtcttcttccagacgctaggctag

SEQ ID NO: 333176 - DNA, 552 bp, Pseudomonas aeruginosa
atgacctcctacccgattctccaagggcattcctttctccgtcacgcgtctgacgaaatcggcatgcccaatctcgacttcgaaatcttctaccagcaggggctcacctgccatcgatggggcttgccccgtctctacgtgcgccaggcgcttcggtctgtaattaaaagctggctcgctcgtttccgccggccggtggcgttctggcaactgagggccttcgcctatggcctgcgtggcttgtgcgatggcggtacccggccgcgccgagtttcctcagacttccaatggccgctgccaccagacgtttcctgggataccgtgctttgcctctacccggacggtaagtgcgatctggacttcgttcatcctgtctcacgtgtgttctggtccgagaagaacggcttcctggagctgccgtcctacgacccactggtgatgggcggttggtggttcgaggcgatggggttcgaaatcctacgaatgcagcctgggatgactgtgcgggtgcaggaagagagcaggccggcgaggcttaaggcagttctgtag

SEQ ID NO: 333177 - DNA, 552 bp, Pseudomonas aeruginosa
atgttcgcttccccagagttcgccgaccgcctgctggccaagctgtttggcttcccacagtgctgtgtcgatttctacgtaaattcctcctcagatgatcggcgccgtgcgcctggcatcgcgcatgcaggtatccggttgtgcccggcatgcgcagctaaggacctggaagagatcgtcaatgacatcgcctctaagcggatctgcccccagccattccccatcacgccgagagagtccgatttcagagccatagtggaggatcagcgcttcacagaggaggagagggcctggctcttggccaacaaatcgcgtgtggtcccaaccgaagatccttttgacgctgctctcttggcattgcaccaagggctgaaggacctggaggagcgcaccgccgagaacatcgccgctgagccggaacgggcgaacctgtttctcgctcagcaggagatcggaaagaaggagatgctcggcgccgtgctgaatgggatacatggcgccatgaagaaacgcgtcattgatcagatcaagggtgggcatctgacgatctga

SEQ ID NO: 333178 - DNA, 351 bp, Pseudomonas aeruginosa
atgaccgccgagagaccaaatcgcatgtccgaaccgccgaaaaaaatagccaagctgggccaacagaactggcttggcgacatacgaccacggtacttcactaagtacacaatccttggaattccgtacctgatcgtcgtagggggagccaaggttgcgctcaaggtcgttgaggtcctgctctacatgagcgcgatcatgaccgtctctcaatacaccctggaaatcaccgggctcccttcgaccgccaccacccccatcaaggaagttgagtggtatgcgctgggcgttgcggctgtggtcgcattgatccggctatgcgggcgctacttcaggcgcggacgggcttga

SEQ ID NO: 333179 - DNA, 525 bp, Pseudomonas aeruginosa
atgtccattaaacagctgccaccgaagattcttgatgggtctcaccgtgagtaccccatcagcatactgtgggagggaactccagttcgcaccaccgcttcagcagagcgtcaactgctgaacctggtgctgccgccgtggcagcgccccttcgtgtggagcgctgaacagcagatccgctatgtcgaaggaatcttcctgggtctgggcaccggtacctatgtcgtcaatggccgcgaatacgaaggcgacagcaatgcgcacatgtccggctggctgatcgatggacaacagcgcatcacttccatctcgcgcttcatcaaaggcgatatcgcgatcttcgatgggctgcgctacagcgatctttcgattgccgaccgccgccgccgcttcgacaacatcgtcttcccctgcatcgagttggagtatcaacccgacgaggagcgccttattgagttgtatctccgcttggcgttcggcggcgtcgcacacaccgaggctgatcgtgccctggttggccggtaa

SEQ ID NO: 333180 - DNA, 309 bp, Pseudomonas aeruginosa
atgaagaaagtgaaatgggtcatctgcgattgctgtgaaggcgaaggtaaggtttcgaaccccgcgttcgagaacggattcaccacctccgagtggaacgaaatggaccttgatcagcaatctgcgtacctgggcggcgactacgacgtcacatgcaccaaatgcaaaggcgaacgctgcgtctcggtaccgaacattgcggcgctgagcttcgcggagaagcgcgacctggttcttcgtcggagagaagaaagggaggaggctcagtttcgccgtgaggcggcggcagaacgcgcaatcggttattga

SEQ ID NO: 333181 - DNA, 525 bp, Pseudomonas aeruginosa
atgcatcattccagcaccattgcccaggccaccgagcaaaacctcgctgctgcacacaagagctaccgacttgagtgccgcactaccagcgagtacgaccatgcaccgggcgccgccatttttctcatcgacgtcggcacggccaagctcatcactgagctggcagggttggtcaaagcacacgggttacacacggttgaaaagttcgattaccgcgtgacgtacctcaagcacgaccccgaaaccgattccgaaatggccgaggccgccggcgaggacaatgacctgcgaactgttggtgattgcctggtcgtgagcgatacggagttctggttctctgccaacgcgaagcacagcgatgtgctgtttacgtgcgtaccacagcgcatccaagacttggttgaacacttcgacctcaagccggagagctcgtgcgctagctgtggcgaggacagcaatgaggttattggctgcccgtcaggcgacgaaatatgccgagcatgcttcgctaacggtaaaggctaa

SEQ ID NO: 333182 - DNA, 459 bp, Pseudomonas aeruginosa
atgctgttcaaacgctacgagcgccatacgcctgtcaacttcactacgcgcaaggaggctgcttttgcccgcaagcaaaagcgcgagcaggactcgatgccgctctttgcggaccagatcgcccaggagcaggcaatctgggacgacgagaaacagcgccgtgaagagcgctggataaagtcggttcaacggatgagggatctacaggccaagcactggcgtcgtgtacgtgctgcctactacgcactcgaccaggcgactcgtacccgatgccgggaatacatggagcaatggcgcggtggctacaccccgaccaacatgatctatgtgatcgagggcttcagcggcgcccgtgaagaacgagaaaagcgtcttcgtgaagagaaccgtcaactccgtgtccaaatccagcgccagctcgatgcggagatgcaacagagtcccctgcagctcgcgtag

SEQ ID NO: 333183 - DNA, 1161 bp, Pseudomonas aeruginosa
atgaaagggctggtgtctcctcaaacagtggaggagcaggggctgcagtcaattcttctagggattgctgacccagcgacatacccccatgccttggacagtcttcggaatctggatttgccatcgcgccgcctggtcaaacagatggtacatgcggccagagagccgcatcttcatcggcacctcgtctcgctggccgtcgctgccgataaagcattcgaccagtctcaaaggcactttgatcgacatgagaggcgggtagtctacagacacaaaggtacaacggtccgcagtcgtaaaataagcgcatcggttggggacgaggggttgcttaagcggttgagatacatccgtcagcagatcctttgggctatgccagatgttcgatccgaggcggtgcaccctccgctcgttaagacgcatggggctgccccttgcctgaaaggttttttgtcagaagcgcagatagctcgcataaagcagcccagcgactccacagatcgttgtttccaggccgcgttcctgcatctggtggatccagaggtttacgacacgaccgttgatatcctctctgcactttcgctggatgattcggaagccatcttcgccttgatgaatggcctcagtgatgatgacgtatgtgccggtatggttgacctggcagagcaggctgaccgcgcctttgcgtcgaaatgcgagtatttcgagcgaagtgccagcgaaatcaggatccgcacgaaatttgcgaatgagcgcttctcaaagcgcgtttctattcagcagttcggcatggaccgagcaatgaaaagagcgaggtatattcgcgatcgactcctctaccagtttgcgatgactgactccccataccgcaaagtgccgatcaaaggtctgcgtctagctaaggctacgaaacgagaagggaagtatccggacaggctcgatctggtctaccgatttaggcttcccgatcaagataaattcaatcttcgtaaagtttcctgtaccggcggattccaggcagcattttgccggctaagggcctccgttgaagcggcgggaggcttcgtatctgtcgaagcgattcagagtatcaggccaacccaagggcagtacgatcagttcattgggcggatcccggacctaccgcttcccttcagttga

SEQ ID NO: 333184 - DNA, 573 bp, Pseudomonas aeruginosa
atgaagcaccgcatgctagtgatcattatcttctgcagtgtgctcgccgtaattttggttcttctgctcgcgccgcgattctctgacggccgtgacaagcgccgcgtagagatcagcgtgccggaagtatcggtcggcgcaaccggacacctgcatgtacctgccgaatcttggaaggagaaagccggcaacatcgaggtctgcccagggacctaccgttacggccgctgccgggtctactccacagggtttcaggctctcatgagtgacctgtttgagggtgttgcctccgaagacgcgcaagtgctcccgttggagcttgcggttcaagcagtgcgaatgaagggtttggaaggaagccaaccccaggtaacacgcacgcctaatggcgctctggatgtcgcattcgtcatgcgcccagaaacggccccagttatagatggcgatttctacaaccaggcttcgggattctggaagatcctcatcatggtcgtgcttatcgttctatttagccccttcccgctcgcgttcctgctcgatccgtccgaaaaattgaaacgtccccgcagttga

SEQ ID NO: 333185 - DNA, 297 bp, Pseudomonas aeruginosa
gtggtaaagctgccccaagtcacaaccttcgcccctgagcagaccaaatcccatccgaacctggcggaagtcgagtcgctgctcggcggaataggccgaacggtcttcccggacgggaccgaacagttccaggagaaagatggctcgaccctacacgtattctccgcgcgcctaccccccgttgaactggagcgcttctgcgaggcaaatctggggcactaccaggcacaccacgacgcccacgccgacgcactgaacaacttccagattgtgcccatgcctcacttctgggcttga

SEQ ID NO: 333186 - DNA, 450 bp, Pseudomonas aeruginosa
atgcaagacatgcaagacagcgacaaacatcctgacgacgcctatgtggaaaaggcccttcgccggctggtgaacaccgacgtagcaatcggtctgatctccgtcgcccccttcatctcgcttctctggcaggtctattcagacccgcgcttcacctggaagtacgtggggatgactgggggtctcttcctatggacgatggcttttgtggccgtattcgtactccggaaggtccgcaacaagatcctctgggcatcagccactgtgttcggtgcaggcgtgttctgctcctgcctcacactcgccttcgtgacgcttccgccgctatacgcagtaggcgcggtccctattgccacgtattggatcctcaagctccgtgccaagggctaccaccaggtggagatgatgcagcggaacacgtcgaagtcagctggccagttgctcggctga

SEQ ID NO: 333187 - DNA, 315 bp, Pseudomonas aeruginosa
atggtcgccttggtcggctacgtgttgatgatttctatcaccatcttctggggaggcgcggttgcatcgatcctctggggatggtttgtcgtgcccctgggcgtcgacgctgtatcctattggcaggccgttggcttaggttgcctctcagcattgctcttgcagcgccagccaactagcaatgacaagtcctctctgcaggaggacgttctgagcggactcggtgagtccgcgctgaagcctgcatttgttctattcgtcggctggatagcgcattaccagctgagcggcatcttggtcatcccctatctctga

SEQ ID NO: 333188 - DNA, 804 bp, Pseudomonas aeruginosa
atgagttcgataccccgcagttcgctgcgcccacgtgagatgttcagcatctgggggagctgcatgattgtgtcattgcttacagctgctgccgtttccctcctcgtgaacaagccccatgcagaaccaggcaagcaggatgctttgcagcagattgttattcgcgccaagaccgacagcgatcatgagcgtgcatatcgagcaatcgaccacgcgctcctcattccaacggaaagctgcgactcgggagccggctcccaatgcatccaggagcacgcccgcgtcgaagaggaagcacgggatgaagcggtgagaattgcgttgaaagcagcagcagagggcgaaagttgggctctggatctgcctacgcggtctcccaggtttctctggggcgccacgcgtcagcgcgatgacacgctctcgtctatagctgcgttagctctcggaaaggccgaaaagtccgaggtggccggccctgatgacctgtaccgagcgggtctgttgtaccaatttggggtgtatgtgctgcaggatttccgcaaagcccaggattttttggagctggcttggacgaaaggaaatgccaaggcaccagcgcagctggcggaactcgcgaagattctgaaggagcctgagacggcctatctgtgggcggtcaggtgcaccaggccttgtgttctggcgcaaccgcttgatcgctttttcgagggcataccttcggacgagattctggcaatccagaagctcgctaagagcaagtcgatgatgggatacagcagcggacgatatagctctgcagactga

SEQ ID NO: 333189 - DNA, 639 bp, Pseudomonas aeruginosa
atgagcaatcccaatctcatcgcggccattgagcttgcgcccactttcgaccaggttgaacgccaggcgagcgagaaccttcggcagctgagcaatgagtccaatctcactgagctgaagatggagtttctccacgctctccagatgcccatcgcggccaagggcagaatgacgcgggcgctcaagatcgctgacaagatctccgccgaagtgacaccctactcggcctgccggaacggctgtagctactgctgccacacatcggtcgcagtcagtgtgcttgaggcgcagatgataggggatgcaatcggcaaggctcccctcaaggcgcctgcacgcatgtctcgcgaagacataggccactaccatcgccaaccctgcccattcctcaatcagggccagtgcagcatctacgaagcccggccgatgacttgcaggatcatgttcaacatgtccgattcaagctactactgcaacaccgatatcgaccctgaagacagccgtgtcacgcagctgaacctgcaggatctggagttcacgttcaccggcgttttcatgagctctggctttgccgacatccgcgacttcttccctgatggggcgggacgcatgggcaagagtaagcgacgaaaaggttag

SEQ ID NO: 333190 - DNA, 255 bp, Pseudomonas aeruginosa
atgcatctcatgaacaagggcatcgacactgggagtagcgatgtgacgcgcaagagcaagtacggaaacatgccgccggctccggacttccacgccaaagtccgtggcgatgcaggtatttacaaggtgtggggagtggattggatgcatcaccgggtcctcctcgagcgtccaaccctggaatggactcccatcgataaggtcacgttcgtggatgcccaggatccagtggacgctgaaggggatgcctcgtga

SEQ ID NO: 333191 - DNA, 210 bp, Pseudomonas aeruginosa
atggcagcaagcaagaccaaaggcgtggccctgacagaagaccaggatgtaggtgagctcgaggtactgaagcctggaactcccgttgctattcgcgttgcgggccgctggtggccatatctgaaggtagagggtaagaacgtccgcccggttggccagcaaagcttcgacgaagctgaacaagctctgcaggctgctgcaggcgagtag

SEQ ID NO: 333192 - DNA, 1059 bp, Pseudomonas aeruginosa
atgctcttcaaccgtgactatctgtgcagcaccgccactcattccgcggcacggcttctactggctggaaagcagctgccctgctcgcttgaggctcaacgtgacggcgcacgctatctactcgaggccatcgatgccggctggtttgtcctcccgcactgggctgagactggggcgtatagccgtgatcagttcagtgggattacttcccgcctccagtgccatccggatcttcccgaggccatccagctcgccacggccgcggtagagcatgccaagcaggcatttcatgggccactctttgagctgatcggctccagccgcaacaaccgcctcccagaccctgtatcaatggccaagggcgccgcctatgcgtgccctcgcatgccggcagagttcgtggccggcaaattcaccgctgccgcctactgcgatctcctggaggacatttccggcatatgccggcatgtggaggtgctgtcctcgctcctgacgcgaccgggaatgctcgcccccgagacctgcctggcagccaagatcgatcacctcagacttattggtcgaccagggtggataccggcgatcgtcaggtcagtgcactacgcctttctttctctggaggcgattgcagtgctgcgcaatgtgacggccggcaccgtctccggcggggagttcattgccttcgtggaaaaggaccagcgccagcgtgcggaacagacctgcatcgcctggagggggtggaaatcgatgataggccgcgtcgccggcgtattggcagattcgcgcacataccatcaggctgcactgacgaaggtccttcggcgggaattgggaagctgttttggtgtagagaacctgtctgggcgcctggtgttgaataccgattgccacctggtgctcggcacaaaagcacaggcgcgaaccggattcgagcttgtgaactgggtgctcgcattggacagcagcttgagagatgcgcctgatagcctcgacggctactggtccgcctgcggtgaagcaaacgcggcactcgatcgcatgagagccgacgtggcctga

SEQ ID NO: 333193 - DNA, 1962 bp, Pseudomonas aeruginosa
atgaccgacatcacgacgatctaccatgacgacggcaagacccagcgagttgaggcctcaatcgagcttcctcgcatcaccgagtggtactgggtctgcggaaaagaggaccccgatgatcgctggctcggctgtgtcgtccaggtcggaagtaacttcgttgaactgcggggaccttgtgaagagggtcgcgggcattacagctctcggattcacttggacgtgctcgatgagcgtcttatccgcgagccgaatcacaaagaaatcatcgaaggtcgagtgaaggggctgcagaacactatcgctggactcattggacaaatccaagaactctctacgtccctaggtgtctcgccggttgcaaggattcagagtccgcagaaggccagtggcaccgctttggctgtgatgtccagtcaggtagacgtcggggcgtatcaaaaggctctgatcacggcgaaggaagagactgtgccgtccctccagaagaaaattcgtgaggaaacggaaacgctttcaaactggttgaaggcggagatcatccccttccaggcgcaggccgatgatgttcaaagtgtcattaacgcaatgaccgagcgcgtcttcaacctagagctctatgcaggtctgatcgagacggtgcatcagtttgctgacggtgagcctgccggtatggctgagaagctgcgagtgtttcagcgcatgctgttctgtgacgaggaagcgctcctcgcgtacaacgcagggggcatggatatcacggacatgtcacggttcaaggaatggctggccctgccagccaatcgcgaccgaatccttccgttccctcggtgcttggtcgctatgcgtgtcagacggaataccaaagcgcgatcttgggatggttcgctttcgaagctgtttgagaatcttggccgagaggagggtgataagaaaaccttcctcttcatacgcaatggtgagcgtctctattgtttgaataccggaattgagttcgacgagctgattttccccaacgaggacgccttcgatccgactgagcccctgatggttaaaatgtttggcaggaccgtcgacaagctcatgccgcggcgagagtttgagttcctgctggaggaaaagcgggcgctcaagatgaagagtgatcagtgggaagcggaaaaccctcggagcgcttgggaggaggcaaaccccggccgtagtagcttcggctacgagtatgcgaatccgtatcgctatacctcctcctttgatgagcacgattggcgcagttttgacgggtcgaatgtgtatttcgacgaagcgtttgaaaaaatcaacgacgaattcaaaaagtacaatcgagtggccgttatcatccaaggcctgttcgatagatcggactgcctggcgcctcacccggctgtccgcagctggacgtcggaaggcttcagaagcgccattgagctgatctacgacagcatgggtctcatgcatggtgagcccccaagtttcgaggagtatcgcgctcgctgtaactcgctgatcgatgagaattccgtgttgcttggtcaggaagatgcctggcttgagaaagaagcggaaaccgaatgcaagcgcatcgacaacagctggcgctcaagtcgtgacacctaccgccctaaacgcttcaagccatacggcgacgaaggccccggatattttgcccagcctagcaaagtgatgaagcgcgctcagaaggtggtgttcacctggatgagagcgcgacgcagcggcccagatagattcgacagcactatccgcgcctcaatcaccgtgcctttcgacggtctgttcaatgtcagtgcttatcggccaggcgactaccgcatcttcttccaggatccgcgtactcgtgagcgttacttgcaatgggcaccgatgctcatcgcagctgaggatttctattcgaagggtggtgaggtccaacagcctgtcgagtga

SEQ ID NO: 333194 - DNA, 1626 bp, Pseudomonas aeruginosa
ttgaccattcaccagagtctcatcaataccagtgaggccacttcggtagagctaccggaagcccaatcgcagggcgagcttgtcgaggatgtttgcagcgacttctttgctcccgcccctactgacgtcgtcgatcgtctagttgccagataccgcgatgaggctgcaaacgtccggacggtgggggagttcgtccaaactcatgcctaccgcagcgcactccaccacttcatcgctgggaatactgaaggaagtctcgctctacgcggtgatctgttctcgcttgagggcgccctggggcacctgaacggagtctactggcgtgagctgctccagatgactgatgtcctggactacatgccgtacgcgcgaaaggtcgagtgggaagagcagatatccagcggcaatgcccctgagttcaaggaaagcaccgtccgaagcacgctccaaaccatgctcacccagcggagcatcttctttgccgagcgtgtcgacggcgtgttccgggcgctctcaaagagccacctcacgaacaaccccgcaggtttcgcgtctcgcttcatcatcgactatgccggtagcaaggccggattcatctctgatctgcgggtggtgatttcgcgctttatgggccagccggaaacctccgtcagaaatggccatcagttgctccgcatgcttagcaaacgcgctggagaatggcacttcgtcgatggtgcagcactccggatgaagatgttcaaggtggggacctgccacgtcgaagtgcacccagagattgctgcgcggctgaatagcctgctggcgctgctctatccggctgcaatcccgtcaaggttccggtctcgtcctacccgaccgcccaaagagttccctgttctgagtcgatcgcttccacaggctgtaatttcgattctcagtgagccaaggcaacctggcgagatcaattaccgccgtgtcacccagaaccccaatgcggtggtcttccattcaaataccccagaccgggacgaggcatatcgagtcctcgagtcgctgggcggagtgcgccacagcgtgaatcgctatgtgtggttcgagttcgattttgatccgctaccagctatcgagcaggtggcaatcagcgggatggtgccagacgacaagtcccaccagttctatcccacccgcgaaagcatgtccgagaaggccgcagaactggctgacatccaggatgacgacgattgcttggagccttcggcggggaatggcgctttggccgcaaagatgccgatcgcgcgtacgacctgcgtcgagattgcgccgatgcgctgcgctgttctgagtgccaaggggtacaagacagttcaggccgattttctcgtttgggcgtccaagacatctgagcggttcgaccgaatcatgctcaaccctccctttgcaaacaatcgggccacgatgcacgttcaggccgctgcaagcctgttgcgtcccacgggccgactggtggcgatcctgccggcctcacttcgtggaaaggaaatagtcccaggctgggaccttgagtggcatggcccatacgagaaccagttcgacgggacgaatgttcaggtctgcatcctggtagctcagcacaagtcttcctga

SEQ ID NO: 333195 - DNA, 780 bp, Pseudomonas aeruginosa
atgaccacgaccatgtcccgttctctgccgaaattcgagttggccagcagctgccttcggaggctgcgagtcgcttgcgccgtgaccgcattcgcagttctcgttgcttgtggtcatggcacccacacgcaacagctcgccgaagctgtccgtgtggcaatgagcaaaggaccttcggaaggggcgtacaaggacctcttcagagagctaagacgcgtcgaagcggattgcgagcgcttcaacgctatctcacgctgccaaagcaaggagttccaggaggtgcggaagtgggcggatagcgaactgtctcggatgctgctggccggagctgcgcagggggaagggtgggccatcaagcaagcattccgctctctcggttcccgtccgtctgaggaagtgcgtatgagggtagcggaacgcctactgctcacggccaagggcgatgctgcgcccgccagcgtgcagctgcaggctggcctgatctacaagggtggcacctacaccccgcagaacttcgctgccgctactctgcatttgcaaaaggcctggctgaaaggggaggtacgggccgccggcgctctggaggaactctcactgtacgatcgggacccggcgaacgcttacctctgggcagttcgctgcgtaagcccctgtaccccttcgcgtgacctgggaggctacgtgtcgcaactcccgccggaccagataggcctgatccaggaagtcgctcgagacaaaggtgttttgacggtagccatgggcatcgccgaagagcgttga

SEQ ID NO: 333196 - DNA, 510 bp, Pseudomonas aeruginosa
atgaagaaactctccagtgttctggctgtggtaatcaccagctgcctgtcgagtattgcactggcacagcaaccggcaccgccggtgacggacataaagatcgtgccgccccctttcaccgatgtgaatcccgacggtgctaaccagcctgattggcaggtgaaagttcaaaccagctacctggaccgtgcagggcagctggtcagagaggcaccggttgtgttcatcgtacggaatgggttctgtacgtctgccaaagagcgtcttgtagaacttcggccaaacggccaggcgaaggttcgccagcagatctgcgtggggggcgtaggaaaagggaagacggttctcgtgggctgggtgttctctgactacgaccagcacaatgcgctgaccgatgacactgaagcaatgcttagttacggcacgaaagtcgagcttaccttcgagggcaactttgcggagggcgtctttggagagtaccgagtgactgccaagaaaatcgaaagctga

SEQ ID NO: 333197 - DNA, 555 bp, Pseudomonas aeruginosa
gtgagcgattctggactcgacgatgagtacgttagaaagcacgccctaccaggtgaagactgggagcaggctcggcgccgactgactggcatcgtctccaagcgcttcacggagttgcccgcttgcgtgaggtgctctagcgaggcggacagtgttgtggatgcacgagagcgccacgcgctgcgaacctgtttggggcagggggaagcatggccggttgaggcgttagaccagtctaaggcggctgaggcgcatgccgcattcaagcatcgcactgaggacctggctgcgattgtgcgaaatcgagtgcgtggcgctgtggcgcttctgagtggcagcgaatacccgatcaacactgttatggctgccagcaaagcacagggctatctgcaactcgctgctgatcttgaactgctcgagcgctccgagtacatcagcctgtctgagcaggtgtaccaggtcgaggcgaaagctcggtacgactttattctgcagtacaggtctagcgacccgacggctttaccctggcggctgatcgagccatctgaagagtga

SEQ ID NO: 333198 - DNA, 339 bp, Pseudomonas aeruginosa
atggacgatatccaaggaacagcagcagtactcaatgcaaccaaggaatacgaagagctcgcccacgaacttaccgacgaggtggcgcaagtcttcgtggcgaatgaaatcaacaaggttgaacctgcggctaaagtgacaccgagtgatatcggcagctttatcaaggtcactaagatcttgagaaaaggtactgtcgacatccaggccgcagccgaaaaagcccgcgcccaggctcgtgtggccgctcgggacatcatgactgcgttgaaggatccacaacccactgctgaagtggacaaacccaccgtaaacgaagaggaagaagccaccagctaa

SEQ ID NO: 333199 - DNA, 354 bp, Pseudomonas aeruginosa
atggatctgttcaaacaagcatgttggctgcattgccagttcacagtcatgcgctacctgatgagcaatgcgcatggtcggcaagacggcgttgagaaagcagaacgtcaccaggagctgtgtgcgttctacgtcgccgccttgtgcgggctgcagaatgtcgatctggttcgtcggacccatgagatgcaataccagctggtccactcgaagacacaggagctcaccgactacctcgacgaggcgatcggcttcccgctgaaatccccgcctgactatgtcgtaatggcgccggcgttcttcgagaaattccacgtgcttgctctggaagcgctccaggtagctactgcttaa

SEQ ID NO: 333200 - DNA, 345 bp, Pseudomonas aeruginosa
atgaacaaactccgtctcaatcctcagatcatccatgcaatccaggaaggccaggcccgtcgtattgttggggtaaagctttcggtcccggagctctttgccgacccggacttcgtcgactacgtgaacgcgagcaatgtgatgtcgtggcacgacaagaaggggccgattgggcccgatgactgggctgatgttgtggtgtttgtggacccgagcctttcaggcgaggggaccgacagcgagatcccgtactgggagtgcatcgtggacaaactgcgtaccgccgttggcggctacgacccgcagatgagagagcactacgtggtagtcctcaccaacgtctga

SEQ ID NO: 333201 - DNA, 483 bp, Pseudomonas aeruginosa
atgcaaaaattcaacgtcgtagcgattgaggaaaccactggcaaaatcgtagtggtcaacgtcgccgcaacctcccctgaaaatgcattcgcctccgcggctgcgatcaactgcaacctaaacatggtggtagtagcacgcgaaggcctgctcgatgatgacgccatctcgttccctggtgagtccatcgtcgacgcggctaccgtcctcgagcagccggaggtcttcgggaggccagccctcactgtgaccgctgaagccatcaccgaagtcctcaggggctactctctgcgcgttgccagcaccaacgggcagcgattcgaggacatggcggccacgctcgttgacgagttggacaccggcgagatcctgctgtctgcccatgccagcctagatacggaggcagaccggatcgagcatgagcaagcgctgtttaattcgattcatgccgcactcgtgaagcaaggcaccatcgagttctaa

SEQ ID NO: 333202 - DNA, 879 bp, Pseudomonas aeruginosa
atgcgccaactgtatatcatcgcgttggccacagccctggccggctgccagaacctcaaacctcccaagcaactggtactgaatcctcagtgttcaccgtcgtccatgtgtttgctaaaagcacttgagcacgagtacgcgggctaccacctaggcgcaagcaacgcccgcctctggaccgatggtacggttcttggggccacgggtggggcagtcatcggagctgctacgaacgcacactccgacctctacaaagctaccggtggaatcgcgctgacggctcttggattttcgaagtatggcaactttgaagcccagcaaatgacgactgaggtcgcgttaaagcgcctgggttgcgcgcattcctaccttgagtcgttgcttcagaaaagtggcgcatacggtacggcggcacagttagtgttccggactacccctgaccagagggttttagggttagcgcagacaagtggtactacgacgatggaagtcaacggcatagcaactgctatccaggctacggacctatctgctctcggcgaactggcagttacgtactctggtgcgagtcagaatattgcaaaagctgagcggatcctgcagcagatcaacagtaaagcgacagagagtttgttcaatctgcagagctcggtgaccgagcaaattcgcactgactcattcgatcttgaccaagcagtagcagtgatcaagtcaacgtctacggcaccatctccgagcccgaaggatgcccaggcagccaagtcggccagcacacccgatcttctgatcgatgacgctgcagcagttgctgttatcaacgattacaatgacctggcgcgatgcctgggcaccaattttgaacctgtaaaatttgactga

SEQ ID NO: 333203 - DNA, 207 bp, Pseudomonas aeruginosa
atgcagctggggatcggtgcgataccccaggaccttcaggacggttccattcttggtgtaggactttttgttgatggagtgacgcgccggctcaccgttcaactggttgcctcccaggacaagaaccttgtcgccctggtctgcaaggaagaatgcgacgtggccacctccggatttgaggttttggaaaacgaccaggtcgcctag

SEQ ID NO: 333204 - DNA, 729 bp, Pseudomonas aeruginosa
ttggggctagttgtcagagagaatttggtcacggttgaccaccaagtcaaacaccatctcgtctccaccgtcgaaggaaatccgaaggtttcatcgactgattgcggcttgagggttacatcaatcttcactcgcctaaaggcttcagcgaaagctcgccgcggccggctgcagattggtgacaactgccccatgctttacgcgctaaaagccaaagacggtttgatcaccaatcactcgtcaatacgccttctcacggctagcggccgcgaaattcttggcctcatctcccaggacgtggcagcagacaccgtggtctatatgccgtctggttataacttgagccgtataattgcgaaaagatgcgcaaaagctttcgatgcacagctacttgaaggagtttttcgcaagacgacgaagctcgaggcttacgagatgctgagtattgccgacagaaacggcgacatctccccaccagacaagcagagtttgcttttccggatgaagaaatcggcgggcttttcactcaaggatatccccgtcagttttcgtcaattttttgttccacttcatctcgccgcaggcttcgaaggtgttgtgaagggccgtgtagtccttgttgatgacctgttggcttcgggtcagaccctgagcgttgcagctgccctaatcaggggaatgcccggcgtaacctctgtcgaagccgtctgcctcttcagcaacgtctag

SEQ ID NO: 333205 - DNA, 420 bp, Pseudomonas aeruginosa
atgcataatctatcggctcagcagcctcatctagccgcactcttcgtcgccgccaatcgtgatcgcgtcgagtcgatttcttgcgcagcggcaaacctcgccaacgccttcctcgtacgtctggcatcgaaggtcctttgtcccgccacctacaaccagctggagaccttggccaagcccgaaacgatccatgttttcggccaacttctgcgccagcatgctgtcgagttcatcgagcgtcgagtcagctccgcctattgggacttgattgatgcaatcggatctctgggcgatgcgactgatgcccgctggccatacatgaccatggagaggcgtggggttcggctctcacacgctcaggagcacctggctgcatgtgagcggtacctcggcgacgatgttgcaagaatcgctgcttag

SEQ ID NO: 333206 - DNA, 429 bp, Pseudomonas aeruginosa
atgaattctcaagagatgaaacaacacgtgttgcaggccttgatcgaggccggctgggagcctgtcaccgagctgtcgatgcaggcaacggtgtacgttgcccaaaagcgattcgcgacgtcggtgggaacgaaggtagctcttgcaaccttccgcgacgtcaccgatgagtgctgtcgcgtaggaggggagtacctgagcgagggcaccaacgtactctccaccgggacggcttacatcttgtacatgctgcagccggaaacggctcgtgcgctcgatgctcccctgtaccgccacgctctgcgtgagaacgtgacggaaaacgatctgcgtgagtgtgcattggcattcgcagcggaagctgaaaagcgaattggcgaatccttcgccgttcgtttgatgagaagaaacctggccaaagccagctga

SEQ ID NO: 333207 - DNA, 2685 bp, Pseudomonas aeruginosa
atgaaaaagctgcaatggcaacactcgctgctggcaatcgcaatcagcagcgccgcgatgactgcagtcgcgcaggactacgacgtaaccgctggcgcttcggacttctccggcttccaagacagcctgaacctcaccggcggattcacctctctgcaagctgaaccggacttcatcctgggccacagcctcttcgcagacagcgttaccaacaacgcgaccattcaggtttacaccgacggcgcccgcccgctggcgctggaagacagcttcatcaacggttccgtggtgaacgccggcaccctgaagaccaacggtgcgctttccagtggcctgactctgatcgataccctggtgggtggcgacgtcaagaacaccggcaccatcaacaccatcggccgccagttcgataacaacggcaaccaggcagccgcattgaatcttcgcgactccggcatcggcggcaatctcgaaaacagcggtcagatcttcgccaacggcgggggctccatcggggtgaacttctccggcaccaaggaaaacctgatcgaaggcagcgtcatcaactccggcggtgtatctgtcggcggtaccgactctgtggctctgaacatcgatagcgccaagatcaatggcagcatcaagaacaccggcctgatcggcgcaaccggcgccggcgccgtgggtgtgacggtggccgactcccaagtcggcgacatcagcaacgccggcaacatctacgtgagtgccgccgatggtgtggcttccgatcctaccgtgatcggcgtgtatctgcgaaatgtcaaaggtctggacgctgacggtaacgcgactgacctcaccctgaacaactccaaggcgatcagctccgccggcgtcggcatcctgatcgatgacgcagatagcgtcgtcatcatcaacagcagcagcctgggctccatcaccggcaagaccgcagccatcgaaggtaacggccacaccatcctgaacatggctggtggcaacatcaccggcgatctcgtgggcctggaccagatcaacatctcgaccatcggccgcttcactggctcgaagctcgatgccgccagcatgaacctggccaaagactccaccgcctacctgaccaccgccggcaccaagctgactggtgacctgaacgtcgcgagcggcgcgaaggtggacatgcagctgagcgacgacaccgttgccaccaatccctacctggaagtcggcggtaccgcagctttcgccgctgattccgcggtcaccgtttcctcgaaggtcaacgcattcaacccgaccaatgcaggtgtcgagtacaccctactgaaggctggcaccctgaccgacgatggcctgaaagtcgcgagcaactcctacctgctcgacgtgaagtcctacgttgttgacggcaacaccgtcaaagccgtcgtggctgcgaagtccgatgacgacatcggcaacatcgagaaccccgaagagccgggcggcgagaccggcaacggcaacaccggcggtggtgataccggcactggtggcaataacggtggtgaaaccggtggtaacaccggcggcaacaccggcggcgaaactggtggcaataccggcggcggccagtcgcagaacggggctaccggcgctctgctggcgatgaagaactcggtcctgggccaactggatacttccgatcctgtctaccaggctctggcaaacgcctccacccgtgaggaagttgcccgcatcgcccagcagctgaccccggaagtcaacggtggcggcagccgtgccgcggtgaccggccagaacatcgtgaccaatgccatcagcaaccgcgtgagcggcctgcgcagcggtatgtcctctggcgaggccttcaaagaaaccggcgtatgggtacaggctctgtcgagccatggcgaccaggaccgtcgtagcggtgtagacggctacgagtcgaacagcgccggtatcgccgttggtgtggatggcaagatcaacgaccagaccaccgttggcgtcgcgtacagctacatgaacaccaacgtcacctccgactcgggcgacaaaaccgaagtccaaggcagcgcgttcaccctgtacggcagctacgagctgggcaactggttcgccgatgcgagtctgtccgccggcaagaacgacaacgacagcaagcgctacatcgtggggacccaagccaaaggcagctacgacagcgacgtgctgagcgcgagcctgctgggcggctatgacttccgcttcgacaacctggtggtcgagccccgcgtcggcgcccgctacaccaacgtgaagatcgacagctaccgcgagcatggctccagcgccgctctgagcatcggtgcccagcgcttcgaggtgggtgagttcggtgcaggtgtccgcgtagccggcgatttcccggttggcctgggcaacctggaaccggaagccaccctgatggcctggcacgatgtgatcggcgacaaagtatcttcgacctcgagctacgtcctgggtggcaacccgttcgttaccagcggcgcatcgccggtgcgtgacagctacgaagctaccgtcggcgcgacctacaaggtcggtgcggttaccgtaggcgccacctacggctaccagaccaagaccgacttcgacggcaacaccgtcactggccgcatccgctacgacttctga

SEQ ID NO: 333208 - DNA, 1011 bp, Pseudomonas aeruginosa
atggggcgccttttcttttgcctggagaaagaccgtcggctgaaatcgccaaacagctgccgattggatatgttggccgaaggtgtctacgacactacgaacgactcatgtagcttcgactcaagctggcgcaagggatcactagcattggacgaacgggtagatgagggactcgcctcccttcaaggcgtggtcagccaaaagatggggcggtgcatcctccgtctccagcaggtagaactgttgactaaggcgatgctgagctacagcaacattgaggggccggccaaggagctgtcggccaacttggagaagcgcaagaaggccttagccaacaaaacactggggcagctgacaagcgaattccttggcgcctatgtacgtccccttgagaaagacgattcccaggaggatctccccgaagattcatcgtcgtgctatttccgaatgtcgtggtgcgttcagcttgagggtgatgatcacgccaacctcaaaaaagcgcttacggatctcgttgcgcttcggaatgacctggtacatcacttcatggagcgcttcgatgtgttcagccccgacggttgcaccgcggctgtcaaccatctagacgcagccttcatcgaaatcgaaacccaggatcgcgcacttcgcgccatggccaaggcaatggatgaggcccggcaagagataggggcctttatcgcatcagaggcgggcaacgacatgatcgtctacggcattatgccgggcgacggacccatgcactggccttcgacgaccatcgtgcagtggttgctgaacgcagaagtggcctgctccgtcaacggatggacgcggctgacggatgcgatcagctacatagagcagcggaaccaaggccttacgccaggaaagtacggctgcagaacgtggcgccaggtagtgcatgagtcgaagctcttccagtctgagcgccgccgagagcatcaggccggcggatccgctctctggtatcgcagcaagccacaactctaa

SEQ ID NO: 333209 - DNA, 1029 bp, Pseudomonas aeruginosa
atgggaaagctgcgtgagttctttcggcggattctgccggagcctggtcatgagggggctcgtgaggtcgaaccgacactcgccgagacctatcaagagccggttacggcactatccgaacgagccagcgcgctccgtcgaatcgcggcggtagccgggtacattgcattggcctcagccgccctggcaggtgcctgctatctcggaggctggctgtcactgccgtcccccgatctaagcactatcgatcttccgcgccacgtctcggagctcttcgagccggcgcgtgaaccaagtcgagtgtcttcagatctggctgatagccctttgggaggaggcggtttcggcgacatcagcagtgctctcgacgtatttgggccaatcctgcaagcactgggcgggattgtgcttgtgtttggactcgctatggccgtcatcaggcagtcactcgagtcgctcacgggattggtcgcggcacttcctcttatgttcgcccctacgatgctccaaagcttgacgggcgcgagtcatgaagtaaaagcacccgcacaggccaatcaactcgtagaagctgcgaacagcaaaaactacgtagttctcaagcagttgctcaacagcgagagtcgaatcgacgagttctcgaaagcctatgtcctggcccaggcggctatccttgctcacgtgaaggaacgagcggtactggatgaggtgacaaagtatcttcggtcggatgagctctcctcactcagccgcaagctggcgcccggcaaagctgcattctcaatcgagccccaggttgcgtacgcccttgagaagacaaccgatggcatggtcctgaaccttgcagcaagccggttcgaagacgaggcgatgcaaacggtcaacacctggcgcggggttggttggttcgcgacgctgggctgcgtcttcttcagtgtgctggccgtcggccccctatcgctctcacaagtcatatcctctcgcctaaggcgactggaagtgctcttccgtcaggctgaccctagctga

SEQ ID NO: 333210 - DNA, 1128 bp, Pseudomonas aeruginosa
atgcaagtccaaaccatcgccagctctacccttccctcggttaacctctcccctgccgagctgcagggcttggggctgaatgagtccgacattccgcagatccaggacgtcgcacttcgcattcagggcaacaatccgctgtcggtagccgagttcggccgcgagatcgccgatcacacctcaagctacgcggatggtctgctcgaccaggttcgaaacagcgacctggatgacgccggcgcgaaactgacgcaggtactgaccgtcgcccaaggcgtcaacgtaaatgccttactggacacgcggtcgcgtattccggtgcttggcccgcttctggaccgtctcaacctcaagcgccgccaggtactgggcgagttcgacactacccgcgagcaaatcgagaagctcatcgacgaggtcagcctgacgcagacaggactgtcggagcgcaacgtcgggcttgaagagatgtatcacgccgtgcgcgaggagtatcgcctgctgggtgtccacatcgcagccggcaagcaacgcctaggcgagctcatacgtgaatcgaacagccttcgagacgaggccagcaacgaccccactcgcgtgcaacagctgtccgacctggacaacttgatctcgaatctggacaagcgaatcggcgacctcaccgctttgcagcagtccgcacttcagaccctgcctaccatccgcttgctgcagaacaacaaccagcagctgatcgacaagttcgccaccatccgcactgtggcgattccggcttggaagcgcggcttcatgctggctatcagtctgaatgagcagcgcaacagcgtgcagctggcgaactcgatcgacgacgccaccaacgaactgctgaagcgtaacgccgagctgctgcatcacaactccgtggaaacagcgaaagctaaccaacgcctggtaatcgatgtcgaaaccctgaaaaccgtccaggactctctgatccaaacggtcgaggaggttttgaaactgcagcgagcaggcgccgagactcggcaaaaagcagagcgcgaaatccaaggcatgcgactcaacatgcagcagcgtctgacccacaccgaggatgccccgcgcacccagaaggagctgcactga

SEQ ID NO: 333211 - DNA, 780 bp, Pseudomonas aeruginosa
atgaaaacagccgtggtcgtagtagacattgaccaccttaagacccaggtgttgccgctggtgttcctccacccggcacgcatcggggagtacggcaacctcgcgacctctggcgcaaacatggatcaggtttcgcgcctcatggagaacggcgccgcgagcgcactcgcagccaaaatcgcagaagtcctggcaaagatgacagatgccagtcccgagcaaatcaccaaagaaccatcgtggtttgcgcgcttcctgggtggcgcggttgagaaagaggtccgctatcgcgtcgcgcgaaagaacctcgagcaattgctcagtgaagcagaggggcacgcccaaggcgttcgcgataccgtcgcagccatcaacaccctcatcgagagccatgcccaggaaatcgccgacctgaagatctatatccaggccggcaaggagtttctgagcgagaaccccgctgccggcgcgatcgcagagggagtcatggagttcgaccgaccccgcgaacgattggctcgaaagctagccaacctggctactttgctggcctcacaagagctgtctgttcagcagctgaagctctctcgagcccaagccgtcgacctgctcgatcgtttcagcgaaaccacatctgtgctgttgccagtgtggcgccaacacacgctcacgctcattaccaccacccacatgtccccaacgatggttgccgacgccagcagggcccaccaggcgctgatggccagtctttcgcagagcctcgaaggcatgaagcactga

SEQ ID NO: 333212 - DNA, 354 bp, Pseudomonas aeruginosa
atgatccgaactgccaaccaagctgaagtatccgccatggagaagcagggctactccatagggtggcgcgacggcttgatgtctcgagagtgcgcatctccctatccttcacattcaatccagggtcgaaaatacctcgacggtcacaaggccggcctggcgcaccgcgatttcctaaccgcccgcgggatgcggcacgtcaccaagctggttgagaaaggccacgagggttggcgttggaccgtcgtcgtagaagaggaactggcggccgctgggtgcgaaggaagccgccgagcggcggaaggcatggcggaaagtgccgccatcgaaagcgccttcctgcggggcgcctag

SEQ ID NO: 333213 - DNA, 1011 bp, Pseudomonas aeruginosa
atgccgatacgccacgccatcgttcacttgatcgacaagaagcccgacggaaaccccgcagcgctgcatgcacgcgatgccgaactgggcgactcccaggccatggagaacctgatggctgacctcaacgaaagctacaacgccaagccgaacaaggcctgggggctgttccagggcgaatctggcgcgtacccgttcagtggctggctgaccgagtaccttgacggcggcaaggacttcgtcggcttttccgtgcgagcggtggagcacctgaaattcctgatggaagagtccaacctgtccaccggcggtcacgtgctgttctgtcattaccagcagggcatgaccgactacctgtccatcgctctgctgcaccacagcgaaggcgtggtggtgaccgatgccctggaagtgaccccgtcgcgccacctggacctgggccagctgcacatggccgcccggatcaacatctccgagtggcgcaacaacaagtcctccaagcagtacatctcgttcataaagggcaaaggcggcagaaaagtctccgactacttccgcgacttcatcggctgcaccgagggcgtcgacgggccgagcgagacccgtaccctgctcaaggccttcagcgacttcgttgaaagcgaggacttgcctgaagaacaggcccgcgagaagaccgacaccctggtcgactacgccacgagccaggccaagattggcgagccgatgtccctggacgcgctctccgagctgatggatgaccaggcgccacgtgccttctacgactatatccgcaacaaggattacggcctgtcgcctgaaatcccggcggacaaacgcaccctcaaccagttccgccgcttcaccggccgcgccgagggcctttcgatcagcttcgaggcgcatctgcttggcagcaagatcgaatacaacgagcaaagcgacacgctgaccatccgcggcattccagcccagctcaatgaccagctcaagcgccaggcgtcgaagtag

SEQ ID NO: 333214 - DNA, 360 bp, Pseudomonas aeruginosa
atgcaccaggttatctccgccgtcaaagacgcgatcgaaactgcagctgaccagccgacgacaattcccgcgcttcctgccggctggatcaagaaggcacaagcagctcttgagcagaactccagcgttaccatcatggacgctgctgtagagctcgtagaagcccatacaggctaccgcgcgtcctgggactactggccttggctggaatcgctccgcgaggtaacacgtaaggaaattgccttcaggagcgccaagaagatcctgacctacggcgaaacagagcgtgcggttgccttctacgtccgtttcgcgaacgcgacacctgaggccgcgaaggaggtcctgggaatttgctga

SEQ ID NO: 333215 - DNA, 384 bp, Pseudomonas aeruginosa
atgaaactctcccaagcacagaaagctgccttacaagccgccaacgcgattctcgcgaaggcgggcctccctcagtacacgccccgccacttcccccagatcgacatcgcaggcgctactgcaccggtgagcgtcgatcttagccgcctcgtaaaggtctcccccagcccgttccagacccagtgggaggttgccggtggcagtggaaagtggctccgcaacatcggccgacatgtaggctcgatcgagatttctaactcacgagctcatgggatcctgctgcagttcccagacggccagttacagtccttccacccgatagacctcttcccatggacggggccccaagttgcattcgaccatcaaatcgaaagcgcctgctaa

SEQ ID NO: 333216 - DNA, 681 bp, Pseudomonas aeruginosa
atggtttacctacttctctgctccctcgtcctgtttatcggcatcgccaggatgcacacccacatgctgcagatgctccagtacgaaagcagcactagcgcacctcgcccaatcattctcgcgggtctcaccgggatattcccggcgctggcattctccctgccggtctatgtgctgtttctggatggggaaggcagctggacctatgaccacaatcgcaccgtcgtatacgttgttctggctgcatcgctgatattccttgcccaggccggactgggagcccgcagcgttctgctggggaataagcttggattctgggccactgggcgaatcgttgtgctgctctttgccggcgtagtcggctctatctccggcatcaagcatctgacctttttctccagcagccaggatggattcgccaacgtgggacttttacgagagatcgcggacctctcggacatgaaggcctgcaccagcagtatcgctctagtccagttccgcgacgccggcccgatcacctaccgctgcccttccctcctgatgtttgggcgagacacacagcagcctttcatcccatggccagactatgtggaaggctcaagccagaacctggctgatgccattgggatcgtcaaagacgcggcagagcatgaacgctcggtgaagaagctcgaggagtga

SEQ ID NO: 333217 - DNA, 414 bp, Pseudomonas aeruginosa
atgacgatcgctgaatacaacctcgacccccgaatcggcgtgatggtccgtaacggcgccaatgtgttctacgcgtacgtccagggatacagcaagcctccgcttgaaggcgagctcgccgacgttgaggttgcacttggaatccacaaaaagaggagggaaatcgttcaaccgagcgccgatgaggttgatccacacagaaatgctctgaaggggaagttacggagctacgacgtcaccattacaccatccgtgacgctctacagcggcagttctacgttcggccagagtgttgagcaggtcgaggcccacagtcgtcgagaggctgaaaaagctgtccgccagcagcttagggacgtgaacgggcgccatggcccaaagtacaatgtagttgccaggctatcgcgctcctag

SEQ ID NO: 333218 - DNA, 753 bp, Pseudomonas aeruginosa
gtgagcaccaaaatccacaacggtcgcatcatgcgaaacgcgagcctagaacaggccctggcggcccttgttgaagtgcggccggcatttgttgctgaggcacggaaagctgtcgccacagtaatcgcccgaaagctcgcttttggccatgacctgcgggcgaacgtcagtctcatggatgaagcgcgcgaccgctggacacgcgaaaagatcatcgaacagttcgaccaagccagcgccaaccaagacgatcggctcctatcgataagctgggatttcaccttctccgttgcggtgattcctcatgagggcgacgtccttttgctgacatatgggccggcacatccacccttcgccacgctgatcgagaaggcaggcttcaccgattttcactatcagaactccactgacctgcctgacgagatcaccgaggaggaatgggaagtacgagcggcggcgtgggacgaagccttaccgaccggccgggctatggatgtggcctacgagttcaatctcgccacctggtttgatgtgcagtcggtgaagtacgacccaagcctcatcggcgcctgcgaacccagcgagcatcaacgtcgacagtatgtcgcgcagcacctcacggagctcgaagagttccgaggctgcgccgcaattgaggatgccgcaagaatcttcatgcgtgtgaagcaactggcgccggcgcgggctgagcacgtccacctgagctcaactccgaagccggccgggaggtga

SEQ ID NO: 333219 - DNA, 990 bp, Pseudomonas aeruginosa
atgacccagcaacagaacatcctcgacgcttcggctgttccacctgcggagtactccttcgatctgctgttggggggtatcaaagccgcgatgaagggcgtcaagagtcgcgatttgtacatgctcgaagtccaggacatcgaccggcttcacgtcctcgacggactgaacgtccgagtcaaggatgcagcactcgatgcacacatccgtggccttgcggagagcatgaagaaggacggattcaagatcgccaaaccgctcgaggtcgttgtgctcgaagacaccgggcagatgcgccttactgtcactgacggccactgtcgactggcggcgctgaaaattgcgcttgccgagggtgccgatatcaaggacatcccactggtgaccctcccgtcaaagggcaccaccctcgccgacctcgttgtgggtctggtcaccagcaacggcggcaagaacctgacccccttcgaaacctcgctggtgtgtagccgccttgtcaaattcgggtggtccgagggcgaaatcgctcagcgcctgaaccttagcgaaagctacgtgaacaccctgctcgcactcgcctccgctccgatgtccattgtcaccatggtccagaacggcgaggtatccgcctccttcgcagttgaaaccctgcgcaagcaccgtggtgaagcgatcaacgtgctccaggacggcctggctgcagcgaaagctgccggcggcaataaagtcaccaagaagtacatccccggcgcggcactggagagcttggtgaagcgtcaagctaccagcctctacgacggagtccgcagcgtcacctccgaccctggctacagcggtttgtccgaagagacccgcaataagctggacctgctgctgaaggacatcgccgaacgtgaaaaggcactggacgagaaaatgaagaagtcggcagaggacgctgcaaagcaggcagcgcaagatcatgaggagaaggaagaggcggcggcctga

SEQ ID NO: 333220 - DNA, 501 bp, Pseudomonas aeruginosa
atgcactatctcacaccagtcgaagccttcgatctcggcctgattaacgcgggcgcaaacccggcgcattgggaggtgcgggatctcgccggcgctctggtacttgtcggggagcaggagacgatccaaggaactggccgaattgctctcgcctgtggccgcaacaacaccatggagcttgcaggtctgttcaagatcagcggcaaccaaccgcagttcaccaatttcgacagcgcagaggtccaggttgacgagctccctattggaacccccgctgctcgcgtgcggttcaggaatgggtacctgagcttcctgaccatccccaatagcgaatttgagaacgccctctccagctcttcggctgtaacgctgcgcttcactagcaaagctcccggccatgcgatcgagtttcgcctggttacaggagacgcgctccccttgatccgcagcttcgttcgcctctgtggcggtgacagaccgagcctaggagacagtttgtga

SEQ ID NO: 333221 - DNA, 729 bp, Pseudomonas aeruginosa
atgctattcctactctcaatccaaggaaccaaagtggaatctcatcctgtaaacaatctgtccgctaggcagagtcggccaactcaacttatcagcatggcgtgcctggcgattctgctttgtgtagcctgctatctcgcgattgcggttgccgcttccctcgtcctcacccgtgctgttcccgtttctgctgaggacttacggaatgcttcaacgctcggcatgcgagtcgggcttggatatcacggtgtagcaattgctgccgtgtttggtgtcgtgggcatccttcagctactcgtgggccgcttatccggggcgatcctggtactgctgggactatgcgcctatttcgcgacctccgaggcaactgcgctgcggcagggtgttctcgatggcgacatgcggatcgggtgtttcagctaccagtcgttggaatgtcgaagaatgcttaacttgaacgaggcgggttcggtaacgatgtacaaaaatccgaatgaacttagccttggaggttatgcagattggtacttgccggtgctggcgcatgcacaggcaaaggtacagtcgaactacccaaatgctgtgcccggcgtatcgttccttcgtagcccttttgtgcttctgcggataggcgagatgaacactcagattcgcgttcagcgcgatgaggtaagccttgagcgggcacgccttggaactcagggacccgaggcgtcagacaggacctag

SEQ ID NO: 333222 - DNA, 804 bp, Pseudomonas aeruginosa
atgaataccgaaactggagatgctcggataactgagatcgtgaaagaagcagacctctgccagatgtttatccgtgacttcaaaaggttcaccagctggacgtgttaccccgaggcgggaggcttcgatatcctcgccgtgcaccaggacggtaggcaaattgggattcaggcaaagctcaagctgaacgcgaaagtagcccagcaagtctttcctcatcccagggacgattttgacgggagacctgggcccgactatcgcctggtgatcgttgccagcctcacagaggccagtaccggaatcagcagaatgcttgggatgctcggcgtgagagtcctggtgcctcgcctagcaaagctgagcatgtttggcgacgagttcaccttcggcgagatgtacgagttgctggagggcacagggagggcctcatcttacggccacccgtacctgcatgattggaaccctgaggtccggtgtgcagtaccctcggtccatcaggagcttccgtcgggcgtaccctctcccgttcagataacaccatggaaggagtcagctattcggctggtagcgctgatgcgcatgcagggatacatcaaagcaaagcagatcgctgatttcgggctcggcgttagcacgtggacccagcccatcggcaggaagcaggcttggctgaaaaagggtgccgtccgcggcacttgggtcgagaccgagcacatgcctgcgcttgataagcagcacccggctctctacgagctcgcattgcgcgagctcgaggcaagggctaagcaattctcgctccgctag

SEQ ID NO: 333223 - DNA, 213 bp, Pseudomonas aeruginosa
gtgcaggcccccagcagaatgtacttcgtcggctatacggacctaggccacaccggacttgcggtcatccaactcagcttaagcgcgatgcacgagcgtatcgactaccgccctgccagcagcgccgatttcttggacgtagaaggcgcgattgagcacgccagagacctggcccggaagttcgacctccacctagatctttcccaccaatga

SEQ ID NO: 333224 - DNA, 495 bp, Pseudomonas aeruginosa
atgccttcaacgaacgagttggttcggaaactgtatgacgtagcgacttgccgcgtgccgcatgtcttcaacggacagtgccctgattccatggagggttcggacgttcgcgaccctgattgccctgcctgtcaggtcctaatccaggtggggcggcagctcgagggagcaaagccacatcaggctgtggaagtcgccgtgaaagtgaagaaggcaccgaagcatgaggcccatcagttcgagccgttctggtcgattattggtaacgccctggagagcaggaagtgcggacgtggaatggagcagcacccgacgtacaaggtcgcgaactacgttgttgatctctgcggagaactcgtgaagaagctgcatgaactgggcaaccgcggcgcgacgctcgaggcgctgataaagctggagtccagctgcacaggaacggattaccagcacaagcttgccatgcgtacctaccgtctcgcgcaacaaggggcctaa

SEQ ID NO: 333225 - DNA, 216 bp, Pseudomonas aeruginosa
gtgcgggtgcattcaatcagctatcaaggcaagcggcggccgccgatccgtctcaaccgtcagatatcgactggcctgttcagaaatggcccatctgcggagaaggagctgctggttatcgctgcagagtttggctgcacgcagatcaacgatcgcgacatccacgagcagattgagaacggaaaactttggtattgggccagcggattgatttga

SEQ ID NO: 333226 - DNA, 639 bp, Pseudomonas aeruginosa
atgaagattccgaaactcctcaaaagtcgcaccttcctcgtgatcgccctgatggtcggggcccgtgcttccctcgcagactggtatgtggttccctcgggctcgatgaacccgaccatccaggaaggtgactacatcttcgtcaacaagctggcctacggcgccaagctgcctttcaccgacatgcaggtgctgccggcgcagactccatcgcgcggcgacgtcgttgtgttcttcaagcagccggaaagcacacgcatggtcaagcgcgtcatcgggattcctggggataccgtcgaactgaagggcaactccctgaccatcaacggccagttggctgagtacaccctgatcgaaagcaccggcgataagctcgtggtccaggagcgactgggctcgttcgtgcatgaaatgcagaccttaccgaatgcccgcagcccccagtccaccaccgccccgatgatcgttccagaaggcaagctgctggtgatgggcgataaccgtgacaacagcttcgactcgcgcttcttcggtctagtcgaccagactgacgtcgtagggaaggcgctgggtgttgtagcgtcgttctcccctgacacctacctgccgcgtgttgagcgcatcggcaagagcttctaa

SEQ ID NO: 333227 - DNA, 552 bp, Pseudomonas aeruginosa
atgggactcaaggaagatcaggcttacgctcaagctaactgcaatcgcctagtggcggcattgcctgcgaagctcatcaagaaagaatccgacattgccaggcgcctgggtatggcgaagctctcaccagtgcgcaagctggaagccatctacgagctcctaggcgagctcggcgcatacgtggcgccagcgtcgccatgtcggaaaggatgctcgtcctgctgccactttggagtgacagtttctgagctcgagattcagtacatcgaagccaaaaccaagcatcgcaggttgaagcaaatccagcccaaggcggactttcatggtcaaccctgtccatttctcgtccatggtgcgtgcagcatctacaccgccaggcctttcgtctgcagacgtttccattcgctggcgcccaccgctgagtggtgcgagcctgaaaaggcatacgccggagagttccctcagttgaaatcgagcgagttggacaaggccttcgacgctttaagagtgggaagcccagtactggacatacggcaagtctttggccactaa

SEQ ID NO: 333228 - DNA, 750 bp, Pseudomonas aeruginosa
atgagagctttcgccctaattgcatgtcttcttcttgcttcaatcgcctcacttagccaggccgagaccatccgcctcactgtctacgacgatggaagagcctgccccggcaactgcgatgcgcacgtcgtgttcagggaggatttgaacggctccgatttcgctcacatacctggaacgcagaagggcaaatgcgttgacggacagaagtgtgagatctgcatcgagtctgggagaaagcagtgtcttgaggtgacctatcgcggagcggggccgacaggaaagacttttgatcttacgccgtccttttttcgagaagcctgcgagccaaccccggcacagcctgctttggctgcgaagtgcaaggcactcataaaggaggttcacgcactggacggacgaatcaactgcatcgccactcccgataacgccaagtgtgctgcgatgattgctaaagcgaaggccgcccaagcgttggatcaaccgaagtacgagcagtgcgcactgttaggcgaatacaagtacaacaaggacaagcctaaagcggagagacgcgtcgacaagtgcagttatgagtggctgagcaatggtggtccgaacagcaaaggggtcacatggaggagacttcttccaggagcatgtcggcagggaaactacgttggcccttacggtactgactgctgcaccggcgtgcagtttgaggatggtcccaaaggcattgagtgcacggtttactatcccaagccctag

SEQ ID NO: 333229 - DNA, 615 bp, Pseudomonas aeruginosa
atgaatctccgaaactctgtcaccagcccacacctgtgcggtcacgccggcaccctcagtggaagcggccgctttggtcggatccaggatgccgaacgaaattacgtgcgaaacaacctctgcggcgcctgcgtcaaggtgattcaggctctcatcgaccaggcccgaaccgatactgccaagcttgcggctgagagtggcctggcggctccggtaccgcagggctccttcaagcaggtgccgtgggcaaaatccatcgttgcggacgtgtttccggtgctcgctgcagtagcggctgcaggccggcagcgcggtgatgctctcggagttgccacggcccgcgcgatcgcattgatttgccagatcgaggacgcagggttctggattaagtaccaggaggcttaccgagctctgacggcctaccagatatcaggcgacgtggccgacatcatccgtcaggccacccatggtctgcagggcaaaggcaccagctggatggctggcttgatccccgcaacgacccgtcatgcccctcaccatcgtttcgcccggccgggcctgctgagccgtctggtaagcgatatctctctgttggatgctgttgcgcacgcgtga

SEQ ID NO: 333230 - DNA, 600 bp, Pseudomonas aeruginosa
atgaaaacctcgaagttgctttatgtcggcatgcccatcatcagcattaacggtgagatgggtgatacccacatcaacgaagagatccagactggcccctacgctgttggcttcgtctctgcaatccacctcgactggtcctctgaaagcatggtttcagccgtgttcgaaggcggaatctgtgccagcttgagcatcgacgaaattctcgacgatacccagtacatccgaggtgtgagtatgcctcctggttgcactcacaccgttacaaccaactgggccaagaacgaggacgatgaggtcgagcaatatcgcttcgaggcacgaagtgccttcgaagctgagagcaacgaactcatccgcataccggcggatacccctgtagtgaagtcaggcaaaggtcgcgtggtgaagggccatgcgttcgtctcagcgcaagccgttgaccgaatagccgctatccgcgccgcagtccctgaggacctttcctctaacatcgactggagtattggcgcagcagaaaatggcctaggcccggacggcagcaaaggcgactgggtagagctcgacatcttcgtcggcgacgacctagttcagtaa

SEQ ID NO: 333231 - DNA, 291 bp, Pseudomonas aeruginosa
atgtcgaaaacacaggtcttcaaactccacctttggacgtccggcgactcccgtgtggggatccccggcgaggcagccgaggtcactgccgtgagcagcaaaggccagggtgccgaaatcacagcgccgagctggctgatcaatgctgcggattacgaccatgcagacttcaaagatacgctggaggccttccgtgcgaaaacccgagaggccttcgaagtgatctggccgaacgaaaaggttcacgccgtcttcgacttcgagctgctcgaccagcgccaagttggataa

SEQ ID NO: 333232 - DNA, 258 bp, Pseudomonas aeruginosa
atgtcatctgcacttaaaatcgctctcgaatccctcaaaatcgcagctgaatgcggcggcgaaattgataaggacgactatctcgaagcctaccaggcactccagggcatgattgacagtgtcgtcgagcatgaccgcgagatgggccgtcaggaacgttcgcctggtggagacgattacaacaccattcttgcgctgctcgggctaagcactgtgcagagtcaggatgagctgtcgccaatggcggtaagccaataa

SEQ ID NO: 333233 - DNA, 693 bp, Pseudomonas aeruginosa
atgactgccaagttctcaaagtttgttggaaagcacagcgcaagcgttctggccgatcgttgcatcaaacaaaacgcttacgtagagatcacgccactacctggcgataactgtctggtgagcgtccacgccggcaatgagcacctgctgcgcacgcgctacaacgtcctcactctccgcggtatggagatgcgcagcggagtcctccacgccgtcacttcggtggaggccgctgaaggctgtcgcaatgtcggcgaacgcgtttgctttgccggtacccatgaagtcctcgaggagcccggtagcagtgtcgagttcgtcgacgctgacgaagcacgtgagaatggcttcatgctcacgctgctacaacagcgtccccatggcggctctcggtatcgactcgacgagttggtgaaaggagaggtcgtgatgacgtgcgagggcagctacagcgacgttcgcggggtgattgctcagttgcacccagcccactggcaacgccgttatggcttgccggggctgattcaactctggaagcgcttcctgcagacgcagctcgatccccagggggaatgcctagcagacccgttcctgttctttccgatcggtgctcgcgtgagtgatgtggccgggctgtttgaagcggctgaacctcgcttctctgaggcaagaaaagagatgtgcggcgcctaa

SEQ ID NO: 333234 - DNA, 756 bp, Pseudomonas aeruginosa
atgtcgaacgcagtgtggggctatagcgccctgatggtagccgccttgctgacagcaaattccgccacttcagcgccaattgaccgggagctgatgtttcagcggtgtacggaccaggtcaagtcaggcaagtacttcagggcagcagaccgaggcgaagttcatcgcttccacctttccaccgccgtttactcccaggaaggccgcaagaacattggcttgatcctcgatgaaatcgcgaaaagacacccggacgcgttgcccacggagatcgcctacgtgctgggaacggcacatcgagaaacagcgagcaccatgcgcccgatccacgaggccatgggctgcacatcagaagcctgcatccacaagtacgttggggattacggacagcccaaggccaatgggaagtcctactacggccgcggttttgcccagctcactggagaccacaattaccaaaaatttgggaagatcctcgggctcactcctgaatcagcgctctacgacaaccctgaccttgcgctagagcccaaaacggcagctgcgattctaaccgtcgggatgtttgaaggcgccttcaccagacggcacaagctctccgactactttggcccggataaagcagagtgggtcctcgcgcggaagattgtaaacccaggaagtaagcgtgcccccgtcacggcgggctatggaaagctgttctacgagtgcatcaccggcgagacactcgtgaccaacggtcagatgatcgagtag

SEQ ID NO: 333235 - DNA, 1266 bp, Pseudomonas aeruginosa
atgatcactgatctgcatgaccaccagctcgaagcgacttacgcgcgtttcgtcgaacttcttggcggtaagccctggttgaaagtcacccaagaccatcagtttcagttcaccgcgaacccactttctgaagtgcagatcacgcgtgagtacagcgtcgcgtatggcttggctagttttgaccagaagggcatggcgctccaagggagtagcgaatggtcaactgccttgcacggactaactttcgcagcgcaggcctgccaacttgcagagaatgacttcgatgaaagatcacgcaggtcgttcataggccgggtgagaggagcattctcgaatcccgacgatatgcgggctctacggttcgaaatgctgactgccttgagcctttacaagcagggagctcgcattcactggcccgaaagcacagaaggtccagagaccttcgatattctcgccacaaccaaagatggattggaggttgaagtcgaatgcaaatcgatctctgccgacaaaggccgtccaattaaagagcgtgacgctggggagcttttcaatcgattgcttcgcaaactccctgtgacccacaaagcaggcgagttgctgctcgtaaaaatccagataccagagaagctttcgaaatcacatgcagagcttgacagactagcatcgggcatcgcggatgcattcaaagcaagcagatcagaagcgtcggaaaatatctttattaatcaaaaggttgtagaagcgccttttcttttcgatccaaaatccgacgactacatcaggtttgcaattggcgagttagcagatcgagcgtctgggcccgcagaggggcatagggctattgcctacagctccggatccaagacgggcctctgtattgaaatcaccagcacccaagcgtcacaggttctggaagctatgcggcaaacagcaaaccgtgctgtacggaagcaaatgactggaacacgtccaggttgcctggttctgagaatggaaggtctgtctcgagagtccctcatccaactagccagcgaagaccccaatccgcttgccttctttgcaaccgaaattctcaaagacccaaggcaccagcatctggcatgcattgcatttgtcagtgactctgacctcatcccgataagcgaaacgacgcaaactgaacagagcgtttcgtatgtatttgatcagcaagtggggcctttagcgggtctcggtctaggtgcagtgttcagaggtgtagctgtctccgaacggcagcgttga

SEQ ID NO: 333236 - DNA, 1071 bp, Pseudomonas aeruginosa
atgcaaaaacaccacgtcttcgcactcacctcccagtctgacatcgatgctgtcgctgcagggaaagtgcctgcggagttccgtacctggccttttgactcggaagccgaagtccaagcttacatcgaggcgtcgaatgtcctccgagaggatggcattgggatccactccttccacatggatggaaccactacagtcttcaacgtatcgttcgacggtggcgttgtcttcccgaggtcgaaatccttcaacacctctcttgaggcacgcgccttccagcttggcctgcgcgacctcgccgtgctggattcctggaaagttatctcagccaatgactgtgctgagtttgctcaccttcaagcgatcgtagaggctcgcgaagcgaagctcgctacagctgcagcagagagcctccctaccatcgtcatctacaagtccgcagaccagatcgcacgtgtgattgcctcccaaggcgttcgcgtgattgtcctggatgcggatggggtaggcctcgaggaagatgccggccgcactttgcagatcggtgaccaggagctcttcgtttctgacctgatcgtgacaggcaaggtgggtgagtcgccttgcggtgagcaaggcgtcgatgccgagttcgttcgcgaggtggtgaagtgcgttgaaggtttgccggctggcagcaatgccagctacaacaagcctgggcaacatgcagaacccttcccgaccctcaaatccgtccaggttaaacactgggatgaatatgaggacgagaaggcgcctctcactcaccagatcgacatcgatgaccagcgtcttaccaacggccagctgtgcatcacggtcggtactttggaaggtcatatggacaattatctgtccgtgacggccgaagtgaacaccagcccccagaacgaagccgaacatcttccctgcatgcatgttcacttcaatgagaatgcgatggcgttcaccgcattcaaggtgtacgacaagatccttcttcgtcctgaggagggggttgtcctgacgcaggtgcaaggtccacagggccccatgtacatcgtcgagtaa

SEQ ID NO: 333237 - DNA, 2373 bp, Pseudomonas aeruginosa
ttgaccattgaacaactcacgaaaggacctaccgagaccgatctagaggtccagctcgaccaagcgatcaggctggccttcccgtggttggctaataacgcagtgcatcatcaactgagtttcaaggtccagattggcagaacggaacatgaagtagatgggagcaaaaaatcctaccaagcgcgtgctgatgccatcgtctaccaaggtgaccatccactggccgtacttgagctcaagcgtcacgaccaggctctaactcctggcgacgagcttcaaggcctctcctacgccaagctccacaacccatctccccccctggtgatcatcaccaacggcgccgacgttaagatcatcgcgacacacacaggtaaaccctgggtacccgaatcggaaactgaggacgcgctgaaggcctatctcgaaagcgcctccaaggttgcaaagggcaacctcaaggaagctgtcgagtctttgatggggaccgccccagcagtctggatgcctgctgtcaggcacgaaacacagcagcgcatcgcttcaagaacggggccttggagtgaccccagtgcaccctttgtggaaggttggggcatccccagggcggctactactgaactcatagataaagctctctcggggaccaagctgaccctgcttgttggagcgccgctcagcggaaagagcaacgtattccgtgaggtctgcgagacgacagcaaaccatcccaacctagccgcgctctaccttgaggcagggagtggtgtaggtgttctgcaagcgttggccgatacgctttcccatgcattgggttggccgatcgagcccaacgaagccagaacctggctgaccaatgtgtcgaaatcggcagaggacaagttgctgctcctgatcgatgacgtcagccctgatgacgagtctcgccggaccctggaggatctgatctcgcatcgctttggaccaggcctaatcatcgccgttgcggcgaatgagtccgcagctgaacggctttgccagagcacaaatttgctcagcgcctcagcaatcggcaggctcgcagaaacggttgccctcggctcgttgagcgacgctgaatttgatcaggcctgccaatcgctgcagaagctcagaatcaaggttcttcgaggcgctgatgcgtccagagagttgcgggagccctgggtcattaggtctgtcactcgaaccctcgtagagactgtggcgggagctccagaggatcacttcgtctgtatgcctccgcagcttagcctcaacctgatcgcagaagctcgagatcgatttaccacccctgagcttttgcggatctttcaagccatggctaaagctgtgctggatgatgcccagaacacaaatagggggctccccttgcagcttgagtctctggactctttcctagttcagcgctcgaccctcaaaaggcacttggaccccgatgaaatcgccaaggcatcgtccatcgggctgctttcggaggcaatacactctggagatacccccgtattctacgtgcgcgtcccagaccttctcgcgagcgagctcgccaaactggtcaccaaggctctcgcagacgtagatgtcgactcagctgctgcgattaaattccttgagaacgtcgcctcgcactttcccattggtgacatcatcgcagcgcagggcctactcgacgcgatgcttaaaggagagcgcttcccaatctcgataatcacggggctcctcgcgcgtccacctcgaagccgagcaatcgagccaggaacgaaaattgccctaaaaatgccaacgtcgggagtcgtcaacatttcatacaaaggaaagggaaacgttgaagtcaaccacgatggagatttagccactgcagtgcttggcgaaagagaattgggatcgctgacagacgatttttatccctggcttatcctttcccacctatcgacggcagaaatcgttggtgaaaatgaagacggtgaacgcgtgttgtttgctccgagcttgatgctcacggtgggcgccgcagatatcgtgctgcgaaagccggggctcacggaagcaagtcgccgcgttcaagtgcacgagctccctgacgggaacatggcgtgccatttgggtggattccaggagctgatcacctactcgatgttctgcttcttagattctcacggcccccagtcagaaacgtggattgatgcggtcatcgaagctggctcgaaataccttctatgccgagtccatattgccctctcagcgatcgcagatatgaaccaggacctgcatgactgggcgagcgagacgcttaaaaacaaggtcgagcctccgctactcgaggacatcaagcgaatttgcagctccacttcgcactga

SEQ ID NO: 333238 - DNA, 564 bp, Pseudomonas aeruginosa
atgaagaaagattccgttttcactcgtactatcagccacgcaaccctgggctcggttgagatcagtgccgagatcagtccgtgcgtctggatgtacaacagtgacttccagctgaccgtaaaactgcccaacggtggcggtgaccagatcattcaaaggcgcggcctgaaaatggacgcagcgacccaagagcatgtcgatgagatgctcagctccttcggtgtcacgccctgtattcaagatggctgtaacaaacctgcgttcgacccgaatgatttccctctgggtaatcgtaagggggtgtgcgagcagtgcttcatggcagcgatgcgtgaacgccttgccgcttcgcaggaggctgagaagaagaaattggccgaggaagacgctctggcgaaagcggaggggtatacccaccgcgtggatatggttgttcatccggccgagggtgacgataagttccttcgcggttggtatgtgaacccaacacccaagcagattcagacgtccttgcgtcgtcgtcggtccacaaatgttgacgacttcgtgatcatcccgctgtaa

SEQ ID NO: 333239 - DNA, 642 bp, Pseudomonas aeruginosa
gtgtgcagccattatgaggcgccggggcgccagcaacttctggatatcttcgggcttgaaccacaagaggaatacaagctcgatctctttccaggcagtaccggggtcatgattcgcaacctggcacggccgaacgaccagggcgagttggaagctgaagccgtggccggtgtgttcgggcttttgcccttctgggccaaggacgagaagctcgctcggcgcacctataacgcgaggtcggagactgtcgctgaattgccgtcattccggtcggcgtggaagcaatctcggcactgcatcatccccgctgcagcgatctatgagcccgactggcgttctgggaaagccaggccggctcggatctggcgaaaggatgggaagcctctggggattgctggaatctgggaaagctggcgcaacccggaaggagcggaggtgctcagctactcaatgctgacgatcaatgcggacgaccacgagctgctccgcaactatcacaaacccgactctgagaagcgcatggtcgtcattttgccagcaggggcttaccgggactggctgaaggcgacgccggcagaaagcctggacttcctgcgacagtaccccgcggaccggctccaggccgaaacactggagcggtga

SEQ ID NO: 333240 - DNA, 450 bp, Pseudomonas aeruginosa
atggatacgcttgaacgaatagtgaatcgctggctgttatcgaggcatgtgggtgtgtcctcgaaggcgatatgcgcgcacatgctgggggagccaaccgaggactacggatacccccacgacccttctgacctgggccgctgtcttcgcctactgcagctggtgcccgagtgggagccgcgcattatcgaaatgagcaaatacggcccaggttgggcaggccttgctccccaatggcgccgcatagtcgacatctaccatagcgaaggcggacttccgcctgagcagagaaagtgctccccggagacgtggtacgcgatgaagtcagcaattgctgacggctaccgaaacgacccacgctacaagtgcactttcgaccagaagggtcatctctcgactgcgacctggttggaagaggacgagccagaagaagagctcgcaaacgcctga

SEQ ID NO: 333241 - DNA, 462 bp, Pseudomonas aeruginosa
atgggcgaatacgatccaggctacggggagttggagcttcgcttccctcgcgagacttgggcgtccatcgagacgcccgacggcacagggatcttgatttgcacgggcgagtttcacaatttctggatgattcccagcggcctgatcgagccgatctgcgagagcaaggtttcgaagacaaacacagaaaccaggaagtatctcaatcaccactaccctgcgccgttctatcagttgaaggactggcttaagcaggcagggttgtacgagcaggccagcggcttcttcatcaacgagcaaggcaccctgtacatgcaggtggagaaccttggcgtgcgaccggcaagcgaacctgacaccgacgaggcacatctacagaacttcggcgtggcgaaaggattcgagtatcgaggcctatggcatctcgacaccgctcgggcccttcccgaaatcaaacgatag

SEQ ID NO: 333242 - DNA, 1887 bp, Pseudomonas aeruginosa
atgcacaaattttggcgcttgtggcgccacacctggttcaaatacacggtcatcgttgcgatcgttgctggtgtatttggcggcctcaccggcttcgagcattactcggagcccaacactccagtcgcaggatccacccaggctctcctcagcgaacttgacgagtacagctacgactggcgaaaggagcgtcagccagccagccgactcttctccgatctccaggacagtaaggtgagtggggtcgtcatcggtaactcgatggtcttcgtcaagacaaaggacagtgagcgatactccgtcaatgacgtgaagggtgtgattggtgatcggttacttctggataacgggaagggtggggcggaggttttcccactgacaaccattcctgaaggcggcatcaatctgggcaggattctgggctatctgggcaacgtggctatgctcggcctgctaattttcatcctcaagccgctgttggagacgctattcccggtaaaggttgtgcgtggcggtaccgatgtttcattcgaggatgtggtcggctgccacactgcgaaagaagctctgttcgacattattcagtcgaccgaaatgcggaaggcatatcagaaagctggcgccaaaccacctaaaggcgtcctgctggtcggacctccggggacaggtaaaaccctgttggccaaggctctggcaacggagtgtgggctgaacttcattgccgtgaccggaagcgacttcacaaagcccttggttggcgccggcgtcctcgctgtgcgtcagctgttcaaaactgctcgtgaaaatgctccctgcatcgtgttcatcgatgagatagatggaatcggagctcggcgccagagcggcgacgcactcgacactgagaacaatcgaatcatcaatcggttcttggttgaaatggacggattcgacaattcgaagggcgtgtacgtcataggcgccacgaacttcggggcctcgctggacccagccatgatgcgggaaggtcgattcgatcggacagtcgagatcagcgcacccaaccatcatgagcgccttgagttgctccgactctattccagcaagctcaatctgggcgaggttgacctggatgagatatcgcggcggtgcatgggcctttcaccggcagcgatcgcagccatcgtaaacctcgcggcaatccgctctgtgagagtcggcgtttcggcgatcaaccaggagaacctactcagagcgatcgagattcatcgtatgggtgaggtgtcgagcggaggagcctgtgcctcggactctgttcgtcgtcgtgtagctgttcatgaagccggtcacgctgtggcgactgttctttttgatctgggcaagctcgagaaagtgtcgttactgcctcgtgggaatgccctgggtgtcacgatgattacccccaaagaggagcggcggttggtcggtaaaacacagcttgaacgcgaaatgcagatgctcctcgccggcagagaggctgagcgtttgattttgggtgacgtgtccagcggtgccgcggacgaccttcatcgcgcctcggaaatcgctctggctatggtgacggattacggcatgtctccgacttccatcgttagcttgaaggccattcgctcagccagtattgcgatgaccaagttggatcctgtggcagctgccaacgaccttctgatgctggctgagcgtgatatctcgaagctccttcgggaggtcaaagtcgaactggaggaaattaccgacgtcgtctttgagcaggaagaggttcccggcgagacggttgagatgattcttgcagcggcgaaaaaacgcttactcggtgagtcgtcagacgcccagggtgtaacgattagcgaagtgaaacgagcgggttga

SEQ ID NO: 333243 - DNA, 282 bp, Pseudomonas aeruginosa
atgatgttgaacaaaactggtttcatggttctttatggcttagccatcgcaggtgtggccaacgcgtccgttgatcttgaccgggtctgcatgttgaacgggaagggctaccaggcaggtgatgtggttgtcacgcaaggcgatgctcgtctcggcgcccaaggtcttgcctgcagcatggtcaacgagcaggcgatgtggctgacgctgtctgatcaagcggttgatgtggtgcgacaaaaagagcaagaggtggaccagagcgactcccacgcgaagtaa

SEQ ID NO: 333244 - DNA, 294 bp, Pseudomonas aeruginosa
atgtccactccccaacttgtccaacttttcgacttgctgaaggcggccgatcaactcgctgtgtacgacgaaagcgtcgaccactgggatctggctgaagatgctgccacgtatcggctggcctgcggggggcgaagctaccttcttgaggatcagcttgtgctgctggacctcgagggttgctgcctggtcgataccacctccaacgaatcgatctcgctcgcggctgagatcacgcggccggtaacccccgaagacgtcttcgccgctgtccaagcgaactcgattagctaa

SEQ ID NO: 333245 - DNA, 888 bp, Pseudomonas aeruginosa
atgaaaattcaaaacgttcccgctgcagtacacctggaattctatgcggatccgggccacggttgggtacaagtcccgttcagtcttctttgggagctgggcctgcaggaccacgtctcttcgtacagttacatcgacgacaagtacgtgtacatcgagcagcacggcgactacgtacgcctccgtgatgcgatgagcgcccgcggcctcacaccaatcttcaaagagacccgcacctcgggcaacagccctattcggcagaaaaggtccttcgatagctctgagatgcctgttcctgcactgcttgatctgactctggcagtggaattctcggtgctcgatgaaggcggaaaaggcgtccttgttgaagattccttcaactggtgcacaggagggaacagctgtcgtgaagacatcctgctccgcttggtggaggaggtcgatcgtcaagttgcccatgggtggctgaagggaaagactttcgagtcagcacgtgtagtctcggtaacccggaacttccaggagggcaaattcctcgacttcccagtggagctcgctctctcgagagctaaggcggatcagatgcttctagagctgacagctgcggctgcagctgcagctgcgtccgagtctgcggccctgcccctggaaatccaattggacggtctgtttctgatcaagggagatgagacatcgatccaggtgatctggaacaacctgagtggtgtcaacttcgtagctccccgcgccaatcccgactacacgtacgaaagctatcttcgtatggtggagcacgagtggagcggaagtctcaaagatggctctgtgctgacgatgcaccgcgtcggccaggccgaaatcctgaagatgcacaccatcaagcgttga

SEQ ID NO: 333246 - DNA, 261 bp, Pseudomonas aeruginosa
atgacctggccgacagcgacagcagctgcagagagcgttgcactcccgccggcagttaccggagcacgtctgctaaagcctgtgccggagagctgctctgatcgctacgccgccggctgggcaagtgcggatagctttctggcgcacggcggggatatgaacgctttgcctccttccgagtggcccgaagagaaggcacagggtttcatcgagcgcctgcaggcggagcatgccttcccctgcccggaccaaccggagtaa

SEQ ID NO: 333247 - DNA, 1692 bp, Pseudomonas aeruginosa
ttggacgacatccagctggccctcgccgcctcgccccagttggggcgtctttacagcaatgccaaagctctcagtgtggactcacccgcacagtcactgctctaccttagagggctggcggcgacattctgtcaggtgttagaccaagacttcacagcgcgagatagcatcgaggatcgggtgaaaagcctcgagcgtcgaggcctgctgcgtccgcaggctctacgccatctgcgcactctgcagcagcacggcaatcgatctgcgcaccctgagcagtacgcccaggaagtccaggactatctcgctatggcggatgcctctatggcggcagcgcgtgccctgtgcgagcagatctttaccatgcgaaacgaatctgtaccggactatcaggtcatcgagcccgagcagagcggactcctgagagatctctgctacatggccatggtcaaagacgacgttgaggctattcaccagatcggagtctttttcaaagagaaagccgaccaggtcgaggatctggatacctacgtgctggctgacaactacggtgacaccgccagggatcacatcgatcaggcgatgttctggttcaagcgtggtgcgcagcgaaagcatcccggctgccaatacgcatacggaaactatctggcgaatacccgtagcgatgatcggcagcttctcattgcgggggaaggcctgatcctgcaggccgcggaggcggaacacgccgatgcgatggtctatgtggctggaagcctccttgaaggctctggcatctttgaaaaggaccttaccctagccagggagtactacgaacgagcggccgcacagggccaccctgcagcgctcggacagctgggtgcgatctatgagcagggcattggctgcccaaagaatcctgtcgcagctgcaaagtacacaatgcgcgctgctgaggctgggtaccctcaagggcaattcaacctgtttgtgctttacctgcacggcactggagttgagagcgacacgtcaaaggcactgcgatggctgcagcttgcggttgaccagaacttccctgcggctgtcttcaaccgtgcgtgcttggtgcagcaagggttaattgagggggaaggcctgaaggaagcgcttgcgctctaccacaagctcaccggtaccgcagatttccatgctcgagctgctctggcgatcgctgagatcaccttagcgacggagactggcgtcgagagcttgatggatgcggcagttaagctgcaggactgccatcgttggcttctcagggacggtgatccctacgagatcatggaagactgcctggcctccttggctaaggcggtaaggcgtctccgtgaccacattggcacatatgggcctgacacaaagatgcgttttggcgacgtcatcctctgcacgcacttcgatgccgccggtgtgcctgtcgaagacgtcgcggcgcgaacaagcgaggtcttcgacttggtcgaaggcatgaacagcactagggcgggtgcgaaagatcgtgtgatcgaccagctcttggcgatggcccacgtcgctctcaaggttccgaccgcagggcagaggcccgttcaggcatccaggacgcccgtagttactggtcctcggcaggggcgaaatgacctgtgccactgcgggtcaggacgtaaattcaagaagtgccacggtgcgtga

SEQ ID NO: 333248 - DNA, 669 bp, Pseudomonas aeruginosa
atgcagacagactcatcaagagcacacgttttttcattcctgtccgggctggtactcctcggcctgttccaggtcataggaaaggtgctccccacagcagccattaactgggctcctccgtactttcagctggcaggccaggtgctgatccttgtagctacggtgattgcctgggctgctcttgagtgggaacacggttcgatgccccggcttggcaaggtgagtgtattcaacctcatattgggattagttgcggtcgtccttgtgcattacgcagggcagattcttcacgacgttcttggctcagggcatgaactacccagggacgtcgacaaagctatgatcgacgccggattaggagctgtcgtctttgcctcagccgtcgtggtcggccctattgtcgaagaaatgattttccgaggctttttgttcagtgcacctaattgggatcgaaatgccttttcgacgtttgctctagtagttgtcacgtctgcgatcttctctgccacccacaccgactacacccagccgaccacatttatcagcattttcctgacgggactagtccttggcatcgcacggttcgcgtccggcggcgtgctgctgccgatcgtgctccatatgtgcacgaacgcgattgtcttcatggaaatgctcttctcgcactaa

SEQ ID NO: 333249 - DNA, 702 bp, Pseudomonas aeruginosa
atgagctatacgtacacccgcatctgcatcgatctgtcaccccaagttctccacgaggtgctgcagcttgccgctgataacctcacagacctatctctggtgcctgttcctccatcgaaccacatgtacgagctctaccagtactcgatcgcaacagagatcgcgttgtacatcgcgcggattactcaaccgggtgatctcaggactgagttggttctcgcaaaaaaccacggcgatgaggtggttggttttctgcagtacctgcctgtgaaggggtgcacagacgcatgcggtatcacctacatggctgtgtccgcccggcatcgccggaaaggtgtcgctcaaggaatgattgccttgatgctcgagacctatcctcacgctgcgctcagttgcgtcatcgaaaaggtcccactctacgaaaaactcggcttccaggtgattggaagccgtgatggccaggtgtcgatgaacaccagggactacgtggcaaacggtgtgattgggacgatcgcggtgagtggtctttttgaaacggaagatgctttgcggatccgcgcgcaccttgatatgaaatacggccgcaaggctatcgccgatgcacagaagaagattcatcgggactacacgcgaatggtggagcgcacgaagaagttcgtgatcgagtacatggccaagatgggtaaagaacccgtctgctga

SEQ ID NO: 333250 - DNA, 717 bp, Pseudomonas aeruginosa
atggaaagctcccgcgaccacttgaaagccaacgcctcactggcggcgatgattcgcccgtaccttgatagctggagggctgtgctcgtcgataacttgatgatcaagggggatcccgacgaccgaagccagctcgaggaggacattcaggccctcgacgacatcaccctggccgtggatgccgaaatgagcggcagcggcgcggccaccgctctgcaggcagagaacgacgagctccgagcgctattgactgagcgggtgctgaacgaatccaggctcaagtccttcattgcgaaccacgggggcttctcgatcgagatggaagggggagccttcgctatcatggctgaggcgtttgccaaacagctatacgaatcaagtgcctccaattacctggagcttcaattcgagagtgacgaatatgcatcgcttggtcagattgtgatgaccgtgaagcgggaaaccgggaagacaccccacatgctccgtgccgaggccgaagcgcagcgggatgccctgcaggaaacgaacgaggtgctccttagcgcactcaacccatttgctcagtttgcgcgcagtcgtccgccggcgcctgaaggggtgaacggagcgttgctgaagcgcgaggcagaaggtggggtagcacagatcacggtccaggacctggaccgtgctttacaggtagtggttgaagcgaacgctcgacatcagagctag

SEQ ID NO: 333251 - DNA, 963 bp, Pseudomonas aeruginosa
atgaatcgcgaagccttcctggcccagcctgaccttagagcctttgttcaatggcttgctaacacactgccgacacttaacgtcgacttgcgcctactgcccagtaacttcgtgcgcggcgggcataaggctacggttaagggtattgaggcagttacggccgagtaccgctggaaaggcgattggcctacggtttctgcactgctgaagacgctgcgaaaggaccttcggattgcagtagccgccggagacgagagcgcgacactcaaggccagcgttgcgatccttgagtggggcaatgttccgaagagtaaggagttcctgcaggacctcgccgcgcaaaatgctctggttgagtacatcgccgtacgagcggctctgctatcgccggccggcgaccaggcactcaccgatctgaacaagacggttttccccaagttcaactcgggactcaccaagatattcgcgctgctctgccctgaaggctcaccgatctacgacggccgtgtaggtggcgccatcgcgctcctataccacctttaccgcgagagtccctcggcccgcggggcaggcccaacgaaccaccgttgcttcgcctgggggccaggacttgacgaccaagactcggagcgcgttcgccagattcgcaaccctgccgcgctcggccgaggataccttggcacccctcaactgctcggttatcaaagcccgcatttgtgggcgcagcgccagctgatactgggctggatcatgagggcagtgctcgcaaagaccgattggtacggcggccgcgccgtagacatagcagatcgatgccatgcattcgaaggtgcgctattcatggctggatatgacctccgcagcatgataccgggtggctgggaaattcccgacccgaagaagcgtgcctacccgcgtaaacccaaggtcgttccgaagggcagctccgcacaaccgatgtag

SEQ ID NO: 333252 - DNA, 294 bp, Pseudomonas aeruginosa
ttgaccaaactgagtgctagcgacctgagtgaggctgaaatcgcagccctttgcctgctgaaggttaccagtgggattctggtcagccgtgtcccggaccggacagagcgggattctttcggggatgttactccggggatagcgatctaccgtcgacttgaagcaaagggcctttgtttccagacagaggaggagccggtgcatctcacagacgatcccgacgatgagccgtttaccttcacggagagcattgagctcaccgaggaaggcgccaaactggcagcgaggctgtaa

SEQ ID NO: 333253 - DNA, 744 bp, Pseudomonas aeruginosa
atgaaaactaccaacagtacaacgattgaaatgaccgtcgaggtcgtcacccgctcggttgtgaaggtctttgtcagcacggatgaaggcgtaaccctcgatcgttacggcgaactcggaagagcaatctttgaggcaacgccagcggcaatgttcgctgatgttgagcggagcttcgagcgtgtgtctttctgcaatagctctggcgatgcggagatcacagcgacggttgctgatgggaaggtgagcctttccccatgttcaaagtccgtggtggtacatctagcggacagcgcaaagcttgatgagattggccattttgtctttcacgtcggcaatgatgaaaagggcatgccggtgataaccactccagtgcgtccagaggccgtgacctctgttgtggccaaggtcaccccatttacacctgaaatccagaagtcagtctcggagcgaatttgtgcggcgtttctccctggttcgcttccagccagtgtggacgtggtgtttcaggagttcgatgagagtgaaaccaagtggctgaggagcgatgaaagctacgcggaggttgttctcgccacgaatctgcggacgtcggactacgtcatcagcgactgggatgagttctcgaactttgcctatcgcatgtatggcgaggtcccccacgtgctgcaggcaggcgatatacataaggctgttgagcgattcatggccgaacgaagcgtgaagaccgtcatcaccaagtaa

SEQ ID NO: 333254 - DNA, 447 bp, Pseudomonas aeruginosa
atgactgcaaatcttccctctctcgccaccttcgggaaatttcacgccggcgctgactatcacggtctgcaaatggtgaagttctggttcaacaaccgtcgtcatgaggttctgatcggttcggcgaactgcgaaaagctgagggacgcctacaacggctcaacacgggatttcgagcgggactgtgtcagccgtgtaggcactgcgagctacgagaaccaggaggctcccaccccagaggtggttgcgttccttaatcagtggcgccgggcgaaccatatcgacatggttcaccgcctgaccagccaacctgagcgatatggccttcttactgaagccgatcttgcacccacgccagcgatcctggtcccagccttctacgagcaaggtgttggttgggtgaaaacgcaggatgtcgaggatgctcagttgttagcaggactttaa

SEQ ID NO: 333255 - DNA, 264 bp, Pseudomonas aeruginosa
atgcgcaagtcactctcgatcatcgctgggaccagcctgctcctagctgccgcaactgcagcagcaaacgcaggtgatcgtccgaaaatcaaagccgtgcaggagctgaagggcaatcagtgcgccgccgccagctacgtatacgagcaaggcgagctggtgcaaatgtcggaaggcatcacccaggtatgcaccaccatcaatggtcgctctgtctggctcttggtcgatgagcaagagttcaagcggatgtccaggagctga

SEQ ID NO: 333256 - DNA, 1443 bp, Pseudomonas aeruginosa
atgctcgacatctcccctaaccaagccagccccctcgtgcgcgtatgcagagccgaactcttcgcagagggaagcgcctactgggcggcttgtagggctgacgacgctgacgccgagatgtttggcccgatgatgatgccgcacgccatccccggcgacctgctcaacaaccagaaagctgaagcggtatggaccatgtggtacggaagtctcaaagaggcacgcaaagccgcgggcctttccggccggcgcctcacctcacttgaagcactttcttcgccaaagctcgaggcgctttctccgttcacacggctgtctcgacggctcgaccttgacctcaccgctctcgccgcggacaaagctcacaccggtgccaccacaacaagcttcaagcaccactcacgcgaacacatgcccctgctacagctggattccgtgattgcggcacagatcggcatcgagaacttccagcagatctataggctcgccatggccgcccccgcggctgaccttgcaagcatcgttgaaggggagttccccttcatggcggccctgcatgagcgtggggcgctgctccgcagcacaagtcgaaacctactggccatcgcgtgcctccaacagcagatccaaacggaaacccaccaaaccgaggcggaagtgctcgcaacccgcttgctgatcactgtcctggtgcgatccctcccttcccgtctcgggattctcgtagccatctccaatccgctgatcgatggctgctttgactggccctgccgatttgcaggtgtgaccagctcggatctccagaaaggccaggacatctggggactggttccacctactgtgttggacctgacggcgcgtgctctacaggagtacaccatgccgacctatgctgacgcagtcaccgacgcgcttattcgccagctcgatgaatcagtaatgggggctcgcagtggtaaagccgtcggccttgagctcaatgcggtttaccagcggttcctgagcaaaattgccctccccatgtttgacgatctcaagctgttcatcgaagagggcgggatcttcttcgccgtccagccatacgtcgtatctgaagacatgattcgccccggcttcagcctcacgttcgatgacaaggccattgccgtcgccaccagccttttctccatcatcttgtctacccactttgctgggcccattactcctctgctgcggcgattcgcaaggcataaggctgacctgaataagaccggggagaaaatcgaagcactttccgggacttcgtcgccggcgaaggtagcgaagattgaagctatcggaaaaagaggaatggcagccctcgaggaggggcgcatgtggttcgtaaccgaaaccaaccgcctgaagcccctcaccaacgcttgggctgagttttacaaccaggtgggcgcacttcggcgctag

SEQ ID NO: 333257 - DNA, 228 bp, Pseudomonas aeruginosa
atgcatcacaccatcaatcctactgaccttcgccctgagcgccttgctctcatccgtaaggaaatcgccgaccttcgccatctcggcggcgagaaagcggctatcgcgtacgggcgcatttgcggccgtttgagtgaactggacgcgctgggagtcttggagttcgccgaacggcctgctttcgagttggaggcaacaaaggcgttccgcgcgagcagtggaggctag

SEQ ID NO: 333258 - DNA, 582 bp, Pseudomonas aeruginosa
atgctacgtcacctcattcacaacgctacctacaaaaccacatgccccagcggggctcggcattttcgtgtagacgccactggcggaagcgcaatgcttatcgagtacgagctgcccggcgcaccagtacgcccattgaccgaaatgacagacgccgagtgggccactatcgacttcgtcggtgagcctccgttgctcgagggtcgtcagtaccttgttaaggtcctcgggaaatggcatctggcaacctggtgtgtcagcagaactcgtgtggacatgccgacccagtacttttttcatggctggggtgtcccctttggggctcttatcgagaccacagtcctggttccccttccctccgacaagtctgcctggctaccggtatcgatcccggacagcttgccaaaccccggagaagaggtacttcacgtggaccgcggtgaacagttcgcccgctcatccgtctacgaccactatcgatctcaccgagtgcagggcctaaatggcctaatgttcggaagtgacaacccagcccaagcagtctgcaaatggctgccaattgcggcactgattgcggcgtag

SEQ ID NO: 333259 - DNA, 624 bp, Pseudomonas aeruginosa
atgccccacaccaaaagcccaacttccgcaccggtggcagttcaagcagctacccggtcactcgcctggatcgacctcgaaaccactggcttcaccgagctgagtcggcagatggtctacagacatctcatactggagatcggcgccctgatcaccgactgcgacttcaatgtccttgcgcagaaaaacattgttgtgagccaccccatcgccaaagtccgcaacctttgcgacgccacggtcttacggatgcacaccgaaaacggcctgctggatgaggtggaaggagcaacggtcaccctcgccgatgcagaagttgagatcatcacgtggctcgaggaacatggggttgccccgaaatcatccccactctgcggcaatggcctgcagctcgatcgttcgttcctcgaggctcaaatgcctcgcctcaacgaccgactgcactatcgcaacctggatataagcgcggtgaaggagtttctgaagactctttctccggcatttgaaccgcctaaacgtcgtagccatcgggcgctggaggacatactcgagtcagtcgaggaagcacgtgcataccgatctttgattgaaccagcgctcgctgaagccatcctgcggcagtag

SEQ ID NO: 333260 - DNA, 765 bp, Pseudomonas aeruginosa
atgcaaaacctcagacccaaagctggcgacgctgtgatcctcaccggcaattacgtcggcgtgaatcccggcgaaattggctgcatcggcggagctattgcagcggagctagggaaggacgtcactttccatccatcgatctaccgggacgacacacacgttagctgcggcggtggacctggttcgtttgagctccctgagctacatcccaccggtcttaccaccgagctgatttgctggcgcttcaaggacggtgttccatctgctggaaactccacaaccttcagggttgcagtaccactgtgggagtaccgcgggacaggtgaacacccaatctggggggcgcaggcggtgcactcgctgattgctgatcgcaagatgctgtgcgacgacgttgagcgctttccggccagctggagcgatgatcgcgttttccgtggggactactgccttaccgacattcccaaccggccgaaccatgaccagatgggtaagagcgtggcaggcttctatcgtcgacggcaggtgatgaatttgctgcaacacaaggtctttccggcaagcggcggctactggtacacggtgaccgtgggcggtggctcaggcttcacagctttccgtggaccggccgaactagaccagtggctgcgggcatacaacctcaccgttctggagaaggagcgaggggacctcgttgatcaatgctgggttattcccaacgctgacttcgcacaatggcaaccgcttcgaaacgagcgctcgtga

SEQ ID NO: 333261 - DNA, 447 bp, Pseudomonas aeruginosa
atgaccagcaacgaaaccgccccagccaagagtaagagcccattcggcgtcttcacctatacgatcgcattcgggctcttcttctggtacgtcatcatgccttctgccaatgcgtacacgatggcgggtgaatcgggcgccggagggtacgcgatcctggcggaggcctacccttctctgaaacgcccaacccagatgttgatccaagagcggatagccaagggattcctcacgcgcaccgatgtttctgatttgatcagcgctatgctgcctgagaagggaagcgtccagacctccccagcccccgatttcggtgacccgcagtacaacactttcgatgccttcgacgacatgtggatgcgatggaaaggagagcacgcgacttacaagtcaaaagccgctcttctcaagcttgttgccaagtcagccggccatgaggcaccttaa

SEQ ID NO: 333262 - DNA, 1275 bp, Pseudomonas aeruginosa
atgagatcacttcgcccgaaaattggaaatagccctacccaaggtgatttgttcggaatcgaccagatcgctgatatctacaaagcatcgccggacactcccatctccaatgagtcgctataccggcgcatgtcgaacaagctcggattctctgccgccgaaatgaacgaaagggttccgatcggcgcaaatggcgagcgccatagcttcgctaaacgctctatccgttgggcgcagcaagaaatgaagcgtctgggcatcatcgagcgtgtcgaaggcgagcgcggggtttggcgtctcaccgaggagacaaagcgcgacctcaatgctgcaaagcctggagtgaagcttctcggatttcgcactgatctcggcattgctatctgggggcccagcggcgacatctttaaaggtcttcagactgaggtaaccctggtgttctccagtccgcctttctgtctccgcagcccgcgttcatatggaaacccaccggaaaaagaggtggtccagttcgtctgcgacacattggagccgatcattgaagcactctctgagtctggttcactggtgttgaacttgactcaggacctcttccttccgaagtcgcctgcacgttcaacctaccttgagcggctcacgttggagcttggtgatcgtttcgggctgtggttgatggacaggctcatctggcagaacccatcgaaggcacctggacccgtgctctgggcaagtcgcactcgccagcaactgaatgttggttacgagttcttactctggtttgcaaagaatccggcccgatgtaaggccaacaacaaacgtgtactgcagccgcacacagaccggcacctcaagctgctccagtccggtggcgagaagcgcactacgaactatggagatggggcctaccgcctgcgcccaggtgctttcggaaaccagacggcagggaccatcccaaagaacgtaattacccgtggtcaccgctgcgcggttgggacccagcatcgcaagatctccgaggagctgggtctacctgcccatggggcaccaatgcctctgagcatccctgagtttctgattcagttcctcaccgaggaaggcgacctggtggtcgacccgtgggcaggcaggaacgctacaagcttggctgcggaacggctcggaaggaactgggcgtcgggcgagatcatgctgcagtacatgcgtaccggagctgagctattccgtgggcgccctggattctggctgaacccgcaaatcgagagcgctttcgcctaa

SEQ ID NO: 333263 - DNA, 636 bp, Pseudomonas aeruginosa
gtgaacatggaccttgccaaagcgctgataaagacccttcccaaagggaaggatggtcttttcaacccatggaccgacaggtgcagcctgcacaccgattggaacgggccggaggagctcctgatccggctggccgaacatttggactgtgtccccgagtggatctgctgcggtgaagcacccggctacaatggcgcccgcatcacaggggtcgcttttaccagtgagcgcctgatcttcgagggctccattccacgcaacacgagccaagtacgcctcacgcggcaacgcaagacggtaccggaggtaagtgcaacactggtttggaagagcctctaccgactgggaattgcagagaccacggtgctatggaacgcactgcagatgcacccccacgctctcggtgccccacgaaccaaccgaactccgacggacacagaagtgcaagcgggcttcgcagctctcttgcttctgaaagaggcgtttccccaagctcgatggatcgctacgggtaagatcgcgcaggaatcactgcttacaaacggcattgagtttgacgctgtgcggcatccagctaatggaggctcaaggctatttgccgaaggcatgagcagtttggtgggcatggcgacgtaa

SEQ ID NO: 333264 - DNA, 867 bp, Pseudomonas aeruginosa
atgactagcgctctcgataactacactcctccagcatggttggaaccctaccgtcgcggtgagcgcgagggttacgcccagagcatgctggcctatgccgcataccacggaactgacgggagcgccgacatggacaacgagctcgaggagcgtctcccctttcatccctcccctctgatttcctacgcgagccgcacagggaccaagcgcaatctcgaagcaatgcgccaggccggttggcacttgctcgtttctgcaaaaggcgcattgcgcactgagggcatgaagtacgcgctagacaacggagcttggtctgcatttacccagggcgagaagtttgacgaatacgccttctgcaaagcagtagacctccttggtgaaaacgccgagtttgttgtggcgccggatatcgtggaaggcggactcaggtcgttggaattctcactcagatggcttgagcgactgcaggaaatgcgcttcccgaccaagattctgttggcggttcaaaatgggatgacgccagatgacgtgagagagtatctctccccggtcgttggcatcttcgtcgggggctgcacagagtggaagctggcaacactcaatgcctggggcgcactggcacgccggcgtaactgccatctacacgttgggcgggtgaacagtgaaaagcgcatcgctctgtgtgcggccgccggcgccaactccatcgacgggacaagcgcaacacgcttcgcgaagaccctcccccggctcgctgcagctgtccatcacaccagggaccaggctgatttcttctgcccgagcaacgagcgactagaatcgacctcgtttgactgcaactggcccgcattcgtcccgaacgcatga

SEQ ID NO: 333265 - DNA, 189 bp, Pseudomonas aeruginosa
atgtccaatactcaagcaagcttcagcggctttgactttgccgacgcggcaatggcgcaccgcgcgcaggcgggcggctggatctttctttctgcgaatggaggagcgatctggttcagcactcgctacacgccgtcgatgatcatcaatcaccccgccacggctggcatgtccggcaggctggtgtga

SEQ ID NO: 333266 - DNA, 441 bp, Pseudomonas aeruginosa
atggaagtccaaatcgtcgtccagctgcctcccgaggacagcgggattcagaactcgatcgtgcgcttccacaactcacgcatggattcgaagaaagctgacaagtcgaggttctttcggcgcgaacccctgatgatcatcaaccccgaaaccggggcccgtgtgctcagggtagctatgggtaaccctggccttgagggcatcgtgaagaacggtgtaggccttgattacgatgctgtcgatgcactgggtgttcgcttcaaccgtgacgtgaagctggaggtccgcagggccaccatcctggatgtctaccagtggtactggcagcacccggacgttgggcttcgcctttcttcgcggcttggtatcgttggcggcattctgggcgtgctgggatttgttgtcggtgttatcccgcttgtcgtccagctcatgtcatga

SEQ ID NO: 333267 - DNA, 291 bp, Pseudomonas aeruginosa
atggtcttcgagaatgagccccaattcgaaattcagctgtccgagaatcgaaacgcggtctggatccatagcctgcaggacggcggtacggtcggtcgatttgggcgaatgggtgtggacctgcacaactccctaacagatatcctccagggtgcccctgagtgccgcttgtgcacgcacgggcaaccgaccagggaggactgggagaccttccgtagccgcagtctcgaatggtggggtgtggaggttccggaagatgcgttcgatcccaagctcttgaaatcgagctga

SEQ ID NO: 333268 - DNA, 288 bp, Pseudomonas aeruginosa
gtgaagaagccccgcaatttctatcctaaacaggtactgcagcagctcgatggcaaggaaacaggcagtctgtcggacacggagcgccatgctctgatgttcttcctccgtcgctcccggcgttacaacatcatcgtctccgtacttcaggacaaccctgcagtctgcaatgaggagtgtgtgctgagcgcaaacggttttctaccctacgccatcagcgggagttcgcgggtattcgttgggaacccaattcgactcgcgactttcgatctggcgtgcatccactga

SEQ ID NO: 333269 - DNA, 339 bp, Pseudomonas aeruginosa
atggtcgacaactcgcgacctattgcagaggtcgttgcaggatttcttgcctgtggtgacgaccggcagaagtggattgaggtgatggccaccatattcgagcacgcggctgagttagacgatcttgccctgctcaggcttgggcgggacgcagaacggtacgaacgagacctctggagcgatgcgcccagtacccaaaatgaatcgctccagatgctcactgccaggggcctctatcgactggcactcgagttggccttgatcgagagcatcctccgccgccaggtacttcttgcctacgccaaagcccttcgacttatgcatggagagatgaagtga

SEQ ID NO: 333270 - DNA, 741 bp, Pseudomonas aeruginosa
atgcagcatcaattcgtttccacccccgtaatgaacctcgtcgccggcagtcgtgtcgacctggcttcgtgcccactcctgtccaacagggctgtcgcgccttacgagttcggcgtcgtctcctcggtaacgcaagagacagacgattgcgttcttgttgactttgaaaacgcagaggccgttgcctatccccgtgagtccactctcatggtgaaggtccctgttgacgtggttgatcgtgagatcaaggtgcgtcctgtaacgggcgatcaagagtggtctgtgtggaagctttctcacaacctcagcgatcgctggggggggttgaactactacaacgcccagcacaaaccactcgaactcctggagagcaaccaaccgctcctcgaaagacttcgtgagcaaatggttgaggaggacacattcattgcccgcaaagatggtgtcttcggcattctctacgagatggaaatgttgtcgctggagtccgacggagaggagttcactggccgccctggcgaccacgatcaaagcgtcgaactgcggccttccgcggtagtggtcgacgacctcaaacgtaaactcgcgctgctggtgcctcagtaccctggcgctgagttctgcgtgcctgtagagagcgagatctgcaacgaccgacctgcggcctgggtgttcgtgcccgaagggcttctcaccctggagcagcgtatcgccttgggcgatgctctctcgtcgctttaa

SEQ ID NO: 333271 - DNA, 705 bp, Pseudomonas aeruginosa
atgcaagcaaaaatgccgttcaagtgcatctacgaagaccagtcgacccttgttcgtacctgggtgaccgcagtggatgtgcgtgacgcgatcacgcgatttttcaccacagacgcaggtatgggtctcgcccattaccacaacatctcggtggatctgatccaaacggttccggcgaactttgacacgcaccacacgctctccggcgacggttggaaagtaagtgttgcggtgtcttccgagtcccaggaagaggccgtgaagaagcccgcaggggagatctacctccctgaagggcctgtgcggaacaccattctggcggcgcttcggtactaccaggagcaaggcatgggtgagcctgaaaaccgctcggattcgattcaagacatcgccacgaatggtggtgatgaagagagtcttaacgagtggggaatcgaggaactgtgccagtcaatcaacgacgccgaaggccctgcctcgccggttgtcatcgtgcgttgtgatgaagacgatcgcattctggtccaggcaaatcaccaagtgacagtggttcacttgaatgacaacgtcaccggggatggaggtcctgatctcgtcgagctttgcggcactgagatgtggaagcaagtgttcgaagtcgcccctagcgacctctcggacattcttccggccctgaacctggccggcgcatgctcaggcgagtag

SEQ ID NO: 333272 - DNA, 609 bp, Pseudomonas aeruginosa
atgcttgtgcatgtcacaccgatcatctttgccaaattcaatgatcgtgcagtggacgtcgagctggtcgatatcagcattccggagttcggtgtgtgtctctgtggcggctccgacgttgtgggaaggaagccggtacccaacaagtactacacggttgcttgccgaaagattggccgtgaggccgtgagcggcctgctgttcgctgttgatggaccagtcgagttctacacggtaacaactcgctggcgcttgctcaccagcggcaaggtaatcagccatgaagtcatgtaccaggtgctcgagaatgagcatgaagcggtgactgatggaatgctcctttggggcgcaactgaagagcttcccagccgctggcctgacttcgccaacggctacgtaatcgccgtacatcagccgaggatggaccttgaaacgagtaatggccggcttggagagatggtggacacgatggaccgcagtgggctgatcctggagcgccgggagcttttccggctgcccagtgttgaaaaggtccgcttgacccggcgtgactcgatatccagccgccttccactcctgcacacggcgatccgggttcgtactcggtga

SEQ ID NO: 333273 - DNA, 885 bp, Pseudomonas aeruginosa
gtgtcgaggaagcacaacctccgcctgaaaggcgatgaggaccaggacctgcagggctaccagtcgacggtggcccatctctcagacattgctctgaaggatctcctgaaggcgattgaggacgacgaggtcgccctgccaaccttgcccgaggttgcgcttgcggttcgggaagctgccgaatcccccgatgtttccattagccagctggctagcgtgattggtaccgacacggccttaactgcccgaattctgaaggtggtgaacagtcccttgttgcgctcgggttgggagatttccgacctgcaggcagcaataggccgtctcggcgtcatctacaccagcaacttggcagtcggcttggcgatggagcagatgttctgtgggaagtccaaggcggtagacggaaagctccgtgacatctggagaaagagccttctcgttgcaggtgtgtgctactcgatttgccggcatcgctccgacctaaaagcagaccaggctatgctggcaggcctagtgcacatgatcggtgtgcttccgatcctcacctacgccgatcagcaccaggtgctgaattccactccagctgacctggatggtgtaatcgagctgatccaccctcaaatcggctctcggattcttgaacaatgggacttcccgtcgcagctaaccgctgtgccgagaggctacgccgatctggcaaggcggtccgcgcagctagactatgtggatgtcgtccaagcagccacattgatcgccggcctgagtggcgaaagcaattacggcgctattgactgggacatggttcctgctattcagacgctcggtctcaagcgtagtgacgtgcctgtctacctggaagaagcggcccagttcgccgtatag

SEQ ID NO: 333274 - DNA, 261 bp, Pseudomonas aeruginosa
atgcagcaatgggaaagggggacggagttcagcgcagatgggctgtcgatttcagtgctgtgctctcatggggaacagagccttctcgccgtatcggcaaaggctggtcgtttctactacgcagagaaagtccgggtgttctctgccacgaccttggacaccgaaagtgtctggttccttagcttcctggaccgcgcgaaacgtaaaagggagcaggaggaggcgtttctctggcgccgggcacgggtatcggtcgcttga

SEQ ID NO: 333275 - DNA, 261 bp, Pseudomonas aeruginosa
atgctgaaaatcgctgaagtgctttcgcggtccatgcgagtgaccctgttctccaccctgctcggcctgtcatggttgtatcaaagcgagctgaacgagtttttggggcttagcttcgagccctggatcaaccgagccctccagctaagtctcgtatgcatcattgcccttgtggttggcaccccagcgaactggctcttcagcagaatccacgaccatcttgagcagcgcagcttcaatgatctgccaccaggaccctag

SEQ ID NO: 333276 - DNA, 591 bp, Pseudomonas aeruginosa
atgactccagatgcagagagcaagcactactacaggccaacagcggtcccaggactgagggactgcatgcagtgttggcactgcggcacactactgcatctgggctggtactggctgggggatcactgcagcatctcagagccgccctgcggcgatccgcgtcgtgcacctgaacgattcaggcactggcagcagtcagctgatcggcgcagtgccatggctacaggccaacctggccttgctaaagcagctcgacacctgctccgtcagatcctgcagagcgactcccgcttggccgggggcagtaccgaagtacttgaagcgacgatcctcgctctcctgcatttggtacaggctccatccctcgccccagcgccacagcaggtcgccctgaacgggtaccagctgagcgaagccctggagtttcttgcgtcggatagaagtcccgagcaactacaggactacctttcgatttccgcggttccaggtggctacccgaccgctcggtacacaggtcctgcgagcgggcaaggcatcaccttaaagccacaccaggtctatgtcagatcacccgaatatggcgaccaataa

SEQ ID NO: 333277 - DNA, 948 bp, Pseudomonas aeruginosa
atggatcgaggcaagaacatcccagaaggccgtggctcgtatgatgggctgctagcgaaaggcgggcagtggaacggcactgtagcctttgtgcctgaggttctagacgccccgctccgctggaagcggcagcgaaagatcttcgtcaattcgatgagcgatgtatttcacgaatcactcgacgtaagggacatcgacaagatcttcgcggtaatggccctgtcgtatgcatcgagcgacgagccgcacatcttccaaatccttacgaaacggtcagacatcatgttgcgctacctgacggatccagcgctgatggcgcggattcagggtgaagcaaaggtccttcgtcccggagttaagctgcatctcgaaagcatgtggccactccctaatttgtggcttggcgtgagcgtagagtctcagccgtataccagccgaatcacgaatctgctcgacgcgccggcggcggtgcgctgggtgagcctggagccgctgatcggcccgatcaatctattcggcgtccaggacggcgaccacacctacaacgcactctccaaacgagaaggcattggataccgcggtgtaggactagattgggtggtggtgggaggcgagtcgggcgatctcgcccgccccatgcatccccactgggcagaaagcctacgccgtcaatgcgcacagaccaacgtacccttcctgttcaagcagtggggttcgtggtgcccaagagggccagcgtcgctgggtcacccagtcgtcgatggtgtacccgtgatgtgtgttacggagctcggcgtcgaccgggccaaaaccactgaaggagacccctcgaaagatgcctggatgaaccgcgcagggaagaagcgatctggacgatcccttaacggcgtcatctacgacgactacccacatgcgttggcaagcatccagaaagcacctctactttaa

SEQ ID NO: 333278 - DNA, 873 bp, Pseudomonas aeruginosa
atgctcagcagctcattcgtgtggtcattgctcgcagtttgtatggtcatgctgctccccacactggcaatttgcatcgggtcgttcgtcgctggtcgggtgacgcgaatgtccttctacacctacgcctcacttggcatcgtaggcgtccctttgcacgagctatcgcacgcgctggcttgcctactgttccgcatgcggatcaccaaagttgccctctatgcccctgatcccgagaccgggcgccttggctttgtggcttttgcctacaaccctcgctcaactcttcacgctgtaggtctgctggttcagggcattgctccgcttctgatggcaggtgcttttcttctttggcttgtcccggcgcctcatgttgattcgatccaggtcatgggaaggggcggggccggctggttcggggagcgaatcaccgaaggcctttcgctcgggctggcgatgacgctggggaacctcctgactggattacacggggccgcgtggtgctccgcagctctgctcatcggcgcctatgggattccgagctggtctgatgtccgcctggcattacgcggcctgatagtggttgctctggtagggactgcagcggttttcctagctacgtctgtagagacacttctgccgtcgaggttcagtgctgattacattccagggatcgcggccgtgttgagcacagcgactaccaatgcgatcgggttcttgattacctgcgccacgatggtgagcttggtcggggtagtgggcgttgtagttatccagctgctgccttccctgctggctttcagccttaaatggggttggcagcgccttatcagggcgaaaaaaaaccggccgcatgggccggttgaggtttag

SEQ ID NO: 333279 - DNA, 237 bp, Pseudomonas aeruginosa
atgaaaggtcaatcgaagcacctcacccagatcatcgaacggcgcactcggaaggccctcacgcccattgctgagcgtgagatcacacgacagcaccagcatgaaaacgatgcggagttggagtaccgccttcgccggaacgtcgtcggagaaactgaagtcgcgatcagacaccagccggtaatgcgccggaagcttagcggcactgactggtgcgtagattgcgtaatgctctaa

SEQ ID NO: 333280 - DNA, 204 bp, Pseudomonas aeruginosa
atgtcctatttcaacgacgaaagtacggagccggcgctgcctgtgaaggttggtgttggccacctaccgacgcgaatgacggtcgcgcaggcgaggctctgggccaagcagcaacatgccacacaaggtggctctgagcctgctctggaggtcaaaagcccattgggcttcggctacctgcacatcgaaatcaccttccattga

SEQ ID NO: 333281 - DNA, 270 bp, Pseudomonas aeruginosa
atgttcacttctagccaagtctcgtcgatcgctgcactggatatccacgacgtagtcgatgactacgatgagcccgctcaggttcctgagtggcagtgggtcgaagcaaacgcttcgtttgcccacgttcgaaatggtaccgacggtatctgggaatttaccctgaatctgtcaaacgcctggaatgacgttccggagctgttgcttccagctatcgaggcagcgcgaggccagaactgctcttacctgatcattcaccaaggtatttaa

SEQ ID NO: 333282 - DNA, 474 bp, Pseudomonas aeruginosa
atgccttacaccgatgccccttacgaagtgcacctggaggccgtcgtagccctcctgtcacgcttcacctcggactcggttaccctcgccgcggcttggctccatgacgtactggaagacaccaaggtgacctttgagatccttcaacgcgagttcggtgacgatgtagcttcgatcgtacgcatggtctcgaaggtctcgcgtagagacgatgggaatagggcggttagagctgcgatcgaccgaaagcactatgcatcaggcagcgcgatcgcgcaggacatcaagctagtcgacgctgtagtgaacgtgaggacgattgttgaacgcgattcggagttcgcaggtgtttatgtccccgagaagaccgcattgctcgcagcactgaacaagggtaacaggagcatctggaaacatgctcatcgagtcattactgccgctgagcttgacctgcagcgcattggtcaccactga

SEQ ID NO: 333283 - DNA, 462 bp, Pseudomonas aeruginosa
atgctgtggcacctgggctgcgatgctatccagaagggagtagccatcaccgagttcccctatgccccgccggcggacactcatcatcagccgctgaaagcgccgaagagcgccgtaccaaaggctgatcgacagcgggagcaacgagaacgagtgcttgaacacgtcaagagcctcagggcggccgataagcctacagccgccaccatcgcccaagctctagatatgtccgaggcctcggtcagcttggcgctcggagagttgttggtaaggtgcatggtggactaccagaagttctccgatgccccggctcaggaacttctggcccccctattgcccggtgcaatcgataagcttgggagcaccaagctcaagcccctcaaagagcatttggaaaaggcgaccggggagagtgtcgattacacgcagctcagaatcgcccttatcaagctcgggcgctaa

SEQ ID NO: 333284 - DNA, 882 bp, Pseudomonas aeruginosa
atgccggatactaaatcgaccagtcacacctcaggtgagcacaaggtgtttaaagacacgaagctactgcgaatcggcctagggctgatgattgcctgcacagccagctgcgcgaactacaccaatcagctctacgatgaagcgcaacgggctaaccggcgccctatgatcttcgacacggagagctaccgcattcaggcggtactaccgcaagctcaggtccggcatttgcgcatctacatcgagggcgatgggaaggcctgggcgacgcgatcgcaacccagcaccgacccaacaccgaccaagctgctggtagccaacttagcggcaagcgatccgacgccttcggcctaccttgctcgcccctgccagtacgtccaggaccgccactgcaaccctcaagtctggactgacctgcggttcagcaaagctgcagtgaacagcctctcagcagcggttgatcaagcaatgcgggcagtgggggccaacgaggtagatctagtcggatactcagggggcggtaccctcgcacttctggtggccgccaaacgcagtgatgtgacatctgtgcaaacccttgcagggaatgtcgccccattggcctgggcaaagatgcaaggcttgacgggacttcaggatgccttggatccggctggttttgcgaatgcacttcgcgagatcccgcagcgtcacctggtgggcacccgcgacaaagtgattccagcaacactggcaaggcagtatgcaaccttacttggccccaacgcttgcgttcagctagtcgctgttgatgccacccatgaggagggctggcaagccgcttggtccaagtatcgagctttgcctattggctgccatttctcctcggacctcagtcagtaa

SEQ ID NO: 333285 - DNA, 144 bp, Pseudomonas aeruginosa
atgtactatctcctcttcgttctctcgatgttcgtcggttcctatcagtcggagccggtgttcaccatttccgtggttttggccatcgtactcatcgcagtactactgacctatttcatctatcggatgtggaagcgtaactga

SEQ ID NO: 333286 - DNA, 129 bp, Pseudomonas aeruginosa
atgtgcccggtgcgcaggacctggctggacctggtagtaccgagccgcatcctcaagcttcccctttcggccatggagagctatccagatatcgcgtacgtcgagttgaacgggagcctcgatcggtga

SEQ ID NO: 333287 - DNA, 930 bp, Pseudomonas aeruginosa
atgaacctgtcggatgaacacgtagctcgactcatcgatgacataatccgggagaggcgagcgactcgccgaagcaagtggctgctgtggatcggcgccgcggtaatagtcggtggcggcattattggtgagcgcttctccggagacctcgacggtaccgaacccttcaccgcgaaagtcgatatcaacggcgagatcgcagaaggcgcgagtgcaaacgccgaaagcctcaagaagagcatcggcaaggcgttcgaggacaagcgaacccgtggtgtggtgctgcgcatcaacagcccaggcggcagcccggtacaggctggctgggtctacgacgaactgaagcgtcagcgggcgctgcatccttccatcaaagtctacgcagtgatatcagacctaggcgcttcaggggcctactacattgcgagcgccgcagatgagatccttgccgataaggcaagcctggtcggctcaatcggagtcacagctgcgtcctttgggtatgtcgatctcctgggcaaacttggagtcgagcgtcgcgcatacacctctggggagcacaaagcctttcttgatccgttccaaccccgccggcccgaggaaactcagttctggtcggatgtactggccaccactcatcgccaattcatcgaagctgtcaaagccggccgcggtgatcgcctcaagagccaagatcaccccgaattgttctcagggttgatctggtcgggagagcaggcacttcagctcggcctggttgatcgccttggagacgtcgactacgtcgcgagagaaatcgtgggggctagcaaggttgctgacttcacagctaaggacacaccatttgatcgtttcgcgaagcgtgtcggcgcctcagtggcaaacgaaatgtcgatgacgctcggactttctggaatccgcctcgaataa

SEQ ID NO: 333288 - DNA, 1521 bp, Pseudomonas aeruginosa
atgaaaatccatttcggctacaacgctcacgactggaaaaacgggcagaactacattcctgtcgtctacgacacgcaacagctcgtgaacggccacactctcctcgtaggcatgagcggcgcgggtaagactactctactcaggaaggctattagccacattctccagaccgctgagtaccttccacggatccacgtatttgacgtgcatggtgatatcgagatccccagggccagttctgtacggttttccgagcaaacccaatttgggttcaacccccttcgagtgaacccagaccccgattttggaggcgtccgcaagaggattcagctgttcatgtcgactatgaacaaagcgatgcggaccatggggccgaagcaagaggcgtgtctgcgaaacctgcttctggacgtctacgaacagtttgggttcaaccagaaggatcccagcacttgggttgtcgaggaggagacggccgttcttctaacggatggtaccgacaagctctacctggacgtaccaagggcagaaaaggacgcggctaaggaccttggcgccaaatggagcggtgctccgctctactgctggtacatatcgcccagtagtaattatcagggagccatcactcgttggcctcccaagctgatcgctcgcacccacccgaccatccaagatgttctgcggtacgcgaaaaatttgcttcagcaatcgtttctgggcacaggtaccgatgcggtaacgaacctagagatcgcatgcaaggcagccgctgcttaccgcaagaaggtgctcttcgagcttcggagggggaatgctgacttctctgacgcttcagcgaaggccgatctcgacaaagcgaggcggaaggcggtcgattcgttctcgacatatgcggactcaatcacaacggggactgagcttacgaccctgctcaagtacgattcgactgatgttctgaagtcggttgtggaccggctccaaaacctcgacgctatcgggatttttaagcccaatccgccacccttcgatgatcattctccaatttggagatatgaaattaatgccttgagtatggaggagagaaagcttttcgttctatttaaacttgatgagctatttcaagctgcagtgcagcgcggtgtccagagcgaaatcgtagaagttatcgtgttggacgaggcgcatatttatgcggacgatgatccagagtccataattaataccatcgcaaaagaggctagaaagtttgggacggccatttttctggcaagtcaatcccctacgcactttaactctgatgtaatcgcttcagttggcacgaagattgttctggggatcgacgaaagcttctggaaacaatctgccaccaagatgcgcctctctgaggaggcgctcgcctggatacaagcaactaaaacgatgcttgtgcaaatgaaggggaggggtgaaacgaaaaacgattgggtgtggactattataagtaagccccaggggcaggcagatcaggaacaatacgcttga

SEQ ID NO: 333289 - DNA, 738 bp, Pseudomonas aeruginosa
atgaaatatcaggcaatattcgggctcactcccgaaacactacacgcaatgcaaaaagcatctgacaaagattctcgaactttacgggatttcgttctcagcctttctaaacctgacgtatacgacttcagccttcgccggttcatcgaccttagcgacgaaaacttcaacttggcttccggtatgttgcatgcgttccgccgcggcgatctggtacaaagaaatctcgaccaggttgccctactcctggaaaggtcctttgaccccagcaactcctgtttggagaaaattggcaccacctcggtacgagttctcattgccaagcggcagatcgccaagatcagcaccaaggtgatcggcgaggagaacgcaatgctccgtggccgctggattcgcgacaactacctcttcgacaaccagggcaacgtgtcgattcgtaagcgccgctctcctcgaaaaggcgccgtgaagcacgtgtcactcgtctctgatctcacggctggccgactcaatttcgtcgttacgtatcaaggagagactgggcgcccgactaccaagcagttttctgttctgaaactaggctacgatggcgccttcagagaggcactgcataaagcaaaggaggaggcccctgaactggacctccaaatgatcaacccctacaagccgacggaggaagagtaccaacggttcaagcgtattgttcctgatctgcctgcccctggggcttacttataa

SEQ ID NO: 333290 - DNA, 543 bp, Pseudomonas aeruginosa
atgatgcggcccctcgttaccttcgtttccaagtacgaggtggagcggctcactcccacagggcggcatcacctgatatcgatctctgatgcacctgatgaccaagcgcagatcgatgaaggggtttgggcgagcgtcagtcggcactatttcatcgatgcaggcctcgatgaggtcgctctcgagatgtatgcctttgaaggtaaaaggttcgagctacggtaccgtgactatttgcttgagcaccgagcgaaggaccttcgtttccgtgtggcagagatcaccgctctgggcgagccgatcgtggtgaattgccatgctgggcgatcacgaagcgccgcggtcgccaggtttatcgccaaccaccacggttacaacctcgacaagcccaccccagacgcaaatgagttcgtctaccggatgcttgcgcgtgacggctctctgatgctggcgtatcaacgtgccgtttctgatccgtccgaggaaaccccgccagcaaaggtttctctggtgtctgctattaagaaactcatcgggatatag

SEQ ID NO: 333291 - DNA, 270 bp, Pseudomonas aeruginosa
atgaccgccgcagccatcccccagcgccggaaatatcgcatcgtcctcaccgccggcggcgccggcatggtgctccttggcgccctgctcatggcagatcagagcggattggttgacccattggcgctggccagtaaaggttgccgaatgatcagtaaatccatgaccgccggcgacatagatgcgatcctcgcaggccatcctgttcacctggacaaccctgacggcggctactgctacaacccgcctgctatcgcatcctctaaatga

SEQ ID NO: 333292 - DNA, 498 bp, Pseudomonas aeruginosa
atggccacaccgttcgcactggccatagcgttgctcctcaacacgattgcggtggcgatcatgatcaaggcagacctggctggctggtccaatggaaccttgcctcgactgagcttcccggctgatttgttcaccagcgagaagaagtaccttctggtcatcctgtacacgactgctatcgagcagcagctcgggttcatgcccttcatggtcatcatgggaggtaggtttgagcctcacatcgtgggcaggatgatggccgggcgattgaattgggctcaggcacgggagaagcaggcgcggctcaccaagggggagaagttcatcctggcgcctttccggttgctggtcctgggaggagttgcgctgcagttctccgctaaacaaatcaatgcgaccgtgaaccactacggactttggcttctcataggcagcatcctagggtggctcttctatgcctgcctcttggcgcaagccagtcgagatatttccgactga

SEQ ID NO: 333293 - DNA, 366 bp, Pseudomonas aeruginosa
atgtctcttatcaacgaataccgctctaccgaatccgctattaaagaacttcaagaacggctgaagaatctcgaaagcaacgacaacctcaagaaagaactggagttcgagggcaaactgacagatctgatgaagagctacggtaagtcgctccgagacgtgatcagcatcctggaccctgccgctggtaaagcaccgcgcggcaactccactcctaccggccgcagcccgcgcaagatcaagcgcttcaaaaacccacacaccggcgaagtcatcgagaccaagggcggcaaccacaaaaccctcaaggagtggaaagccaagtggggtggcgacaccgttgaaagctgggctgagattctctga

SEQ ID NO: 333294 - DNA, 666 bp, Pseudomonas aeruginosa
atgaccccaaagaccctcctcatcgtcaccgtcgcgttcgccgtgattgtcagctctcttatgggatggaggaagagctttaggagcttcctattttggggggcaatggcagctgctttttgcgaaattgcggcgtctcaattgggtttcaaccgcggattttcagacaccctacttaagcatctggtgatcattttcgggctcggcggccccatctatgcaatcgctcgacatgcgggaagctgggcccgcgcatgcgcaaaggctggccaggccaaaacctctcgcacgactgtgcgaatcgcggtgcatgtggcccctttgctcaaccttgcactgcctggattaggtttagtggccacaggagtggcgtacgcagtgttcccgcgccggctcgcttcctacaaaacgcaggtaatagactccgcatggttccaggcaatatggggcaccctgctctttgcttcatacgtactctcggcgatgccgattggtatttttctaagcgcaattgtcatatccctcggtatcagccgtattgcaataggcctgaccgtaatatgcagaggctacgactatgcgtactacctagaatcgccaatcaacttcttcaaactaatgcgcgctccaacccgaaacagcttgacgaaaagcaacaaagcttag

SEQ ID NO: 333295 - DNA, 849 bp, Pseudomonas aeruginosa
atgaacgacctggtacggcgagcaacagaaaaagtccgcgaatcaatttcgatagcggagaagtatttctcgagggagttccgccttgatgatcttctgtttgacttgaaggggcgagctgcaggccagttcaggtattgcggtagaacaggtaagtgggttattcggatcaacaggctgttactcgaagctaaccctgacgctgtgattgtcgaaacagtccctcacgaagtcgcgcatttggtgactcggcaggtatacgggttcgaggtcgcttctcatggggccgaatggcgaatggtcatgacggaagtgttcggacttaaacctgatcgttgtcatacgatggacacatctgtctcttcacccagcccctatgtctataaatgcgcctgcccgaagcaattccggctgtctcggaggaagcacaatacacatgccatgcgaccatatcggtgccgcgcctgtaagactgcacttgtgttcagccacgaagaacaggtcggccgagctgccgcggtgatagaacatctgctgattgtcagtaacgggtgcccctttacgatcgagcatgtaaaaattctagggagccttgtcaaaggcttcgccataggtcgagtctcattgaggcatgccggcgttgaaggacgtgccctgaaaactatgcttaaagttctgaaggttgatcagtcagtggtttccgctgaggagttacagcggcagctgccaaacgctgtgagccatgccgtgttctttgcgtcgacaggagatgagcgcagcctgcaggctgcagcacgataccgtgagcgctcaactgtggttcgtgttcttcggcatccaggggcgtag

SEQ ID NO: 333296 - DNA, 198 bp, Pseudomonas aeruginosa
atgggagagtaccaggcgcaacaaacactctcgttggtgcgcgaaagcatcaggcgcctactggtgctcgctgcaccctggagtgccactgataccgcagcggagggtggccccttctccttgcgtctgattgatggatgcttggacgtctcgatcgaggtggctgaaggcgaggccaccctgactgtcctgtcctag

SEQ ID NO: 333297 - DNA, 1092 bp, Pseudomonas aeruginosa
atgcaatcttccgtacgccggcagactccccgcgagtcgctccaagcttctgcacgacgtctcctacccgccttgcgggctattggtgagcggtactgcttgatccaccatccgtctgctcaatccgaggtacgggcggttgccgcctatgtcacacagtccggtaacgtgaccgtttacaaggtcgccatgcttccggcgagtgctgcaagcgcatacacctcgactgaccatgactcggtgtgggcggtagtagatcactcaatgaagtccgtgcttttcggccctgaggatggaatcagggttaccacccaagaccgggggatcgcggcctatttggcaggccaacttatccggctcctcagaaccaagaacgaaccggcagcgtatcgagtgctggaacttgagttccccagccggcccgccggcgaatccgctgaagcttgggaagaagccatccagaagaccactacgctcctagaaaaccagggctttagagtcagcaagacaaccgctggcatcgtcgcgaatgcccagagtttgggtgctctcgctgagcgctggaattctgaaaagatcaactacatatccaattctcgtctgatgtcgctgtacaacgaagcggtgcagcaagagaccagaagccaggcccagatcgaagaactttccgaaagctaccggcagctcgagcaagatgcagcagcactgcggcaatccctccagggtattgaggaactgacaaccgcagcagcactcaaggacatggagatcgccagacttactgagcaagtcgcaaccctcaccccataccaaacggaggtccgatcgctgcgcgaagagctggagatgacgagggataacctcaacgctgaaaacagcaccagggccatcccgtgtgacgtcccccttgtcgtggcagcttctagccccccaaccgctcatgcggaagctgatcaagcgcctaaggcacatcaggtcagtacggtgatcgatcatacacaccgcctgacattaggccgttttgagcgctggactgtcggcgtcgttgctgccgctctaatcgccttagggtttgtgaacgtctttatctag

SEQ ID NO: 333298 - DNA, 906 bp, Pseudomonas aeruginosa
atgaagctctatgcagtagccctgtcgatggccgtaaccagcgtactggccggttgctcgtcgcttccgatgcccaatagcacggaattcaccgaatctggtcatggctaccagtaccaaacaaccgcttcagccatgcattacgcgaatgccacccctctgtcgctccagggcaacgagaatacccgtgtgctagcactgttcggtatgcctgactaccagacgatgcagcctggaaaattcagcaactacatgttcaccaccactgacccagtgactgtccagtcttacatcaacccggcgctggtcgaccgtgccaaaccctcgagaacgacaagcacggacctgtctgcggtcagcgtcaatgcgctctcgaacaccgggatgagcgctggcgcggttggtgccgccggtgctgcgctgatgattgctggcgcggacacgacgccggaccctcgcacaaacgtcggtgctgcaatctgttatcggcctacggcggagcaggccagcatgaataaggcctatgtcgagtgctttgaccaggtggtcgaagacctgcgcaaggcgctcggcccgaccgcaaccgtggccgacaaggggcagcatgtgagcgtgtacggtgaagtggaagttccaggaataggtaagcagccggtgtccatgctggttggccgcgtctacaaccatgcctcggcaggttttgccccggcggataagggtggttttgctgcgaatctcttcgcgatccagatcgtgcgctttggggacatccctgcatctaaggcgaccgtcgaggatatcggagctgcgctgcgcaaagccaagcgcgagacaatctcgtatcgcctcaatgcgagcgaggactaccgcaagcgcaaagatgccgagccggttggggtctactga

SEQ ID NO: 333299 - DNA, 309 bp, Pseudomonas aeruginosa
atgcaaactcaaaatcttccgtcacaagctgctgccattctggtcagcgatctgccgttgttcttctcgccgcggccggactcgggctgcccggcgattggctcgttcctgacctatcacgtcaatatcgattttggcgaagagttctacgccgacgtgcgtgatgcttatggccgtactgtgttcgagctggatggtgacccatcagtttcaggcctgatgtccgggcgctttgacctagtcggacttaagcgggtgcttatgcagcgcggcgtcatgactgcgaagcaagaactggtgggagggtaa

SEQ ID NO: 333300 - DNA, 270 bp, Pseudomonas aeruginosa
atgaaccatcccatcatcgtgaacatgcactcgatcggcgttgaccggtatttcgcctctgatgatgaggctgagatggtcatggtcggtcttaccaattacggcttcttgctcaagcacaacaacctccagaccaggcgtgtcagctttggtgcattcgctgactgcattgaagcaaactgcgatctgactacgcctcagacagccgcggtagtgcacacgctccgggttgtgcataagcggcagaagacagccaccgtgatccagtga

SEQ ID NO: 333301 - DNA, 1131 bp, Pseudomonas aeruginosa
atgcaaaagatgagactcttggctttatcgatcgcagctgcacttgcaagcgggcctgcagttgcagcagtggtttgcgaatttgaaccatctcaggatctcaatgactgcagtcgatgctttaaggctgatgtcgatggtgtaagcctgttcctggatgggaagcgggtggcatcgagcacagacgctgaccggctacagcgcgtgcggatcggtcgtactgattaccagcgaggtgtggagaaagcacttttctcacagaggcatggtgccgcgaaactctacgaggtttgctattcaagtgagcggccagtgcaagccctcgatctagacctggaaatgcagcctggtgccgagatccaggagtttcaactgcaagtagaaggctcgatggaggcacagcagtatgctttccgtcttgctagcaccgtctcgcccgttgagggctcggttggtctgtttgggaataccctagtcttccagcctgcctcaacctggtcgggtagcaccactctgcaatacgaggttgtcgacagcagcggacgaagccgccgcgccaacctcacagtccatgaagattctcagactgcctcgctgcgggcggagcgggatgcacttacggatctgcagaacgacctcctggccgtagaggccgaattgggcgccgaaatggactacggcggcgaaatccggtcccgtgttgacgccttggagctggcagttgccagtgagcaggaacgagtctcgaggctcaatcagcagatatccctggcacaggatcaactccgcctagatcgcactgaggcacgactcaaaggattgcttggggtgtcagaggcgctacctcaggatatcgaactgggcgtaatactcagccacaacaggccacgcgatggacgaggctggatgagtgccgaaatagccattgagcacctgcaggctttcctagtgccgcgcttcgcccggcataagccttttactccaatccttgggcaggagcctgtagtacccaaaaggcgtcggcgccagcggctgtccaacgatgcatcaaatccccggcggaggctctccaaacgcgagaagaagcgcgcaaagcgagctcgcgccaaacgttcgcacctgggcgtctga

SEQ ID NO: 333302 - DNA, 1161 bp, Pseudomonas aeruginosa
atgctgttcaaaaacgtaattgcctaccgtctgacgcaaagcctcgaggtcgaccaggaagcgctagaaaaagctcttgcatcgaaggcctttcgcccgtgtgaatcgcaagatctgagcaccatcgggttcacaccaccggttactcccaaggaaggtgacaaccctgacgttgagcccgctctcagcctttgggcagagaactgtgttctcgttcgtctgctgtccgaaagtaaagtgctgcctaatggcgccattacgcagaaggtgcaggaccgcgtgaatgcaatcgagaaggaccagctgagaaaagtctaccggaaggagaaggaccagctccgtgatgagatcatcatggagtaccttccaaaggctctttcgaagcgatcctcgactttcgcagcgatcgatcttactgacggtttgatctacgtcgacgccatgaaccacaagcaggcggaagccctcctgagcactttgcgcgaggcgctgggcagcctcccagttcgcccggtgtcgaccaaggtctcgccttcggcaacgctcacagattgggtgaagacccaagacccaacccacgacttcaatattggctcggactgcgaaattcgtagtcaaggcgatgaagcgagcatcgtccgattcaagaacaccgacctaagtagtgaggaggttctcgcccacttgaaattggggcacctcatcgtgaagctaaaccttgcctacagcgacaagctgagcttcgttctgcaggacaacctgcagatcaagtcgatgagactggacgaccttctcatcgaccaggccagtaagaatggtggtgatgacagcgtgtcccaatacaccgccacgttcgtgatgtccgtcctgacgctgagagcgatgattccacagctgctcgaggctttgggcggagagtccattcccgagagtatcggcatcgtccctgacgcagcagaggctcctgctgcgattgaccttgctgcggccgcggagaagtttgtgattgagacacagcgagcatcgatttcagcactccagcgcaagctcaagatcggctacaacgaagccgccaggcagatggaagggcttgaggccaaaggggttgtttcttcgatagacgacaagggagcgcgctctgtgctggtgagtgccgcataa

SEQ ID NO: 333303 - DNA, 402 bp, Pseudomonas aeruginosa
atgactaaggatgaattgttggctatgcccggcgctgcgtatatggacgcggtccagatcgccttcttccaggcactcctgaaggagagggtcgtcgtgctacgcgagcggtacgttgcgagtaaggcgcaacttgagaatatggagcctgctgctgacccggccgatcaggctgtcatcgaggagcaaagaatcttcgtgggtcgtgcgatgcagcgtgatgctgcggaagtccagctcatttcgtccatccttggtgacatgagcggctacggatattcggatctgtcgggcgaaccgatcggcctcgagcgactgctggtgtgccccacagctcagctcaccgtcgaagagcagaaccgccacgaacggcaccagctccatctcgcaaaagcgggataa

SEQ ID NO: 333304 - DNA, 879 bp, Pseudomonas aeruginosa
atgaaaaagtttctgaaatcccatggcgttgccatcgttaccagtgtcgttctctcacaagctatctcggctgccggcttggctgcttacctgcagagtgacctgtatagccagcgcttcacggagcagatcaatactgccgtggcggcgaaggaaaaggtccagatcgacgagtacaagtcatcccgctttgaggacttcaaggaagctccggcgtcggttcccaatgatgcccgcatctacggcagcctgagtgctcgtttcactctcgcagaattcagcgatatggagtgtccttactgcaagggcctgcagggcaccttgaaagagatcgtggaccgctcgaatggtgcggtgaactggcaattccgtcatatgccgctggcgttccacaaccccgccgccacgaccgaggcgcacgcggccgaatgctactcggagcagttcggtaaccaaggcttctgggtcatggtcgacgagatcttcctgaagtcaggcggcaatggtgcgggccttcaggacctggaaggtgctgttcgcaagctcggtgccgacatggataagttccagtcgtgcatggctagcaaccgctacaaggaccacatcctggaacaggccaaactcggcgcgaagctcggcattaccggcacccctgcaaccgtcgtaatcgacaacctcaccaacaaaaagatgttcgtcaaaggcaatcagccgcggaaagagttcatcgacgtgatgaagcaaatgctcgctgaatcgaaggcgaacgaagccaacgcagaggcgaaatccaagggcgaggacgtcgatacagggcgcgtaattggccaacagcttcttaatcaaccatccggcaagccagctggggccgatgaatga

SEQ ID NO: 333305 - DNA, 1503 bp, Pseudomonas aeruginosa
gtgcaaacaaagatcaattggactccgcagcagcttgcctttcatgcctgccaggatcgaaaaatccgcctgatcgcatttgccggcgcggccaagtcgacatcattgatcggatacgcccagcgctaccccaagaaacgcttcctgtatctggcatttgctcgatcggttgcggatgaggccaaagggaagtttcctcgcagcaacgtagtttgtctcagcacccatcaactcgcatggaagtctttcgggaaggtctaccagcacaaaatggcaccgagcctgcgcctcacggccatcgccaaggcgctggagaacaacgactggaccttcctacgcatagtcctggacacgctcaccaacttcctttgctcagcctccagtgagatcgatgggtcccacctggagccgaagcacatggaacatatccggcgacagtcagcgacctactacgagcgagtattcacatcagcagaagagatttggcgtcggatgatcgaccccgaagacctttcgataccgatgctccacgatggatacctgaagcgctacgtcctcagtcggcccgatctcgggcaccaatttgatggcatatttctcgatgaggctcaggacacgaacgcactctgcgtcgctttacttgcggcacagaccattcaagtaatttcggtcggggatcctcaccaggccatattccagtttcggaaggccgagaatgcttttgatcatgagttcttcgcggatgccaccaccctaaatctgacaacgagcttccgctttggccccgctacggctcacgtggcgaatctgctgttatcgctgaaaggcgagacgacaaaagtcatcggcggcggtgctagaactcagatcaaaaccgcgatacctggtggcacgaagaaggtcacctatatcaacaggacggtcatgggggtcattgagaccgccctccacttcgcatctcagaacaagcgtatctactgggtcggcaaagcagaggcttaccagatagaggacatcgcggacctcttctggctgtacgttggcgacatggatcgcatcaagaatccaagaattgggaaggaataccaaacgttcgagaagtatgcccaggtagccgaggacaccaaagatattgagatgaatcgggccctaaggattctcaccagccaagagaatctgatggcgaagattgagcaccttcgacggatgacggtcgagaaggaagaggatgccgatgtcgtggttactaccgcgcaccgctgcaaagggttggaatggccgaatattcagctcatggaggatttcccagatccactagaccctgaaatgacgcctgaagactcggtagccgagatcaacctgctctatgtggctctcacccgaggacagctaatcactgtcctgaatacggttgtcattttcctgatgagagaggcgcagcgccgcgaggtcgctgcaaggcaggctgctgcgaaactcggcatccttgactcatacgcttag

SEQ ID NO: 333306 - DNA, 804 bp, Pseudomonas aeruginosa
ttgcgtcccaggcattcgagatatctcgtggtggccgcgacgtggtttccgggtaccaagcagctgcggtttggcttcagaaacgtcatcagcaaaggaacagaatcaatcatgcttcagtcgattgcagcgcttggtaggcacctcaagcctggcttgatcgtgctcgccggtacactcatcagctactgggttcttcgagcagccatgacagagagagcgttgctgccggccataacctatgccgtaggaattcttctctcgcttgtgatgctcgcaaaaggtattggcgcatggtgccaacaggtgggaagggctgttgattcacctgcggcgcgggctaggttcgttgactacctcgaccggatcagtactgagcgaccgcctgttgcaagtgaggaactgggcaaaattgcgatcgagatgaaggggcaggagctgccggctagctttgacggttgctgggcattcaacctgcctgcaaaagactttccggtgtacgaggtcgaggcttatctcttgttgagcgaggagcagctctgcgttgggatcgttgccggtgtgaggggagagtgggtggaaacgaggcacctttacgcccaggtagagcgcgaaggctcctcacttaccagcattggatcgtatggcagcctggaatggctgccggcgggaagcccagtcgtgattgcttactccggtggtaacacagccgaactcagctggcgactcggttcgcaccgtatgcaccgagctcctgttccagagtccctgaagcgcttcattcccaatctgccctcaaattag

SEQ ID NO: 333307 - DNA, 273 bp, Pseudomonas aeruginosa
atgcatagctatgtgactggctgccgcctggcttctctgatccgcctcgcagaaaaaacgaaggtccttcgcaacatccaggcaaccttcccgaacggtttgatagtgaccatcgatgaaggtggcgaagtgacgtccaccggtatcaaggcacacggtcagctgaaggccgaggtgtcgcgacagctagcattggggctcggagaagtcacggccactcacgctgtgacaggacgcgtgctccgacttgggaaaagtgcactggagcgctaa

SEQ ID NO: 333308 - DNA, 225 bp, Pseudomonas aeruginosa
atgactcgatccactttgctggctgccctcgcagtactcaccgtagtcctctcgatcgctggcctcgctctctgcgccttcggcgtcatcgaagatctggatgccctggtactcacccaatcagcaagcttgggcgctctcattgtcgttctgtacgggctggaacaggtggacagcaaacaatccgtcccttcaggcttaaaggaggctcggcgtcatgcatag

SEQ ID NO: 333309 - DNA, 273 bp, Pseudomonas aeruginosa
atgagaaaggaagaactggttcaagcaatcgcagacaaagctggcctgaccaaggctgatgctgcaaaagcgctgaacgcgaccctggaatcgatcacacagactctcaaagccggtggcgagatctctttgatcggattcggccaatttcacgtaaaagagcgcgcagctcgaaccggtcgcaatccccaaactggcaaagaaatcaaaatcgaagccgccaaagttccgggcttcaaaccgggtaaagccctcaaagacgcctgcaactag

SEQ ID NO: 333310 - DNA, 1998 bp, Pseudomonas aeruginosa
atgggcgtatccgctcccgacttccgccctgaatatgtcatcgatgaaggcaagctcaagattgtcaaaagcctgaaaacgctggtgaaagaggcctcaatggtctacctcgctaccgacctggaccgggaaggcgaggcgatcgcatggcacttgaaagaggagctgcggcctaagaattacaagcgaatgaccttcaacgcagtgaccaagaaggtcctgatggaggccatggcgaatgcaggcgacatcaactaccaactggtggccgctcaagaaggtcggcgtgtgctcgatcggatcatcgggtacaccgtatccccccttctcactcagctggccaactcgcccgtttcgctttctgcaggccgggtacagagctccgccctgctgctgatcgtcaggcaagagcgtgcaatcacctcgtttgtcgccgaggaccactacaagatcaaagtgcatttcccgaatgcaagcggtggcacctggacagcgcagtggcagcacaagccacttcagcagttgtttggcgccgagaagacgaacatcttcactgaccaggccacaactcaaaaaatcgccgccatggtccaacagcagcctgcgttcatggtgctgaagatcgatgggaagaacacacacatcaaacccccggcggcgttcaccactgcaacattgcaacaggcggcaagcgtgaagcttggcttcagcgtcgaccgaaccatgtctgctgcacagaacctgtttacccagggcgctatcacgtatcaccgtacggacagcgagaacctcgaccccgagccggttgatgccattcgtggttggctccagagcaatggctttgcagttccggatgagcctaatacctggaaggcaaaggctggtgcccaagaggcacacgaaggaatacgccctactgtcattgaagacagagcgaccagtgagttccccgctggctctgacgaggcaaagctctacgagctgatctgggagcgtgcagtagcttcgcaaatggagcccgcttgctacttctcaacacaggtgctccttgcgagccaggtgaaggtcaggggcgaacacctgcagttcctggccaaggggcgccaacttctctccccaggctggaaatccctgacgcaagaggatgccaccgaagagaaacagaacgacggggatgagccagaggatgacggctcgtccaacgacatgccttctctcacagaaggacagcagctagcctgcagcaaagtcgagcctcttaccgcaactacaaaacccccggcgcggttcacggaagcctcgctcgtgaaagcacttgaggcggcaggtgtaggacgcccgtcgacctacgggtcgatcatcaagaccctctataccaagggctacaccgaattgacggggaaaaagaagattgttcccttggccctcgggatgcacgtcatcgacattctgcacggtcgtttcagcttcgtggaccttgagttcaccaggatcatggagggtggcctggacaagattgccgcggggcagaccacctacaagacggtggtcagttaccagcacactatcctcatgcgagagatcgagaagctcgagggagacaatgccctcacagaagcagcgtcagctgccagtaacgagttgttcggccacctcgtggagtgccccgtgtgctctaaagggcgccttaccaagaaagggaccaaaggatctttcttttactcttgctcggcgtatccccaatgcacagcgacctgcagagccaaaggaaagggcaaggacatcgagccagacctggatacgatccgcaccaaggacgccagctcaacttccgctgcagaacaggtgctgtcggaggaaaactgccctaagtgcaagaagaagaagcttgcactgcgaaacggaacaagaggtccattttggtcttgttccgggtacccgaaatgcaaggcgagttacaacgatgacaatggaaaaccggcgctgccggccagctga

SEQ ID NO: 333311 - DNA, 219 bp, Pseudomonas aeruginosa
atgaacaaagcacggaaagaccgccggcacccaatgtcggtatccgcaactgagctggcaaagctcggtgcttgcgaagtgatggtcgctctggatattgcggacgcggcggacagcgccatgcggcagagcgcccaccgaggggaacaggaacatgagcggtaccacgtgcgagcggtgcttaacgccggcgccgggggattgatcgccaaagcctga

SEQ ID NO: 333312 - DNA, 375 bp, Pseudomonas aeruginosa
atgcacggccgcggtgaccaggtctacctggctaacgggtggcttgtgccagtcgacactaagcgtaggtccaaggcggtggtgtacttcaaggacatcattcagctctccgcctacggtttcattctcgctcgagcttccaccaggctgttcggtcagaacctgcctgtagcgactcatgggttcgtccgccttgtggtgggccgccaggtctcatacgtgccggtgaagctgctgagcagcacgcaggtaatctccctatggaaccgatactgggaactgaagaggaagaaggcgcgacccgcgatcccggaggcctacaagtgcgctcagtgtccgaagaagaccaactgtccggttggcaggaggcgataa

SEQ ID NO: 333313 - DNA, 1086 bp, Pseudomonas aeruginosa
atgacggaccagcaaaacgaccacgacttcgactactcccagctggaagggggccactccctggacagcgagggtggaaaccagatcaacgacctccacagcctgtgcatgtcgctcaaagaacaggacgagagccttgtcggcgagacctcactactctggctatcaccggacgttcttgaggaggaagaaggcttcaatctgcgcgagtacgatcgtccggacacgcagctccatatccaggcgctcaaagaggcttggatgaacggcacacagttgcctccgctggaggtcaagatcgaaaacggtcgctgcctggttcgcgatggccactgccggcttcgcgccgcccgccttgccatcgaagaaggcgcccctatcaagcgaatcccagtcatcgagcttaccggctctgcagaggcatccgctcttcgcattcttacgtccaaccagcagctcaagctgaccatcatgcaacgagcacgcggttacgcacgtctacgcaacgaaatgggctggaacagcgcaaaaatcgcgaaacacatctgcatgaccgatacccacgtccggttcttgatcaagctgctcacactgccagaacgcatgcaggaactgatcaacaaggacgtcatccgggctgacttcggcatgaagatgttcaacaggtatggcgagaaggctgtcgagttgatcgacgaagcttacgcacgtcgactgaaggaacaggaaagcctgctcgcggaaaaccccgagactactgccccgatcaaggtctcgaccaagcacctcgccgcaccagcgcccaagatcaccaagaaaatggcgtctcagatgtcggtgactgtccgctctttgcacaccgcgatcgaatccaatgcgaccgtcgacaacgagtccggggaggtcgccgtcaagatccctatggacgtctacgagcagctcttggagttggcaaaggcgttgaaagaggcggatgaagcggcctcaggctcgagcgggaaggaacctggtgaaaagacagcctctcaaggcaaaaaaccgaaggccgatgtgattgccatcggctccgctcgtaaggccggttga

SEQ ID NO: 333314 - DNA, 537 bp, Pseudomonas aeruginosa
atgaatcgtttcttatccctcgcactcgctacagccacagcgcttgccgttgtcggatgctcgagcaacaaccatcacagcgaagttgagcctgtacctacgcacgtcgaagtaccacagcgcctggctcacgagttctacgccagctggggccacgatggccgtggcggcgccgccctccgcaaacccacctaccagcacgtcatgggaagtgaagacgtcatcatgaccactcaaggcaagctgattgagtggccacaacccaagacgccggacggcgtcgtagtgaccgcactgaataacgggatgaatgcagccatctttaccgccatggattcggctccgccccctgctaccaacaatgcagcgagggtggcagccctgaaggcgacagacgacgagtacgagcgtgcctatcgcaagttctgcaagggcggcggtatggcgatgaccgaacgcgagtgggagctcgtcgctctgggcggccccaacggcatcccggccagcctgcgcgatcgttgcatgcgccagaagtga

SEQ ID NO: 333315 - DNA, 3444 bp, Pseudomonas aeruginosa
atgctcgcgaaggttcttcgaaaactttttacatctaaaccgcagcagacctctgatcggtctaatggcagtggggagcgtccgtcccccaaatccctcactccagatctcctcaagatgttagagaagggggacgaggatgctttgcggtaccccccgtatatccgcggctttccggccttcatctcgggcagcgtgctgctggattaccacaaagacaaagtcgggctcattgcctctggaatcggacttccgcctaaacagttcaaccagctgattctgccggtcctgaacagttacgcagacttcgttcacctggtgccagcgtcacagaaccaccaccatcgtgcgtggggcggtctgcttgcgcatgggctggaagtagcgctgatggccctcaactcgtgccaaacgacgtcgttcgaccatgggcgtgttccacaggaccgaacccggcgcaaagagcggtggtacgcggctgcggttttcgcgtcccttctgcacgataccggcaagccgttgagtgatttcaggattaccgacgagaccggcgtgatcacctggaagcctgtctcgaaaagcattccggaatgggcatgcgaaatcggcattgagcggtactacctccactggaatcccggccggcatgagcgtcacaagaacctctcgatcactatggtggatcggatccttcatcctgaagtccgcgaatggctcatggacggcgggcaggacctctattcggccatggtcgccgccatcaccggagaggatgagaagagcatcctcaccggaattgtcattaagtccgactcccagtcggtgtctcaggacctcaagaagcacggtggcgatccggccggcgcagctgccggagggactggtgtgcccattgcaagtcaagtcatcaatgcgatgcgcctacttcgccagaacgagacttggaaggcgaacgagaaaggcgctcgcatctggtcgaccacgcaaggcatttttgttgcctggaacgcggcggccagcgaggttgtcgagaagatgcttgccgacggcctcaaagctttcccgcgaagcgcggattccctgggagaaatcctgacggaccacgacgtctttgagcggaacccgaacggatctatctactggaaagtcgcccccgatattctttcggccggaaaggaaaaggtccttcggttgcagtgcgtgaagttgtcttcaccgtccactctctacccctttgacccagccccacctcccattgccgttgaaatcggtgacgacaagagttccatccggtacgacccggcgcatggcgcaatggggttggctgtcggggaggcaagtgacggcggtgatatcgacctcgaagctaatggcttgggcggtatctctgctgcagacaacaaaccgatgttcgatctggagggagacgagcctaagccctctccagccgtccctagtgggttctctgcgccggccctggcaaccaagcctgcatcagcaggagcgacaaagccgggcaaacagggctccatgccgaccctgcagaccaaccaagtagcgccggcgaaaccaagcctggttattggggcgccacctcctgcgttcgtgaaggaacctgcagcggtcggtgcaactccacagaagacaacacagccccccgcaggcctcttctctgggctcaagatcggcgccgatgctccgtcgttcgaagaggagccacgttcgtcacaacccgccgagcctgcagcgtgggaagatccttttgcttcgactgaaatgcagctggacggtgaccctttcgcgtcggcgccgacgagtcctaaggcagatagtcgaaagctccccacagtggaacccttgcaactgaaggcggcagctccgcagaagcggacgcctgcaccaggtaacaagccctctgaggtgcttaatgaccgagtgggcttgcctggcctgcagatcggtgaaaagccacctttcgcgaaatcgcaatccgctgacaaagctatcgaatctccagtcgttgtggctgacgctgcgccggtgagcgccaatgcgttcatgactgtggaaatcacgggcgacttcgatgcggaaattctcgagatgaccggcatcgagcaggcgtttgctgatgttccagtcaaagctcctcaggatccgattgcagaacattcgtccactgttccgacctctgtgatggtggaggcaaagcctgctcttcagcgcgcacctgtagtggtagcgaagcctgcgcctgcgcgtcgagagggatttgtaccgattccgcctgacgcattcgaggatgagtttcggtttgacgcagagcaggtgcttgacggattcgacgtcccggcgccaccaatcaagaacccgataggtgtctcagcgccggcggatatggtcgggcttgatctctcatcattcagtcttcaggaagcgccgcaaagagtctcactcgatggtttcgatgccccgatgcttgaggcggcaatcttcatcggaggtacgccagcgcagccgatcattcaagccggagccgtagaagacctcgaattcgatgacggtctcgccggcgattcggaagaccaggtgattgatcatgacctcggggccgagccaggcgcggcggaaaatcacgccccagcatcgaaaaagcgccgccgaaagaaaaagaagaaggacggtttcgttgttccgatgcctcagatggaactggacgcggcttcccagctttctcctattcctggtctgcacatagggccggctcgagagccgaaatcggcacctcagcgtgagctggttcagtcttctccacggccgcagccccctgcagttactgctgctcctgcagcagagatgaaggcgcctgacgcagagcagaggagcacctatcagacgttcctgaacagacaccctgaactggcaacgaagttcctttggtacgcagacaacgtcgactctgccatccgcctctacaagcggcaccacccgctattccttttcaaggaaggtggtttccagcctgaggacgtaaccgccctgaacgaggcccactggctctggttcgacctgacctcacccgaacggttggtctacagcatgcttggcgacaagggcgtcgtactcatcagctacctggttgatgcgctggccgagttcagcaatggccgcttcagcgtgagtgttagtcgcccggcgacgtcgctcactgacgcagaaatggcgcggacggcacgggcagcaatcgagcgcctgcccgtcaactcggagacatatgcagtccccgtagttgtgttcactccgaagctaatcaccgcgatcgccagtgaccttggaatcagagaaccggacctaatcagggcgctaattgagacccaacaggtggtaatggaacgtaagaattacgtcgtcagagttgaagcgatgccggtgagctatgagtga

SEQ ID NO: 333316 - DNA, 1728 bp, Pseudomonas aeruginosa
atggcggtaatggcgggattcaccttgcgtcgcctgccatcggcaatccacctgtacaagattcgccagggcctctcggccaaaagcgccgtgatgatggggcaggatgagctgatcgagcgcatgctcgagaagcgccacatgatgttcctcggtgttggatttgaatggggtcagccagaagcgcagcaagtttttgagctcctgaagcgcgacgtttcgaaattgatgcccaaaatcccggatggattcatgggggcgccgtggatccatggcatctcaatgcagaaggacgcgccagttgggctgccacacgatcttgcgtcgcttcataccctaatcgtgggaaccaccggtagcggcaagactcgcctcttcgatttgttgatcagccaggccattctccgtggtgaggcggtcatcattttggacccgaagggcgataaagaaatggccgcaaacgcaaagcgcgcgtgcgagctttcaggccagcctcaccggttcaagtacttccatccggcattcccagacaagagcgtcaggatctccccaacgaagaactttggtcgtccaacggaggtggctgcccgtatcgctgcgctcatgaaatcggaaggcggcgacccgttccaggcctacgcaaacatggcgctgaacaacgtcatccaggccttgctcctctgcggagtgcttccaaccctggtggagttacgccgtgcgttggaaattggtttggcacccttggtcatcaaagctattacggcttacggtcgaacagtccttgatgatttcaatgccatcgctcaggcgaggcttcgtgtggctaaggacgtggaacagcaagcgaaggcgctcgtggggctttatcgctctgacattgttccggtgaagccttcatctgaccttgagggcgtgatcgggatgtttgatcacgaccgggcgcacttcggcaagatgattgccagcttgattcctgtactgaacatgctcactgcgggccacctggggccgcttctatcccccatggatgacccggaggatgagcgcgagatcactgactcgagcaaggtcatcgcgggcaagcaggttctctatatgggcctggactctttgagcgacgcaatggttggctcggccatcggaagcatcttccttgcggatctcgctgcggtgggtggcgagcgatacaacttcacccctgaaggccaatcgccggggaaggtaaacatcttcgtcgacgaagctgccgagaccgtgaacgaccagctgattcagttgctcaacaaggggcgcggcgccggtatggcgctgtacgtggcaactcagaccatcgccgacttcgaggcacgtatgggatcgccggccaaggcaagacaggttcttggcaacaccaaccatacgatcgcgctgcgtctgaccgacccggacacccagaaattcatcgctgaaaagatcccgccgacttacttcaagtatgtgatgcgtacgcagggcaacaccacgaaggatgacccgcatatgcactcgctcaacgttggcgagcgcttgatggacgaggagggcgaactcttcccatcgcagcttctgggatcgctcccgaacctcgagttcctggcaattctcgccggtggcaaggtttacaaagggaaggtcccagtcctcacgaaacccaagaacttcaacaaggccgtccaacgggcaggcctcttactatctgaggcggcataa

SEQ ID NO: 333317 - DNA, 441 bp, Pseudomonas aeruginosa
ttgcgtaatcgtgacgaacagctctctcgctacttcaaggatgacgagaaggcaaagattgtcctgcacatcctggaaaccgattggcccactgcaatgcaggtcgttcccagggcgctcgactacatgcgcactggtgagaatgtggcgatcggggagaagatcctccgagattcgctggcggcctacaaccaatctctgggtaagaccgaccaggtgcgacttaaagcattcctggatcctctgatcgatggtctatcgggtctgatcctggctcaaccgccggaaggcacctccgttcagttgatcttcgactccttggcgcatcacagtcccgaagcgcagaaagcagcagtacgccagaaaatcgagacgctcctgctgcccgaagatacttcgatcggccgcgtatggaagaacatcaaggccagggggatctga

SEQ ID NO: 333318 - DNA, 633 bp, Pseudomonas aeruginosa
atgccgagcgggttctggaccatgctcatattcgtcttcctagagatcatcctcatcgtctgcctggtcccgaacaagttcatcgacaagtcgatactgctggaacaggactggggtgagatgctcatggggaaggcgaaccatgacatgctgatcgaggacacgaacaacctttacacgagtctgatgctcaccagcggcgtcaatgaaacggtcaagttcttcttcattccgaccgaggaagagaaagctcgatcgaaaggctgggagcaccttggcgagctctggttctccttcattacggttcgtggtgaggcactgaccaaggtcatctaccacatctactatcgcatgctgctgctcttcatgtgggcaccgtacatggcggtgatgcttgcacctgccatcttcggcggttacatgacatggcatcgaaagaggtactcgtttgcccactcctcaccgttcctgaacacccacagctcgcgcctgatttggttctgcgtaattggcatcgtggtgagtttcctcgcaccgctacctatacccccgatgatcattcctttgatcgtcatcctgttgatccctgtggcctccacgctgctgatcggcaacctccccaagcgtctgtaa

SEQ ID NO: 333319 - DNA, 825 bp, Pseudomonas aeruginosa
atggaaaaagaaaaacgtctcggaactggcctgccgctacggttgctctgcctgattgcagtgagcctcgcgctcattgcattggccgccaactgggtcctctggcagcaggtgaagtccacgaattccttgatcgcacaggtgaatgttcggaccgctggcatcaagccatgggcgttcagtttggatgatctccggaccgctctcgaggacatccgccaggttggcgtactcgaaggaccttcggttcccgccgaaaacaagcctcgtgctctggaagtggtcgaacgccgttatggagacccagaggcgcagttcgaaattatcgagtacagcgatttcgagtgcagcttctgcaaaacctacttccccgtgcctaaggctctggttgatggctccaggggcaacatctcactggtcttcaagcatgtccctatccacggtgaagcgagccgccgtgaagccttcgctgcggagtgcgccggtgcacagggcgggaatgacgcgttcttccgaatggctgacgcgatctttgcctcgaccaacagcgacgggaacggcaccaacaagactctcagtgccatcgccagcgacctgggtttgaacggccaagagctttcgcagtgcatcgatagcaacttcttcctcaagaaggtcagggctgatttcaaagaagccattgacctcggtattgaagtaactccaacaacggttatccggcataagccaagtggacgcaccacgactattaaagaagccgtggctccggatcgcttgcttagtgcaatgggtgcaatggtaaacggcaaggtagagcagaaatga

SEQ ID NO: 333320 - DNA, 285 bp, Pseudomonas aeruginosa
atgaatccgattgaaattccgcaactggttgatgagccgccacatgtgttgttttggcagtccgatgaggttgcgccaatcggcatcggtctggtcttcggcatgttcactggttatgccgccatcgcgactatcggcgggtttttgctggcgcgttggtataggaagtaccgcgacgatcaccccgacggtttcatggcacacatgatttattggtatgtaggcctcgccggaacgtcctcggctcgcagcattcccaatcccttcgtgcgcgaatacaactga

SEQ ID NO: 333321 - DNA, 642 bp, Pseudomonas aeruginosa
atgaacttcaaactgttcaaaaataacttcacgggtacgcagaacgaaaataagttcttgcgtatcgcgctggttggtaatgttgcgctcaccttggttttgggtgtttttcttggcaccaaagacactgttgttgccatagttccgccgactctggccgagaacgcctgggttagtgctaacgaggcgtcccaaacctacgctgagtcgtgggcttactacgtagcgaatctcgtcggcaatgtcactccggaaaatgcggggatggtaagagccgcgattgagccgctactcgatacttcgatctatcaagatgcggttaataaaatcgaagatcaagttagcgcaattaagcgcgagcgcgtggttcttacctttgaggcaaaagggattacgcgagagcgcaataatccgaacaagttttttgttgaagggcgggcgaccatggtcggcgccaacggtaagccgatccgtagtagtgcgacgtatgaggttgaactgaagatccgcaactaccggccgattatcacgttcctcgatacgtatgaaggtaagccgaaaactgaagacgtactccgtcgtgacgagaaatccaaagatgcccgtaagcgtatggaaaaggccaacaatgaaaaccaataa

SEQ ID NO: 333322 - DNA, 1104 bp, Pseudomonas aeruginosa
atgaaaaccaataacgttctttgtgcgcttgcgctggctatcacttccgttggctttgcccaagcaagagagattcagattccgcagatggctactgcctctgccaagaccgaggtcgtggcaccgcagagcagcgtagaccccagtgagtacggcatggggtctgatgctgcaacagagcaggtaacgccaccacagatcacgccgaaggcttctgcgcctgctaagtcccaaacgccggcgaaggacgacctggtgcaagtgcagggtggcgggcgcgataaggacctgcccggtgtgtccgctgacgttgcgcagacccggcagtctgaggaatcactgccggtggtgagttcgtaccaggacgtagtcgttcagcctggtgtgaacaccataattccggctgctttggatcacctaaatcggattgtcacgccgtttgacaaaccgattgttcagactacttcgggtgctgaaatcaagaccgtggaaaacgttatttacgtttccacgaaagatgccactccagtgacgatgtatatcaccccaaaagatgacgaaagtgttgcgatcagcctgactctggctcctcgaaaggttccgccaattcaggcgaacttgattatcgggcagcccatgggtgggcaagggcaaggtgctccgtcgtttggtggcgcaggcggtgctggataccgttactccggccaggcgcgcaagtgggaagaaggccaaccttacgaggagtcgatcaagggcatcatgcgggctctcgcactgtcgaagctaccgaaaggctactcgatcggaaaacttggtcgatttgatacccttccggcttgctctcaaagtggtatcagcttcgacttctccaagtcgcaagttattctcgggcacaacttccgtgttgttgtagcagtcgctcgtaataatgccgccgttccgcagatgttcgacgagactgcttgtactcatcccaatattgccgctgttgctgcatggcctgaaaacatgcttgagcctggtcataaaacggaagtttacatcatcactcgcgttggtgagcctcaggcagaagaatcttcgcgccccagcttgctgaattaa

SEQ ID NO: 333323 - DNA, 1353 bp, Pseudomonas aeruginosa
atgattaaacagtacttcagtcgtctggacccaaaacatcagaagtgggctgtcattgggctggctattgcagcagtgttcctggtggtatggatgctttccctgttgggcggaaagccggagagatctgttcatcagaagaaaactattacaaccattcttacaaacaaagatccgcgagatgcggggatgaatgcggttgttgcatcccagcgtgactcggagaagcgtctgaagctcattgagcagaaccttaagacgctatctgaacagggctccaatcaggcagagctgaaatcccaagtaggggagttgaagcgtggcgttgacgcactgcagacgaaactgactgcagcggaagaacgtgctgcagccgtagagcagacgaacaagcagctacaggaggacctcaagcactccaaggacagcaccccgtcgaaggctgatggaaagacgcctgatgaactgaaggcggatgctgagcgaaaagagcggtccgaagctcgattcaaccgcgcggctgcagacccgaacaagaaccaagcagccttctttgctaacgctccgcagccggccgctgaaaccaccaagccgggacagggaaagaagaaggatgaccatgctggtattcgcactatcgaagcggcgccggtcgaagatccttcggacaagaagaaagcagatgaaggtatctaccttccggctggttccatcctgtctggtgcattgatcacgggtatcgatgcccccactggccagggtgcgagaaaagatcctttccccgttctgctgcgcatcaagaaggaagccgtactgcctaaccgcttccgtgccgatgtgcgcgagtgcttcctcattgccagtgccttcggcgacctctcctccgagagggcatacatgagagcagagacgatctcctgcgtccgtgaggacggtgcagtgatcgagaacggtatggatgcatacgccagtggtgaagacggtaaagctggtgttcggggccgcctggtctcgaagcagggtgccattctggctcgatctctgatggctggcttcatgcagggtgtctcggaggccttctctgttcgccaggtaccgagcatcaacgtcaccggcactagcggcagcggcaacagcggcaaagtcatcgacccagtctacgagcaggctttcaactcccaagccatgcaaggcgccgccatcggtggtaccggccgcgcccttgagcgcatcgccgacttctacctcgagatggccgagaacctctatccggttatcgaagtggacgccgctcgcgagatcgacttcgtcgtgaagaagggcacccagctgaagctgaagaaatccgcctaa

SEQ ID NO: 333324 - DNA, 516 bp, Pseudomonas aeruginosa
atgaccacgaagatccttcgtctcgcgctgttggccgcattcgcgtccggcatcaccggctgctcctacctccaaatcggggaaagtgagtacggctgtaagggcatgccgaacggggttacctgcatgtctgctcgtgacgtgtaccagctcaccgagaacgagaacttccgtcaggaggtcgaggcacaggctgctgaaaaaggggagggcgacggtggtaccgagcatgctcctgcctctgcagcaccggctaccccggcagttgaggttggagagcgatatgtcgtccctcgcccggcccgcaatccggtcccgatccgatcgcaagccacggtcatgcgggtatgggtagccccctgggagaacgacaagggcgacctgatcgttcctgggtacatgtacaccgaaatcgaaccgcgtcgttgggagattggtgtccctgcacctcgccccactccctcgcttcgcccgctggaaacacgacctactcctcccgcgcagcagggcaactga

SEQ ID NO: 333325 - DNA, 357 bp, Pseudomonas aeruginosa
atgaaagaccaaaccctaatcgctggtgatttccaaactttggaagagcaaaacacccgccgtcgccagaccgtgcaagccctcatggtggtcaccctcctgttcgcagcacaggttgccatcgctggtaccggcggcgacagcttcgacagcatctgggtgaccctcaccgactggatgcagggcaccctaggtcgcgttgtggcgggcgcaatggtgctggtaggcatcgtcggcggcatcgtccgccaatcgatcatgtccttcgcgaccggcgtcggcggcggtgtcggcctctacaacaccccgaccatcatcgaatcgatcatgaccgccacgctccacgtgcacagctga

SEQ ID NO: 333326 - DNA, 6762 bp, Pseudomonas aeruginosa
atgaaacccctcctgaaactcgtattggccgtatcgcttcctttcgtggccagcttcgcccatgcggcgtgcacggagcaggttgtccagttctctgtatcacctgaaaacgcctacgcggaccagaagatcgctgtcgaatataagtccgcgcgtaccgactgctcgaacgctggcggcttcacctatcccattaccatcggtggtgctgccagtgccgagctgggccaatgtaaagggacacgcaccaaagatattgttcagtgctctggtgaattcgcgattccagatggttttacaggcactctcgtggtgggcgtcaacggcctaactaagaaggtcaacgtggctgccgtgaacacggcacctgttgcccaggcgctcactgtcagcacaactgagaacgttccggtcgatatcaagcttcttgccaccgatgcggaaggggacgagatagtcagctaccagttgctgaagatgccgtacccgcagaatggtgcgcttagcctctccggctccgttgcaaccttcgctccggctcgtgactggaacggcaccgccgaattcacctatcgtgtccaggactcatcggggaactggtcgcaagaggttggtgtatctgtggttgtcgatgcagccaacagtgcccccactgtgatcagtaagacctacgtgggagtcgaggacaacccgcttcagatcacacccacggtcacggatcccgatggtgactctaagtttacgttcgcaataacgggcgatcctgccgcgcacgggaaggtagcggtttccgctaccggcttgacctatacacccgacctcgactggtcgggagaagatgctttctggatcaccgcgaaggatccaagcggggcggtatccgaaccagctctcatccgcgtacagattcagccggagaacgacccaccagtcctgtcgccgattaccctgacgatcgtagaagaccaatccggtacggcgcccattccttacaccgacgtcgatggtgaagggccgtatacgttctcagtcgtggcacagcctgcatcaactaagggcgtgtgctcgatcaatggcagcgtcctgcaattcacacctgcgaagcactgggccggcacgactacctgttcaattattggcatggacgcgggcggagctcgctcgaagccggtaaatgcgacgattactgtgacgaacgtgaacgacccgccggaggtacttgacgtcacagctaccctgacacagggcgaaaccaggacgatcaatctcaccgtgactgatcctgacgtcggtgataccaatgtggtccgcctggcgagcaccatcgatccaagcttcggcaccgttaccgtcgttgggaaggcggttaaagttgcgttgacgccccacttctcgggcacccaagcaatcaaagtggaagccgttgatgcgctaggcgcagtgtcggctccggcgacccttttcctgacagtgcttccttccaacaaaccgccggtactgcaggctgtatctattcagactgcgcttgatactccggtgtcggtgaagctcgctgcagttgacccgaacaacgatgccccactgacttacgcgctggcgcagaacactacggcagacaagggaagcttctccctggtcggcgcggatatcacatttaccccaaaatcaggttttgtagggacagccactgcatctgttaccgcggccgatccggcaggcgcagtctctactccggcggtaatcaccgtcgacgtaaaggctgaccaggcagtggcgtcggatcccgacatcggtgactcgcactcgatcatcatcgttacgcagccgcctacttccgtgggtaccgtctcggcaacgggcatgaatgtgactttcgagccagtgaagggctactacggtacagccgcgttcacatacaaggttcgagacgctgcaggcctggagacagacgtcgtttcagggcagattcaagtcgacaaatacaactacgcaccgaccgcagtcagtgggagtgcgaccgtactggaaggtgaggtagtcgaagtacctttgactgtggttgatcccaacccttatgaccagggtacgcatacgttcagcgttcccatccagaccatgactggattcgcgcaggtggtgggaaacaagctgtcctaccaggcacctgtcggcttcaccggcaatgtggcctttgacgtaattgcgactgatcctggcggcctttcggtgaaggacaaggtatcggtcactgtaaaaccgaaaaactacgccccgacgtccgtttcgctcgacctggccacgaatgagggcgtggcggtcactgggaagcctgtggtgatcgatcgcaacccccaggacactcacaccttcaaggttctttcgcagcccacaggcggcctggcagaggtcgtgtcggcaggcatcaagttcactcctctggcggggtggactggccgagctgtgttcgatatcgaggccaccgatcctgctggcgccacagtgaagggcaaggcgtatgtgacagtggctgcaagcaacgttgcgccaaccagcgtcaccgggctcattcgggtccctgaaagcacaccctctgctccgtactaccctacggtggtcgacccgaacccctacgataagggggtgcataccctgcaggttgtctccgccggtgcgcatggcgtagctacgatcatcgggaacaagatcgtctatacccccaatgaacagtacaccgggagtgacaccatacgagtgaaggctaccgatgcaggtggcctttcggtggaaggtgacatcgcggtggaggtcttcgaggtgaatcagcctccggccagcgccgctctccgaatctatgcggaggagggtgtggcgtccgaacctacactgccagtgattgaagactctaacacctgggatagcttcacctacgaggtcatctcccagcctagacacggccaggttgtggttactgaccagggttacgtctacaccccggaggagggttactacggaaatgacaccttcaatttccgggtggttgacgctggtggcgagttcatcgaagaggcagcgattgtttctgtagccctgcacaactatgccccgacagcgatcactccctcggtgatcaacttcatcgaaggcgtgggtacggaggcacggcttagcgcggaagatcgcaaccattgggcgagcttcaccttcacggtggaagagcagcctgagcatggggcgatttggttcgacaagaacaagcttgtctatcgtaccgacggcaaggtggagaccgctgcaaaggtgcgcgtcaccgatcaggaaggtctcttctatgtcgggacgattaccctgaagccgaagccggtcacggacgccatcaaggatcttccggtcgttgatgtagatggggctattcgcacgcctggcatcacacaaccaatgcgacgtctggatggcactccaggcttcatggttcgagacgctgctgccttggctggccttggcactgacgtcgtcgcggtcctccaggagggatcgaagaagcatgttgtcctcggaggccgtgagctggcaccgggtgaaggcatgcagttcccggtcgagttcctaagtagctcagcgcttggcacttctatctctgcctctgaggcggaaacagaaggcacggcgaaggtccttctggtacgagccgacttcaaaggcagcgtctatgcagtcccggtcgaattctggaagctgcgtgggcaggtgagcttgacccagtcgaccatcattcaggcattgcagcgcactcgtgcccaattcgtccctgagaccgctgactgcacccagacggtaaagattgccgaggcagcgaaggggaatgcctatgacaagcccgtttgcctgttggaattcgctgagcagctagaccaatcgaaggacctttccagcgattccacactggcgtcggatggcacctcgagcacacttgggcagcacaagattgtcgcgaagtcctacattgtggactccgcgcaacagcgctatgaccttgggacctatgaagtgtcggtggatgtggtctctggtgttggtgcagtcacgttggcgccgaaggatcctttcaccgaggccttctacaagatccaggacctgaccatcgaattgatgcaaacggctgggcccacctgtgacctcaccaccgttgagcgccgtgcgcagaccagcgctgcaggttattcggctaaaccaatgtgcctggtcgagtggactgacattccggctggcctgagtgttcgcgcaaactgggagaagccctatctgatgggtatctctcaattcctcggccagaacaaggctggttgggcgatctcggtcttcgacccagccgggaacaaagtctctttgggcaagggtgagttcacgttcgatgcagttgagccgccggcggtggagatcacctacagctccaagaagctgatcacagagggcctttacgctgcgtcgattgcgggtgacaacattggtgatgcccttatcaagtccgcccgcgggcagctgaagcttaagcacaacgtggaccgcggaaggacccaggaagaaaccgtatcaccatcttacgcagcatccagcaccatctatcgccgtatctactcggacgcattcgacaccctatgggaccgtcgcacagtgtttgtggatgctgggtactcgctgctaagcggttccgatgtgcattcggagatccagctgctctcggtgcctgaagaaagcatcatgccaatcatcgacaacgagaacggcaagatactctcgaccgactcactgcaggttggtgtcaccatgggcgacgcctacgtggatacccggacctatgatgcgtctgtgatgggccgctggcagattcgtctgatcaccaagcccaagtgggataccactgaggcgattaccgattgggtcgataccgatggcactggccatgcggacttcgaactgccgatggcgacgatcgcttcccagagcctacggatctacgcagaggctcgtattgtatcgccggtgcctgagtaccaggtggtgaggacgtcaccgaaagctttgagcatcacgattctgaatggcgcggcgctggatggatctgtccgtgcacttcggatgacaggtgaggcaccgttccgcgtgacgctctttgctgacgtgaccaatcgcgcgtggaccaaggaccttggtgcggtgcggtgggagatgtctactgatggtgggccattcgttgaggtacccaacacgtcgaaaacgcctcagcgcatggcaatgactttgccgaaaggtctgtacaaggttcgtgcacagctgacgaacaagaacagcggtgcactgtcgatgacggacgagattgaaatcgtcgcctacaacgtaccgaaagctgttctgaaagggcctggcaacacgttcgtccggtccaccgctacattcaaggcacgccagctggatggactcccagttgatctcaacaccgtgcaggttgaatggagccttgaccgcggcgttacctggactcccggagaagatacgttctcgatcaagcgcgacgaggagaaacgagagtacgtctatgtgcgcttgaagtacaaagatgcccctgtcgaagacccccgtgtttggaaaaccattcgctcgggtgttgccttccgaaaggtgcggccgccgcgcgttcagctgattggtacccgccggcctgagattggggttgagactgtgtgggtcgcgaacatgctcatgccgtacccgaacatggatctgaccatggacggcgagttcatcagcttcgatggtgacgccaccattccaggcaccgaaatgcgctatacggctactgatgctgacctcgatcgtgagaagcctcagctgtcctatcgagcatggatcaatgggtaccgggatcaggggggcgagggcatcacctcccaacgaatcacgttctggctgtacgactggcccgagtggagcattcagccgaccttcagtgccgagtacgccccggcagatctgaccttgaggatccgaaatatcggccaattcaaggccgtcgaaggcgtgtactacgattgggagctgccggcgatggcggggtatgacgtcgtgaaggacgacaacagccaactccggatactggctatcaaggaccctgacacctaccccttcaaggtccatgtctatgatgcgcgcgggaactactcgctggtcgagaaggaccttaccttcaaggttccaccgccgtggcagatcaccctggactactcgggcgacaacgatgccgagcgggccccgatgaacatcttagtgcgcccgaaaatctctggaggtcacccgaaagacgtaattaccgacatgcattactcgctcaatggccaggcgctggagacaggcgggtcacgttatgcgcgggcactactgccggatgaaggttcttacgacatcaaactgcagatcgccaccaggatgagcaaggccgccgaaggcgaggtgagcatcgatgttcaccagaacaagaagccgacatgcgacctggaagtgaaggagggcggctccgcctggaccgctaccgcgaagtgcaaggatgaggatggacggatcgctcggcacaactggtttgtgaacgaccagaagcaaggcctcggtgggtctgtgattacgatctcgaagcggacctacaaagagactccacgcatcgagctctacgcgacggacgactctggagaggattccgaaccagtggtctggtaa

SEQ ID NO: 333327 - DNA, 711 bp, Pseudomonas aeruginosa
ttgaagctcaaacaaatcctcatcggcgtcatcgggctggtcgtcgtggccggctcctgcttggcagcagatcaagcgcctgtcctgaaggacggcgttatcgcccccctgccgatcaacggcatggttgcggcaatgaagaacggcaacctcgcattcatcagtgataacggtcggttcgtgttccgggggacggtctacgacacctggtcgaagaagaacattgagtcgttggaggatgctgaccaggcatacaaaactatcgatgtgaaggagaccaagttccgcgttgacgatctcgccccgctgacgatcggcagcggcgacaagacggtcattatcttcaccgatcccttctgcccttcctgccacgttctcctcgaggacgtgaagaagacgcctgggtacaccttcaaagtcgtctacgtccccctcttgggcgaggacagccagaaagtcgtgaaggcaatgcattgcctgaaggacaaagaaaaagctgaaagcgtaatgctggggaacgccaagccgctttcaatcgtaggcaaggatgatttcgctaactgcgatacctcacccatcgccaagcggattgtgtccgcgcatatgttcggaattaaaggggttcccttcatgattcgagacgatggtctggttcgtctcggatatgacaagggggctcttaaaagttggttgtcgggtccgggggcataa

SEQ ID NO: 333328 - DNA, 2220 bp, Pseudomonas aeruginosa
atgatctcgttctgtctgttcgcttcgcagaacatcaacgcgcaagtcaattcaatgctgcgtatccgcctggcttacgacgacaacatcctcacccaggcaatcaagaaccgggcgtcgtatctcttcaacggcacgctgaacccgattgacgacttctccggtatcaagatccgtgagacccacgcgatcgtcaccgtgatcatccccacggatgaccttttccccactgagaaagaagctcagaccgctaccgagctgcgtgctcagttcgagtccaccttctcctcaatcggattcgcgccacgcagtctgacggccgatctgtacgtcgaaacaatgtcggcgatcctgaatcaggggcagggtgcgtcgtggcgtgaccggaccgacgcaatggcggacgacgacaagccgctcaagcaccagatccttgattacgaccgcacggtgaaggtccacgctgatcaccttgagatcggtgacaccctggtgaagacgctcagcgtcaaacgcttccctcgccaaacggttcagggggcagcagcctggtatctgggtgatctgctaaccggaaaaaacggtatccgggacaactgccttatcacgttcacgatctacttccctgaccagcaaagtctcaaagataagatgaacaccaagcggacctgggcgaataaccaggcctatggtccgattctaaagtttgtgccgatgctggctgcaaaaaagcgcggtttcgatgttctattcaaagagctcgatgacggcgaaacggcggttaaatgcaatatgtccattgttgtcttcgctaatgccggagacaaagatcggatggtgcgtgctgcagcagaggttaagaactacttcagtattcgtcagttcagtgtgatggaagacaagttctttattcttccgatttttatcaatgcacttccatttggtgctgacgccaaagcagtgaaggagatgtatcgctataaaactatggcgattactcatgctttgccgcttatccccatctacggtgactggaagggcaccgggacgccgatgatgaccttcgtctctcgaaatggtcagttgatgtcctatgacctgttcgactccgagacgaactacaacgcgacagtggctgctcagtccggctctggtaagtcgttcctcaccaactacctgatcacagcgtatcgatccgctggtgcgcaggtctgggtgatcgatgtcggacggtcatacgagaagttggccaaggccttcgacggcgatttcatcgagttcaccgagactgcgaatatctgtctcaacccgttcgaactcgtgaaatcgtatagcgaggaagaggacgtcctgattggcctgctggcagcgatggcggctccaacggtgccgctcgacgacttccaactcgccggactgcgccggcacaccgccgaggtctgggcggagaagtccaccgacatgatggtcgatgacgtcgctgctagctgcctgagcgatgaagacacccgaatcaaagatatcggccaacagctttacgccttcaccagcaagggtacctacggcaagtacttcaacggcaagaacaacgtggacttcaagaatccgttcacggtgctcgagctggaagagctcaaggggcgtaaacatctgcagcaagtggtccttctgcagctgatctaccagatccagcagaacatgtacctgggtcagcgcgaccgtcgcaagatcgtgatcatcgacgaggcatggagcctgctgactgagggtgacgtctcgaagtttatcgagcacggctaccgccgcttccgtaagtacggtggcgccgcgatcaccattacgcagtcggtaaacgacctgtacgcaaacccgaccggccgtgccattgcggagaactccgcgaataccttcctcctcgggcaaaaggctgacgcgatcaacctgatcaagaaggagggccgcctgtccctctccgagggcggcttcaacctcctgaagactgtccacacgatgcgtggccagtattcggagatcttcttcatgactgagcatgggtcgggtattgggcgcctgacggttgacccgttcagcctccttctttactcgactgcgccggacgacgtgcaggcgatcaacgaccatcgcagtgaaggtctgtccatgaacgagagcatcaatgccgtgctccgtgaccgtaaccagttgaaggcggctgcgtaa

SEQ ID NO: 333329 - DNA, 360 bp, Pseudomonas aeruginosa
atgcaaatcttccaaacccttttgatcagcgccatttgctctgtcctgtctgttgttgcatacgaccagttcctcgccgtgaagcccacaccggtagctgtggccaactacgaccttgccctcgagaccgtgcccgacgccaacgaagctctttcggttctgcgttcgaaggccgcgcttctggcggctgaaggctatgtggttatcgattcacgcgcgctccttggctatccgggcgacgtcgagattccgcgtgaggcacttctctcggcggcgccggcggctgacaccgtaccgtctgtgaagggtaatgctgttaccgcggcagcagtcgaggagatggagaagggcggtgagtaa

SEQ ID NO: 333330 - DNA, 261 bp, Pseudomonas aeruginosa
atgatcaaagtgatcgatggtttgcctggtgacctggtgaaggtgacgaaggagcaggtcctcgtgaacggctctccggtcggtgaaggactccagctttccaaacccctaaagcgccctgagggacgcttcgttcgcgaggaaattgtcccagacagcaagtactggttcatgggcaagacgctcgatagcttcgattctcgctactggggctatgtctccaaagatgatctgatcggcagggcgtatccagtatggtga

SEQ ID NO: 333331 - DNA, 1206 bp, Pseudomonas aeruginosa
atggtgagctttcgccgcaaagtcctcggcgccattctcgctggcgccgcaatccatgccctggccagtcctgtggagcttccggacatcgatgaggccactcgcaaagagcttggcacccttcagcaatcaacgcagcagcaggtcgatcacctcatcaacagtggcgatatgtcctgggcttcagaccttgagaaagaagcccaggacgttgtcgcgaatactgcaggcgtcgaaaagaaagagccgaaacaccctcttggcgctggtctacgcaagcttattttcgtttcgtggtcgatgagcagttacgagttgaaagggctcctgcaggagcatcaaggcgagtccaacgtcggcttgatcttcaggggcattccggacggtatgtcgatggtcgatgcgctggcgaagatgcaacggctatccctgcagacgaagtccaacgtatcagtactactcgatccggtcgcgttccagaagtacagcatcaccgtcgtcccggcggtcgtgattgaggatggcgatgatctcaaggcgatggccaaaggtacatcgtccactgcgcgtgttgaggacgcgatcaaggaaggcaggaagggcgaccttggttttctgggcccgacacttgagattgcggagcgcgatctgattgagcagatgaaggagaagtttgcctcgctcgaccccgaggagatgaagcggaaggcactcgctcgattctggaagggacagaccatgtttgaccttccacacgctgaagaagatcgcacccgtcgtcttgacccgtcggtgacggttcagcaagacatggttactccagacggcaaggtcatttaccgcgctggtgacgtgatcaacccactgacggttcgacccttcacccaacggatgctgatcatcgatccctccgtccctgagcaggtgtccctcgcgagggagcagatcgaacgctttggcaaatctcagactgtcacactgattttgtcatcagtggatgtagaggccggctgggacgatcttcagcgagttcagggagcaactggtgttcccgcctttttgctgaaggccgacgtcaaagagcgttttgcaattgagcgtacaccgtcaatcgtgaccgctgaccgccagtcatttttcatcgaagagagatatgtgggccgggggcaggtcaatgatcagactagcgattcagtcgatccatga

SEQ ID NO: 333332 - DNA, 702 bp, Pseudomonas aeruginosa
atgatcagactagcgattcagtcgatccatgaagcaaatcagcagatctgcgggcacgagattctggcgcgcaagctccagaacggaaaacctgtagctcctggtgtcttcatggcaaccgggaaggtgcgggagtggttcgacctggacatggccatctaccagttggttgctgagaaccctctcctgcgcaaggacccatggcctctcttcatcaacatgtcccctgcgacccttgagcacatgaacctctttgcgcaggcgctgccgtgcatcgagacgatagcgtcctcgcgccgggcaccgaccgtcattgagatctccgaagagtcgtcccttgactcctatcagctggaggtgcggcttgattcgctgcgccataccggcgtaatggtcgctatggatgattttggggtcgcctactcgaacatcgatcgtctgcgggcgcatgaatggggctactgcaaaatcgacctccagtctctcagtgacgcggagaatctcgactggctgatagaggcgaaggtcctttgcgacgaacgaaacatcaagatagtcctggagcgcttcgagtcccgtaaatcgcgcgacctcctgcatcccttcaacaactgcctttaccaggggtacgcgttttcgcgtcctcgcatgctaaacgagctgctccacttcgcgcgtccccgctctcaagtcttgggttag

SEQ ID NO: 333333 - DNA, 825 bp, Pseudomonas aeruginosa
atgtgccagaaccgactgggcatctacgaacctggcatcgtgaactcgatgtgggagccagcgcggatgatcgaggtcgtccggcagcctggctgtgccatgtcgctgggtggcgcggtgctgccaatcggcgacaaacgatcctggggtacgcagtcagatgccgtgggggggaacaacatcacgaaggagaagatgtcgttttaccacgtccactactacgcgtttccgttgctctcgattctcgagatgtacatgccgaaacgctgctcgcctgacggctacagcgacttcgacatcatcgagctcactgagatcgatcccacctggaacaacgacgagctcgctttcttcacgcatcccgaatccgcagctgtggccaaccctttggcacaagcagcttgcactgccgacgcagctcttggtgtagcaggtaaggaggggctgtcctccctctggtggtgtgctggcacatggggaagcgtgtaccccatggcaggcacggcactgccgaacgacttcgggagaaccacgtctctgctggccacccggaccatcgcgcagatgcaccgtcgcggtatggcgcacctcaccatgggggacgacaccatctgccgcggcatgatcttcccaaccatcccaaagggccaatacaagatggcttcgtttttccctcggccggagacgaagaaagggcatttcattggctcgcatcccatgacctggcagggaggtgagggccgcgtcatacccgtcactggggaagatgccatgtatctgatgttccgctggaacgattgctgcaacacgattggagatgactag

SEQ ID NO: 333334 - DNA, 3405 bp, Pseudomonas aeruginosa
gtgcctatcaagcctctggtagcggccgctacgctcttcttctacgtgtatggctcgttgctcccggcatgggccgacacgatctcgcaatcggccgcggacggtaatgctgcggccaccgaggcgctgaacaacttcagtacaccttctgtctcggatggttcgatcatcttcgggagcggcgatgcacagcagaacatccagatcagtgaccttttcccaggcgtaggtactggtgagagtcaggagcagctcgaggatctctatggaaacgacaaagagactctgagcgtagggagtagcgcgaacgcccgtctcaaggctgaggactcagcgagcggcgattcctaccgactactccttggtaccgcaacgtctactcgtccgaatctgaccaacgatcctctgtggaccaacacagactcgatcatgaacaaccagtccacgttcgagaaggacttcgccgactgcaaggcgaacaacacgctcacgcagaacagctctaccaagcacatccccgacaacaagacgtgcgagcggatcaataagcctgctggcgcctgtgacatctcccacgacgtggaaatcgaacctctgcccaccgatttgttcttcctggtggacaactctggctcgatggaaggggcaatttcttccctgcgcgagaacgtatttcgcgtagctgagctattgggcgtacggaacaagggccagctgcgcattggtggcgccgtttcgcgaaacaaccaatggttaagcaaccatgtgaagctcaccgagggcgtggacgccttccaggagtggatcaactccgtaaacatcagcggcggggataccagcaactttgctgcgttcaactgggctgtggccaacaactactggcgcgacgacgtcaaaaaggttgtggtgatcatcggtaacaaggatggcggtggcagcggtaaggccgaggtgctgagctcgatcgccgctatgggtatcgacgtcttcatcttccacgacaactccgatatcaagtcgatcggcacacctatcgcgaattccttcactgccggcggcttgatgaaggtcgcccagttcctcacggtcgttaaagattcgtggggacctgaagactgcgtgcaggctgcaaaatcgaccaaggacggcttctgcacaggttcttacgcggtaacctccggcggagccgagtgcgtgaacttctcgggtttcgacgtgtgcccaggagacccgatttacgaaaagctgactgacccaccgatcccagatgtgccgaagaccgccgtgaaggtttccgtcggccaggtgagctgcccgttcaacgaaggggcgatggattgctataccgatgcgaacggcaatgagcagtgcccaacaaacaccgacaaggtgtgctcggtcaaccacacggtgaacatcaagcagatcccgctcaccgccaaaattgccgttgaggactacgtgggtagctccgaaacccaccaggtggttgtcgacttcgtcgaaggtactgtcaaaaggaagaacctcagcggcaacattgtcggcagcgtaacgaaggctaactacagctatgtctgtggggcgactgcgaatggcagagacctgcctgtcaagtttacgctctcaagcattggcggctgggctgataacccatactcggccacgaccataaccgacggcaccgtttcggtgacccaagttccaacctgcgagaacggcctgcaggcggtgattaatatcgcagaccatggcgtaggaaaggcctcgtggtactttgccaatgctgttcagttcaagggtgtccagctggcaaacgaggcttggagtacgcagaactgcatcgatgcagcgaacaagatcaatgctggccagtgccctacaggcaacgtgcgggtgaccaaaggggttacctctggttgcctgacactagggggtgtcgatatctgcccaggagattccttctacaacaagatgctgccgtcaccgatacagggaatcgacaagctggcgctgcaggttcgggcagaaggctgcatcgagaatggattgcgctcgagcacatgcgctgaccttgaagccaacaagtcttgcggtttcataagccagaagtgtgtcgacggtgctcagggggcatctgggtactgctacgtccaggaagaggtatgggattgcggctatggggtcgaagtaccttcggccgagctggagacttcgtaccaatgcgacggtccggtgcgctgccttggcaatgagtgcttcaacccaacagacgaaaagtcgactgactttgcgtacgcagctgcatctctgcagatcgccatgttcgcagagaacgatctggactgcggtgaagaaggaactggtaacgccgactgccggatctggaagggcgaggcaatggaatgcaagaaagctgtcggtggctgggttgactgctgtgaggcccctgaaggcgtatcccttatggattacatcaacctgaccatgaacacccttcagatcatggaaaaggcaggtgtgatcaacaacgcctccatcatcgacggcgcctggacgtatggtaaggaaatgatttcaacggcctggaatagcgtcttcgcgtcggcaacagatgccgcgacaggcgaagccgtcaagcaggtgggtgaacaggtagggctgcaggccatcaagcaggccctgatgaacaaggcggcagagtggacagcgaacaccttcggcgccgcggccgcgaatacgatctttgcttctggaaccgtcggcgggcaagcaggcggggagtacgccacaacaagcgccaccggcactaccacgacggctaccaacgccaccttcgcgccgatggtaggcgccgcgctgtcggtcatcatgtgggcctacatgatctaccaaatcgcgaacatcctggtccagatcatctgggagtgtgaggaggatgagttcatgcttggagcgaagaaggagacaaaggtctgtcactacgtaggcagctattgtgcgagtaaaacgccctttggctgcattgaaaagcgagagtcctattgctgtttcaactcaccacttgggcgaatcatccaggagcaagcccgcgagcagctgggcgaggaatggggcgaagctgagaacccacaatgcggtgggcttaggatcgaggaaatttccaagctggactggtcgaagatcgacatttcagagtgggttgggttgctgcagatatccggcaactacccgactgtagaggggatggacctcgacaagttgaccggggagggaagcgtactcaacgtgaaaggcgggcgtcccgacaccctcgagcgtaacgtcgaccggcttgatgggctggacctgggcgaggcgcggaaaactgccgaagactcgatccgatccaccgttggccaatga

SEQ ID NO: 333335 - DNA, 714 bp, Pseudomonas aeruginosa
atggctaacggcaataccttcgaacccaccagcaaatacagctcaccatcccttgattcccagatcaccctcaagtccgagcaggcaatccgcgtgtttcgccgttgcttcgagaccgccggccactcgctcttcgtaatcgacgtcgtttcgcgcgctctggcaaacgggtccaaagactcggaatacagcaaggtggagggcgttgtcagcaccatgctgtccgatatggagcagctgatttccaacgaaactgagcgtctgaacacgcttctcgaagccaacggccagggccaccagaacccgagttacagcaaacagaacgagttctcgttcaagatcagctcaccggtcattctgcgcttcgcgaccatcctgctggcattcgaccacatgatcacgcgtatcgatactgcttggctgtgcggtctgatcgatacccagaaagcgatggatctgcacaaggaaaagcttcactggattcagcgcgtggtgcgcaaactgcaggcccactccaccgctgcgatcaagcgcggtcgtcaagcgaaactcgaccaaggcatgctcgacaacctgcagaagaaaggcgagaccgctgcagcgcagcttgatgccgacgacgatgcgctggctgaggcggccgagcaggctcaagcgcaggcccaggccggtgcagcgcaacagcagagcgacatgccagccgtaaccgcctaa

SEQ ID NO: 333336 - DNA, 132 bp, Pseudomonas aeruginosa
atgaaattcatcctcgctatcgccgttctctcggctgccgttttccaatacctgccttcgcacgtcgaaggttcgcaagtggtttcggcaatgcaaaagcatcagcaaatgatcgcggaggcctcgaaatga

SEQ ID NO: 333337 - DNA, 321 bp, Pseudomonas aeruginosa
atgagcggccttttcataactctcgctgtgcttttcttcgtagtgggattcctctacacccgtcatttcgttaagccgaaaagcaaaactcctcgccaggagccttcggttgagcgtcgtgacggttatgaggaaaaccagcaggcgtcgcccttcatggccgaacctgcgaaagcagctccgttgaagctccaatctcaagcctcatccgctccgcgcggtgcgactcgagtgaatcagcttcccgatcagccggactattccgaatatgacgccccgacgttcctgagaaggaacgttgagctcagcttcgccgcctga

SEQ ID NO: 333338 - DNA, 198 bp, Pseudomonas aeruginosa
atggcacacgtagaagccgtctacctaatcgatctgaaagagttgttgtttcctggtgcaaacgagaaggtgatcaaggtcccagaccagatcgcagagaccgtttcaccagatgtcctggatgttcgctacgtgcggaactgggccattaggaacaaccacatccccgctaacgcggaagtggggatcgtctgctga

SEQ ID NO: 333339 - DNA, 867 bp, Pseudomonas aeruginosa
atgcattccattttcatcaacagcaacaggttgatgggtattgcctgcagtgatcctgtttcacatccgttgtcgaacgggaacaaggtggtgaaggtcagccttttcaccaagcgcagatggatgacagatgaaggccggaaggaagcgaccgactttcacaacattgccttctttggcaaagcagctgatgaagcgctgtctatccggaaaggcatgttgttctctgtcctgggtcggaatcaaacccaccagtttgaggactccaacggaggcccgaagcgtaaccggacggagattgttgtcgacgcccagggtgaactcgaggtcatcggagtcatcgactggaagtcgcaggaaagctttcccttcatcaacagcaacaggttgatggggatcgcctgtggtgagcccgtctcggaacctctttcgaacggaaacaaggtggtgaagcttagccttcaaaccaagcgtagctggacgacagctgagggccggaaggaaacgaccgaccttcataacattgccttctttggcaaagcagctgatgaagcgctgaccatcagaaggggagtggttgtctcggtccttggccggaatcaaacccaccagtttgaggatgccaatggtggtccaaagcgttacatgacggaggtcgttgttgactcccaaggtgagcttcagatcggcggttttactggtcgaagctccgctgagcgggtgccgaaaccatctgcgccgatacaacatcagcagcctccgcaacccgctcagcaggtttcgggtgctgtagatgaacccctgtacgtcgatgactggacggacggcttattcggtggggacgactacatccccttcctcgactaa

SEQ ID NO: 333340 - DNA, 1182 bp, Pseudomonas aeruginosa
atgtctgcaattcaagatctcgccaacaagtgccaggctctgatcagtcgatctaaggctcgcttcatcgataccgcttcggcggtgccgggggggctcatcttcgagactgagaaggtctatgcgattaccgcaatggtcaacaatgagtacctcgcgaaagcggctctcaacaaccctgtcagcgtcgatattgcaatggctcaggttgctgcaactggcctgaccctggaccctgctatgcaactcgcatatctggttcctcgtgacggcaaggtcattgctgaaatctcctatcgcgggctgatcgatatcgcaatccgctccaaagcggtgagcttggtgaccgtaaaaccggtctactccaacgatctgttccgctttaagggcgacaccacacaacctctccatgagtacgatccgttcctggatgttgagcaacgcggtgagttccgtggtgcttactcctgtgcgtacctggcgaataacatgttgctggtgacgccggttcgggcgcaggacatctacgcggcacgtgagctctcgtcggcttggaaaaatgccaagcccggtaagagcaaaggcccttgggagtcccacttcgaagccatggcgctcaaaacctgcgtgaaaatttcgcgtaagtattggccgctgagctccccggtcctcgagcaggcaattgcatacctgaacgacgcaggaggagaggggttcgcaagcggggcctttaccctggatatggccgcaaacactgccagcaacggcagtggtgggcagccagagcagggtggagaggtgatcatcgaaggcagcattgtcgatgttgagcctacccccgaacctacgcagaacgctgctgatgcgaccccgcctcaacagcaacgatcaaccgcttcgcagcaacaccaggcgcgtcaaggttctgcaaccgtgacgcaactggaaccgcgtaacactgggggcaataccggtgctgacggcggtgaagagaacatcctcaccgacgccatgcgggaacgagtagataaggttattgctcgaacagcgaagcaaggaacttggaaggcctgtgaggactggatgcgcgaccacttgaccggcgctgcacttcagtacgctcacgagcaatttgcatctgctcaggcggcagcccagaaccctcaagctgcagcaggctaa

SEQ ID NO: 333341 - DNA, 1017 bp, Pseudomonas aeruginosa
atgaaatttgttgatctgaggcagcggacaccggagtggcatgcttggcgaaagcaaggcatcaccgcgacgatggccgcaccgattgcgcggaagcatcctgagaagtccccgtggcgactctgggcggaaattcaggggaaggtgccggtaccggatctttctgcgattccgcaggtgcagatggccatctatctcgagccacatgctcttagctggttcgagaaagagtacggtggcgaatgcctcccgatttgcggggagcacgaggaacacccggtaatccgttgcagttttgacggccttctggaaaccaatgaaccagtagaagtgaaggtccacgcggacagcatcttctacgacgtcctccacaacggcacatcgtcagctgcataccagcttcacttctggcaggtgcagcatcaaatcatggttgcaggatccaagcgtggttatttggtcttctaccacacacgagaaaagccacttgtctttgagatcgcgcgtgacgaggcagttcagcggactttgcttgtcgaggagctcgcgttctggaatctgtgttgcagcggcaaggaaccgatcaaggacccagcgatcgacttctaccaaccggtaggtaacgatctgaatgaatggatcctggcggcggacaagctcaagcgactggagcgaatcaaggaccggttggaaacacggttgaatcacgtgaaggcgctcaggtcagtgcatgtcggcgagctggtagacctcatggggaactacaagcttgcagaggagcacggtgtgcgcgtaactcgcttcaaccaaagcggcaaggttgattgggatcggttgatcaaggagcgctgccccgcgatcacaccagaaatcatcgatcgataccgaggcaaatcagcggagcgtgaaaggatcaagatcgatcctgaaaccccgctggccttggcttctgtgcagttgctcatggctcaaacagccgttgactctgaacaggttgctgaggcattttgtctgtga

SEQ ID NO: 333342 - DNA, 1005 bp, Pseudomonas aeruginosa
atgaaacttcaacctctcgtgaacatgagcgtgttcggtgtcgacaacgccagtcagctggcgcacggtttccctgccgaccacgaattcatgcactacgtgcccaagctcgacccgcactacgagttcgagactgagtaccgtcgaccgatcatgaacttcctctatgccccagccggtgacgcgctgggtctggtaggtcctactggttgcggtaaaacatcccacctggcgcagatctgcgcgcgtctcaactggccgttcatgcgtgtgaactgccattcgcgcatggaaattcccgacctggtcgggatgacgggcgtcgattgcgatcttgcaaccggcgatcagcgcacggtgttcaagcacggtccacttgcactggcaatgaagcacggtttcgtgttttgcctggatgagtcggacgtgctggatcccagcgttaccgcaggccttaacgcagtgatggaaggtgatccgctggtcattccggaaaacggcggggaggtgatctatccccacgaaaacttccgtttcgtccagtgctcgaacacccgcggtcagggtgacgataccggcctgtacggcggcaccatgtcgcagaacctcgcgtcctgggaccgttatcgcctcctggagctcgactacatggcgccagcgaaggaagtaaaagtcctgagtcgtcacctgtcgggggcgccggttgatgtcctccagcgcatggtggacgtcgcgaatgctgtgaggaaccagtttgttggctccaatggcaccggtgacaagaacctcaccgtcacgttctcgactcgaaccttgcttcgctgggctcggatcggggttacctaccggaagagcaacgttcaagcgccactggcaactgctctgcgtgaggcactaaccaaccgctgtgaccactcgcagcagttggcaatccacaagatcgcgcaggacaagtttggtggagcctggatgaacgacccggtcatcccgactgttgtcgtgtaa

SEQ ID NO: 333343 - DNA, 441 bp, Pseudomonas aeruginosa
atgttttacatcggcaatctgaacgggcctgacgctcgagacgaaatgaccgtgatgctgcagggcttagcctctgcagcatccgcggttctgaaggaaggatctcttgattgggtgattgctcaactgcactccgagttgggagcttcagaggtcaaatcggaccaactcgatgagttgctgctatcggtggctctgcgccacaggtggctcaaagagggccgggaggagggcttcacattgaccaacgaggccggtgtgaatctgtccttcgagaaaggtgtcgaatgggtctcctgcttacaagcagctggcgcattgacacctgaggtcctcgatcgaggtgtgatgatcctggagcttctgggtgtagtggataaggccccagatgttgcgggcctggcaaacgtcgaattggaaggctctgacttttgtctgtaa

SEQ ID NO: 333344 - DNA, 1092 bp, Pseudomonas aeruginosa
atgcaagttaatcagatcaacgtcctcaacaagatccttttggttggcattcagatcaacatctggtctgcgcgcaccaagctcgaaccgcaagacctcgggctcaacgagaaggacactccaccggctgagcttgcctccttgggcactctgcgcagcattgatcccgaatacatctctgcgttcgagcagctgcgccgcaaggcaaagcgaatcgtcaagaagatgggactcgacttcatgggagtcttcgcaatccctgaagacaaggccgatgcggtcaatgccgcattggaggaggttgagcaggagtttctggcgctgcgctcgaagttcctgaacgagtacgaccaggccgttctggcttggatgaaccggccgatgccaacgcaagctttgaaggacgcagtggttcgttccattgtccccaaagcgcacgtggctgaccgcatcgcgttcaagtactccctctgccgtatctctcccgaccggtcccccgatctcaacaagcagcttgagcgcgaggtcaatggccttcatggtcagctgttctccgagattgccgacacggctgatgcgcttcttcagaagagcttcaacgggaaggacaaagtcggtcaaaaggctgtcaactgcatccgccggatccatgaaaagctgctctctctggctttcctggatccgaacgtgcaggcacttgccgaccatgtgcaggcaaaactggctgacttccctaccaagggtaatgtcgaaggggcaaagctgcgggagctcgtctctctgctgacaagccttagcgacgaaacaagcatcgaaaagatcattcacctgttcaacgacacccagggtggcgtacaggtcgaccaggatctgatcgaggctgcagatctgccggttgttcaggcagaagtagtccaaagcagcggatccgcggagtttgacttcgttgccgctgaactcgatctcgaccaaagcagtgttgtgccggagagtcgccttgattccatcgtccaggctcccgccgtggtggatgtgatcccggtggcccttccgctccagcctgctagtgcagtcgaagacttctgtctgtaa

SEQ ID NO: 333345 - DNA, 1743 bp, Pseudomonas aeruginosa
atgaaaggttcacttcaaagtgctgttccagtcatcgtgcgttactactgcgagaacctgggcatgcgcgtcgagtttggtgcgagcggtgcttatcacgtaccaggtgtgatcggcttgcccaatatggacgagtcggaagactctctggttatgaccctcggcttcagtgcgcatgagtctgcgcacgagaaattcactgacggtttgattgtggaccacctaccggcggaccacccaccgtttgtgaagagcttcgtcaatgtccttgaggacattcgaatcgaatctctgatgttcaaggctcaccccgccaccgttgcggatctgtcccatgtggtcagaaagctgttcagtggcaagtttgcaaacgaagacgcacacgaagcggtggttctgcacgacgcatgcctgttcatcggtcgcgccaagctactgaaccaaccgatcgctgatgtcgcccaaacccatctgcaggcactaaaaagtgtcttcgggccgggtcgggcaacaaagatcctcgctctactggggcaggtgacttcacttccggataccaaggctacagccgatcttggctatgcaatcttggatgtcctggacgaggaagagcctgaagacaagccgaaccagcctaacccgcaggaccagcaacaaaagccggatggcagcgaggatgaatctgacgaccctagcggtagcggcggcacgccggcgcgacccgatggtgacgcaggacagcctcgtgatcctactggctccgagggtgctcaagctgcaccgagtgatcccagcgtacctagtacaccaggtgcacaaggtgaaccgggcggtgggatgaaagacaaggtcctttccgcaggcagcgatgtgctgggtgacctcaccagtgaccttggtgacgagattgcagcacgcatcaacaagctgcgcagcaaagaaggagtcgcaacaccggcaaccgtgtcggcagcacctccaggcgatgaaaagctcgctcctgagctcgtaatggccggtaacgctgcttccgcaggaatacgtcaggttctgatggggttgattcagggtacccagaacaaccgtgtgcatgcacggcggcaagggcgctcgatcgacgcaaagcgcgtttcacaactcttggttggggataaccgggtcttccgcgtaacggaagctgtgaaaagcgtgaatgcaaacctgcagatcctcctggacggttcaacgtccatggaaggcgagaaaatgcggaaagctgaaatcgctaccattgccgttctatcggccttggagacgatccagaacgtcactactggtgcgatggtgtttccccggttggttgaccgaaaggtctctgtcggtgttctgaagcgtcacaaccagtccttgcgtgaagctgtcaggcagaaccgcttcggcatagctgccaaggggggaacaccgctggcggaggctatctggccggcagcgggtgatctgctctacgcgaaaggtgagcgcaaggtgctgatggtagtcaccgacggtgatccagactgcgtcgagcaagctcaggaaatggtgcagcgctgcagtgccagtggcattgaggtgttcgccattgcttttggaaagggcgtcagtgacgacaagttgaatgcggtgtacggcaaaaactggaggtctctggacgatgtcaatcagctgcgtgatgcgctgtttgcactggtccgggacatcctgacgaacaaagctgcggcttaa

SEQ ID NO: 333346 - DNA, 417 bp, Pseudomonas aeruginosa
atgcaacttgccatgcttcttgaagaaacccatgaaggcccgattccgatcgttcaggctcgagccaaaagggcttacaggagaacggttcttccgaaggtagaacgtcagctgtcgctcctcgacatcctgactctgccagagagtgagctgggccctgtcgaagagtggaccgatgatgaaatcgcagaccttcgcttgtacgtcctgcacctgtcaacgcatgtcctcctggacctgcgagcaagtgcaaagagtcggaaggaaagcctcgagtggatcttcagcgatgctgagggcccgttctcgtttaaaacctgtgtggctgcagaaggtggtgactggattactttccgtgaggaactgatccaactctgcgcctaccgcaacatgccgatcgaggtccctgtcctctga

SEQ ID NO: 333347 - DNA, 204 bp, Pseudomonas aeruginosa
atgtccagaaagaaagtcagcatccccgaagccgttctgagcgcactgtccggctatcagcccagcgtcaagctggccgatatctacgacgaagatgaagaccttcggtccgccctcattgagggtgtaccgggcttcgagtatcccaactactcgtggatgaccattagccagctgcagatgcacttggctgctgccgcctaa

SEQ ID NO: 333348 - DNA, 765 bp, Pseudomonas aeruginosa
atgcaaaaatctcacaagttctctgacgcaagtctgcaaacctttccgtatctgcaggcgatgtccttctcttctcgcagtgagcttgaggagttcacacgccagcagaatcagctggctgttcagtccaggaagagcttcgacgaacgcctgatgaagctgaaggaagagggcggatctctccgcacttaccccacgcctcaccaggatgtactggatgattgcatggtagataccgcgctcctgaaggccatggcccgcaatctatccgtgaactcacccactgctcccgcttctgagactgcacctgcagtcgctcctgtggcggcgagtcaggtcccggcggaactcgatccatcggtctcgttcgagggtatgtacgagggggttgagatcgatcccgaatacgacaacagcatcgctgttggtcctaaagacgagctgcagccggtggcaattgactggacgaatgcatttgtaggggagatcacccactacggccgctacccgttccagttcaaagaagagaaccgcaaaaagaacctcagctatgtcatccggcttggctcggagaacatctggggtgtggggctagaggcggtgatgcgtcagcacaagttcaagaagggcgatcgtattgctctgaagtgcattggctccgaccccgtcactgttccagaagagggccgtgatgaccaaggaaatgagcaggtcattttgcggccggctcaacgaaagaactgggttgctaagcgcataggttga

SEQ ID NO: 333349 - DNA, 498 bp, Pseudomonas aeruginosa
atgaatcggaatgaaatcgtgagcgtggggtttatcagctcctttggcggccaacagtcctacctgattcgcaccagggaaggtagccatcgtgttgaggctcactatcctgagtcggactatcaccgcagcatctcctgctacaagggcgccgactacgacaagcatgtggccacgaggatcggctgctacaccggggcgagtgagatgctcactctcgacgttgcagtggagttcaatcggctgcgctttgccgagagagacgctcaggtccagaccatcctttccaacaaggaacgctacggtgagtacgatcctgttgcggaggagaatctgttcacagtgcttctaccagcgtcctacaacctcagtgacggctgggttgcgcttttctcctttgagcaggtgcgcgacctggctgggatccctgcagaacgatgcacatcgctctacagcgggtacatcaaggcgccggcgagcaaccaggttgctgcctaa

SEQ ID NO: 333350 - DNA, 1542 bp, Pseudomonas aeruginosa
atgactaccgttattacctgcaaaattggcgattcgaaaggcgtaccgcgcatctggctcgagggcgaaaagctcgcacgcgccggcgtgtccgtcggcgccaagtacagcatcaaggaactgcctgaagaagggagcatcgagctcgttccgcttcaggatgccctgggtgcaaccacaacctgcaatgtctcgaagcgcgtccgaaacggcattgagaggcctctgatggagatcaggaccaagttcctgtcgacgttcttcgccggcatggagaaggtcagggtcgccatcaagcgcggccgcatcatcgtgtctgcgctgaaaatcgagctgcagatccgggcaagggttgctcgtctcaaggccaagctcgctgcgaaccagaagctgaaagtggcgtcgcttttcatgggcgcgggggtcctcgatcgggcgttgcacatgggtttgcttgctgctggcgttgccagcgtcattcagatcggcgtggaactggaaccggagtatctagagtcgtccttgagaaacaacgtggtgctctgggacgaagactctgtagccgcgtgtggtgacattcgcgacctggagctcggagatctggttgattgtgagtcggagatacttgcagctggcgttccatgcactggggcgtcaatcggcgggcttgcccggctaggcctcgataatgcggaggatcaccctgaggctggttcgctcttcgttgacttcattgaggcggtgaagctgttcaatccggccgcggtcgtgatggagaatgtgaagacgtatcgaaataccgcttcgatgtcggttatccgctccaagctcgagtcatacggttaccaactctttgaggaggtactggatggcaacgacttcggcgcacttgaggacaggcagcgtttggtgttggtaggcatcacacgagggctcgagactgacttcagcttcgacaaccttcgtgcgacggtcatcaagcctgcgagccttggagaggtccttgaggacgtccccctagactcgcctagctggaagccatacgagtacctggttgcaaaagaagccagagacaaagctgccggaaagttcttcgctcggaccatggtaaacccggagtcagaacgagttccgaccgtgaccaagttctacgcgaaggctcagtccactggcgtttttctacagcaccctacgtctcctttgctgagccgcctgcttacgccggtggagcatgcaagggtgaaggggattcctgaaagcatgatcgcgggtctgtccgcgacagtggcgcatgaggtccttggccaaagcgtggtctttccccaatttgagtcactggggcgagagctggggctggcgctgaacatggtgcatcgtgatcccgaaagggttctggagctccggtctggcaagtctgtccgctcgcaacatgaacgaagcgaaagcgacgttgatgcaggtgcgcacgctgaggtggctgtagtggttcccacgccgctaccgatggttcagcagcagttgttcgagttcgaggctgcatga

SEQ ID NO: 333351 - DNA, 666 bp, Pseudomonas aeruginosa
atgaacgtctatatccacaacaattcaccccttgcgcatcgtgtactggtgtcgatcgacgctgagaacgtggtggcgtgtcctatcaaggaggcgttaagtgaggcagttgatatcgctatcgccattgccaagggggagatcgaaggaccttcgactcctctggccttgtacggcagcgacgttcgcgccttggggactttcgtcgatggcgacgtcgacttagcctgcaaggtgcttctagtgacctatctgggggcttcctactgcatcatctgcggtccggagatgcgcaagctctcccaggtggaaaaacacctgaaggaaaccatcggaaccaccgccgtcgagatcatgccagttgaggatcgttacgtcggattcgcgatccgagatcactatgagctggcgcgagcagcatcgcgcattactgtcgtgatggacgatggcgtggtgactcatgttgaagcggttggggtcccccggcatgttcgcgtgaagatctacaacgtggtgcacaaggacgaccgggcctacctcgaagagggtgaactcggacgcctgacactccgcgaaggcctggtgctcgagaacgtgaaagagatccctgccgatctggtcttcattgaccttccagtcgacggtgccgtctttcacgccaactag

SEQ ID NO: 333352 - DNA, 375 bp, Pseudomonas aeruginosa
atggattttgaaaacctgagcgtcaaacccaagaccaagctcgtgacgctgcacctctacaaggtgactcgtcggcagtatcaagaaaccctggaggttcctgagaatgccactccgggcgagatctcagctatcgcagaggcacggttcgctgccctcgacgacaagcaattcaagcctgatcggaagtaccgcaagcgtgaggctttcgtcagcagtgagggcctagtacgtggcgttgatcgccctgctttcaccgcgctgcgaaatactgatggaaagatggtcgtctccgagaaagcacctgtagtcgacacacaggcgccggagtccttggccagctcactggccgtggttccttaccagcgtcactga

SEQ ID NO: 333353 - DNA, 246 bp, Pseudomonas aeruginosa
atgcacccaatctctgaagccgcgaagctcatggggtcgcgcaagatcgttcggactggcactgccaagaaggacgataagacgatctacttgtggatgctcgacgacgagaagaccctggagctcattcgtggcaagcaaggcttcaccagtctccgagagcgcgatgaagggttcgaggagctggttgagtactatggccgaaacgcgaaagtgttcgtaccgcttctgagcagagttgcttga

SEQ ID NO: 333354 - DNA, 885 bp, Pseudomonas aeruginosa
atgaaatttgctacgagcattgtttcttaccccaacagaggtaaatggggctcgtcgaaatacagaggcaatacaactgggttcctgtatagggatttcctagacacataccatactagacctgatggccttacttgtgatccctgtgttggtggtggaacttttgctgatgtggccgcagatatgggggttcgctttaaagggacggatttgcatcagggcttcaatcttcttcttgatgatttctcgacctttttaggtgaagaagctcacactagcgtgtttcatccaccctatcaatcgatgatattttatagtggaaatatgtggggtgagccaaataaatgggacatgtctaggatgggcatggtcgagttcacagaggcgctagaactggcgatcatgaatattcatggggccatggagaaaggtgggcattacggaattctcatggggaatcttcgtcgcaatggtgagtactacaacttgtcgtcgcttgttgagcggcttgcgccaggtaaactggtcgatgagataattaaggtgcagcataattgcgtttcggactcgactgtttatcgtggtaattttgtaaaaatcgcacacgagaaacttttaattttccgccgagataagcatgagttgttcttcctggcgtccgttgaacagcgggctgctgccatgaaagggatcacctggcgagcggcagttcgaaaaattctgctgggtggtaagactatggctcttaaagagatatattccgccatcgaaccttacgctaagtctcgcgacaattgtcacgtcgaggcgaaagttaggcaggtggtgcagaatccaaaatactttgagcgggtaagttcgggggtctatcgcctggctgcttaa

SEQ ID NO: 333355 - DNA, 741 bp, Pseudomonas aeruginosa
atgaaaattgcacttctctctgatgctacccaggctatcgtcgctgccgcgcttgcctcctatcacaaggaagccatccaggccggtgacgcagttctcgtggcacggattacttccgctgagtctgagttgctggcgccgatccagggcgcctctctggctgttgcggcgaaagctgctggcgtggtgtacaccgacttcgccaacaacgcctacggggaaggggacgataaccccttcgtgaaggctgcccgtgcagctccttccgatggagtggacttcgacgacctggtagtggtcagccagagcggccgcggcgcgtacgtctcctgctggcactgggtggcgaacgctcaggccggagtaccggagatatcggaactcttggaagaactgctgggctaccttggcaccgtggagatagacaatctctctgcgctggtagcctctgcagacctcaagctgttgcgccgccagcgcgatgccgtcgaggatctcgtcgtacatctcgccgacgaactggacggcctctacgacgcagaaccgtgccttccggactcgatcgtgcacaagccttacgacctgggcagcggagtggttgatacgttcccaagctgcatggtgaagacgctgattggagtagctgagagcgttggcttcaatgctccgaagctcgtcatcctaaagcgctggcttgaggagaacgggcgaaagcttgatcaccttgtcacgacgctttag

SEQ ID NO: 333356 - DNA, 2859 bp, Pseudomonas aeruginosa
atgaaacacgaatccaaaattgacctgagcattcctcaggaaatctcgactgctgttctgatcgagaagtacgccaagggcaacgaagccacccaagaggaaatcttctctcgcgtggccaaggcgcttgcatctgtcgagagcgaacctgaacgttgggaaagtcatttcctcttcgcgctgcgaggtggattcattcctgccggaaggatcatgtctgctgcaggtactggcatccacgcgactctcgcaaattgcttcgtcgagcccatcgcggacactttccgtgggaacctgaatggtgttcctgggatttatcccgcactggaagaagctggcgagaccatgcgccgcggcggaggggtgggctatgatttcagctcacttcggcccagcggcgcccttgtaaaagggacgcaatccgaggctagtggtcctgtcagcttcatgcacgtttttgacaaaagctgcagcacggttgagtcggccggcgggcgccgcggcgcacagatgggtgtgcttcgcgttgaccatccagatatccgcgacttctgtcgtgccaaacgtgaggcaggggttctgaccaacttcaacgtttctgtgggggtgacaaatgccttcatggaagccgttgtggccggtgagaagttcaagctggtccatgtcgctgagccgtcggagaagcagaagcagaagggagctttcttcgaagatggccactgggtgtacgaggaggttgaagcctcagatctctacaatgagatcatggagctgacctacaactgggcagagccgggcatcctcttcatcgatcggatgaacgaagaaaacaacctggctgggcttggcgaggtactggctgcaactaacccgtgtggagagcaaccgcttcctccgtatggatgttgctgccttggctccatcaacctgtcagccctggttctcaaaccgtttactgcagaggcctgcgttgactgggtgagcctggctaccctggtgagcaccggcgtccgcatgctggacaacgtgctcgacctgtccttctggccgcttgagcaacagcggaaggaagcgatggcaaagcgccgcataggattgggcttcactggcctgggcgacgcgctgttgatgctgcaggtgaagtacgactctgaagaggcgcgcaagctcgcggcggaaattgctgcgttcatgcgtgacaacgcgtacgaagcctcgatcaacctggccgaggaaaaagggactttcgatatcttcgaggcagagggctacatgaagtcgccgttcattcagcgacttcctgccgcccttcaggagcgcatccgcactacggggctgcgtaactctcacctgctgtcgatcgctcctacggggaccatcagcttggccttcgccgacaatgcctcaaacggcattgagccggcgttcagctggacgtaccaacgaaacaagcgtgaaagcgataattccaccacgcagttcaaggtggtcgaccacgcctaccgggtgtggctcgctcagggcggctccgaaagagagcttcccgagtacttcgtgaccgcgctgtcgatctcggcggctgatcacatggccatgttgacggccgtacagcccttcatcgacaccagcatcagcaaaaccgtgaacgtcccggaggattaccctttcgagcagttcaaaacactctacttggacgcatggaaagcaaagctgaaaggcctcgccacctaccgtccgagcgatgttcgtggtgctgtgttggttgcacctacggctgagaagtcgaaggaagaaaaatccgatttcgatgatacggatccggatcgccgcctggctctcgacaaagtcccccagcccgcgctggcgagtctgcgttggaacaagcggccgcagttggctgccggcaacccgtcctggacctacatggtaagtcgccctgatgggcaagactttgctgtggtggttggccacgttgagagtgaaagcggctcaaagccgcagatgcttgaggtgtggatcaacggttcggaggcgccccgcggtttgggggcaatcgcgaagagtctttcgatggacatgcgaagcgcggatacccgctggctgaaagccaagctggagtccctgcagcgtactgccggagaggatgcgttcgacatgccatgcccgttcctgggtgacgtgaagcgcatgcctagcagcgtcgctgcgatggcgtacgtggtccatgctcgctgcgagcaactcggtgtgtttgaagaggaggggccatccccgatctttgatgcactgatgagcccgcgggaaccgaaaactactccccaggggacaatgtcctggtgtgtggatgttgtgaacccgtccatggatgacgatttcacaatcttcatcaaggagctccagatgcctgatggcagtcgccggccgtactcggtgtggctgtcgggcaactatccacggacgttggatgggctctgcaagagcttgtcgtttgatctacgcgtcgtcgaccccgcatggggtggcgccaagcttcgtcagattgcgagttactgtgaggctcgaggagacttctttgcaaaggttccgggcagcgacaagtccgaaagccagccgtccaccgttgcttacgtggccaaactcattctgcatcgcttggcgatgttgggagtactggacaaggatggacacccgatccagcagctgggctacttccaccaggaaggagctgtagctacagtgagcgcggcgaaatcagtgtccggaatgaaggcctgtcctgagtgcagtcagtactccatcatcaagaaagatgggtgcgaattctgcactgcatgcgggcaccaaggcagctgtggttga

SEQ ID NO: 333357 - DNA, 285 bp, Pseudomonas aeruginosa
atgtctcaccaaaaagaacgcccgccctggtatgcgccgataattcatttcgcgacgcactccgttgtgggtactctcatcttcctgattgtaggggcaccatccgtgctacttggatggctcgtgcatcgtttgaaggcctggcacgtgagcgaactgacgctcacgatcctgactttcctcgaggtagccatactcctgatggattcgctcctcttcctctgcttcctggttttcactacctggagcgcagtaaaggaattcatgcatgaaacgaatgactag

SEQ ID NO: 333358 - DNA, 186 bp, Pseudomonas aeruginosa
atgaaacgaatgactagcgaactggcggcttctagccccataaaagtgtgtttggctgaggtgcttaaggccgctcgtgtcgctccagcgatttactttgctccgatcctgggagcgatttctggggtagcacgacagtggaacaagcttcagcatcaggccgtcggcaagcaaaagctcgcttaa

SEQ ID NO: 333359 - DNA, 138 bp, Pseudomonas aeruginosa
atgagcattcgaattccagagttggtccaaagcgtttggcgcgaggtttccgtggcagcgaaagctgcgccggcgatctacttcgctcccttggttggggccgtgaaggaagtcaaagcgatggccaaaggaaagtaa

SEQ ID NO: 333360 - DNA, 321 bp, Pseudomonas aeruginosa
atgaaccttcaccaagtcctctgcagccctggcatggaacaactggcacaaagcgccagtatccgcgccggcgtatttcgtcgtagcggtcttgccgtcgacgatcttcaaatgctgacctcggccgagcgcctggatctccaatggatccagtctcagctgacgatgaagaacctttccagtgcgaacgatcttgctgagcatgatcggctggtcgtgctccttcatcgtgaaactggtgagtcccaagcctggctacaaaagcttcccctcgagcgcctgcgcacgatgatggacgctattgagtctcgctgggcgtaa

SEQ ID NO: 333361 - DNA, 372 bp, Pseudomonas aeruginosa
atgcaatcgaatatccacctgcaaaacatcaacccggcaatcgagctcaaccactacgaagaagtcatgcagcagcggcaaaagcagctgtttggcgacctggtgatggagggccacgagcgaatcctgctcctcgatcccgagcaacgctcgccctaccttgtgtgtaaggccgcggtgaaggagatggagatgcgcgagccgctggccagcaaaggggttaaaactcccgaggatcaccgcgagtttatccagttggtccacgatctcagcactgtgtactcggccattccggcatcggagcttcgtggctactcccttgatctcctgcggtcgatggagaaggaagcgaagagtcggttgacggcgtaa

SEQ ID NO: 333362 - DNA, 132 bp, Pseudomonas aeruginosa
atgtgcattttcacggtaccgatttcgcagcttacggaggtcggccagggctatttcttcttcaacgggcaactcgtctgctgtgacgttaaccgcggccgtgtgcgcttctgcggaggcatcccgaagtga

SEQ ID NO: 333363 - DNA, 144 bp, Pseudomonas aeruginosa
gtgaataagcaaaagcccgaaaaaaatcagcagcccaatcgcgtgattcctcccttccatgcctattcggatgacagcttcgttcggatgatgtccggcatgatcggacttgatccgaaggcggagcaggggaagaagaaatga

SEQ ID NO: 333364 - DNA, 777 bp, Pseudomonas aeruginosa
atgtcgcttactaccgcacttgaaactttgatggctcgcaacctggccaaacacggttaccccacgtccaacatcagctggtcgttgggatacagccagggtgatgggtcctccttcacgggttcgctcgatctcgaagtactggggacccgtctctgcccggagatttccgcgggcatttggccaaccatcagctgttcgctctccatcgaacgaatctccagcctccgctacgtccacgagtacagcacgcgtctgaacatcgacgctaagtgcatcgagggcacagaagccagtgagtacggaggtctggcgcagaaagttgcgctgcacagacttgtcggcttgctcgaggaggacatcgtccgtgtcgcgcggaagaacacctccgacggctacaagctgcaggagagctatgtgacggaggaacagtgcgtctggtcgttcaaaacagcctcgttcctcgtcagcgttaccaagctcaaggatgacgacggctcgccgttccttgatgacgatcctgagtacctggacaaggacatcagcgatgtcatcgagggcaaagtcagcatcttcggttcgaaggtggtgatctctttgctcgatgctgatgatgaacccagcacggtgctcactaagcactacacctggggtcattgccacgactctgacgatgcaaccctgcgtggcttgcgtcgtgaactcgtctcggaagccattcagatggctcgagaggcatacagaaaactgctccggccggcactgaaggccgcgtag

SEQ ID NO: 333365 - DNA, 1140 bp, Pseudomonas aeruginosa
atgtctaatggtcacaacttcgacgctactgttgtccgggatgcggcttcggggaactgggaacggatcatccgcgccctggtacccagcatcccagaaaaggcttactcgaagcttggtagccacgtcgcttgccccgtgcaccaccagggcagtcagaaacgtggcgacggcttcaagttcttcaagaaagacttccacctctccgggggtgggatgtgcaattcgtgcggtccgtatccggacggcttcgcgctgatcatgtgggcccggagtttcacgtttggggaggcacttgaggccgtcgcaaacgagctgggcattcggtctaaggaagatgagcgggcgcaagcccagatcaaccgtcagaacgaagctgagcgtgcagagatggtccggcagatccagctcaaacgagcagaagatgacgcgcgtgcgcgtcgaaaactgaaggagatctggtctcagaccatccctctgctacacccggatgctgagccggcccgacggtatttcaacaagcggaagattcgctgttgggaccgcaaagggattgaaactgttgtgcgctttcaccgcgggctgaaatcgtggaatgaggacctgcagtacgagggcaccttccccgcgatcgtctgcctggtgaccaacgccggcatcccgatcaccctccaccggatctacctgacggaggagggcgagaaggctccggtcgaaagcgctaaaaagatgtgcgagtaccccagtgatcgttcggttaccgggggcggcatcattctaggtccgtggactggcacgatcgatatagccgagggggtggaaaccgccatggctgttgagaccgcgactaagttgacgtgcttccctctggtcaatgcaactcttctcgaagaattcaggccccacgctggggtgacgaagattcgggtgtgggcggacaaagaccggtcgggaagaggggaagaggcagccaggaagctgaaggagcgcatgagcgaattcgggatcaaggtggccattatgcttccactcttgcctattccggagggtgcaaaaggggtcgactggaacgatgttctcgtcgagctggggatgctcgggtttccacggcagcaatctcaggagcgacgtgcagcatga

SEQ ID NO: 333366 - DNA, 300 bp, Pseudomonas aeruginosa
atgagccagcgtagccaatggctgttcgatcccttgtttgtcgacactacacctggtgcaagcactctgtgcccgttctccccgccgcgcgacttcggtgggggagcgggggagtacctcagcttgatgcggcttcgctatcgcgacgtcagcttcaaacggtacttccgggcgcggattcaggccatggaggcagacgacgatgtgactgtcaccttcgaggggcccttcaaaacggaggcattggctgtgctagccaaaatctctgatcaacacaaccaacaaaaaagggctagctga

SEQ ID NO: 333367 - DNA, 735 bp, Pseudomonas aeruginosa
atgacattgcggaacgtacaattcttcactgaagaaacagaggtgccaggcgtatatttggtgtctttctccggggactctcgcttttataattggttagaagttcatctctctcggtcatttggtaaaaatgcacttgactgcgttgagctttatggaatttggttctttttgatttttcttgaggctgcaggtaactatcggactgcgcgaaattttggcgtaaccgtttcgaggccatcggtgcgtaagcatcttttggagactgtcgagtctagcgatatagctcctcacgcgaatgcagcacgaacgatcctctatggaattgacaaaataggtctcgaccagcgtccaggctgggtctccagggccaaggaagagggaggaatagcggttcagtgggatggggatccctgtccttatcagacagttcccaacgagcgctttggcgccctgggtatcacctatcacgctgttgatcagtacttcaatcgcaccaggcgcgaaggaaggcaagatcaaatgttgtcaaaacttcaaaaacttgcccgtgcggctacacatgaagttgagttgcctaaggacgtacagtttagaaagatcctgactcatggattcgagcagaagtatataaaaacacttgcagctcccagaggatggatgttggtaactgcgcctgataataaaagaggctacttgcgtgtcatctccgtttaccagtccaacatcgggtga

SEQ ID NO: 333368 - DNA, 423 bp, Pseudomonas aeruginosa
atgggtcggttgtggaagtacgttaagcgtcttcgtagtgagattatgtctctgatgaaggtccacagcccatcggcctgggaagaagctcaggcgctcaaggacgatgctttgatcaactttctcgccgatcagccccttgttaggcacggtatttgttatcacattcttggagatgccggctttcgtgaagggtgctatgtccagaagcttcacggcggtgatgttttcattctgaaacgttgcaacattcagttcgacgaaatcggaaatccactgctgatttctctgatgggcgtgagggatgaaagcgagaccccagcgatcattggccggattgaagagtttgtgagcatggagactgggtaccagatcctgccatcgctgatcttcgacatgctgcctgacgatagctccgcctga

SEQ ID NO: 333369 - DNA, 1302 bp, Pseudomonas aeruginosa
atggccatcgggaacgaaaagccatttccactcttcgattcgtactcggagttcataaagctgaacttcaacgacctctcgaaagagcgtcctatcgttatagaccttttacgccaggctgaccagtccgctgatccggtcgacagctatctggtcgtccgtgatttccttcattcctacgatggtaacgaaggtactttcaattcctaccggacgcacgctgaaaggctacttctgtggtgcatgctcgtagcaaagcttccgattctgtccatgaggcggactgaggctgaagccttcatggagttctgcatgaggccgccggcgcactgggtcggcccagtggttaagtcgcgatacgtccgactaggtggcagaaagaaagctccttcggacacctacgtcatcaacgaagcctggcgaccgttcaacctcactcagcccaaggtggtccgcaagctcgcagaggaagcgaacgtggacgcgccggcgccgcaggcgtacaaaatgtcgagcgcctccacagcacaggtttttgccgcttgccagagcttctttcaattctgcatcgatgaggaccggactgatgccaaccctttcagagcgatcaagcaaaagtcgcgcttcactcaacgcgaaacccgtgagaaaggctcgaggtcactgaacccactgcagtgggacttcgttattgagacggccgaactcatggctgaagaggatgccgagcatgagcgcacactcttcatcttggtgacgttgttttctctgtatctccgcatctccgacctggttgggcgcgacaactgggagccgacgatgggctcattccagaaacaaggggatgactggtggtttcacgccatcaggaagggaaacaagaaggccaaggtcagcgtccgctctgactacctcaggtacctgaaacggtatcgggcaactcttgccctgtcaccgcttcccttccctggcgagaccacgccgctgttgcgtactctcaatggtcgcgccgggctctccgatcgtcacgttcgagagttgatccaaggcgtattcgacagagctgtggagcgcatgaaggccgaaggccaacctgaggacgagatcacgaacctgcgtgcagcgtctctacactggctgcgccacaccagcgctactttcgacgccccgttccgtgacatgaaagatctgcaggctgaccttggccatgagagcctttcgactactcaagacaactactacgactcgctcgacggtaagcgggcgtcgtcggtgaaggaccttcttgttaaggggcactga

SEQ ID NO: 333370 - DNA, 318 bp, Pseudomonas aeruginosa
atgcttacgattgcccaggctgtaacaccctcggtcgcacaccactctggcggcagcgccggcatcagcaaaaccacctacgaccagctctatagccggttcggcgcggttatcccgcgcgacgaggtggctaagctgctgtcctactccacgacttatttcagcaaacgcatcggcgacaagaaactcgaacatcttccgtgggtgaaggcgctgaagccgcatcgcctgcgccgcggccgccgcgcgtactttaagacgaaggcggttgctgagttcctggaccttagcggcctagactgcagcgagagtcgctga

SEQ ID NO: 333371 - DNA, 675 bp, Pseudomonas aeruginosa
atgatttacgaaagcgtttcaagtgcggtcgtttcggcgctggcagcagactgcatcgacaacacaagcaagcaggcatggcaaaagctgtatcaggccggcgagcctggtcgtcgtggcggagtgatggtatccgctgatctcaggcagcaaatcgattgctgggtacatgctcgcttgcatgaccaactcattccgcgccactgggcggcgctggtggcgaagtacagcactcaccaggctaagaaagttcaggcgatctctcttctgcggtcggtggtcgcaacgccggctcctgctcttttcctctacaaggctataacgacttgggcgattccgaaattgaagggtgtccagccggcgctgcggaaaaccgtctctgtcgaaatcccagtggacggatcaccagaaaagcaagccagggccgtgcgcgccgcgcttgaggcagagcgagtgaagcggaagcgccttatggctcgatcgtctggaatgatcatcctgccggatgagttctacgacatgaacacatgggatctcgatggaaagcccgaatcgactcggcgtgagtggcgcaggaagattcatcgtgttctcgacgaaatggtcgacgaggcgctggtggcggccgagcagattctcaacgcggagggcttgctggccaaggatgcggcatag

SEQ ID NO: 333372 - DNA, 240 bp, Pseudomonas aeruginosa
atgctcgggttcacgacgaaagctgaggcgcgacgcatcggcgcctcgcaccacgggagctattacggcattccgatgtggctaggggatgtcgatagcgattgcccgctagctttcgcaaagtgggcgccgcttgagctggtcgtctccctgctctcggtcattgagggcatcgtcaactcgatgctcgatcaagagcagacgttcatgttcaaggttggtcggaggatcgaccagtga

SEQ ID NO: 333373 - DNA, 1500 bp, Pseudomonas aeruginosa
atgtttcccaatagcccgctcgatgaagctccgcaggtatgggggtggccatggcacggcctaatacgacagccaatcaacgccgttgattcgacattgacgttaccaagcgggcgaacgatgaagatgccggcggtcaggacagcaaatgatactgcgctctggagtgtaggtatgcctgtcccgaacgtcgaaaccgatgaccctgacgagcgctggctcaaccgagcgatcatgcgcggaaccggactagccgaggcatacggaggggtatcactccagccggcattcatccgtgggtacaccgtccgttgcggcgttgaggttgcgttcaattcatttctcggaacagcatccgcaatctgctctattcgggatggtgtaacaggattcattgggcagatcacaagcaacaccatcgcgccttctgcgctgggtatccccgtccagccagcaggtatgtcttttcaagtcctagatgtaaatcacgacggaacgcgccgagtgttccgcgtcgactatcaagaaactgttgacggaacggtgattgctggcggcatggtggaggtgcgcattagcgcaagcggagcgtccggattccaagctgagttggttgtcgtggctacatggagccaggttcagtttgcaacgttgtccagcagtaagccggacgttgacccgaatactcatacgcggttctggtgggacagtgcgagcggctcctacgtttcaggaacaagcgatccccctggaataccggtcgatacacgcgtactccagggaggctggactgctagcctgcaagctgaagcgattgccacggcttggtacggaatgtccggtggcttggaattcgtgcggataggggtcgatctggtctccgctatacagcgcgccgcaagtgctgcaggtgatcacgttgcgttcagtcagaccgacgatatgacagttgtatatacactgcggtcggaggcaggggaggcgaccgtaactctccacaataccgttgttcagtcggggtcaattttcgggactggcggtcctgggactgcgctcatcaccgatagcattgatgggcagactgttggcactgggtcgcagagcgtgactttgagtgatcagtacatatacacgccagatgtgggcgacacatatgcacgcggtttgaactggaactctcgcatccagctattttctcaagtgctggatgggcacctgtcgtcgttcggtgtgcagtacgcatggcctgtccagaggtactcaaacaagctgctcggtatcgttgcagtccggcatagcgcagtaggcacgcctgatgagcgatatcgatttgcaggcgcggcattcactcctcatggagtgcacggcactagtcagagcgacgtggatgttggtggattctctgccgtccagcttgaagcgtggggtaagggctcctacaaccctctaaccggcgacgctatacgcaacgacccgaacgccttctattcctacgtttga

SEQ ID NO: 333374 - DNA, 240 bp, Pseudomonas aeruginosa
atgatcgactggagccaggtaaagaccgctgaacagcaggcgcaagaacgccggcaggctgagtacgatgccgcaaccgcggcgcgggcaaatgcctaccgcctggagagtgacccgctcaagaccgaggccgagttcgacgctatcaaggccggcgtggaaccggactactctgcctggatcgccaaggtcgaggagatcaaggccaggtatccgcttccggacgcgggcggcgtgtag

SEQ ID NO: 333375 - DNA, 2853 bp, Pseudomonas aeruginosa
atggacaagacttaccagccgcacgccatcgagacttcctggtacgagacctgggagtccaacgactacttcgctccgagcggcgaaggccagccctacaccatcatgatcccgccgccgaacgtgaccggcagcctgcacatgggccatggcttcaacaacgcgatcatggacgcgctgatccgctaccgccgcatgcagggccgcaacaccctgtggcagccgggcaccgatcacgccggcatcgccacccagatggtggtcgagcgccagctcggcgcccagggcgtgagccgccacgacctcggccgggagaagttcctggagaaggtctgggaatggaaggaacagtccggcggcaacatcacccggcagattcgtcgcctgggctcctcggtggactggtcgcgcgagcgcttcaccatggacgacggcctctccgaagcggtcaaggaagccttcgtgcgcctgcatgaagacggcctgatctaccgcggcaaacgcctggtgaactgggacaccaagctgcacaccgcgatttccgacctggaagtggaaaaccacgacgagaagggccacctctggcacctgcgctacccgctggtgaacggcgcgaagaccagcgaaggcctggattacctggtggtcgccaccacccgtccggaaaccctgctgggcgacgccgcggtcgcggtgcacccggaagacgagcgctacgccaagctgatcggccagttcgccgaactgccgatcgtcggccggcacatcccgatcatcgccgacgagtacgtcgaccgcgaattcggcaccggctgcgtgaagatcaccccggcccacgacttcaacgactacgaagtgggcaagcgccacgacctgccgctgatcaacatcttcgacaagaacgccgcggtgctggcccaggcccaggtgttccacctcgacggcagcgtcaacccgaacctcgaccccagcctgccgcagagctacgccggcatggaccgcttcgccgcgcgcaaggccatcgtcgccgagttcgaggccatgggcttgctcgagaaggtcgacgaccacgcgctgaaagtaccgaagggcgaccgctccggcaccgtcatcgagccctggctgaccgaccagtggtacgtcagcaccaagccgctggccgaagacgccatcgccgccgtggaagacggccgtatccagttcgtgcccaagcagtacgagaacatgtacttctcctggatgcgcgacatccaggactggtgcatcagccgccagctctggtggggccaccgcatcccggcctggtacgacgaggccggcaacgtctacgtcggccgcgacgaggtcgaggtgcgcaccaagcacaagctcggcaacgaggccgagttgcgccaggacgaagacgttctcgacacctggttcagctccggcctgtggaccttctccaccctcggctggccgcagcagaccgagttcctcaagaccttccaccccaccgacgtactggtcaccggcttcgacatcatcttcttctgggtcgcgcggatgatcatgctcaccatgcacctggtgaagaaccccgacggcaccccgcagatcccgttcaagaccgtctatgtccacggcctggtgcgcgacggccagggccagaagatgtccaagtccaagggcaacgtactcgacccgctggacatcgtcgacggcatcgacctcgataccctgctgcaaaagcgcaccagcggcatgatgcagccgaagctggcggagaagatcgccaagcagacccgcgccgaattccccgaaggcatcgccagctacggcaccgacgccctgcgcttcaccttctgctcgctggcctccaccggccgcgacatcaagttcgacatgggccgcgtcgaaggcttccgcaacttctgcaacaagatctggaacgccgccaacttcgtcatcgagaacaccgatggccaggacaccggggtcaacggcgagccggtcgagctgtcctcggtcgaccgctggatcatctcccagttgcagcgcaccgagcaggaagtcacccgccagctcgacgccttccgcttcgatctggccgcccaggccctctatgagttcatctgggacgagtactgcgcctggtacctggagctggtcaagccggtgctgtgggacgagaacgcccccatcgagcgccagcgcggcactcgtcgcaccctgatccgcgtgctggagacggccctgcgcctggcgcacccgttcatgccgttcatcaccgaggaaatctggcaacgcatcaagggccaggccggcaaggaaggcccgaccctgatgctgcaaccctggccggtggccgacgaaggcaggatcgacgccgccgccgaaggcgacatcgaatgggtcaaggcgctgatgctcggcgtgcggcagatccgcggcgagatgaacatctccatggccaagcgcatcgacatcatcctcaggaacgcctcgcccagcgaccaccgccgcctggccgacaacgagccgctgctgatgaaactggccaagctggaaagcatccgcgtgctggaagccggcgaggaagcgccgatgtccgccaccgccctggtcggcgacatggaagtattggtgccgatggccggcctgatcgacaagagcgccgaactggggcgcctggacaaggagatccagcgcctggaaggcgaggtcaagcgcgtcggcggcaagctgtccaacgaaggcttcgtcgccaaggccccggccgacgtgatcgagaaggaacgcgccaagctagccgaggccgaacaggccctggccaagctggccgagcaacggcagaagatcgccgcgctctaa

SEQ ID NO: 333376 - DNA, 978 bp, Pseudomonas aeruginosa
atgatgcaggcctataagaataaatggttgcccctcagtgccctggcccttggcatggccctgtccttcggcgccaacgccgaagagcagaagtcggtggccgtgactgccatcgtcgagcacccggcgctggacgccgctcgcgacggggtcaaggaggccctccaggaggccggctacgaagacggcaagaacctcaagtggcagtaccagagcgcccagggcaacaccggcaccgccgcgcagatcgcccgcaagttcatcggcgacaagcccgacgtgatcgtcggcatcgccactccgtcggcccaggcgctggtggccgcgaccaagagcatcccgatcgtcttcagcaccgtcaccgacccggtcggcgcgcacctgacgccgagctgggaagcctccggcaccaacgtcaccggggtttccgacatgctcgcgctggacaagcagatcgagctgatcaagaaagtggtgccgggcgccaagcgcatcggcatggtctacaacccgggcgaagccaactccgtggtggtggtcaaggagctgaaggaactgctgccgaagatgggcctgagcctggtcgaagcctcggcaccgcgttcggtggacgtcagctcggcggcgcgcagcctggtcggcaaggtcgacgcgatctacaccaacaccgacaacaacgtggtgtccgcctacgaggcgctggtcaaggtcggcaacgacgcgaagatcccgctgatcgcctccgacaccgacagcgtcaagcgcggcgccatcgccgccctcggcatcaactacaaggagatgggcaagcagaccggccgcatggtggtgcgcatcctcaagggcgagaagccgggcgagatcaagccggagaccagcgacaacctgcagctgttcgtcaatcccggggccgcgcagaagcaaggcgtgaccctgtccgacgaactgctcaagtcggccgcggaagtcatcaagtaa

SEQ ID NO: 333377 - DNA, 891 bp, Pseudomonas aeruginosa; identical to SEQ ID NO: 319704

SEQ ID NO: 333378 - DNA, 795 bp, Pseudomonas aeruginosa
atgctcagcgcgaagaacctgaagatcaccttcaaccccggcacccccatcgagacccgcgccctgcgcggcctgtcgctggacatcccggccggccagttcgtcaccgtgatcggctccaacggcgccggcaagtcgaccttcctcaacgcagtctccggcgacctgccgatcgacagcgggcagatcctgatcgacgacgaagacgtcacccgcaagccggtctgggcccgcgccaaccgcgtcgcgcgagtgttccaggaccccatggcgggtacctgcgaggacctcaccatcgaggagaacatggccctggcgcagcgtcgcggtgccggtcgcggtctcggcagggcggtgcaggcatcgatgcgcgacggtttccgggaaagcctggcgaccctcggcctcggcctggagaaccgcctcggcgaccgcatcggcctgctctccggcggccagcgccaggccgtcagcctgctgatggcggcgctgcagccgtcgcgcatcctgttgctcgacgaacacaccgcggcgctcgacccgcgcaccgccgacttcgtcctgcatctcaccgcacggatcgtcgccgagaagaaactcaccaccatgatggtcacccacagcatgcgccaggcgctggacgtgggcgagcgcacggtgatgctgcaccagggccaggtggtgctggacgtctccggcgagcaacgcaagggcctcgacgtaccggacctgctggcgatgttcgagaaggtacgcggcgagaagctcgccgacgacgccctcctcctcggctga

SEQ ID NO: 333379 - DNA, 1833 bp, Pseudomonas aeruginosa
atgaacctcgaactgctctgggtggtcggcctgctcgccaccaccgtcgccctcttcatccacaaccgcctgcgcctggacgtgatcgccctgctggtgatcatggccttcagcgtcagcggaacccttaccctcaacgaagccctggccggcttcagcgatcccagcgtgatactgatcgccgcgctgttcgtgatcggcgaaggcctggtgcgtaccggggtagcctaccaggtcggcgactggctgatcgcccgcgccggcagcagcgaagcgcgcctgctggtactgctgatgctggcggtggccgggttgggctcggtgatgagttccaccggggtggtggcgatcttcatcccggtggtcctgagcatcgccgccaagctgaagatccctccgggccggctgatgatgccgctggccttcgccggactgatcagtggcatgatgaccctggtcgccacgccaccgaacatggtggtcaacagcgagctggcgcgcgagggtcatgccggcttcggcttcttcgccttcaccccgataggcctgatggtgctcgccatcggcgtggcctacatgctgctcacgcgcaactggctgaacgccgccagcccggcggaagtcggcgcgccgaaggcacggcggaccctgcgcgacctgatccgcgactatcgcctggccggccgcgaacggcgcctgcaggtccagctcggctcgccgttgatcggcagcaccctggaagaactgcaactgcgcacccgcctgggcgccaacgtggtcggcctggagcgggtgcgcaagttccacagcgaggtggtcaaggtcggcggcagcaccgagctgaaggcgggcgacgtgttgctgctggacgtcttcgcccctccggaggacatggaccggcgctgcgccgagctgaacctggtgcgcctgccgttccgcgccagctacttcatcgaccagtcgcgggaggtcggcatggccgaggtgactctgccgccggactccaccctgctcggcaagagcgtcctggaactgggcttccgttcgcagtacgggctcaacgtggtcggcctgcgtcgcgaccacgaagcgctcaccgacggcatgctggaagagaagctgcgcctgggcgataccctgctggtgatcggcgcctggaaggcgatccgccagttgcagggacgcaaccgcgatttcctggtgctcagcctgccggcggagatcgacgaggtggcgccggccctgagcaaggcgccgcacgccctgctcagcctggccgtgatggtggcgctgatggtcagcggggtggtgcccaacgtggtcgcggcactggtcggctgcctgttgatgggcctgttccgttgcatcgacatggacggcgcctaccgcgccatccattggcaaagcctggtcctgatcgtcggcatgctgcccttcgccctggccctgcagaagaccggcggtatcgacctggtggtctcgctgctggtcgacgccctcggcgacgccggcccgcgcgtgctgctggccagcctgttcctgctcaccgcggccatcggcctgttcatctccaacaccgctaccgcggtgctgatggcgccgatcgccatcgccaccgccaagcagatcggcgcctcgccctaccccttcgccatggtggtggcggtggcggcctcggcagccttcatgacgccgatttcctcgccggtgaacaccctggtgctgggccctggccaataccgcttcggagacttcgtccggatcggcgtgccatttaccctgctggtgatgttcgtctgcgtgctggtgattccgtggctgtttccattgtga

SEQ ID NO: 333380 - DNA, 1362 bp, Pseudomonas aeruginosa
atgcatattcaatcgcttcagcagagtccgtctttcgccgtcgaattgcaccaggccgccagtgggcgtttgggacagattgaggcccgccaggtcgccacccccagtgaagcgcagcagttggcccagcgccaggacgcgccgaagggggaggggctgctcgctcgcctgggtgcggcactcgtgcgtcccttcgtggcgatcatggactggctgggcaagctgttgggctcccacgcccgcaccggcccgcagcccagtcaggacgcgcagcctgcggtcatgtcctcggccgtcgtgttcaagcagatggtgctgcagcaggcattgcccatgaccttgaagggactcgacaaggcgagcgagctggcgaccctgacaccggaaggactggcccgggagcactcccgcctggccagcggagatggggcgctgcgttcgctgagcaccgccttggccggcattcgtgccggcagccaggtcgaggagtcccgtatccaggctggccgcctgctcgaacggagcatcggcgggatcgcgctgcagcagtggggcaccaccggcggtgccgcgagtcaactggtgctcgacgcaagcccggaactgcggcgcgaaatcaccgaccagttgcatcaggtaatgagcgaggtcgcactgttgcgccaagcggtagagagcgaggtcagcagagtatcggccgacaaggcgctggcggatggcctggtgaagcggttcggggcggatgcggaaaagtacctgggcagacagcctggtggcatccacagtgacgccgaagtgatggcgcttggtctctacaccggcattcactacgcggacctgaatcgcgctctgcgtcaggggcaggagctggatgcgggacaaaagctgatcgaccaaggtatgtccgcggccttcgagaagagcggacaggctgaacaggtagtgaagactttccgtggcacccgtggcggggatgccttcaacgcagtggaagagggcaaggttggccacgacgacggctatctctccacctccctgaaccccggtgtcgcgaggagcttcgggcagggcacgatatccaccgtgttcggcaggtccggaatcgatgtcagcgggatatcgaactacaagaatgaaaaagagattctctataacaaagaaaccgacatgcgcgtgctgctgagcgccagcgatgagcagggagtgacccgccgggttctcgaagaggcggccctgggggagcagagtggccatagccagggactgctcgatgctctcgacctggcaagcaaaccggaacgttcaggcgaggtccaggaacaggatgtacgcctgaggatgcgtggccttgatctggcctga

SEQ ID NO: 333381 - DNA, 351 bp, Pseudomonas aeruginosa
atgaatccactctaccgcgccgccatccaccagctttttctcgctctcgatctcccgacgcccaatgacgaggagagcgtactcagcctgcagctgggcccgcatctctgccatctggcagaacatccgaccgatcacctgttgatgttcacccgcctggaaggacaaggagacgctacggccagcgagcagaacctgttcagccaggacccttgcaagccgatcctgggccgcgaccccgaaagcggcgaacggctgctctggaaccgccagcccttgcagttgctggacagggcccagatccaccatcaactcgaacaactggtcgccgccgccgaagagctacgctga

SEQ ID NO: 333382 - DNA, 123 bp, Pseudomonas aeruginosa; identical to SEQ ID NO: 319710

SEQ ID NO: 333383 - DNA, 612 bp, Pseudomonas aeruginosa; identical to SEQ ID NO: 319711

SEQ ID NO: 333384 - DNA, 897 bp, Pseudomonas aeruginosa
atgagcgacctccctcccctcaccgccctgcgcagcttcgaagcggtcgcccggctcggcagcatcagccaggccgccagcgagctgcacgtcacccactcagcgatcagccagcagatcaagctgctggaaaacctcctcggcctggccctgttcgtccgcgaggggcgcggcctgcgcctgagcgagaacggccggttctacgccctgcaggtacgcgcctctctgggcgagatcgccgacgccacgcgggtggtgcgggcgcgtccacgggagggtgagctggtggtcacggtgatgccgtccttcggcctgaactggctgctgccgcgcctgccgcgctttcgcgagcgccatccgcactgtcgcgtgcggctggtcgccagtcttgacgtgcagaacctgcgccagggcctggccgacctcggcgtacgcatcggcaagggcgactgggaaggggtcggtcgggaacgcctgttcgacgacgagttgctgatggtcgccgcgcccgacttcaacggcggccgcctgccgcgcacgccgagcgagatcgtcgcctgccctacactgcgctccaccgaatcctgggcgctctggtgccagcgcgccggcgtggcggaaccgcagcacggactgctgatcaatgactcgaacctgctgctggaagccgtgcgcctgggccagggcatcgccctggagcgtcgcagcctggtcgccggcgccctcgccgagggccgcctggtgcaactgggcgacatccgcgtgccctacccctatccctactggctggtctggccgcagcgcgagccgccgagcgaccgccaccaggccttcgccgactggctgcgcgaggaggcccggcgctaccaggccgagcaaccgccgctcagcgaatga

SEQ ID NO: 333385 - DNA, 543 bp, Pseudomonas aeruginosa
atgctgatccgcgccgcaacctcgaccctgctggtggtcgatatccaggaacgcctgctgccggccatcgacgacggtccggcgctggtcgagtacagccagtggttgttgcgcgtggcccgcgcactggacgtgccggtgctggccagcgagcagtacagcaagggcctggggccgacggtggcggccctgcgcgatgagctggagcccacgcagatcctcgagaagctggacttctcggccgccgccgacggcgccctgctgcgcgcgcccggcggcgaccgccggcagttcgtggtttgcggcagcgaggcgcacgtctgcgtgctgcagaccgtgctcgacctgcttggccgtggtcgcgaagtgttcgtcgtggaggaggcgatcggctcgcggcggccgagcgacaaggcgctggccgtggagcggatgcgccaggccggggcgatgatcgtgtcgcgggagatggtcgccttcgaatggatgggacgcgccggcagcgaccgcttccgcgagatcagccgcaacttcattcgctga

SEQ ID NO: 333386 - DNA, 471 bp, Pseudomonas aeruginosa
atgaatatcagcctgcatttcgaatcgcgcctgcaggccagccccgaacagctctggcggtggatcacctcggtggacgggatactccgcgagatacgcccgttgctgagcatgagcgtaccgcccggtatccgcagcctcgaagacctggaggtagtgccccggcgcccgctgttccgcagccacatgcgcctgttcggcttgctgccgctgggcacttcgcaactgaccctgctggagttgacgcccggccgcggcttcatcgaacagtcgccgatgaccggcatgcgcctctggcgccacgagcgacgcatcctgccgacaccgggcgaggccggggaatgcctgctggtcgaccagttgaccgtgcgcccgctattcgccgccggactggtacgctggttcctcacccgcatcttccggcatcgccaccgggtgctctgccggcagttccgcacggaccgccggtga

SEQ ID NO: 333387 - DNA, 1356 bp, Pseudomonas aeruginosa
atgaatcgcatcaagcacctgctcaaggacctcgccatcctgatccgcgccaacctctggctgatcccggtgatcgccgccctggtcgccgcggtgttctatttcgtcgccccgccgccgccgatgagcgcgaccatggccaccggcgccgagggcggcggctacgccgtgttcgccggcaagctccgggaaaagctcaaggagcagggcttcgaactgaagctggtgcccagcgccggctcgcgcgacaacctggagcgcctgctcggcaccggcgaggtcgacatcgccctggtccagagcggccaggagcgccagctcgaagccgggcaggcgcgccagttgcagaccctcggcgcggtctaccaggaaccgctctggctgttccaccgcagcaacgtgcacatcgaccagctcagcgacctgctgcacctgcgcctggccatcggcagcgacggcagcggcacccgcgccgccaccgaggcgatcctgcaggctaacgacatcgccccgggacactatccgatcacctgggaagcccgcggcggcaacgcggtggtcgacgacctgctggccggcaagctggacgcggcgttcatcgttggcccggcggagaacccggcgatccagaaattggccgacaacgaccagcttcgcctggtcaacttccgccgcagcgccgcctacgaggcgcgcctgccgttcctcaagcgggtcgaggtcggcgagggcctgctcaacctgccgcgcaacgtgccggaacgaaacatcagcaccctgtcgccggtggccaccctggtgatcaacgaacgcttccacccggcgctgatcccgctggtgctggaagccgcgcgcgaggtgatgaaggacggcagcctgctcgacaagcccggcgccttccccagcgccgagccgcgcaccctgcgcctgcacgaggacgccgagcgctactacaagagcggcctgccgctgctgcagcgctacctgcctttccgcatcgcctccctggcggaccgctacatcatcctgctgatcccgttcatcgccatcctcatcccgctgatgaagtccatcggcccgctgtatcgctggcgcatccgcgcgcgcatctaccgctggtaccgctacatccgcgacatcgaccgcaagctcgacagcggtaccgacgccgagcaactgagaagcgagatcgagcggctggagaaactggagagcgagctgaacaccgtggaggtgccgctctcctactaccacgagctgtacgagctgcacctgcacctgaacttcgtgatcaagcgcctgcacggtctgcaggaacgccaggcgacgcaggcagaagccggcaacctcgggtaa

SEQ ID NO: 333388 - DNA, 1005 bp, Pseudomonas aeruginosa
atgccgatccatcacgccatcgtccacctgatcgagaagaagcccggcggcaccccggccgtgctccacgcgcgcgacgccgagctgggcgactcccaggccatcgagaacctgctggccgacctcaacgaaagctacaacgccaagaacaaggcctggggcttcttccagggcgagtccggggcctacccgttcagcggctggctcggtgagtacctggagggcgatcgcgacttcgtcggcttcagccgcgaagcggtcgaacacctgcagaagctgatggaggagtccaatctctccaccggcggccacatcctgttcgcccactaccagcaaggcatgaccgactacctggcgatcgccctgctgcaccacagcgaaggcgtggcggtgaacgagtcgctggaggtcaccccgtcgcgccacctggacctcggccagttgcacctggccgcgcggatcaatatctccgaatggcgcaacaacaagcagtcgaagcagtacatctcgttcatcaagggcaagggcgggaagaaggtctccgactatttccgcgacttcatcggctgccaggaaggggtggattcgccgagcgagacgcgcaccctgctgaaagccttcagcgatttcgtggaaagcgaggacatggccgaggaacaggcccgcgagaagaccgagacgctggtcgactacgccacctcccaggcgcgcatcggcgagccgatgaccctcgacgcgctttcggaactgatggacgaccagcaaccgcgggcgttctacgactacatccgtaacaaggactacggcctgtcgccggaaatcccggcggacaagcgcaccctcaaccagttccgccgcttcaccggccgcgccgaaggcctgtcgatcagcttcgaggcgcacctgctgggctccaaggtggaatacgacgaagagcgcgacatgctgatcatccgccagttgccgacccagttgaaggaccagctcaagcggcgcaaggactga

SEQ ID NO: 333389 - DNA, 912 bp, Pseudomonas aeruginosa
atgaacgcctacgacatcgaaatcgtcaacgacgccgcgcacgccggcgaagccaaccacggctggtgcttcggcctgccgccgggcatccgtccggagcagtggccgctggatccggacaccggctatccgctgatgcacggcttcaccctgctgctgccggaggactaccgggtgcatggcccggagatcgtcgcgctgagcttcttctccctcgccccggaccagaacgacggtggaccgaccagcgtcgacggcattcgcgagatgctcatcgatccgcccgcgcaaccgccggccgaagcggaactgcggccgttctgggaggccgggcgcaatagccatccgcgtctgcatcggatggaggacatcctcggcggcgcctatgcgttgatcctgctcgacgccgctgaattcagcggcgcgccctgccagccgccggcgctgccggcgggtaacccgctgttggcgcagaccgagccgccgcagtggctggaggctggttcggcggccagcttcgtgccggactgggcggaggacgactactacctgctgcgcgccctcggtggccgcccggcggccggccaccagcaacgctacccgctgcgctggacggcgcgggcgcaagaccccaacgccggggtggtgcccagcgaatacggcgacggcggctaccagctgccgcactactggctggacggcaagatcgagcgcgacaactaccgcgagcatccctgggtggaagggcacctgccgaaccatatcggcggcaccatgcgtccggtgcagggcgtgccggagatgagtcccttctacgtagagttcgaggaatacctgggcggctacaacttcggcggcggcaacgcccagctcgatttccgcgacatgcgcttcgactgggcctgcggctga

SEQ ID NO: 333390 - DNA, 753 bp, Pseudomonas aeruginosa
atgccggcggagaccccgccgctgcggccggacgccgatccgccgcagtgcgcgttgcccgaggcgaggccggaccgcgacgccggcaccaagctgcgcgccgcggtgctcggtgccaacgatggcctggtgtcgaacctgtgcctggtgatgggcgtggcgggtgcgagcatggcgcattcgtccatcgtcctcaccgggatggccggactggtgtccggggcctgttcgatggccctcggcgagtggctgtcggtgaccaacgcccgcgagatggcgagcaagcgcatcgccgaggaagaacgcctgctcaggctctgcccgaacaccgagacccaggaactgatcgatatcttcactgccaaggggctgagcgaggtgtccgcccggcgcgtggccctgcaactgatgaacgacggtcgtggcgcgctggacaccttgtcccgcgaggccctcggcatcgatccgacggagttgggcggcaacccgtggaacgcggcgggcacgtcgttcctgctgttttcccttggcgccctggtgccggtggcgccgttcctgttcctcgacggtgccgcggcgctggtcgcaagcctgctgtccagcctgcttgcgctgctgttcagcggcgcggtcaccgcccgtttcaccgggcggccgctggcgttctcggcgttgcgccaggtgctggtcggtacccttgccgcggccttcacctatgggttgggtaccgcgctcggcgtgggcctgggctga

SEQ ID NO: 333391 - DNA, 936 bp, Pseudomonas aeruginosa
atgtcagagctgatcctgcatcactatcccacttcgccctttgccgagaaggcgcgcctgctgctcggtttcaagcaactgtcctggcgttcggtgatgattccgccggtgatgcccaagccggacctggtggcgctgaccggcggctatcggaagaccccggtgttgcaggtcggcgccgatgtgtattgcgataccgcgttgatcgcccgtcgcctggagcaggaaaaggcggttccggcgctgtttcccgaaggccaggagatggtcgccgcgagcttcgcccagtgggccgatgcggtgctgttccagcacgcggtaagcctggcgttcgccccggagtccatcgccgtgcgtttcggcaagctgccgccggaattcctcaaggccttcatggccgatcgcagccagctattcagcggcggcagcgccggccgcctgccgctggaacaggcgcgccaccagtggccggcattcatggcgcgactggagcgccagttgtcgcgcgaggacggcgatttcctgttcggcgaagcgtccgtcgccgacttcgccgtggcgcactgcctgtggttcctcaagggcacgccggtcaccgcgccgctggtcgacgattacccgcaggtgcaggcctggttgggacgggtgctcggcttcggccatggcgcgccagccgagatgagtgcggaggaagccctggaggtggctcgcggcagccagcccgcggcattgccggacgaatccttcagcgaccccaacggtttcctgcccggccaggcggtcgccatcgccgccaccgactacggtgtcgacgcggtacagggcgaactgctcttcgccggcagcgaggaactcatcctgcgccgcgaagacccgcgggcgggtaccgtgcatgtgcatttcccgcgcctgggctttcgcatcgaggcgcgttga

SEQ ID NO: 333392 - DNA, 690 bp, Pseudomonas aeruginosa
gtgggttacctgaagaatcattggtggaaacgctggatccgccgccgcggctgcaagctggccggcggcccggccagtgtcggcaagcgcaccacgctggtgctcgaggagcgggtcgaactcggccacctgcgcatcgtcccgccgaggctggagatcggcgcctacagctatgtgcgcagcggcaccgacctgtccctggtggcgtccatcgggcgtttctgctcgatcggctcggactgcttcatcggccaggaaaagcacacccatcccagcgactgggtgagcagccaccccttccagcacaccggcaccgcgctgcgctacgagccggcgctgagctacgcggaaatcggccacgacgtctggatcgggcacagcgcgatggtgatggaaggtgtcaaggtcgggactggggcgatcatcgccacgcgcgccgtggtcactcgcgacgtgccgccctatgccatcgtcgccgggactccggcgcaggtgatccgctaccggcatccgccggagatcatcgagggcctgctcgcctcacgctggtgggagctggatagcgccttcctcaccggcctgccgctggaccgaccccgggagttcctcgccgccctggaggcgcgcgaggcgccgcgtgcggcgtaccggcggatgaccatcacccgccaggggtgccggctggattga

SEQ ID NO: 333393 - DNA, 315 bp, Pseudomonas aeruginosa
gtgagtgaggcgacggccgctacggcggcgatcgggaagtgttggtcggtctacctggtgagggcggaaaacggcgcgttgtactgcggcatcagcgacgatccgctgcgccgcttcgacactcattgcagcggcaagggcgcgcggttcttccattccagccccgcccgcgcgctggtctacgtcgaggcctgcgccagcaagggcgacgccctgcgccgcgagcgggcgatcaaggccctgagcaagcgcgccaaggagcgcctgttggtcggcgtaccggtgttgcgcgaggtcggcgagccggcaatctag

SEQ ID NO: 333394 - DNA, 702 bp, Pseudomonas aeruginosa
atgatcacgctcttccagttccccgccgcattcaacgtacccaatgccagtccctactgcctgaaactggaaacctggttgcgcctggccggcctggagtatcaggtgaaggtcgtcagcgacccgcgcaaggcgcccaagggcaagctgccctacgtgcgtatcgagggcgaggcgatcggtgacagcgagatcgtcatccgtaccctcggcgagcgctacggggtcacactcgacgccggcctggatgcccggggcaagggctgggcacgggcgatcacgcgcctgtgcgacgaacacctgtactacctgatgctgtatttccgctggttcgacgaggacagctggcgcgtgctcaagccggtgttcttcggctcgctgccattcggcgtgcgcgacgcggtggcctgggccatgcgccgcaaggtccgcgctaccctcagggcgcaggggctcggggtccacggcagggacgaactgctggccttcgcccgcgacgacctcgatgccctcgacggcctgcttggccaggtcccgtactacggcggcgaacatccgtgcagcgccgatgccgccgcttacggtatcctcgccaacctcatcgaggcgaccctggataccccactcagccatgtggcgcgaggctatccgcgcctggtggcgtattgcgagcggatgcgggagcgggtctggagtgagtga

SEQ ID NO: 333395 - DNA, 483 bp, Pseudomonas aeruginosa
atggcccaccccaacgccgaactgatcgagcgcttctaccaggccttccagcgcctcgacggcgaggccatggcggcctgctacgctccccaggcgaccttccacgacccggccttcggcgaactgcgcgggcgcgaggtgggcgacatgtggcgcctgctgaccagccgggcgcgggacttccgcctggactacgcgaacgtccgcgccgacgagaacgaggggcgtgcgcaatgggtggcccactacctgttcacccagaccgggcgcagggtggagaatcgcatcgaggcccgtttccgcttcgccggcggtttgatcgtcgagcatcgcgaccagttcgacctgtggcgctggagccgccaggcgcttggcgccaagggcctgctgctgggctgggcgccgccggtgcagcgggcgatccgcgggcaggcgcgcaagggcctggccgcctaccaggctgcccatccggcggccggctga

SEQ ID NO: 333396 - DNA, 699 bp, Pseudomonas aeruginosa
atgactcccatcaacaaagccaaggcctggggcgtccacgccgtcaccgccagcggcgtgatcctggccttgctggccctgctcgcgctggtcgacaacaaaccccaggcctgcctgctctggctcggcctggccctgctggtggacggcctcgacggcaccctggcgcgcaagtacgaagtcaaggaaatgctgccgcatttcgacggctcggtgctcgacctggtgatcgactacctgacctacgtgttcatcccggccatcttcatctaccgctacatccccctgccggagcatttcgagctgctggcggtgggcgtgatcctggtttcatcgctgttctgcttctgcaacgtcaacatgaagagcaccgataactacttcgtcggcttcccggccgcctggaacgtggtggcggtgtacttctacgtgctcgacctgcacccctgggtcaacctcgccacggtgctggtgctggctgccctgaccctgacccggatgaagttcctccacccgttccgcgtgcgccagttcatgccgctgaacatcgccgtgactttcgtctggctgatcagcagcggtctgctgatcgtccagcagccggccgacctgccgatcctgctcggcctgtggttcgccgcctcggcctatttcgtcggtatctgcctctggcgcagcgcccgcgagtggttcggctga

SEQ ID NO: 333397 - DNA, 1026 bp, Pseudomonas aeruginosa
atgacaataatgaaaggtacctggctgctgctggccgctgtctgcctcggcgccagcgccacggccgaggccggtgcgacgctggatgcggtgaagcgcaagggctacgtgcagtgcggcgtcagcgacggcctgccggggttctcctacgccgacgccaagggccgtttcaaggggctcgacgtcgacatctgccgggcgctggccgccgcgctgttcggcgatgccgagaaggtgcgcttcaccccgctgtccgccaccgagcggttttcggcgttgcagtccggcacggtcgacctgctgtcgcgcaacacctcatggaccagctcgcgggataccgcgctgggcatccacttcaccggcgtcacctatttcgacggccagggcttcctggtcaatcgcaagctcggcgtgtccagcgcccgcgaactgaaggacgcgacggtgtgcatccagtccggcaccaccaacgagctgaacgtggcggactacttccgggcccacggcatccgctacaaggcggtgctcgacgatagctacgagaagagcgcccgtgccctggaggcggggcagtgcgacgtgctcagctccgaccagtcgcagctctacgcccagcgcctgaagctggccaagccggagcagtacgtggtgctgccggaagtgatctccaaggagccgctcggcccggccgtgcggcagggcgacgaagcctggttcaacatcgtccgctggaccctgtacggcctgctcaacgcggaggagctgggggtcacctcgagcaacgtcgagcgccaggccagggacagccgcaacccggacgtcgcccgcctgctcggcagcgagggcgacgccggcaaggacttgcaactgccgcgcgactgggtggtgcagatggtgcgccaggtcggcaactatggcgagatcttcgcccgcaacgtcggcgacggcagcccgctgaagatgccgcgcggcctcaacgcgcaatggaatctcggcggcctgcactatgcgccgccgattcgctga

SEQ ID NO: 333398 - DNA, 648 bp, Pseudomonas aeruginosa
atgagcgaacccctgatcctcgatgccccgaatgccgacgcctgtatcatctggctgcacggcctgggcgccgaccgtaccgacttcaaaccggtggccgaagccctgcagatggtcctgccgagcacccgcttcatcctcccccaggcgccgagccaggcggtgacggtcaatggcggctgggtcatgccgagctggtacgacatccttgccttcagtccagcgcgggccatcgacgaagaccagttgaacgcctccgccgaccaggtcatcgctctcatcgatgaacagcgcgccaagggcatcgccgccgagcggatcatcctcgccggtttctcgcagggcggcgcggtggtcctgcataccgccttccgccgctacgcccagccgctaggcggggtgctggcgctatccacctacgcgccgaccttcgacgacctggcgctggacgagcgccacaagcggattccggtcctgcacctgcacggcagccaggacgacgtggtcgacccggcgcttggccgcgcggcccatgacgccttgcaggcgcagggcgtggaggtgggctggcacgactacccgatgggccacgaggtgtccctggaggaaatccacgacatcggcgcctggctgcgcaagcgcctctga

SEQ ID NO: 333399 - DNA, 1899 bp, Pseudomonas aeruginosa
atgaatccgtccccatcgatcgtcgggctgagcgatatcgaagccctggaacgcgtgccgctggaacagcgcgacctgccgtccagcacctacgaactgttgcaacgctcggcccagcgccacggccagcgtatcgccctgagctgcctgctgcatggcagcgccgccgaagaaccgttgcggatcagctatgccgagctgttcgcccgcgtcacccagaccgcgaacgccttgcaccggctgggcctggaaagccaccaggcggtgtccttcctgctgcccaacctgccgcagacccactacgtgatctggggcggcgaggctgccgggatcgtcaatgcgatcaacccgctgctggagccggagcacatcgccgagctgatccgcgcctccaacacccgggtgctggtgaccctggcgccgttccccggcaccgacctgtggcagaaggtcgccggcctgcgcgcgcagttgccggagctgtacgcgatcgtcgtggtcgatccggccaacctgttaccggcgccgcagcgcgaggcgctcaaggcccagcgcgggccgctgccggagggcgtgctggacttcgatacgctgatcgccgactgcccggcagaccgcctggagagcggacgggcgatccatccggacgacgtcgcttcctatttccacaccggcggcaccaccggcacgccgaagctggcgccgcacagccacttcaacgaggtggcgatggccgagatcatgggcctgaacgccgactacggggtggacgacgtgctgctctgcggcctgccgctgttccacgtcaacggcgtgatggttaccggcctggcgcccttccatcgcggcgcccaggtgctcctggccgggccccagggctaccgcaatccgaccctgatccaggacttctggaagctggtggaacgctaccgggtcaccagcttcagtggcgtgccgaccatctacgcggcgttgctgcaggtccccagcgatggccgcgacctgtccagcctgcgtttcgccctgtgcggcgcggcgccgatgccggtggagctgatccgccagttcgaggcgcgtaccgggctcaaggtgatcgagggctacggcctcaccgaaggtacctgcggcaccagttgcaacccgcgtggcggcgagcgccggccgggttcgatcggcctgcgcctgccgtactgccaggtgaaggtcgcggtgctcgacggcgagggcaattacctgcgcgatgccgcgccgaacgaggtgggcaacctctgcctgaagggcccgacggtgttcaagggctacctgcaacaggaccggaaccgcgatatctggatcggcgatggctggttcaataccggcgacctcggtcgtatcgacgaggacagctacatctggctcaccgggcgcagcaaggacctgatcattcgcggtggccacaacatcgacccacagatgatcgaagaagcgctgcaccggcatccggccgtggccctggcggcggcggtgggcaagccggacgccaaggccggcgagctgccggtggcgtatatccagctcaagcccggcgccagcaccagcgaggaagagctgctggagcacgccagccgccacgtaccggagcgcgcggcggtgcccaaggatatctggctgatcgagagcatgccggtcaccgcggtgggcaagaccttcaagccggcgctgcgcctggacgcgatccgccgggtgctggaggaggaaagccggaggatcgccgaggatatccgcgtggaggtggtcgccgacgagcgccacggccaactcgcccacctgcacgttcccgcgcttgacgaaagacgccgggcggcgctggaagagctgctcggcggctacgcgctgaactaccggctgcaccccgtctga

SEQ ID NO: 333400 - DNA, 1572 bp, Pseudomonas aeruginosa
atgctttacactggcgcccgttcattccttaaccactacgagatcgccgtgctcaaagcactcaagaaaatcttcggcaaggccgacggaacccagccgcagagcggttcctccccggtcccgcaaggccctgccggcgctaccgcgaaaggtaccgcccccaccggcgaaaagccgaccgagaaacgcccacgcaaaccgcgccccccgcgcgccgacaacgagtccggcgccccgcgcgccgctgaaaaggccgagaaaggcgaaaagcccgccaaacccgccgccaaagaaggccgggacgccaagccgcgcagcgacaagccgcgccgcgaacgcaagccgaagccggtggacaactggaagctggaagacttcgtggtcgaaccgcaggaaggcaagacccgcttccacgacttcaacctcgccccgagcctgatgcacgccatccatgacctcggcttcccctactgcaccccgatccaggcgcaggtactgggcttcaccctgcgcggccaggacgccatcggccgcgcccagaccggcaccggcaagaccgccgcgttcctcatctcgatcatcacccagttgctgcagaccccgccgccgaaagagcgctacatgggcgagccgcgcgcgctgatcatcgccccgacccgcgaactggtggtacagatcgccaaggacgccgcggcgctgaccaagtacaccgggctgaacgtgatgaccttcgtcggcggcatggacttcgacaagcaactcaagcagctggaagcgcgcttctgcgacatcctggtagccaccccaggccgtctgctggacttcaaccagcgcggcgaggtgcacctggacatggtcgaggtgatggtcctcgacgaagccgaccgcatgctcgacatgggcttcatcccgcaggtccggcagatcatccggcagaccccgcacaagggcgaacgccagaccctgctgttctcggcgaccttcaccgacgacgtgatgaacctcgccaagcagtggaccgtcgatccggcgatcgtcgagatcgagccggagaacgtcgccagcgacaccgtcgagcagcatgtctacgccgtggccggcagcgacaagtacaagctgctgtacaacctggtggcacagaacaactgggaacgggtgatggtcttcgccaaccgcaaggacgaagtccgccgcatcgaggaacgcctgaccaaggacggcatcagcgccgcccagatgtccggcgacgtaccgcagcacaagcgcatccgcaccctggaaggcttccgcgaaggcaagatccgcgtcctggtggcaaccgacgtggccggccgcggcatccacatcgacggcatcagccatgtgatcaacttcaccctgccggaggacccggacgactacgtgcaccgtatcggtcgtaccggccgcgccggcgcctcgggcacctcgatcagcttcgccggcgaggacgatgccttcgccctgccgccgatcgaagaactgctgggccgcaagatcacctgcgagatgccgccggccgaactgctcaagccggtaccgcgcaagcactga

SEQ ID NO: 333401 - DNA, 4902 bp, Pseudomonas aeruginosa
atgagttttgccattgccggcctgaccaacgccaacgagttctacagccagcactacctggacgagatcctcgagaaagacctcaagccgctgttcgaccagtggaaagagcagggtgccgacagccctgtcgcccgcttgcgcgcagcctctggtgccaacggttacttccgtgcccgtcagcgcttcttgagcgagcgcaaggcaagtgagcgcgccagcctatttatcgatctggtgcagccgctcttgcaggctatcggttatgaattggccccggaaaacctcgctcttgccgatggcgagcagccagtgctggccacctaccgtgatgccaaacatcagccgttgttggtgatcgccgcggccatcgctggggtggatgacgaagagcttggtccgctgcagctcaaaccgcaggcagccaacagccaaagcaaaagtcgccaggccgacagtgactgggaagaagccctgagtcgccgtcttttcgcagacgacaatccgccacgttgggtgctgctggtgcaccacgaggaatggctgctgattgagcgcagcaagtgggggcggaaggcgctgctcagtttcaagctgcccgatctgttcggcccgcgtgacgacaagctgctgcgcgccctggccgcgctggccggcagccaatcggtattgcctgtcgaaggcggcgtggccctgctcgacagcctggacgataattcccacaagcatgccttcgaggtctccactgacctcaagtacgccctgcgtgaatgcatcgagctgatcgccaacgaggccatttggtacaagcgcaccgtggccaaggagaaagtctacgagcgcaatgataccgacctggccgaccagctcagccgcgaaagcctgcgttacatgtaccgcctgctgttcctcttctacatcgaggcgcgtcccgagctcggctatgcccccatcgatgccgaggcctacctcaagggttacagcgtcgagcacctgcgcgagcttgagcagaccccgctgaccaccagcgaggcgcaggggggctactacttccatgaaagcctcaagcagctgttcggcctgatctggcagggcttcccgcgccgtgcagacaacagcggacagttggatttcaccgcagggtacgacctcctgctcgacaccggctttaccatcgccccgctgcaaggccatctgttcgaccccgatcgcactccgctgctgggcagcgtcaagctgcgtaaccgcgttctccagcaggtgatcgagctgatgtcgctgtcccgtggtggtggcaagcgccgccgtgggcgtattagctacggcaccctgggtatcaaccagcttggcgcggtgtatgagtcgctgctgtccttccgcggcttctttgccgaggaagatctgtacgaagtgcgccccgaccccaaaggcaaaaaggccagcacaggtgaggagggcgaagacggtgatgccgaagcagaggacgccgaactcgacactgccagcgaccagaacaagaaaaacgacgccgaactcgacccgctggaggccgcctacttcgtcccgtccagcgccatcggccagtacaccgacgccgagcgcctgtttggcggtaatccgcgcaaataccccaaaggcacctttatctatcgcctggccggtcgcgcccgggaaaagtctgcctcctactacaccccggaggtgctcacccaatgcctggtggagcatgcgctgaaggaaatcctccccggcaaaacggcggatgagattctccagctgacgatctgcgagccggccatgggcagcgcggcgttcttgaacgaagcggtaaaccaactcgccgaggcctacctgcaggctaaacagaaggagctgggccaaagtatcccccacgagcagtacaccgaagagaagcagcgggtgaagatgtacatcgccgacagtaatgttttcggtgtggacctcaatcctattgccgtggaactggccgaggtctccctctggcttaacgccatcttcaagggcagccatgtgccctggtttggcttgcagctgtacaacggcaactccctagtcggcgcccgccgcgaggtgtttagcaccgcccaactcacccctggcagaggcgaaaacggcctacccgagcgcgactggcgcgccgccgtgccccaatcactgccgctgacgcaggcaccgaagaccaccgatatctaccacttcttgctgcccgctgaaggcatgggcatggtcagtgacagggtagtcagggcgctggagcccgctgccttcgagcagtttaggcaatggcgcaggtcctttaccgcgccattgaccaaggatgaagtccgtcgcgtgcaggccttaagccaagccgcggaaaagctctggcaacaacatgccgaggagctctcaagggtgcgcaaggccacctgcgatgagctgcacgtttggcccgacctggccgagaaccgtgcccccaccagcaccaagcagaaggacgatatctacaagcgcgagatgcttagcgatgcgcagaaaaacgccagcccctatcgccgcctcaaactggtgatggacgcttggtgcgccctgtggttctggccgttggataaggccagcgagctgcccagccgtgagcactggtggtttgtgctggaaaccgtgctgctcggcaatgcgagtcttgccaatttcccggccgatgacctgtttccggatacccagccgcagcaggggatggactttacccccgagcgcgaccgctacggccatgtggatatcggcgcgctggtcgaagccctgcctcagttgcaggtggcgcagcaggtggccggccagcaacactttatgcactgggcgctggagtttgctgatgtgttcaaggcgcgcggcggcttcgatgtgattcttggtaatccgccatggatcaaagtggagtggaacgagcagtcattgttgtcggacttcgatccgcgctttgccattcgcaagctcagtgcttcagacactgccaagcagcgtgaggccgtttttgccgcgctaccacaggccaaggcagattacctagccgaatgtgtggccaccgagggcatggggcagttcctcaatgccacgcagaactaccctttgctaaagggtcagcagagcaacctgttcaaatgcttcctgccgctggtctggcaggtgggcagtggcgtgcaggcattgctgcatccggagggaccgtacgacgatcccaatggaggggggctacgggaggccatgtacttccggctccgtgcgcactaccagttccagaatgagctgaagctgtttgccgaaatcggcaaccgggtgaagttcagcatcaatatctacggcgaatcgcgggcgccgactttcaagaccatggcaaacgtcatgcatcctcagactacctttgcagcgttggagcatgtaggcggtggtgtaacccccggtatcaagactgatacagggagctgggatctggcaggtcatcggaaccgtctcgttgaggtaacagaaagcacgctggcaatttttgctctgctttatgacgcaccggatacacctgctctacaggcgcgtttgccggcggttcatagccgcgaattggtgtcggtgcttgagaagcttgctcgagtgccgcgacgcctcggggatttggctggcaactatttaaccttggagatgtggcacgaaaccggtgcgcaaaaggacggaaccatccgtcgtcggagtcgaggcgagcagggctttgtgagcgatcctgtggggttcgtcctgtccggcccgcatttttatgtaggcaatccacttagcaagactcctaagccaatttgtgagacacacaaggcttacgaccccctcgaccttgaaaccctacccgacgactacctgccacgcagcaactacctgccctcttgcgatgccatcgaatatgctcgtcgcgtgccccgtgtgagttggatggaagcgggggagcaagaggcgagggcagtgacaaagtattaccgctttgttaatcgccgtatgttcagtccttctgccgagagatcatttatatcgacaattgcttcagctgggagtgcgcatattcaccctgtgctttcgacaacgtttcggcgtactgccgacctagtggatttctctgcaggcacatattcgttaccaattgacttcttgctccgctcaacaggtaagactgacctctacgagagcactcttcgcaattttccgttgctatcgtctagtggtttaagggcgagagcgctggctctcaactgtctcactagctactacgctgccctctggcatgactgctggcaacctgcctttcagcaagacggctgggctagcaacgactcgcgtctaccgcagcagttcttcaagcagctcaccgccgactggcaacgtagctgtgccctgcgcagcgactacgctcgccgccaggcactggtggaaatcgatgtgctcgccgcccagggcctcggcctgaccctggacgaactgctgaccatctaccgcgtgcagttcccggtgatgcgccagtacgagcgtgacacctggtacgacgccaacggccgcatcgtcttcactaccagcaaaggactggtcggcgtcggcctgccacgcaaacccggtaagaaagacgagccctgcaccttaatccaccccgacggccgccgcgaaagcaaacgcctcggctgggaagacgttatgcccaaggacggaaaaccccagctcgacgacggcacagtcatcgagcgcatgatcctggacgacacccaacccggcggcccgatcaaccgcatcatccgctacaccgccccctttaccctcgccgaccgcgaagccgactaccgcgtggcctgggcgcattttgaagcgagaggtcagtga

SEQ ID NO: 333402 - DNA, 3030 bp, Pseudomonas aeruginosa
atgggattggctgacatctttaaaagcctgcttggcgaggggcgagcaacgctgagcacgcagcagggattcgcctacgcagcggactcggacggcgtgaatttctacttggacaagacggtgtacgcggcgctggccaccggccaagggaatgccttgcagaaggtccagctgatcgttttgcgtatgctgcaggagcagggcttagctgagccacttgctaatggattccatgtggctgctgaagacgtcgccggcatggatgatgagcaggctgagattcttcgtttgccccgccggctcagcatgagctttgtcagcagaatcagcggtcgaactgggcatagcggtttttgtgtcgatctggcaattcaatccaaggcaggtgaagtgcccttcacgcggaaggggccactgctctacctgacgtccacagaatgctatcgcctgacgcctgctgagttgatggggctaatggcgtgggaataccaccaaaacctgccagcacagcaacgaggagaagcctccaatttgcggatgatggctgagctgcagaccgctgcgcgtagcgggatgcgtgtcgacctcagccattttgaaaggctggatgtggtggtgccggagaacattggcgtcattgctacgcgtctggcggatggcagcctcatgctcagccccagcttgggagatggctctacaccggatcagttagagaagcgctggtcccaactggatatgggagcagatggcggagtattgcgcatcgacaaccgtgtggtgctgcttgagccgcagaagatggctgcgattaaggaagtgttgggcagtaaacgcattcctgctgaccgggtcgcggagttcatcgccacaccaagcgcgttcctggatgcggcgttggtcaatcttgaccttggtttttctgtccgggtcgcaggcattggcaagcttcaacacatggagtttggcgacctagacaatcagaagaatgattggtttgcactggattcacgccccgctcccgctgagatcattccgaagttagtgcaatccgaagaggacctacagcacttcaacgagctctacaaagcggccattgagcagggcgcgaccagcatgacctttgggggagagatgattgatatctccgatcccgcccttgttgagcaacagctgaagaggattgaggcgtctctgagggacccggcactcgacgaagtgcccggggactcattgtcagtagagcccaaagagcgagtgagtgtgctgctacgtgatgctgatgagatcagcagcacgttgttgcgcaaagcaagcgaggctaagcccgcgcacgagcctgagtggagtgcgtacgcacgccaacccttcccgcaccaacgggagggggttgagtggatgcttgggctgctggagtcggcagtttgcgatgatcatgatgatctgtatcggctgcagggcggactgctcgctgacgatatggggttgggtaagacctacatgtcgctggtgaccgtaggtgagtatctagcacagcaaaaggcctctgggcgtgcacaaaaaccagtgcttgtggtggctcccttgagcctgctggagaactgggaagatgaggtcgcgcagacctttagaagcatcccattccgggacatcgtagtgctgcagtctggaagggacttgagccgcttcagagtcaaaggggccgagcgagagtccgcgcaattggcttcgctgataaatgacgatggagaaatggacgatgattccattcgctatgcgctcaccatcggtccagaggtgggtgtccaccgcctggatatggatcgtcgcttggttctgactacttatcagaccctaagggactaccagttctctctgtgcagaattgactgggggctggtgatttttgatgaggcacagaacatcaagaatcctaatgcggcgcaaacgcgagcggcgaagggtttgaaagcggacttcaaactgttggctaccggtacgccagtcgagaacagcttgggggacttctggtgtctcatggacacagctcagccaggaatcctcggaggctggagccagtttcgtgacaattggatcaagccgatcctggctgcggcagatgacgaaaaggatgaggttcggcgaagggttggggctgatctgcgagaggctgtaggcagattcatactccgtcgtatcaaggaagaccagttaaaagggcttccaagcaagaccatccatagcggcgtggcgcagcctcaaggggggcttcagcttcatgcagctcatcttgcggtttccatgaagggcctgcagcttcaagcttacgacgccgtgctcgagggcttccgggcaaggcgtgcgactgaggacatgcgcggtgctgcgcttgcagctctttctcagcttcgagagatctctctgcatcctcgtcttcgtgaagaggcagcgttgatggctggcagcgctagtgaggcgcgcgcccatatggctcagtcagggaagctggtggtgctgctggacttgctcgatggaattcgtcagggcgaggaaaaggtcattctgttcatggtcaccaaacggcttcagaggatcttgaagctgtggctcgaccagatctacgggttggacgtagcgatcattaatggtgagaccgcggcagttgcgaagaaatcagatgagctgactcgcagaaagctgatcggtgttttcgagtccaagcccggcttcaacatcatgatcatgtccccggttgctgcaggggttggattgactgtggtcggagccaatcacgttgtgcatctggagcgacattggaaccccgcgaaggaggcgcaggcgtccgaccgtgtgtatcggatcggccagaagaaagacgtgcatatacacctgcctgcggtgctccatccgcaattcgactcttttgacgttcaccttgatcgcttgcttagaggcaagctgatgctcaaggatgccgtagtgacacctgaggtggtgagcgagggggagataattcgctcaatgggattgtga

SEQ ID NO: 333403 - DNA, 2172 bp, Pseudomonas aeruginosa
atgaagctgccgccgatcgataaccgtcctggtgagtggtcgcctacggtcatcgagggctggtcgcgcttggtggaaaaggccagccgcatgaaggcgaaggtcggtagcggcgatgctttcgagcgagctatagcccggttgcgcagcatggctactagtgggcgattcgacggactagttgagttgctcagccgacgtctaggtgctagagcgcttacttggctgtggttgcatgatgattttgctggtgctcggctgttcaacggacgaatgctagaggccttattggagaaccagcagccccgcttgagccgactgacgttgattcagttgctccaactgtatttcatcgtttttgatcgccttgacgagagagacaagcaggccgagaccagcttacgaggaaggttggagtggcatttactggatcagctcaaacgtttgccggagagagctcggccccaatcattcgttgctgatccattaacaacgctcaagacggaaggagattggctgctggcactggacggcccacttcgtctcgcacaggcagtgcgacaacgtggcaaggagctagcacagactttcgaagagatgggcctgagcggatttgatgtcggacgttatggggatatctgtcgcgcacacttctatttggaaaggctgcgccagctgcgaccaggtgagtgggatgaggtgctcgaagagctgctcaaaccatctgtgagtaaggcgccgtatgaggcggatagacgcattggtcatgctgcactggagatcatgatcgatcgcgctggagatgatccaggcgacgcctggcaaaacttcattctcagcttggcgggtgatccacgtattgcgagctcagctccgaatttccgcgagtggtggaaacctctgggtgaggagcgcattggtagggtgcgcgggtggctgtccaaggaagacctgcgtttattcctgcaggctgttgaacagtacggcgtggagtcaggcaaagaagacctccagcgtatgttcccggcacgtaagctgtttttggagggcttgttcaagcttggtctcatccgatacacgaggctgatgcttggcaacagcgccaagctgtcggttaagcgcattctaggaggggaggtaaaaacgagcttcgccagcctggactcagcgatgaacgacaaggcggtgatctatctcgactgcggtgatttccacttggttgagggctctcatagcttcaaaatctgggcttatctcggtcagcccagtcattgggtcaagtcgtatgagcgaaatcacttctctcactacgacctgactacttcattgcccagccagtacaaggcagcctacccagctcttccctacgaggcagtggtccacaatggcccctggcagtacaaggtatttgagttcttggcgaagaatggcatcgctctggatatcgagaagctgctcagccgatctgactacaaagcgtacctcagcaggtacggcatgccggttgttgggcagaagaaagcaagagttgaacccttagtacaggcgtccactgatttaggggctggtaaagggcgaggtccagagaccatgagctcggccgagtcgaacccggtcaagcttgaggctgcacggagagttgcaccctctgcgggagcacctaatccctctcagatcgagctcaacaagactcagcgttcaatcttgacctacttagcctcgaatccagatcgttccatgggcgaaatccggcgagcgatggatggggatgaggctttgctttatgaaatacaggagagtctcaggggtaggcttgcagcctacgttcaacaaaatgacgtcttccaatggtccctgtcagaagcagggcgaaatcttctcggagacgtgccttcccctgctcgaaccaagagccctagcacgggcagctctaatagcgcagctcagctgaagcggcttggcgcgtttgagttgcaggtgctttggtacttcaaatcaaacccaggcgacagggtgagatctgcggccaacgttcttgatgttgaggcgcgagagattaatcgggtgctctacggagcccttaaaaatatgtgtgagcaaggcagaaactttggctgggcagtaaaggccgacatatctgacgccttggagcaactgccaacagaatcgtga

SEQ ID NO: 333404 - DNA, 744 bp, Pseudomonas aeruginosa
atgcgttggcgaaaatcccatgacgtaccaatggaagatgaggatccgtactggaagtctttcgtggacattatgtcggcgctgctggtgctcttcatcttggcgtcggtggtactgatccttcagttgatggagaaaagcgctgattttgatcagcaggtcgagcagctgaagaaagcagaaaccgtacggcagcagattctcgatgaggcggtggagaagctccgccagcgcggaattaaggttgaggttagcgagaaccatacggtcctgcgtatacccaacgaattgcttggctttgacacgggcgcctttgaaattcaaccacgctaccagccgacggccttggagatcggggaggtcatcaaccaggtaatcagtcgtgaagatcgggtcaactacctcgataccatcttcatcgaaggacacacagacaaccgccccttccaaggctttatggggaagggaaactggggattatcgacgtttcgtgcaatctcactctggcagttctggagcaccgagatgcctgaagcggagcgtctgaatcgactgagcaatcaggatggtgagcctttgttctcggttagtggctacgccgagactcgcccggtaagtaagcggcaggacggggaggaggactatcggttgaatcgtcgtatcgacattcgcttcaccattcgccggccgcagagttctgagtacgaagcggttaagtcattgcttgggaactcaactaaatga

SEQ ID NO: 333405 - DNA, 2346 bp, Pseudomonas aeruginosa
atggaatttctatatcacctgttgcccaatttttccttactgaaaggcggtagcacggaagcgctgggcgtcatcttttggttggtcatggcaacgctatttggctattcgctagtttcgttggtgatgagcagcatccgctttagggtacgggttcgtgccttgaacagcttggtcacggggcagaaccgcgaaaacctggcattaagccgtcgagagatattgcaaaaagccctatcgctcaaggaccaacgaattggtgcgctatggcgggagttcgatgacagcttggttagctccagcgaccataagcagctctttaatactttggatgccgagcatttctttaatgtgcgaactcttgcgcatggtctgagcggaagtcgctttttcagttctttgccagggttgctggttggattgggcgtgttagccacattcgtaggcctaaccatcggtttatcgaagttgaaactagatagcactgcaggcgtggatcagttgcgggagggtatctccgttatgatccaaggggcggcggttgccttcatggcatcggtgtggggggtaggtttcagcctaatactaaatctaattgagaagattgctgagcgctgggcgcttgggcgcgtgcaggatttacaacatcgcattgacacgctgtatccactgatccctgctgagcagtcgctggttcacattgctgactacagtcgggaaagcaaggaagcactgcaagagctccacgaacgcataggtgaccgccttcaggaaagcttggtaggcatgaacgaggctatgcaggcggcccttacggatgctttgaacaacattatggctccggccatccagacactcgtcagcacgaccagccagcaatctacacaagtgctagagcggctggtaagcaatttcactgatggcctcacgtcggcagggcgtgagcagggcagtctgatgcagcaagccgctgccgatgtgaatgctgcagtcggtggaatgaccgaccgcttgaatcagctgttccagactctgagcgatcagcaagggcgacagcaggaggcggccagacagcaaagcggcgagtttcaggcccagatggagcggatttcttcttcagcagatcagcgccaacaacaattggagtcacgtttcagtgagctgttgagcggattgactggccagctggatacgcagcttggctccgcgcagcggcgggatgaagagcgtcaggcgctttttgagcgcactttggttgaggcaggggcgagccaatctgcgttgttagagaagttcgccagcgcaagcagtgaacagcttcaggctatggcagaggctggaaacgagcggcatggcaatctggagaaagtcttctcccggttaatgatgacactgaactcccaactggattcgcagatgggggctgctgagaaaagagaacaagatcgagccttgcgccatgatcagcagcaggctgcggtattggcgcagcaacagcagttaattggcagccttgggcagaccagccagcagcagatcggtgcaattgctgaagcggcggctgcacagcaacgtgctttggaggagtcagttagcaagctgctcggtaacttcaatgagcagatgtcgggccatggccagcaagctgagcagcgtgaacattctcgccagcaacgcttcaacgagcagctggaaagcatggcggcgcagcagcatgctctgctggaaggcatcgccacagctgtacaagcaacccagcagcaaagtcgccaaatggctgagcagcatcagcaactgatggggcgtttgcagcaagccagcgatgcggccgctactagtagccggcacatggacagcagtgccaaccagctcggattgctctcaaccaatgttcgtcaggcagcagagcttcttggtcagcggttagaaagcgtgacgcagcgtattgagtctgctggtgagcagaatgctgagctcgcaggccaactgcggcaacaagctaccgctttggcgcaacttcaaggtgcgttgttggacggcgctcagcgcttcgagcaggccgccgcggaagcgcgcagcggatttggcgagatgagatctcatcagcaagagttcctaaccggagtgcgtggtgagttcactgcgctgggagaggcgctgcgcagtcaagtgcagggggtcgagcagcaagctgagcaatggctgcgtagctactccaccgaagtacgcgaccaggtgcatgagcgcatggaccagtggaacaaggaaaccctgagctttgctggccagatgcatgccgcagtgcaggcgatcagtaacgtggtcgacgagctggaggcgcgctaa

SEQ ID NO: 333406 - DNA, 1329 bp, Pseudomonas aeruginosa
atggcgttcaaggacaaggcggagctgcgtgcgtttctagaggtgggggccggatcaatatctcacttgccgtcttcgtctcggcgtggggaaccctccgccagcgctaaggattacgctcgagcactcaaagaaatcgagccacgcatctctgacgggcagcgtcgcatgctaacaggccacgctatagcgccagagcagactttgaccatgacgcagttggccgcactgatggggcaggtcaattttcaaactgccaatagtcagtacggtcgactcggtggaatgctggttgcgtctcttggtgttccaaggcctaagtggctggtctatgccattgcgagcttcgatgacaatccggagtccgggaaaaggcgtgcgcgtatgcatcctgagctgtcccaagcgcttctgcagttggggtggataacaccgcaggattccggtggcgcgattatcagacagccaggcaaagagcaggaaccggctttcagacctcaccacggctcgctcagggctcaggatgttattgctgcactggagggggcaggttttagtcggcccgaacagtccggtctcaaggtggtgcgtctggcgcatccagccctgactgtgcctgtgttcgtcaagcagagcgccagtgagacgcccctcgtgctacacccgaaatatgaagagcagctctctagctggctgagcatccagggtgtggagcgaggccaaacgacttactaccacaacagcaatcttcgtggattccccaaacggagaaatacgggagccacggatatcagctacggcattgatttagggtttctgggctcaggtgcgctcgaggaactcatcaggaagcttctagatcaggtgggagttgggaatgacacacctgtaatgccgacgccactcttgccacagggcctctcagaagaattgcctctgaccgaaactgagcgggaggctttgatcaaggcgcgaattggccaaaacggttatcgcgaggcgcttttggcgtattggggtggttgcgcggttaccgactgttgcgtacctgagctgctacgcgcttcgcacataaagccttggcgcgctgccagctctagtgagcggctggatccgttcaacggccttctgctgactccgaacctcgacctggccttcgatcaaggcctcatcagtttcgatgaggatgggctcatattgcttagcagtgatctggatcctgccagcgctaaggcgcttcacctcacgcccaaacttcgcttgcgtcagctcgagccacgtcactgcgactatctggcttggcatcgtgagcatttattcagagcttga

SEQ ID NO: 333407 - DNA, 648 bp, Pseudomonas aeruginosa
gtgaaccggcctgtcactgtgaaagcgttggaggaactggggcgtcgaagtttgtcgaaaagtttttttatgcgcgacttcctgtactcggaaatcagtcagattgaagggattcctaacatccccgactttcccgatcgagctgtagaagcaggacgtcagctctgtgaacaattgttggaaccgttgcaggagcggtttggtcgtgtcgccattcgatcagcctatcggagcccagcggtgaatgctaaaggggcggagaatggcaatcagtacagttgtgctgctaatgagaagaactacgcctcacacatttgggattatcccgatgagcaggggtacctgggggctacggcctgcatcgtggtacctgcgttattaccttggtatgagcagacgagggattggacgccactagcctggtggattcatgacaatctgccgtatgcgagtcaattttggttccccaagcttgctgccttcaatctgcagtggagcgccaacccggcgacgctcccaagcatcaatacctatgttctcaatccgcatactggggaccggactgcattagtcaaggatggtgtggctagatgcggccttgaagagcgcaagctcatcgttggtccatggttggacagcctcaaataa

SEQ ID NO: 333408 - DNA, 2031 bp, Pseudomonas aeruginosa
atggaaatggctcctgtcactcttattctcatagcactagtcgcattggtttttctggcagtcgggtggttcattggcggcagaatgagcactttgaagagcgctcgtacgcaactggaaattcaagccagccatcaatcgcagttggcgcagctcaatagcgatttggctctatctcgacagagcgaggcacacattcgcggcgagcttgaaattgccgtgcaggttcgccaacagtccgttcagcaattagacgcagtacgtgcggcggcgaataagctgaatgctgagttgagtgctgcgcaggcgactcttcaagctgagcttgagaaaagccaagagaagtcccgcttgctcgacgagcaggcgcagcaagttattgagcatttcaatcgccaggaggcgctgcagcagcacgtttcagcgcttagagagcaacttggtatgagtcaggaacaggccaatctgtcaggggaactcaaagcaagtctggcagccttgcaggggcgctatgagcaggcgcaagcggagcttcaagagcatcgtgagcagcttggtcagagtaatgagcaggcggcgcaattgatggagttgaaggagcagatccgtcgcttcgagcaacgtcaccgcgaaactgaggatgtggtcaagtctcagcgggagcagcttggacagagcagtgagcaagcctcgcagctcctggagctaaaggaaaaatgccgccagtttgagcaactgctgcgtgattcggaggaagtgctgaaggggcaacgggaacagctggggcaagccaacgagcagaggatccagctaggcgaactgcgggataagcatattgctcgtgagcgagaaataagcgaattgcgggaccagcttgccaagacccggtcgactctggcggaaaccatcacgggccgtgataaagatcagcttgcagctgaagagaagctccagctgctccaggagaacaaggagcagcttaaacaagagtttcagaaccttgcgaatcagatctttgatagtaagcagcaaagctttaccgagcagagtcggcaagggctggatgcgctcctcaagccgtttaaggaccagctcgagtccttccgaaatcgcgtcgatcaggtgcattcggaggctatcgatgggcagagctcgatgaagtcggaactggtcaagctcattgagttaaacgctcaaatcaccacagaggcctcaaacctcaccaaggcgcttaaaggagacaaaaagctgcagggcacctggggggagcagaaggtggagctgctgcttgagcaggcgggattgcgcaaaggggttgaataccaccgcgaggcgaattttaaggacgaagatcatgaaaacggtcggccggatttcgtggtgcagctgcccgaaggcaagcacatcatcatcgatagcaaggtctcgcttgtggcttacaccgactatgtcgctgccgagactgatgagcagcgtgccgcgtcgctcgcggcgcatgtgcaggcattgcgcaaccacgtccagtcgctggccggtaagcgctatcccgaactcaccggaatgaattcgccagatttcgtcttccttttcatgcctgtcgaaccggcctatctactggctgctgaacatagcccctctctgttccagcaagcttacgagcagcgcatcgcaatcgttaccgctacaaccttgctgccagtgctgcgtgtggtggccaacctttggagcattcagcgccaaaatcagagcactctccaattggctcagcaagcgagcagtgtctacaacaagctgcgtgtctttgtggagaagatggagaagctcggcaatcaaattggcactgttcaaaagacctacgctgacaccttcaatacgctaactggcccgcacggaagcttaactcgtacggtggacaaattcgttgatcttggagtcaaggtcgtcaagcgtctgcccgcatcggtggtaggggcaggtgacgacccagcaggagagggcgatgtgctagctatggaggagactacagagtga

SEQ ID NO: 333409 - DNA, 660 bp, Pseudomonas aeruginosa
atggatgactacatcgcgaaggttcatcggctacggaaagctgtaagggcgcgggtgcaagccgaagacctcactccggatcaaggtgcaatggccgtatccgaagagctagcgcccattgcctttgaggatcctaaggttcgagcggccctcgataagcttaaaggtcgagaccgagttggcgtaatgggggagggggccgcacttctcggcggcgctggcgcgggagcagcattggccggaagtgctgcgggcatggcaggcgctaccacattgctcggctctacaagcctggcgagcctgctaggaggtgtgttcgttacgaccactccgattggctgggtggtcgggtctgctgcggtagcgggagccgctggctacggcattgcaaaactcatacggtcaggcagtaagcaggatcagcgaagagatgcattgtccgaatgcctagccacgcggttgatgctgcatcataaacctgaggctcaggatgagttggaggcgctgcttgcggctgctctaaaggctgggacagtttcgtcagaatccgggcagaagatgcgggcccagattgaagcaaagttgctgagcgttgacttggcactgctgcggctgagagccattgcaggatcacaaagtgattctgacgtcgaggcttaa

SEQ ID NO: 333410 - DNA, 279 bp, Pseudomonas aeruginosa
atggattttcttaccttgctctgggctgttgtggccacgttgcttttcctgagcttgctgggcaccggcttggtcatgtctttctgggtgcgctgtgaccaattggcggaacagaaagccagcctccagcgacaactggagattgagcgcgcagatagagctgacctggtgagcaacctgatggagctacaggccgccctgcgagcggagaaatttcatgtcgagcagctgcagcgcaagatccaactgttgcagttgccctttggccacggttgctaa

SEQ ID NO: 333411 - DNA, 708 bp, Pseudomonas aeruginosa
atgccacgacaccactactccaaccgagccatccttatcctcgaaaacccttgggagctggatgagggagattgcaaccgcacgagcgtactgccctttgtcgaaggcattgccaagctagcaggcgataccgaggtgtttcatgccaacttctatgacaagcgaagcttcgatcgagccctcgaaattctttgcagcgctcgcttcaacaacgcagttatctacatcgcagcgcatggcaacaaaggcaaggtgggcggcgtcaagctggaggacattcttttcgcaatcggagatcactccaagaacacgaacatcaccggcatcatgctgggatcctgcttcgccggcacggacaccgacacaatcgaggtctttatgcagggcacaaatatcaagtggtgtgtcggctactcgtccagctgcgattggctccctgccacgatgatcgactgctcgatcatggcctcaatgcttgagctcgacgaagaagaactttcagaccgcgcgaccatgatcgaactgctcgcccaagccctcgccccgttctcgcgtacctatgtaataggtgaagacaccgatgacaacgcgatgacaatggaagagtcgattcgcgtggttatgcaacctagcgggcgcgggaatcgcgctcgtcacgtgactgacgaggtcttagaggagcacgaaaagctccaggaattcgcctga

SEQ ID NO: 333412 - DNA, 2271 bp, Pseudomonas aeruginosa
atggtcctgaatctgaaagacgacgctcaactaaagcaagcatgcgacacaatcctgcagcaaaccctaacgcaaaaagggaatcgagattgggtagcaggcctgctcacgctgctgcaggaagtccgtgacgtcgacgaaccaacctttttcagcgagcggttccaacgaaatctgtgggatagcgagcaggttacgtccaccgggatggggcaggtcgacatctccaaggtcgcccaagacaccagcgtgattgagcagctgtggcggcttaaaagccggttcccgggccttgaaagagctcaacaagagctgcttgtcaccgaaacgtggaatgctctgatcaccgctatcacaccgctggtgaagcgttttcctaagctcaagatgtaccgcgtattcgcagtgctttgcccgggatttttcaccaccatcggtcactcccgaaaacttcgagagctcgcgagcgcaatgggggctgcccaaagaggtgagtcacgccagctccttcatcgcaaggtgctggaccgtcttgatgacgtgcttggtcccgccgccgacattttcactaccgccggcgtggagcgcatgaccctgccctggctgctgtacgtgacatacgtccaacggccagagcaagagtccactgagttggccgacctggaaacgggcaaggagctgctcaaccctctgcctgcagaacgtcggcgccgtgggctgctctcgattggcggagggattgccaccattctggcaatgattgaatttgcgcgagaaggatgtacgcgtgaagacttcatgcagcaccttcaatcgctcaatcccgccttcaagaagtcctcgttgagtacccagctcaatgcactgatcgccgaatggggcgtactgcgtgcacagggaaccgatctccaacttaccccccgcggcgaggccctcctggagtcaggcgagccagatgaagtaatcgactggatgattactcgcatccttggcttcgacaatctgctgctcacgctcaaacacaaacctctgtccacccagcaagcgaatgacctgctacgccaagtcaatcccggctggaccagcaatttcgcgccgagcgccctggtaagctggcttcgctccctggccctggttgaactagatggggcaaagcgccttcgtctgactgacaggggcgaagagtgggtcgcacgcattcactggactccgggtgccctgaaagcaataccaattgccgcaggccccagtgatctcgaggctccccgtgcggcttcgtcagtcaaagctagccggccagccctgatggaaatcatcaagggctttgctccagagattcaatttccccagcagctcatagctcagcttgatgcaggactttggagccatttccgtcgccatctggccgtactcaccgggctcagtggcgcgggtaaaacacagctggctcggggatacgcactgagcctctggcagcaaacccaagatcctcatgagggactgctcatcgtgccagtgcagcccggctggcacgatccctcggccctacttggctatgtgaacccactggaggccgacacgtatgtgcgtacggcctgcctggacttcctgctacgcgccagcgctgatcccgctagcccttacacgctgatcctggacgaaatgaatctgtcgcatccggagcaatatctggctcctcttctgtcagcgatggagaccggcgatcacatcgagctccatgcactgggggacggcatcagtgacgtaccgacatccatcccctaccccgccaacttgctgatcattggcaccgtcaacatggacgagaccactcatggattaagtgacaaagtgctcgacagagcatcggtaatcgaattctgggatatcgatgtcgaagcattcccgggctgggcgacaacatcgctgccaacagaacagatcaccatagtgcgctccctgttggcagagctcgtccaggcacttaggccaatgcgcctgcattttggctggcggactcttcacgacgtcatcggctacctccaggaggctgccaatggacaagtcatccccttcaaccaagccttggatcatgctgtttacgcgaaggtgcttccaaagctgcgcggcgaagacagtccgcgtttgcagaaggtattcaaagacgttattgaggtgctgacgaaggtcgaactggaagcgtccaaagccaaggtgacggaaatgctcgacgaccttcatcacctaggctcagcccgcttctggcgctaa

SEQ ID NO: 333413 - DNA, 1551 bp, Pseudomonas aeruginosa
atgacgagccttcactgctacaacgaaaaaaacgtagctataccggttacccccggcgagccctcatcagggtttgatgagctgggttcataccgtttccgagctctgccagagcatcggctatacatcgacgatgcgctgctgcccgagcagttgcatgaaggtgaagtcgtttggctttgggagccaggattctttgcaggtgaggtctcggctgagttaacaaacctgagcggcagcatcatcgcccagtaccgtctggatgtcgcccccagcagcgataagcttggcaaagacatctttacaaagatgctggaagacatcgttgccttcgacgcgaaactactgttcggcacagagagcgcgcagatctccataggcacggacggcgaggattcaaaccctcacctacagtacgcgcggcttcggcgctatggagagtcgctagttgccgcactctgtcaggtgaccgagcgcccccttaccaggcttcgccgagaacgcgttgcagtaggcgcgcaccaggttaggcgcttggagccatcagcggtccgagcagctcttaagagccgtacgataattctgggatcggagggcgtgacactgccctcgtcgcaagccagcttcgaagtcgctgcggtttttgagcatcaagacaatcctgcaaatcaggtgcttggagcgatacttctcaaggtaatgtctcgctgtcgccagacgattcgagcctttgaacgtattgccgaaacggagcgccgctccgatacccgatcggagctagcaccacgcttaaagaggcgtatcgccttcctcgatggcctgtaccgagcactgcggcgccagcaacgaatagagcccttctgccacctgagtactcagcgaatcactgccgccgggctcaatgcgatctccgctcaccctatctatgcgcgggcttaccgtttcggctggcatagcctaaggcctggggtcttgggaacgacaggcgaagagagcctgtggatcagcccttcctgggagatctacgagcgctggtgctatatcaaaatcgtcgagcagctgcgttcacgctaccccactctaaagtgggatggccgccatccgacacagagtgacgactgcatttgctggagcggaaagggttcggatttcacgttggaagtctggcttcaggtccgatgcccatcaatcgacaaaaagaactatgccggcttctccagcctctcaaaacggcgcttccctgacatcgcgattacgctggagtcagggaaccgacgcaagctcgtgatactcgatgcaaagtacaggaccagccgcgaaggggttctcgacggcatggcttccgcccatatctaccatgacagcttgcgctggttcgattaccaacccgcttgcgctcttctactaatcccacgcggaggagccgtagaaaagctgcaaagcaaggaattctggctcgcgcacggcgtcggggtggcccaactcggaagcgacgacgacgccaaaacggtcgttgatcaactggaagaattactggccgtaaacgactaa

SEQ ID NO: 333414 - DNA, 1599 bp, Pseudomonas aeruginosa
atgctgccaaccacagatcaactgccgactctaggttacctgcacaaggtcgtgtgcgactgcctggggctttggaatagcgacaaccaagacgtaacctttcaagtagccgccacagagaaggatcggcgcgccgcactgcggcaggctttcgaagcgatcaagaaggaggatggcaattatggatccctcagcgacttggtggcagtgactactcaacttgccccaaaagatgcgcagaaggtcaagaaaagtcggacgatccaggcctatgtcaatcacctatccaaaaccgactttgagtccctcgacgaatacgttgagttacgccaatacattgagtccctgattgttgagcgttactcccgttggggcgtatctgagctggctgtagtcttttacgtgtcggcgcttgcgcactacagagagtttgttagggagcacgcctgcaacgcggagaaccagcaacacagctatcagtcctttctcagcaatgatcttcactcactggcggcgacactagccggcgcattgttaccggacgatgcctggccaactgccgagagggacgagcaatggcccttgagagggttcgctgacgcagcttgccgaatcaccggcgtttcgctgcataagcttcatcagtaccatgaatttcagaaagaggggcccctcaatgaacaggcctggagccgtgagttcacctctcaaccgatcaatactcagtccaaacaggtggtcgaccggcttcgtaagcacagtcgcatgaagtgggaaacgttctatccgactcttcgacctctgacccatcatctgccgaagcacatccacgaagaggcattcgcgattcacgccttttcggccatgatcgctcacaacctcaacgtccatgtcgcggactgcgggccatttgagcctccggtgcaaagccgcttgatgcgtgaccagctcgagcaaggccactcaatacccagcagtgacttgcttgatctgttatttaatgactaccccatcggacaggaagccttcgcccagcaggcgcccaaccgctatcaagccctgatcgatcgaatcagggcctcaccgtgctcactaaacctcgcggcagagattcccaatagccttgagctagtttacaaaaatgaacaccggcgattcatcgatgggggcaggcgccttacgttgttgaacgggcccgcatggatcaatgagtgggcacgggcccaggacgcgatgctgtccggcgatagtctactggccctcacccacttcaatacagcgctcgaaaaggcaaagtatgtggccgggccattattcatcccgttttacattcaggtgtgcgcgttctgcaaatatcagtatcggctgctgtcaaagcaaaaagacgacgagttgttcgagcgattctacgatagcttgggcagcaatgcggcaggctacgcgggcctgatgggctacattccacgtcatgtgcgaaatcctcagacgttgatgcctcagaccatgctgccgctgaggtcaaagttgatgatcagcgaaaccgatgcactggcaagaactctggagcaacggcttgccgaagacgacgcctcttcctag

SEQ ID NO: 333415 - DNA, 198 bp, Pseudomonas aeruginosa
atgagcgtcggcaaagctgtcatcggccggttacggttcggcaacacctcagtaccaacaatcgcattgatggtggtggacttccctgccttcatcgtgccgacgacagccagcaccatatccaggttctctagcttggctcgctcaccacgcaacatctcaatgtctttgccaatcgaggcgctggagaacgtctga

SEQ ID NO: 333416 - DNA, 3633 bp, Pseudomonas aeruginosa
atgagctcgtcacaacggcctctggctttgcgcttcccgctgtacggcagtcgtctgattgaggcaagtgcgggtaccggcaagaccttcaccatttctgcgctctacctgcggctgatccttcgtcacggaggcgacgaagccttccgtgaggctctcttgcctccgcagatactcgttgtgacctttactgatgcggccactcgtgagcttcgagatcgtatccgcgcgcgcttagtgcaggccgcggcggtttttcgaggggacgctgagccagatgaattgctagctgagttacgcgcagatttccctgagtctgagtggtcaagttgtgctcttcgtttggagttggctgcacagtggatggacgaggcggcagtctcgaccattcacggttggtgccaacgcatgctgcgcgaacatgcattcgacagcgggagcttattcagccaaacgcttgaaacagaccacagtgagctgctggccgaggtggttcgtgattactggcggcagcagtgctatccgctagatggctcggcgttgtcttgggttatccagaactgggaaaaccctgtagggctgggcaagatgttgaaggacttgctcggcgagacaggcgaacctggcgatcaagcgctagggcagttactcgagcggtacctgagggcacgagaggaagcgttggctaccctaaaggcaccatggttggcctgggcagacgaaattgagttgcttctagatgaggctagagagtccaaagcgttcaacggaaccaagctcaagcagccagattacaagcgctggaccggaaaattgagggagtgggcttctggtaccgaagtagctttggatattggcaaaggcttcgaacgtctgacccccagcggcttggctgaagtctggaaatcaactccgcccgatcatgctgccctgaacgccatggtcacgctgtccgaagaactaaaaggtctccctgaccctgttgagccggccttgcgccatgcagctgcttgggtgcgtcagaggttcgatcatgaaaagcgtcaacgggcggagatgggctttgatgacatgctctcccgacttgatgcggcgctgcagagcgacaatggcctgcgccttgctgaggtgattcgccgtcaattcccgattgcattgatcgatgagttccaggacaccgacccattgcagtaccgcatctttgacacgctttaccaggtcgaggctaatcgggacgactgcggcttattcatgattggagaccctaaacaggccatctattcgttccgtggtgccgatatctacacctatctgcgagcgcgccgagcaacccagggccggcactacaacctagaacgcaattttcggtccagccaaaacatggttgatgccgttaatgagctcttcttgcgtgctgagcgctctgacgttggtagcggggcattcctcctgcgtgaagagttgccgttcattcgtgtgggcgcgcaaggacgtgaagaagtctgggtggttgaaggggaggagcagtcggcgctcaccgcttggtatttgacccaagacgagccagtggcaaaaaaaacgtacttcaaggctatggcagaaggagctgcgagcgagattgtccgcctgcttgatttaggccagcgagggagggctggatttactcatgaaggcgagttgaagccgctgctgccgagtgacatcgcagtgctcgtgcgcgacttcaaggaagctcaggctattcgaggggagttggcagctcgcggcgtgcgcagtgtgtatttgtcagataaagattcggtatttgcaggacaggaagctcgcaatgtgatgctctggctccgtgcatgtgccgaacctgaccaggatcgctcgctacgtgcagccctcgctagtgcaacgttgggactaggccttgatgagctcgaggctctcaatctgaatgagcgctcctgggagcgccgagtaatgcaatttcgaggctaccaccagcgttggcaacgccagggcgtcctgccaatgctgcgtcagctttttcaggatttcactttgccgcagcgcttgatgacgcgcgcggatggcgagcgggtactaaccaacttgctgcatttggcagagcttctacagcaagcatccgccgagcttgatggcgagctagcgctcattcgccacctaagtgaattgctagccaatgaaggtcagacggctgacgatcaagtgcttcgtctagagagtgatgaagcactggtgcgcgtggtgaccatccacaaatccaaaggtctggagtacccgttggtatttctgccgttcatttgtgcgtttcgatcggtagatggaggtaagcctttccaggtgtttgatggcgagcgacggcggctggtgctcaatgcagacgaccaagctctagcaagcgctgagcgtgagcgtttgggtgaggatttgcgcttgctctatgttgctctcacacgtgcacagcatgcgtgctggatcggcgttgcagatctgaggatcggtaccgcacacaagtctcggctacacgattctgcactgggttacctgctcggcgatggtcaatcgctagccgctagcaaagagttgacgaattggctggaccctttgatcaaccccttgcgtagtacagcggcggtggtcccagaagccagccagcagtcttatgccgctacgcaggaggacctccctccggtccagtggagcacgccagttcgaagtgcggcggagcattggtggattgcgtcctacagtgctctgcgcttcgaggagggcgcgacagcccctgctagccggcacgacgacgctgcaccggacagtttggcaatgcaaaattccacggatgatgacagctccgacgcggtgccggcagcgctgctgacgtcagcccaaggtctgcaccgattccctcgcggctcgaatccaggaaccttcttgcacggccttttggagttggctgctgttgagggttttgctcactgtctcgcgaacccagcgcagttgcgcgaagccgtagcacgacgttgccagcggcgcggcctcgaggcgtggatcgatccgttgtgcgagtggctgtcggcatttctgagtcagcaaatggctcttggcgggggaggctcggtgagcttggcggacctgactcagtatcagtccgagctggagttttggttcgaggcccagcaggtcgatgtcatccagctcgatcgaatggttcggagcactgagttacccggagtgcctcgccagcctttgcaggcggacacactgaacggcatgttcaaaggcttcatcgacttggccttcgaataccaggggcgctattacgtagtcgactacaagtccaactggctcggtgctgatgatggtgcctacacccgagaggcgatggaggcttcgatggcggctcatcgttacgacctgcagtacgtcctttacgtgctagcgctgcaccgtcaactgcgtttacgtctgccggattacgactatgaccgtgatatggggggagctctctacttgttcatgcgcgctccaggaaatggtgtttaccaagttcgccctgcgaaggcgttgatcgagcaactagacaccttgtttcttggccaatcccaggagagcttcgcatga

SEQ ID NO: 333417 - DNA, 3399 bp, Pseudomonas aeruginosa
atgcaggagcttgaacctggtctgatcatcatccacggcaatcatctggaagagctgcgttctctttcggtgcagtggatgcgacgttacccattgcggccactggaaaacgaagtgcttttggtgcaaagcaatgggattgctcagtggcttaagcttgcgctcgctgaacgagaaggctgtgggattgccgcagcactggatgtcgatctacctgcgcgctttttgtggcaagcctatagggctgtattgggcaaagacgcgattcctcagcagtcgccgctggacaaggctcctctaacctggcgcttaatgcggctcctacctggcttgcttgctgacgatgtttttgctcctttgcgtcgctttttagcggacgatagggatctgcgaaagcgataccaactggctgagcgcctgtctgacttgtttgatcagtaccaggtttaccgagcggactggttggctgactgggctgctgggcatgatcgactacgcacatcgcgtggtggcgagcagctgttgggcgatacatctcagtggcagcctgccttgtggcgagccttgctcagtgatgtggggcaagagcatttggcggagaaccgggccggagtacacccccgctttgtcgagcgcctgggggagcttaaagagcgaccgccaggcttgcctcgccgattaactgtcttcgggatctcgtccttgccggcgcaggtgctggaggcactgcaggcaatgtcgcgatttacccaggtcatgctgtacgtccacaacccctgccagcatcactggggcgatattgtcgaagacaaggatctgctgcgtcacgagtaccgccgccaacagcgaaagggtggattaggcggaccactcgacgaaacgcagatgcaccagcatgcgcagccactgttagctgcgtgggggaagcaggggcgcgactacatcaacctactcgaccagcatgacgaaccacagcgttatcgtgatcggttcgagcgtatcgatttgttcagctcggctcctgaaagcacgttgcttggtcagttgcagaacgacattttagatctacgcacactggccgagactcgagcaactcacccgccggtggatcctgatcttgatagctcgttgcgcttccatgtagcccacagcgctcagcgtgaagtggaggtgctgcacgaccagcttctggcgtgctttagctccgacccgagcctacggccgcgcgatgtaatcgtcatggtgccggacgtgaatgcctatgcgccgcatattcaggcggtgttcggtcagttcacccctggggacccgaggttcattccgttcactttggctgaccaaggcgtgcgtggcaaagaacctctagtgattgctttggagcatttgctgcgtctgcccgagagccggcttagtgtcagcgaaatactcgaccttctggatgtagcagctgtacgtgcgcgctttggcatcgttgaggaggacatgccgacgcttcgtcgctggcttgagggggctggcgtgcgttggggtttggacgctgcccagcgtcagtccctaggccagagtgaagggctggagcagaacacatggcgcttcggtcttcgacgcatgctgctgggctacgtagccggcggcgtcggcagctatgccgagattgaaccttacgacgaggttggtggcctcgatgcagtgctgattggcccactcactcgtttactggacgcactcgattggcatctgcagcttcttcgagagtcagccaccccgttggtttggggagagcatttacgtgggctgatggagtccttcttcctgccttgcagtgaaggcgaggagatgttgcgcacgcaactgttggatgctctggatggctggctggcgctttgcgacgcggcggccatgagcgaggttctgccattgcaagtagtgcgcgaggcctggttggcaaacctcgatcaggggaggctgagtcagcgattcttagcgggttcggtgaacttctgcacgttgatgccgatgcgggccattccgttccgtcatgtctgcttgctaggcatgaatgatggcgactatccgcgcagccaggctccgctggactttgatctgatggctggtgattaccgtccaggtgatcgctcccgccgtgaggacgaccgatatctactgctggaggcattgctggccgctcgcgagcgactttatgtgagctgggctgggcgtagcatccgggacaatagtgagcgccccccatcagtgctgatcggtcagctacgtgatcatttggctagtggctggcgattgccgggaggagggaagttgctctcggcactgacgacagtgcacccgcttcagccctttagtcgacggtattttggagctgatccaggtctctttagctacgcctatgagtgggccgagctgtatggggaggttacatcacccacagcatcgtccgttctttcccaatgggaggagggcaggcaggtcagccccgagcaattacaaggcttcctgcgtgatcccgttaagtacttctttactcgtcgcctgaaggtgtacttggacgaggatgagcaggcgcagttggacagcgaacccttcagccttgatggtctcgagcgctaccaattacaggagcaattgctaagggctgcggaggcagtaccgccatcagattgcgatgacgcgttgaaggctgctgctgatcgattaactcgcagcggtcagctgcctcttgccggatttggtgagcagtaccgctcagatcttttggagccactaccgaatcaaattcatcgatacagcgcgctatccaggctctggcccgaatgccaagcgtcctccttgccgctggcttttgaggcatccggtgtccacctgcaaggctggctcaatgagctgcgttgtcatgccgacggggccttagcccgtttagagttgctacctggcagtctcgccaaatcaaaggagcttaagtggcatcgtttgttgcggccgtacgtcatgcacgtaattgcagcagcctgcggaataccgatgacgactttgttggtgggtgaggacaagtcgctgagcttctctccggtacctcaggaggatgcagcggatgtgctgacagggtggctgcacgcttggagcactggtatggcggcccctctgccgatcgctctcaaaacctctgtgaagtggctgcagagccaggatgaggataaggcgcgtacctgttatgaaggcgccgtcaaggtcaacggcgaggtcacgactagtgccagccttgcccgccagtatccgaattactccgcgctggtcgcagatgggcagttcatcgatttgagtcagcagctctatcgacctcttctggatagtcaaccgacagtacttgaggagcaccaggaatga

SEQ ID NO: 333418 - DNA, 624 bp, Pseudomonas aeruginosa
atgaaagacgttttccagattgagccacttacgcacattgatcgggctcagtcttacatctgttcgtatccccatatcttgtcggcaatgaagacgccgcatgtactggatgagcaggccttcgtttgtggtgcccacatggtttacgggtggatgccaaccattttggagatccacatcagcgagtcggtcgatgtccatgccggggtggcattgctcaacaaggctcgtattgccgggcgtctcagctgtgaagagattgagcaactagccagcctgatcaatcactctgtcgttggggcatccaagctgctgcactttgtgaaccctgaggcgttcgcgatttgggactccaggatctaccacttcttgcgccggaaggctccgcacgcttatcgagtcaacagcgccagtgagtatgaagcttatctggaccagctgcggcgcttgcagcaggacgatcgcttccctgtgctccacgcctccgtcaaccggaaaatgggatatgccgtatcgccgttgcgcgcccttgaagtggtgatgttccttaactctccaggtacgacgaagcttgcagagaatacgtcgcccgcggcaactgcggttgtcgctgagccagattga

SEQ ID NO: 333419 - DNA, 594 bp, Pseudomonas aeruginosa
atggagcttttcagagcgatcccatccaatcacatagccaaggcaagagatggcctacgcaggcatgcgtctgctcgtgttccaagcaatgtgccatatgtggtcgataacctctgggagtggctaaggcctttgggcatgccctctcgccggcacgctatatatgccagtcccacccccgaaatggcgcttgccaatgcaagttctcccctagatgagggggagcaatacattgcctgtcgcgtcatcgtcgatcctagtcaggtaaaaattgcgcagttatccgtgcgcgatgcgcgtgagcacccggacattcgggagatcgctcgctgggtgagtcgcaacggcaatgtattcaccggactagggggcacggaaaagcaacaagtggcgccactgtttatgccgggtttgcggcgtgaagagctcgaggatttgctccacaaggacagcctggttgcggagctctgctgctacatgagccaggcttcgaccttctggaaggctgagctgaaacccgttgctgactctgacggggagctgtttttcgagcttattgaccagcttgtcacctaccggctggagccggtctga

SEQ ID NO: 333420 - DNA, 999 bp, Pseudomonas aeruginosa
gtggaacagctctaccgccaagatctaattcttggcctgcttccgaacaaggaaaatgcgctcgaaagcgccgcggtccaccaacgcgtcaccagccaagggatcgatgtcgacaagcgcaccatccaacgcgatctcagtgagcttgaactgaagtaccctcatgtacacagccgccccaagggcagaggtaaagccaaattgtggtgggcggataggtctctctcacgcttgagcatgttgccgaccgatgcgatgaatctcgtcatgatcatggatcatgcgtcgcgattcgggatggagccacaggtacagaagctggctgctattcgggaatacgcagtatcccttcttaagggaaaccgcccagctcaggattgcaccggaaaaattgtcagcaatacccggttcgtgactctcgctccgagcccagtgcctcatgaagtcctagaggtgatacagcaagcgcttctggacggcaccagcgtgcgggccagttatctcagacgaggagcacaacggccaaaagagcttcatctcaagcctctggggctttcctaccaggactcgaacatctacctctcctgcgtattcaagggacttccagacggcgacatcgcagcccttcctctgcaccgttttttgtcagctcgctccactttcgaggacctcccggcacccgaaaaatatgacatcaactccaacgccgcccagaagagtctggtaagtctgaaaacagatcagccagtccctctgaagctgcgcgtaagcccggcgctttctgtccgcctacaggaaaatgcgctatgccccgaccagcaacttaaagcactcacagacggctggtggctaatgaccggcagcctccatttaagtcaaggattagacctgtggctcttaagtcagggggaacacgtggaggtgcttgagcctatccagctacgcgagcaaatccgtgagacgatcacgcgcatggcggtgctctatgaaatcagatag

SEQ ID NO: 333421 - DNA, 807 bp, Pseudomonas aeruginosa
atggggccgcgccgttggcattctcgcgacgccccgtgccgcctactgtctcgcgacgaaagcatcaacggcacggcatcgctattggcagacaagattccggagcagaccccacctgacggccacatcaccattggatggtcttccacggcatatgtcgacgccaagcaggtcgtgcaagacatcaacacgctctgcaacagctctccgacattgggccagctgcggttccgtcggcatcacatgacggctctggaggcagcccagggctggcccgataagcgattcgatgaggtccattggctcagggttcctccctccgcccctatcccctacctgcaactattcgctcatgcggatatcgtccatgtacatcacctggagccaccagacgccgatacccatcctcatgcccgccactacctatggggtaattgggatgaactggctgcgttctgggcaagcctgtatttagctcgagaaaatccatgcgtcccggggctggactggaacagttactccacatggtcgccaggtcccggccttggtcgggtggctagtttctgggccactactgcggtcctcgccgcggccgggctgttggcgcaaataaaacctgcggatcatgcagccacaccccaggccttgttgctaatcgaggccaatttggatctcaccgtcggcgacctcataagcgttttggacctgctggaaacatcaagcaagcaccaagtcatcgccaccggatggctgtctcgaggcttctcgggatgcggccttcgtctcctaaggtttggccccgggtga

SEQ ID NO: 333422 - DNA, 537 bp, Pseudomonas aeruginosa
atgccctacgtgcgcctcggagcgcccttcggtgtgcccaagctgcaggtagacgaggctactcgagtagcactccggcgtagctatgccgacgagcttggtgcttggcaagacgggaagaagatttacgcaatcgttcagatggcgctctgtccaaaatcccccggcacgttcgtagatactgccgacgtcctggctatcagccttttacgtctgagcgagcgcttcattccactggactcaagctacgaaggaattttggagaagcagctggttaaggccggacgtagcttcacaaagccgatgagattcgaccacaacgacgcagttttcccggacttctggctgctggatatggagtgcgactaccccattgaggttttcggcatgaatacgccggaataccagcagcgcaaggctgtcaaacgcactcattacgcgaaccgccagaagtaccccaaaggttggtggtactgggacctattcgagcataaagagattccgttgctaccttcgcctgcctcagagcgagcttga

SEQ ID NO: 333423 - DNA, 186 bp, Pseudomonas aeruginosa
gtggcggaatccttcttcagtaatttaaataaggagcgcattcgcaaacacccctacagaaccgaagatatagctttagccgatgttttagactacatcgagatcctacacaaccaaactcgccgtcacagccacttgggtggggtcagtcccgatgacttgaagcagccgagttatgaggcctga

SEQ ID NO: 333424 - DNA, 663 bp, Pseudomonas aeruginosa
atgcggcgccatgtaatcaacaccaatcttcacttgtaccatgataggaccttcgaaggcctgcccgttatggacaagaagggcccatttattgagcagtacctttctcgctgtaaatacacgatcgagagagccctggagcattactcgagagtattcgccttcagagtggacctacggctgccactgacgcgtgagctgcctgagcatgcttacacgaatgtagtcatcagggagttcctggagtcattcaaagccaagatcgagcatgaccggcagagagcccgggcgcgcaatcggtacgctcatgacagcaaggttcgttacatttgggtcagggaagtggggaggggagatcgaccgcattatcacctgctcttccttctcaatgcggatgcctacttcaaagtaggtaagaagacctctcgagagcaaaacatcttccatcgcctccaggaagcatgggcccaagcgttgtggctaagtgaagaggatgtcagtgggctggtagggattcctccagcggctgagtatcggctctctcgacgggccgcagatgagcgctcgttagagaggttgttctaccgaaccagctacctgtgcaaggctgccactaagacctatggagatggtcagcattgcttcgggagtagccggcactga

SEQ ID NO: 333425 - DNA, 198 bp, Pseudomonas aeruginosa
atgagaattattcggctgcaagaggtcatggctacaactggtctggctagatcgactatttacaaactgatcagcgaaggcacgtttcccaagcctgttcctttaggtgggcgatccgtggggtgggtcgaagaagaggtgcaggattgggtgctggagcgaattgaagagcgtgatgcggcattgaatgctgcataa

SEQ ID NO: 333426 - DNA, 1680 bp, Pseudomonas aeruginosa
atgagcgaacttatcaacgacacacttaaatttacggatccagaagagccgagaaagcaagacgagtggccatgctatcgagaacacagtctctttgagtccgcggtggaggagtcaatccgacagctggaggtccctagggagatggccatgatgtgcgcactcggagccatggctacggcttgccaacgatatgtagatgtagagttacccccaggaaatagagcacccacatccctgatgcttttaacaatcgccgaatcaggagagcgtaagaccactacacagaactatttttctggatcaatcgacaagataaatggaaaagccattgaagctaattctaaagatctccgagaacatcgtataaagcacaagctttggaaaacggagctgcgtcacctagaaagaatgtacggcaagtatgcaagtgtgggtgacgatgaagctgctgacgctgcaactaaggacattgaagtgcatttacgacttgagccagtccccaccccctcaggaaagttcctatatgaggatacgacgccccaagccttggttcagtttctctacgagaacgcagagaatggctgcctgctgaccagtgaagctaacagtatcttcaatggaaaagccatgagtgagctcgacaagctaaatactctttgggatggaggtaccctaattgtagatcgcctatccagggcccctattacgcttagaggcgctcgccttaccatggcgcttatggcgcagccaagtgtaatttccaatttcatgggacggcgcggggaagaggcgcgcgggactggatttctcgcacggtttctcgtcgcaaagccaaaacccaaagctggcgagcgcactaacagtatgagatctgctgcccaaccacgtaaggaggccttcgacaatcgaattcgtgagatttttgaaactccacttccagccgcccgacaaacgcttaaattttcagaacctgccaagagcctatggtttgaaatcgacaaatacatagaaaaccagatgcaagaaggcggcctattccactacatgaaagatcacgcatcaaagctattggaaaacaccagtcgcatagccgctgttatgcacgcatttgaaagaacttcgagtgatgacgtcgatattgacctcttcaccttgaagtttagctggagatttgcccaggcctgctcggggcacttctccaaaaatctggctaatgaaccgcagatcgtcacagacgcctgcgagcttgcaaacttcttgctgcgggtatctcaagatgactctcgcaacaatcacatctttgacgagggcgcgcctggtgcgaatctgagaataaatagatcaaatctcccaccgcatctgagagagggattcaagaccaccatcaccctcactcaaattaagcagctcggcccctataggcttcgaggcagagccaatgcagaccgattacaagctgctattgagctattggggaaactcgggcatctcataaaggaaaaaggtcgatacaaattcaaagaatcaatcattacggaagaggaacccatactacgaaatggcgagaccgtcacgatcacggcactaccactatacaaaaaccaagaatttttacttgatgagcgagtgagcggacgaccaagatctggacgttattgtatttttaataacaaatga

SEQ ID NO: 333427 - DNA, 747 bp, Pseudomonas aeruginosa
gtggcctcggtcggcacgagagatgagtttaaaaaggaaactatccgcacacttcaggagcgtgctgggaacaagtgttcagctaaagggtgcgagcgccttacttccggtcctaatcttcagccagataaggcaagtcgtatcggcgtggctgcgcatatcacagctgctgcacctggtggaccgcgttacgatccctctctttcatctgaagagcgatcctctatccgtaatgggatatggctttgtcagaactgcgccagacttattgatgttgatcccagtcgctacacggttctgcgcttaatgggctggaaagaggacgctgaacgtgctgcgctggccgaacttgaaggacggggaactcctcgttccttaccgaatgaggagttggacgaggacggatggatctgcccgcattgccggtcctttgtaaagcttcagcagactgtctgcttgggatgtaaggcagaggtgataacaggggcgactcaacaggaaaatgcgaacgctatgcaattgggggcaatagccggtggcgctatttcttttggcgtcctcacttacgtgccccaatggctgaattctgcattcaacttacacgttcctgggagttttgggctcggatttacagcgctaggggtcggggcaggtgtggcgctgataggtggcttcgctggcttgatatttgtcgagaggtattggagaactcagccgccgcggtttgttcgtcgaaaaatggagtag

SEQ ID NO: 333428 - DNA, 1383 bp, Pseudomonas aeruginosa
atggatgaagtcagtcggatcgagcgcgctagaatcaaagcgttttacaagctgcttgttgatcggcttggagcggatgtctgggctgagcgcaaagccgcctatgtgaaacgcatccgagagagggagtcgaagttcaacatcaagctgccgatcgagccccagctcttcatgccgccggacgatgacatcgattggtacatcttggcttcccatctagcctttgatgtccctgtcagtgactccgcctacagcagcaggcgtgtttacccctatgccatggcgatcggtgccgttgctgatcagttgagaaacgtccccaacataaacgctgttctcgacaagatgctggcgaacaacaatcagccagaaaggcagctatttgagctgttgacggcggcgttctacttgaagaatggctacgaggtctccttcatccctgaaaacagcatcacttggccgaatgggaaaaagaaatctccagatctacttgtgaaatttggggacttggagttctacgtcgaatgcaaacgggctgacaagcaaacaacgtattcgctgtccgaggaagaggcctgggctagcatctgggctaagttgagccaccacatgctcaaggcagcgccgtggagcatcatcgatctaacgttccatgatgaggtcgcagatgcgtcagcggatgaggtgatcaaggtggcggacttggctagcaaggcgggcggaggagtggtgagatctggatcgattagcggaaaaatacgcgctatcgacaagatggggctcaagcgccattacaaagacttctctgtcagggccaactgccctcagcaggaactgctggtgttcggcgatatagacagcaatgaaaagcgaagcatcgcgaccgtcggggctcgggtcattcgacccggaaccaacaatgacattctcaacatgttcgtcaaagacgttgttcgttgtgttggcgcccagtggcgctgcgaccacaagcaatcgctctccgtgcgttctaggcattttaaaggcctagtcaatgatggtgtgacccagattcctccagatcgccctggggttgtacacgtctggtatgagactcgagatggtgtggaaatcgaggagctgcgccgagacaagaacatcgacaacatttctaactacgacgcttctgactcaacggtgctaggggtctttgtccatgccgtcaattactaccccttcgaggacaactacgagtgggctgagacagtacaagactttgcccgagtaccagatctgagggacctcttcccatttcaggccttgatgttgtctgcgggaacagcagcaggggtggaggaaactactcattgggcccaagacaaagcggcaaaggtttcgaagtaa

SEQ ID NO: 333429 - DNA, 693 bp, Pseudomonas aeruginosa
atgaaatcacttccatttcacggaataatcttgctagagaaatccgaacaccttcaggccattgatgggactgtacatgtcgcactatgtgcgatggcggcggaagcgtttcttcaagacattaagagttattatcaggcgatatctgcgctacgaccttatactccgtcacgcacaattctcaacatgaatccggagccgcgttattttgggggtggaatttctataaacgggcggatggagtatctcagccctaacgagcgagaacttgaatcactgattgatgaccttgaatgggaatcattggtagaaaagtacgaaaagattattaggctcttggatggcacttggaataaagggggggatgagtcgtttaagaatcttcggcgactcattaaacttcgcaacaatctggtccacataaagtcagatgaaattgaacttggtaaagaccaaagcatctcggagcaccctcgcgtggtgcatgagcttttgagacttaaggttctcgacagcaacatgccgatgacttcctggatctacatgctcgatacggaaaagctagtgagctgggctaggagggcagtaatcgatatcatgaataatatactagggattatgccgaactacccgatatcgaataattttaaatctagctattcatctagccttaagacatttgattttacataa

SEQ ID NO: 333430 - DNA, 702 bp, Pseudomonas aeruginosa
atgaccgctacagtaaagaaagcgcttaaacatcttctagatatcggtgttactgagctataccacgccaacagcgtgctcacctcatgcgagtttcttaggcagggagcgctactttctcgtggaaccatcgaagcgctaaaactgaggcaaaccagccagtacaccgaccgcttagacaagcactacaacatctggaatgacgtgttcgttgataccgttgatatccaccatcgtggcagaatgccaaacgactacggccccgtaatgtttgtgctcgataccgagaagttgatgaatgaactctcgactggggtaataggctttacgcagtataacccaagcaaatggggcagcgtgaaagtgtcacgtagatggtttgctgacctagaggccgttgaggaggagtttgatgtcaatgactttgaccatatggtggtcttcaggcactgcggggggcatgtttctttgaaaaactcgctgaaacggatcgttgttgatgcccccgaagatgtcgaaggcatgggggttgatttgttcagctatgccttgggcagcctcaagcatgcaatgcaccttggtccgaagacttgcacagttgagcgtagggagtgccgggccggctgtggctgcaaggctacatatgaagccgacctcgatagagtgaggaaaatgtatcgcccatttcttcaaaaagcataa

SEQ ID NO: 333431 - DNA, 1368 bp, Pseudomonas aeruginosa
atggggcagttaccgggaggacaggcgcgcctgttctactcgttcgatctagaagagcacatcccgccgcaacaccccctgcgcagcattgaccaatgcctggatctcagtgacctgcgcgcccacctagcggatttctacagccccatcgggcgaccctcgattgacccggagttgatggtgcgcatgctggtcgtcggctactgctacggcatccgttccgagcggcggttgtgcgaagaggtgcacctgaacctggcctatcgctggttctgcgggctgggcctggaggacgaagtccctaatcactcgaccttctcgaagaatcgccacggccgcttccgtgacagcggccttttccgctggttgttcaatgaggtgctacgccactgcatggtggccggcctggtcaaaggcgaaggcttcgctgtcgacgccagcatcatcaaggcggatgccagccggcaacgtgggggggcgggcgatgaagtcgactggcgcgatccggcgctcagcacccgcgccgtgcgcgagtacctcgaagccctcgatgaggaggcgctggccgaagccctgcccaagaagatttcgctcaccgatccgcagtcccgttggacagcagcgccaggcggcccggcttactttgcctacgccaccaactacctgatcgacaccgcgcacggcgtaatcctggatgtggaagccacaccgacgcatcggaccgccgaagtcgagtcgaccaaaacgatggtcgagcgcgtcgaagcgcagttcgacctcaccccagagcgcctcatcggcgataccgcctatggcacagctccaatgctggcctggatggtcgaagaaaaggacatcgagccgcatgtgccggtgtgggacaagaccgagcgcaaggacgacagcctctccagtaacgacttccactggaatcaggactccaatgaataccgctgcccagccggcaaaccgctacgcagtgaatggcgcgccttcacccagaaaagatcgcgggtgaccaaggccaacaccatcatctaccgctccagccaaaccgactgcaccacctgtccgctgaaagccaagtgctgccccaacacgccgaaccgcaagatcgttcgcagcatccatgaggctgcccgcgacgtggctcgacgcatcgccaagacaccggaatacctcgtctctcgctgcgagcgaaagaaggtggagatgctgttcgcccacctcaaacggatcatgaaactcgaccgtttacgactgcgtggcctgacgggtgccactgatgagttcaccttggcggcgacggtgcagaacctgcgccgcatggccaagattttacctcaagggccaccgctcacggggtag

SEQ ID NO: 333432 - DNA, 2379 bp, Pseudomonas aeruginosa
atggctagattctttccagcattcgatcaagcggaattccgcagcaaaggcgagtacaccctctttcaggagctaacggcgctcgacgatagcttcaccgtcatccattcgctgccttggttgcgaggcaggaccaagcgggtgtactcacaagagctgcaggagtacctacgcgtctccttgagtaggaagcacctatccggcgaagtggatttcgttatcttgcatgcggagctgggcatgctttgcatcgagacgaagtcggggctttacaagccttctggcattcgattcattcacgagcgtgatgggtacgaaatcgatccactgaatcaggtcaaggacaatacttttgtcctcaccgagatgctgctgtcgtggcagttgaagtgccccgtcgggtacgcagtgcactttccagacttcgatcttgaaagctcacaaatagctagcgcttacgtaccgctcgaccggccgatccccgacggcattctgatcctgcagaagcaccgtagggacatgccggcgcgcatcatgcaacttatggaacactggaaagctgcactcaattatggcagccaggacaactttggtcgtgaagtcgagcatttcctcgatgcggtctggccgcaggaagtgcgggacgggcatctcggtcgcaagatcgtcgcggacggagagctgtggcttcgattagacgataagcaggcgcatcaggtggccatgtgcctcgatactaatcacaggctcattgcgggcttctcaggcagcggtaagacgctcattgcgcgctccttggctgagcaatttgcgcttcagggcctcacggtgctttttctgctgaagaaccgccagattacgcagaaagtcgctggccagttgagtcgttttggtcggacggtcacggttcagacctttcattcgtactgcgagtccctaggcatacggaatagagaaaaacgtgttattgagcccaactatgacaagcatcacttggctctgcatgggacggtggatcaccaacattcggtgctgattgtcgatgaagcccaagcgctcaacgaggacgatcacttggcattgcgtgaccatttcgccaatgcacgcaagttcgtatttgctgatgagcttcaggttttgcccggtatcgagaagggctgttcctatcgattcctagaggatacctacggtgagcgattcttctacctgacgacggtctacaggaatcccggcggcatcactcagaccatgatggagatgcggccgccacaacatgaggtgcacatccctcggccgacctccaagcaggacctgtctcggagcattagcagggatgtctctaagagtatccaaaccatgacggcggagctcgagagggccggtgtcatgaggcaggacatgatagtgctcagtcagttctccttgacgctggaggggagcgatgtttcgcgctccacgatctcagcgtatcgaggtatggagaagcccgctgtaatcgttgtagcgggttttgaaatggacgacaccacattagcgtgcgctctcgggcgtgccaccacgtgtgcctacatcatcgtgcctatcgacatgctcgtggggctgcggagcgtgaagtcagatttcctgcgcaatggattgaagatgatgaaccgctcagtggtcctcgaaaaggattcccgtaatccagcaccgcgattcatcgacaacagggtacagaagtacgcaggcttaattggaaggcatgagatcttcggtgaagggttcgtctacgcaagccgctggagacgatggatctatgaaggcggcaccagatggaacagccgcggagctcagctttggggctggtggctctcattatcgacggggctacccatctccggtatcgaccacgcgcgtaatgaggtgaccgacggagttctccaaaactgcgccaaatgcaataacacgacaccgcatgaaatgctcggcgcatgtctgacgtgcctggccacaccattggacgcggccaaggtctcagagattgtcctgcatgcggctgatttgggctccgtgcgatcaacgactcgggggcaatctatcgttgaggtcgcagcactagtcggggattacaattttccgcgctctcttgaccctgtgagaggcattaccgaggttgatttcctaactcttgccacgacggtcgtcgagtttcggatgcgctgcgaggcgagtgttgccaccaaatcccaggtggtgcgatggttgcgggaagtgttggtagtcagcgatttagttggttcagtcgagagtcttgcggggcgcacgatcagtagtctctgcgcgcagaagctcatagtgaagatcgacaccgggaaataccggctaaccgatcttccatag

SEQ ID NO: 333433 - DNA, 192 bp, Pseudomonas aeruginosa
atgggtgacctcaacagttggcgagtggtctgccaagaccccggagacgatagtggtgaagccatcatcgagctgccttccgagttgctggataggctgggatggatcgtgggggatgagttgatccttgagtgtgtcgagggtgtgctgtccttgaaacttaagcacccgcccggtgagccagccgactag

SEQ ID NO: 333434 - DNA, 285 bp, Pseudomonas aeruginosa
atgagtcgcgatgtccaacggcaggtcgatcatcaatcggcctatcactcctgctatcgcacggtcctgcgcaccgtggatgcgcgttacgacgttcgcggttctgtgctggcggaaatggtgaaggcctgtctggcgcaccgcgccgcgctgcctgcggtgcaacggacgtatttcgtgcagcacgcgccagcggaagcgatggcctacctggaaaggtttacggccacgctgctgtttggtcccaagggacgcttttcgccgcatgagtaccgctactcatga

SEQ ID NO: 333435 - DNA, 402 bp, Pseudomonas aeruginosa
atgaaccagcgagcactccagccagcggtgctgtcggccgccgagctgatcaactgcctgtgtcccacgaacggggcgccctattcggttgagcactatgccgagatctttggcctcagtcctgcggtgtttgccggccaggtcgctgcctatcgtcgcagccaaccagatgcggccagcgcatccgatgccgaagtgacgcaacgttttatcgcggatgtcctacgggtgatcttggccatagccgagagcggcgtcgccgtcgagcaggcgatcacttggtttcgcctcgagccgttaccgaccttcgaacagcagaccacggagcaactggtcagtcaggggcaggctgaacaagtgctgcagtttctggcctcctggcaggcggggagccagggatga

SEQ ID NO: 333436 - DNA, 273 bp, Pseudomonas aeruginosa
atgaacctcaaagctcagatcgagaagcatcttacccagttctgggacaagcgtgccctcgcgattgccgacgatccgctctctatcgacgaactgggcgcacctatggattcgatcgttgccctcgacgcgctgatagaaatcgggaagcttctaccggtaaaaatcccagtcgatgcggtgatccgcaacggtggctacgaaaccaaggagcagttcgtggagctagtcaccaaagaaatcttcaagctgctgaagaagaccggatcatga

SEQ ID NO: 333437 - DNA, 1014 bp, Pseudomonas aeruginosa
atgagcttccgagaattagccttgaaagccgcgtaccgcgcttctgaagtgttggaagaatcgggggccatgaatcgcctgcaccaaggctatacgcgaatcgacccctttctgattgctgccagccacggcgtgcttgtcatgctcaagccgctggacaagctcctgggtgcgttcatcggggacgactctcccggaattcttttgaataaccaacgctctgctggcctgatgcacatgacctgcgcccatgagctgggccactactgtatggagcatggcagcaacgctgacaagtcgattttctacgataggtccgctgctgagatcgaacaagaagcggaccaattcggcttcaacctgttaattccccgcgacctaatttcgcttgtcatgaagcggaagaaatggacgcgtcagtgcctgctacaaccgctggtgatgtatcagctgtcgctccgccttggtgtcagctatgaggccgttgcgtggtctctggttcggtacaaggttttcacccctttcgacattcagcgcctcctacgcacgaaacctgtcgacatcaagaagtccattctcggcaaggatcccgcagactccagaaaagaagtctggctccttgatgacttcgacaaggacgcgatcctcgaacctcgcgccgatgatcagatcgtcgtgcgcttaaagagcaacgcttcagctggttatctctggcgcgcggaaaagactgtagatgtcgagggagaaggtttccagctacaaccgatcacggtgccttctcacagtctcggggagactttgcgctttgggggacctgacaccatggactacgcgctggtcggtaacgtgacgcctagtacatcccctgtgccgttagagctgtccgagcgaatgccgtggctggaggaaggcgaggtactaggcaaattcaggtcggcaacccaattcgaagatctcgaaacaggtctaaccgcctattccaagaagcagtatctggaggatgcggaatcttga

SEQ ID NO: 333438 - DNA, 804 bp, Pseudomonas aeruginosa
atggccaagattatcgccagtgaaggcgtaggaactgcatggctcgcagcagccaggcacctcaataccaaaaaaggtcggattgagcgaaacatggtgctggaaatctccaagccccaggcactctctgcggacgaccggaccatcatcagagccgtggacggccagcttcgccaacaccacgacgatctgaccatcgagacagtctcaggcacgattttccccaacggcttatatcgcagagaagggcgccctcagttctatacgacattcttagacctgatggaggtaggaaaaaagcgcaacagctggggcacctatgcgctgcgcatgattcaacgcaaggaccccaagggcaaggggactttcaacccgctcgacagcattgtcgaaaggctgctcctgacccatcagggcacaacctaccaagcagcctacgagcttggcgttcacgacatccatgaggatttcgaccctgcccttgaaggctacggcttcgagctgccgatctacgatccatcgcgcgatgcgaagccgaagaagattccttgcctgagtcacctgagcttcaagctgaccgccggaaagctcgatctcacagcagtgtaccgctcccattggtactgcatgcgagctcagggcaacttggtcgggcttagccaactgcataaatttgtgggtcaagaagcaaattacgaatgtggaacgctgacctgcattgcgacacatgcgtacctggactctgagagcttcggcggcgtcaaggcaaccagcgacttcctgcagtccctgccggcgacctga

SEQ ID NO: 333439 - DNA, 672 bp, Pseudomonas aeruginosa
atgactcctacctcgttcgttaaagcccttgcagcgtttaatcttgagaacgtcttcaacccttacgcggatacctgtccggtgcatgatcgtgcgacggccgcttcttgccgccgccgcaacctcaagagctacctcagggctgcggagagcatcggcgtcgacacgatttggatggggcgtgatctgggttatcgcggcggtcgacgaactggcttggcgctgactgatgagtatcacctgtcagagatggccaaactctacccaggttgcgagtctctgcaggccactcatggtcctgctatcgccgagcgcaccgcagcggaaatttggggggtgctgagatcgattgatcttccgccactgctctggaacgttttcccattccatccccatgaagccggcaacccgttcagtaatcgccgattcagtaccaaggaattgagccaggtagatgagcttaacagcgagttattcagatggctgaagattcgtagggtcgtggcgatcggtcaggatgccgctcattacgcttcccgcttcggggtgacggttgagtgcattcggcatcccagctacggcggtgtacgagatttccgtgctgggatgggacgtctctataacgtcagaaccaaagcattcgagcaaagccgacaggtagcgctgctgtaa

SEQ ID NO: 333440 - DNA, 1233 bp, Pseudomonas aeruginosa
atggccgcagcagcagttccgagacccgtaccgctcaccctgtccaagtacctactgaaggctcgcgaaagtcttcggttcaagactgatgatcccgacgcccttgcagacagcctgcagagcattcgtttcgggtactttggtgaagtgggcggtctgctttcttccgtaaagaaagcaggtcgagaccggctgcagaaggcacaaagcgagatcgcggccgaggagttgggcgacgcgctttggtatctggttatcgcagcgcacatgctgtccatttcggccgatgacctggggcaggagtgcatacgactccttcgcgaggagtacggcgaaaccaacaaagtaccgtctatccccgtcacgttccgtcagatagacggtctgatcgattcggcgcgtgaggaggatacaattctgcgctcggcgcagatgggtaagctcgctgcgagtgctggtgtcttggccgaaatgtcgccgaaggcgctagatgcgatggcgctcaccaggcgggcaactcattttggtcggttgttgggtgagcttgcaaagacgtgtgctgcgttcagcctactattggaggatgtggccctcgccaatctcgagaagacagccagccgttggccagccgaaaagagccgcgacattcctctgttcgacgcatcctttcctgagcatgagcaattacctcgagagttcgatatcgagttcattgagcgcggccagggcagagatgcgcatgttgtccagcgtttgtggggggtgtacatcggtgatcgcctcaccgacaacagcaacgagccggatgactaccgcttccacgacgtattccaccttgcctacgcggcctacctgggctggtctcctgtccttcgcgccttgttgaagcgcaagaggaaatcagtccccgataaggacgagaacgaggatggtgctcgtgcgatgattattgaagaaggcatcgctacctggatctttgatcatgccaagaagcacgactattacgcgtctgttcaggaaggcagcctggactatggactgctgaagcagatccagagcatggtccgtggctacgaggtcgaacagtgcaagctgtggcagtgggagcgggccatcattgaaggttttaaggttttccgccagctccgtgagcatcgcggtgggaccgtaaaagtcgatatcaacaacggttccctgatctatatggagccggaacagagcgtcacgaaatga

SEQ ID NO: 333441 - DNA, 1890 bp, Pseudomonas aeruginosa
ttgggtaagccgatagtcaggattagcccacgcccggcaatttgtgcggacctcagcggtgagaaatttgcgcaagcgaatggtgatctgattgtctggtggtacggccgattgctgaccgaggtgatggatagcgccgggaaaggacagtctcaccgatatgtcgaagtgattttccgccaactccacgacgacatacctgccacattcaaaatcgagcaccttcccattgctctgctcggccagctacgcatcggcaccatttggcgtaagggattgtgtgtggcagagatgcagatcgatcccgtccaattccataggatcaatttcaccgaaggcgcatggcacttctcctcgctcaaaaccgcagcgcagcagggtcttccgctgcccttcaccgatcaagactatgccttacctcgccaatatggattagacagcagctggatgctggattttccactacctggaggcagaaacctccttatcccgtgcattgaagtactcagcaggtgctattcccacagctcggaaattccccgcctcctgacaacctacccgtgggagcacgtccgcagcgtgctctacagctccaccgagaaagatccctgcaagtggatcgtgagaccagggaaaggcttcaaggctgacgatggcgtgtacctcgcctggaccctctatgacaaatacgcggaaagccgctccaagcgcatctacagcgacctcaatgtcggcaagatcaatcaacgtggccgtccagaatcagcagtagccctgcaggttgccatgtggttccaaggtctgcactcactggagtgcaaaggtctttgggtgaacgatggcgctacctttctctgtcttgaagtccttgccagaagcgaacccacttcgccgaccttcgagtgggaggagatcgattatgagcgacaagatgacggccacgatgctgctgaattgatccctcgcagaagtcgaatcaacggcgaggaagagctcgatccgttccgtataacaggcactcaggatccggatagaaacgccaggaagacgacacacgcggatcctaaattccgtattctcggtcagcgatgcaaattcagacgcaccaaggttacgaagccgcaaggtgaaaagtacctgcacgctggcgagatgccccgttacccgctgtactccacaggcgatccctcctcaaaggggaaagacatcggcaaggttgcgttcaatagtgctgttgtaggcttaggcggcgtgatcaacgatctttggcaggcactgcagcagatcagggcagaacacccgtcgatcatccaccgcatcgaatggttcactgaagagcaaggcttccaaaccagctctccccccgagctccagcccttgcctcatgtggatgattacgaacgacggatggcaattcgctggatatcgcatcggcacaatccctccggtacacgcggcatcttgatcgtgcgcgtaagcgccctctattcgcagctgtatttgctggaagtgcaacgcaagaaaaagcgagttccggtgaagcccagcccgcaagccagccgtctcgaggtggcagacccactccttcaaaccaaagaggagtcatctgctgggctcgccattgaattcccctccgatggtgtagcgatggaggagatcgcacagatctgctcccatattgcctacgttcgagggaagttcaaggaactggccaagctgcgcgaatatccacatcacatcatgaggcacacccactcaggggggaatcgcttcccactcgagtctgctgtgatgaatatgtttgcgagtatgggcgtgactctaccgtccgctgttaaggccgacgtacctactgacctagcgcactcagcgccggaaatggtcgaatga

SEQ ID NO: 333442 - DNA, 1449 bp, Pseudomonas aeruginosa
atgacggtcgaaacgcctcttgatcgctgctgtgatgaatgcagcagagcgatttcgaaggcgaagaaagtcttccgcggcaaaagttattgcgagacctgctatgcgcggctcttcaagcgccggctctgcgcaggatgtggaaatttcgcgcgcttacccacatttaggcctgaagctatctgccaaagatgcgaggcagccaagccttgcgttcgctgcggtcgcaccggaaggcctgtggggaggatgactccctatggcccgtcttgtaacagctgtgcgcattacttcaatgagccagagccatgtgatgtctgcggcaagatgtcgacgcaactcagtcgggtacttcgccgcgatccaaatatcaggtgttgccccgcttgtgcgcacagcgatgcggaaacttgcccgtcttgccgccggtaccgacatcttgtggatgatggtaccggccggcgcgtctgcaagccctgtgcgaccctaggggacgtggcatgtctgacctgtgcagcgccaatgcctggtgggcgcggcaaagaatgtgaagcgtgctattggcaccgtacttacgagaagcacctccgcaataatcttgctgccctgatgcttcccatcactcaggcgctgtttaggcagttcgctgattggcttgccaagcgatgcggagagcacaaggcttcgctcaccttgcgcagatatgttggcctgtttctgtacctagatgagtcgaggatcggtgttccttcctaccgtgacctcttggaacgctatggggccgaaggcctacgtcggattcgcctgcctatggcttggttggaagaggcacacggcgtggttgttgatgaacggatgcgggaggaacattccgatcggcgacggattgcagaaatcgagcaaagcctgccagcaggcaaggcaactatcgtctggagtggctaccggcgtgccctggaggcaaagtttcgcgaggggaatagcagcctacggtcaatgcggcttgcgttggcctctgctgccagtctattgctgattgctgcgtcactagggcaagagattccggaccaggtgtccctcaggcgatacctgagaaacgcgcctggtcagagggcaaccattcatggttttgtccgctatctcatagatactcatggggcgaagctggaccagaaaaagggtatccatgggttgtcaggcgcgaggcgtacgcggctagaggccgaactcttcgggctgctggaggagcagcccaggcaaccagatttcgagcggcgttggctcgttgccgctctcgcatactttcatggcgtacgtcgtctagggaaggacgcactgagttacgtccgggctcaacaatcgggccatgagggatttatcatcactgttgccgaagaggattattggattcctcatgccgacagtagagctggggaatttggcccttaa

SEQ ID NO: 333443 - DNA, 1107 bp, Pseudomonas aeruginosa
atggaagagatcggaatctggcatcagggaggtaagcctgtagaggggctgtggcctctgacgcctgagctattgtgcgacgaaattctttcctcctggttggtgaggactgccttggcgcactgctgtgcacccatcgcactgaccgattcggtctggccctctaaacgattctggacacgtgaccctgatgcttcgcagtctgctgaggaccttggcgtgttagcgctgcattcaggaatttcgcagagtgcattggcctcttcctcactggcccgggcccaccgactgattaacggggagatgaagcgttgcgatggtcaactctgggtcctgggtttggggcaacgaaaccgaaggcgtgccggtgggttgcagtactgcccgaagtgctttgctgagggggcttgcttctacaggattcaagataggttggcgtggcacacctgctgtccaaaacaccaatgtttactcgctgaccgctgcccccggtgccgttctgcagtctgccctcagctcctagtgccgccggcttgcgatctcgatcgttgccatcgatgcggaataccttttggtcacgacgctcttcctattcccgatagtcgtgcgtttgccttccaaaagcaggcggagtccctctcgcaagggactcgcgtgctgtacggcgatgcttgggtctcgggggaagactggctcaaagtggctcgatggatgatcggacttctgcgctctgcatcgattcggatgcctgcgacgatggttcgatttctgtcggcaatggaggtcgatcctggcgacattgttgcggtttcgagcgggttgcgtttcgagcttctgggccctctggagcgctcgcggatcttggccacgtgctggccgatcatcaatgccggtcctgagaggtttgtgcgtgccgtgcgtgaatcaaggttaagatcttcgtacgctcctgtgcgcgctcaagctgttccgcaatctgtggccagcctggctcaagcctttttgcactcgccacggggctctgtaaatagggccgtaaagggtccacgttcccctgatagcgtaatgaaaatgtggcaacgcctcctgagaaagtccctccgatga

SEQ ID NO: 333444 - DNA, 723 bp, Pseudomonas aeruginosa
atgccgaatgtgatgctcgtcggcgaatcgaataatggaaagactacgctgatcaatcgcttcatcgagacctgtgcccaggcctatgtggatgatgcagctgagagtgttattcccgtgatctcgatcgagctatctaaagctgacattcgtcagctgtacgtcaaaatccttgagtcgttctgggctcctttcaacgtcactgctccgatcaccaagctgcagcatcaggccgaacacatgatccgttcctgtaagacacggatgctgatcattgacgagatccaggcgctgcgaaagggatcccctggcaaggtgcgggatgtcatggacgaaattaaaagcttggccaatgtgctgcagatatcggttgtcggggtaggtgttccgcaggccgtacagttgcttaacgcggatgctcagtacgctagccgattcgaagtcctgactctccctcagtggtcactgcggggcgatttccagtcctttctgaaatcctacgagcgagcgctgccgctgaagaaggtgtccaagctctattccccggagcttacgcaagtgatccactctataacgggtgggaataccggttatgtcgagcatctattggtcagctgcgcgaaggacgcaatagtctcaggtgctgaattgatcgaccgacgcatgctggaaaagcatcaatggaagagatcggaatctggcatcagggaggtaagcctgtag

SEQ ID NO: 333445 - DNA, 1857 bp, Pseudomonas aeruginosa
atggtgttgcaccagcgagaggtttaccggatcaaccaggtcctggacttcaactcagtggtggggctctccattgaaagcggccgagcaaagcttctgcgagttgctgaactggcgcctgcccccaaggaaaagatcaaaggtctctacgtggactgtgatcttgagcagatcggtgcagacgattgggctcttgctcaagagcgttttgcgatcatcagtccactattgaacggtagggctcaggtgaagggcgttgtggaaaagcgagcaaaagaggctggcgtccatgttggcacagtgtatcggtggatgagccgatacaaggagtttggcgaggtcgctgcgctgattccttttaagcgcggatgggcaaaaggtcgaagtcgcatttctgcagagcaagagaaggtcatcaccgctgtaatcaacgagtacttcttgactgatcagcgcgtcactgtgaagaaggccatcgacgaagtcggccgccgttgcgctgagctcaaaatcaaggtgccgaacggatcaaccgtcagagcgagaattagggggctacccgatagggttctgaccaagggacggggaatgaaggagctggctgacaatcgccatacccctcgccccggatcaaacggggctgattaccctctgcaggttgttcagatcgatcacactccggtgaacataatgctcgtcgacgatgttcaccgtagatcgattggacggccatgggtcacgttggcgattgatgtgtattcccgaatggtcactggatattacttgtcgctcgatgctccctcggcggtttcggtggccatgtgtctcgttcattcgatgctgccgaaagacaactggttgttgcttcatggtgtggatggcagttggccggtgtggggtaaaccggtcaccttgcacagcgacaacggcccggatttcaaagccgccaatctcatccgtgcttgcgcaaatcacaacatccagcgcgaattccgcccggtaaaaaaaccgcattggggtgggcatatcgaacgcctgatggggactttttctgtgattgccaaccaagagcggggaaccaccttcagcagccctgcagagagagcggagtacgattcggagagccgggctatctactctttcgaagagtttgaagccaggctcgtcaggaacattctcatgtacaacaacacctatcacgaaggcatttacatggcgcccatacgcaagtggaacacggcgtttttgggtaccaatgattccgggcctctgatggggataccggcccgtcctgcagatccctgggcattccagctggatttcctgcctacggagcgccgtgtcatccataactacggcgtggaaatggatgcgatgtactacggtgacgcgctgcgtccgtggattggtacagtggacagggagaccggcaagcgccggaagtttcttttccgtcgcgatcctcgggatatgagtcgcatctggttctacgacgaatcgcttaagcagtattttgagatcccgatcgttaacgcggtgttcccaggtgcttcggtttctgagtatgtgagggcaaagcggcaagcgatcaaggaaggccgagacgctgaggatatcgagaccatcaaccgaatgattcgtgagaaccgtgagcaggagcaagcatctgctctgaaaaccaaaagcgcccgcagaaacgagcagaaacggaagaacaacgcgaagaaagttacaccagccacaccgatcgcagtgcccccatcaatcagggaaacgaaaccagtgccggcagcattgccgcccgaatcgcaactgctggatttggatgatgttgaagaatatgggggggtatggtga

SEQ ID NO: 333446 - DNA, 387 bp, Pseudomonas aeruginosa
atggtagaggtgaagccagaggaggactggcgcgagaactggcgcgaatggttgcccaaatggaaggctgcctggcgatacgccaaaagccgaggctggagcttccacattgttgatgagtcgcggatccgtgatcaggtcttagagaacgttatcttccttgaacgtcatctccacatggattttgcgccggaagacacctcagctgtcctcaagtcgatatacgaaatgggcgaggcgccgctgcactacatcctggcgctgcatttctccggattcgaacgagaggggacctcccacctgtggcatctgctcgcctcacggcagctcgattgcgacgtccgcctgcctttggatgacttcacttcgctgtggattccgacatga

SEQ ID NO: 333447 - DNA, 852 bp, Pseudomonas aeruginosa
atgtcgcaaacagtgatgatcgccggctgcggcgatgtcggcgggcgcctcggcgaggcgctgctggccgatggctggcgggtccatggcctgcgtcgctcggtggacgccttgccgcaggggatcctgccggtggctggcgatctgcaggctccggagtgtcccgcgcagtggccgagcgagccgctcgactacctggtgtacagcgccgccgccagtcagcacgacgaggctggctaccgtgccgcctacgtcgacggcctgcgccatgtgctgggctggttgcaggcccacggccagcggcccaggcgcctgctgttcgtctccagcaccggggtctacgcgcagaccgatggcggctggatcgacgaggagtcgccggcgctttcccaggcctattccggacggatcatgctcgacgccgagcaggtcgcgctggacagcgggataccggctacccgcgtgcgcctggccggcatctacggtccggggcgggagtggctgctcaaccaggtgcgccaggggtaccgggtggtcagcgagccgcccctgtatgccaaccggatccacgccgacgatgcggccgggctgctggccttcctgttgcgcgccgatgccggcggccaggcgctggaggactgctacatcggtgtcgacgacgcgcccgtggcgatgcacgaggtggtcgactacctgcgccagcgcctgggcgtcagccaatgggccgacgaacattcggtacgccgcgccggcagcaagcgttgcagcaatcgccgcgcccgggcgctcggctgggtgccgcgctatcccagctaccgcgagggctacgcggcggtactcggggacgcctga

SEQ ID NO: 333448 - DNA, 390 bp, Pseudomonas aeruginosa
atgtcggagcctgagaaggagtctgtcaagcaaagtgaggttccaggcccggagctcccgtcggatgccccctggttgaagcaggcgaagggggattcagatgccgttcgtgaggagctaaaatggaaggagcttgatccgcgaagaggggcgcacaatgaggtctatcgtctaacgatcaaagccttgaggtttggggcttggattctcggggcgctggtgcttgttcggctgtggcaccttgccggcccctatcagtggggagacgcaaagctccgctggcttagcgtagaagacattaatgctattgacaaaatgctgttcagtggtgctttaggtggtctagtgcttggccatctaaaggaaatcatgaagccgcttgataagtga

SEQ ID NO: 333449 - DNA, 474 bp, Pseudomonas aeruginosa
atgtacgacgtgctcactgtggcagatgcgatcctcaaaatcgccaagtcaaaaggagtaagtctgacccccatgcagctaatgaaactcgtgtacatagcgcatgggtggagcttaggtctgcgcggtattgacctattccgtaaccgtatagaggcttggcagtacgggccagtgatgcctgacctatatcatgcgaccaagcagttcggtcgtaatccaatcccgctacacatggttggggaggggccgccgccagtcaatatggaggacgtagacttcctgacagatgtatttgataaatatggccatttgtctggacctcaactttcctatctgacgcaccagagtgggacgccatgggatacggtgtatcatccagaactccgcggagttgagattccggacgacctcatcagtaaccattataaggacctcctgcgtggcaggaggcctatgaatgtcggagcctga

SEQ ID NO: 333450 - DNA, 321 bp, Pseudomonas aeruginosa
atgataactaaaattgaattttatataatagatttcaaatacagaatctccaccgaaagagatactttccatggagagagtcgaaccgtttttccttcagccgtaatgcctgaaaacttttctgaagacggattccagaaaagagtcgcagaaatcctgaacagcaaaacactcgaactgctgcctcaaattttcattgagcacaacatcaataccaacgacagcagcgcaatttcctttgacctagaagtaattaagtcaacaaaagtcaacacttctgtctcaaccagcatctcgcaacaaccatccaaccctctataa

SEQ ID NO: 333451 - DNA, 234 bp, Pseudomonas aeruginosa
atgaacagcaggccgaccaccaggtacaggctgccgctctgcatcgccgggacgaacagcgccaggctcacggtcagcgccgccaggctgagcacgcaggccggcatgcggcgggcgccgaacagcttgtccgaggccaggccgatgaggatcggcccggccagcccggcgacctcgaaggccgaaggcacgatggccgaggcgaccttgccgatctccggcatgcgttcgtag

SEQ ID NO: 333452 - DNA, 876 bp, Pseudomonas aeruginosa
gtggggattcctgagcgccttcagcagggcgccggaatggctcggccggggcgcgttggcggggcgcgcggcctcggcctccacggacggcaggccaacgtcctgcggacggttgcgctggaggaagaagaacagcacggccaccgccagcaccactcccgccgaggacaggaaggccatgcgccagtcatgcgtcaaccggtaggcgcaccagccggcgaacggcgtcgccaccagcccgccgaaggcgtagcaggtactccacaggccgagcacgcggcctcgctcgtaggtggcgaagaaggcgccgatgttcttgcacagccccgaccagccggtggactgcgccaggccctggaccaccatgcaggcggcgaagatcggcagggtggcgaaggtacccatcaccagcgccgccagcgccgaggtgagcaaaccgccgagcaccaccacgcgggtgccgaagcggtcggcgaacaccccccacatgaactggcccacggcgtaggcggccaggtagagggcatcgagatcggccatggcgctcttgtcgagctcgaaggaggggtcttcggcgatgccgagcttggccaccgagaaggccttgcgggtgaagtagaaggcggcgtaggccagccaggtgatgacgaagatctggatgcgccagcgctggagcgattgccagccacggtgcagggtaccgttgtggttgttcatgtgggtccctatgggtctagacagtgcggggaggttgttcttgttgtgctgctgcaaagctgtccggatgcatggtctaggccagatgcctttcccatgacttttttcgtgcgcaaggttggctgtcgacgcgctcctgctcggtcctgccgaggctga

SEQ ID NO: 333453 - DNA, 216 bp, Pseudomonas aeruginosa
atgtactactggctcgactcggcgggtgatctgcggtgggcgcagcgtttgaatgtcgagggtgcctcccacatggtcgacgctgcgtatatcgaggacattggcgatatcgggatcgacgagtttcaccagaacgccacgcacatggaagaatggctcactaaccccatcaccatccatgcgagcccagagtggcttctcgccattgaaggctga

SEQ ID NO: 333454 - DNA, 2658 bp, Pseudomonas aeruginosa
atgcagttcgacctcaactccctcgcagagcaccagcacgagggtctccacggcaccctggaggccttcaagacttccaaccgggcgcaggtccatatggcctgtggaaccggcaagacgcgccttggccaggctgtggcgtccgcgaccgaggcggagatcattctagtgctcctgccgtcgctctctctgatcagtcagacgatggccgcgtggatcgccctgggcgacctgcctttggatcgcgttctgtgcgtctgcagtgacccgtcggtagctgagtcagacgacgaagacgtaggtgtggtagagctgccggttgaggtgagtacacgtccagagaccattgcggcgcatgtggcccactgtaccggtgggccgctctacgtcttctgcacctaccactcggtaccggcgctggctgccggcctgccggcaggcttttgcttcgacctctgcgttctcgacgaggcccaccgcacagccggctttgtggacgctggattcaccttcgcactgaacgaccacccgacgctgaagatagcgaagcggctcttcctcacagcaacgccgaagcacctgccggagacagcgcgagcgggcttcgacgtgtactcgatgtgcaatgaggacgtctacggaccggtggcctatcacctgtccatgcaggaggcgatcgcccgcggcgccatctgcgacttccaagtgatcatcacggtgctggacgaccatcagtctgagctccaccagagctacgagatccaagaggaagattgggctggcgccaacgctgccatgcatgctgtcgagctcgtgaaggcgatgcagcaggtcggggctcgaaaggccttttccttccacaacttcatcagccagtcccgcctgttcagcgacaccctcaatcaggttggtccgcagatcgccgacggcctgcaggcatggcacgtcgacgggcgcatgagcggtagcgagcgccaccacatcctcaatcgcttcctggaaagcccattgggcgtggtatcgaacgcgcggtgtctatccgagggcactgatgcacccgccgtagacctggtggcgttcctcgacaacaaagagtcgacgatcgacatcgtgcaggccctggggcgggctctgcgccgtgcaccgggcaaagagcgcggctacgtcctactcccggttcgcctgtcgagaaagccgggagagaccgttcagcaggcgctcgcacggtcctcgatgaaacacatctggcgagtgctcgccacggtcgccgaactagatgaccagatcaagaatgagctgatctccattcgcaggcgggtcagcatagaggagtggggctcgacgcctgtccattcgctgatggataagttagaggtgcatgctcctgctcagctgctcgctgcagtgaatgagttcatccgctacgagttggttgaccggctgacagtctcttgggaggcgtctttcggtcagttactgcggtatcaggaggagaagggcgacctcaacgtccccaagcgctatgtagcgccctctggagcacgcctcgggctttggtgcgcacaacagcgcacgctctacaaccagggcgtcctctcggatgaccgacgagtgcaactcgaggcgatcggattcgactttgacccgcatgcgacgtcctggtccgacgcattcgatgacctcgaggtctacaaggcgcagcatgggcacgcgaatgttcctgctggagctgtatcggcagctgggcgcaatctcggcacctggtgcagcgagcagcggaaggccttccgtgccggtcgcctccatgaatcgagggttgagcagctgcaggccgttgggttctcattccagatcatcgaagacacttgggccgaaaacctcgatgccctgaagcgcttcgttgacgagcatggccattgcgacgtccccgccggcgttgagggcgccagaggcagtagcctggctgattggctccgaaatcagcgcactcggcggatcagcctcgcgaacaaacggaagctcgaggcgcttggggtcagtttcaagacagcgtcagattcaacctgggacgaaggcttccaggcgctgcagcagtatcttgagcaaacaggcagtcccacaccacctctcgatcacctcactcccgatgggtttgcgctgggtacctgggtcggttaccagcgccagcgccagcagtccggcaagctggaactcaacagggtcgccaagctcgagcagctcggattcgtcttcaacgtggaaggggcggccttcgaagacggcctggcgcagctgtccctgttcaagtccgtccatggccactgcgacgtccctacgaactacgttaccgcggccggctacaagcttggctcctgggtctcgaatcagcgcacgaggctgaaggcccggccgcaagacctacgagcggcacagctcctggcattggggttcagcctggatccagcgagggatgcgtgggatcggtgctgcaggctggctgctgactacgttgcccagcacggctcaatgccgtcgacctatgttgcgccgacgggcgagaagctgggcgcctggctatacaggcaggtgaggaagcacaaggacgggggattgccggtggaccaggctaagcgcctggtcgaagctggtctggtctga

SEQ ID NO: 333455 - DNA, 249 bp, Pseudomonas aeruginosa
atgagccagcagaccaagaaagtcaccgagatcaccaagtgcaagtgttgcggcagcgccgacctggcgtggcaaacggccaacaccattcgaaatgacattcagcaaggccgcctcaacaccaacgatgttcagtgcgtcttctcgctgggctgtaatcactgctccgaaactctggccgtgatcagcgcagatcaggtcgccgcgctcatgaacgagcgggccgaagcggcgcgtgcatccaagtaa

SEQ ID NO: 333456 - DNA, 162 bp, Pseudomonas aeruginosa
atggaatacacctacgttcagtctgagcccaacctgtggacggtagggtactaccacggtccagacgatgacctctgggaggccctcagtgatcacgaaacccctggtgccgctgccctggaggcccagcgtctgaacggggaagaagccgccaaagtttga

SEQ ID NO: 333457 - DNA, 267 bp, Pseudomonas aeruginosa
atgatcaagcgtaaccccttcagcttccccgtggatgagagtgctggtacctacgacatcgagaaagcgaccagcgatgcagcggcgaagtacatcgagctccggggcaccaacaaggagtccgagtcacaagaagcgctcgatgacctggacagactgattaaaactgccccggactcgatcagaaaacgattggagagccatcgcaaccagatcgtgctcgactgggatgcccagcctgaacctaaccagaacgactttgactga

SEQ ID NO: 333458 - DNA, 639 bp, Pseudomonas aeruginosa
atggtggtgggtatcccggtgcttaccggcgccgatgcccctatcgctatccgcgccaccggcgagtttctcgaccgggattatcagtaccagtacgacctgcgctggtggaacaaccaactctggtcccctctgtacttcgacaactccggtgtgccgcgcagccattctgcagttcaaggtgactgggagtggcccgagatgcccgaggtcctggatctccgccagggatcgcggaactacaaccacaagttcgatatgtgcttcaccttcggggtccacccgatcggcgacgtgcagctggacatcctgcagagtgcaggccgtcacgcgatcatcgatggcaaagccttccgtgcagtagctgagcctcgctacctggtcatgacctttggacttggctccaatcatgggggcacttcgctgttggttgagtcccacttcgaccgcgccatccaccagaatcgctacttcggtctgttggagctcgacgccgcactgcaggcggccgggaaggtcgcagatgagcggggcgataccaactccttgcccattcagtactccgggccgaggtacgaagtgctgatgccggaggtgattaccgtgcggcatgtgcgagaggaggctgaacctgcctag

SEQ ID NO: 333459 - DNA, 243 bp, Pseudomonas aeruginosa
atggcgcacatcgacatgctccgcaaaatggggcgcgaagccactttcgagatcgggaaaatctacgagattgagactgtatcgcgtgaccgcgacacaggggtcaccaactgcaccgcgaaggtcagcgcaaaatccaactgggatcttctgggtcgtccggtcccgatgtcttacaaggtcggcacctacgacgacaccggagagaagtacgtgaaagctaaggtcctgccgatccagtga

SEQ ID NO: 333460 - DNA, 705 bp, Pseudomonas aeruginosa
atggttcagatcaatctcactcgcaccgaacgcgaggcactgctcgctgtagatgtctcggctctcagaaaggccgtggacaatttggtggagcgtggggcccctggcactacgcatcgccttgagctctcggattgcggggattatgtccgccacaagctgcatatcctggagcttgcgctgagcaacctgaacactgccaagtccgagaagaagcgcagcgatatgcagtacaacgcccgccgagcagctggggacttgattgctgcagttgaacagatgcgggatcgcgcagagacggagatcagcgacggcgaattgttccaggtgctggagcctcttggttcgccaggccacctgaccgacaagctatcggtgatcgtcacctacagctggcgcgagtcggctgatggtgaatggaagagcggatccatccagttcacacacctggtcgagagtcggccagacttctccgtgaatcagtccacccgcaagctccccgcctggaaacaggccgaggaaagacagaacatgctctttcgtgaatgggagcgcatgacgatgctggcgctctgcacggtcagggactactttcgcgccgggaaggatggagacgctatccccaagacgttcgaggtggttcccaatcctcacggcggtggcttgaacaatcacagctgcgatttctggcgccagcgcccgtga

SEQ ID NO: 333461 - DNA, 192 bp, Pseudomonas aeruginosa
atgaccggatacaccgaggaagagctgaacactgaggttgaagtgaagctgacgcttcgcgacctgatcatcctgaactgggggcacgagagcgtctcgtttgtcccagggggcgaggaggctgcagagtttgccgctgccgaagccaagctggacgcagctttgaatgcggtgcagaaggcgctcgtttag

SEQ ID NO: 333462 - DNA, 270 bp, Pseudomonas aeruginosa
atgaaccggacgcatactttccacgacgatcaactggtccagcgcgtggatcttgccctggcacgttatcgccggcgcgaaatcacacctgcgcagaagcaggccgaaatcgacggggccttcctcgcatacagggaaggccttacccacgaagcagaaggcagtctgcaccccacggggaaattgggggggcaatccccggctcagagacaggagtcggtagaggatgaagatagagccagtgggtgtggaccattggcagcaggatga

SEQ ID NO: 333463 - DNA, 234 bp, Pseudomonas aeruginosa
atgaagatagagccagtgggtgtggaccattggcagcaggatgaggtgcttgcgcatgccggtaatcccctgttcggaatgaggcttcccggttatctatccgcgcgcatggatgcgggctctacagaggtgatgcacacgctcatcacccctgattggggtgtggccccctacttctcccggtacccgttcatcaccatgtctgcaatgtgcggctgctcgagatacccctga

SEQ ID NO: 333464 - DNA, 1215 bp, Pseudomonas aeruginosa
atgccgatcaaaggacgtttcacaggccgcctgacacttttggtctcgctcgttgctattgctagttgcagaagcccgtattggcagcctgaggtccatttcgctgagggcagccccaaatcgattgttggcgtgaaagagattcttgataaacctactacgacgcaagttgatgttataaccatacatggtatgtgcacccacgacagtctctgggctaatgagtcaataaatgagctcgcagctcagcttggcgacaattccaatccagtcgttaagcctattgcggtagggaagtcgaatgcacaagttttcaagaggacaattaactataatggaaagcaggttaatatatcggctttagtatggtctccaatacttacaccattgaaaagtaatttgtgctatgaccagaaggctaagacagggctttgcgcagtaggggataagaagcccagtttcctggctaagccaattgactcgccagcgtttgaggaggagcgggcgacagtaaatcgacttggaaaagataagttgatggatgactgcctctctgatgcggtggcctatcaaggaaaggcgagagagcagataagcaagcaggtacaggaggccatcctctttgctgcaattccaaccaaagcagagttagggcctgatgaagtccgtgaagaggcggctcaaagagcaggcattccactggtgatatttacatcgagcctaggaagcaaggttgggtttgatgccctcaatacgcttagaaagaacaacgggaaagataaggcagcgaccagtacaaccgttattcggactgtaaatatatttatggcggcaaatcagtggccaatccttcagctcgcagatcaggaactaagtgaagggttgggaacggcggcactggtttccaaacctaaagactctctgcaggagttgcttgacgagtaccgagatgagatgggggtttttcaagcgggactacttgatgcaggggagaaccatccgccgtcaattattgttctctcggatcccaacgacattctgtcgtattcctggagaaactctcctgtccgaccagattatgtgactgttgatgtcgtcgtttctaacgataagacctggttcaacctctttgagaatccagggacagcccatcaggggtatctcgagcagccgcacattgcagacatggtgatgaacgggtaccgggagaagtag

SEQ ID NO: 333465 - DNA, 201 bp, Pseudomonas aeruginosa
atgacactcgcgcagttaccctccccacctggtggcttcggcatagtgagcgagggagtccttcgcccaggagacctagtctggaacccgtatgcgagcacatggggcggaccaacgaaggccgacctcgagaccctgggccgcaccatctgcttctactacgccgtgtcccgcaaaacaccgtcaccccgtctcagctga

SEQ ID NO: 333466 - DNA, 357 bp, Pseudomonas aeruginosa
atgacgaaaaccgccgtccaagtagaactcgtctatatcgagaatgagaaagaaacgctccgctttcacgcagtgctccaagatggaaagctcgcatcaccggagatgtactgccatctgtacgagctcaacgccaagaacagctatgaggtgcagccaggtatcttgcatgccgaagacggaaacttcaggcgctatcaaggtgaatggggctatgacgacacaagcgatgtgacgatagagtttctggaccgtccgctggaggttggccaggagatcacacgtacggacaagagtgatgggctgaaatacacctcaatctaccgcatcacggggatcactgacctgcttgcttga

SEQ ID NO: 333467 - DNA, 1155 bp, Pseudomonas aeruginosa
atgctggacaaggacgcactcaagcgcttcgcaccgaaggaatttcatcggcacttcaaggagttcgacgatctgctccagaggctgatacttgaaaagcctgcttaccggcagctggtagagaatccattcgcaatcttccgggactgcaaagcgatacctgttattcaccttgtggccatgatgcgcagcggcaggtgggattactttcctttgccagcacagcgtgttcgccctgggcacagggtcgtgcaggaaggagccttgggacaggggttttccctgtcgccattgcttcagttggaggtggtgacggaccctctgctgacacaggtggtcgggatgtcaatggcgttgtcggtgctcaggagcaaggcaaagcgagatgagatcggcgagaccttcagaatggcctcaactccagcgcagttgttctccattcctcttccgctgatgttgaagccccacgctcagcgattccatagccatagattcacgctctaccaacatattttcggcaaccaacatgagtatccagtcgacggagctttctacatcggcattactagccgcgagtggcagcgccgatggcgagagcactgggccgcaatacagcggggatccaagctgaagtttcaccaggagtacagggacagggtagcgagtaagaatctcaccttcgtgcaccacaaggtcatgggggtggccccgtcacttgagcgacttcaggagatggaggagttcttcgttgaagggcactgggaagatcagcgcctgctgaacatgatccccggcgggaaagccggcctcgcgtatctccacaggcacaatatcatcaggaaggcgaaggaccaggggcctgaggacgtcgagaagacgttggaagggtggattcgcgataaccctcggaaggggctgccagcgccttgggtagccgagagttggacagacccagaatacgccgcacgggtgatttgtgggcctagaggaaggttctcagttgagcaggtgatgctgattcggcgcttgggggaagaggggctatcggctgatgaaatagctctacgcattgaagcgcgcgatgtggaacagatccgtaggctgctggccggcaaaacctactccagggtgaccgacatagtcccaggtgagtag

SEQ ID NO: 333468 - DNA, 405 bp, Pseudomonas aeruginosa
atgaagaagacccccatccagattctgcgcgacctcgtggacgtgcacagtgttgccaccgagctggtcgacgacaaccgttttgaagagctggccgccgaatacatctcccacgatgcgccgaccatgccggaactacgtgagaaggtcatggaccaggccaagcgagtgctcgaggatgcggagcctaacctcgccccgcgctgggaagatgccccccactgggccggttggctggcgcaggactacaacgccgagtggtactggtacgagagcaagccaaaggaaagcccccatggcgggggttggatctcatcctgcggtgaccgcacgatgcgcgccaaaaagcctgccagcaaggcgtccaactgcgtctggcgcgatacactgcaggttcgcccgtag

SEQ ID NO: 333469 - DNA, 1959 bp, Pseudomonas aeruginosa
atgacaacccttttggctcgcttcaagcgagctgctatcaaggcgtcgagcatcgtgctttgcgccggcagtgtgctgggggcgcacatcgaaacagtttcggccgcccagcagtgccgctatgacgtgaacaactacggcatgcctctctgcgcgatctacgtatgggacggcaaggtggtcgattatgggccggtaccggagaacgggaacggcacagacttctcctggtctgcgaatggcttcagcagtggtggtcagacgaccatgaccgtcctgcaggacatcatggggactgagcagtggccagaagggatcaaaggtccttcgcgagcctatgcggggccggcgtactgcgaaaccaaaggcgtgaactactggaacgccaaaaaggcccagggcgacaagaactggaacgggattggcgccgcgatcctcttcggcactatggtcagtggcgctacccagatctgcggcaacacaaacaaccccccgagtgcttccaacgttgcgcttggggtcaacgaagatacttcgggcagtgttgcgctggccggttgggatgccgagaccccttactccctcacttactcgatcgtgggcggcccggcgaatggtagcgcctatatcgtggggaacacccttgtcttcactccgaaccccaactggtacggatcaacgacggtgacctatgcggtcagggacccggagggcctgacggcttatgcgacagtcttcatcaccgtatacccagtgaacgatccaccatgggtagataaccgatccgtgaccaccgctgaagacacaccagcctacctgggcctgtatgcgtccgacgtcgacagcaccaacttcgggtaccagatcctcagccagcccgccaatggcactgcctggatggatggttccaccctcgtgttcgtcccaaatgccaactggtatggaacgaccagcctgacctaccgcgcctatgacgatggcggggcgtactcgaacgtcgcgacggtaaccatcaccgtcacgcccgtgaacgatccgccggtggcactcccgcttagcctcaccatcgacgaggacacccctggttctgtgaccctccaggctaccgacgtcgattctccggtaccgacggtattccagatcgtcacggcgccaaatgcggcgcatggcagtgcgagcatcagcggcaacgtcctcaccttcaatccggctagagactggaacggcaccaccacactcacctaccgggcacaggacaccgccggggcctggtcggcgcctgcgacgatcaccgttgtggtccgtccggtgaacgatccaccgatcgttgcgaaccgcaccctggtgctggacgaggacaccgtcggcaacctgaccctcacggcgaccgacgtggatagcacggtgttcacctatgaggtggtctcgcagccatcagtagggaccgtcaagattaccggctcgacactgagcttcacgccgccggcggattggaacggcgctaccagtctcacctatcgggccaaggacgatgcaggcgcctggtcgaacgttgcaaccgtcaacatcacggtgacccccgtcaacgatgcaccggtggtgaaggcgatcaacgtggcaacggacgaagacacccaggtatcggtgactctcactgcgaccgatatcgacagtgcaccgaacttcgtgttcgaggtcctggacttgatgccggcggcagaagggaaggtgaccctgcagggcagcgtgatgacgttcatgcctgcccaggactggaacggttctaccggcctgagctatcgcgctcgcgacccggagggcgcctggtcggctccggcgcgcatcagcatcacggtgcgcccggtgaacgacaaaccggtgaagctgaccccaatggtgatcaagaccattgaatcgaaggcaaccactgtcagggctcaggtaaagctgaatccttga

SEQ ID NO: 333470 - DNA, 2244 bp, Pseudomonas aeruginosa
atgagcatcatgtcgttccgcagcccgcggatcctccgggcggcggccatcatcacgctgacgtcgttcctcgcgggctgtctgccgcaaaacgtcaaggacggcggcaactcgcttctcagcggggccaataacgtctccaacggcgccagcaatctcctggcctccatcggtggcgccggtagcaccttcgccgacatcaccggcgtcccgctgccgggctccgccagtggcggtgagctccgcgagtggaccgatgccgatcagcaggatgcggaagaggcctacaaggccttcgctggtacgcccctagacgatctcccggtctacgacccgaccaagcccggcgagctgcagcgctacaaggcgaagctggccgagctagccacgaagtacaaaggccgccagaccctgtccaaggacgagatggctgagatggcgcagacggtcgtaccactgatgcgcttcatggccaaaagtcgtgcctatcgtgaatcctcgaaaaaggtgccgaacatcactcgcgacccgaagggccaggcctctgtcgttgtgccggccggcatgaccatggaagtggccttgctgacgtactgcaacgaccatggcctcccagccccctggagcggccagaagctccatatgcgaagctcggcaccatacatgccggaagcccttcgccccctatacgccgacctccacaagtacgcagcaacaaacccggcagcccactaccagatgcagtccacggtgtggtggttgcgtggtggttcttgcagcctggaaacgctcactccccagcagaagggcctgatcgaagccgctcaccctggcggcctggctgagctgcagagctactgcacccagaagaaaatcaaaggccagctggtcgacgcagtgaccaagcagctgcccggcgccggcgctggctccatgctctcccagtaccagcagttgatgcaggctgcaacggactacaacacaaaggctcaagccttcctcaacgccgatctgacaaaccccagcgacctgctcaagctggctgaaaccagtggcctgcagacaaatcttggctcgaagggccttttcaatgacccggcaatgcgccaggtcctgcccttgctgcagaagtccggcttcgccaaggccctgaccccagcgtccgtagatgacaaagcggtcgctgcatcgctgtcggtgatggaagagctcggccgccagctcggcgaacagcagggcaaggacaacggcagcctggccaactacagcaagctgcccaacggcctgtatgtggacgcttcaacacgcggcggcgccagccacgcctacatcaaggttcgcaacacgggcaccaccgaccttgagctgaccggaaatgagttcgtgctgacctcggtggatgaccgaaaaggtggccacgccaacttccgtcctacccaacggctgagcctgggcccgatgcagccagtggccatcggcccgaatgagcgggatgcggcgaagcgctacaccaccaagaacgaagacgacgtcaaaaagatcatcgaacagctgtcgggaattcctgcagggtttgagtctcctggcgacactgctgccaaggagcagtgtgcagagcgtgaggccaagaaccccggttccggcacgctgcgctacagcgacttcggcatgggtatcatccacgacgtgattcaagctgctcccgtagtgggcaacgtcctctacggctacagcgccatcactggaaaggactggctgaccggctccaagttgtcgactgccgaccgggctgtggcgttggtttcagcggccattccgctcgggggtgctctaggcggcctgcgcgcggccacgaaggccggaatgggcatcgtcggcacctggaagacctcctacgccggctacaaagcaggcaattctgtcgcagctggcgctgcaaccggcctgaaggccgcggaagggtattttgcctacgagggtcatgacgcctgcaccgcctggtctgcaggcgcgggggcggtctccaatgccctctgcatcaaggcttccgacccggcatgcatgctgtacaacggcatcttttcggcaataggcaacgccaaacaggttcgcaaggacacagagctggagaccatgcaggaggccgcaatgcgattggagtacgcgctggcgccccccggccagaaaccacctatgttcaagacgccggccatcatcgaaagcgcctggaacctcttcaagtaa

SEQ ID NO: 333471 - DNA, 555 bp, Pseudomonas aeruginosa
atgaatttcatacccgccgccgcacaagccctcaaggcactcggtttccaattcccgcacgagctcaacctgttcgttcatccgctgctcgacactgagggcaacaccgtcgacccgcgcacgctcggctttgacgtggtgcacacaggcggtggctgcatggcgcttgagctcaagatcggcgagttcgtgatctgcctgacctcggaggacggctgctctcttccggaggaggtggactgggccgagaacctcatcggagtgctgcagggtgacgatcgcgaggaggtcggcatgttcaccggcctggactggctggaggtggtcagcgcgatgaccaagggcgttctcaccgatcatcaggtagaggacatggcagcttcggagctgtccgcgtggtacgtcgaacacgtcggctacgaccctctggtcgacgatcccagccttacgctggagtccttccgagatcaggtgaaggagcacgtgctgatcgagcgctgctgcggccttgatggagacgcttaccagagcatcgaggcgaagcgaaagcagtaa

SEQ ID NO: 333472 - DNA, 312 bp, Pseudomonas aeruginosa
atggataaggcggaattgagcaagctcctggaacagcaagtgcagtcgaagttagcagaaggctactccatcacgacctatgcgcttgatgcggccgcccgtgatcgcctgaagcgaggtctcaagccgttaggccatgcgatcccgcatgagaaccaggctgacgaggagtggcaggattacctcgaccatctagacgcggaagccaagaaatccggccaggccgcaaggccggttcggaaagctgcagaagccctaaaagaagagccgtcaaaggtcagatcaggtatatggaacgtctgccgtcactga

SEQ ID NO: 333473 - DNA, 567 bp, Pseudomonas aeruginosa
atgcgtaagcggccatacagcccctacggccggtatctcctccgcgatgagaatgaccagcccgccggcgtgattaacgatggcgtctacaaggtcgagggattcaaaccttcgagcttcgatgcctggtcaggggtcatccattcgcacgcgaatccacctgtcttgttcgagcggaacgacaaaactgccgttctggatggcctgtgtctcagattcacgactggaaggatccttcgtcttgttccggatgctggcgccgagccggatccacgccgcgggcctcgggtgagttcggaggagggcttcagacttctactcgaccagcttgaacagtcagaagagatggccgcggacgcgcctaatgcacggctcaccgcgcgaatcgaggcgatgcggaggcgaattgacgttgccgccttctacgagtgccccaactgccataacgcagtgctggagcgggacagctgcagcctgtgccggggggacggatttgtgtgggagggtgttgagaccgtgaatggcaacgccgatgattgcagctccggcgatgcaccggtctcttag

SEQ ID NO: 333474 - DNA, 309 bp, Pseudomonas aeruginosa
gtgacatctatcggctactacccggaccatgactatcagctgcgccggctgaacgaagacgacggattggatcctatagccgcctactacctgcagggccgcgatttgtatcgtgcccggcagcttcgcccacagagcccgatcacacgactggaaggtaagcccatcggccgcgtagtactgaacaacagtctgctgccctacgcggtgaaggatggcgagacgctcctgggcgagatcgatctgccgaccgcaatattcatcaccaccgacggacagcggtacctcctgcagcgcgtcgagctctga

SEQ ID NO: 333475 - DNA, 264 bp, Pseudomonas aeruginosa
ttgactaagctcgagcagaccattgtcgataacgcacgtcgtgagctggacgcagtcctgagtttctaccgcaagaaaggggagaacacgagtgaagctgattttgatgacgcgtggcgtgagtacttgggccatttcaacaccatgagcgcgttcctgatgcttgctcatcaggcagacagcggtcttagcgccggcggagttcaggctctgctgcggctcgaggatgagcacgccgcggcctaccgggcgagtgtgaactga

SEQ ID NO: 333476 - DNA, 2418 bp, Pseudomonas aeruginosa
atgcgactgcccttcgaacttgatccacagatcatccaccacatcatctacagccaggcaggttcgatcggtaaggcggtcatcgagctgctgatgaactcggtcgatgccaatgctgcatcagtcacgttggttctggacaaggacggcttcgagtgcaccgatgatggcgcgggcttcgccaatcaagaggacgtgctgcggtacttcggccgcttcggcacgccccacgtggatggtgacgctacctatggacgttttcgcctcggccgcggccagatcatggcgcacgcgtcgacagtctggacctccaatgcttggcggatgacagtcgacacccgcgtgatgggctacgaatacgagctcgatgacgtgcaggaggcggagcatcggccaggctgttcgatcgtcgggaagtggtacgagcagctgaatgatagtgagtggatgtcggccatccaggagatcaaagacctcgtcaggtacacgccgatacgggtactcctgaacggtaagcagatcacccgcgacccgcggcaagagaaatgggacgcagaagacgatttcgcctggtaccgggtgaaggaggagggcgccgtttcgatctacaaccagggcgtgctggtccgccatgactcttcgcacctttggggcgccggcggcctgatcgtgtccaaaaaggctatcggcttgaacgtctccagaacggagatcctgcgcaagaactgcccggtctggaagggcatttctaagcagtttcaggggctctgcgacaagttggccaagaaccttggggagcaccggaaaactgaggcccggcgcgagaagtctgctcgcgcactcctggccggcggggaggagatgctaaagatccttaactccgaggaggtgattacgctgttgcctgggaagcggcatgtaactctcgaccgctttctgggcttgtgccgcaatcctggggaggaatctcgctttaccatcacggggatgagctcggatgttccgaaaggagaggctatcgcccgagcggggatcgttcctgtcgtgcaccacaaaacgctcgatcggttcggttgccacactcccagggacttcgtagaagcgttggaagccatccgagaaaacgcgtacgcggtggcctcggagtgccagatggacagctgggatcgctacagtcactggaccgcaaggcttgtgaacttccgggtcctcaaagaggcattccttgagtcgagccgggtggtcagtgagcttgaggcgctcgacaaggaaacgcgtcgtgtgtggacggctctccgctggaccctgtggcagtacgcgatgctgatcaccggcggggagcgctggtactcaaatcggatgcggggtggcatcaacttcaaaatccttctcggtgagtcgaatgccgctgacgcctggaccgacggcaaaacctacattgccatcaacgcagagaccgtccggaagctgaaggcagagcctatgcgcatcgcgtcattcatcttcagcctggttgagcacgaggttgcgcacgagggagacagcctcgattgcgggcacgacggagccttctaccagcgttaccacgacatctctgtgaacttcagtgaagcacgccagcggtacatccatgtcttcctgatgaagtacaccacgagccttgagcgtgaaggcgcagccggccgctccaaagcatggtctgagcggtatctgattgaccgcgtcggcagcggcagagttgctcgcggcctgcccaaggcgattggcgacgtcaccggcgagcctggcttctctgatgaggctccggccgaggacctcgctttcatgcagctgctcaacctgtcgctcgtcacgagcggcgcaaccgcgccaccgccgagctggccagaagtgctgcagcgagctcaggaagagcaagtaaggcaggacactgagtacgcccgccaggccgccgagcaagatgccgagaacgcgcgttggattgaagaaaacgctgacctcattgctgagtacgaacgcgagcagcaggaggcggaaatggagatggaggccgaatggcagcgggatatcgggtgtatggcggaggtcctcggggttgcttttgatgatgtcgagcaagccatggcccgtggtgcggcggcctggctgcacccgagcctggagaaggacgaactactcaaggcctggaacgatcaagagtggctgcagcacggctcccaccgcgccgagacccatggggccgaaggagaccccgaagacagtcgcctaggtgaatgggggcgctggctggagccagaggtgcgcgccctgatccgggacgatgagaaccagtggtctctagagcgcaatgcggcggcagcgggcttccgttgggttggggattacctgtgctggcgccgggacagcgagcaggtgtga

SEQ ID NO: 333477 - DNA, 255 bp, Pseudomonas aeruginosa
atgagaagcactgcgaacaatgaagacgcctgcgcggtgaagctgacgcagaaggagtctgagatgcttctcgtgatgtttggccgcccccgccaagagttgtcctacctgcttgataggcccaatgcgcgcactgtgaacgccctggtgcgcaagggtatggccaaagacatcatgggcacattttggcgaatcaccccagccgggcagcagcgtgcttcggcgctgtttcaaaacccctccgccgacgaatga

SEQ ID NO: 333478 - DNA, 477 bp, Pseudomonas aeruginosa
atgagaaacgctgcagcagtagcactgatggtcctgtcgtccgcagccatcgccaaagacgacgtgatcgacgtcccgaagatgactatgatccctttcgtcctcacatcctcgtctgacgatgacgatatcgtcgttaggggcgatatccaacccatcagggtcaaggctcagcaggggggcaccattcagcacgtgactactcgaccagttaatcagctaatggcgcgaggttgtgggctgaacttcgagccgaataggaaaatctcggaaggccgggtgggtgccaagagcggcgaagtcaacgttgtctgcagcatgtcaaacgggagaatcgtcgttgcgcctcttctgggcaacatcagcgacgtgcacttcaaggatggattgagctcactgaaatctggtgttcagggttacttcctcaccgaagagagcttcagcattccctcgagcagcgcagcatcaaacgactga

SEQ ID NO: 333479 - DNA, 231 bp, Pseudomonas aeruginosa
atgactgaacctaaccgtggcccgctgggagctgacgcggatatcagcgaacaggagctgatgttgaagctggcaggcctgccggacaatatcgtgctggcaatgcaccgccgtgcagcgagaacacacacacggatgatactcgctcgcctatcgcgagtgctgttcgtcgccgctatagccggagggatgctctacggagctccgcagctcctggctgccttcagatag

SEQ ID NO: 333480 - DNA, 180 bp, Pseudomonas aeruginosa
atggctataaaaccggatacgacgtatcgcttcgtcaagagcggcaacttggtgcgtaccgtcgtgtcaacctcgtacggcgggtccggcagctggatcgtcgcgagagtggatactggcaaggaaatggtcgtaccgggcaaggcactcatcgatccgaacgatccgaactggacctga

SEQ ID NO: 333481 - DNA, 339 bp, Pseudomonas aeruginosa
atgacgctgatcacccaagcaaacaaccctgcagaaatcttgccggactacttcaccaacagcgaaggctcggccagctgggcgggacgcaacgtcgtagagttgagtggggcagaggtcatctctgtactgcaattctgccaggccgagggctggcggcagggctggaacgatgcacggagcaaccgagtaggtgagcagcagaaggccccgtttcaccccggcctactcggtggcttcccagccgaggagtgggagcgcagctatttgcgaggcgtcctcgagcagcagacgcctgaagaggagggggcagcctgccacagcgggtttcccgactga

SEQ ID NO: 333482 - DNA, 534 bp, Pseudomonas aeruginosa
atgccagagaaagacctcattcacttcagcctggatgtcatccaccagcagatccacgagtccatcagagctgatcatgaagcacggtggatggagaccgttggcggcttcggcagccttcgaatgcccactcgaggcatgtttgtgaaaaccggcccacatggcgggtcgatgcacggctccatcggctgggtggtgcaggtccggctgaagcaaggacagttcgggtcggacaactacatcctgtgccacgccgggaaaggcgggtggctgatgcagcactccaacaacgtgttctacccgctcacccctgaggaggaagcgctggtacggcccttctttgcagaccgtttgccggaggaggaagacttctccaacggctataccctgggcagggaagagtctcgtgctgtgggtttcctgatcgatccgccgcaagacttcgtgccgcgtggaggggagggcgctcgcatgcgcatcgccattgttggggaaagcggtgagacagatataaccgacaccgtcttcctgtag

SEQ ID NO: 333483 - DNA, 375 bp, Pseudomonas aeruginosa
gtgcacaacaaccaaacgctttgtcattcctgcggaaagatgatggtcccgcaagtcgaacgcagccgcggtttgtacatcggatgggagtggggtggccgctttggggctgggcacgccattggatcgatctgccctttctgcctttccgctgactgggacgggatcaaacgcccccagccgcgcagcccaatattcaagacgggactcgttatcgccctcctggtacttggaaatgttgggctggaggggatcgaaagcctctaccgcgcaatgggccgggctgaaaccttttcaagcttcaagcccgcaatctccctggcggtcattggcctgctcgtactgctttacaaacgcctgagcaaaaagcgctga

SEQ ID NO: 333484 - DNA, 738 bp, Pseudomonas aeruginosa
atgagttttatccctggctgcgataacggtgcagatgcgctcaactccctggccacaatctacggcgtagcggaggatgctattcaagaaatcctccagcatccggacgtgctggagattgcgagcatctctgatcagatgagttcggagtggtttcctgcggtcattattcagctccttagatcaagccctaattacgatttaactcacgccgcctactaccacacaacgagttatgacggctcgttggagtggtttgatgaagggttgcatggatcactggaaggggcccagcgattccttgaaaagatctcgcatttggttccagaggagctacgtgacgcagtccaccaaacaaccgcggctttaatcgcgcgtaggagtgagtgcgagggaaccaggggggctctagctggaccttatgcctggaacaccatgacagcagctagtgcggctgagcatggtggtaagtatcaagtgccagaggtcattcgagacctttggtcgcagagcgggatcggtaacggcggattgatcgacctatccgagcgaatccgtcagcacctgaagcctgtggtagtgaagttcaaggggaggacttctgacctggaccgctactgctccacgctctgggcatacctgctcacccaggatgagcctgttcacctcacacacacgttccaggcgaatggtgagcgtattcctcggggagacattctcgctctcattgacctctag

SEQ ID NO: 333485 - DNA, 1365 bp, Pseudomonas aeruginosa
atgcttacccagcatctgaccatcgttcagctcaaatctgtgtatatcgaacatggcgaacgcgcagttgttgtcgctgatggtcttcatcctggggatgcctttgactacgacttaactcctcttgtagcggtgacgctcaccatccccaaaacaggcgttcactggcaaagggtttaccttgcagaccaaccgatcccccttatggaagcgttgtatgaagcctggacgaacttcgtaccgcttcacggcctacccgatgccctttaccttgaccacgagttgaccaaagcgtacccggtcctggctcgactggccgagatggatgtatgcggcatcatccaggaagtgagcagcaagggaggcaagtcctttggagccgcgaagagagaggcgcaaaagctgatggagcacgccctttcgtggaatcggggagagtggccaaagccgaagaaggcgaagagtgcagaatcgttgctggcagcgctgaacaacttcttggagaggtactgtcaagatatctaccgccttgaatttgggaaccacagtctccaaaaacaggagcttttccgagcactgaagaagcgctcgccctacctgcccataccaccagaccgttgcgacgaaatgagaccagctgactggttcggcaaacaggcaatggatcttcctttcatgagatcagatcaggtcttgctcgttcgagaagagcgagatcgggtactttggctagcagtcggttacgaaacgccttcagaactcgctggtacagagcctggcgatcgaggttactacggacctcagcgcgacaatgggttcatctgggcggacgaaaacaaagaactaaaggccgtcatcgaggcgcttccgttcgcgcttgaagagctgatcggagcagacatttcttccaggcggatagaagcattccttgccgggaacgaggcgctgccagagggggaggcacgccgcattgaaagactgctcaccggaagccgattggtgctgttccctaggacctctgccgcattctcatcggtttacaactgcatgtctcatggctgggacgtaagactgaccgttgagatcgtgggtgaagcaaggcaatcaagcccatacagagtttttgcgtgcgactcgtatacgggtgggctcttcgtccttgcggtaagggcaagctccaaagcggataacccaaaactgaacgagtacctgaaggccggtagggttcgggttggtgcgccggcattcgccgcgatcacgtacttcctagagaaccttgttgtcgaccgaccgctgacgaacactgccgtggtgatagaagccatcgaagcaatgcttgatgcatgtccagaatgggctgagtaa

SEQ ID NO: 333486 - DNA, 705 bp, Pseudomonas aeruginosa
atgcaaccggacgcgcttacgaaggatgaccagcccttatgggctagccagttctctgcgaaggagtgggacacactcaagatccagagccaggcggatccggaagccttcaggatgccctgctgcaggtcccgcgctgtgctcaagacgagcatcaacggcttgcagttcttcgctcaccattccgatgagtgcgcgacggctccagagacgatctggcacttccaggcaaaggatcttctgtacggcactctaggcgccttcggcgtggatccgaagaccgaggtatccggggggagtggtaaggatcgttggcgagctgacgtctacttcgagctcgacgggcggaaaatcgcgattgagctgcaacgctcctaccagaatctgcgtgagttcgaagctcgccaggcgagatacgaacggtatggcgttgagtgctactggctagtgcgacatgaggtcggccgtacgctcatgaaggccattttgcgcaagcgatggatagacgagttcaaccgaggcgccatcccggaaggtgaatgggtcaactcgaccccgcatttcttcttcggcgtcctggcgccgggcgcggagattgatgtgagttggccgggcggtgcgttgaagcacctcgatctgctgatccacatcatgacccgcgaacttcggtgggatggcagaatgtggacggtctcaccgcagtga

SEQ ID NO: 333487 - DNA, 1098 bp, Pseudomonas aeruginosa
atggtcgatgctgaatcagtgcagcctcttcatctcgaggtgcctgagcgcctgagtcaagcggtacagatgctggcctacaacaagtatcggatggatctcgatgtccatcagcactcggcctgcatgttagcgggtgacctgcacgatggcgcctatgggccggcggagccgctgccgttccttgcgcgggttctccccttcatgtgggctgcaaagcacgccgagggccgcgaatacgccctggtacccactgctaacaccttgggctgcagctggcggtggcgtcgccgaagcctggacaacgaaaaagctcagcgcctagtccagcagctaaccgatgcccgcgctcttgcaaacgactcccttaaccgcgccagctacgcactgatccggccgttgggcatcttcgctcccaacgaagggaagaaccgtgtggacttccttcgggaggagggtatagagcagataccggccgaagtcttctacatcgactaccccagcgcgattcggctgaaactgtaccgggtggaggctggagccttcgccgaaacatgggcagtgctcgacggccaatgggtggaaaaggtggcccacccgagctgggctattccggtgctcaatgcctatggggtgacgctcgagcgagagtggccgggcgaatacgctccgatcggggacgtcctggaggctttccttggaagcagaggcagcacccaggccttggggcatccggaataccgcagtgccgcagtggtggacctcgagaccttgaaggtgcgcagcgagtaccaggcagagcgcgtgccctgtccagtgatcgagctgcagcacgtgaagattgagcctcggttctggatgtccgctggcgcgggccttttcgtcagttcacttgccacgatgtggcttcccgctgagtggaccgaggtaagactggcggcaggaattggggtgggggctgccattggggcgcttgcggcagttgcggcgcccatactgcgcgtccggaggcgctccgttcgcaatcagccggcactgccgttgaagcttgccacaaagcgccggcggccgacgatgatggaaaatccatcggagtga

SEQ ID NO: 333488 - DNA, 375 bp, Pseudomonas aeruginosa
atgctcgaagcacgattggaccgcctttcgaaggtcattcagcacgtcaacgtcgaaatcgcccatgcggcgacggaggcgagtcgccagggtcgcgtgctcgatcagtgggggctgacggatgccaagcaagccgttcgtgagattgctgaggtcgcgcatgtagtcggcaactggttctgcttcagtggcgcgggcaccatggttccgacaccactgttcgaccagttcgctcacttggatagaccgctgttcactggcgacatctctcgcctgcaggaggtctggaacgacgtggaccgcgaggcgcaatcatggactttggctgatcccaggtcgtggatgagccagcatgtggctggaggtgtgccgtga

SEQ ID NO: 333489 - DNA, 1146 bp, Pseudomonas aeruginosa
atgacggctgagaacaaagactctttgtttttcccgcgcacggcgctagcgcaaggcattctggccaccttcgaaaaggggcttcagacggctgcgaccattttcgctcccaggcgtaaagggaaaaccaccttcatcaacaacgacctgatccctctcgccaaagagaggggattcctggttgccaatgcagacctttggttcgacaaggaccacccggagcgcgtgatcgtcggcgcactgtatgaggcaattcatgggacgggcttcctacgccgcaactggatgaagctactgcggcccggtgcagtactcagctctgtcgaggcgggtgcaggcgctgacggtgtgaacctgaaggccggcctggcgccggacagtggcctggacttgttcgagttgtttgagcgcttcaggcagttgggaaagggtaaggcgctgctgatcatcgacgaggttcagcacctggcgaccagaaaggagttcgagaacctgacggcgacccttcgctccttgctgcagcgtgcgcagggcgacgtgtatgcggtcttcaccggctcctcgcaggatggactgcatcgcatgtttcggcataccaaggcgccgttctaccagttcagccatgaggtggagttccctaacctgggctacgaattcatcgagcacctcggccagcggtatcacgagatcactaatcgagagtgggacgtggacgcagcctttgagcgctacgtcgctcgagggcagatgcccaagtacatacgcgacgtgctccagctctgtatgaatgatgggctgagtgttcaggaggcggattaccgagcctggaacaccatgaccgatgaaggcaacttcatgaacctgatcctggaactcccggctatcgaccttgccgtcttgatggcgttggtgaagggcgtcgcagtgttctctgcagaggggcttgagtcgattggcaatgccattgacgctcccaaggcgctaagcgccgcctctgtccagacggcactcaagcgcctacagaagagggacctagtggggaatctggggcggggcaagtggcagatggaggacatcgctctggagagctacatccgccgcactttgcttgatcctgaccagacccctgacaccggcgcgaactga

SEQ ID NO: 333490 - DNA, 1251 bp, Pseudomonas aeruginosa
atggctaccgataaccagcctcgtgagcaccgaccgaaagtggttgtgatggatgaggcctcgcgcttcttcgggatccaggacgatgagctgcgcgagaaacttcgagcaatcgagggcatccccaatgcttcgtacctggtgcgggacggacaggtctttgttttcgacaagctgctgtatctggtcaaagaccagatccccctgcagccggaccagcaggtgaatgagctggctctctccctcgtggatgcggcaacggttcctgccctggaggcggtagaggtgtggggcgtagtccccgaggccttcgaagtgaagacttcctcgcttgggtcgttcgcaattcatcaccgctatttcgaggcagcattgcctggcgcgttcgttgataaggctgcggttcatcaggcgcttgccaccctgatcgtgggcgggacggtgtctggcgccggcgagttctcttaccgcgggcaagaaatgaggctgagcaccccccttgggctggagctccttccggtacgcccggacattgaggctggcagcgagcctgccttctggatctacagcagcctcgcgaacgtagagttcgaggaaggcttttctccggtctcgaaggacctcttcgatgagatcaaatccagagagtggcgctggagggagtcgtcgacgcaggctgctcgccaggtccacgctcgggccggtgaagtctgggcgaaggtttcgctgttcccgctcgaggatctgaacgaaccgggcgagctggtcgacagcgacgatcgcgaaacagttgctcagctccgcgtgtgcttccccgagttgaccaagctgtctgacgcagcgctctactcctggttcgactcgttccagcgggaatgcatcttcatcggcggatggtctgccgagcgtgacgacggcttcctgttctacctgcttggtggccttgtcgagcgccatcatggcgtcggcggcgggcaggatgcgggagagtggatcgcttacgagatcctgcgtggcagctcgcctgaggccgcgctgtgcttcggacaggcatgccagctgtacaacgacgcacttgtcggccaggcggcccgaatggccgatgccatgcgtttcctggggcgcgacaaggctgcagtcgaccttcgcggcgctcccatcaccacaatgcgcgatatgttccgttatgcgcggaaggtgagtacgggtagagtcgaaatcgtgcagaacctgggaaatctccagtcctga

SEQ ID NO: 333491 - DNA, 990 bp, Pseudomonas aeruginosa
atgcaacaactgaccacggacactctcgaaaagctaagcgaagaccaagtggtccacctgacaatgcgccagctccagttgttgggtccgtccgcgcccccgccggcgctttgtgagagccgtactgacggccgccacccgcacattggaacatcacctcacggcatgctggtggtcagccgctccggcctgctgtgtcccgtctgcagcttggccggggagccgagcctggtgaaggtcacagccgcggagatggaagccgccactgaggcattcttcaaccacgcccccaatacccctcagactttcttcaccgtccaggccagacagcgcgaatgggaagagtgggaagacagcggtaccgtcctggccagccaggtggttcgcccactgaccaactacctgcaggcgctaggcaaggaactggatgcgaagaaccacccagggcagcgaatcgacggcttcccgctgaacctcctgctgagggtccacaatctggcggagcacggcagccagattcgaaaggagatcctgggctggctggagaccgagcgtgcgcttcggccccgaaatcactggatggacgcccttacggtctctgaaggcggggagctcattttcaacaagaaactgcacaccctcgcggcgtggcgcggcaagcaggaaacgtatttcaaaggcgctgctgaagcgttcgagactctgaagaaggacctgtcgtttgtctcgcactttcaaactgaagaggatgtagcggcgctcgaagcacctgacgcgacgcgtctgttcccagcgcgccccctagagcgccgggtaagagatctcaagtcgattgcaccccagctggcgctcctagtagatgccctagacggcaaagagcttgaggaggttgctacagcgctgcagggcgccctgccccgcccacttcagctaactgacggggatgagcagcaactcgcgctcgaaagttcgagggatgagaaggcgtga

SEQ ID NO: 333492 - DNA, 816 bp, Pseudomonas aeruginosa
atggcagagataagtgcatttgagcggcgcaagctggaaaggctgctgggcatgggtagcggttacgtcctggacttctccgaccgcacctatgcggagttcttcatggacttccgcgtcgacatcgacgctgctcagtttcgtgtagctggtgattccaaggccaggcggatgcgctccttctgggagatcgcaccgaaccacacggtcggaaaggtgctcgaagggctaatcgcttacgggcttgaggtgggccgcctgggggatagcagcccagcgcttgtcgatgagtgccgcaggatcgcgcagcgtctgcagagcgagcagcctgttgcggacatggacgcgttaactgcgatcgccgatgagcgtgatttcgaggtggtcgcggagcacgtccgcgaggccatcgagaagaaccagcctgagggcgcgctcgatcgtctgcacacgttcgtgaacaagttcatccggatcacctgcgagccgcacggcattacggtgagccgggataagcccctacacagtgtgttcggtgagtatgtgaaggcactccgagcgaatggccatctcgagtcggcgatgactgagcgcattctgcggtccagtatctctgtgctggaggccttcaacgatgtgcgcaacaacaagagcctcgcgcacgacaacccgatcctgaactacgacgagagcctactgattttcaaccacgtggcatcgtcggtccgcttcatcaagtcgttggaaacgaagatcaaggcccaaagcgagtcgcagaaggctgccgcgcccgctgatgacaccttcccgttctga

SEQ ID NO: 333493 - DNA, 255 bp, Pseudomonas aeruginosa
atgatcagctcccatacgcaccgcgcaactccagcatctgagctggctcagcggggcaacttcacccacattggcggcgacgtctataagttcgaaattccggccaacccgtcaactggcttaggttccatcacctcgtggtggacagctgaggagagcgatcgcgagttcctccaatcgcatgtcaccaggatgaatgccgatggttgcagccagggcaagtatggtgcgctgtttgacggcgctgacgcctga

SEQ ID NO: 333494 - DNA, 456 bp, Pseudomonas aeruginosa
atgagcaaacatccccgaactattccagatcgtacgatcgctgtcgcagtcgtcgacgtcctcgcagagagcatgggggcgtccttcagtccgtgcgccttttacgatgacgacgccgagatgctggacgaaattgaccgtttgcttgtcgaaaggacaggcatctccctagtcaagggccaggtctacgcctatgtgcatcgtcgccttatgcgaatatgcaaccatctggagagctggggcgtgctagctggaaaagctacgaggaaccctgaccatcagtacattggcgaaccgtgcggctggaaagacttctggctggccaatccaagcaccgcgaaacgtcttcgccctgatctatacccaaactacaagaacgattgcgccagcgggccagagtgggaaatggattggctgctgcggcgcgcttacccgaagaaaggaatcaacaaatga

SEQ ID NO: 333495 - DNA, 243 bp, Pseudomonas aeruginosa
atggcagaaacctttgacccactttgcgacagcaccaccatcagtcctcagaaggctgtcgagccctatgacctcagccagttcaagccctttgagacaatcgttattggccagtctccaggtgtctgcgtaaccgctgaatcgctgacccgtttcaaggtaatggaaggactggaggaccaaccagccgggtcgtgcgcactcatggtcttggcagaagccaaagtcagtagccccgaatag

SEQ ID NO: 333496 - DNA, 540 bp, Pseudomonas aeruginosa
gtgccatcgctccgcatcgagcagcatgagtcccatcgctatcctccccgtacctgggtcaacgcccaaagtgccgacctaactgttgcgatcgctgtcgacttcactacgaagggggagctgctcaccaagcgtgcggcaggagctgcgttcgttgctcttcctctcgagggtgatccgctggatgcggccaggctgctttggaaggcggttcgtcaacgtgacgcgcgtaccctcaatatcgctgggaatggcatctgcaccatggccaagcatggctggtcgcaggagcggatcaacacctgggtctatcaggtcatcgctaaggtgcaccaacatcacccgattagcttcatccgctcgggcggtcagactggtgccgacattgcaggcctagtcgccgcgtatgccctgggaattgaatgcctggggctctatccgaagcgatttcttcagcggaccatcgataatctcgacgtgcgccggtctgctgaggagattgaagctgaaatcaagtcctgggcagcagggcttctgtag

SEQ ID NO: 333497 - DNA, 240 bp, Pseudomonas aeruginosa
atggaaaacgaaatgtctaagcgctgtgagtggtttggccacagctggaagaacgatggggagccatcaatcatcgctgatctgatgacccagcccctgaagtgctcctcgtgtggagagacaaaaggcgatgttgggtcatggtcggatgaccctccgccaaagattgccaagctcaagccggccttctttctcatcgcggcgttcgtcgtagttgcgatggtgctcaagtggagctaa

SEQ ID NO: 333498 - DNA, 282 bp, Pseudomonas aeruginosa
atggcgggcatcgaggcgccgaccgaaccctgcccgatgcagagcatgggcatgggccagatggcgggcatggaccaggactgctgccaggacatgggcaagatgacccagcacggcaagaaggactgcaagagcgggcaggaatgcaagaccggcggcctgctccaggtcagcgtcctgaaagcgtcgctccctcctgccatagcacagcaccccgccccctacaccgatgcagtcctcggacaggctccgtccgatccctggcgacctccctgcgcttga

SEQ ID NO: 333499 - DNA, 1245 bp, Pseudomonas aeruginosa
gtgactcccatccgactccatccgggctggatgctgttcgccctgctgtccagcctgtccgcccagggtgcgcccctgtcgctggacgacgccctgttactggccgaacgcaacgccccttccctgctcgcgcagagcgaaaaagtctcggcggcgaaaagcgccgccatccccgccggtgaattgcccgaccccaaactcagcctgggcctgcagaacgtccccatcgagggtgaagaacgctggaccacccagcgcgacaacatgtccatgcaggtggtcggcctgatgcaggagatgcccaaccgcgacaagcgcaacgcccgcatcgagactgcccaggccgcagtggagcgcgccgacgccgaggccggcgtcgagcgcctgaaggtccgcagcgcctccgcgcaggcctggatcgcggcctatacgctgcaacgcaagctggcgatgttcgacgacttctaccacgagaaccgcctgctcgatgccaccgtccgtgcacgactggccggcggcggcgccagcaccgtcgacgcggtggcgccacgccaggaagccgccctgctggatgagcagaaggacgacctgctgcgccaagccgcccaggcgcgggcggcgctcaagcgctggatcggccaggacgcgccgccagagctggccggcgacttcccgcattggcccatcgacgctacccattccttgcaggcactgcaccaacacccggaactcgccgcctacgggcccatgacccgcgaggccgaagccctagtgcgcgaggcagtggccgagaagaaaccggactggagctgggaagtggactaccagcgccgtggccgtgagttcggcgacatgatgacgttgcaggtcagcttcgacctgccgctgttcaccggcacccgccaggacccgaagatcgccgcacggcgcgcccaggtccggcagctggaagccgagcgcgaggcgctggcccgtgagcacgagcagcaactggaggatgacctggccgaataccggcgcctgcaacgggcggtcgagcgcagcagcgcaaccctggtgccgctggccgaggagaaggttcgcctggccaccgccggctaccgcgccggcaagagcgggctcgacgaggtggtcaacgcccgtcagcaactggtcgaggcacggctgcggcagatcgacctacgaggcgccctggcgctggtcgcggcgcgtctctacttcacctacgaggagggccgcgcatga

SEQ ID NO: 333500 - DNA, 1467 bp, Pseudomonas aeruginosa
atgagccgtttcccgttgaaaacctccctcctgctggtcctcgcgctgtccgtcggcggcgctggcggctactggttcgcccggcaaggccacgccccggcgagtgctgctcccgccagcaccgagcgcaaaccgctctactggtacgacccgatggtcccgcagcagcatttcgatgcgcccggcaagtcgccgttcatggacatgcaactggtgcccaagtacgccgacgaggccagcgctgccgacagcgtgccggcagtacgcgtcgagccgggcatccagcagaacctcggtgtgcgcctggccacggtcagccgtggcaggctcgaccgcacgctgcaggtgaccggcctgctgaccttcaatgaccgggacgtggccctgctgcaggcgcgcgccggcggcttcgtcgagcgcagctatgccctggcgccgggcgatgtggtgaaggccggagcccccatcgccgacatcctggtgccggaatgggccggcctgcaggaggagttcctcgccctgcgcggcagctcggaaccggccctgctggcggcggcgcggcaacgcctgctgctggcgggcatgccggccgcgttggtcgagcaggtcgcccgcagcggcaaggctcgcccggtgatcaccctgacctcgccgatcgccggggtgatccgcgaactggaggtgcgccccggcatgagcctggcggccggcgcccccctggcgcggatcaacgggctgggccaggtctggctggaagcggcggtaccggagagccaggccggagggctcaaggtcggccagagcgtcgatgcgcgcctgccggcgctcccggatcgcccggtgaccggcaccctggccagcatcctgccggagaacgaccagcagagccgcacgctgcgcctgcgcatcgagctgcccaaccccaacggccagctgcgtcccggcatgaccgcccaggtcagcctcgacctcgccggccagggcgacgtgctgcagattcccagcgaagcggtgattcgcaccggcaagcgcaacctggtgatgctggccgaggaccagggccgtttccgcccggtcgaggttcgcctgggccaggaaaacgacggtctggtcgcggtcctgcacgggctggacgaaggccagcgggtggtcgcttccgggcagttcctgatcgactccgaagccagcctgaagggcatcgaagtgcgaaccgccgagcctgcggccacggcgcccgccgtgcatgaggcggatggccgcatcgtggaaatcaccaaccagggcctgaccatcagccacggcccgttcaacaccctgggcatgcccggcatgaccatgaccttcgccctcgcccgcccagaactggcggcgggcctgaaagccggcgaccgcgtccgcttcggcgtcagccagggcgatacgggcttggtcatcgagcaggtcagcaagcaggaggagcagccatga

SEQ ID NO: 333501 - DNA, 3153 bp, Pseudomonas aeruginosa
atgatcgcccgactcatacgctggtcggtggccaaccgcttcctggtgctgctggccacgctgttcatcgtcgcctggggcctgtggtcgctgcgcagcacgccgatcgatgcactgccggacctctccgacgtgcaggtgatcatccgcaccagctatccggggcaggcgccgcagatcgtcgagaaccaggtcacctacccactggccaccaccatgctgtcggtgccgggcgcgaagacggtgcgcgggttctcctccttcggcgacagcttcgtctatgtgctgttcgaggacggcaccgacctctactgggcgcgttcgcgggtgctggagtacctcaaccaggtgcagtcgcgcctgccgcccacggcgaaaaccgcgctgggcccggacgccaccggcgtcggctggatctaccagtacgccctggtggaccgcagcggccggcatgacctggcccagctgcgcgccctgcaggactggttcctcaagttcgaactgaagacggtgccggatgtggccgaggtcgccaccgtgggcggcatggtccgccagtaccaggtgctgctcgacccggtgcggctggccagcctgggcattacccagggccaggtgatcgaggccattggcaaggccaaccaggagaccggtggcggcgtgctcgaactgggcgaggccgagttcatggtgcgcgcctcgggctacctgaagaccctggccgacttccgcgcaatccccctgcgcctggctggcaacggcagcccggtcacactgggcgacgttgccagcatccagctcggcccggaaatgcgcaggggcatcggcgagctggacggcgaaggcgaagcggtgggcggggtgatcgtcctgcgcagcgggaagaacgcccgcgaggcaatcatgcgggtgaaggacaagctggaagcgttgaagaagagcctgcccgagggcgtggagatcgtcaccacctacgaccgcagccagctgatcgaccgcgcggtgtccaacctcgggcacaagctgatcgaggagttcatcgtggtcgcgctggtctgcgccgccttcctctggcacctgcgctcgtcactggtggccatcgtctcgctgccggtgggcgtgctcatcgcgctgatcgtgatgcgccaccaggggatcaacgccaacatcatgtccctgggcggcatcgccattgccatcggcgcgatggtcgatgcggcggtggtgatgatcgagaacgcgcacaagcgggtcgaggcctggcaggaaaaacaccccggcacgccgctcgcgggcgagcagcactggcgggtgatgaccgaggccgccgcggaagtcgggccggccctgttcttcagcctgctgatcatcaccctgtcgttcatcccggtgttcaccctgcaagcgcaggaaggccgcctgttcggcccgctggccttcaccaagacctacgccatggccggcgccgccgggctgtcggtgaccctggtgccggtgctgatgggctactggatacgtggccgcctgccctctgagcagcgcaacccgctcaaccgctggctgatccgcctgtaccagccggcgctggatgcggtgctgcgccggccgcgcgcgacactggcggcagcggcgctggtcttcctcaccgggctctggccgctgtcccatctgggcggcgagttcctgccgccgctcgacgagggcgacctgctgtacatgccttctgccctgcccggcctctccgcgcagaaggcctcggagctgctgcagagcaccgaccgcctgatcaggagcgtgccggaagtggccagcgtgttcggcaaggccgggcgcgccgagtcggccaccgacccggcgccgctggagatgttcgaaaccaccatccgcttcaagcccagggaccagtggcggccgggcatgaccagcgagaagctggtggaggaactggaccgcgtggtgaaggtgccaggcctgaccaacatctggattccgccgatccgcaaccgcatcgacatgctcgccaccggcatcaagagccccatcggggtgaaggtcgccggcaccgacctagccgagatcgaccgcgccacccaggccgtggagcgggtggccaagggcgtccccggcgttacctcggcgctggccgagcgccttaccggcgggcgctacatcgacgtcgacatcgaccgccaggcagcggcccgctacggcatgaacatcgccgacgtgcaggccctcgtcagcagcgccatcggcggcgagaacgtcggcgagacggtggaaggccttgcccgctacccgatcaacgtgcgctacccgcgcgagtggcgcgattcggtcgatgccctgcaacagttgccgatctacaccgcccagggcggccagatcaccctcggcagcgtggcacgggtgcacatcagcgaagggccgccgatgctcaagagcgagaatgcgcgcctctccggctgggtctatgtcgacgtgcgcggccgcgacctggcctcggtggtggcggacctgcgccaggcggtggagcgcgacgtaaaactcgcgccgggcatgagcctaagctactccggccagttcgagtatctggaacgcgccaacgcccgcctcaagctggtggtgccggcgaccctggcaatcatcttcgtgctgctctacctgaccttcggccgtttcgacgaggcgctgctgatcatggctaccctgcccttcgccctgaccggcggcgtgtggctgctgtacctgatgggcttcaacctgtcggtcgccaccggggtcggcttcatcgccctggccggggtcgcggcggagttcggggtgatcatgctgatctacctgaagaacgcctgggccgaacgcccggaggccgacgatcccgccgagctgctcgccgccatccgcgagggcgcggtgcaacgcgtgcgccccaaggccatgaccgtggccgtgatcgtcgccggcctgctgccgatcctctggagcagcggcaccggcagcgaggtgatgagccgcatcgccgtgcccatggtcggcggcatgatcaccgccccgctgctttccctgttcgtcatccccgccgcctactggctgatgcgccgtcgtcagtcgcacgcggcagcccaatcccaccctggagaaatcgcatga

SEQ ID NO: 333502 - DNA, 357 bp, Pseudomonas aeruginosa
atgaaaaacccgctgatcgccgccggcgccctgctcttcgccctgtccattgccgccaccgccgaggacatgcccggcatgaagatggatggcatgagcatggacggtatgaacatggagagcagtcaggcggctgctcctgccaacgcggagggcaccatcaaggccatcgacgtccagcggcacaccgtttccctcgctcacggtcccgtcgcagcactgagatggccgccgatgacgatgggcttcaaggcgaccgatgagcaactgaaagggctgcaggtcggcgacaaggtggatttcgagttcgccaatgaaggaggcacctctaggatcgtgaatatccggaagaagtga

SEQ ID NO: 333503 - DNA, 357 bp, Pseudomonas aeruginosa
atgagcgagatcgagactgtttccaacgctgaagggcggcctgtctacacatcttgctacagaagcattttgagagctgttgatcgccgttatgacattcgcggctacatactcagtgatatggtgctgatctgcctggccaatcatgggcggctaccaatgacgcgtcgccactattacctctgctacgcccaggaagctgccattcgctacctcgaagagctggcaacagagttgctctatgggcattacggcctcttggggaaaaggactccattcaacactgatctggtactcaggtcggagttgagggagcccgttggcaggtggacacgtaaccagtcggaaagcagctag

SEQ ID NO: 333504 - DNA, 2427 bp, Pseudomonas aeruginosa
gtggctacctacaagcacctgagcattgcgcgagaggtgctggataaccagcgccggaccaagaatcctcccctgttcgtgacccgcggagatctccgcgggcatggccaaaagctcaatgcctacttcgccacggctgaaggtcaggctagaaagcaagtcggctccacagcgagttccccctacgtcctcaaactgaagtacgagggcgcccttacgttcgccaacctgtcgcaccatgggttggagttcatcagccaggaagacaaacagctctgcgtggtctttgcgacagaagctggcttggccatgttcgccgaccacttgaaaaagctgggtgtcctgggtaccagcttgacctaccgtcagattctggaagccattgaaggaatcgaggcgtggtccgctgaggaccgcaagagctgggcgcttaagaatatcggccttcccgatactcctagcttcaagcttgacgtcgagctctggcctgttgacgtagcgaaccaccctaaccgcatccggctcatgactgccttcgaaggttggctggaaagccagaagattcggaggatcgacaaggtcaatctggatagtctgctgatgtaccgggtagaggtcactgcaggtcaggcggagctcctgctggatcatcgcgatgtgcggttggttgaccttcttccttccaccgggatcagcattcgccagttgaaccgcgacatcaacgagctcccccgcaacatcccttccccaccagcggatgcagcacgggtctgcatcttggatagcgggatcaatggcaaccacccgctgttgaagccagccatggcagagagcgcctctttcatcgatgaagagggggatgccgatgaagtaggtcatggtacggccgtagctggcgtcgctctctacggagacgtggaggcctgtgacaattcgaatttctggcggccggagttctggctctacaacggcaaggtgatgaagaagtgcccgcatacgggaaatgcggtctacgacgagcactcgcttgaggcctccctaaccaaggccgtcgagtacttcgtggacctcgggtgccggatcttcaacctatcgctgggcaatagccacgcaccctatgatggggcccatgtccgtggccttgcctacatcctggatgtcctttccaggcgccacaacatcctcttcgtggtgtcgacgggtaacttctgcggatcagaatcccccccgacacccatcaacagctggcgagatgagtaccccgagtacttgctggcagaacagagcgccatcatcgaccctgcgcctgctatgacagtgctgacggtagggagcatttctcggcacaacgctacctacgacgcccagcggttccctgagatccagcagctctcaccggcttcggaaaaccagccatctccattcacccgtcacggtccctcggtgaaaggcgcattcaagccggagctcgttgccgcgggaggcaatctcgcgagtcccatgcggcagaacaacgggcagtggcgcccggatatgcgtgggttgggtgtccttacgctcaatcaccaggtgatcggcaacacgctgttcaaagaggtgagtggtaccagcttcgcggccccctacatcacgcatctggctggacgtttgctgaacgagtatccagcggcatccgccaacctgcttcgtgccatgttggtcaatcaagcctatttgccggagcaggtcctctccaccttctcggatgagttcaggaaggcctacaaggaggataggagtacctacaaccgtgaggtcgcgcgggatgtggccggttatggtgtcgtgagcgaaagcgatctcttcagatcttccgacaacgtcgtcgttctgatgtcggaagagagcatcgaaaacgattcctgccagttttttgaactgccgttgccggccgaatacttgcgctccgctcgcgcgacacgggaactctccgtgacactggcttattcgcctgccgtccgtaccaccaggatcgattacctggctacccagatcagctatcgcttggtgaggggcacttcactggacgatgttcagcagtacttcaaccagctgaaaaaggccgaaactgagacgcgaaacgatgacgcgactaccaatcgtgacatctctgctcaagcacgcagccgcggaacagttcagtcctctcgctggacctttaagcagcgcaagccaaatgaaaaatggtacgtggtggtgatcaggcaggatcgcgaatggagccatcctgatgtgctggacaaggagccttacgcgttggtggtcactgtcgcggaccgggagagcgagaacgcgaagctctacacccagatccaagcgctgattcagcagcaggtcgaagcgagagagcagctgcgggctgcagctcgtttgcaaaacagggaataa

SEQ ID NO: 333505 - DNA, 987 bp, Pseudomonas aeruginosa
atggcgaacgggaagattcttcggcagctcttcagggcaggtacggcgggcgatgcagatgcatttcgccttgcgtcgaaagctgttatcgaagaggagcggcaaaagcagcaccatctactcgcaaatgatcttgagcagattctttacggcggtgacttaaatttacggacatctggtagcacgcagcgcactcattatgatgttcctgtagataaggaacgaggtctaccgctgctggatatcaggacgcccaagcgttcactcgatgaagtaattcttccccctagcagttctgccgcccttgaggaaatcctcgaggagaacaggcgtgcggatgtcctgcgcagctacggaatgaagcctgccgggaaggtcatattttttggacctccaggttgcggtaagacgctggcagcagaggtcgtggcattcgagcttgaccggccgctggccatcgtccgcctggatgccttggtttcttccttcttgggcgagaccgctgccaacctccggaaagttttcgattttattgcccagcatccatttgtagttctgttcgacgagttcgacgctatcggtaaagagcgggacaatagcagtgatcacggcgagctgcgccgagtggtaaatgctgtccttcagatgatggattcatacgaaggtagcagtttgattctcgccgctacgaaccatgagaggatcctggactcggccatatggagaagattcgatgaatccattgaattccccctcccagatgagaagcagctgaaagagattttgcatctgaagctacgcggtatccgtcgccaatttgagattgacgacaaagaagtattgaaggaatttaagggtaagagcggagcagacgtcgaacgcgtcatacgccgtgcagcgaaacggatgatcctgcgggagcaagagtttctgaccatcaaggagctgaagagcgcccttgtcagggaggacctcaggaagtcctaa

SEQ ID NO: 333506 - DNA, 591 bp, Pseudomonas aeruginosa
atgacgactcttcctcaagcgatcaaagatcgcagcaagctcttgcccgaaggaggcatgctgactgcgaaggagttcttgcacctggggagccgggcagcagtcgatcaggctttttcgcggttggcgaagagtggtctgctcttgcgggtgactcgcgggctctacgttgcgcccaaggcggggcagcatgggcgtgaagcacccgcggcggagaaggttgtcagttctctggcctccaaaacccaggaagtcattgcagccgatggtgcgcaatccgcgaaattgctcggcctcccaacgcaaggtgcggttggagacgtgtttctcaccagcggtcgggctcgcacgcttaaagtgggtggtgtgacagtagagttgcgccatgcacccaagtggatgctctcgctagggacttcgactgcggggagtgttattcgggccttggcgtggttgggagaggcgcatgtcggccaggtggtggtgaaactgcgggagaatctatcgacggccgactggcaagcgttgagttcagcaaggtacctcttgccgtcctggatggctcaggccataggccgtgaggtggtttga

SEQ ID NO: 333507 - DNA, 636 bp, Pseudomonas aeruginosa
atggtctgctctcatgatgccacagctgaattcacattcaaatggagccagcccagcgaccatgccagatcctccattaacgtcgttgccgaccgaggctacttcagcggggtggaaatcctggcgtgcgagcaggcgggcattactcccttcgtgcccaagccgatgacctccagcagcaaagctaaagggcgttttggtaaacaggacttcgtctacatagccgctgatgacgagtgccaatgtcctgctgggcagtgtgcaatcaagcgcttctcgacggtggaggatggcctcgagctggatgcttactggagttctgcctgcacgagctgccctatacgcagcagctgcaccaccagcagttaccgccgactcaaacgatggcggcacgaggcggtactggaggccatgcagcagcggctggatcgcgaaccagagatgatgagcgtgcgccgccagaccgtggagcccccgtttggcacgcttaaacattggatgggcgcgacgcacttcctgacccgaacactgccccgagtcagcacggaaatgagcctgcatgtcctggcctacaacctcaagcggctgatgagcatctttggcgtcaccggtgtgatggaggtactgcgggcctga

SEQ ID NO: 333508 - DNA, 426 bp, Pseudomonas aeruginosa
atgtctaacttacttttgctacgggctgagcagatgacctggttccggaaccatcaacgcacgctgctacgcatagccttggtgctgtgggtgctggcgttcggggttgcggcaagccatggttgtctgtcgtacccggagcatgaccccgcactagtccatgcagacgtctcggtcggcctggatggtgcagcgcaccagcttcatgccagtggctgcctacaattctgtgacgacagcgcatcggcgctcaatcaggcaccggggtatattctgttcgaccaggctctctgggtgctcctgctcacgcttcccgtccttttcctgcctgccatcatccctccgcgcttcggcgcactcgccaagcacctgcccgcgccgccccggccgccggcacgcctgagtttcgtccgcttcaacgattga

SEQ ID NO: 333509 - DNA, 450 bp, Pseudomonas aeruginosa
atgcacatcaccctcaaatcgctcgtcgccgccctactgattagcagcccgctacttgccgtggctgtcgacgaacatcaccccgatcaggctccggcgaaagccgagaacgcatcggcgccgactcagggccaggaaaaggccatggccgaacagatgcagaagatgcaggccattcacgacaggctcgctgccgccaaaaccccagaggagcgtcaggcggccatgcatgaaggcatgcaagcaatgaaagaaggcctgggcatgatgcagaacggctgcgccggcaaaggcatggaccagcatatgaagatgatggattcgaagatgatgggaatgatgatgcaaatgatggatcagcaggccggcatgatgggctcgcagtcggacatgaagggcatgcccatgcagcactccatggaccagccagcccagaaaccagcccagtaa

SEQ ID NO: 333510 - DNA, 252 bp, Pseudomonas aeruginosa
atgaacacttcgccttcatcccatcagcctccgccgtccttttggcgcagcaaggccggtattgccctgggtatgctgttggtcattgccttgttctacctggcgcgagagcactacggtcatatctcgctgttgttgccatacgcgatcttgctgctgtgtcctctgatgcacctgtttggtcatcaccacggcggccacggccatcatggtggaacggacagtgcccccaaggacgacgaaagaggctga

SEQ ID NO: 333511 - DNA, 2340 bp, Pseudomonas aeruginosa
atgcacggtcatgaacacggacatccattacttcgaaacgacacctcctccggcgaagtgaaggaccccgtctgcgggatgacggtcaaaacagacagtgcccaccaactgcagtacgccggcaaggcctatcggttctgcagcgaaaagtgtctgtcgaagttcagggcagcgccggaagtctatggcgtagctgtgcgggaggagacgaccaaacttccgacgactgcaggtgacacctggtacacctgcccaatgcaccccgagatacgccagcttggtccgggcgcctgcccaaagtgcggcatgaccctggagccggtactgccggagctggagcaggaagagaaccctgagcttcgggatttctcccggcgcttctggtggactttgcccctgaccattgttgtcacgcttctggccatgggcgggcatgccttgaacctgttccatggcgccacgcagaactgggtcgagctggtgatcgccagcccggtggtgctctgggcgggatggccgttctacgtgcgcggagtgcgctcggtgctccagcgcagccccaacatgtggacgttgatcggcctggggacttccgcggcctatctctacagcctggtggccaccctggcgccgacggtcttccctgcgaacttcatgatggagggccgcattggcgtctacttcgaggcggcggccgtcatcatctcgctcaccctgctggggcagatactcgaactcaaggcgcgctcgcagacctcggcggccatcaagtcgttacttggcctggcaccgaagacagcccggcggatcaatgccgatggcagcgaagaggacatcccgcagagccatgtgcacccgggcgatcggttgcgcgtccgccccggagagaaggtcccggtcgatggcctggtcgtacagggcgaaagcgccgttgatgaatccatgctgactggcgaacctctgccggtgctgaagcatgtgggcgacacgctcatcggggcaaccttgaatacccatggcagcctggtgatgcaggcgcaaaaggtcggatcggaaaccatgcttgcgcagatcgtgcagatggttgtgcaggcgcaacgctcgaaggcgccaatgcagcgcctggctgacgtcattgccggctacttcgtgatggttgtcatcgccatcgcggccctgaccctgattggttggggagtctgggggccgcagcccagttgggtgtttggtctgatcaacgccgtggcggtgctgatcatcgcctgcccctgcgccctcggccttgcgaccccgatgtccgtaatggtcgctacgggcaaggctgctggcagcggggtgctgttccgcgatgcggcggccatcgagaacctgcgcaagatcgatacgctgatcgtcgacaaaaccggcaccctcaccgaagggcgcccggccttccagagtgtcgaagctgcgtccggtttccgtgctgaagaggttctgcggctggccgccagccttgaccaaggcagtgagcatccactggcgcatgccattgtcgatcaggccagggtgcaggggctggcattgagcgaaacggatgagttcgagagcgcctcggggattggagtgcgaggccaggtcgatgggaggcgcctgctgctgggcaacactgccttgctggccgatgcgggcgtgtcctgcgaggccctgcaagcacgtgccgaacaactgcgtagcgaaggcgcaagcatcatgtacctggcggtggacggtaccttggccggcctgctggcggtagctgaccctatcaagccgacctcccggcaggccgtgcaatacctccaggacgccggcgtcagggtcatcatggccactggcgacggtccgaccacggcgcgtgcagtggcccggcaattgggtattgaagaagtgcacggcgaggtcaagccacaggataaggagcacctggctgccagcctccaggcggctgggcatcgtgtggcgatggccggagacggcatcaacgatgcgcctgccctggcgcgtgccgatgttggcattgccatggggaccggtaccgacgtcgcgatgaacagtgcccaggtcaccttggtcaaaggcgacctgctcggcattctccgtgcccgcaacctctccatggcgacagtgcgcaacatgcaccagaacctggccttcgccttcgcttacaacgccatgggcatacctctcgccgctgggttgttctaccccctgacggggcacctgctgtccccgattattgctgcgttggccatgagcgtaagttcggcatcggtcgtgttcaatgccgtgcgcctgcgcaaggccccgctcgatgggtaa

SEQ ID NO: 333512 - DNA, 270 bp, Pseudomonas aeruginosa
atgaaaagtattgatctgcgcgttgaaagcatgagctgcgcttcgtgcgtccgccacgtgaatgctgcattggcgccagtcactggggttgccgaggtgtcggtcgacctcgcggcggggcgggtgcgcgtcagtggggatgccgatgcccaagcactgatggccgcgctgcaggatgccggttatccggccaaggtcgaagcatcgacccaggccccggaaggtggcaaggcgcgcggctgcggcggcagttcctgctgctgtcactaa

SEQ ID NO: 333513 - DNA, 444 bp, Pseudomonas aeruginosa
atgcgcaaggcacttcgcttgacggcactggccgggctgttcatggcctccatcgcccaggccgccacaaccatcgacgtctaccgcgaccccaactgcggttgctgcaagagctggatcaagtacctggaggccaatggcttcagcgtgaacgaccacgtcgagccgaatatgagtgcggtcaagcagcgcgtaggcgttgctccgcgtctgtcctcctgccacaccgcagtgatcggtggaaaattcgtcgaagggcatgttccggtggcgcagatccacgagctggagaggcgtccggaactgcttgggatcgcggctccaggtatgccagtcggctcgcctggcatggaaatggggcagaccaagcaggcctaccagatcattgggcttactcgcgacggcaccgacgaggttgtcgccaactatccggcagcccaatag

SEQ ID NO: 333514 - DNA, 1332 bp, Pseudomonas aeruginosa
atgcttgctgtggtgtccgtcctgaccgttgctggagtgagcttcagtgagctcagtcgtcggcacttctggatgcaggatcagcagacgatcaccgaaaagctcgactctattcaacaaatcctcatgtctgcgaatgccaatctagagagcagtcatattcgtttggagcttaatgctttacttggcgctcaccatgagctcgaatcgatcattaccacgacggatggcaatgtacttttctcgaattcaacaattactaatttgccggctcaattttcgcaggaaagttccagcttgtgggagtgggggaatcatgggcggctgtataggggtatgactgctcgggttggcccacagtcggggcctagctcggcaaccgccgtcctgatattggatgtcaccagccactctcactttttcgtgacgctagaacgttggttttggataggcttggcgatcagcgccattgcaagcggcgccttgggcgtcgtggttgtcagaagtggcttgcgaccgatacgacaagttaccgcagtcgcggcatcgatgtcagcaaagtccttgaaagagcgtatcccactggaccccgtaccctctgaacttcaagaattagtaagctcctttaatgagatgctggccaggctagacgattcgtttatgcgcctctccaatttttcagcggatattgcccatgagctccgcacccccattacaacactactcacgcacaccgaggtgatcctcggaaaaaagcgcagcattgatgactatgaggaaaatctctactccaatcttgatagtttgcatcatatgtcgagaatgattgatgacatgctcttcttggcaaaatctgacaatggacttatcactccaggctcggccaggatcaatcttgaggagattgtgcagaggctcttcgagtactacagcctgcttgcagaggagcgcggcattgagcttcgccttaatggttcgtcttgtatccagggcgataacctgatgctgcatcgagccatttccaacttgctatcgaatgcggttcgttataccccagcgggcgcaacgatcgaagttttcattgagagcaacgccaataccgtgactctctcggtcgtcaatcctggagagacaattcctgccgagcacctgaagaagctcttcgatcgcttctatcgtgccgaccccgcgcgtcgagagggggaatcgcataatgcaggccttggcctcgcgatttcacgttcaattgtcgaggcgcaccatggccgcatctggtgcacctcatcagacggagtgacagcattccacctggaatttccacatcgcccttga

SEQ ID NO: 333515 - DNA, 684 bp, Pseudomonas aeruginosa
atgagacttcttgtcgcggaagacgaacccaagatcggcttgtacctgcagcaaggactgagcgaggccagcttcaatgtcgacctggtcaattcgggtactgaagcgctccagcatgcactcagcgagtcgtatgacctgctcatactggacgtgatgatgcccggtctgaccgggtgggaagtactacgcatggtgcgggccgccggtaaggatgttccagtgttgttcctgaccgcacgcgacggcgtggatgatcgcgtcaagggacttgagttgggagcagatgattacctggtcaagcctttcgcatttgccgagctcctggcgcgcgtacgcacgctgctaaggcgcgcgacaacaactccaaccctgatgaccctaaaaattgcggatctcgaagtggatctgctcaagcgccgggcagtgcgaggcggggtgcgcattgacctgacggcaaaggagttctcgctgcttgagttgttgatgcggagacgcggggaggttctgccgaaatcgctgattgcctctcaggtatgggacatgaactttgatagcgatacgaacgttatcgaggtggcagtacggcggctgagggccaagatcgacgatgacttcgatcccaagctgatccatacgattaggggaatggggtacatgcttgaagagcccgagcagaaatga

SEQ ID NO: 333516 - DNA, 546 bp, Pseudomonas aeruginosa
atgaatactaagttttctagcttcctaattgctggggttatgtttgtcttctctgcagtttcgatggctagtgaaaaggcggtaagtttcgattttggaaatcgcagtgtgccagaaaaggcaggtcggacaattgagattaagattggggatctctacttcgagccctctcgtatagatgttaaaaatggcgagaccattcgatttgtattaaagaacgaaggactggttcttcatgagtttaatctgggcaaagccgcggcgcacgtgcagcaccagaaagaaatggtggagatgttcaagagtggctatctcacggcaatgaaagttaacgacgccgagcacgatatggcagggatggatggtgacatgcacggcatgagcatgcccagcatgaatcacagtgacgccaacagtgttttgattgagccaggccaaaccaaggagttggtttggacatttagtaaaacagcagggctgcaatttgcgtgtaacgttccaggacattaccagaaagggatggtagggcagattgccataaactag

SEQ ID NO: 333517 - DNA, 1458 bp, Pseudomonas aeruginosa
atggatggtgtgccgggtttaagttttcagggaatcgctcccgatggcatgtacgaatataaattcaaggtcaatcagcatggtacctactggtaccacagccactctggcttccaggagcagcttggcgttttcgggccgttaattatcgaccccaaagagccagagaaaatttcttgcgaccgcgattatgtcgtcatgctgagcgattggtcggatgagaatcccagtcgtgtccttgccaagctgaagaaagactctggttattataatttccataaacgcacagtcggggatttcattgatgatgtaagcgagaagggttggtcgaaaactgtcgccgaccgaaaaatgtgggctgaaatgaagatgagcccaaccgatctcgccgacgtaagtggttatacctacacctatctcgtcaatggtcacgcacctgataccaattggactggcattttcaagtccggggaaaaggtccggctgcgcttcatcaacgcctctgcaatgacctacttcgatgttcggattcccggactgaagatgacagtagtggctgcagatgggcagccagtccggccggtaagtgttgatgagttccgcattgccgttgctgaaacctatgacgtcattgtcgagccgacagaccaggccgcatacaccatttttgctcaatcgatggaccgtaccggctacgcccgaggcacgcttgcggtaaaggaaggaatcagtgcaccagttccggcgctagatccccgcccacaaatcaccatggacgatatggggatgggaggcatggaccatgggagcatggcgggcatggatatgtccgggatggatcatggcgacatggccggtatggatatgtccagcatggaccatggcagcatggctggcatggaccacagccagatgcagggaatgggggcacaaatgcaatcccaccctgcgtccgaagccaataaccccttggtcgacatgcagactatgagccctacagcaaagctcaacgacccaggtattggcttgcgcaacaatggccggcgcgtgctgacctatgccgatctaaagagcacattcgatgaccctgacggacgaatcccatcccgagacatcgagcttcacctgaccggccacatggagaagttctcctggtcgttcgatggcattgagttcgctgatgccaagccgctactcctcaagtatggcgagcgtgttcgtatcaccctggttaacgacaccatgatgacgcaccccatccatttacatggcatgtggagtgatttggaggatgaacagggcaacttcatggtgagaaagcacactatcgacatgccgccggggtcgaagcgcagctatcgcgtaacggccgacgcgctcggtcgctgggcctatcactgtcacctgatgtatcacatggagctgggcatgttccgtgaagtgcgagtgcaggaatag

SEQ ID NO: 333518 - DNA, 933 bp, Pseudomonas aeruginosa
atggccctcgaacagacccgcagccccgttttggctggcattgcaatccttgggatgagtttgctccctttgacaggcgcccgtgctgaagagccgatgcaaggcatggacggctcccagatgcaggggatggaccactcccagatgcaagggatggatcattcccagatgcaggatacggactactccgatatgcaagggatgcagcccgctgccccaacggaaagccgtacgccaattcctgtgctaaccgatgctgatcgtgccgctgtgtacaaaggcagcatggaccaccatatgggacaagcacttaactccctgctcgtcatagataagttggagtggcaggacgccgatcaaggtagtgccctcagctgggaagccaacggttgggtcggcggcaatatcgatcgcctatggctgcgctccgaaggagagcgagtcaatggtgttaccgagaatgccgaactgcaggccctgtggggacattccatcggcccttggtgggatgtggtcggcggagtgcggcaggacttcaaacctggttcgccacaaacctgggcagccgttggtatccaggggttggccctgtatgacttcgaaacccaggcaactgcattcctgggggaaggtggccaaagcgctctgaggctcgaaggggattacgacattctcttgaccaatcgcttgatccttcagccgacggccgaagtgaacctctacggccggaatgacccgcaacgcggtaacggttccggtatctctgactcagaaatcggactgcggcttcgttatgaggtcgtccgggagttcgcgccatacataggcgtcacctggaaccacctctacggaaaaacagcagactatgcccgcgaagagggggatgactccagtgaagcgcgcttggtcctcggcgtacgtatgtggttctaa

SEQ ID NO: 333519 - DNA, 387 bp, Pseudomonas aeruginosa
atgcaaaatctgaaaacgttcgccgcgatgtctgcgctcggtgcgggaatgctgctgagtgcggtagcccaagcacatcccaagttgctttcctcctcgcctgctgagggaagcgtcgtcgaggctccggccaaaatcgaattgcacttctcagaaacgctgctgactcaactctctggcgccaagctcgtcatgacggaaatgccaggcatgtctcactcctcccccatgggcgtgaaggcggctgtctcgggcagcaccgatccgaaagtgatgctcatcacgccggcagctcctctcaccaccggtacttataaggtccaatggcgggccgtttcttctgatacgcacccgattactggcgctgtaaccttcaaggtgaagtaa

SEQ ID NO: 333520 - DNA, 939 bp, Pseudomonas aeruginosa
atgggcgaccccgtcactatcgctctacgcttcgccctgtatgttgacctgattatgcttttcggtttggcgatgttcggcctatacagccttaagggacaagagcgggtcagcggggcagtattcaacttcgagtcgatattggtgtgggccgccttgatcggtaccttgctatctgttgcagcaatgctacagatggctaaggtgatgagcggtgtttccaatttctccgaaatacatcaccatattttagagatgatcttaacgggtaccgatgtcggcctgacttggatagtcagggtcgcggccttggtattggctgcgattgctgccctgctcaacaggcgtgcgccaacattgagtctgctggcagtatccgcactaggtgctatcgcccttgctagtttggcctggacagggcacggcgctatggatgaaggtatcttgcgctatgtgcattttaccagcgacattgcccaccttctcggtgcagggggatggctgggcgccttggtagccttcgtattgctactccgctccaagaagcttgaaggtgagcagcatcttcgtttgttgtctcggacgctgacaggtttcgagacggcaggagctctgatcgttattagcttgacagttactggcatcgctaattacgtgctaataattggtccggaaattggtggtctggtaaagagcacctacggttttctgctaacaatcaaggttgcgctttttgttgcgatgttggtgcttgccgcagcaaaccgctatcacctcagtcctttgctggatcggtcgttgcagactggtagttatgctcctgcaataaatgcgctacagcgcagtatcattcttgagttcgcggtggcgattgtcatcgtcagtctcgtagcctggttcggaacactgagccctgaaatggacatggctgtcgaatga

SEQ ID NO: 333521 - DNA, 1662 bp, Pseudomonas aeruginosa
atgtcaatgcctgatgaaacattgcattctcgaattacccgctatcactatttgtccggaaataagactgagcctgaaacatttcgggatctatttgatgcagccccttttccgctaatcatcctgccgaagcagattgagacccttgcagcaagacttccaggggatgcggagagcaatcttggtgagttgatcgaaatcaatacaatcctccccgcgtataaaccatttttgggtatttcagacacatcggttcagagcgctagcacaggtattctttccggagtggttcgagtcccgcgtagggagggtgcctctcaagggaaggctaaaatatgtctttcttgcgtgcagcaagacttcattgaactagggtgtgcatattggcaccggtctcatcagttacctggtgtaactgcttgctggcgacatggtgaagggctcattcattgctgctctagttgttcacatccgttttatagagctaataaattgcttccggatttggcggggaagtgtatctgtggctggagtcctctaagtatgcctgccgtatcattggtgtcggagcacgaaaggcagtatgcaatatttgcccatgaagttcttcagcgcaatttaccgttcgtaaattggtcggttcttgcagcatgctatcgtcggcaaggcagaaagcgaggattcgtttatggaaagctaatgggtacggcgaagttggcagatagcataaagtccaagtatggggatgaagtgttgtcgcgaatagataaggcgtatgctagcggaaagcttcaccagtggattaggttcacgacaacacgtgggcagattgatatgccgctcgcgcggcacttgctaatcgctcaccatttgtttggtgacgctgatgggtttgagaggaatttggctaaagagatgatgttggccggcgcgtatagatcagctccgcaaacgaagtctagacagtttctaccaagcaagaatcaccaattccgaaaaaagatagagatgctcatagagactcgctcagatatcgggatggagtatctctgggctaatgcctatcaagccacacgatggcttgtggaaaacgacaagtcatggcttgcagcgaagcttgctgctgtcgaaaaaacgtcaggtgcagttgtgtcttgcagtgatcctcgagacgaaaggtatgctgctctcattcaaaattgcatagatgatctatatcgggtcacaaagtcacagaagcgtgcaaacataagtaatattctcggcctattgccgacagcagttcgtatgacgccagctaagcgcaaggaaaaatttccgttagtttcacatcagcttgagcttcattttgaatctgtttggcactttcgcttgaggcgtgcggtgtgggtggtcgccgaaatggccagactagggctacctccgaacaattcgagcgcacgattattatcgacgttaccaagccttgcttggtccgcaattgtgaattttttcgaatgggagttggaaaaaatgaccatggagatcatcgacgtggagtcattgcttaagtcaactggcgtctcgagacaatgggttgggcctccgggctacgacatgcccatgggaggtcacgcctatcttggagtcaacgcacaggcgccgagctcgttaacgccctaa

SEQ ID NO: 333522 - DNA, 1668 bp, Pseudomonas aeruginosa
atggagctcaaattccatttcttcccgacagctttccccgacgagacaattcacagtgtcctctctcgctatgcccggctttgcggtggaagtagccgaaaagcagctttcgctggcgagagagctgcagtctcgttcacacagaacgtagcgtttccaagtcggttggctgatttggtcgaggcactaccccgcggcacagacttgtccgtggcccaaatcatcaagcgtcatactgtactgccctattacgcgccctttctcaccaatgaccaactgcagcatgcccaggcctcaatggccggcgaaggcaaagggttgatgctcaggctgggcgtcaatgccagtcggatcgagggcgcatcgagagtgaggttctgtcctgtatgcctcaatgaggatatcggtcgggttggtgcagcatactggcaccgagttcaccagctcccaggtgtgttggtatgcccccaccatggccgaatgctcaaggtggtggatcctagctggtacagccgcaattcacgacaactttacctgcctgacgatgacggagtgcaaggacacgcgatcctgcttgatgctgccttggacaccttcccggcgctacaccagattgcgctgaattcgcttcaattactcgacttggagctccgccagctttcagccaccgcagtgcgctcttgtttactgcgaagagctgctgatctaaatctgacctctggcgcaacacatcggctggatttacgccgcttggctgcgtatatggccagctttttcaaagggctcccagcgacttgggagtactcggttcttcgcgagtctcctgcagatttacctgcgacctgggtcactaagctgcttcgaaggcccagaggcactcaccatccactcaaatacattgtgctggcgagggctttcggggtcgacatggctcgcatcccgcgcattgacaagccatcagttccagcggcgaagcgactgccaattgatatccacacctcacaaatgggcccagctgagcccgtaattgagggactggcaagcttaccgactgctgtttgggaactagctcttgccggacgcgaagcacggcagatcgcctgctcactgggtgtatcccaggtttatgtttaccggaccatccgcagcgtcaacggcggcccgaacgcatggagagaagcgagatttctcagcgagcgcctgcagcgccgggcaaccttcgaagctgattatcgcatcctgaaagctcacctctgcagggggtatgcgtggctgtatcgctgtgaccgggtctggctttcagactgcatcgcgaagtatggcaaggttcacgcaagccgagcggacagagccggcaagttcgctgtccttgacgcgaagcttgtcgagcaggtcagggactgtgcacaacggcttctcgccgtgtcgggaaaacctatccggatttcacgcaccaaaattggccgagagctgcacgtcctgtcacgcttcgagaaacaactctccaagctgcccctttgtgcaagagcactggacaatgtttgtgagtctgctgagcagtttcgcgttcgtcgtctgttgtgggcagaggcgaagctggtggaggagcagcgaagtgtgaatcgatcggcgttataccgcactgcttgcatcaggcctgggaagtga

SEQ ID NO: 333523 - DNA, 1461 bp, Pseudomonas aeruginosa
atgaaaggcgcacagatttttgcgagctacacaaagcaggccatcactgagtacgcgggtaacccgttgattgaagctctgccgccaattcttgcggaaacggcggccatcgagttgatatcgaattttcctcagccagtagcacctgaggaactcgacctcgacggagcaacacggatccactgcattgatcgcttgaggacagttgtgcagcccttcctgctgcatttggagctggagtcaatgttctccctactgatccgccgcggatacgttggccgcaatccaacctcgcccgacacggtcagacatttgcattccttgtcgggggcccagcgctatcttgattccttcaagtcgacagctgattccttcagcgttgtcggcctgagtggtattgggaagtccactgcactccacgccatattgagcctctaccctcagacgatccggcatgagcgttacgagggcagccagttcgtccacactcagatcacgtggctcaaacttgattgtccgcgagatggttcgttggcgggattttgtcagcagtttttccacgccgttgggcaagctctgggcgacaaggattatcacaagcggcaccggcaccgaaacatcaacgatgcgctgcagcagatggagcaggtggcaagtacgttcttcatcggtgccttgctgattgatgaactgcagaaccttcacctggcgaaaacggggggcaaggagagcatgttgaacttcttcctccacctggtgaacaacatcggcatccctgtcgtattcatcggcacgaattcgatgatcagcctgttctcggacgtcatgcgtgttgcccggcgtagctgcggtggcggtatggtcgaattcaagcgcttcgagaaggatgatgaagagtggcggcttctggttgagaatctctggagctatcaatggtacaggcagacggctgaactgacccccgaaattttcgacgcactgtacgagcacacacaaggcgtaactgacttcctggttaagcttctagtgctgagccagcgctatgccattcaaagtggctccgaacgcctgactgccgaggcgatcgccaaggtgagcaatgccaagatgcagatcctcaagccagcgctatcggctctgcgcagccgagatcctcgtcgcatgcggcaattcgatgacctgcttccaatcgaggagcagttgataggcatgatggcatttgatggtcttccacgatcagagcgtcttgccttgcttcgtggtgtgacgccgcatgcgaagccacatgccccacctccatcagttgttgcaagtaaacccacagtgcctgcagttgttgcggtggagacatcggaggcaaaggcacttagtgaacagcctgacactctcgcagcgctgaagtctgctggttggataaccatggatctctttgaattcgcgccggcttaccgcaaatcatag

SEQ ID NO: 333524 - DNA, 2169 bp, Pseudomonas aeruginosa
atgagtatttcagttaatgacgtgttcgaacccgtcacagaactctctgttctctccaccatggtgagagcactttatatcgatgaagcgcacgacgccgtgatagttattggcctgattgagccgctaagaaagccctatcctgtgggcctggaggagctcaggctgtcactggaatcaggtaataccaagacagtggttatgtcggtccctgaattcattttggttctggaagatgatttggatgagagcgccaagcgcgatcgggatgctaaatgggcggtgatcgagccacttttagatccggcctacccaggacagatattcgttcgtggtgagatgggccggctggtgggaagtcgggcagctgagctgggcatgcagcggaagactatttaccggttcctgtataggtactggttttatggccaggtaagaaatgcacttctgaagaattattcggcagtgggggttgcgaatcgtacctacaagcctgaacgccggccagggcgaaaaccaaaattccagggcgtgctcgtctcacctgcaaaactgctcagtgatactgataagcgatgcattcgagtaggttacgcactttacgtaaaagataagacatctacgattcgcagtgcttacgaaaagatgctgggtaggttctattctgtaaaagaactctccaaaaacgcagagaatggtgtccgcctgcttcccgactcggaaattccgacattcaatcagttcgattactggggcaagcagttttttgacgaagtcgaaactgatcgtgggcgtaagggaatgacggcttggctcaaggattgccgccccttatccggtaccgttcgcgattggctaagggggccctgccatcaattcgagattgacgcgacaattgccgacatttacctagtcaacagctattcacgacggatgttaatcggccgacccgtagtgtacatcgtggtcgacagcttctcggggatgattgtcgggctatatgtcggactggaggggcccagctggaacggcgcccggcaggcgttgttcaacgcgttcacatccaagatgaatttctgtgcgcagaacggcgttgacatcgttcccgaggattgggactgtcatcacttgccacataacatctatgccgacagaggcgagatgttgtctttggcagcagaagggctggcggctggcctgggcatcgagatgggcacggctcctccgtaccgaccagattggaaacccatggtcgagagcaggttcggcatcctgaatgacttaacaggtatcaggtggcttccgggcggtgtggctgcgcgagaaaaggaacggggcgagcgggattatcgcctcgatgccacgctcaacctgaaggagttcacccagatcatcatcgagtgtgtccttcactataaccgctatcatcggcagccggatcggcttacccaggcgatgatgaatgatggcgtcgagcccactccgatgggcatatggaattgggcttcggagaatgacctgatccaggccaacaaccgacctgacgaattgatttatctacacctgttgcctcgtgaacgagcgaccgtacaaaaaggtggcgtgctattccgcgggatgcactatgtctgcgagatggctatccaagaaaactggttcgccaaagcgcgtcgcaacggtgtctggtcaatagactgccgtttcgatccgaattccgcagaccatatctggatccaaggtgataacaagcagttcatccgctgcgaccttcgacgctcggatgctaagttcgcgggttaccgttcggacgagatctacgatctactggaagcgtatcggcagtcaccacctgctcataaacgcgcggagctggagagccgtgtgggcttggccgatacggtggaacagattatcagtacagcacttgccgagcgaaagcttgagcctgccgccagtaccaagactgaggcggtagccaatatccgcgagaatcgtgctgaggaacggctgctagagcgcgaaagcgccactgtcccagatggtgtccgtgcagacccccttcaacctgcgacggcagcccccaccattgcgcacgattcgtatgcagggccccgcagcgcgcaggttatcgatctgctcaaaagacttcggccgggacagtcgcaatga

SEQ ID NO: 333525 - DNA, 738 bp, Pseudomonas aeruginosa
atgggccgctcctggaaaatccaaggcattaagaccgggcgcattcatcacctcctgtccgatcttgaacgagcgtaccttctggtttgtgagttttctgaggatgtagtggatattcgcgagcagtatccgttactgccagtggaaagcgcccaggcaatcgcacgcgcgatcggtgttcgttaccccagatacaaatccaccgccgttccgctggtcatgacgacagacttcctcctgaccgttaagcagccagacggagacttcaagactgtagctaggacgatcaaatatcagcaggatctcaaagggaaagattctgctcggacattggaaaagttagaagtcgagagacgattttggatgggtcagggcgtggactggagtatcgtcacggaggagcttttcacacctgacctgataaaaaatctcggtctacttaggcggtatgcgcaattgcctcgcgctctgatgatttcgtccctgcattatgaatttatcgagctcctcgagtctagcaaggtttatccatggtcgatgtcagagtgcctaaggaaaattgctaagcgtttgtccataccgtatgccgaggctcgggacattttcttcaacctgatctggcgaaagatgatccagattgatttgagcagcgctccgctacacctcacatcgccattacctgatttcaaagtcgtttacccctccgaactgaccgcccttagcgagaaatcgtcatga

SEQ ID NO: 333526 - DNA, 258 bp, Pseudomonas aeruginosa
atgaaattgtttgttctgtttggccaacgcaaatgcgattaccccggccagtacgcgctggaggccctggcctgcatggatgagaacgggcattcggacaacccagactacctgagaggtgagctggccattcgggagggtagttgcgagtttgaccgattgagcatcgtcgagctgtccgtcagcgagaaggatgtacgtcgcgtcctttaccccgagaaccaggcaactgatgccgctgtcgttccggctgagtga

SEQ ID NO: 333527 - DNA, 165 bp, Pseudomonas aeruginosa
atggctcgtagaattttagaaactcgtgaagtcgaaggcgcggaagaggtgaaggaattccgcgatgcggagtgggaaattgctgccgttgctccaggcacgaaaccggatgggacagcttacttcctgcacctgatggctcgatattctgaagacgaggattga

SEQ ID NO: 333528 - DNA, 219 bp, Pseudomonas aeruginosa
atgacaactcccgctgagaacatcactaaggaaggcatcgaagttaagcctggccaggtctggaaagacctggataagcgccaagcaggccgccagtgcaaggtaacaagcgtgtcctttggtaaggcaaagatggagagcttcgctgggagcaagtccaccgtctcggtgcgacgtatgcacaatcacagcaccggctgggaactggtaagtgaatag

SEQ ID NO: 333529 - DNA, 300 bp, Pseudomonas aeruginosa
atgacccaaaagagccaggcgttcgagctggcattcaagcgccgcgagcttaagagcggccccgaggtgtaccgggcctgtgatgcgctccagcagtcaatcagccggctttaccggcaggctgggatcaagctcggcagctcgcacagtgggcggcgctccctgactgctcgcgaactggctgcgaccggcgacgtggagacggtacaaacaattctgggccaccagcacatcgatcacagcaagccctacctcagcgttgatcagaacaccatacgccaggcattcgagttgcattga

SEQ ID NO: 333530 - DNA, 195 bp, Pseudomonas aeruginosa
atgctgctgtacctgacccataccaccggcattcgcgtgaccgagctggccttactggatgtgggagacgtgctcaaccccagcggggcgatccggccagaggtgtaccttcaggccgagataaccaagggctgccgggcacgcaacatctacctgacccagccgatgtgcttggatgtcatcgagagtggatag

SEQ ID NO: 333531 - DNA, 1881 bp, Pseudomonas aeruginosa
atgcaagcagttcaaatcattcccgccagggagcttcatcatgtccaggtaactgccggcgctggtcgattctctcggatcgtggcgcgggcggaggcgtgtatcgaacgaattggcgagttgatcgaccagggctacacctgcagtgcggccgtctcgtttgggaaggacagcagcgtcgtgctgatcctcatgctggaggctatccgtcgccgcgtggaggctgggacttacgtgcaacccgcgtttgtcacccacgccaacaccggcatcgaaaaccctgcaatggacacctacgctgacgcgatgatcaccgacctggagatgtactgtgcccagcactcccttccggtcacggtgatcaaggtacagccctcgatgacctcgtcttttgcctacgccaccattggccgcggcaagctaccggtcttcgttggcgcatctcgaagctgttcggtggactggaaactgcgtccgcagcagaaggccctcaaacagctgctctcaacgctccagaatcctggtgagttggtgaccttcgtgggcacccgcctatcggagtcgaccacccgtgcagccaatatgcgtgtgcggggccaggatgtagcagggggactcacgctcaatgagcacggttcctacgtctgctccatcatcgcggattgggagatggctgaggtatgggagctcctgatggcatgcgattcgaagcgcggcggtccctttcggacctacgtcgataacttcgatttgtgtctagagctctacaaggaagcgaatgagggcgtgtgcgcaatcatcaccggcgacggtggtaacaaggcggcatgtggatctcgtttcggctgtgcctggtgcaccgtcaccggagagcgcgacaagtccatggaggcgatgattgcctcggcgcctgagaagcacgggcacatggaagggatcaacaagttccggaatcttctcatcaacacccgctgggacatggggcgtcgagactggatcgggagaacccgttcggaagccggctacatcaacgtcacagggacggcctacagcgcagagatgcgtcgtgagttgttgcggtacctgctgaccctagatgtgctggaggaggagcgagcagaggagcacgatgcgcggatgttccgcggcgagctggagaagacggagtccaacggaatgcttcgtgggattaccttccaattcatcacgccgaagaaccttctggccatcgacttcgcctggtcactgagctacggcttcgatcacgccttcccggcgctgaccgagtggtacgagatccgtgtcctgggcaagcgctatccgattctggatgccgctcctgtagagaagggcgtcatgtccgagcagcgctggttcaagctcgatgcgtggcaaagcccggctctggaaatgggcctgcaggacgcctacctcgaggccaccaacaaagaacgctatccggacaggccggcgatgcgaacgatccgcgaccgctttgaaggaaaggatcggaacatcgtctacttcgaggaagccgacgagatggagatcgacccgtcagatgccatgttgttcgctgacgagttcgatgaagcgttctacgagatggccaagactctggcgcccaccgacagcgcgaagttctacctgaacagaggcatggttaagttggccaggggcaaggctgctgactacgacgagatggcccgccgggcgcagttctggcgtcgcatgcagcgtgatctgggtggcaccgatctgcgtgcgtacatccggcacctgtcgatcagcaacgctgagcatgaggcaatcctggagtcgctcaaagctgaagcaactcaggccgaagcgccaggcggcactttggatctgtttggctga

SEQ ID NO: 333532 - DNA, 336 bp, Pseudomonas aeruginosa
gtgagcactcgtaacccttacgacctggaggagacgcttctccggctgcgtgcgtacctgtcgaagaaaggcgggcactaccgtgatgggctggagctgcttgaaaaggctgtttcccgctcgaaagagaacgctgtctatgcagcagagatggaagaggcgctattgcgcggttcgaccatcgagctgcgtgagctgctgtctcccttcggcgactactttggtccgccacgcagtgagtttccgttctacccccataccgatggagtcaatgccatcgataccgcgatgcaccacgtcaagctggggatagaccaggaagaagacgacaactga

SEQ ID NO: 333533 - DNA, 1806 bp, Pseudomonas aeruginosa
atgggcgttggagagacggtgggtgcggtatcaggggaacagaaaaatagcggtgagctgggtaccgaacaacggcggttcaacgttcatccaggaatcatcaagcatctgatcaaagaacaggccggtaccctggtaaaggctgtcgctgagttggtgatgaactcagttgatgcgggagcaaccagggttgacctggactttcgagacgatgggaccttcacggtcagagacaacgggcgcggcttccgcgatcggagcgaaatcgagaacttcttcgagacgttcggtaccccgcacgaagagggggatgcgacttacgggcggttccggattggtcgagggcagataatggctttcgccaacaccatctggcgaagcgggaacttccaaatggatgtcaacctcctcgatgcaggtgctgagttcggttacacgcttaccgagatggagcaggcgcatgtcggctgccagattgatggcgtaattctcgatgcaaatgtcattgaagaagccaagagaagggggctgatcggtgatgactattggagctacgaagatgaccgcgactttatcagtatggtgcgttttgttgaggtccctgtcttcctcgcaggcgagcagataaactcaactcctgacgcccgtacgtggagttatgaagacgactttggttactatttgtttgacaagtcctatggtctaaatatttacaaccaaggcgtttatgtggcgactgctgatcggaagagattttcggtgggcggaatattcgtctcgaaaaagccaattccgttgaatatggcaagaaacacctggatgggccatggatgtgaggtgctggaaaacctcagaaaagtagcaagaagcgagtatctagcagccattgagcgttctgcccagatgtcagattatgaggttggggcaataattcatcggattgcgaccgactcggaaaacattgagccgcaagaagcagcgcttctcttcgaatatcgcttcctgcccgcattcgccggccgcaaagtctcccctaaggaattcttaagcgccactcggtacagctattacgatagagactctagtttggttgccgagagagccattaaggaaggtggaatagctctgcttctgccgaaaacatttaaccttgcgcgactatccggtagtcccgaaactgcctggaagtttattgtcaccatgcgcaaattattcgatgagtttgtggagaacaagactcgagattttgtatatttcgataagatagtggggggctattccggaacctttataaaaaccccggatgctgaactgtcagagcggaagcttgctgccctcaatgctattcgttacatccgctgggatcttaagcgtttagcaggagatattacgggtgagatgcgggccctggtagccggaaagtcggactgcgccgacgcatggacaaatggcttcgattacatcgcgttcgacgaaagagtactggaatacgcctatacgacccgaaatagcggcgggattgagcgtctggtgaatttggcgatccacgagttctgtcatcaggctgaaagctctgaggatacgcatgcgcataccttggaattctacaagctgtaccacgatgccacgttgtcgatgcggtacagcgaggtcgtcagaatctgccaccggcgttatgtgagtctgctcgccaaggccgggctgaagatcagcggagaagaccgcaggcatgcgaatgccctcgggaaattcgtctcggaggcggaggcgaagcaccccgtccatcgtcgggcaaagaccctctag

SEQ ID NO: 333534 - DNA, 456 bp, Pseudomonas aeruginosa
gtggccatcgacaagacctccgccgcggcacagctgctccgcgacacccatgatcgtcaggctttgcacgcctacatcgacgctacctttgagccgtacgacgaggtgccgccgagcaaggtcattaagcccgacacgtacgttcaggacttcccatccgaccttgacgaacggatcaaggcgatggaagagcggctgaggcacgaggagccggaggccattcgcattcggttgcggtacgaggagatcaggaccgggggactttcggctctcaacagccgcgagatcatgtacaacggcagcggtgatccgaaactggccatcaacgggcagatgatggtgctccactcgcgcgtagcctcatcgaaggtcgttctgcctcggttccgcgaactcctccaggcctggcgtgctgaacgtgaagctgcaggccatcagatcggcctacccttctag

SEQ ID NO: 333535 - DNA, 810 bp, Pseudomonas aeruginosa
atgagagacacgttctcgaaacggcatggatttgcctcagtcgaagaggcagaaatcaccatccgcgaagacgccccggaagcgttacgggggtacctgatccagcttgtgtacgaatgcggcctgaagccctcagagttgcgtcagctgatctgccgcgcgttgaaggtgctgccggacaagggtaactggagcgagcggccgaacattcacaacgagaacgtgcagctgctcgaggagtgcaagtggttcaaggtctacgacgtgatcgagcgcgtagatgagtacctcggcgagcagaattaccacggcgagatctaccagcacttcagcagcgaggtgaacgagtactttgtcgagcacggcattggctggaaacttgtcgatggtcgtatcgaggtgcgaggtcctgagtcgttcgaagtcctcttggagaaagccaaggtggcggaagaagaggctggccacctcaccgcgagcaaggaactgcatcaggcaatcactgacctctcgcgacggccatccccagactcgaccggagcgatacagcacgcgatggcatcactggagtgtgtcgccaggcagctgaccggtgatcagaaggcgaccctggggaagatcttgaatgaccatcccgcgctgatccccagcccgctggacgtcgcagtcgacaaggcatggggctatgcctcgaactttggcagacatctacgggaagggcgcgagccttccttcgaggaggctgagttggtcgtcggcctttgcgcctcaatgagcaactatctgatcaagaaagcgaacccgcagtag

SEQ ID NO: 333536 - DNA, 249 bp, Pseudomonas aeruginosa
atggcacacaccacacaaatcgcagcgttgaaaatggtcgtccttgcgctggacgaagtgcagcggttcggcggcaagttgccgtcttacgacgaaccagaggatggggatgaggccgaagtacctctcgcgacgttcctggagctggtcaagcagtacgctgatcagcgcacgccggagtcggagctgatatcggcgatcgaagccattgcgccgctgctccccagctacgactttccctggacgtaa

SEQ ID NO: 333537 - DNA, 285 bp, Pseudomonas aeruginosa
atgcaagcctggatagcacatcagcgctacatccgcaggttcaatgccatagctgtcgcgctgcttgggttcggcctggctctggcttatgcggtaggtggaccacaagctgcaggtgtgctcctggtggtggaggttgagggcggtgggctgcttatcggcatggccaacgtcgtcctgttgctggacacgccacgcgtcaatgccacggatgacgagattcgagcagctgccgccaccgggccgcggtggttgcagcgcctggtcgcgaagctggacgcataa

SEQ ID NO: 333538 - DNA, 432 bp, Pseudomonas aeruginosa
atggatcagacagaggaaagggaacagttcgggcagtgggcgaccaatgagtactacgagctctaccaggatgatccggtcgccgcgctgcgcaccgcgcatgagaggtccgagatcctgagtgccgacgaccgaagagtgctcgctctggccttttcgagtgttgcagctggcgcaggagagaaggccgcgctacttgggggcggcaagctacccgtttggctcgtcatgggcgccataagcgtcaccatggcccagttcggtatgggggggtggtcggttatcccggtcgggttggcgtgcgtgctcgcgcttcatgaccgaaaggcctgcctgggccgcgtagaggcctattacgccgtcgcagagctgctgaaggaaacgcttaagtcccaaccgtcgcgcctaggcaccgacagcgcggcagaatga

SEQ ID NO: 333539 - DNA, 420 bp, Pseudomonas aeruginosa
atgcagattcccccttctacgctggcgcttggcgactcgatcgagtgcaccgtcccccagacacgcacgggccgcctagttgcccaactgctcaccgagaaatcgctggcctacggccgagagctactggctgatccgtcgagcggctggaagaagtcggccacccagctcgccgtcagtgcctccactgtggaggagccagcgaataaggtcgacctgtccagcgaaggctgggcattgttcgagattggccgcagtggcctggtcgaaatccagcgcgatgacgagatgggcatcttcgaaaccgatgaggacgctttggatcacgtcaaacgcatggccgcccagggcagccagcctcacaaggacgccctagcccgccacatggccgatgcaccacacctggtcatcccggcctga

SEQ ID NO: 333540 - DNA, 258 bp, Pseudomonas aeruginosa
atgccgctcagacgccgtaagccaggcctaggccattacaacgccccgcgcagggaatggtatgaggcctatcgcattgcacgcatcgctatcgtaggcggggggctcaagccagatcacacccttgatggtgtccgctggaaagcccagctgatcgtagccaatgagcgagacggccagggtgaccagctgcgattcgacgccctcaccaagctcaagctgcagcgtctcatcgacgaactgctgagcgagcaatga

SEQ ID NO: 333541 - DNA, 504 bp, Pseudomonas aeruginosa
gtggaatggcagaggaaatgcggcatcgccaaagttgcccaggaagacggctacggatgcggcgtagcctgcgccgcaatggtcaccggccggagctacgccgagacgcgaccggactttgttcgccttgggtttgcccttcgtcgagctggccgccccgcgttcgcagtttccgtcggtgaattgcgcatggcggtctctgctgctggcttgctagctgagcccaggcgctggcagggctgggagaacgtcaacggtttgggcatcttcaagatgagggacgactggcgcggaccagaaagcaagaacagacaccactgggccgtcgcctttcgccacccagagttcggcatcaccgtactcgatcctcaccaggaattcccggccttcgagcgaatgcccatggatgaggtctgcttacagttctccgtgtacgaacccaggggctactggctgcaggtggagcagcgcatcccgattgcgcttccggccgcgcaagcatga

SEQ ID NO: 333542 - DNA, 840 bp, Pseudomonas aeruginosa
atgcgccagaagatactcggggcctacctgccgctagccctctgcctccacggcaccaacgcctgggcatactacagcgaccggactcctgatccgtcctggtcgagtagcgaagtctccgtttccgtgtatatgcagtgctccatcgacgagaacgcgatcggctggccgtcagcgtattgcgaccaacccttcatgaacctgaagaaggaaaggtccttttcatctgaccgtcccttccttgcccatggcaatctggtgatgactgacgatcgcaatcgcaaggacgcggctgctatcttccaggcgcttcaatctgaccaagcagcatcaccgatgcttaaggtggtcatgcggcgctgggagtacgacaaccctatgggaaggatggaggttcaaccggctctggttctccaagacttccactcccaggttgcagagtacatgcggctcaaggagcagttggtccagaccgaggctagaagggagcgcgttttctactccctgcgcatcgctataccgctcattctcctttctctcttcgcactgatcgccaggtacgtctacagaaaccgcaagcgattctgggatcgcagcgccggcagcctcttgcgctggaaaggggaagtagctcagaacctcgaggacaagcgcgtccgccgcatcgccatagacgaggcggtaagactatcggtgcagaacagcgtgagcgctgcaaaatcgggcgacacagcggtgctggagcggatgatcgcgtcagctatcaagcgcggtgacactgaggctgcggaagctcttagcgccgctcttgagcggatcaccggcgcatcacgcgaatag

SEQ ID NO: 333543 - DNA, 1023 bp, Pseudomonas aeruginosa
atggcaatgaacttcttcccaggcacgctggccgagtctctctctgagatggctggctacaaggtaggccttgcgctctcggtcgaggaaatctgcgaccacctcaccgggccaggagacctggcagacattgtgcgccgctcagaggagcggagtgtccgcattcgatccgaggcttacgaagcaatccactatcgccttctgcatcgtatcggcttcaccgaggacgagatggatggtttcccgcctggcgcccgcgcgttccacaagtacaaggccttccccaagttgctggcatgtcatgaggcaatgcacaggatctacctggaaatgctcccagcgatgatgcaggacgccttgacgagggctgacaagagcctcaatccacggccgtttgtagagcggtgcaaaagcgagttagggcttgaagggatgaagatggctctagaccacatcaacgagctcgcgaataagctcagagctagcccgtttaccctagggcgctttgttgagtgggcaagcccgttagagttgaaacggctgttcaggggaacagcgcagaccccagaggtgggcaagttcattgaccagcgctatctcgactacctgtcaaacaacggtcaccgcatcggtgagatgcactggcgcaaattcgaggagctgacggccgagtacttcgagcgagagggcttccgggtcgaaattggtcccggaagcaacgatgacggcgtggatgtgcggctctggaagccggaggcgccggaggactccaagcctacctgcataatccagtgcaagcggcagaaggacaaaatcgagaaggtggtcgtcaaaggcctggctgcagatgtggagtacgagggcgctgactacggaatgatcgtcacgacgtcgaacctaagccctggtgcagctacgaccatctccgcgcgagggtatccgatccaggctgttgagcgtgatgctgtaatcaagtggctgcagcagctaaggacacctgggactgggattgtacgggtgtag

SEQ ID NO: 333544 - DNA, 786 bp, Pseudomonas aeruginosa
atgagccaccacacgcaactggccttgcctaccacccttaccgatctcctgcaggcccgccaggatgccttgcgtttgatggaggactcccggcgcatcctgcagaaggcagaggatgtactggggccctatgggaggctcctgatgccccacggggcacaaccgagagagtctctcgacaaggtccgccaggaactggactgcaggatgtggcgccgggcgatggacctgaccggtttccgccagctgatggatgctgaagaggtcaaacgcttcgacagcagcctcgaaaagacaccgccggagttcaatgacgacaacatccgagcgacctttgtcgacctgcagttgcgctctgaagagatgttccgccgcggcgtcttcaacgtgtttcgcggcctctccgacgcctatcgcaccaatgcagcggagccgttccgtatcggcgccaaagtgataatgaaatccattgtgcggcctgcctttcgaagaggcctttgcgtcaacgacagcatggggaactacgccggcaacaaggtcgacgacatcgaccgcgtcgtgaagaccctggacgggaagcctttcagctcccgcgccctggagtgcgccatgaacgtcgcgttcgaaaagcgcgaggtgtacgaggacgagtattttcgagcgaaagggttcatgaacgggaacctgcatctcgagttcaagcgcctcgacctgctcgatatggtcaatgaacagatcgccgactactacgcgtacaacgcactagccgacggacgaagcgcctaa

SEQ ID NO: 333545 - DNA, 297 bp, Pseudomonas aeruginosa
gtggaaaaccagaacgcgcaagaaatccgtacatctctgttccggaaactcggggagtatgcctccggccgtaagagcgatgtcgaccgcggcgcggaaacccctcacttcgcggccttgatgctgcagaagtacggctacgggctctgcgatgcggcggaactcatcgcgcctcgggccggcctgatcaaacactccgacgtcgatgccctggttgaggagatcgacccgaactggcgcgagaacgccaagaagcgctgggctgcgcgacctgcggacattcgttgcaaagagtga

SEQ ID NO: 333546 - DNA, 126 bp, Pseudomonas aeruginosa
atgaccgtctgggtggcgatggtcgatttcttcggcactttgattcttggcgtgacggcgttgtgcgtcgtcgcgccgttgtttagagctcctggctggcagccggttgagcctgagaaggagtaa

SEQ ID NO: 333547 - DNA, 240 bp, Pseudomonas aeruginosa
gtggttcttatcaagattcttcgtccagagaccgcccaggcgctcagcgatcgtgcggtgattgccatggctgtcgggattggcctggcgagccttctgctcgttctcttcaccgtgcgtgcgctgcttggggctggccatgtgtggcttgccgccctggtagctctcccgctcggcgccggtctgggccgtcacgccgtcgatacggtccgctactgtcgtcccgcctggttcaaatga

SEQ ID NO: 333548 - DNA, 222 bp, Pseudomonas aeruginosa
gtggaagtcgtgagcagcgctgacgcagagaatggccggacttatgccgaaaagcagctggaagccaatgaggtcgagggcaagttcgacacgctgaaagatcgtgtcatcgccgccggctacgggaacacctgcagcgacgaggaagtggcagagatgcgtgcagaaatggacgctctctccagccgctactgcgagctgaccggcctgactttgaggtaa

SEQ ID NO: 333549 - DNA, 747 bp, Pseudomonas aeruginosa
atgagtaaccccctgttagaccgtacctacagtggccgtagtagcgcctgggaccgggcagctggctaccagaaggaggcgcggccagttcagcaggtgcgcaagatcgtcctcaagggagcggtcgatgttgtcttcttcacggccgattcggcgtgtctcgtcgtcgctggagattctcaggatgcaattcagcggatcacgacccgcctggagggtgacaagctggtgatagagcaagagggcgtcacgatcagcagcggtggcggtagtgtccgagtctccggaagtgggaatattgtcgccggtggcaccatctacgtcggcggcagcatgaacgttcggatcgacggcgctgctgttggcgtctctgtcggcggtgagactgtcgtcggcatcgcgctgccggaggccccagtcatccgcgtgaaaggcagcggcgacattgagctgtatgacctacaccaggcggagctggatgtgcgcgtgcagggctctggtgacatttctgtctgcggtcgtgttgagcgcttcttggcagaggtccagggttccggggacatcgacgcggcagacctgatcgcgcaggcggctgagctgtccgtagctggctcgggcgatatcgtcgctcatgtcacaaccgcggtgacggcgcgtgttgccgggtccggtgatatcgtcgttcgcggggcgccgccgagccgcaaccattcggtcgcaggctccggggagatcaagttcaagtga

SEQ ID NO: 333550 - DNA, 447 bp, Pseudomonas aeruginosa
atgcgcaagatcctcgacacgcgcggaggagtgctggcgttcatagcagctgcattgctggcgccggctactctcacggcgcatgccagtgagccgatcacagctgatgttgagctgggtctgctgcagctcgatctggtcaatgtcatgagcaaccggatgctcgtctgtccgccaggtctcaacgacctgggcgaacacggttgcgggaagatgaaccgggaccggacgcttaaggcaccggcggttgctccggtcaccccgcaggcctacctgcagaccgcgtgccctgaggtgaaaattatctcgctcagcgtgagcaacctgcgtcagctgctggggcaggtggcgacgtatccgtaccccgtgacggtgaccctggtcaccagcggtgtgtgtgacccgcagaagttgacgttcgccggcaagaacaagaaggagctttga

SEQ ID NO: 333551 - DNA, 486 bp, Pseudomonas aeruginosa
atgtcggatgagcaccaggagctggctgcgcgcgatcacgcggctgcagcgggaaatactgcgccccaggacgcccagaacgattggatcacccagggcgacgacggcgagtacctctactcggtagagctgatcgaaccggtcgaaggaccttcggttgaaggtgaagagggcgacggcgacgacggcgatttcgacgatgggatcagggagtatcagtctgttgagatccacggcgtgatcgtctacggaactgcgcctggccaacgcctgcccggctacctctcgaaggcgcagaaggagatggtccaagggctgagtgcccagatcgacctcggagccggcgctgacgctgagctcgtgcgcagcctcttcgcggagctgaaggcatccggcctggtcctcaccggcgagttggacgacttgcgcatgcatatcaaccaccatgtgccccacgcaaacttggtggcggaggaggggcgctga

SEQ ID NO: 333552 - DNA, 1440 bp, Pseudomonas aeruginosa
atgactgagcgagcctcctatgcgaagaaggaggccgacattgcggccgcgacggctgagttccgcagccgtaccgaagagttgaaagtgctagccgagcgattcgatgcgaagcacttggtcacctacctccaaaccggtgtcatcggccgcggtgaagttgtggagctgacggagccctggaacattccaggatggcgacgagcgcggtcgaaggtctttctagaggccatgcagctgcataagacgcttttcgagctggagccgcagaagtcctggactaacttcaccatggccaaagctctgcttgagggctcgcggttccagaacctgccgcgcgaggccgtgcggtcgatttggggcacgttgttcatggcggtccctgtcgtcagcagcacattctcttcctttgcacggtgcttcagcactctcggcgccgaagacctcggctggctgctggtggatgaggccggccaggcgagtccgcaagctgcagtcggggcgctctggcgttcacagcgggcggtaatggtcggcgacccgctgcagctggagccgattaatcaggtgccgccgggagccctggagcacatgcgaagtgcctttggggttgacctgcactggatgccccatcagctgtccgcccagagcctggctgaccaggcgaaccctatcgggcgagtgatcgggccgtcggatagcaaagtgtgggtcggcatgcccctggtggtccaccgccggtgcgaccgccccatgttcacgatcgcgaaccgcatcgcctacgacggtgcgatggtctatgggacgtcgccgcgggtgccggacatccccgccaccctcaccaccgggtgggtgcaggcgcgaggcccttcgactggtaactgggtgcacgctgaagggaggagcctgagtatcctcgtcacactcctgattcttgagggggtcgacccgaagtccatctcagtgattactcccttcagcgacgtcatcaaggaggtctccgggggcgcgctcacgcagcatggggtaacgacagggaccattcacaccatgcaggggaaggaggccgacgtcgtgatcctggtcctcgggggcgaggccgaccccctgcgatcgggtgccagggagtgggtcgtggagaaggccaatatgctcaacgtcgcggcgaccagggcgaagcgccggttctatgtgattggcgaccgtgccgactgggcgaaacgaagacacttcgacaagatcatggaccagctccccatgctcaacctggaggctgcgttgactcggtgccagggcgcggaggagggtggtggggtggcgcaggcacttctagacctgctcaggatcggaagcacggcaccggtggagggagacaccagcgaaggtacaacgatgggcaagctcagggtgggtcttcccgcgccaatcgatccccagtag

SEQ ID NO: 333553 - DNA, 1392 bp, Pseudomonas aeruginosa
atgcagccgcgcacgaccccgcaatccgacatcatccgcttctggcactcggtagagctgctcagcccccaaactgtgccgaagctgacgccgagtcgggcacctggctccatcttcgttcatgagattcaacgaggcagggatgggacactggtgctgccctggtcccaagacagcgcagtagcaaagcgaaaagccattccaggcaaacgctggagccaccagatctacggtcgttgcttcgactacggtgtaatcgtcgaacgactgaaggcgcagtacgaagcggagaacggctaccgggagacgaaggagtcaatcgtcggtctgtacgcattgcgcttcgacgacaagggggagttcatccctgattcctttgtgctgtcgtctgcggcgtggtttgccgggaggattggtcggccgaaggacgattggcttgcaggattcgacgaggcgcagggcgcggccgcaaaactggctttggaggtgctcgaggggccagtcacgcctgagctgctcgaacagctgacagataagcttctggcgatgattgagctggagaccttctttgaatccatcccgaaacggtacgtgagcaactccgtgctcaagaaagcctccgggactgagccgcaagacgatcccctcaacagctttatcctcggggacctggcccatatttcgcggcaggtagccggcggaacgtccagtgcgcctcttgatgcctacctcaccatccatgaccggactaaacgcatcaacctgagcgaagactcctcgtccgtctatcagcgcggcctgctggcgcccgagatgtaccctgacggctgctggccgactccgaaagacatagggctcgttcactcgcagcaactcgctgtgaacggcatccatcggatgctgaaatcgagcggcctgctttctgtgaacggtccccccggtaccggcaagacgacacttctgcgcgacattgtggccgctgtagtcaccacccgtgcggacgcactggcatcacttcccgcggcatcggacgcatttgcatcgaagcgagccgttgtagacggtgacaagaatctcaaatactggtcactggatcctaagctgctcggccacgagatcgtcgttgcgtcgtcgaacaacggtgccattgagaacgtcaccctggagcttccgcagcgcgacaaagtcgatgccagctggctcacacagtacgaccagtttgcggacatcgcgtctctcgtatcggggcagccggcttggggcctcatctctgctccccttgggagcaaaagcagacgaagtgcatttgtcagtgcgttttggttcggtaccgccaaagtggggtatgcggatgaggggggcggacccggacgcttcggtcggcgaaactga

SEQ ID NO: 333554 - DNA, 252 bp, Pseudomonas aeruginosa
atgaccggagcggggatatacccgctggatgtgattgtcgttgatcgctcggttcgagcacggcaccgctctatcgtcaccgcggtctacaacggcgagtttgtctgcaagcgccttctacacgccgaaggcggcacagtgctcctggcaccggagaatcccaattacccgccgatcgtgattccgaatcccgacgacctggtcatctggggtgtgtgcacattcaacctgcatgacctgcgccggcaatga

SEQ ID NO: 333555 - DNA, 354 bp, Pseudomonas aeruginosa
atgagcaacagaaaggccttcgtgctggtcgatgccaataatttctactacagcgcagaagcgtgctggagacccgaactggtcaaccgtcctgtagtgatcgcggggagcaatgatgggtgtgtcatctcgcgtagcaacgaggcaaaggctctcgggatcgcgatgggcgccccggttcaccaggtacgtgagcagtactggcgagaaggagtggtcatctgctctgccaatttcgcgctgtacggtgacatgtcgagccgcatgatgcgcactctggcttctgtagtgccgaaattgatcgtgtactcaatcgataagaataagttgcatactgtggacgcccaaagttag

SEQ ID NO: 333556 - DNA, 1293 bp, Pseudomonas aeruginosa
ttgcctaccgtcgaacacattcacttcagtccgcatgacctttctgtcaaagaccgcctgattacctactcgctgaatagctcccgtgtagtgatcgaaggactaccacaaatattctgggaagacggcttgccctggagagaagccaatctctgggctatggagagagtaaccaatggtgaggcactccttaagaccgtttctagcaacctgaacgggctgttgaactacgcgaagtttttggagagtcgcgggcttcagtggtttgagtttccgtctcgaaaggctgatcgatgtcttgttcagtaccgtggggcgcttatcaaggctcgtgatgctggtcatatcagtcctgccacagcttccgagtacatgcgtaactgcatcagtttctacaggtgggttaggaggcgtggccttctaaacccgctattgccgctgtggaaagacaagcgctatttcatcaaatactttgaccaggtcggcttcgagcgaacgctagctggcaccagcaccgatctgggtattccaaaccgaaaacgcattggggtcactttggaaggtgggctacttccagtgtctgcggttgatcgagacgccattcttgatttcgcaaaacagagcgcctcacccgagctttacctgatgttggctctaggtttctttacgggtatgcgactgggaacgatctgtgaccttcgtatcaatacgttggagcgtgccctacatgatccgtctgctaaaggtctgcttctgatatccgtagggccaggtgcgtccccgcccgtgcataccaaatttggagtaactggccaggtatggattcccgaagctttgtgctcagaagtcttggagtacgccaagggtcttcgcaggttgactcgcgaggcatctgctgctggcgagcatcaagacttagtgttcttgacacgtttcggaaaccctttcggacgtcgcaacagtgatcagtcttcggccataaacgttgagatgtcatcgcttagaaaattaggcatcgcgtcgggcatcaaagcgctcaggaagtttcgcttccaccaatcccgatgcacctttggaactgagctagctaggctcgctttagcaaattgcactgatgtggcgatagtgattgcgactgtcagcaatgcattgcttcacggtcgaaattcggaggctaccaccttcaaatacatcaagtttgtgcaggccgaacccgctaagcaggccattgcgaacagcttcatgactgcgtttacaggaattgcttcgaggcagggagcgagtaatgagtaa

SEQ ID NO: 333557 - DNA, 1737 bp, Pseudomonas aeruginosa
atgagtaacctgatgtctttagacctgacgtttccaatgattgagtacgggaaaaacgagacgccctgggatctggcaccgcttttatacagtggtggtgctggggcaaaagtgaagactgtgcgcagtgaaatcacatcagaggctttcggtgaccctttactggagcggtcggagcttgtgaaaggactccatgattgtttgaccgatgaccttgccggcggaggaagccgcttttcggcgaataacaagatcggtgcgttgaggaagttttttcagtgggttgatcaatgcgggcgtccgttgagtgttgattcggtcacggaagcatacctggggtgggccgagcatcttctacagcgtcaccgcgtagaaggatatctaaccgccggatcgttatacgacacggcaagtttaaccgcgacaatgcttgaccgagttctgggtcgaagctcgacgcttctctacagcacccgaattcgcaaaccaagaggcaacggaagggcaggtaatggaagcgctggtaagcaaagcttagaagagagcttctcattcgggcagttaattgccgacctctgtacggctcttacctatgaggccgtgacggggccacttcccatccaagtggaattgcggtcaggttcgacgctacctatctggtgcggcctacgcgacacagggaaggaagcgtcacgacggatccgacctcaaaccaaattccagattgcggacatccttcgaaaccgcgaacttcggaactctgacgtttcaatcgagactcgatacccagcagtgaatctgcgaatcgaagccgagttgcttatgttcatcgcacaaacgggcatgaatttgtcgcaggcgcatcagcttcggatcgaccaataccattacacgagtcatcttgatggttaccaagtcaagtcttacaaaaatcgccgtcagggtgaagtgctttttgaggttttctcaagctataagcagtggttcgaacgctacattgagtggcgaagcacgtggtttccagtcgatctagagggacttctttttcctctcgtccgtcttgggggacgtctcgttctagaagctcctcagttcacggctattgcgcgtgtctgcaccgattccaatgttcgattcgttcgaccccgtaagctccggggcgcgcgtattaattggctgctacgtgagtcgcaacgccccgaactggtggcggaaatcgcacagcacaccgctgaaactttgattcgtgtgtacgccgagcccaatccgcaaattgcgatggttgaaatcactcggtttcaccggcaagcagatctcgtcgtttgctcacctgctccaggtacttgtgtagcgccgataccagaatcggtcgtggatgctccgactaatgctcctgatcccgattgtattaacgcagcgggttgccttttctgcgtcaatcatcgggatattgaaagcgaggatcacgtctggtctctgagtagtttgcgagtgctcaagagcttggagctagctagatatcgcccagcgtgcacggttagatctgacgaggctgaccatccggcgatgcttgcggtcgagcgtctgagtgcgaagttacggttctttcaagaaagtagcgaggtgcgtcggctttgggttgatgaggcactggctcgcatagctgaagaggactatcacccagcttgggacggatttattcggcttgcggaagttacagcgggggcttccctatga

SEQ ID NO: 333558 - DNA, 810 bp, Pseudomonas aeruginosa
atgaccgcaaccgagcagatcatggcgctcctcgaacgctgggaccgccagcaggagggctacatccgccagcgcgaggagcgctacgaggcgatgttccagttgctcgaagacctcttcggccgcgacgggcgcttcaccgccatcgacgccgcctgcggcccgggctccctcggccggcgcctgctcgaacgcttcccggcggcgcgggtggtggcgctggacgccgacgtcatgctgctggagatcgcgcgtacggcgctggccggtttcgccgagcgggtccgcgtggtggagtgcgacctcaccgatccaggctggaccgaacgggtcgccgaagcgcgcgagtccctcgccggcgaacggcccgcggcgctgctctcttccaccgcgttgcactggctgtcgcccgccgaactcgccgggttctacgcccaggccggcgagctgctcgcccccggcggcgtgctgctgaacgccgaccacatgcgctacgaccgacgctggccgggactcgcggaattgtcccggaagcaccgcgagcgggtcctccaggcgtccgtggccagcggcgcggacagttgggaagactggtggcaacgcgccgcgcagatcccccggctggccccgctgaaggcgcagcgcgacgcccatttcgcgcggcgcccgctcaggcgcgccagcgaagacgaagactgctcgctcgatttccatctcgccgccctgcgccaggcgggtttcgccgaggccgccacggtctggcagcagttggacaactacgtggtcttcgcccgcctcgcccaggcctga

SEQ ID NO: 333559 - DNA, 249 bp, Pseudomonas aeruginosa
atgttctcggtgaggtcctgctcgccgccggtgatgaagatcttcgtcccgctgatcctgtatgaaccgtcggcctgcggctcggccttggtgcggatgatgcccaggtcggtgccggcgtgcggttcggtcaggcacatggagccggcccaggtgccggcgtacatgttcggcaggtacctgttcttcagctcctcgctgccgtgcgcatcgagggccaggcaggcgccggcggaaagggtcgagtag

SEQ ID NO: 333560 - DNA, 1050 bp, Pseudomonas aeruginosa
atgagaccgcggagcaacaagaaccggggcctgccgcctcgcatgatcaagcgtacccggacgatgaagtcaggaaaggtctgggttggctactactacgacgggcgggatgctgaggggaggcgcaaggagatcccgctgggcacggacttggatgaggctcgggagaagtgggcgaagctggagagaaaggccgtgccggtggccaccaggacagtcggcgatctgctgcgtcggtatgagcgggacgtggttccagggaaggccaagtccactcaggagcagaaccagaaagccatacgccagttgatgaagtctttcgagtccgccccgcttgaggccctgaccccgaatgtaatcgcccagtaccgggacgctaggtcggcacccgtacgggcaaatcgagagatcgcccttctctcccacgctttcaacatggcgagggaatggggactcacggacagggagaacccgtgtcgaggggtgaagcgcaacaaggaggctccaagggatgtgtacatcaccgacgagatatggaatgcagtgtacgaggaggcgacaagcgatctgcggctcaccatggatctcgcctatctgaccggccagcgcccggcggatgtacgcaagatgcgctgggcagatgtggatggagagtacctgttcgttggacagggcaagaccgccatgaagcttcgtatcagattgcgccgaactgacggatcacaaacagccctgggggagctactagatcagctagaccgatcagcgccaaccttggcagctaccccggagggcaagcccatctcagaaaaaatgctacgccttcgcttcgagccagcaaggaaggcggcagcggagaaggccgcaaaggcaggcgatgctgaactagcgaaatcgataatgaactttcagttccgcgatatcaggccaaaagcggcatccgatatcgaaagcctggagcaggcatccgaccttcttggccacactacgcagggaatgacacgccggatttatcgccgcattgggaaggctgtagatcctacgaagtga

SEQ ID NO: 333561 - DNA, 777 bp, Pseudomonas aeruginosa
atgaagggcgcaacgttgcaccgactgatcgatatctacgccaacagtcgccgtaacctgcgcgtccgtttggcggccctccggatgttcgtccgcgcggtgcatgccgatcgcaacgccagtttcgccgagtatcgccgggtgtgtcgtcggctcctcaagggcatgccgttcaccgagcaggcgctggagcgcgagcgagcggcatatcggaagcgtaccagagcagcgagacaggccatggaggagagcggggcttggcttatcggaagctcagccatgatcgagcaggccctgtcgttcgacgacctgtgcgatctcctgggggtgaatcatgcccaccgtgccgaggctgccgaggtctgcgcgggcgacgccggaatcgttggcggcctgctatggattggcggggagttcgaggacagcgcgaaccacaagagtggccgctccaaccgaggggacactgggccacttaccgccgcggtccagaacctgttccagaagttcctgcttgaaaatccgtcggtcatccctgacccgttcgccccgggcggccctttctacggcgccccgcggcaggagatggcgccagacggaacggtgcagattcggcgaccggcactcaccgtccacagccaggacggatcgatccgcacggtggagcgaaaggaggaggtggttgacggtgagttggttgcccgcgggcggcacgaagcaccgcggcgcctggtcgtagtgcgccacgaagaggagatagggaatgggaagctcgactag

SEQ ID NO: 333562 - DNA, 645 bp, Pseudomonas aeruginosa
atgagtacggcagtcgaactggtggggatgagcaaggctagacgcgctcttgaactcacggccgtagtgaatgtcgaaacggtgcgtcctttggtggaggctctaggcgaggctgaagcacacgagctgatcgagatccatatccgccacaacgccggtggtgaggtagacactctctttgcattgatccatgctatcgttcacacgaaggctcaggttgagatcacgatcggtcgatatctgatgagcgcagctgctactttgtggctgtggttctggctgtggccggttccgcatgtacggtctctgatgccgcttaagccggctgtgttgatgtaccaccgtcctcggcagcagtgtgctagcaacggtgattactactgctttgccgagagcatgaaggatacagaccccgtcaagcagtcgctgatgggtaagattaaagtgtttgacaaccttttcgatgcacttttgcgtcgtctgggttggagcagtttgagtagcgcggagttgctgctcgaggatgtgccgtatcagcatcaactgcaacacatgaaagaggcgtactacgggaataaagatgtcgttcttcccgtctatcccgaccaaggagcaacagatgaagacgttcgcactgagcaataa

SEQ ID NO: 333563 - DNA, 174 bp, Pseudomonas aeruginosa
atgaagacgttcgcactgagcaataaggcattcaatagcgttggcgaagtcaagccaagccttgaaacctcgctggagcagttgcgtcggttcaaggaggctgacaccaatctgcaacaggtttgtgttcagcgcgggattgagacaccgaagcttgtagcccaagctaagtaa

SEQ ID NO: 333564 - DNA, 240 bp, Pseudomonas aeruginosa
atgctcgggttcacgacgaaagccgaagctcgacagatcggcgtctcgcaccatgggagctattacggcattccgatgtggctgggggatgtcgatagctattgcccgctggcgttcgccaagtgggcgccgcttgaacttgtcgtctccctgttctcggtcatcgagggcatcgtcaactcgatgctcgatcaagagccgacgttcaagttcaaggttggtcggaggatcgatcagtga

SEQ ID NO: 333565 - DNA, 1929 bp, Pseudomonas aeruginosa
atgaatatgtcgagtccttggctgaatgacctgcagaagcaagttcgcctcggccttgagtccctattccgcgaaccaccgctgactgcggtggagtgggcggacaagcatttctatttgtcgtccgagtcctcttaccaggaaggaaagtgggaaaccgcagcgttccaggttggaatcctgaacgcgatgggcaacgacctgatccgcgtggtgaacctgatcaagtctgcacgggtcggctacaccaagatgctgatggcgaacatcggctacaagctccagcacaaaaagcgcaacgtgctgagctactgcccgacggaccctgacgccgaagagctgatgaagcggcacgttgagtcgttcatccgcgatgttccggtcttactcgccctcgcgccgtggtatgggaagaagcaccgggacaacaccctcgccgcgaagaagttcagccaccagaagatgctctggtgcctgggcggtaaggccgcgcgaaactaccgcgagaagtcgcccgacgaggtcatctacgacgagctgtcgaaattcgacgccgacattgagggcgagggctcgccaacctttctcggcgacaagcgcctggagggggccaccttcaagaagtcgatccgcggttccacaccggggacggtgggcgagtgccagatcacaaaggctgctgaagagtcgccgcatttcatgcgctttcacatccgctgcccgcattgccacggagaacagttcctgaagtggggcggcaaggactgctcgttcggcatcaaatacgagaccaacgcgctgggtgaggcggagaaggcctggtacacctgcgagcacaacggctgcgtgatcgagtatcacgaagcggtagaggccgcgaacgatggccgctggatttgtgagcggaccggcctctggacgtatgattccatggactggttcaaggctgacggcgagccagcccgtacgcctcgctctgtcactttccacatctggaccgcgtacagcgtcttcaccacttggctcgacatggtcggcgactggctgaacgtgaagggcgaccgcgagaagctgatcaccttcgtcaacaccaccttgggcgaaacctgggagggtgaccagggcgaaaagctggagtgggagaacctctatggtcggcgcgagatctggcagcacctgcccgcgcgcgtagccgctctgaccggcttcatcgacacccaggacgatcgctacgaggcgcgcatctgggcctgggccgcgggcgaggaaggttggttggtcgaccgctggattctgcagggcgacccggctagcgccgagttgcgccggaaggtcgggctcaagctccaccagcagtaccagcgtgaagacggtgtgagcatgcgcgttgcgctctggggatgggactccggcggtcactacaccgacgaggtgtacgaggagagcaagaagcacggcctgttgtgggtcatcccgaccaaggggcacaacgtctacggcaagcccattgcaatgttccccaacaacaagaacaaggctggcgtctacctgacgatgatcggtacggacaacgccaaggagctgatctacagccgtctgaagcttcagcccgagccaggcaaggttctccccggcgtgatgcatctgccagccagcgacgcgatctgcgacgagagcgaactgaagcagctcactgccgaaaccaaggtgatgaagatcgagaagggccagcgcgtgtatcgctgggacgcgaaggggcgccggaacgaggcactggactgcgccgtcggcgctctggcaatgctgcgagtcgcccagcagcgcttcggcctggtcctcgatacgccgcccaccacttccactgcaccatcggtcccgaccaccaaacgccgcagctccggcagcggctatctgaaacaacgtcgataa

SEQ ID NO: 333566 - DNA, 585 bp, Pseudomonas aeruginosa
atgagcctgcgcctggacctcctgcggcatggcgaaaccgagtccggcggcggtttccgcggcagcctcgacgacgccttgaccgcgcgtggctgggcgcagatgcgcacggcggtggaaggcggacgctgggacctgctggtcagctcgccattgcaacgttgccgcgccttcgccgaggaactggcgcagcgccaggggatcgagctggaactggaaaacgatctgcgcgaactgcatttcggcgcttgggaggggcgctcggcggccgccctgatggacggccacagcgaggcgctcggccgcttctgggccgatccctacgcctttaccccgccgggcggcgagccgctgtccgagttcgaggcgcgggtgctggccgcccagcgacgcctgcgccagcgtcacgccggccgtcgtgtgctgctggtgacccatggcggcgtcatacgcctgttgctcgcttgcgcccgtggcttgccgcgcgagcgcttgctgcaggtggacgtcggtcatggcgcactgttcggcctgcgcgccggagagggcgacgatcgctggcacgaatgccgggaaggggaatag

SEQ ID NO: 333567 - DNA, 561 bp, Pseudomonas aeruginosa
atgggacgccgacgaacgatcgaccgcgaccagttgctcgatgccgccgaggcggtgatcgcccgcgagggcgcggccggcctgaccatcgatgcggtggcgaaggaaatgggcatcaccaagggcggcgtgcagtactgcttcggtaccaaggacgcgctgatcgacgcgatcttcgagcgctggggcaaggcctacgacagcctgttcgaagcggtggcggggaagcagccgacgccgctgacgcgggttcgcgcgcatgccgaggcgacccagcgttcggacgagttgtccagcagcaaggcggcggcgctgatggcggcgctgatccagacgcccgagcacctggagggcagcaaccagtggtatcgcagccggttggaaggcctggacctgtccgcacccgaggggcgccgtgcgcgcctggcgttcctggcggtggagggcgccttcatgttgcgctacttccgcctgatggacattggccaggacgagtgggactcgatgctcgacgacgtccgtgcgttgttgctgacggcggctggcgccagcggagactga

SEQ ID NO: 333568 - DNA, 594 bp, Pseudomonas aeruginosa
atgatgattttcgttgattttgatgagcttgatacatttaactgcacatacgggttttcggaagaaaagtctggtatgcttagagtctttgttgagggtggactggcgttcccatatgggatgtttttaaaggaagaaaatggtgttcgcttttttaaatgtgaaaaagataattatgagaatgtgggagagatatttccaagacactatatttacgatccatcaaggcgggttgaatatgttgaatgggagttgagtgacgatcatcttttgaaggctcgcactaaatctggcgagtgggttcaatatacaagcaaagccgacagtcaatacgctatgcatgagtttgttggtggttgctggtttgtttttgaaggcgctcaattttcaaaaaggataactaatgaatatacagatggtcgagaaaagtctgctggaaataaagtgattcaagagtttggttcccgttcttgtattgatgctctttccagagagtatttgttagagggggttctcgaagttcagccggggcccggctggatgttttggtatatttatgcgaagtcatttcacattgagattccagacgtttga

SEQ ID NO: 333569 - DNA, 822 bp, Pseudomonas aeruginosa
atggctcgactcaaggcccgatcgcaggcggtagtcgatcagcagtcgaagaaactgaacgggtgggccgaagagatccgggaggcgccaaacgaaattctgcgtagcgcccttttcacggtgggtaataagaacaggccccgtaggcagatcaaaaatcaggatattgccgtctacggcaactgcagaattcaatacaacggcgaggaactacgccaagacgacctcgatctctggcttgaaatccttcaccttgcccgcaacaaagatcttgaaagccgaattcacttcaacgttcgagacatgaaaaaggcgcttggttatccctatggagccaagcacaccgaacgattgaagacgaatctccttcggttgaaaaccacctcggtcattgttcactccgaccgtctgggccgaggcgtctctctgtccctcgtgcgaaagtttgagtactcggacgaggagggcgcctccaaggatgatgaatggtacgtcgagttggagccagaaatggccatcctttttggagggggggtgtactccacccgtatcgagaaagagcaacgaatgaagctcaaggggaacctggccaagtggctgcacgccttctacgggagccacaaagccccattcgatataggctatcaggtgctattgaccgcctcagggtcagacgttgcctcagaagggaagaaacggcagatgatcaaaggcgcgctagacgagctcaaggaatgcggtttcctcaaaagctggaagctcgataaggccggcaacgtccaggtcgaacgagcgccctacaaagccatacccaagaactaa

SEQ ID NO: 333570 - DNA, 957 bp, Pseudomonas aeruginosa
atgactcaaaagaagaagctgacccccagcaaggaacagccaggagcagcacctgcaaaacctgttcgtagggcgaatccgctggctggggcgctgaaaagcattaaccaggagtaccgcgaaggtaattctaatgcgggcggtttagtcgacagcgagccccaagtggctaaacaaatcagcatgggcctgatcgaccctagcccataccagccgcgggttatcttcgacgacaagaaaatcgaagagctcgctgcgtcgatcgacaaaaatggcctgatgagcccaatcacagtcaggccagtaaacaaccgatacgaactgatcgctggtgagcgtcgattccgcgctcatcagattatgaagaagacagtcatcaaggccttcgtaatcaacatcaccgacgaagaagcctctacgcgagccctagcagataaccgagacgctgagccactaacagaatttgaaacctacctcgcaatccgtaaccaccgaaatacatttggcgggaaccacgactatgagtactgggggttcacgaagagtgcatacttccgtcttctcgccttcgactcgctcccacaagcagcaattgagctcctgaaaaggaagccagcactcatcaccggatacgctgctgacgaatacaagaagatggtcaatgccgaagttgagaagggcggcagtaaagagaaactggatcaggcggcaaagaacgttattcagaaggccgtggatagtggcgtaaaaatcaacaacctagcgggacaggtgtttaagcaacttaacccaacccaagtagcgccaaacaaaactccgctcaagtactcgggcggtaccgcaggtgaaatcacaaagaaggcgacattcactcaaatcaagttgaatcgctctgccttcagcgatgagaagctggccaaactcgagacctacttatcgcaactcctggctgaatag

SEQ ID NO: 333571 - DNA, 915 bp, Pseudomonas aeruginosa
atgtcgaagccagctgcgactgcaaagaaagggcaggttgaagacctgtcgtccgaccaggctgacgaatccattgacgagctgcatctcgaccaggagaacactcccgtcgaaacacgcatccttgcaatcgcaaaccacaaaggcggggtagggaagacaactaccgcagtcaacctggctgattgcctcgcccagaaggggcactgggtgcttgttgtcgatcttgacccccagaacaatgcatcccagcacatcgggcagatgcaccctgcacgagttgaatataacgcttgcgaattgctaagtaatcagcgcgcaaacatagaagcattcatttatgaggaaactcaactcgatggtgttcatctcatttacgggtccatttcattggagaacgtggatgaggttatccgcaacgaatacccacgcccagtggaagttctgaaagaacgtctgaaaccgcttattggtaagtacgactacatcatcatcgactgcccaccctcgcttaaactacttactcagaacgccttagcagcagccacacactatattgttccggtggaatccggtgcgccctacgcaattaacggtctcgacgatctcaagcgccgcgtggagaaggtgatgatggtcaacccgaagctcatcttcttgggtgctctactcattaagcacgatgagcggcaaattctctgccgtgagaacgaaagcgacgcaatttcgctttttggaaagttgatacccgtgaaaatttcaacgacaactaaagttaatcagtccatcgcccagaaaatgtctgttcggatggctgaaaggacaaataaagtttccagacaatatgtcgacctggccgactacatagcagatgtaacgaccgggaaaggcctgcttgctgaaggtgacgcgtaa

SEQ ID NO: 333572 - DNA, 1449 bp, Pseudomonas aeruginosa
atgcattcccctaccgaggagcaggcaacgattgcaaaggctgctgtgcagcttctggagaggcctagggggataatcaaatcggtggctggggctggctgtggaaagaccactacccttcatacctcagctcaagaatgctacgaggccggcgcacgccggctttgttatttggcgtacaacaaaccgctcgtggacgatggcaaacagcgcttcggcaaccttgcgaacgtatcgaccttcaatggaatggccttcaacgcaacgggcgccaagaactcaggccgaaaaaccgccaatctccatccctccactatcgagcaagcctttgatctcaaaaacaaaaggctccctctcgatgcgggacaattcagccgagttgtccttcaaaccctctcggcctactgcaatagcagctctaccagcatcacctcttctcatctgccggcatgggttaaggatcaggttgttggaggcctggcggttcagtacgccgatgtcctgttccaggcaatcagggtcggacagaacactgtgcttcccctttcgcacgacgtcatcttaaaagagtggcacctccagggcagtccagggctctcatcgtttgatctcatcctgctggatgagtgtcaggacctaagcgctgttcatctcggctgtctcgcttatgccaaacgtgcgttggtggtgggtgacgcaggccaacagctttatccatacagaggcgcacaggacaccatgctgaagattcctggagcagggtatccactatctctgtcattccgttttggacctgctatcgccacgctagcgaatgccatcctgcagaccaagacctcgcctcccccactccgcttgcgaggcctcgcggggaaagaaactcgagtaggcagactcagttacggggcgtctcacacgaagatattcaggcacaacgtgtcaatcgcgcgtgacgccatggttcttgccgatctgcgcactccgtttgcgatcgtgggcgacatgcaggacctgggggagaagatctccagcgcccacgcactaatgcagcgcaaccaccgcgacatccggcaccccgcctacgctcagtttcgtaattggggtgagttcgaggactgggccgcggagaaccccgacagcgaagtttcccaggccggaatgctcgcgcttgagtatgcggaacgagtagacgacctcacgaagatactttccggtgcaggtcaatcgaggcagcctgaagtgacactaacgggaatttatcgtgcgaagggccgtgaatggccgaatgtagtaatcgcacctgacttcgatcatcggctcgaagccctggtacgtagaggacagggaagcaagcttgatgaggagttgaatctgctctatgtcggcgttacacgcgtgaaatcgctcttagagagtcagtcaaaattcctagataggttactaatgtaa

SEQ ID NO: 333573 - DNA, 792 bp, Pseudomonas aeruginosa
atggataccagtacaagtcttgacgttcgcatggcccgctgcggcttccgctctgcaatcatccgggttcaaaccggaatgacccgtaagcaggtagccagccttcgcaaacgcctgaatatcgttgggccagccgagtcaggcccgttgcctctggcacacagcatcctgagcaagaaagcacgggcgatggaagccagcctgttcatgttgaactacctgtacctggcgaagagcccacgtaacgacgtcgacatcgacgcagtcatcgctgcccatgatcagtacatgaactgccacgttggagttcgcggcggacaggccgacctggaaaaccttctggagatcgacgacgcgtgggtcgttgctcgcgactaccgcactcaggaagtcatgatgcgttcctgcagcgggtgccacattcagttcgttgcgagcgtccaagacagccgccagtgctgcccgatctgcaatggcgcagttgtgcgtactgacctgttctcctgcgatgcacagaccgccaagactgatcgtacgattcctgagctcattgagatggcgtccctggtccagcaattcaagaactggggatccacagaagcggagattcgggcggagcatgccctcaatgctgaggaattttcgctctgcctatccatggcgaaactccccagctctcaactggcattggttaaccagcgctacaactctggggcaattctgcttaccgccttcactcgcgacggtatgagcgcactgaagccctctcaggcggccgtggcggtggcgtaa

SEQ ID NO: 333574 - DNA, 402 bp, Pseudomonas aeruginosa
gtgattgatacgaccctggccaagcgcatgagcgacgcaggctttgccgcgtccatcatccgaattcaaaccggcgtgacactgccaaagcctgtgcacaagcagaaggcgtccgtcacccagctgttacccgccctcccctccttcggctcgatcactgcagacgctgcaactgcggaggcagccatcgcgctgctgatgagctacctcgagcactggaataccgctgactacgaggttggtgtggacgctctcattactgcccatgagcaagcttctcgggagttccccggccagatggtttctttggaagaagcctggattatcgctcgcgaatgccgctccatcggcagtgccgatgttctgaatcttctcttctccagttacaaccaggatcgctga

SEQ ID NO: 333575 - DNA, 348 bp, Pseudomonas aeruginosa
atgctggaccaatacgcgctgactctcgttctccacaccgccaaaacatgggccaccacgaacaacggctcgttcaaccgcttcttcaacctggaccaagttgaccgccagtggctattaaacagctctgaatccgagctgcagagcctggtcatgctgcccacgtcaatcatccaggtaaatttcgatgagatccgccccaaggacctcagcggcccactggtgatgccaacacccgaagtaaatgccattggcgcaattctgagcgcgatcgctgagaacatccgaaccaacgtccgggttgggatgatcgcatggggcatcagcgctcaggccaatgccgattga

SEQ ID NO: 333576 - DNA, 555 bp, Pseudomonas aeruginosa
atgaaatggataccacttttgtcgctcgcgacctcgctggcagtgctttcaggccagccggcacacgctttcacgctgaaaggaacggtgtgggaacgacagtccgagcgccaatgcaaggtcgaccctaagctgctttacgcagtagcgctttatgaatcgaagcggtacagcgggaagatcgttcgacccaatccatttgcactcaacatcgcagacacaccacatcatccagcctccctgggccaagccaagaagctgctaactgacggtctgcagaaaacgcgtgccatcgccgtcggcgccatgcaagtgagcatccgctggaacgggcagcgggtgtcgaagcctgaagatctgcttgatcttgagacaaatgtccgcgttggcacggaagtgctgtgcgaaatgatcagcgggcagagcgaccttgagctcgcagtgggccgctatcacaccccgaaccccgaactcgaagcagtggcacgcgactacggccggaatgtgatcaagatctggcgccgcctgatcctcctcgaactgaaggaggtctga

SEQ ID NO: 333577 - DNA, 693 bp, Pseudomonas aeruginosa
atgcaatacgcatcagaagatatttccgtagaagcgttccagaagcgcgtccaggagcggatggagcttcttgatatcaagccgaagcagctggctcaattgatcagcaagaacgagagcacgctgaagaacgtcatttataagagcaccgagtgcaaccggacgatgctgatccagcttgctcgtgcccttcagacgacggtggagtaccttgctaccggtgcactcattgctgatgcagacgaaacgatcaaccttgcggtctatacaccggaatcgctggcgatcagccagggtttttctgaggtacagcggaccagtagagattccgatctgccgataaggtcattgccactgcctaaacgtctcattcagtcgtatggcgttgatcctgataaggtccgggcggtctacatcaactcagacgctctatcgaaaatcttagacccagggaacatcgctctggtggacacggacaccaagttcctccacgagggaagttttctcatctgtttccgaaacaccgtcattatgcggttggcgtcaccggttacctcaggctttgctctctcggctactaacggcaatatcgttggcaccgccgttacggtcgatcagaacggtatgctcagcaacaagggcatgtcggtgattggaaagatcttcctcagggtgaacctaagtcgagtttga

SEQ ID NO: 333578 - DNA, 1023 bp, Pseudomonas aeruginosa
atgagcaaaaaaaacgaagtgaaggacgccaaactgatcgtggggtgggactgcggctactcgaacggcaagctgacctacggcctgtcgtcggactccgaaccgcaagtgctgattcgccccgcacaagcggctcctgtgagtgagctgcacggttcctcgcaacgcaaagaaggcgaattcttcgttcaagtgaatgaagagccttgggccgctttcctggaaccggggcgcgcacgcttcaatcgcgagctgcatggcgactatccctcgaccgatgcgtacaaagcactcttccacgccgcgctcatcgcggcatgcggtgaccgcaacgtggttgaccgtctcgttaccggcctgcccaccaaccaggcgcgtgatcctcgcctcgtagacgcactggtaaagcggctgcagggtgtgcaccaggtcgctcccaagcgccagatcgaggtcctggcggtagaggtactggcgcagccggtgggcactctctgtgacatcaacagctatcacgacgacgctgaaatgttcggcgaagctaaccttctcgtcctcgaccctggtttcttctccgtggactgggtgatgttccgccgcggcgacatccagcgcgaatcctcgaacacctccctcgatgctatgagcgtcgtgctcgacgcgatcaacgacgaggttgcccgtgaacatggcggcgagggccccggccgggacaagatcgaaattgcgctgcagaaggaccgtaaggaagtactgatgttcggccatcgcctcccgctgcagccctacatcgatcgtgcgatggccatcgtagcgccacgtgcactctccaacctgaaagagcagatgcgcttcatggaaggcgaggctctcgacttcatcctcatcggtggcggcggcgcgcacttctaccaagatgcagcccagcagctgttccctaaggccagggtgatcgttgcggacaataacgtggcatccaacgcctacggctattggttccacggccaggccgccgagatctaa

SEQ ID NO: 333579 - DNA, 426 bp, Pseudomonas aeruginosa
atgctgcagaacaccgaaaacgcaatcagagaggtcgatgcgtgcttcgagaacatctaccagaaggccctggatgcgcgggaccggttttgggaggaggcgaagggctcaggcaaggtgcttttccgaggggtggctgtatcgcgccgaggtaatagcgtggacatctactggctccggttctcctacaagaaacatgagcacggaccgcaggagaaacccttcaaaagtcggatcgccaagggaagtcgctcctaccctcggttctcgcggatgcagatgggcaagatggaggcgtggttggaggacatgttcaatcgctacgaagacgagttcgagattcatcgccaggcgttgaaggagaaccggcaactccgacgtgccctcgagcgacacgccaagctgattaagcgaatggaaggatag

SEQ ID NO: 333580 - DNA, 282 bp, Pseudomonas aeruginosa
atggctgttaccccgaaaatcattgttggcgtcgttgagatctccccggatgaactggacgggtgggctgagatctactgggaagcgaagtctgcaggactgatgcgtgtccctctctcggtctttctgagcgatccgatgcgtttcatcgccgaaggggatttcgagccgctgctgcccaagcagcaggaggccgccgagcgtatctggaatcagtgggatcgcgaggatgacgtggcggcgcagaaggacaatcacctgactcttgttgtcagcaactga

SEQ ID NO: 333581 - DNA, 906 bp, Pseudomonas aeruginosa
atggcggtcgaagcccgatcgcgcgtcctgcgctggtgtggtctcggtaccggtgcgggaatcggccccacccttaccctggcgaagttggcctcctacgccgcaaagcgggtcacgaagacgggcctctgcaacctcatgagcgctgaagaccgtctctgcatgcttgagattgcgcctgtgtctgaggtttgggggattggtcctgcggtctcccgcaagctcgacgcactgggggtgaaaaccgccgctgaattcgcgcgcctcccgcggcacatcttacagcgggagttcccggttcctgtcctccgcacgcagatggagctcaacggtatctgcgctatcactctggatgaaccgggcacaccgaggcagatgatcaatgtctctcggtcattcgggtccccggtcacctcagtcgccacattggcaaatgcattggtcgcgttcgtgtcgagtgcagcggcaaagttgcgccgtcaggagtgcacctcctcgttcatgcgggtgtatgcgcagtcgagcaagttcagcaagcgtgcgccgccgtatgcgaaagcggttaccgtgaagttccgctttcccctcgacgatacccgtgcgttggctgtgttggtcgctgaagctgctgcgtctgtatttcgccctggagtggagttctccaaagcgggcgtatgcctgatggggattgcccctaaggactcaatgtctcagggcgagctgttcggtcactcgacagcagaagcctcgcgagtgatggacgctgtggatgggatcaacggaaagttcggccgagggaccattgcggtcggtagcgagtttgcggggaaaagctggagggggaaatccagcgatgcgagccctgcatacagcacaaagctcgctgagctgaagacggttttctaa

SEQ ID NO: 333582 - DNA, 129 bp, Pseudomonas aeruginosa
atgaaaaccccaactactctgattcgttcgatgcttctgatctgcttcctaggcctgatgacggcatgcggcggtggcgagaaaggcgcaacctccgagagcgccgagcacggccattcgcacgagtaa

SEQ ID NO: 333583 - DNA, 306 bp, Pseudomonas aeruginosa
atgagcgtcacgctcaagccaggtgaagggacagaaatcaaactggaagtgctcaagaacaagactgtcagctatgaatggactgcggttggtgggcctgtgaactacgacacccatggtgagccctacaacggtgaaaagggttacttccacagctacaacaagggcaagcaggtcaaaagtgataaaggtgaattcaccgccatttttgacggcacccacggctggttttggcgtaatcgcagcaataacgacgtgaccatcgcactgaaaacgaccggcgattacttgagcgtcaaacagtaa

SEQ ID NO: 333584 - DNA, 735 bp, Pseudomonas aeruginosa
atggattcgcactcgatgagcggcgttgacgcacttactgcgccttcgcgtcgcctgctactgctgtttttatttgtcgcgtcacttttcctcgcaatgcccgaggcgatggctcatgccgtcgccgaaggtgacaagggattcatccaggaaagctccggcgtcatgttgctgcccttcatctacatgggcgctaagcacatgatgacgggctacgaccacctgctgtttctgttcggggtgatcttcttcctctaccgcctgaaagatgtggggctctacgtcacgctgttcgccgtaggccactcggtcacgctgctgcttggcgtgctgaccgaggtcagcatcagctcgtacatcatcgacgccatcatcggtttctcggtggtgtacaaagcgctcgacaacctaggcgcgttccaacgctggttcggtttccaacccaacaccaaggtggccacgctgatcttcggcctgctccatggattcggtctggcgacgaagatccaggagtacgaaatctcgcctgatggcctgattccgaacctgatcgccttcaacgtcggcgtcgagatcggccaattgctggccctcagcgcgattctgattctgatggggtattggcgacgtaccggcagtttctggcgccacgcctataccgccaacgtcgccatgatgagtgccggtttcctgctgatgggttaccagatcaccggcctgtttgtctccgcgtaa

SEQ ID NO: 333585 - DNA, 300 bp, Pseudomonas aeruginosa
atgagtgagcacgaacacgaacacaaccatccccatacccaccaaagtcatgaggcgatcatcaagcgcctcaagcgagcggacggccatttacgcggcatcatcacgatgatcgaagaaggtcgtcagtgcgtggacatcgcccagcagttgcatgcggttgaaaaagcggtgtgccaagccaagcgcacgctcatccaggatcacattgatcactgcctggaggacaccgtttcggcgttgaacaatggcgagcgcgcaccactggaagccttcaagcaaatcaccaagtacctctag

SEQ ID NO: 333586 - DNA, 1089 bp, Pseudomonas aeruginosa
atgctggtttcgctggatctggtgcgagccttggttgcgctggctctgccgttcgtgacggaagtctggcaaatctacgtactgattttcgtccttcagtcagcctcagcagcgttcactccgacattccaggcgaccattccagacatcctgccggatgaagatgactacacccgtgccttgtcgctatcgcgtctggcctacgatctcgaaagcgtcgccagccctatgctcgccgcagcactgctgacagtgatcagcttccacaacctattcgccggcactgtcattgggttccttgcctcagcggcattggtcggcacagtgctgctgccaaaggcgaagcaaacaccgcgacgtagcatctatgagcgaaccacccgtggcatgcgtatattcctcgcgacgccgcgcctgcgagggctcctggctctcaacctgacggtagctgccgccagtgccatggttatcgtcaatacggtagtgctggtgcagtcgcgcttcgctctgccgcagagttctacggcattggcgctggccgcgtttggcggcggctccatgatcgctgctttggtcttacctcggctgttgaaagacatcaaagaccgaacggccatgctgtttggcggaggaatcttggtagtaggcttggccgttggcatcaacctgaccacctacaatttcctgttgccgttgtggatgttgctcggcgtgggctattccctggcgcagaccccgagcggtcggctgttgcgtcgctcggcgcatgccgaagatcgcccagcattgtttgccgcccaatttgcgctgtcccatgcctgctggttgattacctacccactggcgggatggctgggtgccaacatcagcctcacggcgtcgtttgttgggctcgctgtcgtggccggtggcgcactggtggtcagtatcgtgatctggcgtcctgcgcatgaccaagagtcgatcaaacacacccatgagaacctgccggacgatcacactcacctcgacgggcaggatggtgtggatcacgaacacccgtacgtgatcgatgatcagcatcgccgttggccagatagacgaccgtaa

SEQ ID NO: 333587 - DNA, 153 bp, Pseudomonas aeruginosa
atgagcatggagcaagccctgatgaaactgtctgcccttttgatcgccgctttactttccattacctccgtggcggccttcgcgcacagcggcggtactgatgcgaaaggttgccaccgcaaccataaaacgaacgactaccactgccactaa

SEQ ID NO: 333588 - DNA, 453 bp, Pseudomonas aeruginosa
atgaggtggattacccgtgaacgacccaagatcgaccgcatcgcttgtccctggttgatcacacgctttatcgatccgcagcctgagtttttatacgtacccagtggtgatgtgctgcgattagcgacggagaaagacgctgcgccttacgacattcccggcgtagaactgactcatgagggcgaactgtgcagtttcgatgcatttctgaagaagtaccaactcagtgagcccgccttgcagcacttggctaagatcatacgcggcgctgatacctctcgcctggatctgactccgcaatcggcagggctgtacgccatctcactgggactgtcgcagcgatattccgacgatcatgaaatgctttcgcatggactgatcctgtacgacgcactctatgcatggtgcaaggagtgccaaggtgaatcgcataactggcctccacaaatgtga

SEQ ID NO: 333589 - DNA, 1359 bp, Pseudomonas aeruginosa
atgaataaggttttcgcaccagcggttgaagaggatctgtcgaagccaaagccgatcagcttgcgtgaggcattctggttctggttgaagctgggtttcatcagtttcggcgggccagccggacagatttcgatcatgcaccaggaactggtagaacgtcggcgctggatctccgaacgacgctttctccatgcgctcaactattgcatgttgctgcctgggccagaggctcagcaattggcgacctacatcggttggctgatgcatcgaacctggggtggagtgatcgccggagtattgtttgtactgccctctctgttcatcctcatcgctttgtcgtggatgtacatcgcgttcggcgaagtgcctgtggtggccggcctcttctatgggatcaagcctgccgtgacggccatcgtggtgcaggcagcacacaggatcggcactcgggcgctgaagaataattggctgtgggcgatagcagcagcttcctttaccgcgatcttcgcgttcaatgttcctttcccgctgatcgtattgggggcggcgttaatcggctatgtcggagggcgtctggcgcccgagaagttcagaatcgggggccatagcgctgccaaaaagtcttatggcccggcgttgatcgatgacgacacgccatcccctgagcatgcccggttcagctggttcaaactggcgtcgctcgccctgattggcgccgcgctgtgggctttgccgatgggtactttgatcgccctctttggttgggaaggcaccttgacccagatgggctggttctttaccaaggccgcgttgctgacttttggcggggcctatgcagtcctcccgtatgtctatcaaggtgcggtcggtcactatggctggctaacgccgacgcagatgatcgacggtttggcactgggggaaaccacaccggggccgctgatcatggtggtggccttcgtcggctttgttggagcgtacgtctcacaagtgttcggtgccgatcaggtgtttctggccggtgctgtggccgccgccctggtgacctggttcactttcctgccctcgtttctattcattctcgcgggcggcccgctcgtggagtcgacccacaacgaactcaaattcaccgcaccgctcaccgccattacggcagccgtcgttggggtgattctcaatctggcgtgtttctttggctatcacgtgctgtggccgaagggcttcagcggcaacctcgactggccctctgcactgatcgccatcgcagcggcgattgccttgttccgcttcaagcggggcgtcatccaggtgctgatggcctgcgcgctcgttgggttggcagtacatctgctgcgctag

SEQ ID NO: 333590 - DNA, 945 bp, Pseudomonas aeruginosa
atgaaaaattggctagctctgattcttggcttacccaccgctaatgccaccgaacgcatgcgggcttggcgcgctttgaaagcttcaggtgcggcggtattgcgcgatggggcctatctgttgcctgacaccggtttctgtcgtgaagtgctggcgtctatcgagcgggacatccttgccatcaatggcaccgcttacactctgcccgttgtcgatcctgacggtgagcgctttgtcgagttgttcgaccgtagcgaagactacgccgggcttcgtgcggagcttgatgaatgccgagcacaactcaacgctgagaacgcactggcgagcaccaagcagattcgtaagcttcgcaaagcctacgatcaactgatccgcatcgattacttcccaggcaagcctaagcagcaactggattcggcgttgcaggagctagaaacggcggtcagcagggccctgtctgcggatgagccccatagccgcgaccaaccaataacggcactcaaccttgttgattatcaggggcgtgtctgggcaacccgtaagcgcccttgggtagaccgtctggcatgtgcctggcttattcgccgtttcattgacccaaatgcgcagattctctggttagacacgccgcaggactgtcccgtcgatgtgttgggtttcgacttcgatgacgcaactttcagccatgtcggcaaccgcgtgaccttcgaaaccctgcaagccagttttgaacttcaagagcccggcctgaaccgtatcgcggcgttggtgcactacctcgatatcggcggcattcagcctttggaggctgccggcatcgagcgggtgctggcaggactgcgcgaaaccattacccacgacgaccatttgctggctgccgcgagcgccatcttcgacggcctgcttgctgggtttgtaaaagaggaacaacccaatgaataa

SEQ ID NO: 333591 - DNA, 1554 bp, Pseudomonas aeruginosa
atgcatgagctttacgcgtcccgtaatgccgtaggatttacgttgctggattcaggctccctaacccgtctggctgcgctttttccaactcaccatacagctcaaacaccttacattcctccacgtatttggcgctatcaagttactaggctgcgagagtgccttgatgacttcctatcccatcgagaacaggttgaagcttgttaccggttctgcttcgcggcttacgaacataaccagagggtttcggagagaacagcgtgcgtaaacgccccgcctttttgcggccataagatgcaattatcaggcgctaaaacggggcttcgttttctcggcgcgtttgcagataccgcgaaacgcttcggcatctttgagctacttgaacgttgggtgggtcgaagtggcggcttgcaagtaacagcgctgactagctatctgagattggtcaacggcgcgggattagcttacatccttaacttcagtctcatgcgggtcgaggaggcgtggaatcttcgagccgggtgccttgacatcgagcacgacaagagcttcggcgacatttttttgttacgtgggcagacgacaaaaacgctctctgatagcgacgccgtttgggtcacatccccatctgtgacagtcgccgtgaaggcgatggaggttatttctctgtttcgctcactatacgcacctcacgaagccgcgagagttctcgccgggcgttacttgaccgatttttcttacgagccctggagttcgttgcgcaataaaggtaatcattcactgaggccaagcattcagtcatattccgaccttttggggcagcacgggaagctctttgacttagaaaatttgcgtatcacgcctgaggatttgaaattggcccggctagctaccccttcactgccggaggagtatcaagtgggcgctgtatggccgttggcatggcatcagttgcgtagaactggggcagtaaacatgcaagcttccgggctcgtaagtgatgcttcgcttcagtaccagctcaagcacgtcacacgagcgatgagcctttactacggacaaaatcactcgcggatgcgtctagaggagaaggctcacactctgtacgttcgcacaatgtacgagacgctgggaagagagttacagcagcttacgagtgagcgttttgtcagcccccatggagacaaacgaaaggctgagatcgttcggctgatttcgccagaggatgcgaagaagatgattggtttggcaaagaaaggcgcggtcgcctgtcgcccgatcattcttggcgtttgttcgagtcgtgaaccttgtccgtacggcggaattgacaacattgctcattgcgggggcggtgattcagaggatgcaaaaccttgccctgacgtgctgtatgactcagaacgattgggcgcggtagatgatcttgaacatgtactcaaagagcggcttgctaatgctcagaatggaagtccgctaatggaatcgttgatggctcaacagcgaagcgtagagagcttccgtcgtgtcgtagggagcagaaatggacgttga

SEQ ID NO: 333592 - DNA, 819 bp, Pseudomonas aeruginosa
atgggccgccacgttgtccctgagtacagcgatgaaaaaatcgtttccacgggcttgtctttgatcaagcctggtgcgcggccgcgatcagtaagtgcatacaagattcaaaaggccttgaagggcggcaattacggtcggctggttcgagtttgggggaactaccttgactcgctctgcgctggtgatgaggcagctgagatcccagcaggcatgcaggcaaagctcgatgtgattgcggcagaccttcaagtaaaggttcaggcccttgtcggcgaagcctatgcagacctggtgagtcagtttcagcgcagagaagaggcgttgcgctcagagctcgaggataagatctccttccatcagcagcaggcggatgatgccttgcaggtctgtgatgaacttgaagcaaagctcgtagcggcatctggtgcgttggaggtgatggtgtctgcgaaggaggagctttcggctgaagttcgccgactgactgagcagcttcaagaatcctcatctgcggtcaatcaactcagtactgaccgtgaggtgttggtgggtactgtcgaggatgttcgacaggaattggctaccgcggtgagtgatttgcaaagcagtcgtcttctagaagcgacgatcaccggccggcttgagacccttgagaatgtgcatcgtgaatttcttgctgctgcagatattcacgctggcgaaaggcggcgcctggaggcatcagtggcgaggcttgaggcgtatcgcgctgcatctgatgcgcttttgctggccaatggcattcagccacctggatgggccgaagtcgacagctga

SEQ ID NO: 333593 - DNA, 762 bp, Pseudomonas aeruginosa
atggcatcaggcaagagatcaacactgaccagtgcatctggcataaccgcagagttggtactggagctggggaagttctccaccgccaaagacatgcgaagcctgcagacaggccttaccagcgccgctcgcgaactgcgtgcgctaactcaaggagtatctctactagggcgattgggttcgcagctgtccctggagcaacgtgagctgcttgccaacgccgcaacgttgctagattcgatcaagcacaacgtcgagcacgccaaggagcgaaaggcgcggggagagaaggacaaagagaaatggcgcatggagcgagaacgccaggcagaacaactggtcgagcagcacttcaacttcgcgaccgacacgatgaccgagcagatggagctactcgatctctaccttttagctgaagccatattggggaaaaggatctacttgaaggggcacgcgagcctgcgacaaatgatgcaagagaagccacctcagtggttcaactccactatggctcagtggtaccagtatcaggcgaggtccctggtcgtcgatctcagatcagccttcagggaactgctgtgttgggacgataagaaaactcccgccgagaagttagtggaagcccagggccatctgagcgaaagaagagaggagatcctggggcgtgctgactccatcaaaaccaggcacgtctggtctgatgcgctgcaaagcgcagccttcattaccagcgcgttggcgccgggcggcagcccaagttga

SEQ ID NO: 333594 - DNA, 1131 bp, Pseudomonas aeruginosa
atgggacacgagccattcgttctagcttccgtcgatcgagcccaggcttgggttgatagttgcgctaagtcgctcgaggtcccgccagagaaagccgcatcaatgctcgccggcatgtgcggtttcggatcctgggatgtcatgacctatgcaattggctctatgccaccttcgccgagggacgaagagttagcgccgaacgactaccaggagcgcctggctggccagctccgatttctagttcgcgatcatgaactggaccccgcggcagccatccacttgctcgtggcactgccacctatgtctgggcggccgttttctggctttgatctagatgcacctcaggcctacaagccggagcatttgcttgtactgcggaacttcgcggtcgagtgctccctggagctcgaggagcatgcgcctggctttttcgattcgggaatcaatctgcagggcctcagcttggcggatccggtccgggcggacatcgcgatagccttgagcgggcggacagtccccgaggcctggctctacatccttgaagccctgggttggcagtatgatttttctgaggatgatcaccctgatctggatgagccgtcctttacggtgttcgacccggttcttggggacgttcctgtctacctgtcatctatcgccaggtcgccggtgtttgacgaggaggcagaagctgatcgtggtcagcgggttcaacgagctctgtgcgtgggtgacttcaccagccactggaaggaccgcagctcggtcgccctcctcctccaccgttggcccgttgtacgtgcggtgaatgacctggtcttctgccatctcggaagtgtgtatatcgagagttcgaacagctggcgcgatttgctgttcacgctcggtaccagcagccttcacgagctgattgagctgaacgcggcagcgaaggacttccctgatcaatggccaggcctggtggacaccgacgagaatttgagccagctcgcctgcatctgtctgtcaggattggacccattcgaggtggacgagtcccctgatattgagctcttgggcgttcggcttccgatcggggacaccggctggatgattcagaagttgactgagtcggtcgatgacgacgaatag

SEQ ID NO: 333595 - DNA, 1002 bp, Pseudomonas aeruginosa
atgcacgaccgtatccaagtggcctttcaggcgctgcgggaagccatcgaggctttcaacgttatctggccagagcgagtaatcagtggggcggtatggcgcctaccgttgcttacggagcagaagacgcccgacgacctacccgtggagctcctagaaggcgaggagggcatacgcgcgacgcagagggccttgctggccttcgagctcgaccaaagcgacttggccaccaagcaagccccagggaccgtcatgcgcctgccaggctactggctgctgcagacgtcggtcctgcaggaggtcgcggccatcaatgcgttgaaggaagcgctggacatggccatcgaagaaacccgcatcgagctgggcttggtgaagacggcgcggccaaagctcgtgcggcgtgccctgaagggcgcctacagcaccaagcagctgctccgtaaaatccaggcgttcgagctgccaccatgcaagctggcgttcacttgggccggcgacacggccggtaccaccagactgcaggttggattgctgcgcaagaagctcgaggaagagatgcagcaccggatggatcgcgatggcgttgctcctggccacactcctgagtgggtggagctgcagggtatggccaaccttcaggatgatgagtacctggtgcagtacaagaaggttgcgccccatccgcgggcgatgctctggttctcgatgaagcctctgtacgacgcgatgattcacgccaaccttccagtgttcgttgtggagggtgagttgaaagagcgccatgtactgccactacgcgcgtataagcgttcggagcgccgtggccaacgatcagatcaggttgaacgggttggggtggtagcccgcctcgacatcttcgccccggctaagggcaaccggaaatcgaaggtcctttccagtgaggacgaggtcgcggccgaggcgctcgagaagtcgacctactcatcggagaacgacgccggcgccggcgagcagtag

SEQ ID NO: 333596 - DNA, 777 bp, Pseudomonas aeruginosa
atggacttcaatcgagtaatccaagcagaagcagatcgcgctgaagcgctgatcgcgaagtacctgggcttctatccgggcgacctggacctggtcgagctggatgtttcgtccctcgaggacgtctccgtggacttcaagcgctgcgtccaaatgattcagggcctggctgaagcggcgccgagcgcgatcgcggccaagaacatggtgaacctggtcgacgcactagctgatctggttcaagtcccgcgcctgcgccaaccgctgatgaccctttgggagatggaagaaaccctgtcctctggtggcctttggttcgtccgtcacgccgtggtcatcgtgttggccttcctgggcataggtttcgttgcgcccgagatgcacggcgtaccgatggccatcagttatgcggcactgctcaccggttacgtgtcgctggcactgggactgacccatttcaagaagccagccgcagctttcttcgtcggtttcccgttcgcgctcgtgatcggtgcggccctcatggtgatggccaacgaaaccctgatgatggcggcgctgctcctggcatcgatcgctatgttcatcaagtcggttgtgggcatggcaatgaaccgcccggacgcaacgcaaagcttcactgattacgacgacgacatgtcgatagaaaacgatcgagtaatctttcctgctgacgccacagaacgcttcatcgagaagagtgatccgttcctcatcaatcgcgccggcatagtcccatacgctgcagacgattga

SEQ ID NO: 333597 - DNA, 717 bp, Pseudomonas aeruginosa
atgaagcacgttccagtcaatgccgggcttgttcacgatgcttggcagcgcatccttgatcgggaagagtatccgagtgttgaagccgtctgctctgagctaagtacaaggtgttctaagtgtgacattgatcgttatcttaacgatctaagggaaaatgcattagatagcggcgcgatctttgtcggattgagcgaggaacttgtttctaccattaaccagttgatctcaaatctccgtcaggcggcatggccatctgctggagaggagcgacagttgatcgtcgagcacatgaattcacttcgacagcgtcttaggcaagctacagttcgttggatgcctgaaatcgacgagacggcgagtacttcagaacagctatggctgctgcggcaagcactacagcatgagtggttttcctcgcttaaagtagaaattctaaactcacgttttctacttataggccgtagactgcgcgcgcagcttctagagtgtgaagcacaacttgatgtggaaattggtgtgagacaccgaacggtagctatgtggttggaatataaacaaaaacttgaggatcacctggaggttctcgagcaacgacagttacaagaatttaccgatctcaatttgcagattcatgcgttgagtaccgagctgagtgaaactcagcatgccctatctttggagcgccaacggtcggacctagcgtccaataggtag

SEQ ID NO: 333598 - DNA, 3033 bp, Pseudomonas aeruginosa
atggaatttactatctactctgttggatcggctgcgtatctcgaagatattctcaatgccgtcgcgatgatctctggttctggcaaaatcgaagatcttgcgaagattggattgctcattggggtgctgatacttgggtttcaagcagtattcaataatactggtattgaattccagaaggttggcgtgtgccttattctttacctcgctgctttcggcccacagaccacggtgctcatcgaggatatctacactggtgaagtagctgtcgtagacaatgtgcctcttgggccagtcgcggtaggttcgattatctcaaacctggggtatgacattaccaaaacctttgagcaggcattctccacgccggcgatgacgagctatgggtttgcagatccgcttgagacgctaatgaagtttcggcagatcacgatgaatttcatgtccatcccttcgttcgtggaggatgccggtgaacgaaatatcgttgcctcttggacgaactacatgaaggaatgcaccttcaccggctacggaaatgatccacgagccatgcaagagctgatgcggaactcagatccgctccaggccatgaagttcgagtcgaatgtctactacaccctgatattcgatggcaccagcggtgggcgtaccatgacctgctccgctgctcacgctgctctgatggatatgacggaagataaagccgaaggtgttatcgatgatgcagctcgcatcggattcaagagaatggggcgcccagctccaagtggtgccgaccttgaatcgaagctgagcaacagcctgtatggccttggggtaatgacgaacaatattcgtacgttcgccctggcttcaacaatccttccaattttccagcgagcgcctggcgagaaggcaattgaagagatgcaaggggccgctgcgataatgatgaacgacagcatgctcaagacaaatactcagtgggctgctgaaggatcgaagttcactcaatacgtccgacctttcatgaccttctttgaggggtttatctacgcgatcacgccgctgatggctttcgttatggttctcggtgggttcgggctgagtctgatcacaaagtaccttttaattctaatctggatgatgctttggatgccgcttctggcgatcgtcaacctgtacgttttgtcgacaggtgcagacaagatttctgcaattgtcgaggcatcgtcaaacggcggtgacggcatctctttgcaggcgctgcttgcaatgcagccagtaattgaaaacctcattggtacagctggtctattcgcgtcttccgtgccggcattgagtctcttcctggtgtatggcacgtcggttgctgcgaccagtatcgccggtcgactcggcggcagcgacaccatcaatgagcaaatggtcgctcctgacccactcaaggttggcgctgcaatggacgtcagttcgattgcaaccagtgacctgaacaagggcacgattctggcaggatctgatgcaacgcgcgggaatgtcagctttggtaaagccctatctgaaagcgtgcagtcgacaaagactactgccgatcaaagctctcaacagttcactgaacaactcagttctgctttcggcaacgcatatcagaatagcgcgtcaatcggggaggccgcacgtgtaggccaagggcttacaagcaccttcggtttgtctaatagtgcaggcttccgctcgggtgtcgacgccatgaagcaggcaggctatagctcggacatgatcgatgccacggtagctgcaattggttcttcggccggcgtttcgggaaatgttggtgcatctacctcgatggccagtaagctcggtggcgctggtggaaaatctgctagtgactcgggtagtgcatctgcaagtctgagtggaagcgttcaaggaactacaaccactcaacagctacgaaatgacaagcatacattgggtgacgctcttaaatacgcccaaagcgttggtcttgatcaggcagttaagaatggtttggatagttcgaagggctatgacgtggctaagaacttccaatctggtgaaacttccgtacttagtcagaccgatactaaaactctgagccaggcagcgtctaaaacgatctctgaccaagagacctatcagtctgctaagtctcttcaagatcagttcggctatgacggtaagtataatgtcgacacctttgccggaatgatgattcagcagggccaatctgctcgtcttgtcgatgctgcgcgaaatgaatatggtgagcgcaacgcgcagaactacgctgtttttgattcaattcttgatccgagccgtcgagaaactgctgccgctatccagacgcttgcggagaacggacgatttgatcttcttggggacgcccacattgatccacacgagaatagccatctccgctccgcagacgtccagggcgttgaggagagaacatcagcagccggccacatgtccaacggacacgatgttcatggtcgagtagcgtccgaacgtgaagaagctatcaaggatctagatctcaagggcaattacgaatctaagtctaagattgtggaaaatgactctcaggtgtacgcacgcgacgttgggaagcctcaggtcgaccaggctgagaatcgcttgcgcggccttggtaatggctcgtacacctacggagaaactagcttcggtgccgtctcagcactatggaataaagtttcttccggaatgcatgacaaagacacgtatttcaacgagggcaagagttacgaactcaatgacgcacaagcagaagtgtttgcgtctgcccgaatgggtgaactatttagcggtgagacccgtgagaagtggaatgcttacgctgactcgcagcacatggatcctgaactacgcgatggcatgttcaaagcgctaactcaggctggcatgcatgatgatggtgctggtgggcaacttgctgatattcggatgattaatgtgggcactagcactgacgatgccatggtcataaggcacaaccattaa

SEQ ID NO: 333599 - DNA, 1446 bp, Pseudomonas aeruginosa
atggtcgggacaactctgccacgccggatgacgctggccatcggctttgctgttgcagcaagtattctgccggggacttcgtcggcaaacattcagtctcagatggattcgatgttcgagtcgatgtcgaacacaactggctcgggatacttcgagtcggcgactcgaggcgtcatcagcggcggctccatgcgcatgaggaataaaatcgcaacggatccgatcgtctccttcaggccgccatccttccaggccgggtgtggcggtatcgatatgttcgccggctcatttagcttcatcaacgctcaacagttcgtgcagtctctccgctctgtggcatcgaatgcggtcggggttgcctctggttatgcgtttaagctggcgcttaacgccatggggccgaccgtacacaacgtcattcagaacctgcaggaagtgatgcaggacgtaaacaccatgatgtccaattcttgccagttggcgcagggcttggtgagtgacgcattttcagcgttcaatgtgaaagccgatatgaacgcatcgaccgaaaacgttagcaaaggtctaggcgacgtcttcagccagttgaagccttcaaaccttactgcgagtaacccgaaaacggagcaggccaaggctggcaatgcaacaatctgtaaggactacggcaatgtgctctggtgcgcgatgcgccagaacaacattaaagacgcattccagtatggatcgaaccaaacggaagagctgattctttcccttgttggctcagcagtcatcggtgacctcgctaatgctgacgatggtaaggggcaagagcgtaaactcgatttcatcaaggcaaaagacattagcctgaaggatgtaattgagggcaaaaaggacgacaagcttacaatttatagttgtgcaagtgacacagagtactgctcggagcctacgaatcaggatatcagtttcgatggtctcgcggctaagatagttcgtgcgtttaatggcggggataacggtccaggcattatctataagtggcacaccaatactggcagctttacctcctctgaatcagaaataatcgctgcgctgcagcagacaagcttctcggccatgattcaacggctttcgcagagaagccaatcaattgcccagggcttcgttgaggagcatgcaagactaatcgcccgtgatgcagtaactgcgcttattcggtcttacatatctgccgcagagagcagcatgctgaactcaaagatgacggaccttcaggggcctcaggcagcaaaattcataagtgaggcccgtaagcgcctggcgagtgactactcagctgttctgaaggactatgggaactctaaggaagttttcgaagactacgagaacaagttgaaaatcatgccggctacaagcttcctcgctgttggtccggttgctgcgccaggtggtgagtga

SEQ ID NO: 333600 - DNA, 636 bp, Pseudomonas aeruginosa
atggacaaggcgtcgaaattcagtgagatgtcctcgaaagtcatcatgaaagacccgttcctggatgaggacagccgccgcccggtcgcaacctacgcggctaatgccatgaacaagatggctgcagatagccgagacaaggtcctcaaggagctttctcagaaagtcggtctcttctatttcttcaagtccgattgctcactctgtgtcgagcaggcaggcgtgctgcagtcgcttaatcacgccacaggcatcccggtcattccggtctcgatggatggagagaaccttcccggtggtggattcgccgaataccgggtggacactggccaggccgagaaactcggaatattccaagcccctgcccttgcactcgcgataccgcctaatcgctcggaaattgtcggttacggcgcgatcaccctggacgttctctacaaccgaatcctggtggctgccaaagatgcagacgtcatcgatcaacgcaccttcgcatccactcagcccgtaaacgacacgggtttgctgtcgatggatgacaccaagggaataaccgaagagatgcttaaagatccagacgcattgattcagtacatgcgcggccagctcgcaaaaaaaaatatggagggtaagtga

SEQ ID NO: 333601 - DNA, 1074 bp, Pseudomonas aeruginosa
atgcgccgcctccagcgcgatgcgttcgcgcgccgccaggctctgccggttgaccagttcctccgcgctgcggatctcggcgctgccaccggcgtaggtcttgccgttcagctccacggcctgggccgcgatcttcaggtcgccctggctggaggcctgggccaggctcagcttgccgctggcgtcgatgcggatgtcaccgccgctggcggccatgtcgccggccagcttcacccccacgccctgctcggtgccgaccaggcggatcgccccggcatacatcccgcccagcgccgagctgtcgatcgccagctgtggcttctcgctgccatcggcggcgcgcggcgtggcctgcaggctgtcggcctggacgtcgttgcggccggtgacgatgttgaggttcttcgcgtagagcttggcgttgagcttggcgctgcgggtgatcaggtcgaactgttcgaggttgccgacgttcagttcggcgccttcgacgacgatgtcgccgccatccacctggaagcgctccaggcgctggccgtccatgatcggcttgccggtggtgagggtcgcgcgcggcgtgttgatgaagccgcagccctggcaggtgatgccgtgcgggttggcgacgatcacccgcgccgactgcccggccacctcggtgtagccggccagggtgctgcggttgccgccggtgacctggttgaggatcacctgcgccgcctggcccttgaggttggggttgccgaggatgatcccgccgagctgggtaccctgggtcttgccggtggcgttgttgaggatcagcccgttggcgccgacgttgtagtcgcggaaatggttgttcgacagcccggcgccgttgggcgtggcgatattgacgatgggcacgccgttgcccgcctggcccaggccggtgttgccgccggcggccttgtccagcgccagccccgccgccgcggcgacgatcgggttgaggaacaggatgccggccagggacagggcgatgcactggttcagcgggctgcggatgtccatatcgttactccttggcgggtaggggcccggcgaggttaa

SEQ ID NO: 333602 - DNA, 1131 bp, Pseudomonas aeruginosa; identical to SEQ ID NO: 331748

SEQ ID NO: 333603 - DNA, 756 bp, Pseudomonas aeruginosa
atgctaccgaacccgaccttggacaagctgcaaaccttgcgcctgcacggcatggtcaaagcgctcagcgagcaacacgctacgcccgacatcaacgatctcagcttcgacgaccgccttggcctgatggtcgaccgcgagctgaccgagcgcgaagatgcacgcctgacgactcgcctcaaagccgcacgactacgccacaacgcctgcctggaagacatcgactaccgcagcccgcgtggcctggacaaggcgctgatcctgcaactgggcagcggccagtggctgcgcgacggcctgaacctgatcatcggcggcccaaccggcgtaggcaaaacctggctcgcctgcgcgctggcccacaaggcctgccgcgacggctacagcgtgcgctatctgcgcctgccgcgcttgatggaagagctgggcctagcccacggcgatgggcgcttcgcgaaactgatggcgggttatgccaagaccgacttgctgatcctggacgactggggcctggcgccgtttaccgccgcacaacggcgcgacatgctcgaactgctggacgaccgctacggcaaccgctcgacgctggtgaccagccagatgccggtagacaagtggcacgcactgatcggcgatccgaccttgggcgacgcgatcctcgatcggctggtgcacaacgcttaccggatcgaactgaagggcgaatcgatgcgcaggcgcgcaacgaaattgacgacgacagggacttcagactaa

SEQ ID NO: 333604 - DNA, 1515 bp, Pseudomonas aeruginosa
atgcgtaaaatccgagaggtactacgcctaaagttcgacgccggcctgtccgtgcgcaagatcgcctccagcctgcgcatcagcagcggcagtgccggcaattacctgcaccgtttcaacgcttgcgggctgacttggccgacatcattgtcggacgccgagctggagcgatgcctgtttccgccagcaccaacagttcccagcgatcaaaggccgatgcctgattgggcttgggcgcatgccgagctgcgccgccccggcgtgactctggctctgctctggcaagagtaccgactcgctcatccgcaaggctttcaatacagctggttctgcgagcactaccgcctctgggccgccaaggtcgacgtggtcatgcgccaggaacatcgcgcaggcgaaaagctgttcgtcgattacgcgggtcagaccgtgccgatcatcgaccggcgaaccggagagatccgccaggcccagattttcgtcgccgtcctcggtgcctccagctacaccttcgccgaggcgacctggtcgcagaaactgcccgactggctgggctcgcacgcccgctgttttgcttttttcggcggcaccgcacagatcctggtgcccgacaatctgcgcagtggcgtgaccaaggcgcaccgttacgagcccgatattaaccccagctaccgcgatctggccgagcactacggcgtcgccgtattgcctgctcgctcacgaaaacccaaggacaaagccaaggtcgaagtcggtgttcaagtggtcgagcgctggatcctggcggtgctgcgcaatcggcagttcttttcgctgggtgaactcaacacggccatcggactgctgctggatcgcctcaaccaaaagcccttcaaaaagctgcccggctcacgccgctcggccttcgaggccatcgaccaaccggcgttgcaaccgctaccggaacacccttacatctacgccgagtggaaaaaggtacgcgtccatatcgactaccacgtcgaggtcgatggccacttctactcggtgccataccagttggtgaagcaccaactcgaagtgcggctgaccgcgcagaccatcgagtgcttccacgccaaccagcgcgtggccagccatttgcgctcacagcacaaaggccgccacaccacccagatcgagcacatgcccaaaagccaccgcgagcacgccgaatggacgccgcaacggctgatccgctgggcagagcaaaccgggcccaacaccgctggcgtcatcacctacatcctcgaacgccgaatccacccacagcacggcttccgcgcctgcctaggcatcctgcgcctgagcaaacagcacggcgaagcgcggctggaagccgcgtgccagcgtgcgctggcactgggcgcatgcagttacaagagcctggaatcgatcctgcgccaagggctggaacgcctaccgctggctcagcaaaacctgccgctgctgcccgacgagcacatcaacctgcgcggccccggctactaccactga

SEQ ID NO: 333605 - DNA, 798 bp, Pseudomonas aeruginosa
atgagttcgcagttgatcggtgtgctggcggcttcgacgcagggcgatgcggacgccaagagcttgcagacgggagcctgggtggcggggaatgctactcagaacaactatattgaacactcggatgttctggcttttgccgaagacatgaggtcttgcggcaaagacgaaggttgccaaaaggacaagtgggagaaagaaaggtacagcgacgaaagtaaactcaatgtacaggaggcccaaaatacctatggtccgctgagagcaaaggagaaaaggctccaaatcgtcgagagcatggacacattggtgtccatccagtgcgtgacgtcgcgatgcgagtcgtacaagacggaattgttggagcaatcagtcgatagctatatacacctgagcaaggtcctcgatgaatgggcgccgacgctggaccgattggcgcttatcggaggtgctgctgcaggtaagcagatagactcgaaagtcaaacgtccgggtatgccggagcctgtagagcttgcgcaggttcagaaggctgtggattatcttgcagccctaaaagcgactggggcatcaggaaaaccgctggtttcaaagggctcagaggtgacccctgaagttattcaaaaagcattgcagggtgatcgtgttattactgcgcaaggcgctgtgtcattacctgcggtgcaaagatatgttgatcggcttcttaagggcgatgttgccccggcaataaaaatggatggcaatgtgattgttgatgggaatcatcgttatatcgcagaaaaaatattagggtga

SEQ ID NO: 333606 - DNA, 240 bp, Pseudomonas aeruginosa
atggttccgttgttttatatgcgtttcgtggtgagtccgctcagctatacaatctatattgcccagcggcagagtatggatttgttgtggcagctagccttgttgctcctgacgtttatctgttttaccttgcctgactctgtcgactcggtgttgtggttttactccatagcatatgctgttatgtattttgtctatttctggatgtccttccagtgtgccaagggagatgccaagtga

SEQ ID NO: 333607 - DNA, 369 bp, Pseudomonas aeruginosa
gtgatctcggcccgtgttgtctcgatcatgctggcctgcctgctgctggttggcctcggcgccgttggcggtgtttggatcggcgcgcggcactaccggccgcagttggatgccgcgagcgcggatctggctgcctgccgtgccgcccggggagagatggagtccgcagtggtggagcagggcaggcaggtcgccgcgctgcgactggccggcgaacagcgggcccgggatgcagcccaggcggtggagcaagcgcggaggcgcgccgacggcgactatgccgcggcacagcgcctgttgcgtgagcgctccgctggtgatcagtgcctggcagccgaagtggtcatcgatcaggagttggggctatga

SEQ ID NO: 333608 - DNA, 255 bp, Pseudomonas aeruginosa
atgtgtgggattggcggaagaaccattgcagaagccaaatctcgtctcagctaccgggagttcatgagctggtgcaagttcagggacaagcgcggcagtcttcatcttggtatgagaatagagcgtggcacggccttattgtctgcgctctacgccaatgctcatagcaaggagccttacaagatatacgacttcatgcctcacgaggatgagcccgtcctgagcttagaagctgccctcgattcctgggggtag

SEQ ID NO: 333609 - DNA, 360 bp, Pseudomonas aeruginosa
atgcagctgagtatttcaaatcttgcaacgatcggtgctttcaccggtgcgccagtggaaagggaaatcacatggaagcaaggcgataaggaagtcaccgctaccgtctacgtcaagcctctgtcgtacagcaccgccgtctccgacctccttgcgatgaatggcaaggtcgatggcgtagctggacgtatcgctgcgtcaatcgtggacgaagagggcaagccggtattcacgccggcagatatcaccggcgaggccgaccccagtcgcggcgcgctcgatggaaacctgaccatcgccctgctcaccgttatcgccgaggtgaacaacctgggaaagacgaccagctcagcgaactag

SEQ ID NO: 333610 - DNA, 516 bp, Pseudomonas aeruginosa
atgtccatcttggctcaaggaactcagttcttcgtaatcgatccgaatctcgacagcaatggccccggtgtgctggagatcgattgcatcaccgctttcaatcctggcggaaacccgtccgaccagatcgaagacacctgcctgaaatacaactcgcgaacctacaagaagggcctgcgcactcccgggcaggcaaccgggacgctgaatgctgacccggaaaatgacagtcactaccgcttttggcagttcgcggaggaccccgaattcgatcagatcgaaatggatatggtcatcggctggtcagacggtccgcttgaccagagtggggagccaatctctatcccgacggttgcgagtgatggcggcttcaatctgcccgccaatcgcacctggtaccgtttccggggctacgtgtctgacttcccgttcgatttccagagcaacgctgtggttgctacgaacttcactattcagcggtctggccgcggttactggatcagaaaggcggtttaa

SEQ ID NO: 333611 - DNA, 366 bp, Pseudomonas aeruginosa
atgtacgcaccgattttcaaagtctgctcgcagaaccctggcgttgtcgccttgcttggtgcgaagccgacccgactctatctgttcgctgaagcaccagaccagcctggtcgcccctatgccacatggcagacctttggtggcgagcctgagaactacctggcccaccgccctgacatcgactctttcagcctgcaggtggacgtcttcgcggacactgccgcccaggtccgcgccgtcgcgacggcgatccgtaacgcgatcgaactgcgcgccacgatcactcgctggagcggggaagagcgggacgatccaacagacctataccgtatcagcttcgacgttgactggtgggttaaccgctag

SEQ ID NO: 333612 - DNA, 498 bp, Pseudomonas aeruginosa
atggctgacggcgtcgagttcagcatcaccggcttggagtccctgctgggcaagctggatgctctgagcgtcgacattcgccgaaagggtggccgcgccgctttgcgaaaagcggccatggtggcgctcaatgccgcgaaggctggcgccgagaagatcgatgacccgggtaccggccgaagcatttccgacaacattgtcctgcggtggaacggtcgtctcttcaagcagtccggcgaccttggcttccgtattggcgtgctccatggggctgttttgccggcgaggggcgaccgcgtcgacaagcagaagaatgcgccgactccgcactggcgtctctgggaatttggaacctcgaagatgaaggcatcacctttcatgcgcagtgcgctggccgacaacatcgccgaggtcacgagcactttcgtcagcgagtacgagaaagccatcgaccgcgcaatcaagcgcgcccagaagatggccgctgggagcaactga

SEQ ID NO: 333613 - DNA, 618 bp, Pseudomonas aeruginosa
atgcagagcgccttaccgcctgggctagccgactgcctgctgtggtcggctgagctgggcatggggtaccacccacgcaagccgatggactactccggtccctacttcgagaagtaccaggcgatggacgccaccccgatggggggggctttgaccaaggcccgcgtgcgcatggttcgacgtcaccacggtggcgacctgatcgacattggcattggcggcggtcgcttccttgaagagtctggcgccttcggctttgacgtaaatgccgacgctgtgcgctggctcaaggagcgcggccgcttcctggacccctacgctggaaagatcccggcgatcacctgttgggacagtctcgagcacatcccgaaccctgaagggttgctggctcaggtggtggactgggtgttcgtctcgatgccgatttaccaggatcaggccgactgtctggcaagcaagcacttcaagcccggtgagcatctctggtactggactcagaacggtctcatcagctggtttgcgcggctcggcttcggctgtgtcgagatcaaccaggaagagtccgacatcggccgcgaggggatcaccagcttcgctttccggaggttccatggctga

SEQ ID NO: 333614 - DNA, 846 bp, Pseudomonas aeruginosa
atgatgatcatcaacggcatgaaggggctgggcgacaacatctaccagcgggcattcatcaagcagctaccgcgaggcgtgtggctggagactccctggcccgagctctatcaggacattcccgacatcaatctgatcctgccggtgaccaggctccgcacgcagatgaagaacatctgccggcagccgaagggcacctggcaacggcgcccacgcggcaccgtggttcaggtcggctacggccgcgagggcattttccctggaatgatgcgcagcttcggccgccgccctggggagatggacctgcccgacttcggcccatcaccggtcgatggccgctacgtggtggtgcgtccggctacggtccgctccgagtggcgcgcggacacccgcaacccactgccagagtacatcgcccaggcggcggatgagatgcgccggcgcggtttcaaggtggtctcggttgctgacctggtcgaaggccgggaatgggcgctcgccccactccccaccgccgacctgcagttccaccgcggtgagctcccggtcgacaagctgctggctcttgtccagggagcggcggcagtgatcggcggaatcggctggcttctgccggcggcgatcgcggccaaggtgccggccctgatcatctgcggcggccagggcggctacaacgcgccggagctcatcaccgccaaggtgatggacacctcgcgaatcgaattcgtggtgcccgacaggttctgtcgctgcacccagaaagagcacaactgcgacaagaggatctcgaactatgcagagcgccttaccgcctgggctagccgactgcctgctgtggtcggctga

SEQ ID NO: 333615 - DNA, 357 bp, Pseudomonas aeruginosa
gtgctgaccaatcgattgcggcaccggatcaccttccaggcgcaggagcagcagcaggactcggagtctggtgacgtgttgctggtctgggtggacgcctcgcagtacgacggcacgctgctggtggacgttccggccgaggtgctaaccggcgccggccgggagttcatggccgccaacaccaagcagaacgagaccgacgcgcggatcaacttgcgttggttcccggatctggacatgtcctggcgggttctctggcagggccagcaattcaccataaccggcgccgacacggatgccactgggcgtaaggaatggcgcctgcgctgcgcgacaggagtcaccgacggtcgatga

SEQ ID NO: 333616 - DNA, 333 bp, Pseudomonas aeruginosa
gtgagcgtcatcaaccttcaggacgtgaagcaggccctgcgcgttattcacagcgccgacgatgccctgattcagcagctgatcgacagcgccgaggatgaggccgtgcgtttctgcggtcgcacgcagttgccgaccttgccgttggacaacccctgctcaccgagcagcgaggatgtaccgtccagcgaagacccagtggcgcccagcgtcttcaccgcggtggtggcgctggtaaaggccgattacgaggcgacggtcgatgaggcgaagaagctgcgcgaactggccgaggtcaagttgatgccctaccgcatcggcctgggggtgtga

SEQ ID NO: 333617 - DNA, 387 bp, Pseudomonas aeruginosa
atggacgcggcctggtggcaggtccacggcgatgaagccgccagcgctttcgtcggcgagcgctgcgcgccgttgaccttcaagggcgtgaagaaggtgcggttccagcagttccagaacagcggcgccggagcggcctcgctcgcggcattcttgggcgcgcgacggatcatcttgctgggctacgactgccagaagaccggtggtcgtgcgcactggcacggcgaccacccggccgcccttggcaatgccggcagcgtggataagtggccgtcgcagttccggcaactggccgcgcatctcgcaggcctcgaagtcatcaattgcagtcgagagacggccctggaggccttccctcggcgcccccttgaagaggttctctcgtga

SEQ ID NO: 333618 - DNA, 252 bp, Pseudomonas aeruginosa
atggtcctggtaacagcaaccacaggattcgatcacggtggcaggcgcacgctgggcgaagagttcgatgtcagcccgcagcaagcagccgccctgaagcgcaagggcctcgtcacctgcgacgagaaccagctggaccccgaacaagccgctggcgagaagtcgtctgcatcgcaagtggccccagtctcaccgcagacgactgcgaaacagtccgggcgtggcgagaagaagaagccggccgcggagtaa

SEQ ID NO: 333619 - DNA, 1425 bp, Pseudomonas aeruginosa
atgaaacgattcaaactctctgcgccgctgatcctggcggtaatcgctgttgcgatgctgatcccgctggcggtcggtctcgtcactcccatgaccgatgtcgtcatggcgggcagcgctctggctagcctcactgtggtggcgttcagctcgatgttcatcgagccggcacgcttcccgcaacgtgcagcccatgcccagtttggccgcgcgggcgaagaaaccgacatcgagcgcgagtatcgccaggttcaggctgacctgaagaacgtcggtgatgatctgcgccgctacgcggaacaggccgaaaaagacctcaaggcccacgtccagatgtcggagcagaccaaggcgtccgtcgaccagctgttgaccactcagggtgaactgaacgcccgcctgcaagcggccgagcagcaaatcgtgaagctcgacggcggcagccgcggcgatgatcgcccagagtctgctggtgagaccttcaccaacgatgagcgctacagcgcattcgccgctcaagcccaggccagcggcaactacagtctgaccgtcccggtccgcgctgccatcaccagcctgcccggctccgctggcgatctgatccagccgcagcgcgtcggcatggtgcagccgctccagcagcgcctgttcctgcgtgacctgctgaactggggccgcaccacttcgccctcgatcgagttcgtgcgtgaaaccggcttcaccaacaacgcggcgccggtgtcggagaacccgcagaacccgaagccggagtcggacatcgccttcgagctggactcggcgccggtggccaccatcgcccactggattcgcgcctccaagcaggtgctttccgatgtgccgatgctgcagagctacatcgacggtcgcctcttctacggcctgaagctgaaggaagagcttcaactgctgaagggctccggcgtcggccttaacctggacggcatctacacccaggccgccgcctactcgaacccaggcgtgaccgtggaaggcgagactgcgatcgaccgtctgcgcatcgcgctgctgcaggttaccctggccgaactggaagcggacggcatcgttctcaacccggtcgactggaccggcatcgagctgaccaaggaccgcaactacggctatgtattcgcaaccccgaccggtatggctgttcccggcctgtggtcgcgcccggttgtacccacccaggcgatggatgtgaacgacttcctggtgggctccttccagcagggcgcccagggttgggatcgtgaagacgcgaacatcacggtctcgacctccgaccgcgacaacttcgtgaagaacatggtcaccatcctctgcgaagagcgtgtcggcctcaccgtctaccgtccggaagccttcgtgaaaggcgacttcgacggcctgccggtgtcctga

SEQ ID NO: 333620 - DNA, 858 bp, Pseudomonas aeruginosa
atgtccattcgagcactgcccgccgcgcgcgtgggcgcgccggcggctggcctgcgtttcgatctgtcggcccgcgccatggagcgctggaacccggcggtgcaggctgccaccgagcaagacaacaccatcagcatcctcgacatcatcggccaggacttctggagcggcgagggcgtcactgccaagcgcatcgccggcgccctgagggccatcggtgaaaacgacgtggtggtgaacatcaacagccccggcggcgacatgttcgaagggctggcgatctacaacctgcttcgcgaacacccaggcaacgtgaccatcaaggtgctcggaatggccgcctcggccgcctccatcatcgcgatggccggcgacgaggtgcaggtggcgcgcgccggcttcctgatgatccacaacgcctggacctgggccgccggcaaccgacacgacttccgcgagtttgccgactacctggagccattcgacgcggccatggctgacgtctatgtggcccgcaccggcctggatgccaaaaccgtcgccacgatgatggacggtgagacctggatcggtggcagcaaggcagttgagcagggctttgccgactcgctgctcgactccgacgaggtagccgccggcaatgagaagccaaccgccaaggccgtgcgtcgcgtcgagaacgcgctgcgtgcctccggtatgccccgatccgaggccatgcgcctgatttccgaattcaaagccagcctgagcgactcggctggtcgcggtgagcgtgacgccaccgaccacggccgcaaggccatccagctgcaggtcgatcccctgccgcgcctcacgttccccaagagatcctaa

SEQ ID NO: 333621 - DNA, 1233 bp, Pseudomonas aeruginosa
atgaagcccaagacgaagaagccgagcagggtcaaggctgccgtgctgggctggctgggtgtaccggtcggcctgacggatgaagccttctggagccagctcggtaccaacgtagctggccaggcggtcaatgagtgctcggtcctcaagctgtcagcggtctggtcctgcacccgtttgattgccgagacgatctcgactctgccgctgggcctttacgaaaagaccagcaccggccgcaaccctctgccgaatcatccgctgtacagcatcatccattccaggccgaacgctgactcaacggcgtcggtgttctgggaggcgatggttgcctctatgctgctccgcggaaatggattcgcggagaagaagttcctcggtggccgcctggtcgccctggtgtttctgccgccctcgcggcttgctatcaccagagactcctcgggtaaccggatctaccgtttcacggagcgcaacggaaagcagcgcgttatccctgagtcgtcgatcttccgcattcctggatttaccacggatggcgactggggattgtcggctatcgagtacggtagccaagtgttcggctcggctctcgccgccagcaatgctgccaatagcaccttcgagaagggcctgtcgccgaccgttgccttcaccatgcagcgcgtcctcaacaaggagcagcgcgccgagtttcgggagagcctggccgaggtcagtggcgccatcaacgccgggaagtctcctctgcttgaggggggcatggatgccaagacgatcggcatcaaccccaaggacgcccagctgctggaatcccgcgcgttcagtgtggaggaggtctgcaggtggttccgtgttcagcccttcatggttggccattcggaaaagtccaccacctggggaaccggcctcgagcaacagatgatcggcttcatgaccttcaccatcctcccatggttgactcggatcgcgcagtccatctgcaaggatctgctgtcgccggttgatcagaagacggtctacgccgagcacagcattgaaggagtgctgcgcgctgacagcgcggggcgcgcttccttcctgtcgaccatggttaacaacgggatgatgacccgcgatgaagctcgcgcgaaggaaaacctaccgctgaagggcggtaacgctgacgtgctcaccgtgcagaccgcgctgatccccatcgaccaactgggcaagacccccgcaggaaactga

SEQ ID NO: 333622 - DNA, 1695 bp, Pseudomonas aeruginosa
atgcagtggactacggcctgccctgattggcagcgacggatcgtcgctggccagtcacttatccctttcgcaccactcttccccagcgaggccgaagccgcgctgcaggtattccgctcgctgcgcgtggttgacctgccagggcagccgaccttcggcgagtgctgcgaccagtgggtcttcgatttcgttgctgcgatcttcggcgcctacgacgccgagcatggcaagcaactgatcaggaccttcttcctgctgatcagcaagaagaacacgaagtcgaccatcgccgccgggatcatgctgaccgcgctgatcctcaactggcgacacgatgaggagcttctgatcatcgccccgaccatcgaggtcgcggcgaacagcttcaagccagccgctgcaatggtgcgcgccgatcccgaactgacggacctgctccatgtgcaggaccacatccggacgatcactcaccaggtgaccaacgcggccctgaaggtcgtggctgctgacactgacaccgtgtccggcaagaaatccggcaagatcctgatcgacgagctctgggtgttcggcaagcgcccgaacgccgacgcgatgctgatggaggccaccggcggccagatctcgcgggaggaggggttcgtcatcatgctctccacccagagcgacgagccgccagccggcgtcttcaaggagcagctggactacttccgtgacgtccgggatggcgtggtcgatgaccgcaagtcgctgggcgtgctgtacgagttccccgaggacatggtcgagaacaagacctacctcaacccggacaacttctacgtcaccaaccccaaccttggccgttcggtcagcagggagtggctggaggatcacctggccaaggtgctccggatggacgagggggcgcagcgcaagttcttcgccaagcacctcaacatccagataggcatgaacctgcgggccaaccgctgggcaggcgccgatcactgggagaagagggcagacaagtcgctgacgttagatcagctgattctgcgctccgaggtgatagtggctggcatcgacggaggcggacttgatgacctactcggcctgacgctaatcggccgggagaaggactcccgtcgctggctgcactgggctcacgcttgggcgcacaagatcgtgctggagcggcggaaagacatcgccaccaagctcctggacttccaggccgccggtgacctgaccattgtcgccctccctggggatgacgtgaccgacgtcgccgacatcctctgtcgggttaagacagctggtcggttcccagagaagcaggctatcggcgtcgaccagtccggcatcggcgacgtagtcgacgaactcactaccgaagagcgcggcttcacgatggagcacatcgttggcatcggccaaggctggaagctcaacggggcgatcaagactacagagcgtaaagtcgctggcggagagctggtacatggcggtcaaccgctgatggcttggtgcattggcaacgcgcggaccgtccaggtcggcaacgcactaaccatcaacaagcaggtaagcggcaccgctaagattgacccgctgatggccaccttcgacgcggcaacgctcatgtcgctcaatccctcggcttgtgatgagggcgatttcaacgacttcctgaaggcaccgatcatcgtatga

SEQ ID NO: 333623 - DNA, 501 bp, Pseudomonas aeruginosa
atggcgttaacagacaagcagcggcggtttgttgacgcgaaggtgcgtggagcctccaacaaggatgctgcggaagccgctggctacgcggccgcgacggcatccgccgccggttccaggctggccaagaatccggacattcttgccgagctcgaaaggcgctctcgtgttaaaggccgagcgcgaaaagctcaggccgaaccgtcagtggacgatccgccggcagatgagcaggagggtgacgaagataacggcgagcagttggccaaccttccccacaccaatgacccgctgacctggctgctcgctttgatgaacgaatcgaaagcgaaggtcttcgaccgacgcaatgccgcccaggcagccctcccttacattcacggcaagaaggccgaccaggggaagaaggaacagaagggcgccgccgcgaaggaagcgagcaaaggcagatacgccgcgcgcccagcgccgaagctggccgtcgacaacaccaaggggtga

SEQ ID NO: 333624 - DNA, 309 bp, Pseudomonas aeruginosa
atggctaagatcccgacactggcgccacggctgcagcaggtcggttccaagctgaaggcaacggccagcaccagcgagcggcgaatgaccggaagcaggctgcagaagcgccgctaccggctgtggctggcttcacctcagtgcgccgaatgcggcgtgatggtggcataccctagcggcttcgaactggaccacaaggttccgctcttccagggcggcgaggacacggaagagaactgtcagatcctctgctgcggtccaggaagctgccacgaccgcaagacgcggaccgatgggggtgcagcatga

SEQ ID NO: 333625 - DNA, 348 bp, Pseudomonas aeruginosa
atgagcgagcaacgctgcgaaagagaaaagccagtgttggtggtgaagatggatcggctactggacaaagatcagcaagcggcgttcgcaaagtacgttgaacggggagccgagcgtcttggtatgagtgctctgctgctgactggcggggctgatgcgcacattgatcgggaccttcgaccgctgctaggtgacctggttgccgagcagcgcaagaccaacgacctgctcaccgcgctgatcacggcgatggcagatgaaggcgctgtcgatgtcgaggccgagagcattatcacgcatgacttgtcaggcaggccgctgaagaagccgggcggtcaccatggctaa

SEQ ID NO: 333626 - DNA, 336 bp, Pseudomonas aeruginosa
atgtcaaacatgcccgacaaaccggagacctgggcgttggtgctcgcctggttgagccaacatgctcccgtgctgtacgccactggtctctcgttcgtgatggctgcaatccggatcatctatgggggcggcacccgtcgccaggcgatcctcgaaggcgctatttgcggatgcctcacggtgactttgatcagtggcttggagttttttggcttgcctcagtcgctttccaccttcgttggtgggtgggttgggttcctgggcgttgagaagattcgggcgctggccgaccgttacgccaacttcaagctgcctagcaacaaggcgggtgagtga

SEQ ID NO: 333627 - DNA, 582 bp, Pseudomonas aeruginosa
atgacgttgtcggcacggaagccccggccgaagaagtgcgcagtgtcgacgtgccgcgcgcccttcgtcccggtgaagtcgtttcagacgtggtgcagcccagagtgcggaatcgtcatcgctcggcagaagcaggagaaggagcgcaagtcgatccagcaacgcgagcgccgcgaggtcaaggttcggaaagagaagttgaagagtcgtgcagaccacttgagggaggctcaggccgcattcaacgagttcatccgctggcgcgactgggaccgcccctgcatcagttgtgggcgctttcatgacgggcagtatcacgccgggcattaccgctccgtaggctcccatcccgagttgaggttcgacgaggacaacgtccacaagcaatgcgccccatgcaacaaccacaagtcgggggacgtcgtgaactaccggatcaacctggtggcgaagatcggcgctgcggctgtagcgcgcctggaggggccgcatgacgcaaggaagtggactgtggaagaaatcaaggcaatcaaggccctgtatcgagccaaggccagggacgcgaagagggctgcagcatga

SEQ ID NO: 333628 - DNA, 624 bp, Pseudomonas aeruginosa
atgaccgagggaagtcgatcgacagacccaacaccatttcggaaagccggcctgttccaccgccgccaagacgagacccctgacatgagcgatgccgacaaaagcgacattgaggtgcatgaactcaagttttacgtacaaaggaacattcgctaccacatgaggcgcgcagcctttttcatgaggtggggaaggttcaccgcttttgtcggcgttcttttcggctcagccgccattacatccattctggcgaaagcgccggcaggatttgtaactgctgccgcgctagtggtaaccatcgcgtccgctatcgacctggttgtcggcacgggtcagagagcttggctccacaatgatttgcgtaagcggtatctcgacattgaagccgaactgctctcgtgcgctggagcgccaagccttgaacagctctgccagtaccgcagccgcatccggcgcatagaagcggacgagcctccaacactaccggctcttgaaattctggccagaaacgatgttatccggtcgatgtatccgaaagctcaagccgacgaactagtgtccaggctatcctggctgaaacgcaccaccgcccaatggtttgactgggatacttccagcgcctga

SEQ ID NO: 333629 - DNA, 165 bp, Pseudomonas aeruginosa
atgaaaactgttacccgctacgaaatccgcgaatacaagggcgccagctacagcaccagcatgagccgcaaactgcgcgatcgtaaggcggcaaacaagctggtcaagcgcttgacgaaaatgggtcacgacgcctttgcagcaccgctgaaggtgctggcgtaa

SEQ ID NO: 333630 - DNA, 180 bp, Pseudomonas aeruginosa
atgaccgtacaactgcataacgcgcaatacgcaaatctgattgcggagcgagacgcctacaaactcgcaatgcgcatgctggatagctgcaactggctggatagcgacccggctgactccgacgaattgcagcaggcaaagaaagcggctcgcgctgcattgcacgagttcaacgactaa

SEQ ID NO: 333631 - DNA, 228 bp, Pseudomonas aeruginosa
atgagcctgatggagaacgtgagcgacgcctactcggccgaagatggccggcgcgtcgaggccatcgccaagacactgatgcttgagttctacggccgcgtgctgaccgccgttgctgcggagcgcaccacgctgcgcgccatggcgcagaggggcgagccgcgcgcgcgccgctgcgtcagcgtggccggcgtcatcgtcaactacctgcacgaagaacttgaataa

SEQ ID NO: 333632 - DNA, 711 bp, Pseudomonas aeruginosa
atgaacagagaggcttggctcaacgccatggccgagcggatgtcgcctcgatttcttgagctaggcgcgccgcttcagccgtatcgaatctccatcggcttcaccagcgcaggccagagaggaaacgtcggcgccgaggtatggcacagctcggcatccgcagacggaacctacgagattctcatcagcccaggcacagacgactccatgcaggtatcggcatacctggcgcacgaactctgccatatcgcggcagggatcaaagaggggcacaaagggccgttcgtgaagctcatgaaagccatcggtatgacggggccgttcacctgctcagtgccgacaaggcagttcgaggagtgggtccagccgttcatcgacgaactcggcccactcccccacggaaagctcacttggcacaggcccggcgcgagagagcgcagagagccagcgcaggggaaggtcgcgaggggaatacgggacggcctgagccagcccgaactcgaagagatcatcaccaccgccaagaaaaagcagtcgacgcgattgaagaaggtcgagtgctcggagtgcggatacgtcgccagggtgacccagaaatggctcgacaagtctggaccgcctcactgtccggagcatggagaaatgactgtcgggcgagacgcaaatgatgaacatgacgaagaactcgaaggggtagaaaatggcggctaa

SEQ ID NO: 333633 - DNA, 351 bp, Pseudomonas aeruginosa
atgaaggcgcgcatcgagaagaaactcagtaagcggttggtcgagttgtacccggagaactatagcggcgcctggcgtgacgaagatctgtctgaactcgcatatgagcaaggcacccgagttcggcatgttctctccgtcggcggcggtgtcgactactggggcgaaggacaggacgcctacacggtctggcaagactggctaatgaattgggaatggtacgggccgttcgagacgtacccggagggtcatcgttacgagtacttcccggatacggaaggcttcaagccaaccactcgcaacctactgaaactggcccgccaatgtcagttgcagggtgagccgttgtga

SEQ ID NO: 333634 - DNA, 249 bp, Pseudomonas aeruginosa
atgcacaccctcaacctgaccgcgctgttcctggacggcgaggatggccagcgcctggccgaggtcaacggcctcccccgcctcggcgcactgctctcctccgcacaactgcgccagctcgcgcgacaactgaacgagatcgcaaacgacgcagaccagggcgccagcggtgagcactgctacacggcacccccatacggagcctgcccatcatgcccttcgacgaaagccccgcagtccgccgcataa

SEQ ID NO: 333635 - DNA, 786 bp, Pseudomonas aeruginosa
atgaccaaagcaaatgaatgcacctgcccttccggcgacggctccctccgccatccttgtccggcacatccggcgtcggtagagctggcgggcgtagctgccaagctgaccttcatcaacggaaggcccgccatgtgcgggtgccaagtggaatacagcagcggtggaggcgagtactccgacgtgatagacgtgacgctgtgtgccaagcactctggcagcgcgattctcgacctggtggcgaccaaccgaatcgctctgacgccggagtacgaaggccagtggcacgcggacctctacctggatcgggagattcctcttgcgaaggccgagggcgcgactccggccgaggcggtgcttgccctcatgtcggcagagcgcatcgatcccgaacagggaggggtcgatcaggccggcggggatcgatgggatgctctccagtcaattatggagtggacggcagcagagaacattccggacgaccgcaagctgtgcctgatccgcaacgcagctcgcgccgccctggcgcacgcgccgaccagttcggcatccccgtcgtgcaaatggaccgaaagcagcggcatctgggaaacaggttgcggccagacctggagcttcattgaggacggaccagcagagaacggcgcgctgttctgtcaccactgcggcggacgcctggtcctcatcaaaagcgacgaccaggaagatgacggtgagccgtgcccggaatgcatggaacacggctgcaatggcgaatgcgctggccacggcgcgatgggtgactga

SEQ ID NO: 333636 - DNA, 753 bp, Pseudomonas aeruginosa
atgaatgactacaaatcagccttcaacgccgcggccgccgacatcagcgcgatcatcgcactgctggggttcaccaagtatcccggcgttgatccggtgctgcgcgcaattgctgacctgatactcgaaaaagccgagagccaggtactcagggaggagcgcgacgccgccctggccagggtggcggagctggagcgcgtcctgcgggtagtggtcaacgctgccgaccatggctcatggccgaccacggtgatgcatggcatcgagaaggtgcgtgaagttctcgcaggctcagccccgcccgtcaaggctcagcccgaggaaacgcccggagaaatactcgccgccaaactgatcgaaacatgggtgacgaaacatggaaagccggccccatggtcaacagctgtagagatcacagcgcttgcgaccaacatgcccaatgacgagcgagaccgactgctcgcactggacgatgacgtggacgcccaggctcagcacagcgtgccggaactcgaccagctctattccatgctcggcgctgaaagtcaggtagacgcagcgaagaagattgccgagctgatcggctgccggatgagccgcagcgcgcttaccgaagcgcagatgcgccggatctacgagaacagcacagaggccgagaacgagcgacttgggttcgcagcgttcgcacgtctgatgcgccgcgctgaggccgtgcaccagatcgccgccgcgcccggcaaggagggggtgtga

SEQ ID NO: 333637 - DNA, 240 bp, Pseudomonas aeruginosa
atgctcagatcactgaaagtctggtggttccggcgccaggcacggcaggcctacttccgctggatacaggcaaatgacgatctggactgcggcagccacatggctgccgtgatccgcccgttggtccagcagcacatcgaaaaccaggcgcagctgttcgacttctacatggacaagctgcgcgccctgggcgaacaagtaccggctgcacgcctcagcaaggaggtaggtcatgagtga

SEQ ID NO: 333638 - DNA, 531 bp, Pseudomonas aeruginosa
atgagtgaggtgaagcggttcgatgaatacacctgcggggtgactgaggctgaggacggggagtacgtgaaacactctgactacgccaagctcgccgccgaggcccaggcgctcagggaggaagtcgcggcactgcgcgcaagggtggtggttgtgccggagcggaagctcctaaatgccggcgtcccagggctgaatcgtaatagcggctggaacgcctgcctcgacgaactggcgcgcatcaacggtatgacggtcagcgaggggcttgtgcaggggatggccaagttcgcgcgcgagatcatctgcggagccctcgatggcggaagcttcgatggtgcggaactacaggaaagcgccgagcgccatgggctcatcgccaaacaggtgatgaacgagccatgccgtggcccagaagagtactgcgcctgcgcctggtctacctcgttcccgactgaatgctaccggataacggcagagcttcgcgccctgctcaaccaggacaaggagaacggcgaccatgctgcatga

SEQ ID NO: 333639 - DNA, 300 bp, Pseudomonas aeruginosa
atgtcatttcactacatgagcggcacgaaacgctactcgttcagctaccaagaagccctcgaggagtatttgcgagtcttgcggctgagcgacgacgagttcgccgcgcaactgccggcgatcctgcatctgtcgtgtttcatctgctttttcaaaggcgttccgacgaagacgtgtctgacagatacggggctcattcatgagatcgcccatgcgctgcacagcccggacagagtgacgccggaggtcatcagcaacatccggcgactgttcaagaccacgtgcaagttggtgaagtag

SEQ ID NO: 333640 - DNA, 288 bp, Pseudomonas aeruginosa
atgacctccagcagcgtagggaaaggtattgccatctccggcatgttcttcatgctcggattgtgtttcgggagcctcagctcccggatggccacgataaaagacggactccagctttccgacggggtgttcggcagtgcgcttttcgccatgtcggccggggtggtgctctcgttgccggtatccggctggatgatcgcgaagctcggcagcagaaacgttggagtaacggcgattctcgcgaacgccgttctgctgtcgttggttcccttggcttctagcgtctag

SEQ ID NO: 333641 - DNA, 1578 bp, Pseudomonas aeruginosa
atgaaaataaaggccgcgttgattgttgatgatctttcattgagtgagtggcaaaagcgggcgattgaagactcttctgagtatcttgatattcaattggttctcagttgtcgtaatagcgcgaccaagaaaagtgtcatcaagcattgcgggtattattttctcaatattctttccctgaagaatgatatgactcgtcgagtgcagttagactctcgtggctcagaagtcattcatttcgattctgattacgaaggggcctggcagcgcatcccggaagatgtctgcgcccgaattctggataagggaataaagctggtcatcaagtttggcatgtctctgctccgcatcgatggaggattgcagaggctggacattctttcctaccaccatggcgatccagagtactacagggggcggcccgcgggcttttatgagatctatgaaaatgcagacagcgtcgggatcatagtccagaagctctccaacaaactggacgccggcgaggtcttggtgcgcgggtactccaaggttcatcaccactcctacaagaaaacctcaagaaacttttatctgaattcggtcgtgctgcttcgcaaggcgcttgtcaattactctcggggagagcaggtggtattagaaaagctgggcaaaaactaccgtctgcccagcaatttcaccgtcttcaagtttttctgcaagactatcttccgggggcttgcccggctatcgtacggggtgtttttcgaaaaaaaatggaatgtcgttgcgcttccttacaacgatattccttcgttgcaagaattgtccgtctcagcaggaaagattccgaaggtggagaaggggtatactttctacgccgatcctttctttagtgcggacggtaagctgatacgtctcgaagccttgaatgctagcaacggtctgggtgaaatcattgaattgaaggcccagagtcttgacttttcacgtgtgatcttgaaggggaatcatttttcctatccctattcgttcgaggcgtctggtgtcgaatatctgataccggaagtcgcctctcattccgctccctgtcttctgcctcctcctttcgctctggagagcaagaagctattccagggaatggagggtgagcggattctggatggcacgcttttcgaacacgggggcaggtactacctgttctgcggccaggcggtatcaggttcggacaacctttatctttatgtcggcgagagcctggaaggaccctacacttcccatccctgtaaccctgtggtgatgaatcccggctccgcacgaatgggcgggcgtatcttcaaggagggaggaaagctttaccggttcggtcagaacaactcctatggttatggaagcagtctggccgtaaacgaaatcgaggtgctcgatccagagcattattcggagaagcgtgtagcaaacctggcgttccaggacgcacgcggtccgcataccatcgacattcatgggcaaaccatgatcctcgatttctacaaggacagattttcgcttctggcggggtatcgccgtttggtggccaggctgctcagcaagggctga

SEQ ID NO: 333642 - DNA, 351 bp, Pseudomonas aeruginosa
gtggaagaactcggtatcggggtgatcagctactactcgctggccagcggcttcctcagcggcaagtaccgcaaccaggccgacaccgccgggcgagcccggggagagaaggtgaagggttatctcaacgagcgcggcgtggccatcctcgcggcgctcgacgaagtggccgagcagtacaacgccaacccgacccaggtcgccctggcctggctcatcgctcgtccgacggtgaccgcgccgatcgccagcgccaccagcctggaacagctcgacgacctgatcgccgccacccacctgaagctcgacgaacaggcgatccaccgcctggacagcgccagcgcctattga

SEQ ID NO: 333643 - DNA, 789 bp, Pseudomonas aeruginosa
atggcagaaacacagatcgagtggactgattccacctggaacccggtggcaggttgctcaatcatcagcgcaggctgcaaaaactgctacgccatggagatggcaaggcgccttgaagcgatgggcatgaccaagtatgccggtttgacgcgcaagaagaacaagcgtgtggtgtggaacggaaagatcatcgaggatcgggactccctggccattccttatcgatggaagaaaccccgcaaggtgttcgtgaactcgatgagtgacttgttccatgagcaggtcagcgacagcttcatccaggacgtgtggaaagtgatgcgcgaaacacctcatcacaactaccagatcctgaccaagcgccccgagcggatgaagcagatccttcaggacaccattcgcgaagttttgccgaacgtttggctcgggacctccatcgaatgcgccgatactgcctaccgagtgctgcatatcaaagaaacccctgcccatatccgtttcatttccttcgagccgttgattggcccggttggttccatcgacctttctggaatagattgggccatcgtgggtggtgagagtggaaataaggcccgcctgatcaaggaggggtggattgacgagatctacagtcaatgccttgaaagtggcaccgcctttttcttcaaacagtgggggacgtggggcaaagacaacgtccgccgctctaagaaagcgaatggccgagagtatagaggaaaaacatgggatgaaatgcctattaacattataggcacgtcacctttgtaa

SEQ ID NO: 333644 - DNA, 1248 bp, Pseudomonas aeruginosa
atgtcaaccaagaagtacgagtgggaggacggggctgttcttgctgaacactcgaagaaaaaacatcagatcattcgcgaatacttctacgagtacgtcataacgcgctgcaagcttcccaaaatggatcggtttcggctagctgtagtcgacggttttgctggaggtggccgatacaaatgcggtgcgccaggttcccctatcatttttatcgaagagctgaatcgggccaccagggcgattaacattcatcgggctgagcagaatctgccactgattaacattgaatgcttgttgattctgaatgacaacgagaagccagtggtggagttgttaaagcagaacgtaacgcccgtactgatggagagcgtccagtcaaatgatcatctgacgattagagttgaatatctctgtaccgagtttgagaaagcgtatcctgagatcaaagcatttttgcagcactatcggatcgcgaacgtagtctttaacttggaccagtgtgggcatagccatgtcgccaaggaaacgctggtagacatcacgaactcctatacgtcagctgaagtgttctatacattcatgattgactcgctgctcgcctttctgcagagagacaatcccaaagcccttgaaagcacactcgcctatttgtccctgagcaggtacgacctcgacgccttgagtgagttgatgcataagaagagatggctgggagctgcagagaaaatcgtatatacaaatttccagagatgcgcccaatatgtaagtccattttcgatcaacaatcctggcggttggcgctattggctaatccacttggcgaactcttacagagctcgccaagtgtacaataacgtgttgcatgacaacagcaaatcgcaagcccactgtggtcgctcgggcttgaacatgcttgcgcatgaccccgaagaagaagagaagctcacactgtaccttttcgactcttctgcacgcgaagaggcgaaagttcagttactggaagatatccctcgagtcatctcagagttcggcgatgccttgaatgtgggtgatttctacagccgaatctacaaccatacgcccgcgcatagcgatgacatccacatcgccatgttagaaaaccctgacattgaggtggtaactaaggccggtggagttcgtaggaaaccaggccagatcaatatttttgatacgattaaactcaagagccagaagagtttctttttcccattctcgattaaaaaatag

SEQ ID NO: 333645 - DNA, 1047 bp, Pseudomonas aeruginosa
atgaagacccaggaagagatttttgagctcgtaagaacagcgcgccaacgaatgaaggagctgccatccacaaggctaaccaagtcgactgacgatgattatgttcgcgaatacaaccgcatggttggcgatgaaggagctaatccagagaagctttggtcagcaatctgtgcgactcaaagtaagtccacatatcgaagaagagtggccgcaacgatgcgctgttgtcgttctcagcttcagaacgcattgcagatccaagacgcggcccagcgcgcaggtgatatgaacgctctcagataccaagtggcagttatcgaagaggtgatcggagtcctgaatattattgaaggtcacaaagggcaatgccctctggaaaatacagtaaggaggaagtcaaagcgatctgacttgaaatatctacctagcaattggcgggatcaattgcataagcaatttgagggaagaaagtacgaactggcatatctggtggaggcagtgtcgggatgtcgaccaggtgagctcgagaaaggcgtcaaagtgatttgttccaaagagagcggtctattgactatccggatcgacagtggcgtcaaggtggctgaccagaaaggccagccctggcgcgagatcacatatcgagtcgatcagaatccgttggttagggctctttttgaggtctgcagaaatgtcgcagtaggcatggaaaggatcgagatggttgtcgatatcgagaaaaccaccaactggcgtgcagcgctgtcttcggccggacagaagctatggccgagactgaaattcagggtctgcccgtaccatctccgaaatgccgcagccagcgactggaagcgggccgggctcagtgaagaagagatctcggcagcactaggccactgcgtaaacaaaacctccagcatctatggtcaattccaagttgggcagggggagggaagattgagtcctgctgatgtaagagctgcacgccctatcttgaatacccggagtctatctcctcatatgagccggggctccctgggccctaaatga

SEQ ID NO: 333646 - DNA, 1950 bp, Pseudomonas aeruginosa
gtgtatcttccagccttaaagaatgcaatccaaaatcttgaagaaaaactcttttatgacgttgccctgatgtacttaacaaccctcggctaccaagagctaagtatggtggacggtacgggtgacggcggccgtgacgtaacctgctcaagagaagaccttagaatccaacttagtgtcagaagggactggcgaaagaaaatcaatgaagaagccagtaacacggaaagatctggccaccgtcatctaatatacgtgaccaacaagatagtaagccccgacgcagagcaagaatttatacagtccgactacagccatagaggaacaattgatttatccatccatgacttaaagcgaattgtaaccgccctatcgcgccccggcgtaatccgtcgagcttatgagctcctaaatatggctgtcccttcaacgcttgaggccacccccaaagacatagcactcagcacgctcttgctattttcacaggaggcaaatgagcttcgagaagctgtgattaacgcgaacaccagggcacatctttttaaaaaccccggcatatctgagaatgtattaattggattagtcgagaatagcactcctggtacaaatgtggcacgtgctgcccgtggcgccatatcacaactaagaacgtcaggcaggattgtaggttcttcttcatctctaaatctcagcccctcagagcaggaaaccatgaaggctgcggaggcagagtttttaacagcggcacaagccgacgtaacagcactatccactatgacctctctttcagaggacgattcaagagaactgttaaacttagctctaaatcttcttattagaggccgagatttgaacggcaccggcccaacagaagaagcactccggtcatttatagccaaaaaaagcctaaatcggcaacgcgaaaagattttcgatgcattatcaaggacaaaatctgcaactttcaagcagtacggcgcaactatagatagagtcttctctactaatacatttgatatctatcgcgcactagggcgtaggacggatatcactgtagtgcttgacgccagtgtcgcaatgcccgtcatgttcggcttggagttcggggctgcaagatccagatacggtattgctgccttggcacttcgagacgcttgcaaagcgcacaacatacgaatgaccgtacctagatgctatcttaatgaaatggcagcccatggccgaaatgccttagaaaaacttgacgtttataacaacctccctgaagaagcacgcatttctttacgggcttcaggaaatgcatatcttagtcactatacccacatccatgaagtcatacgctccagcggcgacgaactgagcttacaggaattcctacagcacttcggaattgcagatggtcgccctctagacaaaatagagaacaaaattagctctatccttgaatcccacggaatagctatattacctgacgaaagatatgatcagacagtttatgaaataatttcatctaaaaagactttcgaaataaaactacttattgagcatgatgcaatcgtatgctccaagctcaagaatgacgaccagcgcggattcattcttgccacttgggacaaaatcatcatagatgtagtggaagatattgcacgcgtattcgcagacactcctgcacgagtcattgacttcttatcaatggcgcacggccaggacatagagagcgatcaaaactacgagctactctctgcattaatccacaccgatgaaaaaattgctcaaaagctagctgaaaaagttgatcacattaactccgtagagcaagcctataagctacgggctctggtcgaggcttctcgacagcgtaacggagaagcctggactctaaaaccagaagatattacgccactgcttgaccctgacgagcaggacgcatcgcctgatactgcaagctaa

SEQ ID NO: 333647 - DNA, 1212 bp, Pseudomonas aeruginosa
atgtacctttcaatcatgttccctgacgcacttccctacgtcgctatgttgaccggcgggttgtgggtgactggaaaacaagacaatccaattctggcagtcaaggcgagcaaagaaatcatcctcaccgctagagagaaccgcacgttcaggctctatctcgcgccttgcgaagtggacggccaacgtggactgacgcttctttcggcgttctttgatgatcctataagccccctcttgatcaacacgcccctggtcgctgctgacgcactcactgaagcgctgaggatccttcccgacgagttcaagatttgcttttttgacgagcacaaccgtgagctgctgagttgcaaggcctatgcgaaccttacccagtttcgatcgcagcttgcttcacaccctcttttgggagaagaacacactaagcagatgctggatcaaggagatgcctggttcgctaccagcactgccgaggacgacatccgcgcaatcccggtgatcttgggggaggacttgttccccagcgattacgtgatcaccgacatgacgcgacaaggtttccaaggatcccctggtttctctaccacccagcttgagcgaccagagccaggaacgctgcaagaggtggatatcatcttcctactccagcgagcttacgccgctgaacgcatcgttcatgggccattgaaagttgcagacgatgaagaactggtcgatgtactgatactaggtgatgaagtcactttacttctacaagcaaaggacagccccaatacagccgcgactcttggcaccaaactggagcggaaacgccgaaaggcgataaatcagctttcaactggcctctctcagctacgcggagcgctgactacgatacgccgagaagggaatccgagactcagacttgttagcggcgaggagcttgatatcgatctgagcaccaagccattggtaggcgtcgtcatcgtgcgggagcttttcacagatagctacgatgaatatggcgcgaagattctcgacttcatggacaaataccaaatccccgccctagttttcgattattcccagttagaggtgataactcgaaattgtccgtcagagccagaatttctgtcagcggtccaccagatatttgaatgcgtgagggatcaacgtatctacccgcgcctacggttcccggctcgaccgctacatgcaaggggtgaacagtag

SEQ ID NO: 333648 - DNA, 840 bp, Pseudomonas aeruginosa
atgctcactggcgtcacggttcgaatccgcctgctggtcctggcgctgctaccgctgacgatgctcgtcacggtcatcgcgatggcgctggccaacgccagtcgactcgatgccagcttccaggaccttttcaacaaccggatgaagcccatcagccagctcaagatcgtcgccgacgccgttgcggtcagcgtggtcgacgccctgcacaagtaccgtgcgggggtcttcgatgaagagcgcctgcagcaggagttgagtggggcgctgtcgcgcatcgagaagtcgtgggccgactattccgcagaccaccggactgccgccgagaaggaaatcatcgagtcgctggtccccaccctggaacgggtcaagcggatgaccctggcatacggcgagcaggccagggccggaagcctgcgaaacgtcgaggccggcacgttcaatcgcgagatgtatggtgcgttcgatccgctgggaaccgcgctgtcgacgctgatcgacctgcagctcagtgaaggcgccaagctcaacgagcagatggagaaacgctacgactccatgcgcaccaccttcctgctcatcggcgccgcagccctggtcctcatcgtcgccgcggcctggttcatcagcctgtcgatcatgcgcccgctttccgatctgcgcggggtgatccgccgcgtgcaggactcctcgaatctcacgctccgcgccgatgcgcgcgggcgcgacgaagtgtccgatacggcgcgcgccttcaatatgatgctggaagccagcaggcgctgcttcggcatctcgccgagacagccaggaagctcaccatcacctcggacgagatga

SEQ ID NO: 333649 - DNA, 690 bp, Pseudomonas aeruginosa
atgcgcatcctggtgatcgaagacgatacgaagaccggcgagtacctgaagaagggcctcggcgagtcgggctatgcggtcgactggtcgcagcacggcgccgacggtctctacctggcgctggagaaccgctacgacctggtggtcctcgacgtgatgctgcccggcctggacggttggcagatcatggaagtgctgcgcaagaagcacgatgtgccggtgctcttcctcaccgcccgcgaccagctgcaagaccgtatccgcggcctcgaactgggtgccgacgactacctggtgaaacccttctccttcaccgagttgctgctgcgtatccgtaccctgctgcgccgcggcgtggtccgcgaggcagagcaggtgcaactggccgatctgcatctggacgtgctgcggcgcaaggtcagccgccaggggcaggtgatcgccctgaccaacaaggagttcgccctcctgcacctgctgatgcgccgcgagggcgaggtgctgtcgcgcaccctgatcgcctcggaggtctgggacatgaacttcgacagcgacaccaacgtcgtcgacgtggcgatcaagcgcctgcgcgccaaggtcgacaatcccttcccgaacaagctgatccataccgtgcgcggcatcggttacgtctgcgaggagcgcccgtgcccgcccgccgctccctga

SEQ ID NO: 333650 - DNA, 429 bp, Pseudomonas aeruginosa
atgtggctgctgctcggcaacggcctgtgctacctcgcctacggactgtccagcgggcattttcgtcgcgacttcctgcctttgagcgcggccggcgtctggcgcgacctgcgcctcgccctcggcctgcgcctggtccatgagccgggccgctacaacgcggtgcagcgcctgctgtactggctggtcctggcgctcggtgcgctgctggtgctgtccgggctggcgatctggaaaccggtgcaactgcacgggctgaccgcgctgttcggtggcttccagggtgcgcgctgggtgcatttcctggccatggccggggtcgtcgggttcgtcgtcgtgcacctgctgctggtgctgttggtgccgcgcaccctgctgccgatgatcatcggacgcgagtggcggcgcggacggaggagcgaaggatga

SEQ ID NO: 333651 - DNA, 1098 bp, Pseudomonas aeruginosa
atggccagacaacgcagggctgcacctagcgacgatgccaagcgggaagctgaagctgccgtatccgtagttgctcggcaggttaaatttacggtagctgaatacccggtttctatgtatgtaagcagatttaccgatgatacgagtgaccgttattttgtgcccgaataccaacgcaatcttgcttggaatgatgagcaaaaatctcagtttatcgagtcgttaatcgtcggcctgccgattccatttatgttcttctatcagacagaagatggacgaatggaaatcgtcgatggttcgcagcggatgcgcgcaatgcggtcattcctcaggggcggcttgcgcttgcgcgaccttgttttggtccctgaactcaatggatttaatttcgatgatcttcgaggcgaccggaaaagaaagcttgaagatataactattcggacaattattctcgacacagaaaccgatccttcgacccgagcagaaatgtttgctcgcatcaaccggatggggacgaccgcgaacgaagctgagattcgtcgtggttctttgcctgggcctgtaacagatttgattgctgaactggctgagcatccgaacttcgtagcgcttaccccgttaacagccaagacggtcagccagcgcgagcgtgaggagttagttactcgattcttcgcttatttgaaccggaatgatactgatgcagggcggttcccaggatatcgcgatcgtccgaagaagtttttatatgactacatcaaggacgcgaattcatctgctacgcaaaaccctgaattaattgattccatgcggcaggagtttctgcggatgctggcattcgtagatagaaccttctcactgggtttcagaaaatctacgacagcaaatactgtcccgcgtgttcgatttgaagccattgctgttggctctgcgctggtgctgcgccacaaccctgatttcgaaatggatgccatcacggtcgctcagcgtatgaatcaagccgggtttgatgatgttgtcatttcggatggcgcgaacgtacgctctaagttggaagggcgtattgaccttgttgtagggatactgacaggacaatga

SEQ ID NO: 333652 - DNA, 714 bp, Pseudomonas aeruginosa
atgacatcgcttttgacgacattagaagaacgtaaagatgaatttgaaattcactttgcgttggcgcaggctttggatttacgcctcgtggaaggaagtccagtttctattggtgagacggcattgaatgttcgtcacttgcggacagtcaagtcaggcttgattgtgcatctatataacatcgtcgaggcagtaatgagtcgaacgatggaagaggtgggggttgcagttaaatgtattcccccggatagctggtcgaataatacgttaaaagaatggcttcggttcaatgcgtcaattgggctagatggtaacgaagacaccaggctcgatgttgttcataaggctgcgctgaagctgttgcggaaagagccgatcgatgaactggcttttaaaaagccctcgggaacttggtcggataaagtgatacttcagttctcgaagcgtttggatgtaaagtttcgactgactggagatattgcaagaaaaataaagcaagcgacgaagtatggcgacaaaactccactggagtttttggcggatagacgaaatgctattgctcatggtcgacgatcattcgaagatggtgccggagatctgacgcttcaggacataagggagctgtccgaaataacgctcagctatatggagtttgcaataagggcgtttcaaaagtttgtcgatgaacgaagttatatggcggctgaggcctga

SEQ ID NO: 333653 - DNA, 1065 bp, Pseudomonas aeruginosa
atgttagaaccaaagcagatatttgcagttgaccttttttgtggggccggcggccttacgtacggacttgaaagctcaggcatttccgtaaaattgggaattgatattgacccagcttgcgcccatccaatcgaacgcaattcgaaagctaagtttctgcaggcggacgtggcatcactggatcattctgtaatagatgcagcattttctggcgggcgctttaagcttcttgctggatgcgccccatgccaaccattttcgacatattctcggtctgcaaagcagaagcacggtgacaaggcgggagacaatcgaagcgaagattggcgcttggttgaacatttcggaagtgttatccgtaaaacccagcctgatgtcgtaacaatggagaatgttccacctttggcgcagcaggatgtttttcgggagtttcttgaaggtctagaagggtattgggtcgattggaaggtggttgaatgccacacaattggattaccccagacacgcaagcgtttggttttgctcgcgtccaagcttggtccaataactatccctgaatttgcgaagccgccaaaaacggtgaaggctaccattggtaacctcccggcaattgcggctggagagcacgatacgaaggatcgtttacaccgtgccagccgacttagtccgacgaatcttgaacgaattcggcattcgttacccggagggacttggcgagattggcctgatgatctccggtcttcatgtcatgcaaaggaaacaggggcgacttacccatcagtttatggccgtatggaatggaatgcgcctgcgccgacgataacaacccaatgcttcggatatggaaatggccgatttggtcatcctgaacaagaccgagcaatcagtctgagggaagcggcaatgcttcaaggttttcccagacgatactcgttcattcctgagtctgagcctgtaagttttgcgaaagttgggcgtttaattgggaatgctgtacctgtgactcttggtaaagtcttaggtgagttgattttcgaacatgtttcaaagtatgctgaaaattaa

SEQ ID NO: 333654 - DNA, 240 bp, Pseudomonas aeruginosa
atgaagaagctgtttgttggtctgttcctggctgcgtcatcgctgcctgtaggctttattgcaggggcattggcgtttcaatacgtgctgggtaccggttggcctggagcgatccagatcgcagcaaaggtagccgcgagcctgctgggacttgggttgtttgtgttcatgggggggatggttacgaaggagcaagcccccaaacctgcctcgaacagtcagggctgggggcagaaatga

SEQ ID NO: 333655 - DNA, 1548 bp, Pseudomonas aeruginosa
atggcacacaatcttgaattacagggcggcacctatcatgtaaggctcgcagtccccgccgatgtgcggcaggcattcggcggccgcaaggtgctgtcgcaatcactcaaaactggagtccaccgcgaagccatggagcgtcggcttccaatactggcagcctggaaagcccaaattaaactggcccgcgaaggtatccccccacccgaaggctggcaggacaaaatctatgccgtggtgacagcgcttgatgaacgcaaaagaagtcgaaagcttgcaattgttggtgagaaagtaccacatttggatacaggaatttcagagtcatacatcaacgagttcatgcagcaaaacccaagaactgttgaatgggcagaacgactactcgaagaatgtggcgaaggaatcgacggcaaactaaagcttcaggaatcactgcaccaaattgcaaggcaattcatacctcacaggatcaacgaaaaatacaaactagataaagaccagaaaatcgaactcagcgagttaatttcaaaccacaccttgtataaaccaaattcaccaatcaccaaatcccgcctagaaaaattccgcacattccgcgaaacccgaaatatcgccgccaaaaccattgatcaacagacctcaaaacttagcaagctatccaaatacctgacagataccggaaagcccttagattttgacgcgatatcagactggatggactcattaaatctctccagcaaaactttggcccaatatcttctagccggtaatgtcttctggaaatgggccatgaaatatgacgaacggtggcgaattgacttcaaaggcaaggcgaatcctttcgagcaacatgatttacctgtcatgcgagggagcgaaaggaccaccacccaaagacgggacttcaccctggatgatataaaaacacttcattcagcggctttgcagtctgagcaaaaaaacctagccgacctgatcagcttaggggtatatacgggagcccgcatagaggaaatttgcaaacttaccaaggaaaatttggtcacgatcgatggagttcagtgcttcgacatagccgacagcaaaacagctgctggcgtcagggtagttccgatccacccagcacttcaccatatagtagtcagactttccaaagattcgactgatggatatctcatccaaagcaaaagccgcaacaaatatggtatacgatcagatccatttgtaaaatcttttggccgacttaaaacatcactcggctttggcgcagatagggtatttcactccattcgcaaaacggtcatcacccagctgctgcgggcaagcattccagggatcataatcgctgaaatcgttgggcacgaaactgggaccgttatatttgatgtctatagccaaggtgcgtccatttcccaaaaatggatgcgctcaaaaaaatcccgacaatgtggtgattctcagcagtttcaaaaaatcagcttctgccaagcagcggtgtcagacaatgggtcaccgaaaagaaatctcgcgcagcggctgagttaa

SEQ ID NO: 333656 - DNA, 726 bp, Pseudomonas aeruginosa
gtgatccgaatgacgctggacgaggtccgcgagctggccgtgcgcatcctgcgccggcacgctttcagcgaagcccatgtacaggcggtggccgataccctggtggcgggggagcgtgacgaatgcgcgtcccacggtatctggcggttgctcggctgcatcgccaccctgaaggccggcaaggtatccgccgacgccgagccggaactgcacgacatcgctcccggcctgctgcgggtcgacgcccatggcgggttctcccagtgcgcattccggctggggctgccgcatctgctggagaaggcccgcagccagggtatcgcggcgatggcggtaaaccgctgtgtgcatttctccgcgctatgggttgaggtcgaggcactcaccgaggcgggcctggtggccctggcgaccacgccgagtcatgcctgggtggcgccggcgggcggacgcaagccgatcttcggcaccaacccgatcgcctttggctggccgcgtccggacggcccgccgttcgtcttcgacttcgccaccagcgccgtggcgcgtggcgagatccagttgcacgaacgcgccggcaagccgatcccgctgggctgggggtggacgagcagggcgagccgaccaccgatgccagcgccgcgttgcgaggcgccatgctcactttcggcgggcacaagggctcggccctggcggcgatggtcgaactgctcgccggtccgctga

SEQ ID NO: 333657 - DNA, 333 bp, Pseudomonas aeruginosa; identical to SEQ ID NO: 327160

SEQ ID NO: 333658 - DNA, 123 bp, Pseudomonas aeruginosa
atgcgtagagcactgaccgccctcggcatcatcgcagccctcggcctggccgtggtggggctggtggagatattcccgatcgttcgcacgctggcggcctggcagacggggtgcttcggatga

SEQ ID NO: 333659 - DNA, 867 bp, Pseudomonas aeruginosa
atgatgacgaaccagaaccaccccgacgatcatcttgcaattgaggcgctccacagccgctatctcaatgtcctggccggacgcaccagcgatcacctcctgatgttccaggacgaggcttacgcgcttggccgcgcccgcgggcggctggacgtgttccgtctcgacctgcacctggagcgccagcgccggttcagcgaacgcacgttcgggcctgggtcgcgcgccgctggcgtcgtcgaccacatccggaaggagttgcgcgagatcgaggagaaccctggcgacctggccgagtggatcgacgttgtgattctcgctctggacggtgcctggcgcaccggcgccactcccgcacagatcatcgacgccctggtcgccaagcagacgaagaacgaggcgcgcacctggccggactggcgcacggtgccggtcgaaaaggcgatcgagcacgaccgcactggggatgctccggccgtcgcttacagcgatccacggtcagggaaaatcacctggagcgccaacggagaggactggcacaacgaggatctctcagaactcatcaccagctacgacgagttgcaggcaggctccaccgtgtacttcggaacgaagcgctacctcgatcccgctggcttcgtcgatccggacagcctgatcagcagcatgaacgacaacgccagttgcagcgatgccggggaatgggtggacgactggccgcaggccagcaaggaagcaatggccgacctgggaagcttcctgcgcggctgggccagggcgaactgcccgccggacttctatctcgtcgacggggttaccagttacaccctgaccgaggccgatattaaggaggcgcgtggagaatga

SEQ ID NO: 333660 - DNA, 444 bp, Pseudomonas aeruginosa
atgaacactgagcagttcatccgggagtccgccgcgcgcgggctttcccgccgcgccacccggctggccctgggcatcggcccctgggtattccgcgaaatgctgaccctgatgccggagatcacctggccggcacgcggatgctcagccgaccaccagcgtgcgaacgagcagaagcgcggacgctgcacgccggcgcaggccgcggcgctggagcgcgcacacgaacgctggagcgagagccgacgcttcaccgtcgacggcgtgaccgggacgatcgccgagctggtggagcacttccagtgcccggtccacgcaacgaccgtccgccgccgcgtcgccgccggcatgagcctgcgcgacgcactcatcaccccgcgccagcagcccaagcccgggcgccggcatccctggaaccgctcacagcagcaggtgcagccatga

SEQ ID NO: 333661 - DNA, 939 bp, Pseudomonas aeruginosa
atgagcgaacccacccaactggagcagttgaagaccagcgccgttgcgaggtcaaccaacgatgcgccgatgtccctcctcaccggcgccggcttcgaccagatccagcgcgtcgccaaggcgctcagcgcgtccaccctggtgcctgtgcagtaccgcgccttcgccgaagtgaaagagcgcggcaaagtggtcggctacaccccgaacggcgccggcctgccgaactgcatcgtggcgatgaacatggcgcagcgtatgggtgccgacccgctcatggtgatgcagaacctgtacgtgatcgagggccgtccgagttggtccagtcagttcatcatcgcctcgatcaacagttgcggccgcttcagcccgctgcgttttgacctcagcgagcccggcaaagaggaagaggtcagctacgaggtgacgacctggaagaatggcaacaggacccaggaaaagcgcaaggcaaagatccgccatcgctcctgcaccgcctgggtgatcgagaaggaaaccggcgagcgcctcgacggcccgaccgtctccatgcagatggcgatcgacgagggctggctcaccaagaacggcagcaagtggctcaccatgccggaggtaatgctgcgctaccgcgccgccagcctgctcggccgcctgtacgcgcctgagctgctgatggggctgcagaccgtcgaagaggtcaatgactacatcgaaccgcgtgacaccgatatccagggtgaaaccgtgaccgtgcatgtcgatgatctccgagacaaagagccggcgccgccggctgtcgccgccgaagacgatggggacgagccctctccaatgccggacggcgtgaacaccgagacgggcgaaatcaccgaacccgccccgggccagcagccggacaccagcgacaccggcaccgacgagctcaacctcgagtaa

SEQ ID NO: 333662 - DNA, 228 bp, Pseudomonas aeruginosa
atggataccttcatccaacccaagatcaccggctaccgccagcttaccgaggctgaagccgccctcatgaacgagatcaaggccaaaggcgtcgagctgggtgaactggtcgagaaacttcgccagacccccgatctcgatcctcgctggattgcgatcggcaccaccgatctgcagacaggcctgatggcgctaacccgcgcggtagcccgccccaccaccttctga

SEQ ID NO: 333663 - DNA, 930 bp, Pseudomonas aeruginosa
atgagccgattcaagctgctcgacgcccaggccgccctgggcttcgtgctttcccagacctcgtacatcgagcgtcaggtcaacgaggtcgtgtacccggatatccagtatccgggcctgatccccgtcgacacctcggcgcccgagtggatcaagaccgtcaccttcttctccatggataaggtcggcaaggccgactgggtcaacggcaatgccgacgacatcccgctggccagcaccgagcgctcgaagttcgaatccagcgtgcacatggccggtatcggctatggctatggcctggaggagatcagccaggcgcagatgctcggcatctccctgacagccgacgatgccatggcagcccgccgcgcctacgaggagatggttgatcgtgtggccctgcagggcgatgcctccaagggcttctccggcttcttcaactacccgggcgtcaccgccgccagcgccgtaaccggcaactgggccgccgccaccgctgaccagatcctggccgacgtgaacaccgccctgaccctgcaggccgccggcacgctgtacaccagcttcgctgacaccctgctgctgccctacgacaagttcctgctgatctccaccaagaaggtgagcgatctggccaccatgccgatcctggcctacctgcagcagtacaacgtctacaccgcgcagaccggccgcccgctgaccatccgtggtctgcgcggcctgaacacggccggtgccggcggtaccgcgcggatgatcacctaccgccgcgacccgcaggtgctgaagatgcacatccccatgccgcatcgcttcctgccggtgttccaggccggtccgatccgatgggaagtgccgggcattttccgcctcggcggcgtggatatccgccgtccggcggaagttcgctacaccgatggtctctga

SEQ ID NO: 333664 - DNA, 456 bp, Pseudomonas aeruginosa
atggcgaaggtaaccaacaccggtcgcatcacccccattggtctgccgagtggtctcgtcatcctgccgggcgcgtctgaagacgtgcccgactgggaggaggtcaagaagcgcccgaacattgccttctacgtggccactggcgtgctggtggccgaggaaagcgagggcgagagtggtgggagcaccggcggcgaagcggcctaccgtgagcagctgttcgcggagctggccgccctgggcatcaatgctcaccccaacagtaagaccgagaccctcgtgtccaagctggcggaggccaagaagaaggcccagccccagacccagcctcaggacgaggctgcgcagaagcaggcgatgatcgcggagctggccgctctgggcgtgccggcggggcctgatgcgtccctggaagagctgcagaaggctctggccgagaagaaagcggccaattga

SEQ ID NO: 333665 - DNA, 1494 bp, Pseudomonas aeruginosa
atgaagctcctgcatgagtgcctcgtgcgcagtgcgcgcgagtatccgggcaatatcgccgtcgttgaccaggccggctcctgtagctatgccgaactggacgcgcgggccgaggcctatgccggcttgctggttgcgctgggggtggggcgcggagagcggatcctgctctgggcggaaaagtcggtggagttgccggcgctgatgcagggggccttgcgccagggcgttgtctatgtcccggtggatccgctgggaccggtgtcacggctggaaaagattctcgccgacagcggggcgagcctggttttttccaccgcgagtcgtctggcggatctggacgctctggaacggcgcccgcgtatcgtggtcctggacgatcccgcatgccccctgcactggtctcatgtggagctacccgccagcgcatccgccccggaggaaataggcgaacacgatctggcctacatcctctacacctcgggctctaccggcacgccgaaaggcgttgcgctgagccaccgcaatgccctggccttcgtggagtgggccaatgagcgttttgccttcgaggcacgcgatcggttttccaaccatgctccgttccatttcgacctgtcggtgctcgatctctattgcgccttcagccgtggcgcggcggtttgcctggttccggaaggcatcgccttttccccggcgctgttgacggcgttcctccaggaacagcggatcagcgtctggtattcggtaccttcggtcctgctcatgatgatgcgcgacggcaacctgctgcagtcttgcccggactccctcagagtcgtgctgttcgccggtgagccttttccgatcaaacacctgcgtgtgctccgggaagcgttcccagggctgcgcatggccaacctgttcggtcccaccgagaccaatgtctgcacctgttacgaggttgtcgcggtcgatcctgctcgtctccagccggtgcccatcgggacggctgcttccggcgacgaagtctgggcggaaaaggacgatggccggcgctgcgaggtcggggaggagggcgagctgatcgttcgcggccccaccgtgatgctcggctatttcggccagccggcggttaccgggagctatcgcaccggcgacctcgtcaggcaactggacgatggcaactacgagtatctcggtcgtcgtgacgacatgctcaaggttcgtggctatcgcatcgaacggggcgaggtggaggccgctctgctggcccatccgcgggtacgcgaggctgcggtgatcgtcgccggtggcggcatggacgccgcgctctgggcgttcctggtgtcaagcgatggcgaggcagtctcgctcatcgaactcaagcgtcactgcgctgagcgactgccgcgctacatgatcgtcgaccgggcgaagacgctagcggaactgccgcgcaacgctaacggcaaggtcgatcgcttcaagttgaaagccctggtggaggactga

SEQ ID NO: 333666 - DNA, 1404 bp, Pseudomonas aeruginosa
atggagacggtggtcccggtagaggcgtgtggactggtcaagcgcttcgccacccgcggcggcaccccgctagtcgcgctcgacgaggtcagcctgcggattccggcggggcggctcagcgccctggtcgggccggacggtgccggcaagaccaccctgctgcgactgatcgccgggctgatgaaggccgatggagggcaactgagggtactcgggctggacgttggcgccgaaccccaagccgtgcaggaccggatcagctacatgccgcagaagttcggactctacgaggacctgacgatccaggaaaatcttgatctttacgccgacctgcacggtgtggaacctggccagcgcaaggagcgttttgcgcgtctgctggagatgaccgatctttcacgcttcaccgggcgcctggccggccagttgtccggtggcatgaagcagaagctcggcctggcctgcaccctggtgcgttcgccggacctgctgctgctggacgaacccacggtcggcgtggatccgctgtcacgccgtgagctctggcagatcatcgagcaactgatcgagcaggagcggctgagcgtgctgatcagtaccgcctacatggacgaggcgcagcgttgcgcccaggtcttcgtgttgtaccagggcaacctgatcgccgagggaaccccggaagacctgagcgagcgtgccaaggacctgtgctatggcatcgagccggcagccggggtgccggccaggaccttgcaggccaggctgatcgatgaccgggagcatatcgtcgatgccgttcctcatggtggccaggtgcgtttcatccgctccggccatgcgtcgctcgaggagattccctcgctacacggagagcaggctgcgcagccgctggcggctcgtctcgaggatggcttcatggtgctgttgcgcgagcacgccagcgaccagggccagccctctccccaggcgcctgcggacgagccgggcggcgaggaggaactggagagcgagcgtcgcccgatcatcgaggtccgcgacttggtgcgcaagttcggtgatttcacggcggtcgccagtacctcgttcaaagtgttcaagggcgagatttttggtctgctcggccccaacggagccggcaagaccaccacctttcgcatgctctgcggcttgctgccagcctccagcggccacctggaagtggccggggttaacctgaggagtgcccgggccgccgctcggcggcgcatcggctacgtttcgcagaagttctccctctacggcaacctgtctgtccaggagaacctggagttcttcggcggggcctacggcctgttcgggggggcgactcaaggcacggctcgataccgtcctgcgccagttcgagttgcaggggcagcgcaatga

SEQ ID NO: 333667 - DNA, 927 bp, Pseudomonas aeruginosa
atggccggggattggttgaccatcgtcctgcgcctggcgctttatctggacctggcggcggcgtttggcgtcgccatgttcggactctatgctttgggcaacgacgagcgatcctcgacgatctcgcgccgctatcgcgtactcattggcgcatccgccgccatcggcattgtcctgtcgatgtggggcatgacggtcatggccaaggccatgtccggcgcccaaagctacgcggagctgtcaacgcacgttttcgacatgctcattacgggcacgcacatgggcatcgcctggtgcattcgcatcctggcgttagtgacgtgtgtgctcatcgccgtgttgcgcatgaattcaacactgcgttttgcagcgatggccgcttccagtggtgtggcgttggcgacccttgcatgggcgggacatggcgccatggatgacggcgtgcgcggatacattcatctcgcttcggacatcacgcacctctgggcggccggtgcctgggtaggcgcattgatcgcgttcttggtgcttgcggcgaacaaaccaaataccgggcaaggctcagtagagatcctgagccgaacatccaatggtttcgctcggataggtactgtgatcgtggcggcactcgtcgtgaccggagccctgaattacctgttgatcgctgggccatcgcttgatccgctcttctcaacgctctatggccgcctgctcgtaggaaaactcctgttgttcggaggaatgctcgcgctggcggcagccaatcggtttcgactgagcccaagtctggaggcggcattgagaacaggcaaccacgcacacgcggtcgtcaagctacggcagagtctgttcacggaggcgacattagccgttctggttttggcgagcgttgcgtggcttggcatcctttctcccaacggcacctaa

SEQ ID NO: 333668 - DNA, 279 bp, Pseudomonas aeruginosa
atgttccccgacctcatcacacccgcatccgacttcgagcaccaactcggagcctgcgtcaacgccatgagccaggaagatgccatcggccagatcctggtattcgagcgcatgagcggcacgctgcacatgcgccatatcgccagcgccgacctggtggacaccgacgtggacgactacgaaatggtcgtcttcgacggtggcaacacaagcggcgacacgtggaaacacgtgttctttccgcgtcagcgcgagcactacttcgtgtaccaagcctga

SEQ ID NO: 333669 - DNA, 348 bp, Pseudomonas aeruginosa
atgaagcctgaattggatgccctagaggcctggctcggacaaccgctgccggctgccttcgtcgccgctctggagcagcacggcggccgcctcgtcgagccggacctgctgctctacgccgccgacgagttgctggaacgcaaccgggccttcgaaacctctctctactgccccggttacctggccataggcgacgacagcggcggccgcgccgtggtgatggccctggacgaccattggcaggcgctgttcctggtcgaccatggcgcgatgaccccggactgcttcgaacccctggcacccagcctggaggcctggctggaagccgggccctgcctgcccgaatga

SEQ ID NO: 333670 - DNA, 429 bp, Pseudomonas aeruginosa
atggtcggtgtgagcttgcttaccgggctttcccatgactacgagtcgagagatcgactgaaagaagtcatcaaggatattaaaaagcacattgatgccgcactggagcgggaacccgacttgattcaggccctgtcgcaactgtcggacgaccagtcgattcgtattcttacggtgcataagagcaagggtttggagtttgactctgtgatcatgcttggcgtggaagaccaggcttactggggcaacgacacccatgaaacacgctgcacgttctttgtcggagtatcacgcgctaaaaggaggctggtggtaaccacggcccagactagggaaaaccttggcaacatcagcagttggcgtatcaggcggactcctcacgctgaatttctatcgtacgtctcaagctggcagactgaagaacaataa

SEQ ID NO: 333671 - DNA, 576 bp, Pseudomonas aeruginosa
atggatctctccgccctctccttcgagcaagctttctggcatctcagagcctggatcgagaattttcactatgtcgttttgcaaacgcaaaagctgtggctgcgaccgaaaattgcggtaaatgttgagatgggctgccgcgaagtcgctttcaaatttgccgaatacaccgtcaagtgcacccgcccaccccatgattttctgcttcacatcaccaacggcggtgacgcgacgcgttgtacctgcaaatatcttgctgaccagcgcgtactgctcatttgtacagtcttggaattcatcgagaaacacatcgctgtaggtctgcctgagggcatttaccgccatcgggtaagcatcaagaatcttgagtgccagcggaataagaagaccaaactcggtctgaacaggatgggccttacccctgggtaccacttggaacccagcgtccagtgcatcatcgccggtgagaaccggccgaaatcgctcaatgatccgtttagcgaatccgtgaaacgtatagctatcgaaccgattagcgtatccagctccacaccgaagccagacccgctcttttaa

SEQ ID NO: 333672 - DNA, 1956 bp, Pseudomonas aeruginosa
ttgaaacttcagcacatccgcgtatgtggcttccaatcgttcggatcaaaaccaatcactattgatctggaaaacctcaccttcctgatcggcccgaatggctcaggcaaaacagcaacgctgcaagcgctctgtcggctcttttcgtttgaccccaatcaacgacgcgtacgtagatccgacttcttcgtccctcacgctgaggaagaggtgcctgacgagcgggccctctggatcgaggccgaattcacatttccagagctggaggatgcagcaggagagcatccgaccataccttgccactttgggcacatgcgcctggataatccagacggggtacctcgcgtaaggtatcgcctggacgcttcgatcggcattgatgacgagatcgagcaaggccttcgctatgtcctggatgtcgatgaggctggtgatccggtcgataccgtgccggtaccccgggatgagcggaacttcatccaagtacactaccttccagctcgtcgtgacccagcagaccatatcgcctatggcgccaacgcccttcttggacgcctactgcgggcggtcaactggtcagcccagcgcgaaaccatcaagcaattgaccgcggacatctcgcaaagccttaccgacaacgactcagtaatcaacctcagtgcagggctatctaaaacctggagggagctccacaaggggcaattcttcgcgagtcctagtgttacgtttattgccaacgaaattgagtccttgttgcgacatctgtctgtatcgttttcacctggtcatggtgaacagatggtcgatttttcgcggctcagcgatggtcagaaatcgatgctgtacctgtcactggttttgtcgtcgcaggctgtggggcgggcagtgctcaatggagatgatgagtccttcgattcggataagctcaggccagcagtcttcactattgtcgccctagaggaaccggagaatagcctgtctcctcactatttagggcggatcgtttcctcgctcaaaaccctggtgggcagctccgaatttgcagacgcccaggcattgatcgccactcatgccccatcaatgttgagacgagtcgagccgactgctatccggtacttacggttggacgagtcgcgttgcacggtggtgaccaagattaaaatgccgcccaacgaaaaaggcgcggcatacaagttcgtgagggaggctgtccaagcctacccagaggtctacttctcccgcctggtgatcctcggggaaggcgacagcgaggagatcgtgctgccccgcttgctcgcagccaaggggttattggtagacgaagctgccattacgatagctccgctgggcggccgtcatataaaccacttttggcgacttctcagtggattggagatcccttacgtcactcttctggatcttgacgttgcgcggtttgggggcggctggggaaggatcaaatatgtcgctactgaactaaaaaagcataggcctgatgatctctacttgtcggaagatgagttggcaaagctgcccagctggaacgatcccacctttaaaattttgaaggctgaaaaggatcccaacttcaaatcctgcattggtgatcttgagccgctgggggtgttcttctcggccccaatggatctggatttttcaatgataaaggcttttccccaagcttacggattgacggccgataaactggttgcaccgaagctcactcaaatcaagtcagtgttgggggacagtcattttgatcctaagcaatacacattgactgagcgcaagcacttcaatgcctaccacaagctcttcaagctcgacagcaaaccgaaatcgcatattgaggcgctctccaagctcaccgatgccgagctcaaaaagtcgatgcctgcatcattggcacgactggctgatttcgtcctcgccaaggtcggggctctacaggaatga

SEQ ID NO: 333673 - DNA, 369 bp, Pseudomonas aeruginosa
gtggccctgaattcgcagtttcatgacgtctacctgtccatgccgatggaggccaccttgcagcctgagctccaaggcttttcatattgggggcggacagttcacgaggttctccaagaggtaaatccgctccttatgcgccggctggcggaaggccagaggctacaggcctatatcgagcggaagcaggaccatctccagggggcggctgcgcgacttgaacgtgagtggcgacggctaaacccgctgggtgctgataccggctacctggctcgcgccaattggcaacggcactgcaagctggcggtgagggagctgctgattgatgagctcgccaagagcctgatcggcagcactgcagatctgtag

SEQ ID NO: 333674 - DNA, 1920 bp, Pseudomonas aeruginosa
gtgaaccagcaaaacctcgccgacttcatctggaacgtggccgacgtgctgcgcggcgatttcaaacagtccatctacggccgcatcatcctgcccttcaccttgctgcgccgactggagtgcgtgctggagccgactcgtgacaaggtgcgcagccggtaccaggcgatgaaggccagcggcgtggacatggacctgattctgccgaccacggccggcgccaccttctataacgtctcgcagttctccctaggctcggtcggctccaccagcactcgcgccaacctggaggactacatcgccaagttctccgccaacgcccgccaggtgttcgagcatttcgccttctccgactggctcgttcagctcgacaaggccaacctgctgtacctggtgacgcagaagttcgccagcatcgacctgcacccggaaaccatcagcaaccacgagatggggctggtgttcgagcacctgatccgcaagttcgccgaatccgccaacgacaccgcgggggagttcttcaccccacgcgatgtggtgcgtctggccaccaccctggtgttcgcccccgatcatcaggcgctcaacggcgaaggtgtggtgcgcaccgtgtacgactgcgccgccggtaccggtggtttcctgtcgtcggccatcgagcaggtgggcgagtggaaccccaatgctcgcctggttccctatgcgcaggaactgaacccggaaacctacgctatctcggtggcggacaagctgatccagggcttcgagacccgtaacatcaagctcggcaataccctgtccaacgaccagttgccccatgagcagttcgactactgcctggccaacccgccgttcggcgtgaagtgggagaaggtgcagaagcaggtgcaggacgagcacagccagcaaggctacgctggccgcttcggccccggcctgcctcgcgtgggtgatggttcgctgctgtttctcatgcatctgctgtccaagcgcaagcccatcgagctcggtggtagccgcatcggcatcgtgctgtccggctcgccgctgttcaacggcggcgccggctcgggggagtcggagatccgccgctggatcctggagaacgactggctggaggcgatcatcgccctgccgaacgacctgttctacaacaccggcattggcacctatatctgggtgctgtccaaccacaaggacgcgctgcgcaagggcaaggtgcagctgatcgatgccagcgccatgcatgcgccgatgcgcaagagcctgggcagcaagcgcaagtatctgtccgacgagcagatcgccgagatagccaagctgcacgaggccttcgaggaaggcccgaactccaagattttcgccaccgccgacttcggctaccgccgcataaccgtcgagcgcccgctgcgcctgcgcttctcggtgacgtcggacaagctcgtcgcctacgaaaacaccaagggcgccgatcaggccgaggcctttggcggcgtgcagggcgagttcgacaacctgccggccttcctcaaggccgccggcatcaaaaagctcggcaagggcgcgctgaaagccgcgctggcctgctttggcgagcgcgatgccaatgcccagccagtgctggacgacaagggcaacctgcaggttgactccgaccttcgcgagttcgagaacgtaccgctgaaccagagcatcgaagactacttcgcccgcgaagtgctgccccatgtgccggatgcctggatcgataccagcaagcgggacgagaaggatggcctggtcggcattgtcggctacgagatcaacttcaaccgctacttctacgtctaccagccaccgcgcccgctggccgagatcgatgctgacctcaaggaggtggaagccgagatcgccgcgttgctgggcgaggtgacggcatga

SEQ ID NO: 333675 - DNA, 1053 bp, Pseudomonas aeruginosa
atgatcaagtcaggtgcgaccactggcgtgacggcgatagtcgacacagatgaagagttcaacatctggtctccgcttgcagtcattcgctgtggtggacgctccgccccttactttgtcctgaatttcatgcgctcgcgaagctttcaggaagctgtaacgctaagttggagttatggaactcagcagaatatcggcatgggtgttatcggcaatcttgcagtgacggttccgccacaagaggagcaacaggtaattgcggcccacctagaccgcgaaaccgcccgcatcgacgcactgattgaaaagaaaacccgctttatcgaggtgctgcgcgaaaagcgcgaggcgctgatcacccatgccgtcaccaagggactcgacccgaacgtgaagatgaaagactccggcgtggagtggttgggggaggtgccggagcattgggctgtctgcaaactcagcttccgctattcggtcgagctgggaaaaatgctggatgaaaaaagaattacgagcaccagtctgatggcgtatctgcgtaatcaggatgtgcaatgggatgcggtgaatgcggaagatttgccggtaatggacatttatcccgaggagctatcgcgttacaccgtgcgtgctggcgatctccttgtgtgcgaagggggggatgtcgggcgcgctgcaatctggcgcggcgaaaatgatgtgattggctaccagaaggcgctgcatcgtttgcgccctcgtaatgatgcaactgatacagcggagtttttcttcttcgctctgatggctgccaaggcgaaaggagtctttgaggagtcagactccaaagccaccatcgcgcacctgccggccgagaagttccgccagtatcgttttgcattcccgccagcacatgagcagcgcgagatcgccggccacatacgcacccatacacaacgtttggataaggtcttaataacaacagagcgcagcatcgaactcctaaaagaacgccgctcggctctaatcaccgccgccgtcaccggccagatcgatctgcgggaggcggtatga

SEQ ID NO: 333676 - DNA, 942 bp, Pseudomonas aeruginosa
atgagccagggtcgcagcctgcgcctgtttctggtggacggcacgcccaacggcttgctcaccgccgagatcatgaactggaccggccacgtcttgacgggacctaggtcgaagcttgccgaactggtacagcgccccgagtgcgcgcgcaccggcgtgtattttctggttggccccgacccggacaacagcctgcgctcgaaggtgtatatcggtgagtcggacgatgtggccaagcgcctgaaaacccataaccgcccggaagatgcgggcggcaaggacttctgggagcgcgtctgcctggtcaccagcaaggatcagaacctgaccaaggcccatgtgaagtatctggaaagcctgctgatcggcatcgccggcaacctcgggcgctgcgagctggtcaacggcaccgcgcatgagtacatcagcctgcccgaatccgaccgcgccgacatggccttcttcttggaacagatccgcaccgtgcttccggtgctgggcttcgactttctgcgagagttgagcaggcctacgacaacagctctcaccgcgaccaacccggtcagcgtttcaccgatattcaccatggctgcccaaaaatatggcgcaagtgccacggctcaggaggtcgatggggagttcgtggtgctaaaaggatccactgctcgtggcgagtggggaaatgcccctcacagctatgaaggccttttcaagatgcttgtagccaatggtgtgctaaagccgacagaagacacccgtatggttttcgctgaggactacgcgttcagtagccccagcgccgccgctgcggttattcatggtcgtgctgctaatggccggctggtgtggactgtgaaagaaaccggtgagacctacgctgcatggcaggatcagcaattgaattgccctgcgctgtcggaggggattgaagcctgtgaatga

SEQ ID NO: 333677 - DNA, 1683 bp, Pseudomonas aeruginosa
gtgaatgaagccagtctgcaacagtacctgcttgagcatttccccaaggagaatgccgcctgcgagtggaaggagttcaagaacctgcgccatgccctagtaggaagcgcaggcagcgacgtgatcagctatctctcggccatcgccaatatggaaggcggacatctggtgatcggcgtggaagacagcacgctgcgcatcgtgggtattcatgacttcaacaaccagacggtcgataacgtgcgtcaacgcttgctggagcgctgccgggcgctggactcggaaggcttccgcgtcgagccctttaccacggacgacaccggcaagacggtgtgggtgttccatatccccaagcaccggccgcggatgccggtgtatgcccatgacaaggcttggcagcggctggatgattcgctggtggaaatgcgccaggaacgactggaagccattctgcatgagccgctcgatgctagtgactggtccgcgcagattgtcgatggcgcaatgctgaacgatctggaccccgttgcgcttgctcttgctcgggagaaatttgccgagaagcaccgtaatgctgctttcgcccaggatatcgccgagtgggatgtggatacctttctcgataaggccaagatcacaatccagggcggtataactcgcacggctcttttgcttctcggcaagccagaggccagtcacttcctgccggcactggcgcaaatcacctggaagctgatgggtgaggaacaggcttacgagcacttcggaccaccctttctgctcagtaccacgcaggtactgcaccgcatccgcaacattggctacaagctcttcccacaaaatcagctactggccaccgaggtcagcaagtacgacacccgggtaattctggaggcgctgcataactgcatcgcgcaccaggactatcagttgcgctcgcgtattctggtgaccgagcgtgtggaccggctggtgttcgagaatgccggtggcttcttcgaggggcagcctgaggattacttcagcggggaggtgacgccaagccgctaccgtaatccctggctggctcaggccatggtcagcttgagcatgatcgataccatgggctttggtatcagcaccatgacccagtcccagcgcaagcgctacttcccgctgcccgactacagcaagtcgagtccggacaaggtagtgctggagatctacggacatgtgatcgatgagaactacacgcgcctgctgctggagcgacaggacttgccattgaacacagtgatgttgctggaccgggtgcagaagaagctgccgatcaccgatgacgccgctgctctgttgcgcaagcaggggctgatcgaggggcgcaagcccaactactacccggccgcgcaagtggctcaagcaaccggaaacaagggcgaatacattcgcaatcgagcctttgatgacgcgtactacaaggatctgatcctcgactacctgcgcaagtttggctctgccagcccgcatgatttgaagggactagttttagacaagctttcggatgctttagacgagaagcagaagcagaacaagttccgtaacctgctgaatgccatgtcgcagcgtgatcaaaccattgaaaaacaaggcagtcggcaaactggtcgatgggtactgtctggctccaatcaagacaaggtttag

SEQ ID NO: 333678 - DNA, 3183 bp, Pseudomonas aeruginosa
atgagccacatccaccacgagtgcgaactggaacgccatatcgtcgagcagcttgaagctgccggctggctggtgggtaagtccgccgactatgaccaggggcgggcactgttccccgaggatgtgctgggctggctggaggacagccagcctgctgccatggacaagatccgcgccatgaatggggcgggcactcgtgatgtggtgttggatcggctggtcaagcagctggagaacaaggccgatggcggtacggtgaatgtgctgcgctacggctttgccgtagccggtggcggcaccctggtcatgagccaggccctgcctgaggacgggcgcaacgacacggtgatcgcccgctatgcggccaaccgcctgcgcgtggtgccgcagctgcgctactcgttggacaaggctgacgagatcgacctcgccttgttcatcaacggcattccagtagccacggtggagctgaagaccgacttcacccagtcagtgcaggccgccatgcagcagtaccgcatggatcgccgaccggaacgcaaaagcggcggcctggagccgctgctgagcttcaaacgcggcgccgtggtgcacttcgccatgagcgacagcgatatccgcatgaccaccaagttggcgggggattcgaccttcttcctgccgttcaaccgaggtaacgatggcgccgccggcaacccgccgggcgagaacggccactacccggtgagctacttctgggagcgggtgctgcagaaggataactggctgcacatcttccatcgctttgtgctgcaggagcgcaaggaagcccaggacgtcaacggcaagatctacttcaaggaaggcctgatcttcccgcgcttccaccagtgggaaggcgtgaccaagatgattgatgcggtgcacctggaaggggctgggcagccctatctgatccagcacagcgcgggctccggcaagaccaacaccatcgcctggaccgcgcattcgctgattcgcgtgcgccgcccggatggtgaaccgtacttccacagcgtgatcgtggtgaccgaccgccaagtgctggaccagcagctgcaggatgccatccagcagatcgaacatcaggccggcgtggtctgcgccatcgaccgccagcagtcgagcctgcctaagagccagcaactggccaaggccatgctcgatggcgtgccaattatcgtttgtaccctgcagaccttcccctatgcgcagaaggccatcctcggcgagcagagcctgcgtaatcgccgcttcgccatcatcatcgacgaggcgcacagctccactgggggcagcacggctgatgacctgcgctatgtgctgaccgggcagagcgaggcggagtgggagaagttgtccaaggaagagcggttgtccgtgtggcaaagctcgcgtagccgacccggtaatgccagctacttcgccttcactgccacgcccaagcattcgacactgagtctgtttggccgcccgcgtaatccggcccagaccgtgagcactgacaacccgccggcaccgtttcacctctacaccatgcagcaggctatcgaggagggcttcatccttgatgtgctgaagaactacaccagctacgaggtggcgttcaaaatcggcagcgaggtggtcgatgacaagcgcgtggatgagaagagcgcggggcgcaagctggccaagtggctgtcgctcaacccggtgaacgtggggcagaaggtcgagctggttgtcgagcacttccgcaagaacgtggcgcacctgcttggtggccaggccaaggccatggtggtgaccagctcccgtgcggcagcggtgaaataccacctggcgctggaggattactgcaagcgcaagggctacgacaacgtgcgggtcatggtggcgttctccggcgaggtgcccaacacggatgtagaggagcccagcctgcccaaggatcaccagttcagcgaaaccaacctgaaccccggcctgaatggtcgagacatgcgcaaagtgttcgataccccggactatcgggtgatgatcgtcgccaacaagtaccagaccggcttcgaccagccgaagctggtggccatgtacctggacaagaaaatatccggcgtggaggccgtgcagacgctctcgcgcctgaaccgcaccttccccggcaaggacaaaaccttcgtcatcgacttcgccaacaaggccgaagagatcctggcgtcgttcaggaccttctaccgtgatgcccaggtggcggacatacaggatccgaatatcgtctacgacatcaagcagcgccttgatggcatgttcatctacgagcaggtcgaggtcgaggcgttcggcgatgccatcgtcgatccgaaggtgacgcaccagaagctgttctcgctgacccaggcgcccaccgaccgcttcaacggcaagttgaagacgctcaacgacgccatcgaccagtgggaaaaggcctgggagaaggcccacgatgagggcagcgaggaggatatggagtacgccgacgtgcagcgctcggagtactgcaaggcgcgcgatgagctgatgatcttcagcgagagcctgaccaagttcgtgcgcagctacgagtacatcgcccaactgatcgatttcggtgacccaagtttggaggcattcgccagctatgcgcgtctgttgcgcaagcggctcaagggcattaccgccgagcaagtggacctgggtgatctaaagctcagccattacaggatcaagaagggtagcaatctcagtggcgtggccgtgcagggggaaacccccggcctctacggagtgaccgacaacggcctgcgcgacgcccgcgatcgcgagaagaagtacctcactgaactgatcgaaaagctcaacaatgccttcggtaaggacattaccgacactgaccaagtggcgtttgccgtgcatgtttctgagaagctgcgtgccgacagcgtggtgatggcccaagtgcagaacaacaccatggagcaggctatgaaggctgacctcccctcaaaagcgatctctgccatcgctgccgccatgagcagccacaccagcatggcgaccaagctgctcagcgatgagtcgacgcgggatgtgttcctgacggtggtgtacgagctactgaagaaggatggggggacggatttgctgggcgcagcacgagattga

SEQ ID NO: 333679 - DNA, 828 bp, Pseudomonas aeruginosa
atgaaactcatattctcccgcaaaggtttcgactcctccgccggaggagttcctagcccgatcgtggaggggcggccaatctcgttccccatccccacacgcatgccgacgcctattgccttcggcgatctcgccgagccgatcccgacgctcattgaggagctcacccgaggccgtcacacgagaacaactccatgtcatctcgatccagatattgattccagcatgcgcccgcgcttgcctggatggcgcggcgcgctcggtcagcttgctacagctcagagccatctcctcgggcaaggtgtcggcgtcggcgatttgttcctcttctgggggctgttccggccggtgacgcaaatccacggccactggtcatatgaagggcaacgcgagcatcgcgtatttggttggctgcaaatcggggaggtcttctctctgggtgtcgatggaacacacgcggctaagcgctatccctggcttgaagaacacccgcacgtccgagccggctggacggaaaacaacacgctttatattgctgccgaccgcctaacgctggacggtcgcaaaactcatcgcccaggcttcggcctgttcaatacgggcttccgactgaccgagagtcatgccccgaatccgtccatttgggcggtacctgactggttgaacccagcgcgcggtggagctggcctgacctatcatccattgccgcgctggtcgtcgtccgggactctgagggccgccgcacgtggccaggagttcgttgccgacatcacgaatcgtgccgatgcgctcgcatggctcgatcagctctttgcgcaggagacatga

SEQ ID NO: 333680 - DNA, 1743 bp, Pseudomonas aeruginosa
atgtctctatcaaaaacgaaggagcagttggtccgcttgctagggcaggccgataacagcgttatcgcgctgtcgggcaagtggggcaccggcaagacgcatctgtggaacgaggtcaaggctgcatcggccgacgagaaggtcaagaaggccctctacgtgtcgctgttcggcctatcaagcgtcgaccaggtcaagcgcaagctgatcgaatcggcaattcctggcgtcgaatctcacggcggcgtgttcgacggcatcaagaacctctttaacgcaggcatgtccgccgcctcgcagcactacaaggcgatggccgctatcaaggacctcaacgtgttgttgatggccccggtggtgctccgagacaagctaatagtcatcgacgacatcgaacgcaagcacgcaaagctcggtatcgacgaggtcctgggcttcatcgacgactactccaagcagttccacgtgaggttcgtcttagtgctgaacgacgaccagctatccacggatggcgaccaggcgaagctgtgggcgaccttccgcgaaaaggtcatcgacgaggaagtccggctgtcgacctccccgaaagaggcattctcgattgccatcgagctgacgccatcgaaatacgcgcaggagctggagcgagcgattgcgatctgcggactcaccaacatccgcatagtgggcaaggtggtgaaaaccgccaaccagatcttgactggccgagatttggaccaagcgatcctggcgcgagttgtaccctcgatcgtcctgttttccgcgatccattaccgcggcatcccagacggacccgacctccagttcgcgctgaacgtggcgaacccggactggatgcatttcggccgggacaagaacacagagccgaccgagcaggagaagcgcgaggaccgctggcgtttgctcatgcaagaactcggcgtcctcagctgcgacgagttcgagaaggtgctcgtcgaatttttggagtccgggctgttcgacgcggaccgggtgcgggccatcatcgaccgattcgttgccgagacgcaggcgctgcaagccaggcacgcggcgcacgacttcttgaagcgggcgttctgggaccatcgggtgagcgacgccgatctgctggcggaggccgaccagttccctgccagcgccgaattgctggatccctacctcgcgactcagctcttcgacactctctccaagctccccaatgggttggcgcttggccaagcgatcgtcgacgcgtggatagccgccttcgaggcaagggatgaccactatgtcgaggacgacaacccgttcaacaaccctatccatccggacatcaaggcggcgttcgatgctgccaaggcgagcatccaagcgagcacgacgttggtcgaaacctgcatcgacatcatcgataaccgcgggtggggcacactgcaagaggtggtcatgaagcgggccacggtcgcggatttcgatgccgcaatacgaggcatggacatagattcgctgcgtcggttcatgcggaggatgatcgatatgcgtcttcagcgggcgaccttcgacgctcacttcggcacggcgacccagcacttcattgacgcctgccgcgcgatttcgaacgactcgaatgcccctcggctcgcagggttgatcaagaagctattcgccagtaccgcattggcggcggagctcaccccgccaccagccgtacaagctgaacctgttgtacaggctgaatag

SEQ ID NO: 333681 - DNA, 225 bp, Pseudomonas aeruginosa
atgtcatcgactgaggcgattctgctggatcaattcaagacaccgctgatttcgctagagcaagtggccaggattctcaaccgaagccctgatggcctgcggatcacgctgagtggcgacagcgaattggctcgcaggctaaagccggctaggaagcggtttggtcgacgggtgctgtttagcgtcgctgagctggcgcgattcattgacgagtcgcaagggtga

SEQ ID NO: 333682 - DNA, 810 bp, Pseudomonas aeruginosa
atgagcgatacggtaatcgtacggcgacgggtagagagcaacttcacaacgcttccgaatgagctcatccgagataatcgcctctcctggaaggctgtagggttgcttgtctacttgctcgctcacccggccaacttccgcctcaatttagtgtatttggcgaagcagcgaccgagtggacgtgatgccaccagatctgcactgagagagctggaggcgacggggtatgtctctattgagcgcagccacgacagcaggggccggttttctacgaccacgtggatggtttctcagactccggattttgggcgtgatccaccatgttcgggaaatccgcatacggtaaatccggcaaaggaaaacccgaaggcggaaagtccggcgtcgggtaagccgacgctaataagtattgaaacagaacaaagatctataagaaaaagaactactacaacaatgccggcggttggggcgctcgagcgcccagtcggactgacggatagatactgggcggcgatagaagaagctttggctgcgctgcctcttgaggatgcccaagcgctgcttgatgagttggcgcaggccatcaaagtgggggcgatcaagacaacaccacttcgctggttccatggtgtgatgcgtcgatatgcagaggggcggtttacgccctcattgcccctgaagcagcgcactgcatctctgagtagaacgagtacaggaccgagcacaaagccagagcctgatagaggaatcgcgaacgagtgcttgcagcagatgaaggctacaacctctcgggtgcgccttggccaatga

SEQ ID NO: 333683 - DNA, 234 bp, Pseudomonas aeruginosa
gtgaaagcgaccaatcgcctactggctgatttcgaaaagcacactcgcttggggcctacgttcgccgccgagctgctcggtgtcgcctattcgacgtacaaccagtaccgcaatttcagtcgagctaccccaaagtacctccagcgccatatccaggccgtccagctactgccggagtcggctctccaatctttgataaaggagcatgtgcgcgatggctggcaggccagatag

SEQ ID NO: 333684 - DNA, 576 bp, Pseudomonas aeruginosa
atggctggcaggccagatagcaaggtcatggacgaggggacaaaagagatcctctttgagggagcgagcatttcgcagctcggacggctcttcggtatggacaaccggacggtgaccagcaagctcgccaccaacgtacaaccagtggggcgccgcgctggccactcaatctatgcagtcaaggatgcggcgccgtacctcgttgagcagaacctcgacctcagcgacctggagaagatcgccgcgtatgtgcagcggctggacccttcccgcttgccgcgtcagctgaccaaagatttctggcaagcgatgttgaacaagcagaagttcgaagaacaggccggtgatctatggcggaccgcgaaggtcgttgaagtctatgcggacttggtgaaagccatccgtacacccctgatcctggcgggtgacaccgtcaacaaccagaccgagttgagcccgcggcagcggcagatcctcaacgaggtaattgatgacctattggagatgctgcatgaggcagtcgttaaacagttcggcgaagatgaacagccgccggaggcggacgacgacctatag

SEQ ID NO: 333685 - DNA, 2040 bp, Pseudomonas aeruginosa
atgttcaatccgcccgagcgcctgtccgtcgctgaagcggctgcgaagtaccgctacctgaataaccccggctcgttccgaggttactggcgcaacgataaagctccatacctagttgaaccgatgaacgagcttgattctcggttcttcgaaggggtgattttcgtagggcctgcgcagtcagggaaaactgacgccttgattttgaactgggtattgcactcagcgaagtgcgacccaatggacatgatcctctataacccgtcgacagctgcggcgcgggacttctcgatgcggcgtatcgaccgcttgcaccggcatagcccggtaatggaggagctgctgctgaagaagcgggacgccgataatacgttcgacaagcactacgtcaacggcatgatgctgacgatgtcgtggccctccgtggtcgagtttgcaggcaagcccgtcccacgcgtggggttaacagacttcgaccggatggatatggacatcgaaggtgatggtaatccgtatgatctggcagcgaagcgaacgaccacgtacgggagttaccgcatggcgctggcggagtcatcgccgtcgaagccgctactgaacccgcgatggatccgcaccagtccccatgaagcgcctcctgcagacggcatactcgccctctacaatcggggggaccggagacgttggtattggccgtgcccacactgcaacggctacttcgagggcgccttcgagctacttgagtgggacgggaaaaatcgtcagggccagaagctagacccaattagcgcgtcagaatcggtgttcatgcgttgctcccactgcgggcatccgattcgcccggactggcgccacgagatgcagcagtggggtatgtggctgaaagaaggcgaagggatcgacgcgaagggtaggcgcttcgggcaaccccggcgaacgaagatcgccagtttctggttaaacggagtcgccgcggcgttcaccaactgggcggaactggtgcgtctctgcttaacggcggaggaggagtacgcgagtacagggagcgaggaggcgctgaagaagttctacaacaccgatttgggtgtcccgtacatgccgaaggctgttgattcagaacgtctccctgaacatctgcatgctcgcgccgaagagctgggcgagaaggttgtcccgctcggtacgcgcttcctagttgccaacgtggacgtgcagaaaaacatgtttgtggtccaggttcacggtattgctcctgggacccccttcgacatgtgcctggtcgaccgcttccaaatccggaagtcgaagcgcctggacgatgctggggaccatctctgggtgaagcctgccacgtatttggacgactgggacctgttgatcgaggacgttatggaccggagttaccctcttgctgatggctccggtcgccggatggcggtcaagttgactacctgcgactcaggcggctactcgaaggacaagggagagtctgtcacgtcaatggcctatgacttctatcgcaggctgaagcgcgaaaaccgccacggccggttccacttggtcaagggtgaccccagccccggagtccctcgggctcggatatcgttcccggacgcgccgaagaaggaccgccattcggctgctcgcggcgatgtccctgtgctccttctgaattccaatgttctcaaggacgcgctgcacgcccgtctggattgcatcacgccagggcatgggatgtaccgtttcccggattggctcccggactggtggtatcaggagatgtgcgcggaggaccgaacagcgaaaggttggttgaagcgtccgcataccaagaacgaagcgtgggacctctcgtactactgcatcggagtctgcgtctcttcgttactccttgttgagaaaatggactggcaaaaaccaccagcgtgggccgatgagtgggacaggaactctctagtgagtgcgccggaagaggcccctcgctttgctccgcaaaaagagacttacgacttcggcaagttcgcgcaagccatggcttag

SEQ ID NO: 333686 - DNA, 231 bp, Pseudomonas aeruginosa
atgtcgtgtggaaccgaaccaaccctgcaagacctggaagaggcccgtcgggcctaccaggcgctcatccaaggcaacaagcctcgcgtgatcgttgaccagaatggtgagcgggtcgagttcactgctgcaaacgcagcgcgcctttatctgtacatacaggagttggagcggaagctctgccccgctggcgtgcggcgcccgaatggaccgattaggttcgttttctga

SEQ ID NO: 333687 - DNA, 1542 bp, Pseudomonas aeruginosa
atgctttggtatccgcctgtgcgctctccggaccaagcgatcaatggcggtaaaccgcttgcagacgctcgcgggcgcgacattgtccagaacgacggatatgcctccggtgctgtcgcgctcaatcaagacaacatcgttggcgcccagtaccggctgaatgcccagccgaactaccgtgccctcggcgtgagcgaggggtgggctgaagacttccaagaggtcgtcgaggcgcgcttcaacgtgctcgccgattcacaggattgctggctggacgcatctcgccgcaacacgctgaccgggatggtgcgtctggccgtcgcgagtttcgtaatgacgggcgaagacctggcttctgcggagtggatcagggaagcgcgtaggccatgtcgcaccgccgtgcagcttctttctccggatcgcctgtgtaaccccgacggccgctcggacgacaagtatctgcgccggggcgtggcgatcagtgagcggggtcaacacagggggtactggatccggaacggatatcccaacgacccctggaatgactcgtacacctggagctacatccctgcggagaaaccctgggggcgcaagcagatgttgcacatcgtcgagcagcggctgccggaccaaaccaggggcgtggccgacatggtcgctgtgcttaagcagatgcggatgacgaagcgcttccaggacgtgacgcttcaacaggccgtcgtcgcagctacgtacgcagcagccgttgagtcggagctgccgccgaacatggtcttcgaacaactcggcggtggttctctcgatttcgggcctatggcgggatacctgaactcgtacatgggagcgctcagctcctacctggatgagtcgaaaagcatccaggtggatggagtcaagatgccgcatctgttccccggcaccaagctgaagatccagagcttggcgcaaccggggggtatcggcgatgggttcgagcagtcgctgcttcgccatatcgccgcctgcttggggctttcctacgagcagttcactcgtgactacacgaagacgaactacagctcggccagggcaagcatgaccgagacctggaagttcatgcagtccaggaagaaggcggtcgctgaccgattcgccaccttcgtttacctgctctggctcgaagaggaaatcaacgccgggaacatcccgctgccacgcgggaaaaaggcgtcctggttctacgagcccctggtgaaagacgccttgggcgcctgcagctggatcggcgccagccgcgggcagatcgacgagctgaaagagacacaagcggcacttctccgcatcaagtcggggctttctacatacgagatcgaggccgccaagctcggcatggactggcgtgatctgttcgcgcagcgcgctcgcgaggaacgcctggccgctaagtacaagctggtgttctcgatgaacgcgcagcagagcgacacgaacgaggctcagcgcaccttggctgatgacccggataacacgaaatcgaacgacgaagaggacgaggcagcatga

SEQ ID NO: 333688 - DNA, 1287 bp, Pseudomonas aeruginosa
atgagcgaactgatcgcccgccaagtgctcgggcgcctgaatatgaccgaggcgctggttagcgtccatggcatcccggaagtggcggcggatctccgtgcgctctctctggcagacgctcgacaggagaacgccaaagcggaggagagcaaggccagcctccttgcagcctatggctttgaggagaccggagcccaaaagccattcgcatttgcagctggtatcgctgtgatacctgtccacggcagcctcataaaccgttttggtgcgagctgggggtatgtcactgggtacaacttcattcgctcgcaactgaacgcagcgttagccgatgacgatgtaaaggctgttgttttcgactgcaacagctacggcggggaggctgcagggtgcttcgagcttgcggatgaaatctacgcagcacgggggcggaagcccctgacagccgtggtcgactccaactgctattcggcctgttacgccatcgcgagtgcatgcgaccgggttcacgtaactccgacaggtggcgccgcgagcatcggcgtggttgcgatgcatatcagcttcgaacgcgccctggaaaacatcggcttgaaagtcgagctgatatacgccggggcacacaaagtcgacggcaatccgttcagcgatttgcccgacaacgtgagggcgaacatccaacgcggggtcgacaagtcccgcgacgacttcgtggcggcggttgcccgtaatcgcggcctcgataagcaggtagtccgggataccgaggcggcgtgctatcgcgccgacgaagccctggctatcggcctcatcgacgcagtatcgacccctacacaggcggtagctgcgttgctgtccgagctttctggctcaaccgacaaccaggagaacaccatgtctgtacaaaccaccaagccggaggccgaaagcgcggatcagcctgcagtcactccggtcgacgctgcggccgagcgcaaggctgagcaggatcgctgcaaagggatcctcaattgcgaagaggccaagcgcaacccctccctcgccaaccacctggccttcgaaaccgacatgtcggtcgaagctgcacgcaaggctctcagcgcgtctgcgccgagcaccgacgactcctcgtccgcggcgaacccgttccagcaggccatggacaacgacaagcaccccaacctcggcgccggcggtgaggggggcgcacctcagctctccaaggctgaccggatcctccaggcccatggcgccgcttctggccgcacctacggcgacaacaagtaa

SEQ ID NO: 333689 - DNA, 384 bp, Pseudomonas aeruginosa
atgacagagtttctcgcaggcagcggtcggatgaacttcccgcaggcccctcagcttttcgctgggagcttggaggtaaccaccaaccggcgccccgtgaaagacggcctcaagttcgcgcagtacgaggtgatcgctatcgtcggcgacgagatcgtcaagttcgacccggctggcaccgacggcagcgaaaaggccgcaggcattttgctgaactcggtggataccagcgcgaccggcaccacgggccaggattccgcgttctataccgggggcgacttcaaccatgaagtcctgatctggccggcgaccgtaaccacgctggcgcagcgtcgagcggtattcgccaccactgccaccatcgccatttcttccgtgctctga

SEQ ID NO: 333690 - DNA, 1056 bp, Pseudomonas aeruginosa
atggaatttgaactgtatgacctggcgaccctgctgcaggtacgccgccgcgtcgatgacgcgccggtcttctggctgaacttcttcggtcggcagatcaacttcgagacgccgtacatcgacttcgaggacgttaaccggcgctatcgcaagctggcgccgtttgttgcgccgaccgctcaagggcgggtgatctccagccaggggtcgcgtctgacccggtacgctccggcgtatgtcaaaccgaagaccgtggtcgatccgaacaaagtgatcgcccgtcaacccggcgaggtgccgtaccagccgctcagcaacgagcagcgccgcgacgctgctatcgccgaagagacccgcgaacacaaggcgcggctgaccaaccgtaacgagtggctggccgccaacgccgtcatctacggatcggtgaccatcgctgccccggactacccggccaggttcgtcgacttcggccgcgacccttctctcaccatcacgctgactggcgccgcgaagtgggaccagaccaccgcgaagcccttggtcgacctgaaggcggcacgccgcaagtctgcggacctctcggggatccgcattcgccgcttgatcttcggcgaaaacgcctgggacctgttcagtcagcgcatgggcttcgacgaccccaaggccggcaatcttctcgacaccacgttccgcggcagtgaaaccagcgtctcgcgcctgctggacggcttcgagggcgccgagttcgctggcaccctgaccggcgtgaacggccaggggcggttcgagtgctgggtctacagcggtagctacgacgacgacaacggagttcaggtcccgtatctcgacaccaatgatgtcgtgggcgtcggcgacttcgacggggttcgctgcttcggcgcgatccaggatgctcgtgccgggtatcgctcgatggaagtgttcatgaagaactgggaaaaccaggacccgagtgtcgagtacctgctgagccagtccgcgccgctgatggtccctggtgaacccaacgcgaccttccgcatccgcgtcgcttaa

SEQ ID NO: 333691 - DNA, 393 bp, Pseudomonas aeruginosa
atgccgaagcgcatccccctcagcaccatcgtcgtgtatcgcgacggtaaacgcgtcgtgccggaaatcggcaagccgttcgacttcaccccggaagaagtggcggatgtcaacgccctggagaagaagctgaaggaccagggcaacccgcagttgctcttccgcaaggtgatcaacgaagacccggaaaccctggccgccgcgaacactgcagagcagaaccgcagtggtagcgcacccgctgagggcgccgactacgacagcatgaccgtgcctcagctgaaggaactggccgaggcacgcgagatcgacctgggcgacgcgaccaagaaagtcgacatcatcgccaagctcaagggtgccaccgctggtgaaggggacgaggacctgtaa

SEQ ID NO: 333692 - DNA, 345 bp, Pseudomonas aeruginosa
atggccttctctttcgcagaagcgaaagcgcagctgcgtcgagcggtgcatagcaccctcggcgtcgccgcgttctatcaggatgactcgatgagtacacctcaaccgatccgtgtgcggtggcactcgaagattgcccggttcggcgatctcgaaagctccggctgggcggagcggatcgagggtattgatcgagtgatctttgccgctgctgacgctcgtcagctcaacgtgcgctatgcggggcgagtgaccattccggaatatgggatcgaactcatcctcgacgcgatggaacccgcagatgggccagaggaggaaatctggttggtggctcgcccatga

SEQ ID NO: 333693 - DNA, 618 bp, Pseudomonas aeruginosa
atgattatcaacatggagggggcgttcgatatacccgccgattacttcgagcgcatgcccgaggacgttacgcaggccgcgaggatggcgatcaacgatgtagccaaagggccagcgctacggcgcgcccgcgaggaagtgggcgaccaggtgaacttccctgccggctatctcaccggggaccgcctgggtgtgagcaagctcgcaaggaaccacgatctcgaagcggtgatcaccggccgtgatcgccccacatcgctcgcacgtttcgtgcgtaacccgaggcctgggcagcgcggggtcatggttgaggtccacaaaggcagcgcgcagtacatgaagaaggccttcctgctcaggctccgctcgggtcgagttatggacggccagacgttcaacatcggcctcgcgatacggcttgcgccaggcgagaagatccacaatcgacgggaggcggccaatgtgaactactcatccttggggaatggtgtggtgctgctctacggcccgtccgttgatcaggttttccggtcggtcagcgatgacatcgcaccggaggttggcgacatggccgtcgctgaattctggcggcagtttgcgaggctgaccaatggctga

SEQ ID NO: 333694 - DNA, 534 bp, Pseudomonas aeruginosa
atggctgactttcctctgcggctgctcgtattgaagcggctgaccgaacacctggaaggcgtctacggccatgacgagaacgggaacccgtacgacctccgtgggcgcgtattccgtggtcgcacggttttcggtgccgacaccccgctgccggcgctgtcgatacttgaagcccccagacccgacacgccgatctacggcggcgaagaagaggcccagcacgaacgtaactgggctctctacctgcagggttgggtggacgaggacaaggcgaacccgactgacccggcgcactggctgatggcagctgtcgacgagcgcctggggttgattgtccgtgaaaccaagggcggagggcggccgaagccagtcgacccggtcgctcaccatctcggcggcttgatttccggctttcgctacggcccaggggtcgtgcgtcccgccgacaatcaggtgtcgagcaaggcgtacttctacatgcctgtgcaagtaggtcttgccacttatgtcggcgaaccgtatcgttccgcctaa

SEQ ID NO: 333695 - DNA, 789 bp, Pseudomonas aeruginosa
atgccgattcaaggcgaaaacgggcgtaactacgcgctcacccgcggtgaggtctggttcgataagttcgcaccgggaacaactgtcgggaccggggaacgctatctcggcaataccccggagatcacgtcctcgaccgacagcgagaacctggaccacttcgacagtgaccacggcgtcaacgagaaggacgacagcgtcactctttcccagaacgatactgggcaggtgaccaccgacaacatcgttgtcgagaaccttgcgctgtatttccgtggcatcaccgagagcctcacccaaacggcgcaaactgccctgacccagaccttcaaggtcaaacgcggtcgtcgctaccaacttggtgtgagtgagacctccccgcaagggctgcggcatctcgacaacgtgacgctcaagaagggcgccaccgatgtcgcggcggcgggcaattacgaggtcgatctcgacatgggggccatctacatcgaagtcgacgccacgggcctggctgacgacgacgaggttaccgccacttacgacgtcaaggcttacacccagaccgtcgttctgtccggcacggacgagatcgaaggggcgctgcgttacatcggcttcaacccgaaaggcgagcagatggactattactggccgagggtgaaactctctcccaacggggatttcgcgctgaagtcgggcgacgactggcagaccatcccgtacaacatcgagttcctgaaaaagggcaacctgcggaagttgtacatcaccaaccgcggcacgcctgcttga

SEQ ID NO: 333696 - DNA, 486 bp, Pseudomonas aeruginosa
atggcactttcggactacacaccggagcgccgtgaggtctgtgtcaatgggaagccccttttctacgtggaggggctttctcttgagactctcgcgcttctcatcagaactcacatgcctgacttcgaggcggttttcgccatcctgatcaacagtgagcaggccggcggggatttcaatgggcagttgcaacgcgcagcgctagggatcgcgcaacaggctcctgggctcgctgcgaacatcattgcggcctgcagtggcgaggagctgagcgcagacctggtgagaagtgccagccgcctgccgttcaccgcccaagtcgaggcgttgacccagatcggcgaactgaccttccaagaggccggcggaataaaaaaggcgatggagtccctgatcactctgctcgcgagaatgcgggcaggcttgccggacgagactcggactccagcttcctccgctattaccagggaatcaggcgcgacgtaa

SEQ ID NO: 333697 - DNA, 4248 bp, Pseudomonas aeruginosa
gtgactgatcaaacgcgcaacgtcgagcttgtcatcagggcgaagaacctcagcaagaagaccctggacgatgttcgaaaagagatcgaggccgtcaacgcggctatcgatgcgcaggttgacgcgtccaagcggggccagggatcactgaaggacctggacgcagtctaccgacgcctggaagacgcgatgaagtcgctcgtccagcagcaggcgctgatcaagcagttcgaggcgcaaagcgctcgactcaaggagttacaggaccgcctcggcgcagcgagcactcggctgcgggaccaccaggccgcgatggaagccgccgagaaagtgactgcgcgccagaccagcactcaggtccggttgacgaaagccgtcgaacgcgccgaacaggcagtcgcgaaccagtccaagcgcctcgctgaccttcgtgcgcaaggcgaggccgcaggtctcgcgatgggggatctggagcgagcgcaggatcaattactggctaccgggcgcgagctggcgaatgtcaacgcccggcaggctcaaacgtcggaccttgttgccgccaatatggccaacgcagagcgcgcagcacgggatttggcagctgcgcaggcattcgaggcgaaggcggcggttgcgacgcgtcaagtagcggagagcgagtacagccaattctggcttcgggagcttgcaaagcgcgaggcggaagagcggcgcttccagcaggtgagcgtacaaatggcagagcgtgccgctcgtgaaaaggcagaggcggacgcgttccagagcaaagcggcgcaggcggcgcaggcaaaccgtaggcagcaggctgaacgtgaatatgcggcgctattcgacgccgctgagcagcaacgtacgcaggctgcggctgttgcacagctcaacgagatggccgacaaggccaccgcagctgcacgaggctatacaaccctcggtgcagccggcgaacggttggtgcagaacaatcgggcgctcaagaactcgttgcagcagatcctggacccggcgggtgctgctcgctcgactctcggcggtgtggaggaggaggtcaattctctcgcgtcggccatcggccggattgagggacctgtgcaggacgctcgcggccagctgcggcagctggccgaggcacagcgtgcactgaccacgcaggcgtccgggatcgaagcgtaccagcggcaactgcagtcgcttcgcgacgcacgcgccgccttctcagctgctcgcgggcaagtactgcagtacgcctccgccatgcggcaggcggaggcgcccacggcggagatggagagcgagctgcgccggctccagtcgaacctcgcgagcgcctctgggcagatgcagcaacaggtcgctcgtacgcgccagatgcgctctgagttacaacaagctggtgtagacacaaagaatcttgccggtgcgcaggaacgcctaaccctggctgccaagaccagtgtgcaagccgtcgggcaactatcggcagcagtcaagaagtacggcaacgcggcagaggacgcagcgcaggacaccaacttcttcgagtcgaacggcaggacaacgctgagtttcttccagcgcatgcgcggtgagctgctcgccctggttgccgcgtacggcggtctccagggtgccataaacttggccgatcagtcggtcgacgccttcaacacgaagcaaggtgtgcagaaccagttggcgctctcggtcggcaacgatgcgaaagctatcggagctgaatacgagtacatccggcagcaagctgatcggatcgggatcgcgttcgaaggggccgcgaaggggtacgcgaagttcgctgccgcagccaccctcgccggacgtagccgccaagaagtgcgctacgtggccgagacgttcatggaggtcggtcgggttgcgaacttgactgcggatgacatgaacggggtcttcaaggctcttgagcagatttactcgaaagggaagatccaggcagaagagctgcgcgggcagttgggtgaccgtttgtttggcgcgtttgaactggccgccgcggcgctcaaagaccagtttccgcagctcgacaaggcgatgaaagacggcttgatcacgagtgagcaactggtccttatcgccgagaagtacaaagagaccgtggcagggcaactgcccactgcaatgcagtccttggctgcgaaccaagctaggctgaacagcgccgtcttcgacttcaaagtgctgatcgcggagtcggggttcgccgacgagtacgggaagctcattaccaagctgtccgcgttcttccgcagcgacgacggcaagaaattcgctcaggacctcagctcgctgttcggaactgtggttcaggtgctgagtgtgctgctcgaccaccttgacgaagtcaagctggcggtggagctggcgttcggggcgaaggcggcgcaacttgttgccggcttggccaccagtatcacctcgcgcctgttgccggcgctcgttgcgttgcagaccgagctgaccgcgacggggttaaaaggtaagggtgccgctggggtgatccagggcgcgttcggcgtgctgatggccgccatggtcggctggcagatcggcacctatctgagcaacgagttcgcggtggtgcggaaggccggcgtggttatggttaccgcgttggacgagtatttcaccaagctgcaatacaagttcaagctcctctgggcaggtttctccggctccgctgccgacgcgctgaagcagtcgttcaacgacgttgtcgagttcttccagaagaccctccgaatgttcgagtccggctacaagctcgccgggttggatgatgcggccaagagtgcggcgtccgtcgccgagaagctcgggaagatcaagctcaacgttggcgggaagcccgcggagctgaagaagcaactggaggagcagctggctgtcatccggcaggtccgcgccgagatgcttgccgacatcgacaagccggcgaaaggctccaaggttcctggagctgcgagcgcgacgccgcgacccgacatcacgacgagtaaagtggtcggcggtggcggcaaggacaaggaattggagaagctcgtcaagaagcggatcgccttggctgaagaactcacccgtgccctggagagcgcggaggcgaagatccagcgcaacgagaagctctcgcttgaacagcgtttggccgctatcgacaccgaataccagaaagtcttccgaaagatcgaacagctttcgaagcttcctggcggcgcgcagattgcgtccgagatgcgtaacacgctcagcggctatgttgaggtgctgaagaagcaggagacgttgaagttcaaccaagaggagatggcccgccgtgagcagcggatcaactccctcctggcgctccggcagcagatgctgacgaccattgctgcacagcagaaagccggtcagatcccccaaaacaaactgaaggacgccatcgctggcgtggacgctcaggtcaacccgcagatcgagcaggccgtatctgctgctcagcagttcgcgctcgccaacaaagaggttttctctgaccagacggcgatggatacctacctctccaagctcaaggcgatcagcgccggcttggttacggtcagcaccgacctttactccgttgatcaagtgaaccaggacatcgccagcgggctgacgcagggcttcgatagcttcgcggaggctatcgcgaacggcgacgatgccgttaaggcgctgaagaacgcattcctgcagttcgcagcagacttcctcaaaaaaatcgccctgatgatcgtgcagcagatgatcctcaacgcgctgcaagccggcccgatagggggtgttgtttctggcttcgtgaacggcgcggtcaagcattcaggcgggctcgtagggggcaccgaggggcggaccaggagtgccccggcatcttggttcgcctctgccccgcgctatcacacagggggcgtggcgggcctggctccggatgagtacccgacgatcctcaagaagaacgaggaagttctcaccgacgacgaccctcgcaacgtactgaacggtggactgtctggcgggaaagggggtgctgtatcggcgccgcaagacgtgacggtcatcaacaccgtcgatgcggagtcgttcgtccggcaggccttggctaccgattcgggcaagaaattgatcatgaatgtgctctcggccaatcggtcggagctgaagacgctcgtagggagataa

SEQ ID NO: 333698 - DNA, 1365 bp, Pseudomonas aeruginosa
atggccgtcgagaccggcaccgcaaacgggaacatcgacttgatgaacaagctgatgaccttcctatccacccacccggacctggtcagcagcggccagcagtgggaggtactgcgcaacgaagactatccgatcagcttccctttccccggccgaatagctttcgctaactacggcagctcgcgcgcgacaatgcctgacgccttccctacagcgcttccggtgcagaactgtaaggctcgcttccagggcaagctcaacgctccgagtgctggaacttatgccttttcgatcatcgtgaacaagcagtgtcgagtgctgatcgatggagcgctcgccggaggcgtgttctcgccgaattggtcaaccagtaacacccccttcgctcagacattcactatcaatctgactgcgggtctgcacgacatagtcgtcgacgcagtgttcagcgaaaccagctactcgggactcagcctcgggtggaagactccgggcgacagcgccttctcgatcattccggcatcagcgttcgccagcatgacggcacggtacggctggacccagtactggaatccttcagcggcagatatggccgcgacctctgcggatcgggagtatgtcctgaaaggtcccggcttggctggccaggatgagatcttcttagcgatccgtactgccagttccgcgcaggctgatgtctacaacgcgatgatcacctacaccgtagggttcgagccgagtgtcctctacagcgcgcagccaggggtcggtaacagcagcttcatgctgttgtggaaccaagccatcaagtactggtttgtcgccaatggccgccgctttatcgtgattgcaaaggtctcgacgacctacgccagcatgtacggcggattcattctcccgtacggcctgccgaccgagattccgtacccgatagccagtggggcgaatgctggggctgatcgccgatggtcggaccagaccgaggagaactcgtcgttctggaaccccgccagctacaaccccaacgatggcgtgacctcactgacgatgcggcggccgaacgggaccgtcgaatcgttcgccaatatccactactcgccgacaccggacgctcgaacgtatccgtattacaaccgcatcgcgttcaggccgtccccggacaatcagtacgcgctgcagccgatagttctctactccgtcgccgcgggcaagaacgtgtggggagagctgcagggcgtgtttcacatctcgggctacaacaacgcgtccgaaaacacagtgtcaatcggcggcaagacctacctggtcgtccagagcgcgtttcggaccacggctagcgactacgcagccatcctgctggagtaa

SEQ ID NO: 333699 - DNA, 942 bp, Pseudomonas aeruginosa
atggcgtatcagacgggcgtagccagcgggctcgccgacctcatttctgcgttgcagaccttttgcgcagccaacggattcaccgttggcccttcgtggaccttctcgtccggcagcggtacgacgctcaccaactggcaagtgcgttcgcttgtgaagaacggcgtctacttcacgatgcattacggcgtcggcggaggctcagcctacagtcgagacgtccttctcatgaacacgagcacagcggtttcgtccagcggcgacccgaccacgcaagtgggggcgtgcccagcgaactgcagaacggacatgctcggcggcccctatgtgggctaccacttcttcagcgatggttacggcgtcaatgtggcggtggaggttgtcacaaacgtcttcgtgcacttcaacttcggggagctgcaaaagaacggggcgtggactggaagccagtacgtaatgggaacagctctgtacacacgcagcagctccgggccgtacgacctgttcaacagctacaactttatcccgttcttcaacggagacatcggcggtgcttttagcgattacggctctctcggtgggcacatcaggacacctattggtgatccgaccgcctactgtcggcgcgctttcactagcactacgtcattctggacgccgttggctgataaccacgggcggcagctagtcgactgctccccgaactcgcagaacggccggtcggtgattgtccctgcgaacgctctggtagcgtcatctgggcaatcaggccccttctaccaactcggctacgtcgcaaatgctggcgcgatcaacatcaccaacttgaacccgaaggaggtcgtcaacaccgactggatggtgttcccgatacagcagaaaaacggcccgagcaccaactacatcaactcccagaactacggactggcgtaccggaaatga

SEQ ID NO: 333700 - DNA, 1677 bp, Pseudomonas aeruginosa
atgagcacactatggccgtcactgctctatgaagctcaagggccacacgcgcccaaggcttatgaccaggcgctgccggcgtacctggacgtcgaggagatcagctcgcagctgcaaccagggccacttgccggaagtggcgctgtccccgagatccctaggcagatcgccggcagtagatggcgcggtgtcaacgacaccttctacaaccgccttctggtcgagccatcgctgcttgaactcggcaatctgctgagcaaccagactcgtacgatcagcgtctggaacggcttcctggaaaacaagacgatctccgcattccagcgcgtgaatgacgctggcataagcgtcaccgagccagtggcggtgccgtacgtcctgcgccccctggagcagctcacctacatcctgaatgtctcgactgatggtccggctgtgatcgacgcacagtacgtgtggactgtcgacggtacggattactccgccgaggtcacggggcgtcgtgttgtggttttccctttcggtcctaactggagcaccccggtaacggagccgctggagtggctcaccaatgtcctgcggtcctacgcaggcaacgagcagcgccgctctctgcgcgtcgaagcccgacgggaactgaattacagcctgcggctcacccggcaacagtctgcgcgcctggagaatctgctgtggggctggcagaaccgcatatatgcaatgccgatatggacagacaaacctcgcctcaccgcgcgcgcccaacggggagacctggagctgcttctaccgaccgacacgtactcattctcggctggtgccctcgcagtgctgtatcagaacgcggagacgatggaggtcgtagagatcgatacggtggcggcaggtaggctcgcgcttcgacgccccctggaaagcgattggggggtcgacacggcggtgatgccgatggtcttggggcatctccctacgtccgtcccgctgatgcgttacacgaacaacacgttgaccggatccatctcgttcgcgtgtgacccgaacactacggacccatacacgccggctggaacccctcctgtgcagtacgaaggcctggaggtaatcactcggcaaccgaactgggtgagccccctggataactcgttcgcgtatgaatttcagactcttgaccagcaggcgggcgctgtgttgtggaaccccaccgaggagttcccccgaatcatcagacggtacacatggcttttgaacggaaggcagcagatcaaggcatttcggcaagcgttggggcgctggcgcgggcaagccagggcgctctatgtcccgagctggcacgaggacttcaaagtcaccagggtcattggcgcatccgacgtcggtatcgccgtcgaggagaacgagttccgcagcatggtcggcgtcgacccggcgcggaaccggttgatgctgcgcctggagaacggtcagatgttcttccgaaagatcgtgggtgtgtccactgatgggacgtacacgctgctgacgatcgacgctccgttcaaccagcagatcgaggtcaaccaagttcgtgctctgcacctgctgatgcgctgcaggctcgctaccgaccgcgtcgagctggtttggcgtaccagccaggtagcgactgtagataccacattcacaacgatcctggagtga

SEQ ID NO: 333701 - DNA, 828 bp, Pseudomonas aeruginosa
atgtccatcggagacaacgaactcagcgtgcaggacgctcgacccattgagcttttcgaagtcagctacaccggcaactactggtactacaacacctctagcaaggacatcgtgctcgatgggaggcgctacatcgccgcgccgtgttcacacgaagacatcatccctacagtcgatgccgagaagactggtaatacggcggtttttcccgcggatgctgggttcggtgaggtcttccgagtgcaaccacccagtgaagtggtttcgatgtcgatccgcatgcagaactacctggtcccgagcgagctggttacgatctggaaagggcgcatcatcaacgtcgcatggaatggggaagggatgctcgaagcggtcgtggagaacgtgttctcctcccttcagcgaccggggctgcgccgccggttctccataacatgcccctacgtcctgtataacgacagttgcggcgtgaaccgtgacgacttccgcgatgacaccccagtgctcgcgatggttggcttggggctagtgctgcaggccgccatcggtaagcctgacgactactacgcaggcgggtacgtcacttgggagaacaatattcatgggaaccaggagaagcgcatggtacgccagtccgtcggcgccaccggcacgctcatcctcgcgtctccaccaatcgccttgagcggcggccaagtggtgtcggcgtacgctggctgcgaccacctgatcgcaacgtgtgactcgaagtttggcaactccgacaactgcggcgcgacaccctacatcccgaaaaagaatccgtttggcggctcgactatttattga

SEQ ID NO: 333702 - DNA, 240 bp, Pseudomonas aeruginosa
atgaccggacttgaatacctattcgtagccctggtcatggcagtcgtgagctatgcgatcacgctgtcgatggccccaaaaccagagaagcccgttgcgggccagctcgacgtgcctacagcggaggagggcggctgcatccccgtttgctttggcaagaacatcatcaagcagtcgaacgttatttggtacggggccccatcagtcgaaccgatcaagacgaaaggtggcaagaaatga

SEQ ID NO: 333703 - DNA, 2211 bp, Pseudomonas aeruginosa
atgggaggtcgcagcaagtcagtcactacgggctaccgctatcggatgggcgtgcaactcgcgctcacccatgggcctattgatgcagtccaccgctttatctacggggagcgcgaggcttggtcaggtaatgtcaccgacaatgcgcagatattcgtcaatgccccggaactgctcggaggtgacaagcgcgagggcggtgtatctggctacgtcgacctcatgttcggggggaaacagcaggggaagaacccctatctccagcagtggatcaacggtccactcccggcgtttcgcgggatcgtgacggctgttttccgggatttcctgtggtcatctggcaacccttacttcaagtccccttggctggagatctcgcggtacacgaaggggtggagcagggataccccctggtatccccagaaagccaagatcggtgaggacatgaacggcgtacacatcgtgtacgagtgcttgacgaacctcgaatgggggatggggtactcgcccgacgacatcgacgacgcatcgtttcgcgctgcggccgacaagctctacgacgagaagtttggcctgtcgctactctggatggagcagacctcgatccttgagttcgtcaagctcgtcctcacccacttcgacggctcgatacgtaacgacccgaagaccggtcgtttccaaattcggttaatccgaaacgattacgacgtcgccacgctcgataaagtgctgagccccgcgaacgtgatcaagctgtcatcgttccagcgcactgcgtggggtgacaccgcgaatgaggtcatcgtcaagtacaccgaccgtgaccagaatgaagtgcctgctccagcggtccatgatttagccagtatccaggctcaaggtgccgtcatctcggtcacgaggtcctaccctggcatacgtgaaccgagccttgctgtccgcgtcgcgatgcgcgacttgaacaacgtctccaccccgctcgccaagatcacggtcatggtcaaccgcgtcgcgtgggactgggacgtgaccgatgtcttcaagttcacatggccgaagctcggcctcaacggggtgccattcaggatcatcaagattaacaagggcaacctgctcgacgggacgatcactatcgaggccctggaggacattttcgggctgccagctaacgcatacgtcgcgcagcaaccgtcaggctgggaggaccccatcaacgatcctctgccagttgtcgcgccgcgggcaatcgaggcaccgtactgggacgtggtccagaacctggatcccgctgacatcgcctacctacccgacgactatgcgtttggtgaaaccctggccgtaaagccgactgcagacgcgtacgactacgacctccacgcgagcgcaaacaactctgcgttcaccgacgtgggcgacggggacttcacgccgagcgggacgatcactgccgacatccccctcggtggcgccccgatatcggtgacgatcaacaacatgaacggcgtggatcgagtcggcctgcagagctacgcatacatcgacaacgaagcgttcatcgtcactgcggtcaacccgagtaccggggtgctcgcccttcagcgcggcaccctagacaccgtcccagctcggcacttagctggggcgcgcatctactttgcggacaacggtttcgcagggtacgaccagacgcagcgcactatcagcgagcgcacctactacaaggcgctgacgcgtaccggtaaaggcaccttgaagctcgcgcagaccacctcgttcgacgttgtgttctctggacgcgcccagcgaccttacccgcccggcaactggacgatcaacggcgcctacttccccactgcgatctacggcccgctggcgtcgtcctgggctcaccgagaccgcactcagcagaccgtgagcctggtgcctttcactacgagcagcatcggacctgagaccggaacgacctacacgctccaggtgtacagcgggtcagtgttgaagcgcacttactcgggtctcaccagtacgagctggaactacccactagccgacgacaccgccgacggcgtcctgcaggacctaagactcgttctgcagaccgttcgaggtacgggcgccacttcgacgtcctggcagcggcatgaccatgtgattgacagacacggcctgggcttccacctgggcgaagaacttggaggcgtttccgcatga

SEQ ID NO: 333704 - DNA, 1149 bp, Pseudomonas aeruginosa
atgactctctatatggggcctaacaccgggctattgatcaacggcctgccgggagaagggcattacagcgatctgattcggatgtggcgatgggatgactttctgaggcagccggtcgtcaaggggcgcgtcgccacgctgccgactagcggccaggtcgagggtgatacttacattttcaccggcagcggtgcgaaccagaaccgaattgcacgctggtgggcaacaggtgcgacgacgcccatttgggagtacatgccgccacgactgggctggcgggttcaggttgcgaacgaggccacgcctgctggccaggtcaagacgtatgagttcggggccagtggctggacggaactggtgggcgggatggccgacgcgccgagcgacggaaaggcatatgcccgcgaaagcggcgcctggacggagctgggatcggcagcgaaatcggcgctcaacgttctgccgttcatgaacctgatgcccgacatgggccgcttcgcgggaaccgcagccaaccctctggctacgatgttcacaacgtcatggactccaagcaccttcatcaatggctggaacggcgccaccctcgcagatgggggcaagtttgtgttcgacaacagcacgaacggcggggcggggccggcgctcaatgcgcgggtgcaggcgcttctcgcggcaatgggccggacgtggacgtcagtgtcccgatacggggtcgagttcttcaccacggtgctgacagcgggatcgcagacaactactggctcggccggcgcggatggggttacgcggtatctgtgctgctccaacggcagtaagaccgttttcaacgcgggcgcgtgggcgacggtcgtcatgtggttgcgggtcgaaagcggctcggctcatatctcgtcggcgccttatacgacccatcgcctttggatcaatggcgctgtcgctgctcctggcgtggtgctgcctgcgaaccaatgggtgcatctgcggttctcgatgcagtcatacaacggctatgacaacgcgtgtccgtacatctacgcatcctccggggctcagatcgcgtttgcatgcccggcgtggttcggtggcctcgtcgatccgggtatccacgttgcgcccatcctgacaatcaacggagcaagcgcatga

SEQ ID NO: 333705 - DNA, 288 bp, Pseudomonas aeruginosa
atgaccatgaaacgagtcctactgaaaggcgaattcttcgcggaatgggatggcacactggacgaggccgctgcactcgctggcgtccctgtcggcgacttggcgttccacccggatgacgtgctggccgaggtccaggagctgcgccgccaggcctatcgcaccgagtccgacccgctgcgcctggaggccgagtttgacgccatagccgctggtaccgagccggacctggcggcatgggtcgcagccgtccaggcgatcaaggagcgctatccactacctgaatag

SEQ ID NO: 333706 - DNA, 225 bp, Pseudomonas aeruginosa
atgaacgaggtgcttagacgtaggctgcgggctgagctgctggaggtggggctcctcaaccagtgctgcctggatctgatgggggcaatggagtccgaattcagcctcacgcaggatcagcgggaatgcttcgaacagctgagccgatttctgcaggaagggattggcaagctgaccgctctatcggagcgagtggcgggcggtgagatcgtagttttggcttaa

SEQ ID NO: 333707 - DNA, 399 bp, Pseudomonas aeruginosa
atgtcagacaacctccgtccgctggagtcgacgcatcacccgaatttgcggctcccggacggggcgcgctctggcttccggatggatctcacaatcaacatcccaaccatcatcaccctggtcactctcgcgaccggggtgatctctttcggtgtcacgacttacaacgacttgaaccgagccgacgtcgagcagaagcgggacattagcatgctccgtactgacgtcgaccgcatctcggccgcacaggcaaacgtcgcggccgagatgcgacaggcgacggacaagatccgcgaagagaaccgccaggacttccgcgaggttcgcgccagcctggacaagctaaatgaccggctgcaacccgctgccaacaacgcaatgagaggctggacgaaatga

SEQ ID NO: 333708 - DNA, 708 bp, Pseudomonas aeruginosa
atgacagcaagactcccgcgcagcgtgcggaacaacaacccaggcaacatcgagcacaacccagcgaacaagtgggtcggcattctcactccggaaaagcgcaacgccgaccagctcgcagagccgcgcttcgaggtcttcgagtcgcccgtctatggcttccgagcactggcagtgctaatgcagaactaccaggaccgctacggtttgaacaccgttcgcaagatcatcaaccgttgggcgccaccgaccgagaatgacactggggcttacgtggcggccgtggcggcagcactcggggtgcgcggagacgacgtgattgacgtccaccagtacgattacatgcgcccgctggtgcaggctatcgcggagcacgaaacgggcaaggacccgcgcactggcaagctgtatcgctgggaccccgcgatgatcgacgagggcttgcggcgtgcaggcatctccaggccggctccgcaggtggtgaaggtgccagtgaccaaggagacggtcagcgccaccgtggccggaggtatcggcgtcggccaactggccgatgtgctacctgctgtgtcctccgcgatgagccaggccgatgctcacatcagttccggctcatgggtccgcatcgccttcggtgttgcgaccattgccgtggcggcgttcatcgcctattcgcaagttaagaagcatcaggcgggcctggtttga

SEQ ID NO: 333709 - DNA, 243 bp, Pseudomonas aeruginosa
atgacacccaagatcgaatggcgggcatacccgtcagcaaccgaaaccgtgatcatccaagcagccatccgagcgcccaaaggcgcctatcgtcgcgtgaaggacgtgttcagcacgaaggaggtgagccggggtgctacgagcgacgaagtggtctccaaggtgcagcagatgcatctggaagtggtccgactgcatgagcagctcaaccaagttcttgattacgggagcagcaggcgatga

SEQ ID NO: 333710 - DNA, 192 bp, Pseudomonas aeruginosa
atgacctatctcgatgccgccctctgtattgccctcgcagcgcggatacaccgtgacccggcgagggtgcgagccaccgtcaagaagtgcctcaagcgcatgccgcgggcacagcacggcgccctccccctgatcgcctcaagccgcgacccgctcgcggtcgtagaacacatgttggagaacctcgaatga

SEQ ID NO: 333711 - DNA, 234 bp, Pseudomonas aeruginosa
atgaccagctgcaaagcgcgtcagcacagcgaccagatcctctgcgagtgcggcctgggatgggacgtcaacgaccccgacccaccccagtgtccaaagctcgcggagagcacctggacactggttaaaccgagccaggcggcaaccatcggccagaacaccgagcagcgaactccagcggtcggccgctcctggctccaacacatccgcaccctgctggcgaccaagcgatga

SEQ ID NO: 333712 - DNA, 453 bp, Pseudomonas aeruginosa
atgacgcgccaaccccattacgtcgtggtcacgggaggccgttacttcaccaacaaggaagtgatctacggcgctttgaacgcggtgctcagcgagttccgcaaatccaacaaggcaggtacccgccgcttcgtccttgtccacggtgccgcccctggcgcggacacactctccgcacgctgggccagggactgcggtctcgccgctcttgctgtgccggccgagtggatgacgttcgggcggtctgccggcccacgccgcaacgccgagatgctcgaatgggttccggcgaagctgcttgtagcgttccccggcggccgagggaccgcccacatggtcgcactggctcgccgcaggggcctacctgtccgccaggtgcacataccgtcgagcgatgacgacgagttcgaagtggcgcgagcctctctgcagaagatcgggggtgcgccgtga

SEQ ID NO: 333713 - DNA, 372 bp, Pseudomonas aeruginosa
atgagcggctacgcgtacggcgagaaagagccggagattagttgcccgtactgcggcgctacatgccgagccgacttcgtagatatcggcgtcgggtacgagcagtgcggcccctaccactgcgaggtgtgtaatgccagcgagatcggtccgtacgaccgggaacgggatataacggaccgtgagaaggagcttggttggtacgcccctggatccgaacccggcagtagcgcaaacgtcgtcgacggtcgagtggtcagccaccaggagatgagtgcacgttaccgccaggtgttctacggaaaccccgcgtatgacataccaggtgcagtccagcagtggctcgacgagaccaggagacccaagccatga

SEQ ID NO: 333714 - DNA, 648 bp, Pseudomonas aeruginosa
atggttgattttgcatggagttatctggcccgtctgctgaccaaaccgcgcatcgcagacgccctcatccggttcgcaaagcgcacgccgtacctgcacctgcggagtcctgacggctcggtgtacatggagcgctactgggtcttcaacccctacgaccgcgtcaccaatgtgccgcgctgggcgccgctgatcccgttctcgatccgcgtgcaccacattcgccgggaagacctcgaccggcaccttcatgaccacccctggaacgcccgcacgatcatcctgaagggctggtacatcgagaaacgccacagcgagcgcgactgggagttgttcgaactggtcgacggttggcgcggtggtagcgagctgaagtggcgacgtgccggcgataccaccgccctgaagaccggtcagtaccactcgatctgtgaggtgagcgatggcggcgtctacaccctgttcatttcctggaaatggcgcgagacctggggcttcctcgtcgacggggtcaaagttccctggcgggagtacctcggtctgcaaccagggggagacctgcaggagcccaaaaggggaagctgcaacgccatcggcgagcgcgtcgaatctgaactccgtatccacggtgggagggagttcgaatga

SEQ ID NO: 333715 - DNA, 261 bp, Pseudomonas aeruginosa
atgagtgaagagatccgcatgagccgggatgcactgatcaccccggagggcattcttcgccctcagatacaacaaacatttgatttagcagatttaagttgggtcgacgaagggcgtcggccagggctgaggaacatagtgcgcgagctgctcgaagcgcagcccaagcgctaccaattcacgctggatggctaccaccagctcatggcagacgcaaaaaccatctggcacgccgggtctctcggccccggttccgactag

SEQ ID NO: 333716 - DNA, 834 bp, Pseudomonas aeruginosa
gtgagcccgaaactcgaactgttcgcgtttctgcagtggcctcgcgaggtgcgcatcccctgcccctactgcaagtaccagatctgcggtaacgcacccgatgaccaacgcctgttcaactgcccgatgtgccgcgcacagcttcaggggcgagaggaagacggcaaggtgaagctgcggatgaacctgcagaccttcctcgccagcccacagatcagcttcatcgagaacaaggccccgtggccaggtgaagtcatgagcgccgtcccctacagccgcacggcggtgtcgatgttctcctgctgggttgagccggagatcgccggccggcgggttatcacggccatcactgccgatggcaaaccctggccctggacgacagaccgcaaggggcttgtaggcgcggctatcgacaggctcaagcctgagctggagcacctggcctcgatcctccgtttcaacggcgaccgctcctggatgctgggcgccgcggtcgagggcgtcctcacgccggacggcgcgatgctcgtctatcacgcaatgccgctcacctcgctgatctgcggctccgactgcctgcagttgagcgtccggcagatcgacttgcaagaggctgtgtccgacctcagcggcggtctcctacgcctgatgccgcaacgcccgatcaagaccacggccaacagcaacagcgaccagtggactgccagtgaggcggatctcgacaaggcctgccagcactggaatgtgccggccgtcatcatcaaacagaactacggcatgtggcgtaccggcgcgaacgacgcctggatgcgctacgaggagagcgacctatga

SEQ ID NO: 333717 - DNA, 1389 bp, Pseudomonas aeruginosa
atgaacagaagctatatcgtccacggcccaaccggctgcggtaaaaccagaaacgctgaacggatggctgcggccctcgggttgaccaaggtccaggataactggagcccgatggaccaagtcttcgagcctttcgacaccctctacctgaccgcttcggaaggcccatggccggatcaggcacgccatgtcttgagtttcgccgaagcgatggggcgtgtacccgacgccgtcgttgaaccgaaaagccgctatatccaccggaacggcgtcgagtacgaggtggtgatgatcgccaacggcgaaagcaccagcccgaagtaccctccaaccatcgtgtatcggggggtagccaatgggaaggtctgggctcgcccagcttgtgattgggatcgttcaatgcagttggtggagcgtcctgcctcggcgaaggtggagggcacggaacaggtcagcagcacctggcttgcgcaactgcgctcagagtatcgccagttcgctgaggcggacgaaaagatgcaatccaccctggccagggtggcggaactggagcgtgccctacagacggttgttaacgctgccgaccatggatcgtggccgactaccgttatgcacggcattgaggtggcgcgtgaagttctcgcaggcccatctgcgcagacgcaaccctctccggccccaaccctgcgtgccgccattgatgtagccaacgaccggttcgaagtgcctgtagcgaagtgggggaccgacctgataggggaagaggggcggccgaaggtggtggctcggctataccgctcaaacgccaagtatttcccgccgttcgccgaggtacagaagccactaccccctggtgatgggacgctgaccgttgaccctttaattacactcgcacactacgaccgcgacgtcgggacgctgcgggcggcgaacgcgaagctggagaaagaactggcgatagcacgcgacgccgcgtccaagggtgacgatgcccgccacgctgctggcggcatggaaatggagatccaggagctacgcgagaaagtagccgagctgcagaaggagctgcgcagccgttggacctacaccagcacccaggcaaccaactgcgctggttgtggggagcacaagcacaccccgctgcgcgtcgactggatgggcggctatgtctgtctgacctgcatcgacgagaaactggaagcactccacggcgcacaggctcagcacggtttgcctgatgacgacacgatcttgcagattttcgccgacaacgctgagcactcggaacaaggcgacgaggatggctactgcatcgtgcgcgaacagcatgcgctgaaaattgcacgcgaactgttcgtcgccgcgcccgcctccagcgaggagtcctga

SEQ ID NO: 333718 - DNA, 264 bp, Pseudomonas aeruginosa
atgaagcatagccgggagaacaatatgaaaaccctcttccaaaagtacaccgagtacacgaacaggctgaaagcacagggtattcagtttctcgcattcgactgcccgcggtgcggcttcgagatcgaaacggagcgtcctccacaaggcgaattgtgggacaccctttccagttgtccgcactgcggagcgctgttcttcaaggttgcgacccatgaacgagcggagggtcgtgtacccgcctgctcgaccaccaagcactga

SEQ ID NO: 333719 - DNA, 303 bp, Pseudomonas aeruginosa
atggcaaagcgtggacaactgaccaccaaggtcaaaaaagaagcccagcgcctgcttggcaaggaaatcactgtgcgcgaactgcgcctgatgccctacgtgcagagcgtgatgatcaacgaccggcgcatcgacctgcgcaaaatcaacgaagaggaacgcgcaatcctttcggactggcgcgagcgcggatggatcgggggaggtgcagccgggatgactatcagcaaggccttctggaaagcgatccacaccctcctgctgatcgcctacgtcgactacgagaatcagcctgccgattaa

SEQ ID NO: 333720 - DNA, 231 bp, Pseudomonas aeruginosa
atgaataacgcacggcgcaaacagctcgctgaaatcgtggatcaaatgcaggagctgcgcgcacgcctggatgaactgcagagcgaggagcaggaggcattcgacaatatgccggaaagtctgcaacagggagaaaagggtcagcagtcggaggctgcggccgagcgcatcggcaatgccggcgacagcctagatgaggcgatcagcgcgatagaagaagcgcaggaataa

SEQ ID NO: 333721 - DNA, 204 bp, Pseudomonas aeruginosa
atggcccgctctacccctgaacaggcccgcaacaagctgggcctagtggccgcaaagaagctggaaaccgcagccgaagcactgcacgcataccgcatggcctgtctcaactgcgacgaccacgcagcccagcatgaccgccgcaagtcgctggtaggcgagcttcaggagatggcggcgtggcttgaaggctgctgcaagtag

SEQ ID NO: 333722 - DNA, 192 bp, Pseudomonas aeruginosa
atgaccaccaagctgaacgccaccaagaccaaaaaggtgaaagcggtagtcgctcagaccggagtcaccgaaatggaagctatcgaggcactggaagctgaagagtggctggagtcggaagccgtgttcaacatccgcgccgagttcaacgccaacatgcgcaagcgcaacgaagaacggggcttgctgtga

SEQ ID NO: 333723 - DNA, 924 bp, Pseudomonas aeruginosa
atggatactgcagtcgacctcttcgctggcatgggcggctggaccaccggggcgcgtgctgctggagtgaatgtggtgtgggccgccaaccactggcccacagccgtccactggcacgcagcgaaccaccccgagacggtccacgtctgccaggatctgcagcaggcaaactggtccaaggtcccctggcacaacctactcctggcttcgccgtgttgtaccggcttcaccaaggcgcgaggtaggccggaagggaatccggagcacgacgccgcccgcagcacagcctgggctgtaatcgacgcactggaatatcacaggccagacggcgcggtagtcgagaacgtgccggagttcctcacctggtccctgtaccctgcttgggagtatgccgtgaaggccctcgggtatgctgtttcaccccatgtcgttgattgtgcagacctcggcgtcccacagaacagggtgaggctcttcctggtctgcactcgcagcaaggcccctctccagctcaagctgccgaagtacgaccatgtgccggcttcgtccttcatcgacttcgactccggcagctggacgttgatcgagaagccaggtcgcgccgacgctacgttgcgccgggtacgcaacgggcggaaggacttcggtgacaggttcgtgatgccctactacggatccggctccggtctcaccggccgaagcattgagcgcccgataggaaccatcacgacccgcgctcgatgggctgttgtcgatggtgaccacatgcgaatgctcaccgacgacgaaaccctgcaagccatgtcgttcagcaaggacacgctcaggcccaccaacctgaagctttgcacccacatggcgggcaacgcggtgccgccgctcgccggctacagagtcttggaaaacctcctcgccgctgcctaa

SEQ ID NO: 333724 - DNA, 531 bp, Pseudomonas aeruginosa
atgaccttcgacatcaacacagcagtgatcatcgtggagcaagacgtggagcaacccggaacccgacgtaaacgcggcgtggacatgaacgacccgaaggtcaagaccctgctctccatgagggtaggcgatagcttcttcctcgccgatgtcaccaagaaggatgtccgcccgttgctcgacctgggcaagaaggtgaacgttccactgatcgcgcgcgacgttgagctggacgagatctaccagaaggccggggtccgtgtgtggcgcatcgacgaaagcgaggtgcgtacacgccgcaccaaggcccagatcgaggccgagaagcagacgctgaccgtcgacaagagcgcgttcctcaagggctccgtgcggtactggcaccaccccgagtctgagtgtgtgttccgcaccggacccggcacgggcaaaggtcacccgagcggacctgatttcgatgaagcccagacgctcatggagatcgacgaggctgagtacatccgcctctcggccgagtacgacgatctttaa

SEQ ID NO: 333725 - DNA, 1107 bp, Pseudomonas aeruginosa
atgttcaagaacatgatgttctaccgagtcaccaaccccgatcatgtcgccacgctcaacgactgggaaggcctcggtgcgctgctggccgaactgccggcacgcgagcccacgggcagccagtggcgggcactcggcttcgacctgccggcgccgcggttgagcgacgagctggtctggagtgcaccgtccggcgccaacctcttcaccctgtatgtccatgagcgtcaactgaccggcgccaccatccgcgaacacgtcgccgcgagagtcgagaagatcgagagtcgcgagcagcggaagtgctaccgcaaggagctggcgcagatccgcgacgaggtcgaagccgagcttctgccgcgggcattcatcaagcacagcgtcatcaacatgctggtgatcggcaacctcctggtcgtcgaaagcagcagcgccaagaaggcggaggacgccctggacgccctgcggcgcgccatggactcactgtctgttcgccccctcaccttcaaggtcgagccctctgcatggctcaccgagattatgcgctcaaacgcgtacgacaacctgaagcgcctggacgcagccaagctggtcaacagcgaaaaggacgtggtcacgttcaagggggtcaatctggatgacgaggagcctcagtcctacctcaacaacgccttccgcgtcgccgagctgctggttgcgttcagttgggagggtgaggaccagatgtacttcaaggtcagcgaccagctcattttcaaaagcatcaaattcgacgacctggttctcggggagatcggcaaggactcggatggagacccggccactaccctggatgcatcccttgcgatcctggtcgggacgatccagcgcttggtcggcactctggctgaccagttgggggaagacctgccgagcaagctggcgaacgacatcgccgctgttatcgcaccggtcaagaacggcggatccatttccatcaacggcgtcgaagtctatcgctcccccgagatctcgaaggagcgcctgaagggcgtgatcgacggcgaggacggcgacgatgacgagttcgagcaggcccgccggcaaaccgaggaagacgacctatga

SEQ ID NO: 333726 - DNA, 252 bp, Pseudomonas aeruginosa
atgcgcaaacacaacatggcgctcgaaacgctgaccgcgatgaaccagcggcagcaggagcagttcacccaagcgactgtactcgccatcgccgtggtgatgaagaaggtcggcatcaacgaaatcagcgtcgggcccgaagacttcaccaagctgctgccgggggagaaagtgaccgtcgaagaacgggtcggcgggggcttcacctaccgcctcacccagcggcctcagctggcctcacaggagggctag

SEQ ID NO: 333727 - DNA, 345 bp, Pseudomonas aeruginosa
atgccgacgatccaggttgcctcggcggaaggccccatccccgcagaagtgttcgagacgttctggttccccctagacggtgaccggttcctgttcgctctcactcagatgcgcggtgcatcaggggtagctgtcaccgattacgccagcggtttaggggtcatccaccgcctcttggacgagcgcggcgacaagatcgacccacgagaacacaccccgcgctccatgtgcgttatgggcgggtacgccctgcgccatctagccgctgtgcacggcgaggtgaagatcaaagccgccattctgaagggtcaacaaggcggcaccctgaacgaactcgatttctaa

SEQ ID NO: 333728 - DNA, 1017 bp, Pseudomonas aeruginosa
atgactcaagaaaaagcatattcgttcaagagcctccgccgcgacaaagcaatcaagtcgcgagacctctaccgggtgcgctactccgacctggtggtcgtcccaggcaacaacgagcgcgacaaggacgagcgctactggcacagcatcaacgccctggagaagttcctcctgggtggaggtcaagtggcccccttggaggtcgaggtcaacccgaagacgggggccattgagatcgtccaagggcatcgccgccacgaggccttcggccgcgtcatcccggccaagcaagagcagctccggtcgctgatccgggaggacatggctgcggcggacaaggcgaagctgctcgaaaaagttgacgacctggagttcatcgaatgcatcccgttccagggcaacgatctgcaaaagctcgtgcgcatcggtacgggcaacgagcacctcgcgctcacggaagtggagaccgcccgactctacaagcgggctcaggtcgagttcggcctgaacgcgacggagatcgccaaagcgttcaacaagccccgcgaccatgttgaccgccacctcgccttagcgaatgcggaccacggcgttcaggaagccgtcaagaccggcaagatcgccgtcaccgaggcggtcaagatcgccaaggagcacggcagcgacgccgttgaagtcatcgagaaggagtacgccaaggcagtcaagcagggtagcaagaaagttacggctggcacgatgaaggggagccccttaccccgccccgtcgtgaacgacctggtcggcaatgtcgccaagttccgccgcagcctcagccccgaagcggaggccgtcgtcaacgacttccgtgaagggcgcatcgacggcggtcaggtcaccatcgacgtcataccgttgatggcgctgctcgcagcccacgggaacgttgaggccgtgcaggaggagcaacgtaaacgcgccgaggctaaagcggccaaagctgcagaggccgccaagaccgacgatgacgatctgtga

SEQ ID NO: 333729 - DNA, 528 bp, Pseudomonas aeruginosa
atgcacctcaaggtccttctcgaccaccttgaatacgacacgtctgctctctcggaagagaccgctatcgcgcaactccgagctgccggcctgctcaactggaaaggcttggcaaaagacgtaccttccccgagaggcaaaacggtgatcaacctggcggttgggcaagcgatacacgctctcatacagccactggtcgaaggcgcggtgaacgagggaggcctgcccgtgcgccgcttgcgccgtcgtcgagtcgtcggtgaaggcctaggagcggtcgaagaagagacggatatcgaggtctacgacccaagcacggcccccactgcgaagccaggcgaaacctggatggtcagcatcggcggagagcctcgtttgcgccgcaggatggtgatcggcataggctctgaagtgatcgtgctcggccgaaaggctagtaagcaggccacttcctatgaccgcgagcactacctacctgaaagcgtacgtttcgtccagcaggtcggcgtgagaacggaaagcgcctga

SEQ ID NO: 333730 - DNA, 915 bp, Pseudomonas aeruginosa
atgaatgacaaagcaaccggcctccccagcttgggggcgcgctcaacggaaatggcccttgcggaaatgcctaccacccttctcgaccaaggggcttccgctcgcccgcagaaacaacaaacggttgattcgacacttccaacgctgttcgaagcggcacggaaggaagacttggccgcggctcgcaataccctgctcgacgtgaaagaaggaggcctacgcttaattgtcgagtggtccagctacgaggaagacctaagcgtccggatcgtcgatgcgggtaactgcgatctgcagggcacctactacaaggactggctgctcggcctccagaccatcaaatcggcctaccaaggcaccgaggacggcttcaaggtatttcggcagtggtcggcccaggcgttggcgccctatgaggtgcccgagaaccacgaagagcgctgccgcatcgcctggaactcgctgaagtcggaacccatgagtttcgaagaggcgtgcgaccgcctcgcggaacaccccgccttgctggtggaccccgagtacgtggcgagtatcgccacttccatcaaccggctcagcgacatgtcgcacgccctcaaccgctacgccggttggtggagcgacctggagaccggcgaacccaaggagcgcaacgacggcgagctgctctgcctgatcatcagcgaagtgatcgagggcttcgagggggtccgcaagaacctgatggacgacaagcttcctcaccgcaagatgatcgaggtggagctggcagacgcgctgattcgcatcgccgactacgctggaggccgcaacctggacgtgggccgagcgctggtcgagaagatggcgttcaaccagacccgccaggaccatacccgcgaagcccgcctcgcaccgaacggcaagaagatctga

SEQ ID NO: 333731 - DNA, 348 bp, Pseudomonas aeruginosa
atggcgaaatcgacaccgacccatacctccgatgacttggatctacccgacgtcgactcgggtgttgccgtaccaccgaagcgccggccgcaggctgacagtttcaccagccggctcgtcgagctggacctcggcgagacggaagcacgcgctgtccgcttccccgactgcgcacacccctggcccgacatccaggcggccaaagagcagctcaagtcgacagtcaccggccaggtgcggaacgcaaggaaacgcctgccggacgctcggtacaccctcgccatgggcgacttccgagcgccgaacggcgacaccatggtcatcgcgacggtgactcgcatcgaatag

SEQ ID NO: 333732 - DNA, 510 bp, Pseudomonas aeruginosa
atggctaagaaattgaccgagcaacagcaggcagtcgccgactttctggcggccgctggcgtagagttttccgttattccgcgcggtgcgactaagcgcgacgattgggaatgcgacgaatgggcgccgctgttccgtcgcggttcggatcgtgaaggccgccaattagcgcgcgcctatttcacggggatcgggcaccgtaaatccgaacggccgatgccgccggacatcgcccgactggcgccccgcattctggcccgcgtggagtgggaacaacgctacctgaagccggtcgcgccgtgcgccgccgacgttctgcattgcctgctgttggacgccaacggcgcagaccagaatttcaacgattggtgcgccgacttcggttatggcccggacagccggaaggccctggccctatatgacgaatgctccaaagtcctggcggacgtgagggcgtttttcactgccgccgaacgcgaaaagctggccgaactgctggaggactactag

SEQ ID NO: 333733 - DNA, 195 bp, Pseudomonas aeruginosa
atggcacgcgataaggccgcgatccgggaaaccctgcgttcggttgtcgatttttcggccgacttccacgcgctgaacagcgccgccgtggatgcgctggtccaagccgctaatgccaacggctaccgtaaaccgaagaacgccaacggctccaccgcgcgttacttctttgcctacctgaatcgccgggggtga

SEQ ID NO: 333734 - DNA, 246 bp, Pseudomonas aeruginosa
atgcctttcactttcgacgcagccgctaccttgcttatttacgtttgcacgactgctgccttggatgactgccagatatacgcagtcgcccaagcggacggtccccgcgccgctgtgacctgttcccgtgaattgacggcagaggccgaccgctggcgggccgacgggtttaaacacgtagccgccgtatgcgtggaccagcaggggcgggacgtgaccgacattgacgaagtgcagcgattctag

SEQ ID NO: 333735 - DNA, 567 bp, Pseudomonas aeruginosa
atggaacgcatagaactgaacatcggcggcaaggacttagttttcgccgtggaattcgaagacgactatgacgccggcaccccgtgggaaatggcggacggtcacggccccgtcacgggctgggaacgccggaacaagcgccccggtgaactggtcctgaacagcgaccggggcgcaaagcgtttctatgacttcgccgaagcctgccgcattgcgctacgcgacggttggggcttatccgaagaccgcatagccgactggaccgagcgggccggccgtgcgccgacccggcgccagattgcagcggcggccgcgctttccgacttcgaatatctgcgcggctggtgcgccgatcaatggcgctatgtgggcgtagtggtcacgctgctggacccgcaaggcgagaaaaccgaagtatcggatagcctctggggcgtggaaacgctccacgactaccactacgaaacggcgcgccagttggccgatgaactggtgcacggctacggcactcggtggaccgaggctgaaaaaccgacctacgaatatttcgcacaggagggcgcgtaa

SEQ ID NO: 333736 - DNA, 300 bp, Pseudomonas aeruginosa
atggccgttgaactgatgcgccgcgccggcaccgaagggtgcaaaacctattggctagacgtgcgtgggcggggcggtttcctgcgcgtgcatacggcctctatcacgaatccgcgccaggtcgatccggagcttgaacgcctggccgccatggttgaggtggcgccccagttggtacaggcgctggccgacctggccgccgcttcctggctggagccggacccgtgcgattctgaggaactggcgcaggcaaagcgcgctgccctggctgccctggccgccgctactggggggaaatga

SEQ ID NO: 333737 - DNA, 276 bp, Pseudomonas aeruginosa
atgaggtacgtagttgacagaactgaaggcgccgagggcgactgcttcattgtaaccggctcaatcggcccgcatttcgaaccgttgctatttcgccgcaaagcggacgcagcggcctatgccaagcatatagaccgctgtggacgccgtgttcacccgcgtttcacgcccgtcatagaaacccggtgggcttcagatatgttccgtttcccggtcctggagcgcttcgacgtgtcgtccgtatgggcgggggtgacgcatggcgaagaacgataa

SEQ ID NO: 333738 - DNA, 225 bp, Pseudomonas aeruginosa
atggcgaagaacgataagtcgccgcacctggctgtgccgccgtggtggccgttcgtgcgcctggcgctggtcctgctgaccctaggcgccgctacgtgggcgtgcggggcgctgttaatggcggcgcagcggttcgccgctgcaatggttgtcgcggccgcactcggcgtgctgggggcgctctatccgaccgaactaaaggaggccgaacggaaagacgaatag

SEQ ID NO: 333739 - DNA, 471 bp, Pseudomonas aeruginosa
atgaaactaacccccgccaacatcctttccaatgcttgggccttctacgcagaagacatcatggtgcgcattgatgccatgcaggccgaggaagagcgtcagatgcgtgagtgcatgggtaaccgcgacaactacgacatcgaggaaatccagaaggttgttgcctacaacgaaaggcacggatgggcccgtcgcgccaacatcgcccgcgccatcctggccgagcgcctggctgaaatcgaagtgcattcggtagacatcgcattcgctaccgagtcggaagtcgcagaaatccgccgtgttgaggcccacaacgaaaaggcttcgaccatgcgtcagttgatcgaactgcgcgataggtgggaaatcgaaggtcgagtcgatttgcatgcgcagactgtggggctgattaacgagtgggcgggggtcatgctggccgaacaggcgcagcacgcggccggctgttcatga

SEQ ID NO: 333740 - DNA, 279 bp, Pseudomonas aeruginosa
atgttgaacaaaactgcccttcgatccaccgcctaccttgtccgcgtcaaggctgcaatcgtcgccgctgtgcgctgcgcacatgccccccatcgctcggcgctgggcattggtcatgatgccgtgacggacaggaaaggtcgcttttccctgcgcgtggtatggcgccggggtcacggcctggagattttcgaccgccaggaccgtgacgtcaccgatgtcgtgttgaccgccctgaaggcgttccacatgacggaaacgcgggcaagtgctgcctga

SEQ ID NO: 333741 - DNA, 270 bp, Pseudomonas aeruginosa
gtgaaagcttcggcacgtaaagagtttgtcgtcgcggtcctgcccttcgaccgacgcggcgacgcggaaaccatccggcgcgttctgctagatgccaccattccggcagaggttcgcgaagcggacattgaaacgctgttgacggcggcgcgagcggcggccgcgtcgctacgctggcaccgtgatcaaggtcacttcgccggaatggatggcgtttatctggagaacctggaagcggcgataaaaggcgccgaagggggcgccccgtga

SEQ ID NO: 333742 - DNA, 201 bp, Pseudomonas aeruginosa
atgaagttcaagacaacggtaacgacgaatccggattttggcgggcgtcttttttttgtcgaagcgggccgcacatttgaaccgtccgactacgaagacgcctacggggtgacagtgccggagaccgaatcggctgcgatccaagctcaggccgcacagcttaagcctggcgaatggctccaggtcgaccatagcgaatag

SEQ ID NO: 333743 - DNA, 555 bp, Pseudomonas aeruginosa
atgcgaactatgcgggtttccctggccgtggtgggactggtggcagcgctaagcggctgcgccagctcgccgccggaccatgcgacggacacgcggccaggcggcaatcaaggcttgagcctgcgcgacgggtcacccgacacatggatattccaggcggcgcccgaccgcatgagtggccgcaccgcctacagcgccaccatatggtcgcgtgacgtggtcaccctgccgccgccctatgagggggcgcagcgcttgacgttgaccgtaggcaaggactccagcggcaaggccctggctttcgtgggcgtgccgcgtgggcagttcgggtgcatggggacgtgtgatattcgcgtgcgcttcgacaacggcgccgccgagcgatggggcggggagctgaagaattacgaaaccggggccctgcacattgtcggcgccgctcggttcatcgcccaaatacaaaagtcgaagacggtaaccattgagctaccattcttcgactttggggcggttcctgttgagttcaaagcgggcgggctcccgtggggcccgtaa

SEQ ID NO: 333744 - DNA, 2544 bp, Pseudomonas aeruginosa
atggaccgagccacgaaagaccgcacccaggtgataaagggcggctacctggcgcagcacggcaagacactgatcgaccacgggtacaacatcgtccctattgcccctggcaaaaaggcaccggggttcgacgactggcagaaaacccgtgcgagccaagctcagttggcgcgttggatggagtcaggtctggagaaccacggcgtggggatcctcgccgcgcataccccagccgtcgacatcgacgtgctcgatgacgagttggcggatctgcttgaagactggtgccatgagaatttaggacgagcccccgtccgtattgggttgccgcccaagcgccttttgctctaccgcacagacgagcccttccgaaaaatcacctcgaagacttacctcaacgagtggcaagagcgctgccgaatcgagattctcggcgatggccagcaattcgtagccttccacaagcaccccgaaacgcaccggccgtaccgctggaccagtgaggagagcccgctcaacacgtcagctgacgacctcccgctgattgagccggaaaagcttggggggcttgttcgtttattcgaatcagaagcagagaaacggggttggacgctggtccgaggctctcgcatcaacaggcagcctggatctgcagcgatagacaaggacgatccgtttgcagccgacgctcaacctgtgaatctgtcgcaggccgagttgcagcagcgcctaatgctcgttccaggtgcagaagactacgacacctggctccagatcgggatggcgctctaccaccagtacgatggagaggacatcggccgagagatgtggcacgaatggtcggagtccgcagacaactacgacgccgatgcgctgaaccgtaagtgggacaccttcgatatcagcgacaagggccgcgccccagttactgcccgactgatcctgcaactcgcgaaggaggctgcggagacgaaggcgattgaaaccgccgtcgaactccgcaaccagttcgcgatggcgaaagaccgagctgaatggaacgaggcagcgaagatcacccggcgggccgaaatcgaccacctctcccgagctagcctcgccgagatcgcaagagaccgactggtggctttgacgggcaacaaggtcccgctggcggaagtgaagaaatctctggcctacgagatcaataccaaagagctaccgcggtggtgccgcgactgggtttatgacgccagcgaggaccggttctaccacaccgtccacaagcatgcggtctcagcccaaggcttcaacgcgatcaacgatcggcacgcaatgaccaaaaaggacgttctggatgggaagtcggcgccagtcagtaccgcctgccacctcgcgctgaacgtctacaaaatcccgactgtgcacggacgcatgtacgcacctggtcgagacggggtcttcatctacaacggcactcaatgggccaacacctaccccgagcaccacatcccgccgaagccgaagaacatccgacccatcgacaagatcaacataaagcgggtgcgagcccacattgcccacatgttggaggacccgaaggagcagcgcatcctgctcgactggctgtcgtacgtcgtgcagaacccaggtaaaagggtcaactgggcgatcctgctgcaaggcgtcccaggtgacggcaaatcgttcttcgccttcctgctccgcgccgtcatgggaatcggcaacgtgacgatggccaacgcccacatcctggagtccagcttcaccgcctgggcccagggtcaatgcgtgctcgctttcgaagaagtccacatggtcggccacaaccgctacgacgtattgaacaggttcaagccgctggtgacgaaccgggtgatcgagatccacgcgaagggccgcgacccttacaacgtcgagaacacgacctcctatctactcttcagtaactaccgcaaggccctgccactgcaagacaacgaacggcgctactgcgtcctgttctcccaatggcagcagcgcgaaaagctcgcggagttcatggaggagaacccggactactacaacgatctctacgccgcgttggacgagtcagcaccggcacttcggcagtggatgctgcagctagagcagagtcccgatttccacccggatggcaatgcacccattaccccggcattccgctacatggtgcgggtgtcccagccgaaggaactacgaggcatccgcgaaataatcgagtcgaaggaattccctgacatctcggatgacctattgaacatcacccggctcgaaagcctaacgatgaacgacgactacgatttcgagctgccggcaccaaagaccctcaactacatcctggagaaccacggattcattccaatcgggcgcgtccggatcgggcaggagcggtatcgcttctactcgcgaaaccccgagaagttcacctggagaaacgccgaaggtgatttgattccggataccgagaagatccgcaagtacatggaaggcgagcaagacgatgatgaggacgacgacttgtag

SEQ ID NO: 333745 - DNA, 264 bp, Pseudomonas aeruginosa
atgaatctcccttcctgggtgacagatcccgcgctcagcgacgaagagcgacgcagaatgctcctgatctatcgcctgcgtagagcagccctcttccacaacgccagcggctccttgcctgtgctgagcaaagccgtcgggtgccacccgaatcacctgcacgtcgctatgtccagggggcgcctcagcctgaaagtcgatttggcgctcaaggccttggtcggcagtgcatggacagaaacccctcagtccgctgaagcgtag

SEQ ID NO: 333746 - DNA, 411 bp, Pseudomonas aeruginosa
atgagtagcgaaatgaccctcaaccaattcggcgctgagctgattcgtcacctggcgcgcctggccaacgccgtggaaggcatcgagtcgaaagtcgggtccgccggcggcagctcggccggcagcaccagtggctctagcgctaccgctggcagcaagggctcctccggtcgcagctccaagcagaaggaagaaccgtccaagccgaagcacgacagagccgaggtcgacaaggccctgatcgcgctgaaggacgctcatggcaaggacgaggccgtcgcggtctacaagggcttcggttacgcgaagatggtcgagatcgccgagaaagatttcgacgctgtctacgaaaaagcggttgctcgcctggaagagctgaacagcgccggcggcgaaggcgaagatctgtag

SEQ ID NO: 333747 - DNA, 1239 bp, Pseudomonas aeruginosa
atgtggttgctgtgctcaggctcgcttatcccaaatcttcttgccgaagatgaggcgggggaggacgcagcctacggcacagtggctcatggggtcgccgagaggtggctgaagaccggcatcaagccggtagaccttgtcgggaccgttgaactggttgccgaacacacccagacattcgagatcgagatcgaccattcgatgctcgattacgtgcagcagtacgtcgattggtgcacggcgctgccgggggatcactttgtcgagcagcgcgtcgacttctctcgcttgacgccgatccctgatcaaggtgggaccgccgaccacatcgcctgtcttcccggcctcctggtcattaccgacctcaaaatggggaagggcgtccaagtttttgccaaacggaatactcaggcgcttctgtatgcgctcggctcgttctaccgctgggactgggagtacgggttccagcgcgtgattatccgaatcgcgcagccccgtctcgatcacttcgacgagtgggaagtaagccgcgatgagctgttggagtttgccgaatacgctaaagagcgagcccacgcggcgtgggcgccgaatgcgccgcggactcccggcgagaagcagtgccagtggtgtcgagtgaaagcttcgtgcacagccttcgccgctcacatggagtcgctattggcaggcgtgtttgacgacctggacgacgcgtgcagcgaagagcgggtgcaccagttcatcgagcgtttggaagacgagttcgatgaattcacgttggctcctgcgcctctgcaaaccctgtcgacaagccagaaagccaagatctaccgctggagaaaggcggtggagaactggttcaaaagcctcgaagacgaccttgaaaagaccctccaggccgggaatccggtccctggttacaaggtcgtggaggggcggtccaaccgattctttagagatccgtcctcggtccccgagacgctggagatgttaactggcgtccctgcggaaaagttcattgcgacctcggtgcggacccccgcacaggtcgaagagatcctgaaaaaagagggcggctatcgggctgcccaactccccgaattactggagcgcgaggttctcggtgtaacgaagcctcgcggtaagccggtaatggccccagcgcacgacaagcgcgctgagctaaccctgacggtcgatgacgttttcgatgatctcgaaggcgaagacgacctttga

SEQ ID NO: 333748 - DNA, 618 bp, Pseudomonas aeruginosa
atggctcgtgaaatcgtcaaaaaggtaaagaatgccgttctgtactccgatggttgcatccgtatcgataacgttcgggcgtcgtatccgcacttggataaagcttgggcgaaaaacgagagtgaccggccgaagttcagcatcaccggcctggcacccaaggaaacgcacgaagaagccaagaagcttctggtggaagagatcaataagctgctgacctccagcaagatcggcaagctggcttccgaacacaaattcgttcggaacggcgacgactctggcaaagaagaagcggaaggccactggattatcaaggcttcggagaacccggatcgccgcccctcctgcaggacgcctcgcgggactgtgatgactcccgatgaaatcgccgagaagatctaccccggctgctgggtgaatatccttgtgcgcccctgggcccagaacaaccaacacggcaagaaaatcaacgccaatctgatcgcggtccagttcgttcgcgacggtgaacggttcggcgaaggttctatcgatgacgaggatgtctgggacgaactcgacgacgctgagggtgatgggtacgacttcggggacgagggtggcgacgacgatctctga

SEQ ID NO: 333749 - DNA, 2028 bp, Pseudomonas aeruginosa
atgaacagacgtcctcgtgcggtcctcgatatcgagtgctaccgcaactattttctcatcatgctccgctgcatcgagactcggagaaccaaggctttcgaactctacgatgatgtcgtctgcctggatcgtaaggccatcatttcgttgttgcggaaatacacggttgttacgttcaatggccgctcctatgacatgccgatgctcttcctggcccttcggggggccactacggaagagctgaaggacgccagcgatgcgatcattcagggtaatctcaaaccttgggagttcgaagaacggtatggcgtgaagatcccaaccttcgtcgatcacatcgacctgatcgaagtcgccccaggtgtcgcaagcttgaaaatctacggcggtcgacttcatagccgacgcatgcaagacctacctatcgagcccgatgctttgattaccgcgggacagagaaagaccctggtcaactactgcgggaacgacctggatacgaccatcgacctccaccaaagcctgatcaagcagctcgacttgagggagtcgatgagcgatgagtacgggatcgatctacgctcgaaatcggacgcccagatcgccgaagcggtgattcgaaactcaatacagcggcttactggcgaaaaggtctatgcccctgattttcgcccaggcaccaaattcaaatatcgcacccctgatttcctgtcgttccagactgagaccatgcgcagcaccctccgtatggtggagtcggctacgttcgtggtcactggcaagggtggggtcgaaatgcccaagtcccttgacgaggcggccattcgaataggggccggggtgtatcggatggggatcggtggcctccattcttcagagtcgaaggtggctcatgtttccgacgcaaacagtgtactaatcgaccgcgacgtcaccagctactacccggcgataattctcggttcacagctcaccccgaaacatcttggtgccccgtttctgaaggtataccgcacgatcgttaagcgtcgcttggctgctaagcgtgctggcgataccgtcacggccaactcgctgaagatcaccatcaatggttccttcggtaagttcgggagtcgctattccgcgctgtgttctcacgacttgatgattcaaacgacgataactggtcaactgtctttgctcatgctcatcgagagcttggagctttcggggatacctgtcgtttcagcaaacaccgacggcgtggttatcaaatgtccgcgagagaagctcgacttgctacgtctcgttgtcggccgttgggagatggcgaccggtttcgataccgaggagacacgttacatggcgttgtactcccgtgacgtgaataactacatagccttgaaacagaagtgggatgttgagcgaaagtgttgggtcgaagaggtcgatggagtgaagttgaagggcgcctatgcgccacctggtctgcagaagaatccaacggcacaaatctcagttgacgctgctgtcgagtaccttcgtcgcggcacctctctgcaggagaccgtaaccgcctgtgaggatattcggaagttcgtcacggtgcggcaagtcaatggcggtgcaatccaaggttactcaaagttcaacaacaaggcattggtaccggagaagcgcgcagtagtcgaggaggcaggctggacgcagatcaacaggaagtcgtggcgatcccccgatgaatttgacgccaggggatcgtactcgctcgacgaagcatacacccaggcaaccgagatacgggatgccgtctacctgggtaaggctgtgcgctggtactacgcattgggtgagactcgcgacattcgttacaggaaacagaatgtcagcggaaatcacaacaaggtgcctcgtactgagggggctcgcccgttgatggagcttcctgaagagttcccggatgacgttgactacggttggtatgtgcgggaagcggtgagcatcctcaaagacgttggtgttgattacatagagggcgaagacttatga

SEQ ID NO: 333750 - DNA, 267 bp, Pseudomonas aeruginosa
atgacccgcgaagtcgaaatcgagcgaccagctaaagagtacgcgaaaaagcgcgggtggtttgttgtgaagctcatgcggtgcgacatcgactccatgccggatgatctttttcaccgccgtggcatgacgatgtacatcgagttcaagcggccaggggagccgccctccaagaagcagcgtattcgacatcgagagctgcgggcccatggaatcccggttcacgtttgcgacaatttggacacagcgtatgacctcttggcatga

SEQ ID NO: 333751 - DNA, 1710 bp, Pseudomonas aeruginosa
atgacctcttggcatgagtggatacaagctgctttcgccaactgcgaacggggccgggactccctgcacgactaccaagagcacgccgtcgagttcctcaagctcaaccccttcagcgctttgttcatcgacctgggtctcgggaagacggttatttcgctcacaactgtgttggaccttgtctgcgcgcttgaaacggattgcaccctggtcattgggcccttgagggttgtgaacgagacttggcccactgagattgggctgtggcgccatacctccgccttgtcgatgcaccgtattcgagaagaacccttggtggaacatgtcagggcggctggcgcgaaggccagggcgctcatcaaggagcaaggatcttcttcggaagaagtcagggcattcctcattcgtcaccgcacccttgaactgcgtcgaagagcgaagaacttaggctacagcagaggcgacatcagaaagtacgccctggcgcggatcggggaggctatgctcaagcccgtgtcagagcaagagaagaagcttttcgtcgtagcagcccgccagaaagcggcagcagaggcggtacgggagcagaagcgccttaacccggcgagcatctacatcatcaatcgtgaacaggtggagttcctggtcaatgcttggggcaaagactggccttatgacaccgtagtagtggacgagtcgagcagcttgaaggaccaccggactaaccgctggaaggccctacgtaaggttcggccgttcatcaagcgcatgcaccaactgacggcgacacctgccgcagagagctatctacacctattcgggcaaattggtttgcttgatctcggtgagcgcctcggcagaacttacaccgagttcaccgaaaagtactttaaacacaacaagtacgactacagctataagctgctccccggcgcggccgaggagatcgccagggcgatctccgatatctgcttaaccatgaaggctgaggactacctatcgctcgaaaagccagtattcgaagttcgcaggatcgatctgccggaaaatgcagctgctatctatcgttcaatggagcaggactctatcgtggagctggaagagcgggagatcacggcagacaccgccgcggctctgtccagcaagctcctgcagatcgcatcgggtgtactgtacgaaaccttcttactcgaagacgccgatacccacgacttcaacaaggtcaagcgtgttcaccaggtgcatgacaagaaggtcgaagatctgaaagacctggtcgcagaactcggcgaagagagcgtcctcgtgtcataccacttcaaggcgtcacttgaccgtctgcggaaagccttcccccacgccgtggtcatggataaggaaggggcgtgcgtgaagaggtggaatgacggcaagatcaaaatgctgttggtccacccgcaaagcgctgggcatgggcttaacctccagaggggagggaggcacatagctttcttcgacatcccgtggtcgctcgaactctaccttcagttgatcggacgactggcgaggcagggacagaagtatgtcgtctacgtgcaccatctcgtagcgaaagggacgctagacgaagtggttatgcagtgtttgctggaaaagcgcaacggccaggaggagttgttcaaaatgctcaaaacccttcggcgtcggtccagaatccacaaaaagttgtaa

SEQ ID NO: 333752 - DNA, 666 bp, Pseudomonas aeruginosa
gtggatactactttcagggcacgtcttgatcaggcgtgcgacgactcgccgagcgtccccgagaaaggtaaggggcggcaggtcgtgatcgcgaacgcgatcaatgtgacgcaggaggccgttcgcaaatggtttgcgggcgagtcgactccgcgaccgagcaaaatgcgtgagctggccaagttccttgaagtcgatgaaggctggctggcactgggaatcaagccggagcttgaccgcaaagagaagcgtcgcgccgcgatgaaccgtgatggcgcagtctacctggtggcaggcctcatccttcttgagggcggaagttgcgcgttccctgcggagaatgataaacgcgggtcctgggtcgacctgtactcgatcatccgcgggcagcaggtcgcgcttcacatcagcttggcgcgggcagtatcagacaacttatttgaagttatcgtccctcgccagtatgacgatgtcacctgcatagccgttatcccgattggcgtgggtgagttcaagttcattcaactgccggcagaacagatagagcagcttaaaaccaagaaggcgggtgacttcgcactcaccatcgagcgggccggcacgaagttcctttccaatggccatccgtggccgcgattcaagacattcggagagatccatggctaa

SEQ ID NO: 333753 - DNA, 231 bp, Pseudomonas aeruginosa
atggctaacacactcgaaacctctgacctggaaaccccttgggtgctgctgaaagacgtttgccactgctacggggtgaacttcgaaagcgcgaagaataaagtcgctttggggaccttcgaagtccccacttacaaagtaggccggcaaatcgttatcgcaaaagaagttcatcgggagcacttccgccgcaaagcggaggaaggtttgcgggccttaaaatcaacttag

SEQ ID NO: 333754 - DNA, 177 bp, Pseudomonas aeruginosa
atgagcatcgaagaatacttgaagagctgcctagaggacgggctggacacgcatcggttgagggtctctctcaccgttgacggcaaggtccagttctatatccatccggagggcgaagaagaggaggccgtagatttcgaggtcgacggcagcacgttgatccatgtgacggattag

SEQ ID NO: 333755 - DNA, 1035 bp, Pseudomonas aeruginosa
atgggcagcatcatccgtcacggggacaagtggcgggcggtcgttcgaaagaaaggttacccgacgaaaacgaaggtctggtctaagaaggctcaagccagccagtgggtcaaagagatcgaactcgcgatggagaaacaggagctggccagttccaacgtcgagatctcgaagctgattgaaaagtaccttgaggaaatcgaaccgctgcgcccagggcgccgacagaaccaacgcaattacaaagctcttgccaaggttactcgcggcctgtacctggagcacctatccgcccctggcctcctcaaatgggttcaaaccaagagacaaggcgtctcgcgggggactctcgcgatagacgtgtcgatgatcagctcggtgctcaggactgctgaagcattttggggtatcaccgtaccgtgggctgagtttgcaaaaggccgaaccgctttgcgtaggcttggtatggtcgggcgaagccaagaacgcgaccggcggcccgaagccggcgaccttgaccgaatcaaggcggagatcatcagcagcctcccaatgggagaccttatcgacttcgctgttgcgtccgctatgaggtcaagcgagataacccgaatcacaagatcggatctggacgaaaaaaagcgaactgtgatagttcgggaccgcaagcaccctaccgagaagattggaaacgatcaagaggtgccgctgctcaacggcgcattcgatattgccaaacgccaggtcgccgtcgagggggacgataggattttcccgttcaacccgcgctctgtagaggctgcgttccgtaaggcgtgcaagcgtgctgaggtagaagacttgcactttcacgatctccgtcaccacgggataagcttgttatttgagcagggctacgcgattcaggaggtcgctctggtgtccggccacaaagactggaaccagttgcgacggtacaccaacctcaaagctgaaagcctgcacgcggggcccgtgtcgagggcacctctcgaaaacaaaaaacccgccgagtaa

SEQ ID NO: 333756 - DNA, 624 bp, Pseudomonas aeruginosa
atgtacctgatcttttccggctacttcgccgccgaggggctgatctatccgttctggccgacctggctggccagcctgggcttcggcgccagccagatcggcctgttgatcgccgcggcctactggccgcaggtgatcgccggggtggcgctgacctacgtggccgactggcgcatcgaccagttgcgcctggcgaccctgctggcggccctggccggcgcctgcgccctgctgttccagctggccgagggcctgcccctgttcatcgccctgagcgtgctctacggcgcattctggaccagcgtgctgccgctcaccgaatcctacctgctcaagcgcgacaaggccgccctgcagaactacgggcgggtacgcgcagtcggttcgctggccttcatcctcaccgcgaccctgggcggcctgctgctcggtcggttcggccagcaactggtgcccgccctggtcggcctgacgatgctgctcaccgcgctggcctgcctgttgctccgtcgccgcagcctgcgccgtccggactcgccgctgccgggcgccaggcgccgtcccgacctgcgcgggatcctccggcaacgcccctgctgctggccatcgccgcggcgggaatga

SEQ ID NO: 333757 - DNA, 2643 bp, Pseudomonas aeruginosa
atgcaccgatcgctccacaccgacgcgccgctgggcgccgccctgctgctggccctgcagctcgctcccggcagcgccgccgcggcggaggaacaggcgcctgtcgacccgcccacggtccagttgcaacgaatcgaggtgaccggcagcgcgatccgccgggtcgatgcggaaaccgcggtgccgatcagcgtcctgcgcgccgaggagctgcgccaacagggcgtgaccagcaccgaggaactgatcggccggctttccggcaaccagggcgtatacaactccagtcgctcggtcggcagcgccaccggcggcgcctcgttcgccgacctgcgcggaatcggcgcgaacaagaccctggtgctgctcaacggccggcgcctggcgaacaatgccatcgacggctccgcggtggatctcaacaccattcccttcgccgccatcgaccgggtcgaggtgctgcgcgacggcgcctccgcgctgtacggcaccgatgccatcggcggggtgatcaacttcatcacccgcaagagcctgaacgaaggccgcttcgacagcggctacgcctcccccacccacgacggcggcggcaaccagcgcaacgtcagcgctagctggggcttcggcgagctggaggaggatcgcttcaatgtcttcgcggtggccaactacgacaagcaggagcgcctcggcgccaaggaccgtggctacacctacaactaccagccgggacgcggcctcgactacagttccggaaccgccttccccggcaactggagccagggcgccaacgccagcaatccgctggccgccggcggttgcaagggcgccgacctgattccgcgcaacggcatctgccggcagagcctgtggcgctacctcgacctggtgccggaaaccgagaagacctcggtgttcagccgcgccaccggcaagctggccgacgagcacaacgtcagcctggagtacttctggtcgcgcaacgacaacgctacccaggtcggcccagggaccctcaccggcctgcagatcgatcccggcaccgccttctatcccggcaacggcatcactcccggtcccggcggcttcgtcctcgacccgagccggccggtggaggtcaactggcggcagagcgtgctcgggccgcgcctgcaatcctcgcagaacaccggccagcgcctgctgctcggcttcgacggccggttcgccggctgggactacgatatcggcgcctcgtacaaccagaacaaggtggtcgaccacatccacagcggctacgtcgatgatcgcgccgccgccctcggcatcgccaacgggacgctgaacccgttcgggccgcagaccgacgccggcctcgcctacctcggcagccatgccctgagcggcgacttccgtacctcggtcggccgcgtcaagggcctggacgcccgcgccagccgggagatcggcgactggttcggcgccgggccggcggccctggcgctgggcggcgaattccgcaaggaggcgttccaccaggacatccaggacttcgccggcaacgtgcagagcctcggcgtcgatcccgccgccacggtcagcggcgagcgcaacctgaaggcgcagtacgccgaactcaacgtgccggtgctggacagcctggaactcagcgcggcgatccgccacgacaagtacagcgacttcggcagcaccagcaacccgaaatattcgttccgcttccagccgttccgccagttggtcctgcgcggcgcctacagcgaaggtttccgcgcgccgtcgctgtacgaactgtacaacccgaccttcaccacctataccagcgccaactacgacgacccacgcctgtgcgccggcggccagccgagccagggcggcatcgccaaccgcgactgcgcccagcagttctacaacgccaccggcggcaataccgacctgcgaccggaaaccgcgcgcaacgttaccctgggcctggtctaccagccgctgcgcgacctttccgtcggcctggacttctggtggatcaggatcgccaaccagatcgccgagtttcccgaagcggcgatcttcgccgacccgcaggcctacgccggacgcatcgtgcgcaaggccgacggctcgatcgatcacgtcgtcaccggactggccaacctcggcaaggtaaagaccagcggcgtcgacctgagcctcgattatcgtttcccggccagccgctacgggcagttcgggctcgacctgcaaggcacctacgtgtcccgctacgacttccagcagcagatcggcggccagtacctggacaacgtcggcgacttccagggcgtcggcgtgatcgcccgctggaagcacgtcgccaacgccacctggagccgcgacgcctggcaggccaccctgagcaaccgctacaccagcggctacaacgactacgaccgcgccagccacggcaaggtcggctcgtggaacctctgggacctggccggcagctaccgcctcagccacgcgctggggctgaccctcggggtgaagaacctgttcgaccgcgaaccgccgttcagcaaccagacctacaccttccagagcggctacgacccgcgctacaccgatccctacgggcgcatcctgttcggccgcctcagctacagcttctga

SEQ ID NO: 333758 - DNA, 393 bp, Pseudomonas aeruginosa
atgaaccagcttttgccccaggaagtcgtcgatcagatcatgcgggaagagcagcatttcgccgccgcgccccaagccttcttcgaggtctggaagcgcggcgtcgagatcgcaggcccgcaatggtttggcgacggcacgcgcgaaggcctgaaccaggcaaagagcaagtgggatctgcgtcccgacatgctgcgtgccaacgacgcactcggcgtcctgagcagcggggaacgcatgttcctgtccgccatgttcagcttctacaacgcgcgcgagggcggtgccatgctcaagcgctgccacttccaaggactgtcggacttcgatggtctcgatctgcaacgtcgccaggtgatcgccgacctgctgctgaactacagcggttggtga

SEQ ID NO: 333759 - DNA, 1458 bp, Pseudomonas aeruginosa
atgaaacggtccttcctttccctggcggtagccgctgtcgttctgtccggctgctcgctgatccccgactaccagcgccccgaggcgccggtagccgcggcctacccgcaagggcaggcctacgggcagaacaccggcgcggcggccgttccggccgccgacatcggctggcgcgagttcttccgcgacccgcagttgcagcaactgatcggcgtggcgctggaaaacaaccgcgacctgcgggtcgccgcgctgaacgtcgaggccttccgggcgcagtaccgcatccagcgggccgacctgttcccgcggatcggcgtggacggtagcggcacccgccagcgtttgccgggcgacctgtcgaccaccggcagtccggcgatttccagccagtacggggtgaccctgggcactaccgcctgggaactcgatctcttcggccgcctgcgcagcctgcgcgaccaggccctggagcagtacctggcgaccgaacaggcgcagcgcagcgcgcagaccaccctggtggccagcgtggcgaccgcctacctgacgctgaaggccgaccaggcgcagttgcagctgaccaaggacaccctgggcacctaccagaagagtttcgacctgacccagcgcagctacgacgtcggcgtcgcctccgcgctcgacctgcgccaggcgcagaccgccgtggaaggcgcccgcgcgaccctggcgcagtacacccgcctggtagcccaggaccagaatgcgctggtcctgctgctgggctccgggatcccggcgaacctgccgcaaggcctgggcctggaccagaccctgctgaccgaagtgccggcgggtctgccgtcggacctgctgcaacggcgcccggacatcctcgaggccgagcaccagctcatggctgccaacgccagcatcggcgccgcgcgcgcggcgttcttcccgagcatcagcctgaccgccaacgccggcaccatgagccgccaactgtccggcctgttcgacgccggttcgggttcctggttgttccagccgtcgatcaacctgccgatcttcaccgccggcagcctgcgtgccagcctggactacgcgaagatccagaaggacatcaacgtcgcgcagtacgagaaggcgatccagacggcgttccaggaagtcgccgacggcctggccgcgcgcggtaccttcaccgagcagttgcaggcgcagcgcgatctggtcaaggccagcgacgagtactaccagctcgccgacaagcgctatcgcacgggggtggacaactacctgaccctgctcgacgcgcaacgctcgctgttcaccgcgcagcagcaactgatcaccgaccgcctcaatcagctgaccagcgaggtcaacctgtacaaggccctcggcggcggctggaaccagcagaccgtgacccagcagcagaccgcgaagaaggaagatccccaggcttga

SEQ ID NO: 333760 - DNA, 1827 bp, Pseudomonas aeruginosa
gtgccccaaaaagtccaacgtgttcgctacgagccttcagattctcgaaaaaacacctatgagtgtagtttgtccctgccggagggggattgggttgtctggtggtatagccgtctgaagcgcaacggtctggatcacacagtgccgctggtcatggtcattctaagacgcctggatggagatcttctgcaagacgactttgtgacgaggaaaattgccctaagtcggctctgcttttatcagcccggctacatcttggtggacaatgtcgtttccgagagactcgcgaccgacgccgagtggttcgatgtgagcttccgcatagcgggcaataaatggaactacaaaaaaataaccgagctcggcctcactttcgctgacagtcactttttactacctaaaggctgtgatgatgagtgggcttttgaattcagcactgaagatggcgtaaagctagtactgaactgcatagagtttttggttcgtgggtattcaagacgatcggaaattccgcgaattctcgcaacctacgaatggcacgaagcacacagtcgcctgtttgcacaagccacgccggtgcacgagcagagccctagaggtaaagctgctaccggaaaagaaaagtggattgtctaccctcatcaagacatggtgaaagacgatgatgtgctcttagcgcatattgccaatgatgaaacatatgctgcgaatgccgctaagtctgttttttctcaactggatcctgcccgattccgtaaaggagatgagttgccaatcacagtgcgtccgtggttcaacagcgacacacagctcaaatgccgcggattctggtccgctgaccaaaagcggttttactgtactgagttgatcggtattaaagagccaaccggcataccgatcgaagtccggcgtgatcattcgactcgcaccccaacgcctgaggatcagattgagcgagaccggcaattcacgctgcgtaacgacccaatgaccattgccctgactgacttaaaccagcctaggagccaatatcctcgtcaggaaatagacgatggcacctttgaagtcatcaagactagggtggtaaatagggtcaaggttcccaagctcactggccagccgaagacgactcccaaggacggatctgaaatcgaggacttcggtacaggagatccagctgggcaacgtagtgagactaccggaaaggctgtattagtcaacagggagttcggcattaactcccaaggcatgctgtatgaaatgtggaaatcatttcagcgcctaaaagaaatgcatgaaatcaataatctaggctggtttaccccacccaagaaaatagatacgaccagcgattttcagtgcattgcctttagtgatgatttaactaatgccacagttacaaaatggctgagccttaagaaaggaggaaaaagaggacttctcttaatctttattagggcacaaggtaagctctacatggttgttgaaatccagcgagacgaatggattgacaaaaatggcgcctataaagaagacagtttttccggcctcgtttgcaacatagctgatccgaatgaagcctccataattttcgacgagcttaacaagtatctacctgttaacaagggcgtattcaaaggtttcaaaagttcgcttcctaatgaaattagaactttcgagcatagatcaacagggaaccctaatggttggtgcgatgccacggccgttttagcgctcagcaagatgggcgtgaaggtccgtcggccgcaaatgccaggtgcggaggaacccgagctagactgtgtagactcgagcctatacgtgtga

SEQ ID NO: 333761 - DNA, 795 bp, Pseudomonas aeruginosa
ttggactacttgcctcaggtaattgaatcagtaatcgctgcaggccgtattctggcagcggagtggcaacgcccagatggcccacgcggccgcggcgataaggctgatgtcgacatcgaaattgagcatgttcttcgcgcaaatttgcttgccatcattgactgcgacttctggggggaagaaacagtcagtcggctcacgggggacgagctctgctgggtggtcgacccgaacgatggaaccgcagacttcctgaagggcaatcgtggttcggccatttcagtaggtctgctacgaaacgcggagccggttctcggggttgtgtatgcccctgtgactgatgaacgggggccagactgtatagcttgggaagtcgggctccctgatcttcttagaaacgggagacctataaaacgctgcatcagtcaccaaaccctcgcccccggaactcaggttctagtcagcactgccgcgaataccaagccagagctcaatgcagagctgtgcgccccggccagctttgttcccatgccaagcatcgcttaccgcctcgcacttgcagcggctggcgacgccgtagccggtgtatcgctagtccccgttggggcacatgatgtagttgcaggacatgcactgctgattggagcccaaggtgtcctcctgaaccaagatggaaattcggttacctacagcacccaggcgaagctatctcaagtctcttcacgctgcttcggcggcgctcctaaagcatgtgaagagctttcccagcgttgctgggagaagctctttacctga

SEQ ID NO: 333762 - DNA, 1134 bp, Pseudomonas aeruginosa
atgagcattgaggatcgcataccagagcttaaagcagccatttggaagcgcttaggcaatggggcttacctgcatccaaatggtcttttggataagctgggcaaagatttgggtattcatcctgacgaggtacgccggggctttattcgtctcaaacaagaggactggttaggtaacgtagcattgaatggtcatcctctcggtcgggttaccgtgctcgctcccagacccacagcacagttacctgcttccttggcagcatggcgagaggcacttcaatcagcggatctggaggaggatgctcgattgatgctggagtcgcttcactcgtctaccgatggactatcttcttcaatgctttcaagactggtcgcggggctaggaagccttcgagaggagctgcgccagccctcctctgagccactctttgttttgagttcgaggcatttgcttggatcctcaaagatactgggcaagctgccagcttcacctatgcggaagttttgccctggcttaagcgctcagccggatcgtatcccctacgtagtaactgcgggccctgccgatcctaagcgagtgactttgatcgagaacccttgggcatttgaaagagcgattgaggccggattagctgaggataatgcccttatagctacatttggctatgggctgtccaaggggggggaggcgttcggcaggcaattgcagaacctgctctccgatagctggttgaaacttattcaactacgccgaaatcctgaagtgggcaacctaaccgacttgctagggcatcctcgaatcgagttctggggcgatttggacttggaggccctgcggatctatcggagcctactgaggtcgatcccacgtctaactctgagccgattgtacgagccattggaagctcatcttcgagccggtggcggtcacgactaccatccaattactggcaaagaggggcagcagcctttagtgtctgacgagttcgctggattgcctggtgcacgccgccttgcagaagtttgcaaagatagggggctagatcaagagttcctatcacttcaagaaattgcttaccacgggcggagggaacagagttatgaggagcggtggtttgggcgatccgggcaataa

SEQ ID NO: 333763 - DNA, 5784 bp, Pseudomonas aeruginosa
atgcctttgattcacgcgattgaagtatccaacttcatgaaccatcggcgtcagtcaccctggacgcctgattggcgctacgacagattcttgctgggttgttatcacacggcaatcaatattcctaacggtcgtggaaagagcacaatgatcttgatgctgctttcgatgattgctggccagacacgaacgctcaccgaactcatgcgtactcatagcgcacctgaatcttcaggggcttatacgcatctgcgaatagaaataacccatcgagtgccgcgccatgatgacttacttcatagcctggtcggccccagcgatggagagaggatggttttcggcctcttcggtaatgtgacagaagggcgaccattcagcctctatgcatacagaggcacatttgatgattgcccactggcaacagaggacggcccaaatctccggctcacttctcgtgatgcgttcctggagtgcttagaacgtcaggacagtgtcttccctaaaaaaccgaagcattaccgggatgaggagtggaggcgctttactgccgatcatttcgatatggcatcaatcaagcaacagtacgcttaccagatggcgaatgccgccgaagggtcgagtacctatttcgatgtggcagtccccaaaacgggtaactacagcgctgagcttttttacaagcgtctcgcacctgagctactcgtcgatgtgatgggaaatcatagtgaggaaaatgaacgaggtatcgaagataccattcacgagaaagccagcagcgttgtactggcgcgcaaacggacacgtgatgcatcccaggagttgaaggaggcttcgcacgtcctcgaacggtttgttgagctcgatgaggtcgttcaacagatcgatactgcgagagctgagctggaggccacacagcgaccgctggctgaagagttcgccatattggagcacgcggtgctcataagccctttccctggctcacccagggctcctgcggcagacgccccgaatctttacttatacatggtgcttcagcgcggcgattggtggattactgatcaaggcatctcatacctcttaggtgaaactgttggacacgtaaatcaacgtgcgctgcgtgctcacatcgggcgcacaggtgcgaacaagatacaaaaaacacaagtcattgaaatctattgtgatcttaaaaaaaacctgaccgctgctggccatcctcgcaacctatatagccacgaggaagcccttcgtctctgcagtgaggctgccgatacgaatccaggccgagaccgagaacagctcttcttgcaactgaatgcagcttttgcctgggcacgctatgaagctgacactaaccccgcgcgacaagcaattcgcaaggcaagcagggggctctcagcccttgcagatgaaagaaagcttttggatgcagagagcggtgagttgcaggagcgcgtagctgaactacgccgcgaagaggcgctgttgaaggaaggcggcagcgcatgggaaatgctgaaaaacagtggctgcttcacagaacaagagctcaatgatcctgagcaaacgggaatgacggtcaggcaagaagcagcaagcgccaactatgctttcgatgctcacaatgaggcaatgtccaaacgcaacgcaatctacctgacctggaaagacttctgcgcggaatttggcgaccagacctcccccggaggtctggcaaaggacttggagcagcaactgaagcaagcagatctagacgcgcatcagcttcgtcagaccaggtcgaccgagaaggctttactagataaagcgaacgcggagcacaaactttctagatctgtactagaggagctccggcaacgtcattcagtggtcttagcgcatcagggtaatgccgaaggcttcgctttgcgttttttcggcgaggaggcagaagggctagaactcaaggtcacggagcagctacagagcgcaaaacaagtgctggacgcatgcaagagggaggtgacatccatctccaacgctgtgcagtcggttgaaatctttacggcccagtatccggaaattacaccagccgagtggctcaagactcgaaatgcacaacgtgaagagctcagcacgaaacaagcgttcggccaacgcgcaattgccggtctggagctcattctagagggcttggagcaaaactggttacctgccagcacctttgaacaacattttctaggcgagtcgacagaggggctcgaagcgagtgttcaaagcgccttgcagaaagcaaaaggagaacttcgctttcacgagcacacactccaggggatccaatcggatctgctcgcaatcgatcgattcaatcaacgttttcctggtgtgcaacccgatgggtggctgcttgaacgagaaatacaaaggagcgaggcaaacgaggtacgagacaagtgcacgcaatcacttcaggcacttgtctctcaggaacagcttgccaccgcaaagcgtgtgcaggctgaagcttttgatcgctacttccccaatgagtgtcctactggtcttgccagcagggtcacgacagattgggaactcgctaagcagcaaaaaaacagttacgaatcagagctcaaacttatccaacgtgatctcgatgcggtagagcatttccgcgctcgggtgccagagctactccctacagaatggactcgtcagtggcaggaagctcttaccaatgctcagtttgagcgaactcgcttgcaagacgagcttgaatgcaaagttgaagagcgacgtctgcttgaccgagatccaattgtggctagccctaatgctcgagcggccttggatattgctgggcagaacgctcagcctctttatgcagccatcgatactcttggcctcagcgactcaaagaaggaagcggttctctcgctgttctctgcactgctatttgcccccgtgctccgagacgaagccgaggcaattgagatcgcttaccgccttgccgaagcgaagattgaggttccagtcttcgtccatcagccgctgagtgaattttgccacgacaggacaattacctatcgagatggagtcgcggaaggacttttcgttggcgtgcgcacctggccggttgcatgtcttttggatccgagcctgatagagcaggagcgcagcaggctagatgcccaaatcatccaactgagggccgaggtggaaactcaacaggccatcctagatggtttggaggcggatcgagttttcgctcgtattgccactcatgctcaaggagcgctggagcatggggtacctgaactcggcagcaaattgaagagccagatcgagctgatcgatcaggatctgcccaggctcgctgaacgtgcttcgtcgaccgcaaaggaaactattgaggctcgcattgcatttgccgacgcgctgggcttgccgcctgattctaactgggcacctctacaggttgcattgagcaccctgcagtcgaccatcgatgagctctcctccaagattcgagatgccgaggaaaagctattagcgcttgcaagagacgaggacgaagaggccaatgctactcaggccgctgcggcaatcagggctgggaaaccagaggaggcccaagctcttcgtgagtccattattcagctagaagcagcattgcctgggcttgaagatcgagccaatgctacggctctcctgacaattcgtgctatgacccgactccaagagtctcttggactaagcccgcaggactcgtggatagcagtaaccgaagctcgtgcagcgaaggaggaggaactggctgcgcttcatgaagagctgaatgctgtaaaagagtcgtttgatgatctcgcaaaatcgtcctcaatggagggtgtggcgctggcagccgcgagtgcaatctcagcgggtctaccggaacgccatgctttcctggtcgatcagatagcagaactagactctgaactggttcatttagaagatcgagcatcgccttcagccctggtgtccattcgagccatgtgcaccattgagcagcaactgcaaggagtatcgttgggtgagctgggggctcaagtctcttctgcgatcaaaaaggaggggcagctttcggaagaagtagcgcgactaggcgcatgcctagaggagctcaatgaaaaaatcgcccgcagtcaggaaaaactcagtgaggcctatgatcgtgcaaagcgtgtcgaccaactgaatgaggtacaagctttccttgatgacccgatgtatggcccggtgttcatgcatgatgccccggcacagcagaccgctctaagaagcgcgcgtgataacgccaaccgaagagctgcgttcgagttcgagggggcggtacagtacgtacgtagtggtggtagcgcccggataactttggtgcgtgaggagctggaaaaaggggagaatcgtagaggccaaattgatagcgcgctgcaaaatattctggagcgacaggatcagcttaataaggaaatcgaccctctacgtcaaactgcacaaatgattgatgatgcagtcattcgcattcgtcatgcctacgttgagcgtaagaagaatcaagtcgaaccggtcgaggtcagtgccgaacagctgcatagcaacccactctacataagcctaaattctgaagtcgacagctctcctgaagacatctcccatgctctagtcgatgcatgcgtgatactggattcagatgaggcagaagagttgcaacaacgattcaagatcgcgggacaggatcttaaacgtcacaccgatcagttccacaagctcatcgagaaagtgttgaacgatccctatcttaagattccagagatagcgcgcacgcagctacagcaagcacgaatgagtcctgcaatcgtgacgggaatgctccaggcaacccagaaatcgtatgcagagagtttggaggccaacaatatagctgataaacacctcaccgaggctcgtgaaggtctcagcgattggttggcgaacttcaccctgcgcctcccagacaatcttaagaccatgcgtcagatatttgctccgaaacacgatccagtctccagggtggtaactcgtgcaggctttattattgatgcaaaaactatcgactctgatggggttagatccctgattgagaccatcatttcggacgtagaagcgtatgagtcaagcgagcaggcgcagcactcttccctgcgtgaagccctcaggcgtgatctccgcgccaatatccgtgagaacttctatcggaaggtaattgtcagcccacgaatccgtctggtcttacccgcgatcagctccgtgcctttggaaatggaccgtaagatggcaagcactggtcaggggattgccattactttcctctggattctcaggctggctgagtttgtaagtgagcgggaggttcgtcgtgagacggtaggtgcagcgcagaggcgccgtctacgtgataaagccacaagcttcactatcgtggatggcgctttctcgcatctttcagagaagaacctgatcgatgagacccttcaagggattgaggatagtaccggtcgcttccaactgatcgtgacagtccacgatccggcgtaccagaacgactttaatcgcttcccatccttggtggtcgcgcgggaaatgcgaggccactacatgcgctcatggtctcacctcaatgaaataggtgagaaggatgcacttggcagagacagcctcgctaccttccagactatccaggtgcgtcgcccacctgatgtaccacgggcaaccaccaatgagcattga

SEQ ID NO: 333764 - DNA, 849 bp, Pseudomonas aeruginosa
atgagccccgctgaccaaggtttcgtctattcaattctgttgaaacaccgggagttatccactcgtcctttggggcgatcagcttttcccgatgagatcagggcggcgcggattctgagtggatgtagccaattggcccttgatgatttcgatgacttcttatcaggccaagggttgggactacgcgttctggaaggtgttgccgacctgggcgtaccagatcaaagcgggcgtccgatcatgtactacatcctgtgtcgcaggtttggtgaggagtcacctacctttgtcgactcgaaggccttcctgacagatttcagagatcgacgacgggagcgcttgaacagtggtgatgctgtggagttgaacaaggcgtcgtctgtgttctggtcagccaggctctggctcaccctgcagtacttcttctacgaccgcattgatcgtccagcgggcaacctctacaactggcgcgatgcattggttaaagagtccgattttatcgaccagctaaaggctgacatcgaaacaatgggaaatacagggcgtcctgaaggcgaagctggcttgctctgggacgactattggcaaaagcgagacagcattcctcaaattgctcgccgatttctgaagctgatgaagcagtaccggatgatcgagtcaaccgatcaagatgggatttggcgccaaacacttgtggctgcaaccgacatggccactattgcggagcgatctcttcgctatttgatgccggccgatcaaacagatctcatgccacgtacgcaatctcttattaacggctacgaagagaatcaatcaggagacagcgatgcctttgattcacgcgattga

SEQ ID NO: 333765 - DNA, 1455 bp, Pseudomonas aeruginosa
atggatttgttcgccagtgaaccggacgccgtccccgcggcacggcttcatcaccagaatgcccaggcaaccgatgtcccggccgatgttcggctggtggctgctgtatcccgacttctcgattttcaccagtcgcgaagcagcggcggcagcatcacccagccagaggttccaagttcagctgccgccaacttattcctagcgactacgctcctcaggattcttggacgaattgaactggatcaaggccaagccttggtctcgctcaaattcttatcgcaggagctgagtgacgaggttcctggcctagaagaagacgcgcttgaacactgtatcctatccctctctcgctccagggaaattcggtacggcgttaacaccgaaggcggtgtggtgtatgcgcatacaagtgattcgactcctctactgacatttgacggaagcctgcggcaagtaggtcttactgagaatgcccggttgctaattcgggtttcagagctgaaagaaagctggctctatagcgatcttgatgcgaggcgcctactcatggcgctggagaggaggcagtttggggatatcccgcgcttctgcagagagatgcttcgagaccttgctggtaaggctcggcagatatcagacgttgcagagcggcccgcctatgccgaccttcgagaagcgctgattcaagagggcgccacgatcagtgaggcacttcgcgaagctgccaatctcgtccactccgctatgcaagagcttttctctccaacgattgctagcgcctttgaattgtggaaggtctcgaacagtattccttttgaactcggaaacctccaagcggaaatggagaacgttctacaggtaaccgaaagtctttcccggagattcgtacgtttcattactgaggcgcaaagcgcgcaaacagttcgtgcgccgatagtgggcttcttggacatcgtgcaatcgctgcacaccagagccgatggtctagttgagcaactagaaaccgttgtagccgatcttctgccatggctgccggaagtgagtttcttcagccctgactgcattgctggcgaagtcagtctctcaggactctatgctctaagccttccctctccacctagtgctgcgtttattcagagtgaacaattaaacactcagggggatcaggttcatgcgtttcttgagcgtaatgcaaaggtgattctggataccctgagacttggtccacgtccattcgtggagctaatgacattggaagggctccagtttgaaacggatgagagcgcctccgattttgtaggcgcctattcatacccagaggtttttgagatcgaggatcagcgtgttctcgtcatgcaccaggctggactagtagagatttccacggatcactcgctacttgtgaccagcaatccaattctattcttggaggaagtggacaatgagccccgctga

SEQ ID NO: 333766 - DNA, 867 bp, Pseudomonas aeruginosa
atgaagcgcaagcaatccctgtctcaggttcgctgggacttggctctgaggtaccgacttatagagaccgtggcatggtgggaagggcgccttacaacgaatcatcttatgcagagtttcgggatcagcaggcagcaagcctcgaaggacatcaacacctatcttgccgattatgcgcctagaaacttgacatatgaccgctctcaaaaggggtatgtgccagggaaaagcttcaggcctctattcattgacggtagcgcgggtgcctatcttagcttgctgaaccagaaccatgagcgcgcaccgcatatcgaaggtctagctctagcctatgcgcacaccgaagtcttgggtgtgcccgatcgccctatcagaccggaggttcttcgcccactattacgagcttgccgcgaacagttgaggctggagattgagtatgtctcactgacaaccccgacagcacaagtgaggctcattgcacctcataccctcgtaaatactgggatgcgttggcatgtccgcgcctattgcgagaagaacaaagcctttcgggactttgtcctgagtcgctttcgaggcataccggagatactggatgaatcagagtactcgcgtactgacgatcccgcttggaatgcactggttgacgtaatcatcgagcctgatcgcaggttgaatcctgctcagcaagagatcatcaagcaggacttcggaatgttgggtgggcgactcgtggtttccagccgcggagctttagtgaagtatatcttgcaacgctatcagcttgatcccagccacgttcgagccaaggctgcagttcaacaaatctcagtagcaaatcttgaggaactagagccatggatctag

SEQ ID NO: 333767 - DNA, 426 bp, Pseudomonas aeruginosa
atgagaaaaccaaaatacggcccgagcttctggtctggccccgccaccgcgggggtctacaggtacgctcttctacccgcactgacgctgctacccctgcttgggctatgggtgcaggggaattggagttatggcgctgctgcgctgtcgtgtttcgtttcctacaccctctatatgtgcctgcccgtcactgtgacgcttaaccgagacagttttctgagggagtactggggctatcgcgatgctatggaggcacggctgcaccagtcagatgtattgcctgtagaggagcgccatctgcgccgcaagctgaccaagcttgagtcccaatatcacctcgtattgaaccccgcgcctactatgctaatcgcaagtgtgttggcgtccgtggtatggcggctagctcgtacgctttctcgccactga

SEQ ID NO: 333768 - DNA, 546 bp, Pseudomonas aeruginosa
atgcccaaatatagctacgtcaacatcatcaaatcacgatgcaaagacttcgcgcgcgaaaaccaaataccgctgaacgttgttcatcataaggcagcccaaagtgtcggctttacgagctatcacgaccttactcagatatcaaaatctaatcctttagatatcaggctcatgaggcttgcgttcggtatggaaaagctggaagacgtgatctacgaaaatggaatcctttctgatctggacaggcagcttgagaataagatgtccggagaaatggcggaaaccaatgccacttttttcaccatggagaacgttgagtccgccaatgcggcctatgacgccagcaatggtcatttgacgctggagctgagttttgactggcaaggagaacaggatgaggagcgcccctggtccggcaacgagttcaaaatcgatgccctagtgacactagtgtatcgttccaaaagctggcagctacacgaagaacttggcttgtatattgtcagctctaaatcaaattgggatgataatttttacttcgagtag

SEQ ID NO: 333769 - DNA, 861 bp, Pseudomonas aeruginosa
atgaggacgaacagaggccggacccccagagaaaacgaggttcagacagctatagttgcatctctgcaagtctactgccgggacaatggaatccgctgttccgccttggagtattatgctaatcagcaaggtgactccctgcggaaagtctgcgcagattttttagctaccttggatgattcgacgctattgctagctgagacgaaagtgcacgctagcggtaaactactctcattcgatgacgaacaactgatcgagtatctagcatttgaacgtttcgggtttccaattgcttacgtttacaacacggtagatatcttagcctactaccaaaagccgcagccgattaacttccctacgcttaccctggcggcaatcaaccgttccgtgccgtctttgcttccagataggtatccagaccttccaaatcacacaacactcctggactggttgaagagcattcctactagcggcgatcaaactacacgtttcgcgcgcattttcgctgcaattcgtgcagagaaagtcctaagtaatggattgatgatgctaatttatggcactaagggaatgaagattttcgatgagccgaactctaagaagctcgaattacttattcaatcactgggacgaggcgtttcagggaaatacttgagccctgctcagcagaagcggattgagcactttcttcaagaggaagcgttagccttccgaagctggtttcagcctgtggatccaaatgccccttggcaggatccgacgctatcagaacctgatgactcgactgctcccatccaagccccagatcctgatgacgatgatcaccccagatcccgtgacgcctatcccaggttcaaatga

SEQ ID NO: 333770 - DNA, 153 bp, Pseudomonas aeruginosa
atggtgactgagggctctgagaaccatggtatgccgccgccaggtatcttattcagagcgattctcgaattgctttacctttccctgggtgcagctaagcaaatgcgtatcggcatcgggttatttgtcttcttcaacaacatgtggcgctga

SEQ ID NO: 333771 - DNA, 6261 bp, Pseudomonas aeruginosa
atggcgaagcaaggttctgtaggcccctctaggagcggtgatcagttccactatcaatgggcagcccggcagtgcctcgggctgcttaccggagaaaatggcctagtggcggtggcgatcgaaggagcgtcactggacgagggggatgcatctacgagcgtcggcgacgaggtcattgacgtcggcctgtactacgggagcgaggacgttacagtggcaacgtccatccgctatgtgcagctcaaacactcgtccaagcaagcgcacaccccctggacggcaagcggcctcaaaggaaccatcgaaggcttcgctgggcgtttcaaggagctggaggcgtcgcttggcctggacgtcctggctaataaggttcggtttgtctttctgacgaacaggcctatggacggaactgttcttgaagcattggccgatctcgctgtcgggtcgacagcgccgcggcaccgcgaaactgatgaattgctgaaacggtacgcggcgtcagctagcaacaacgtccagagcttcttcgctaccttctcggttcaagctggcgagccggatctatgggagcagcgcaacctcctgagtcaggatctgagtgcatacctgtccgaaccggacactgaggctgcgctccaactgaaggaactggtcacccgccgtgcaaccgatgaaggagcaaaggaccgctccgtccggctctgcgacgtacttcgcgcattgcatgtgaccgaaatcgatctcctgccagcgccttcgttgatctcagaaccgaagcaggtgcttcctcgagcgcaacaggcagacatcctggccgagcttctcaccacacaacgtccgctggtcatccacgcagaaggtggcgtaggcaagtcgactctttctgcttacctggctcgtgccatgcctgctggctcggtggcggttctgtacgactgcttcggtaacgggacttatcgccaagccttgaagtatcgccatcgataccgcgacgcgctcgtccaaattgcgaacgagctctcagggcagcagctttgtctgccactgattccgtccggaggcactgatcccaagcagttcatgcgggccttcgtatctcggctcaagcaagccattgatcttcttagagctcgcacgcctcaggcgaacctttgcatcatcgtcgacgcggccgataacgcatacatggctgctcaagagattggtgagcgtgcttttgtccatgacttgatcaacacggacttgcccgagggggtgcggttggcattcacatgccgatcacaccggcagagctacctgggagctccccccgatgccatcgtgattaagctggagtcgttctcaaaggctgagacagccacacacctacgactaagctatccagaggcgacggaggcagaggctgctgaattcgcctttctcagcagcgataacccccgcgttcaagcactggcgatggagggcaccccgctcattgatgacatgatcagggctcttgggccaacaccgacgacggttcaacgcgcgattggaggcctgctgaagaaatccatcgacaggctgaaagccgagtgtggcccgacagaagcgaatcagatagacctcatctgcaagggcctcgcggtgctccggcccatggtaccaatttccatcttggctcagatcgccggcgttcccgagagcgccgtccgtacgtttgccacagagttcgggagaccgctattcgtcaaagactcaggtctgcacttcacggacgaacctgcagagacttggttcaacgaaacgtataagccagatgcagcctcactcgatgcgtttctttcaaaactaaagccgctcgcggcgaccagctcttatgtggcggcggcgctgccacagttgctgctgtcggccggccgaatggacgagttaattaccctggcgctctcgaatgagagcttgcccgagctcaaccctctcgagcgaagagacgtcgagctgcagcggttgatgttcgcgctcagagcatgtttgcagcaagggcgatatgttgctgccgccaagctcgcactgaagcttggtggcgaggtggccggcgaggcccgccagaacacgctcatccagaacaacactgacattgccagcgttctgcttgcgccagatcgcatcgaagaaatggtctccaggcgcacgttcggcggcggattccttggctcgcatcacgcttacgaggcggtgctgcttgctggaaaagacgacctcatccccgaggggagaagcaggttgcgcatggcctgggagtcattgatcgcttggagcaagctgccacccaagcgccgcaaggaggatgagattgacgacgccgatatcgccgagcttgctatcggagtcctaaggttgcgaggccctgctaaagccgcacaattcctgaaagcatggaatcccaaatccaccgtactgagaaccacgaagcgcgtggccgcccgacttgcggacatcggcgacttcaagggaatcgatgggctcgccgagcacgccgaggggaatgtctggatgctgttgggcctggcgaccgaagcagtccgggtcgcacatccgctgccggctgagccgctgcgccatctgatgggcatattggtcgaccctaaggtcaagttacccgaggaagatcactcatcgaggtctaggagcaacgtactagacggagtccggtctgcaattatgctggccctcagatgcctcccacgcgacgatttgacttgggctgatacgatgcgccggtatttgccagaagatccgcctcaccagttccatgacgtcgatgacgagcgagcagacttcattcgggcctacgctttggaagccgctctgcgtggaaaacgaattgagctgattgatctggcgccaaaggatgttcgcccggagtttgagacgaaaggagcccctattaggggcgaacaagcatcccagctacagcacgtaacagggggcgtcctcccctggttcatcttggccgctgagatcgcctgtggtcgccagcctcctaaccttgatcgcgaaattgagcttgcgttgggacagactaaatctgcttcgtcacgcgactatcagcagtacttcaacttggagaaagttgctgctgtcgagtgggtgcaaattctgcgcgatgtaggttccattcagcctgctcagatcgactcactgttgaactgggtagaaaagaacggtcgcatctactcgggcactctcacgaggatgtgccgcgtgactgcgcggacagcagggcttggcgacctttcattacgactcagttccagagcgttcaatcaactcgcagagtcgcgcgacgatgcggagacacgtattgacgatctgcaggagttagcacgcgccatcttttgcgtgagcaagtcggaatcggctgcctatttcgacaaggcgatcgacatcgccagcaagataggagaggaacacctctctcgatggacaacactcctggagctggcggacgccgcacgtccatcgggccaggcaagacctagaaccgcctatcgactgtcaaggattgccgaactcagctacgagcatatggcccgagacaagtatatggattgggatcagctggtcgaaggcttggccggtctttgtccttcatccagcctcgcaattctgagccgctggcgagatcgagaattcggctctgctggcgagctattttccgttgcaatctacagcctgatagaccaaggactccttcccaagaaggccgcggtggccctgagtggcacagggacgggatggaagcgcgtcagcgacatcaaagccgccatcgaggcggaatccgacaacaatcggaaaagatcaatcctgcggatcgcctaccgattcctccgtatccagcaccacgaaatgcccacctggcgcgaactcaaggttctggccgactccttggcaatgtcgcttccagatttggagagactgcttcaggcatctatgaccaaaggagccggtgagtcggtaactgcagctcgcgcgccccggaaggtatctcgcaaagaggcgcaggagcccgactgggatgccgtcttcaatggcgtcgatctctgcgacgtagctgcggttctcacggcacggcaattgctcaagaaggttgatggccgttcgtacgctcgcgagttctatgtgcaaggcctacggcgcgcgaaactgtcggagatcgacggatacctccgtacgatccagtttgacgacaagtttaatgtgtacagtttcatggacgtcatcaggcacctctccgagccgagcaagaggctcttgtccgtccgccgcgaactcagaaagacggcacttttgctggctgcaagtgaacccaaccgcgtggggcgccgcggctggggcgatgagggcccatatgatggtctctatgcagagggcatcgtcgtggagaaggacgtcgcttcagctcggatcaaggggtatctatctcagctcgacacccttggcgcgaacgacttgttccgtctggtggagccgctcgcgcggcacttgaccagcgacgaagccgatgaggttttgaactttggctttgacctgctcgaagaaattctcgaaagcgaagacggtgatggcccttggagcgactcgctcgcaccatcatcttcttgcgaggaagccttggctggctacttatgggcgggtctggcgcgcccgtccactgcggcacgctgggcacacgcccactgcgtccgtagctgtcttgagctcgactggcaatccttgctgtccgcgctggccactcgcgcatcgggagctgacccgcagccatttgtcgaccgcggcctggtcttttatgagtggcatgcccgccaatggctctgtattgccttggcacggggcgccatggacgtacctcgtgccgttgctccttttctcgcgttccttgactcttgcgcaagggagcagcacgtcgttatccggcacttcgcctcggatgcattgagacgcctgcatgaagtccataccttgtcatcggatttgctcgccattgcgaacggcgcaaaccgggctgcgctgcccagggacgtctacgaccatcgcgagtacgagatagttgatgacaatgcctcgaatgacgaagccgtggccgatgacgagaggtactttttcggaatcgacatcggcccctattggttcgcaccgttgggccgcgtcttcggtttgaagccgcagtcgattgaacaacgagcatgggcagtcttgcgtggtcgtatgtcgccagggcctcactatcgcgtcgatgatcaacgctacaagcgcgggctctttcgggggagcgagacaagccactcacacggcaggatgcctgaggtggaagactgcctcgtttaccagtcctatcacgccatgatgttcgtagcaggtctgctcttggagaccaagccggtgcgccgtcgcgctgacgaggaagaggatccattcgacgattggttgagaggacagctgctcactcgcagtgatgacaggtggcttgcggatcgacgcgatcccgagattctgaagaacgccgcgtcggagaaagatcgatcagatgcctcatggtgttggcaagtcgataggcagtacctggatgaccagttgataacggatgatggtatgacggcgctctgggggcattggacgaccaccgatacggacaaaggtgaaactgtgtcggtggggtctgcactcgttccgacttgccatgcggcggcccttctagccgccatgcagacgagccctaacccaggagacatttttcttccagacgcggatcacatcgttcatcgggagggggttgatgatttagagttgaggctgctcggctgggtcaagacaggaagtgactcgttgagccttgatgaatatgacccatgggctggcaaggtggctaacccgggcccacagctttctcaggaaatcctcaatgccctgcatccgatgacggatccagacgcgcgatcatggacgctaccagatggtggcaaggcgagaagcgaatcgtggtcgcgcagcacgggttacggcgaggagcgcgatttcctaggcggcactcggctcagcgctgacgacaagttcattcgtgcactgttggatgggcacccgaatgcatctctgatggtctgcatcaaggttcgccgcaagccaccgaaagacgagaccggcgacgattactactatttttacaactatccctacaaccgctactacttgatcggacaagatggaatcactagatcgctctaa

SEQ ID NO: 333772 - DNA, 681 bp, Pseudomonas aeruginosa
atggaatcactagatcgctctaaggctgtcatcgatctcggtaagcggattgttgccggcttgatgctcggcgacgatgtcactgcacaatggatggcgcacctagtagcggagaaaatctccgcagctgaggatgcgtccgaaactgtgcgagattcagcggtggcggagtgcatagatgccatcctgaaactctggtcgcaccggtatatgttgcccccacacatgcgaccgctgagggagctagaccccctgctgcacacgctcaattccttaggtgtgaatgaggctgatgagcttaggtatttcgctcgcccccctagcagcgaagagcttgaaggtgctacggaagacgaagaaaaactgttcgagttcgcaatcggcattgatcatacagccagggaactgatccgttatgcactcagtgttgccgcagaacggtcagtaaacgtggtcaaaccatggctagaggaggtcgtcaagggcggcttggaagcaacagtggaattgcggctcacaagattcgtcgttgaaggcctgctgaaaagtccaaaagaggcaaatagacaggccatactagatcgagctgatcggctggagagttttgcgaaagtagctttgtctctggccaacgatatgagaaagacgccccctctagacaccaatgaatcggttgactga

SEQ ID NO: 333773 - DNA, 1137 bp, Pseudomonas aeruginosa
atggtactgaaggcctcagatgaagccgatgatttacaagtgcgtgctaataaagctgcgctttcggacatgtttgcttccgcacttcagattccaaacctagggttctttgcgggaagtggtacttcgcttggcgctgtcggcggaccgagcatgtgggagctatggcaacgagctatgtgtctcgaggagcaagacaggctctccgaacgcgctgccaaagtcgcagatgccgtccgctatatcgagagaaacaacccaaacatcgagcactttttgtcccagtgtgacgcctatttggcattcaacaacgacgaggaggtcagcacattcgttaatgaagtgaaagccttaattcttcaagcctgctcggagtttataaacagcaacacttcggacatttccgcgtacaggaatctgctgcagaagttagcgaggcgcagggttagagatcctcgactaaaggtctttactacgaactacgacatgtgcttcgagactgcagcatctgatctagggatggttaccatagatggcttctcgtacacccgaaagcgcagattcgatggaaagcactttacctatgacatcgtgcgacgcgaggcggacagccatgagtttatggaaggtatttaccacctcctaaagcttcatggttccgtaagctggagtcgtgaaggtacagagatttacgagcatgtggctccttccccagagagtgcatgcttgatctatccggccaaaggtaaatatcagcaagcattcctacagccacaccttgaactcctatcaaggtttttggagtttttgcgacagcccaatagctgcttaattattgcgggcttcggcttcaacgatgatcacctctctgaacctatttactctgcgattcagtccaacccaagcctcaaacttatcctctgtgatttccaatgtatctctcacctacataatcgcggccaacatggctcaagcccatactggggaaaattccatgatcttgctatggaaggctttgatatccacttcatcagcgcttcattcactgaaatggtcagccacattcctcaccttcgtactgcttcgcctgccgagcaactagcaaatgccgtgagacgcataaagggaggatcgtaa

SEQ ID NO: 333774 - DNA, 1707 bp, Pseudomonas aeruginosa
atggcactggacggaatactgaccagcaccctgaaaattggggtggtatctagtgtcagcgctcaactcattaaaacaaacctagcccatgctggagaggtaagcggacattatcttggcaaaaatcgctatggcaaaggtgaagttggcgaacttgtcttaatcgaaggtcagcaggcagtacttctgggccgtatcacggaggtcaaccttcctgaccgtgatcgaactgaaatctctcaagattttgcagggatccgccagatagacgctattggattcattcgcctgttgggctcgataaatcctcatacccttaaagtcacagccggtgtcagctcttatccgcgcctaggcgatcgggtctactctgcgcctggcgagttcatatcccaaatcccggtgctcacttctgcaggggtagacgcagaattgccacgcgtcactctggatctagggcatgttgcgggcgacaacgggtttccaatctcagtcaccccagaaaagctatttggccggcactgcgcgattttgggctcgaccggtggaggcaagagttggacaacctctaagttgattcaagaatgccgaaaattctcatgtaagctcgttttgatcgatgctaccggggaatatcgatctctcaatggagcggacaccgttcattgccatttgggtgaacctatccatcgaagtgcagagtcgatcgaagtctccattcctcccacaagtttttctgaaactgacttcattgccttgttccagccttcagggaagacccaagggccaaagctcagggaagcgattaaaagcttacggctagctgcgcttgcaccagatctgttcccaaacggaattgtgcgtaaggtcagtcaatccaaaaacatctaccgagaagcaatgaggcgtgacaacaacgccagcttggtcggcaaccccagccaaccattcgagcctaagaacctcgttcagcaggttgtccaagagtgctgctatccagatgccggtgcagacaaaatggatcgctgggggggcgcgagcaacgagctttcttactgctcctcactcatgacccgaataatgagtattatgaactcccgttcactaggctgcgttttcagccctggagacaatctgccaagtcttgttgataacctcgatgctttcttagagggcgagaagcgtctattcaggatttgtctaagctcaatcggctatgaatttaatgctcgggaagtaattgcaaacgcaatagggcgagtgctcctgcagcgagccagaagtgaagtgttccgccagcgccctttgatcgtgattctcgatgaggctcataacttcctcggcaaaaccctcggaaacgaggacgatcttcagaatctcgatgcatttgagctaattgctaaagaaggccgtaaatacgggttaaatatctgtctcgcaactcaacgacctcgggatattaccgaaggcgttttaagccagatgggtacccttctagtgcatcgattgaccaatgatcgagatcgagaagttgtcgagcgtgcatgtggggagatagaccgatccgctgccgcattccttcccaatctcaagcagggagaggtagcaatggtgggagtagattttccaattccggtgaccattcaaattggtcgaccctctcaaccaccaatgtcagatggacccagcttccaagagttgtggtaa

SEQ ID NO: 333775 - DNA, 774 bp, Pseudomonas aeruginosa
atggctaggagagctacgctagaaatgcgggactgggagcgacaacctattatcgcgaagcatgagttctatgtagagcaagcatgcgctcggttgctttcacagttcgagaataaaaatgcagacgctgatcgtgctgggcataagtggctagagcaaaatgaacataactttgacccagaccggcatgaccctggagatttctacgagcgagcttacgacataactatctacttctatcagagcttgtcggatatgcatgagcaaactcgactgagcgttgtagctggaatgttccaccagtgggataaacagctgcgtgagtggattactagagagattagtcactggggtaggctaaagaatttcactgatgaagtatgggcggctccttttgatgatttgatggatctgctagctgcctttgggtggaatgttagagccttgaagtgcagcgataggcttgatgcgtgccgctgggtagttaatgcatacaaacatggtgaaggcaaagcgctggataggttgcgccgaaattacccacgttttttgctacaatcctttcctcaggaaattgattacgcgcctgatccaatacatcgaagctatgaaaatataactgttacagaagatgatatagttgatttctctgctgcaattgtagagttttggcaagccatccctgaggttctaattgtagccaccgaggaagaagacttaactctacctcctcgattcgagcgagcatttaataaagattaccctacggggtaa

SEQ ID NO: 333776 - DNA, 210 bp, Pseudomonas aeruginosa
atgtcggagtgtttttataatattgatttcgtggattttcttgttaccctccacgattatctctatgaaaactaccgcagttactttttgccttgcggatttgagaacgaagcggggtttgacgaaggagagttcctagattgcgaattcaataagcgcatatcgcgcgatgaaatcaatgcctacataagaaaaatcctccagttctaa

SEQ ID NO: 333777 - DNA, 954 bp, Pseudomonas aeruginosa
atgacccgcttgatcacggctgccattagcctgttcttatccatcacggcacttgccgacgctccaaccacctttacggctgctaagtatgctgcgaagcagaagatcttcttcgaccaggcacaaagcgacgatggcgaactctattgcggctgcaaatgggaatgggttggcaagtccggcggtcggatttaccccgagtcctgcggctacgaaacccgaaagcagcagaccagagcagaccgaatcgagtgggagcacattgttccagcctgggtgttcggccatcagcgccagtgttggcagaacggtggacgcaagaactgcgtgactgatgacccggtattccgtgcgatggaagctgatctattcaacctctatccgtccgtcggtgaggtcaatggtgatcggagcaacttccagtatggaatggtgcgcagcgctcctcagtatggagcctgcagtacccgtattgatttcagcagaaaggcagcagagccgcgtgatgaagtgaaggggctagtcgctcgcgcaacattctacatttacgaccgctacggtctttccatgtcccgtaagcaacagcaattgctcatggcctgggatcggcagcatccagtgacgacaaacgaaaggctctgggaaagccgcacagcggcagtcatggggcacaacaatccgttcgtcactggcgagcggaactggacgttgggctacaagccgatgcgcgatggtttggtttcacagctacctgcaccgcgtgctgctctgaacccatctcatccgtcagcggccagtctcggcagcatcatcggtaaccgcaatagccatgtttaccatctgccacagggctgctccagctacgaccgcgtcgcggccaagaatcgcgtgccgttcaacagcgaagcggaagctcaggctgccggctatcgcaaggctgaaaactgccgctaa

SEQ ID NO: 333778 - DNA, 606 bp, Pseudomonas aeruginosa
atgcgatctctaccgaaagcaatcctggaacgtagccagaccttgactgaagggggcgtacttaccccaaaagagttcctacatctgggcagcagggctgcggtcgaccaggctttttgccgcctggtcaaaagcggccgcctactgcgcattgctcgtggtatttactccacccccgtgcgcgtacgggagacactccgccccccatcagcggagtcggtggtgcaagcaataggcgcacaaggcaaccagattgtcgtgacgaatggcgcacatgcagcgacgtcccttgggcttgcaaaagctactcaagctccagaggagtacctcactactggcagaggcaagcggctagacatcggtggacagagagtggacctcaagcacgcgccttactggatgttgtcgctgggttccacaccagcgggcaacgcagtcagagcgatggcctggctgggagaggcgcaagttgatagagcgagtgaaactctgcgtaagaagctggcgaaggatcagtgggacagcctcacggcagtgagagcgagcctgccgagttggatggctactgcaattgggaaagcatcagttcggcacgagatgccttga

SEQ ID NO: 333779 - DNA, 984 bp, Pseudomonas aeruginosa
atggctagcggcgaacacctgaaagcgctcctgcgctcgcacattaagggagatgacgaccatttcctgaccgttgctatgcaattggcggcgcacgaggcgaaacagggacacggaaagcttgcagatgacctgcgagccctaatcgactcggccaaaaaaagccgcctgccacctggttcacttgtcccgatcgggcagcctcgtggtgagctcagcaacctgctctctgttgcactaccgaagacccgctttgcggagatgatcctggatgaggccacacaaaatcgcctggcccgcatcatcaatgaacagcgcaacttcgagaaaatccgtgcccacggcctttcgccgcgccgaaaactcctgctagtaggtcctcctgggacaggtaaaaccatgactgcttcggccctcgccggcgagcttggcatacccctctatatcgtgcgcctcgatagcctgatcaccaaattcatgggcgagactgcagccaaactgcggcagatcttcgatgcaattcgcgatacccgcggcatctactttttcgacgaattcgacgccattggctcccagcgtggcctggccaatgatgtgggagagatccgtcgagtactgaacagcttcctacaaatgatcgaacaggatcagtcgaatagcctgatcatcgccgccacgaaccaccccgaaattcttgactacgccttgttccgccgcttcgatgatgttatcgaatacggactgcccaaccaggaacaaaccaaggctgtactcaagaaccggctgagtaatttttcgaagtcgattcgtagctgggacaagctctgcaaggtcgcagagggtctcagctacgcagagctggcaagggcagcggacgacgcgatcaaggacgcgatcattcacgatcgagcccaggtggcagtcacggacgtggaaaggcaccttgcggagcgaaaggctttccatgggagacagcgctcctaa

SEQ ID NO: 333780 - DNA, 2505 bp, Pseudomonas aeruginosa
atgacggaaccgaccaaaggacaacggccacactttcatatccaaggagagggaatccctgaacggttccgatctactgcttccgcaacacgaaaagtccggtacccgcagcaggatcgtgcttcccacggtcgaagcctactagaccaactcagttatgcaggccagcgcatagccgaagccgtgcatatgcaacgcgaggcctcgaaatccatcaggccagatggcggatatggccttcagatcgagtttcgcagcgagcctggttatgcgcttgcgttcgagggccttgctcgaggcgcccaacgcattgaactgatgaatctgcgccatgacccgaccactgataccgattttgcgacagtctttattcctgacggacagctaaaagcctttgaaggcctggttcgccagtatttagaagcgaacactgataaagggaacccacgtaacgcccccctgctaaatcccatccaggaaatacgagtcgccgcattcaacgcactctggaccgatgatccgggcgtcttgccagagaacgagaacgaagccatctggtgggagttctggctacccaccagggaaaaccgggaatctgttctaaatcgtttcctatcgattgctgccgcttgtggctttgaaacctcggacaaggtgctgaacttcccagagcggacggttcttaatgttctggcctcacgagcagccatcactcgaaatctggcactactgaacgaagtagccgaaatacgtagagcaaaagacactgcggaattcttcgacgcactgcccccagtagagcagagggagtgggtagaaaacctgctggaacgcacctccacagcgagcgaagacagcactcgtatctgtctcctggatacaggtgtgaaccgaggccacccactacttgaccagcacattgcccgcgacgatctctatacagtgaaccagaactgggggctcgccgatacgactggtcacggcaccgagctagccggcatcgcactgtatggtgatctacagacacctctcaccagccaagcccccgtttcagtcgaacaccgtctggagtcggtgaagctattgccatccgcccaggggaacatgagggagccctatggtgcattaatggttgacgctgtgacgcagccagatactgcaaagccccatgtgaagcgtcttttcagcatggcgatcaccagcgttgacgatcgagaccgcggccgcccctcggcatggtccgcagcggtagatgagctagcttgcgacgttctgggcgagagagctaacccgcgcctgatcattatttctgccggtaacgccgacaagaatcaggccatccgctacccacataacaccaccaccgatggcatccatgatccggcacaggcctggaatgcgctgtgtgtgggcgcctacacccaaaaggtcaccatagaccctccaaaccctcaattgcgtccaattgcggctgctgacagtcttagtccatacagcacgacctctggaacctggaccaaatcagcatggccgctgaagcccgatgttgtgttcgaagggggtaacctggcatctgatggacatgcagcctataccgagccctgcctctccctggttaccacctcgcaccagccaacccagcgcctcttgaccacgaccagtgccaccagcgctgcgtgcgccttggctgcaagaatggccgcgcagatatcaacagcatatccgcagttctggccggaaacagttcgagctctaatggttcactccgctgagtggccacaacgcatgcaacaagatttcctgcaagcaaacaccaaggctggctatgagaatctggttaaacactgcggattcggcgtgcccaatctgagccgcgccttatggagtgctggcgactccctgacgctcatcgtcgaggatcagctcaagcccttcatgcgccagggtaccaagccaccgaccgccagagacatgcacctccacttactaccctggcccaagcaagagcttttggatctcggtgacctcgatgttgagatgcgggtaacgctgtcctatttcgttgagccgaaccccggcatcgccgagcgaggagtcaaaggtcgatatcgctatgagtcccatggtttgcgcttcgacgtcagccgccccaacgaagaccgcgaccagttccgtcaacggatcaacaaacgagcacgggatgaggaagaaggaacctatcaaggtggaggctccgatccgaactgggtgctcggccctcagaccaggcaccgaggctcactccactcggatatctggcatggtaccgccgccgacctagctggccggggaacacttgggatataccctgctctaggctggtggaagacgcttgtgaagcaacagcgatacgacgatacagtcagatacagcctcgtcgtcacgataaagacgaagcagaccgaggtcgatctctacacagcggttgagaacgtcatcgcagccaaacctgttattgagacctag

SEQ ID NO: 333781 - DNA, 315 bp, Pseudomonas aeruginosa
atgaagatcacagctatggagcagaccgaatcggtcagtgatgttctgtgcgacgtttgtggctgtagcacgcgcgttgaagggtatggattgcaattcggcactcttcacgctgtttggggttatggctcgacccacgacggcgagcgctatgaggtccatctgtgcgagctctgcttcttcaggacgatttccggcctcagacgagagcgcatggtgaacttcatgttcagcgatgaggaccaagacctcgctgattttggacgcattgctcgcgataattttttcaatgacggaggtagctcgacctcctga

SEQ ID NO: 333782 - DNA, 1332 bp, Pseudomonas aeruginosa
atgacctgttacgttcggatgttcaaacgccagctatgttcggggtgtgggaatttttcgcggctacccgtattcgatgcggccgcggtctgccggaactgtgagcttcagaagccttgtgttcgatgccatcgggtcggtcgaaagatcggtaagttgactcctgacggtccggcctgtgcatcctgcgctcactactttcgagagcctgaaccctgtgagcgttgttctaagtcctcgacgcgattggttcggcaagagattgatgggcaggtgttgagatgctgtccgacctgtatctccgggcaaactaggtcgacttgctcgtcatgcaggcttcccagggtagctgtaaacgcagaaggccctccattgtgcaaaaggtgcgcgcttctgggcgaattgccctgtcctatatgcacgcgaatgatgccggcagggagagtgcagtcatgccaggcctgttccttggatcgttcattcgagactcgtctaaaacgcttgcaggccagcactgaaaacagccgtttgcaggtgtcactgtctggctttgcaatctggctcaaagctcgcaggggcgcacagttcgctacgttcaaccttcaacgttatgtccccttcttggcggagcttcaccagcgctgggcagagatacccagctatgcggtgctggttgaccacttcggtgctgagggactccgccgagttcgctcagtggttttctggctccaagataccggccagttgcacgttgatccggtgcttcgagagcgcgctagtgagcgtaggcggattgctcacttacttaaggtatttccggatgggcctgcgtgcaccgctctgctcggctaccacagctttctcgggcgacgtatggagttgggccagcttcaactgcgctcaatgaggatcgcgctaagtagtgctgttcggttgctgttcagtaccgatgcaggcggccagcgtctaccagcacagaaggatctgctccaattgttgcgtaaacggccaggactttgggcttcgctctacggctttgttgggtacttgaatcggcggcactccgtgaaactaactccatgggtggatccagcgtggctgactagggcagctcatgccttgaaggaaagcaggctgttggcgctgtatgcaaagggcgggactgatgaggcacatgagaggcgttggatcagcatggctttatcgtgctttcacggggtgggacgtatcggtatgaagactttccaataccgtcccgccgagcatgagggatattcggggttcacagtactcctgcgaggtgcggagtactgggtacctgctgttgtgtaa

SEQ ID NO: 333783 - DNA, 1125 bp, Pseudomonas aeruginosa
atggaagaaggacatcagctttggcatacgggaagcagtgttatagacccccgttggcctctcgttccagcccttcgccaggacgagctcttctcgtcatggttgatccgttgcgccctgtgtcatggctgtgaccctttggagctagcacagctaatttggcctgctcgccgtatctggacgcgagattgcgatctggttgtctgcggtatttctcttgcggccctctctaagcagtctggtctcagagagaggagtttgagagacgcaacattggagccggtatgcaagctacttggtcatgagttgccaagagccggcattactccttgggtgcttgccttgggtggacgaaacacaaagcgtgctggcgggctccagtactgcccaatctgcttcatggatgctcggccttactacaaggtgcaatggcgcttggcctggcatacctactgctctgagcacggggtgatgcttcgggatcggtgtccgcattgtcaggcggttctttctccccatcgtttggactaccaagccgtcgacttgagacggtgccaccaatgccatgggctgctttctgaggtagatcctgctctcccaccggccggtgccaaagaactggagttgttcgctgattcgatcgtgcgaggacggtcagacggcttcggtggtctgaggctggggccagaggactggtttgctctgatacgcgggctgcatcggttaatgagggctttgtcgatacatcgcaccgggcctgctaaggattttctagcgctcctggacgtggatctagatgctctgccctccgtgagcctgggactggctttggaaagcttgcctgtgtctgatcgtgtcacctacctgtcagcggtgaactcgatcctcaatgcaggagcgacaaggttttctgcagctgcggaggcgatgcacttgtgccattccagttgtcaggctgccggcatcggaacccttgcatgtttggcgcagctactgcctaagacaagtcctcgagcacatgtgcatggtgcatctgagcgactttcgccacgtagcaagaacactgtcctgcgatcctggcttctgtttcagagaaaggcctgccgtgcaggagtcattcggtag

SEQ ID NO: 333784 - DNA, 882 bp, Pseudomonas aeruginosa
gtgaccaattacagtcatgtgcttccagagtttcgttggcagtttggtctttcggattccgagcgattatcaggaatttcacgccggtggattgactatgagttcgctgacaaacttcatgccatgctctatgcgaagctctgcggtcaccgtgatcagccagatattttcattctgggtgactctcgtatggggaaaacaactcttgttaaacgcttcattgaaacgcgtgccccagagtttatcaacagtgagggaatcagagaaaaacccgccctcatgattgagttggatcagccaagccctaaacagtttcttattgaaattttgagtacctcgatatctcccttcaatccggatgcgaccttcgagaatctctttttcaaagcaatgaatatgctagagaactgtaaaactaagatgctgatcattgacgaaattcagtcgctcaatcaaggcactgctcgggaggtgacggctatttcgaggctcatcaagcgggtaagtaacaagacaggcatttccatcgttggggtaggcgtgaagtctgctcggcagctgttggtgaaggacgagcagtatgctaatcgattcgtggcggttaacgttcctgagtggaccgcttcaacggctttccggcagtttctgaaaggcttcgaatcatggcttccgttgaagcagccttctcatctatctagcaaggaaaaggctgcgctcattttgcagatgacagggggcaacacctcgaaagttgaggagctgttgcttgattgcgcgcgcctggcgattactactggcaaggaatgtatagaccttgatctgcttggtttaccgagatggaagaaggacatcagctttggcatacgggaagcagtgttatag

SEQ ID NO: 333785 - DNA, 1926 bp, Pseudomonas aeruginosa
atgaaaggagccgaaaccgagggacttgctcctagaagagcatcggtgagtcttcagattggtgagtttgtatgtcacaagggggagaactatcggctctcagggaatatggattaccaccacatggtgggtattcatgtcgttacccgtatatctaaagccctaccgattgcagagctgaaacgtgttacgtctgaagaagctagagccgattctataagttattctttagatcacgtggccgataaggattgggccgaagctgaaaggcgctgggctattatcttgccgctaatcaagggcgatttgtataagtcgggtgctgtagaggctagggcgaaggaatgcaatgtaagcagagctaccatctaccgttggattgagcgctacaaaagcacaggtgaatacttagcgttaatacctaaaagtagggggtggaaagaaggatcatcaaggctgtgtgataaggtggagcttatcatatccaatgttattcagtctttttacttgactacgcgtaggccatcaaagcttgaagttcacggggttatttcagatgcctgcaagttacaaggtttgccgtcgccatcgttgcctgctgtctcaagacgaattgagcaagtgccgccgaaagttaggttaaaggcccgtggctatggggatgtcgctcgagatacctatgagcctacgcctagtcgttatgaggcggactatcctcttcatcgtatccagatcgaccatacaccagcagatgtgataattgttgatgatgtcttccgtcgcgctattggtaggccatttctgacgctgtcaatagacatgtatacgcgattgattaatggctattatttgtctctatatgagccgtctgcgctttccgttgctatgtgcctagttcaggctatgctgccaaagcataaatggctaaaccatcacggcattgatggtgaatggaatgcatggggcaaaccttatgaggtacatagcgataatggtccagatttcaaagctaaatcacttatccagtcgtgtactgttcataacatagagcgagagtttcggccagtaaaaacaccgcactggggtggccatattgagtcacttatgaacaccaaggctaaggcttttgctacgttgcctggtgctacctggagaaacattaatgagcgcggagaagtcaactctgatggcaaggcggctttgacctttgctgagtttgaaagatggctcattgcggagataattaagtataacaacaagccgcacagtggtattgcatttatgtctccagccagtaaatggcatgaggcgttttttggcagcagtttgaggaggccaatctgtggtctgccgcctgtgccggaatgtcccattaccttagagattgatttcctaccatctgcctataaaacagtgcagacatatggcgtagagtggaatgcgtgttattacgcagaggttttgcgtccatggattggtcgtaaagatccctccacaaataaaacccaaaagatggtttttagacgtgacccgagagatattaactatatctggttctttgagccagtagaaggtaagtatcacaagataccaattttagatgacccatatcctggcgtcactgtagctgagtacagaaaagcaaagctgcaggtcaaaaaagaaggcttaaacatggctgactcgggtgtcgtcaggaaaatgatagcgcttcaaaaaagtatcgttgaagaagcctctgctaagaaaaagtcgttacgtcgagaaggacaaaaaacaaaaaataacgccaagtcgagaactcctgcagttgtttttacaggcgattctgtgccagcaagcaatcctgtcaacgtcacaccaaaagttattggtgatgagtggggcgatgatggggaggttacgctttacggaggtgtcgtgtga

SEQ ID NO: 333786 - DNA, 609 bp, Pseudomonas aeruginosa
atgcgtggcattttgcgtatgaccgtgctggctgccgcagtgttcggggtggccggcaatgcgctggccgaagactggaagctggccaaggacgaggatggcgtgaaggtctacctcagcagtgtccagggctccaagtacaaggcttatcgcggcgttaccgacatcaaggccgacgtggcgaccatcgaggcgctgcaggaggacgtcaagggttcctgcaagtggatccatgcctgcgccgagatgaaactcctgaagcaggaaggcgccgacgcctggacctactcgaagatcgacatgccctggccagttaccggtcgcgacgtggtcatccatgtcaccaccgagaagactgcggatggcaccgtgatccgtcaccttaaggccgatccgacctatatccccgaggaaaagggccagatccgcgtgcccaagctggtcggcgagtggaagttgcagccgaaggggcagggcgtgacggaagtgacctaccaggtggaaaccgagccgggtggcagcattccttcctggttggccaacagcttcgtggtcgacgcgccgctgaacaccctcaagggcctgcgtagcgctgccgagaagcgctga

SEQ ID NO: 333787 - DNA, 552 bp, Pseudomonas aeruginosa
atgcctcactggctggtaatcgatctggaggccaccaccgcggaaggcggctggcccctggaggaaatggaaatcatcgagatcggcgccaccctggtcgccgccgcggacgcccgcgaactggaccacttccagcgtttcgtacggccggtcaggcggccgctgctgacccacttctgccgcgacctcacgcatatcagccaggccaacgtcgatggcgcagcccatctcaatacggtctgggaagccttcgagcgctggctcgcccagcatcgtccgcgactggccggctgggccagttggggcgactacgaccgccgccagttggagcaggaatggcgccagcacgggctgaccagccagctcagcgaagtgccgcacgtcaatctcaagcaacgcttcggcgaagtccgccagttgccccgcccagtcggcctgaacgcggccctgcaactggccgggatgagtttccagggccagcagcaccgcgccctggaggatgcccgcaataccgcacggctgctgccgctggtattgccggtggagcattga

SEQ ID NO: 333788 - DNA, 969 bp, Pseudomonas aeruginosa
atgccggcacccggtgcccgggtgctctggaacgcgcttttcaacaagccgagaagcaccgtcccgcggcagcctttacccgtgctcagcccgagtcgtgccgagctcgatgcgaccgtcgatggcagtctgttccgcctgggtcattcgaccttgctgctgaaactggccggtagctggtggttgaccgacccggtattttccgagcgcgcctcgccgttgccgttcgccgggccgaagcgtttccatgcgccgccggtggcattggcggatctcccgccgatccgtggggtaattctttcccacgatcactacgaccacctggaccgcgccgcgatcaaggccctggtcccgctcgtcgaactgttcctggcgccgctcggcgtaggcgaccgcctgctggcctggggcgtaccgccaggcaaggtgcgccaactggactggtggcaaggtatcgaggctggcggtttgcgcctgactgccacgccggcacagcacttctcaggccgtgggctacatgatgggaaccgtacgctgtggtgttcctgggtgatcgaaagcgccgaactgaagctgttcttcagcggagacagcggttacttcgatggtttcgccgaaatcggccgccgctacggaccgttcgatctgaccatgctggaaaccggcgcctacaacgaacattggccgtacgtgcacatgcacccgcagcagaccctccaggctcaccgggatcttggcgggcgctggctgctgccgatccacaacggcaccttcgacctggccatgcatgcctggtacgagccgttcgaacggatactcgaactggccaccgaacacggcgtgcgggtttccacgccgatgatgggcgagcggatcgacctgcaagcaccgcatgccggccgacgctggtggcgcgaagtggtcgacagcgaaacgcaggtgcagggttacggctgttgcagaagctag

SEQ ID NO: 333789 - DNA, 1176 bp, Pseudomonas aeruginosa
atggataagccttactacccgtatcgccctatatcttcaattgatgctctcgcaagaaccttaggcgtcgtgcctaagcttctttgtgatctcgccgatgatcctgctacctcttatgtgaaattcacaattttctctaagaacggaaagcaacgagatgtatatgagccgaaatatgagttgaagaggcttcagaaaagaattaactctaggatttttgagctcgtaatttttcctagctacctgcaaggtggaataaaggatgtggaatttcctagagactatatagagaatagtaagattcatgcagggtctggtgctcttgttagtgtggatataaaggatttttataattccattcgagagcctagtgttttatcgatttttaagaatttttttagtttcccggacgatgtgagttgtttgttgactcgactcgtcatgcttgaaggtagagttccccaaggcgcatgcacttctagttatgtggctaatcttatttttcataactcagagtattcgttggttagcaagtttcgagctaagggtttggcgtattcgcgtttgcttgatgacgttacagtctctgctactaagcctatttcccaggaagagtcgacgctagccattaagtcaatagccgcgatggctcgtaagcatgatcttcgccttaactcaaagaaaacaaaaattgagcggtcagatgatataaatgcagattatgcagtgaccggagtatgggttgggcatggcgttccaaagctgagaaaagatgagcgccgacatataaggcatctggtttatatctgcgagaaagagtacgcgaaagactgcttcagtgtagagtaccattcgctatggaatagagtttcaggtcaggtttcgaagttgacccgcttgaaacatgcgcaggctaaatctttgcgtgagcggatgggtaatattcttcctaaatatgattttcaagcaaaagcaaaaataatttatgagtgcagtaggctcttgaggaggcctgtctcatctcataagaaaatcggagtaataaataactatcggcggttgatatattctatagggattttgtctcgaacagataggtcaacagctaaggccttgaggcgacagttagtcgagagatttgcaggcgttcctagtaaggctgagatgtggagttaa

SEQ ID NO: 333790 - DNA, 216 bp, Pseudomonas aeruginosa
atggaactggaagagcttaaccccagcgccctgatagggccgcaacaggatgtggagtccatcgaacggtgggcggagcgcaacggcattagctatggcactgcccgcgcctgggtttaccggggtgtgctgccgtccgtgaagcttggaaagctgcgcatggtgaatagtgcgctgttgcgtacctggctgctggaacaggagtggtcggcatga

SEQ ID NO: 333791 - DNA, 828 bp, Pseudomonas aeruginosa
atgaataaaaacaccatatattacaaatatcgcgggtgctcacaaagaacatgggaaatcctagttaaccgagagctttacttttcattatccaaagacttgaatgatccactcgacacctctaccgatataaaaaaagaatacgaacgagcaaaagaacacatatacagaacagaccaataccccgacaaaagaaagtcttttcttatcacaatgctagacagcattaacaaaaaacacccagaaacaggcgaaacactcacgttaagcgaagcgattacagaattcataaaaacgagaggaatactctctctctcaaaaaaccccaatgatgctttgttatggtctcactatgccgacggacatcgtggagtatgcctaggcttcagcgcagagatactcgaaatcagaatgggcggcagctatggggacgtgaactatacgactacccccccatattttgaaaaattccttgaacttacagatgaattcggaaaattctgcaaaccttgggataatgaaaaattctctgatgaacaaggtaaagaattctacaacaagcaagtaaccgacctattatctattggattttacacgaaatctaaaaaatgggaatatgaggaagagtttaggctaacatcagttccaggcaaccatcccttccccccttcagcattaaaggaagtaatacttggagcaaaaatatcaaaaaaagacgaaacaactatcagaaattttcttatcaaccccatatactcccacgtaaaaattaagagagcatataatatacctggaacatttgacttcgggagcgagcttgctgattag

SEQ ID NO: 333792 - DNA, 1455 bp, Pseudomonas aeruginosa
ttgcacagtaacaggatttataattacattatgtcttcacgcaaagattgcaagaaaccaataagggttaacccaggtgtaaaattcacgctacgctcgccggatgacgaggggtgccttgacttcacaaccagcgtaatcttattgaatgcatattcagccccgaacaaaaagcttattcgatcagcactgaaccccaatgcccgcaagagcaaacttattcctgaggaaataaatgcctacaatctatttattcatgagtatacgcactatctcgacttaacaaccacaacatggggaatggagtttctctgccgcaggagtatcgcactatcgaaaattcttgcccagggaaaatcagcgctttcagtcgcgatgctgaacgctgcagaaatacagatgcatgatgatttcaatcttgtacatcgccaagtcaaactggaaaatttggtgacaaagcacgagctaatctactcagaaaggcacggcacggtcatcattatacacttgtacataaatgattatcttgttgctaaaacgtctgtcagcatgctctcaatactcgaagccaatgctgttgcccatgaatatgagggggagtataagtgggtagcctgcacgaaggggaacgtggataaacttcagcacggcaggatagatgcgaagttcacgcaactactggaaaacagcaataggcttgagtacaatattatccacattcttgttgcaattcattttcccaagcaatctctccgtcataggcttaaaattgtttccacgctttgccacattgcactaaacatgtcgagcctggacttggccatactggcgaatataatcaacgataggatttttaataagcatttaggcgatgcactttgcaatgatctgtgtagaggaatgtcacgacaggtggtggtcttctatctcgtgctcatgctctacgaatacattgaggaagttggcttcaccacggagcggatcgctcagaaaattgaaggcgatcttctccagttagttaatgaaatgctattgcatcaaggctttgaacaccccctatctcagaggcttagcgaccttgaatttggcacttacattaaagccctgaggcgagatcgtggtaaattcataatgccaggcacgttaagagccgcagcattcaacagaaagcttcttagttataatcgatctactagtcgggcgtttcggaggcttaagctaccggacataattctggatgaccactctaaaatacgtgcaccgtctcgtataagatccaatgtagtagctcactgggaaagtatgtacgacgaatgtagcgagcttgattatttggcgaaagaccctgatgtcatgaagaaatttcacatgcctccgggggtgattggcccgatgcagcagcggcgtgaaattcatttcaggcagcttatgaatatgaagttcgatgaaccatga

SEQ ID NO: 333793 - DNA, 492 bp, Pseudomonas aeruginosa
atgcgatcgcttgacgaaaagcttttcaaattcgcccaagataatgacctcatctacacccgatacgcggacgacctgatcttttcctcaaggcagccgttcgacagaaccgttccgtcggcatacattcttgccatcaaccagttgctacgtgcagagggttactggcccaatcgggccaaaaccaaagtcgtcacacctggaacacgaaaagtcgtgttgggattgctggtagatggctcggagccgaggctgaccaaaacctacaagaagtacgtcagggaccatctgtactatctgtcgcaccccgagataagccccgagctacatgccaagcgcaaagggtttagatcgctacagggattgataaaccatgtcagtggcaagatcgcctatggcatcagcatcgagccagaatgggggacggcccagggcgaaaagctgaaggaaatttgccagaagtggcaggtagatcacgtgctgttcccgtga

SEQ ID NO: 333794 - DNA, 687 bp, Pseudomonas aeruginosa
atgaaacgctggagccctcaggcttacttgaaagcaggacgtgccgctggtattcctgaggacgttctccagagcgcggtaaagatcgccgctcaaatgcatgagggttgccccccgattttttccctcaagcatttggccaatctgacgggcgttccgtatcctttcctgcacagaaccattagcagaacgtacaagacagaagcctatacagtgttcatggtccataagaccaacgttggccatagtcctgatcgatttcgaaccatctgcgccccaagccctgagctactaaaagctcagcgctggatcaacaaatacatcctttcaaacatcccaagccaccatgcaagctatgcctatgagggccgtaacggtgtgctagaggctgccaatgtccactgccaagctacgtggctaatcaagctcgacctcactaatttctttgagtccatactcgaaccaaaggtcttcacactattcaggtcgctgggataccagccgctcgtagcgttcgaactggccagattgtgtacgcgcactcgcaaaacggggaatccgagagtgatgtctcgggctgggggggggctcaccagcgttgccctacaaaaacagcctaatcggacatctacctcaaggggccgctacctccccgaaaatcgcaaaccttgtcatgcgatcgcttga

SEQ ID NO: 333795 - DNA, 1284 bp, Pseudomonas aeruginosa
atgggcttgaacagggggagaagcgtggcgcagataagtcagagggatacggccaagctttggctctcacagttcgaccgggaaccgagagaccggaggcttgctgagaggttgctcaactccgtcaattactgcccgttgaacgaattcaagagcagcctcgtgaagcttactcgcgacgtgttaccacttggccaaccttctgcgctcttcatagagcgagagctccaacccactaaggcaaaactcccccctccgatctaccagcaaagaaaaacctacagtaagcgatcggggagaaggcaccaaagggcctacggcgccgccatccaagcgatcaaatcaatcacatataaaatgcaggagatcggtagcgaaggccatatagcttcgattgcaaataccctttgtcgccgaagcggcacccgtttcctcctgcagcctacagccgagaacgtcaggcagtcgaaagtaaggaattttgtggtgctcacggacttcatcggaagcggcgatcgggcacggaagatgttggatgcaatgtcaaacgtggcatccatcaggagttggttctcagggaaattcgttaaattctgggtcttggcatacagcgggacagatcaaggcatcgccaacgtgcgtagccacaggttcgcgccgcgcgtgcacgtcgtcacagagtgccccaccctctataacagcttcgaacatgacttgaacgacatgctcgaactctgccaagcatatggtgcccatagcgataaaccgctggggtaccaggacactgccgcgctactggtcttcgagcacggcgcaccaaacaacatgcctgcgatctttgtgtcagagaagaaccgaggtgccaagcgttgggcggcattgtttccaaaacgagtgactgagattttctggggagcagaaaatgacgatgaggccccgctgatcacagcagcactcgaagctttgggacttcccgaaattcaaagcgcgccgagctttcggcgagcaggaaataaggtcaagttagccatcatcattctcctcgccttctctcaaaagaaaagacgagtggcggatattcgtcggctactgccgctttccctagacacactgctgcacgcaataaacaacgcggtcaggcgagactgggttacagcgcatggtgctctcactctatccggccgtaagcgcctaagaatgttgaagcgccaaggtgctaaacattttgtagcacccgaccctttctttccgtatcatcctgagcaactgagggctccgaagtag

SEQ ID NO: 333796 - DNA, 2079 bp, Pseudomonas aeruginosa
gtgcagttcgagggtctctccggcgctcaccagcagcgtcagcggatagtgcgtctgctcctggttgctaagcgcgtcgatccgcatgtccgccggtgtctcttccgccagcgctgcggaaaccgggtagttctcgaataccaggatgttgtcgaacagggcctcgccgacctgcccggcccaacgctggatgtcatacaacggcgtgtgctcgaactcgcgcagcgccaggttttcaccctgcaccgcctgcagccagtcgccaatcggctgctccggacacgggctggcgaccaccggcagcgtgttgatgaacaggccgatctgctcctcgatcccgcgcagctccgccggacgaccggatacggtggcaccgaaggccacggtgtcctgcccggtgaagcgttgcagcaatatcagccaggccgcctggaccagggtattgagcgtcaccttctgctcacgggcgaactctgccaggcgctggctcgtggtgacgtccagctgccgatagcgatcggcatggccctcggcaccccgcaccccgtgggcgaacgccggaaccagcagggtcggctcgcccagccgctgaaggcgctgcttccagaacgcctcggtgcgacccgcatcctggcgttgcagccaggcgatgtagtcgcgatagcgcccatccgagcgcgacggcgtctcgccgcggtagcgctgcaagacttcgccgagcaactgcgagttgctccagccgtccatcagaatgtggtgattggtgtagatcaggtggtgccggcgttcgccggtacgcaccagcaccagccgcagcagcggcgcctcggcgagttcgaagccgagcccggcctcgccggcggcgagggcatcgagcgcctcggcgaggtccgcgcggtcgcgccagtcgtgcacgctgaacggcacctcgacgcgcttgcgcaccagttgcagcggtttttccagcgcgccctgccagaggaacccgctgcgcaggacttcgtgggcatccagcgccgcctgccaggcctcgcggaagcgttggggatccaggccttccacgtccagacgcatctggttgatgtagtcgccgctgttctgctggtacaggctgtggaacagcataccctgctgcatcggcgacagcggatagagatcctccacctcgcccgccgccaggggcaaagcgtccagttgccgctggtcgagcccggccagggggaagtccgaaggggtcacgccttcgacatcggcggcgcaacaatgctcgatcagcgccagcagctcgtcgcgataggcatcggccaggcgaaggatgctcgcctcgctgaaacgcgcggcgctgaagctccagtcgataccgagccggccggcatagacctggccgttgagactcagccagttgtccagcggcgcgtcgctgtcgcgctcgctgccggccgcatcggcgctgggacggaacagcgcggaggaatcggcggagaagctgccgtcgaactgtcccaggtagttgaaggtgatgcgcggactcggcagggccgccagcgccgcccgatcctcggcgctgccgaggtaacgcagggcgccgaaacccagccccttgtgcggaatcgcgcgcagttgctccttgatccgtttgatcgaagcgcccagctccgccaccggcgacaggcgcagcgggaacaggctggtgaaccagcctaccgtgcgggtcaggtcgatgtcctcgaacagctcctcgcgcccgtgtccttcgagctggatgagggtatccgcctggccggtccagcgaccgatgacccgcgccagggcggtgagcagcagatcgttgacctgggtccggtaggccgccggcgcttcctgcaacaaccggcgcgtggcctcttcggtcagctcggtacgtgccgaacggacatgccggaccgattgcgcaccctcgcgatcatcgcagggcagttcggtggatacaccttcgagctgcgccagccagtagccgcgctcgccctccaggccgccgtcgcgggcatgcgcctgcaagcgttcggcccacgccttgaaggcgctggtcttggcgggtag

SEQ ID NO: 333797 - DNA, 9459 bp, Pseudomonas aeruginosa
atgccgctgagtccgaacggcaagctggatcgcaaggcgctaccggcgcctgaagtaagcgtggcgcaggcaggctacagcgcaccgcgcaacgcagtggagcgaaccctggcggaaatctggcaggacctgctgggcgtcgagcgggtcggcctggacgacaacttcttcagcctcggcggcgactcgatcgtctcgatccaggtagtcagccgtgcgcgccaggccggattgcaactgagcccgcgcgacctgttccagcaccagaacatccgcagcctggccctggcggccaaggcgggtgcggcgacggcggaacagggtccggcaagcggcgaggtggcgctggcgccggtacagcgctggttcttcgagcaggcgattcccaaccgccagcactggaaccagtctctcttgttgcaggcgcgccagccgctcgacggcgaccggctggggcgtgccctggaacgcctgcaggcgcagcacgatgccctgcgcctgcgtttccgcgaagagcgcggcgcctggcaccaggcctacgccgagcaggccggcgagccgctgtggcgccggcaggcggggtccgaggaggtgttgctggcgctttgcgaagaagcccagcgcagcctcgacctcgaacaggggccgctgctgcgtgcgctgctggtggacatggccgacggcagccagcgcctgctgctggtcatccaccacctggcggtggacggggtgtcctggcgcatcctgctggaagacctgcagcgtctctatgccgacctcgacgccgatctcgggccgcgtagcagttcctaccaggcctggagccggcacctgcacgaacaggccggcgcgcgcctggacgaactcgactactggcaggcgcaactgcacgacgctccgcatgcgctgccatgcgaaaacccgcacggcgccctggaaaaccgccatgagcgcaagctcgtcctgaccctggacgccgagcgtacccggcagttgctgcaggaagccccggcggcctaccggacccaggtcaacgacctgctgctgaccgccctggcccgcgcgacctgccgctggagcggcgacgccagcgtgctggtgcagctcgaagggcacggccgcgaggacctcggcgaggccatcgagctgagccgcacggtgggctggttcaccagcctgttcccgctgcgcctgaccccggccgcggacctcggcgagtcgctgaaggcgatcaaggagcaactgcgcggcgtgccggacaagggtgtcggctacggcctgctgcgctacctggctggagaggaggctgcgacccgcctggccgcactgccgcagccgcggatcaccttcaattacctgggccggttcgaccgtcagttcgatggagcggcgctgctggtaccggccacggaaagcgccggcgccgcccaggatccgtgcgccccgctggccaactggttgagcatcgaaggccaggtctacggcggcgagctgagcctgcactggagcttcagccgggaaatgttcgccgaggcgaccgtccagcgcctggtcgatgactacgcgcgggagctgcacgcgctgatcgagcattgctgccaggagggcaacgtcggcgccacgccgtcggacttccccctcgcgacgttgcgccaggagcagttggatcgcctgcctctggcgcggatcgaggacatctacccgctgtcgccgatgcagcacggcatgctgttccactcgctctacgagcaggcttccggcgattacctgaaccagctccgagtcgacgtccatggactcgatcccgcgcgcttccgcgccgcctggcaggcggcgctggacagtcatgacatcctgcgcgccggcttcctctggcagggcgatctggagcagccgctccaggtgatccacaaacacctcgaactgccgttcgccgagcatgactggcgtggtcgcgaagcgctcgccgaggctctcgacgagctggccgcgagcgaacgccggcggggtttcgagctggagcaggcgcccttgctgcggctggtcctggtgcgtatggacgaagagcgctaccacctggtctacacccaccaccacatcctgctggatggctggagcagcgcgcagctgctcggcgaggtgctcgctcgctacaccggcgaacaggccgagcgcacgggtgggcgctaccgcgactacatcacctggctgcaggcacaggacaagcgcgtcagcgaagcattctggaaagaacaactggcggaactgctggagccgacacgcctggcccaggcggtcgccgccgagcgcgagcaggtcggcagcggccagttccagcgcagcctgccgccggcacgcaccgcgcgcctgaagacgttcgcccagcggcacgcggtgaccctcaataccctggtgcaggccgcctggtcgctactgctgcaacgctacaccgggcaggatacggtggtcttcggcgccaccgtcgccggccgtcccgccgaactggccgggatcgaaaggcagatcggcctgttcatcaataccctgccggtggtcgccacgccgcaaccgggcatgcgcctcaccgactggttgcaggaggtgcaggcgcgcagcctggcgctgcgcgagcaggagcacacgccgctgttcgagatccagcgttgggccgggctcggcgaggcgctgttcgacagcctgctggtattcgagaactaccctgtggccgaagccctggaaaaggggtcgccaggcggcgtgcgcttcggcccggtgagcaatcatgaacagaccaactacccgctgaccgtcgccctgggcgtcggcgacagtctgtcgctgcaatacagctatgaccgtcaggcgttttccgatgccgcggtcgagcagttggaccggcacctgctgaacttgctcgaaggcttcgtcgacaacgccgaacggactctggtcgagctgagcctgctggatgccgaggagcgcgcgctgatcgattcgctgtggaaccgcagcgagtcgggcttccccgcttcgccgctgatccaccagcgggtggcggagcgcgcacgcctggccccggacgcgccggcggtgctgttcgacgaccaggtgctgagcttcgccgagctggacagccgggccaatcgcctggcacatgcgctgatcgcccgcggcgtcggtcccgaggtgcgggtggcgatcgccatgcagcgcagtgcggaaatcatgattgccttcctcgccgtgctgaagtccggcggcgcctacgtgcccctggacatcgagtacccgcgcgaacgcctgctgtacatgatgcaggacagccgcgcgcacctgctgctgacccagagccacctgctcgaccgactgccgattcccgacgggctgtcctgcctgtgtctggaccgcgaacaggagtgggccggtttccccgcccatgatccagaggtggcgctgcatggcgacaacctggcctatgtgatctacacctccggctccaccggcatgcccaagggcgtggcagtgtcccacggcccgctggcggcgcacatcgtggctaccggcgagcgctacgagatgaccccggcggactgcgagctgcacttcatgtcgttcgccttcgacggctcccatgaaggctggatgcacccgttgatcaacggtgcgcgggtgctgatccgcgacgacagcctgtggctgccggagcagacctacgcgcagatgcatcgccacggcgtcaccgtcgcggtgttcccgccggtctatctgcagcaactggccgagcacgccgagcgcgacggcaacccgccggcggcccgggtctactgcttcggcggcgacgcggtggcgcaggccagctacgacctggcctggcgcgcgctacgcccgcaatacctgttcaacggctacggaccgaccgaaacggtggtcaccccgctgctctggaaagcccgcccggacgacccctgtggcgccgcctacatgccgataggtacgctgctgggcaatcgcagtggctacatcctcgatgcccagttgaacctgctgccggtcggtgtggccggtgagctgtaccttggcggggaaggcgtggcgcgcggttacctggagcgtccggcactgaccgccgaacgtttcgtgccggatcccttcggcgcgcccggcagccgcctgtatcgcagcggtgacctgacccgtgggcgggcggatggcgtggtggactacctgggacgggtagaccaccaggtgaagatccgcggtttccgtatcgagctgggcgagatcgaggcacgcctgcgcgagcaggcggcggtgcgcgaggcggtggtggtcgcccaggcgggtgccagcggccagcaactggtcggctatgtggtcccgcaggatccggcgctggtcgaggatgccggtgcccaggcggcctgccgcgacgccttgcgcaaggcgctgaaggaacgcttgcccgagtatatgttgccggcgcacctgctgttcctggcgtgcatgccgctgacccccaacggcaagctggatcgaaaggccctgcccaagcccagtgccgaccagcagcaacgcgactaccaggcaccgcgcagcgaagtggaaagacaactggcgacgatctgggcggaggtgctgaagctggagcaggtcggcctggccgacaacttcttcgagatcggcggcgattccatcatttccctgcaggtggtcagccgtgcgcgccagctcggcatccatttcactccgaagatgctcttcgaggcgcagaccatcggtgccctggctccgctggccgagagcggtacgcaggtgctggcgatcgaccagggaccggtgaccggcgtcacgccgttgctgccgatccagcagggtttcttcgccgaagaggtcgccgagcgccactggtggaaccagtcggtactcctggaagcccgcgagccgctcgatgctcggcaccttgagcaggccctgcggggcgtgctggcgcaccacgatgcgttgcgcctgtccttcacccgcgaggcggccggctggacggcgcgccaccggggtgtggaagagggcgctgcggcgctgctccgcgtcgctcgggtcgccgacctggcggcgctgcgggcgcttgccgacgaagtccagcgcagtctcgacctggccgatgggccgttgttgcgcgccctgctggcgactttcgacgacggcagccagcgcctgctgctggttatccaccatctggtagtggatggcgtgtcctggcgtattctcttcgaagacctgcagaccgcctaccggcagttgctggcgggtcaggccgtcgagctaccggccaagaccagcgccttcagggattgggccgagcgcctgcgggcgtttgccggtgacggcggcctggatggcgaactggcgtactggcaagggcaattgcagggcgcctccagcgacctgccgtgcctcgacccgctgggcgaccagagcaaccgccatgcccgttcggtcagttgcggactggacgccgaggcgacccggcaattgctgcaggaagcgccggccgcctaccgcacccaggtcaacgacctgctgttggccgcgctggcgcgggtgatctgccgctggaccgggcaggtcgatgcgttgatccagttggaaggacatggtcgcgaagaactcttcgccgagatcgacctgacgcgcacggtgggctggttcaccagcctgttcccgctacgcctgacgccggccgagggcatcgccgcatcgatcaagggcatcaaggagcaactgcgcgcggtgccgaacaagggcatcggcttcggcgccctgcgctacctgggcagcgcggcgagccaggcagccctggccgggttgccggtgccgcgcatcaccttcaactacctcggccagttcgacggcagtttcgccatggaggagggcgcattgttcgttccggccggcgagcgtgccggcgacgaccagagcccggacgcgccgctggccaattggctggcgctgaacggacgcatctatggcggcgaactacgcatcgactggagcttcagcggcgagcgcttcgaaatcgccagcatccagcgcctggccgacgcctatcgcgacgaactgctggcgctgatcgcccactgccgcgtggccgagggccagggtctgacgccctcggacttcccgctggcgcgccttgaccaggcgcgtctcgaccaattgccgctggcgccctgcgaagtcgaggacctctacccgctatcgccgatgcagcagggcatgctgttccacagtctgtaccagcaggaggccggcgattacatcaatcaactgcgggtcgacgtcgacggtctgcatccggagagcttccgcgcggcctggcaggcggcgctggacgagcacgatgtgttgcgcagcgggttcctctggcagggcgccttcgagacgccgctgcaggtggtgcgcaagcgtgtcgaggtgccgttcagcgtacttgactggcgcggtcgcgaggacctggcggcggccctcgacgagctggctgccggcgaaggccggctgggcttcgacctgagcgaggcgccgctgttacgcctggtactggtgcgcacggacgaagagcgctaccacctgatctacaccaatcaccatatcctgatggacggctggagcaactcgcagctgctcggcgaggtactgcagcgctaccgtggcgaaacgccgccgcgctccggcggccgctatcgcgactacatcgcctggttgcagcgccaggacgccgcgctcgccgaggccttctggctgccgcgcctgcgccaactggacgagccgacccgcctggggcagtcgatcgcccaggccaggcagcgcggcaagggctacgcggaacggttgcgcgagctcgatggcgagcagacccggcgcctggccgagctggcccgcgagcagaagatcaccgtcaataccctggtccaggccgcctggctgatgttgctgcaacgctataccggacaggacagcgtggccttcggcgctactgtcgccggtcgcccggcggaactgaacggtatcgaggagcagatcggcctgttcatcaataccctgccggtcatcgctaccccgcttccgcagcagagcctggcgtcgtggctgcaggcggtgcagggcgagaacctggccctgcgcgaattcgaacacacgccgctgtacgacatccagcgctgggccgggcagggcggcgaggcgctgttcgacaatatcctggtgttcgagaactaccccgtttcgcagatgctccagcagcaggcctcgcaaggcctggctttcggtgccgtgggcaaccacgagcagaccaactacccgttgaccctcagcgtaagcctggggcagcgcctggaactgcagttcgcctatgaccgcgagcatttcgacgacgccagcgtggcgcgcctggatcgtcacctgacgcacctgctggcgcagatggtcgagcgtccggccagcacctgcctggccgagttccagctgctggaagcagcggagcggcgccaggcgatcttcgactgggggcgcaacccgggacgctatccggacgagcgcagcgtcgagcagctgttcgccagccgcgcggcgatggagcccgagcgggtggcattgctcttcgaggagcgccagctgagctacggcgagctcaacgcccaggccaaccgcctggcccaccgcctgatcgagctgggcgtggggcctgacgtgctggttggaatcgccgtcgagcgcgggctggaaatgatcgtcagcctgctggcggtgctcaaggccggcggcgcctacgtaccgctggacccggaatatccgcaggagcgcctcggctacatgatcgaggacagcggcatcgccctgttgctcagccagagccacctgctgcaacgcctgccagcggcctccgggatcgcctgcctggcgctcgaccaggcgcgggactggcaggaccgtccggcgagcgacccgcagttgcgggcgcatccgcagaacctcgcctacgtgatgttcacctccggttccaccggccgtcccaagggcgttggcatcagccgagagagcctgtcgcggcatacccacgtttcgctggcgttcttcggcatcgggccggacgaccgggtgctgcaattctccaccttcaatttcgacggcttcgtcgagcagctctacccaccgctcgcctgtggcgcctcggtggtgctgcgcggcaccgagatctgggacagcgagacgctgtaccgggagatcgtcgagcgacgcatcaccacggtggacctgactaccgcttactggaacatgctggccaaggacttcgccaaccagggcgtgcgcgactacggcgcgctccgtcaggtccacgccgggggcgaggcgatgccgccggaaagcctggtggcatggaaggccgccgggctggagcatgtgcgcctgctcaacacctacggccccaccgaggcgaccgtcacggtcaccaccctggattgcgcgccctacgtcgacggcagcaaggcgatcccggcgaccatgccgatcggcaaggtgctgccgggccgcgccatctatctgctggacgatgccgggcaaccggcgccggtcggggcggtcggcgagctggtgatcggcgccgagctgctggcgcgtggctatttcaagcgtcccgacctgacggccgcacgcttcattcccgatccgttcgacgagcagggcggcggccgcctgtaccgcaccggcgatctggcacgctacggcgccgacggggtgatcgagtacgtcggccgggtcgaccatcaagtcaaggtccgtggcttccgcatcgaactgggcgagatcgaggcctgcctcggcgagcacccggcggtgcgcgaggccctggtcatcgccgtcgagggtgctgccggggcgcagctggtggcctatctggtgccgcaagcggaagcgctggctagcgccacgctggaggtacaggccgcgctgcgcaacgagctgaaggccctgctgcgcgacagcctccccgaatacatggtgccggcgcacctgctgttcctcgaacgcctgccgctgagccccaacggcaaggtcgaccgcaaggctctgccggcgcccgacgccagtctccttcaggaggcctacgtggcgccgcgcagcgagctggaatgccaggtcgcggcgatctggcaggaggtgctgaaactccagcgggttggcctcgacgaccatttcttcgaactcggcgggcactcgctgctggccatcaacgtgatttcgcgcattcaactggagctgggcatgaagctcaccccccaactgttgttccaattcccgaccctggggcttttcgtcagcaatctggaaaaggccggtgggcaggtcgacacatcgaaactgaacaagctggaagccctgcttgatgaaatggaggaagtttga

SEQ ID NO: 333798 - DNA, 195 bp, Pseudomonas aeruginosa; identical to SEQ ID NO: 333000

SEQ ID NO: 333799 - DNA, 1092 bp, Pseudomonas aeruginosa
atggtaacaatagccgagaaagaccttgagtctctttaccagcaaggaattcgaggcaacgcagcagcctttgctctcattggccgccagatcgccagcaaacttaaaaagacgcaaccagcacttgcctcccgtctggccgagctcctcgccatcgacagtggaacgcgaggtgcgcctcgcatagcagccccagtggattcggactctcgccgcagccttttaaaagagggcgcaggcattcgtcttgaattcgaacccaagtgggaaagcgccatcgagcagcaactactggaaatcattcaagagagacaaagccacaaagaactccttacagcaggacttgagcctattcgctccatgattttcaccggtccgccaggagtgggcaaaacgttggcagcacactggattgccagcaagctccagctacccattttcacgctggacctcgcttcagtgatgtccagcttgctgggcaagacagggacaaatatcaaagcggttatcgagcacgccaagagcattccgtgcattttgttcttggatgaattcgacgcgattgccaaaagacgagatgacgagaaggacgttggtgagctcaaacggctcgtaaatgttctgttgcaagccatcgacgagtggccatcaacctctgttttgattgccgccacgaaccacccagacatgctggaccctgcagcgtggcggaggtttgaagcaacggttcgcttcgagaacccccctatccaactgattgagggacttctaatcgacgcggaggtttctcccagaatcgctcaacagctggctgtccatctgcagggaaactcgttttcagacatcaataggattgtccttacggccaaaaagcgggcagttctggatcagcgacctgtcaatgacaccatcattgatatctcgcttaagaacctcgcccctactgaatctgctcattgcaccagagacatgaggatcattcagctctctttgcaagggctatcccagcgaaaaatcgcaagcgagctgaacgtatcccaccccacggttggaaaagtcttaaaggaattcaaggagagtacgaatgcctga

SEQ ID NO: 333800 - DNA, 825 bp, Pseudomonas aeruginosa
atgagctcaaaccactcgacgcatgaaacacgcgtcgccgtactagtcgattgcgacaacgtttcaccggacatcctggagcacgcgctgcgtgtggtagcgcaattcggacgcgtcgttttacgtcgtggatacggaaaccacgccaccctaagtcaccgctggcaggagaccttggtgcgccaggctttcacaccttgcctgcagtaccagtacgccgctggcaagaacacctctgacatagctctggccttggacgcgcttgaagcgctgttcgacagccgagccgacaccttctgcctcgtcactagtgactccgacttcgcctacctctgccgcaagctcagagagcgcggagctatggtatgcatcgttggagagcccaagacaccagacgctttgcggaactccagcgaccagttcttcgagtgggtacgtcccccggagccagttgcggagcccaacgctgacgttgccggtagggccgctgccaaagccgatgtctgtgcgaagagcgatcccgcaaagcaggagccggtgaaatcgcccgtgaaacgtcggcctcggttcgtcgtcgatgcggtatccctgcttgccagcgataccagcgaagggaaggtcgctatgggcgctttaggtcagtatctaaagcgaactgacccagccttctcgccaaagacatacggccactctggcttgctcgacatgatcaagacttatgacctcctgtgcgtgatccaggagcctggtggtcatcggtctgtttcacttgcagcaaaggatgagctgaccggcgaactggtcgctgaaagctcagctggctaa

SEQ ID NO: 333801 - DNA, 5127 bp, Pseudomonas aeruginosa
atggcttcatcacctcaacccaagagcctgatctttgacctggaagtcgcccccggaaagggagaaaagcccgaccgcattctgatggttggcgctctgcgcccagacactgaagatgagctcgaggtaacgatcgccggtaatctcagcgagacgctaagccgactcgatacgatgggaaaaggggccagcttcgtactcggacacaacgtcatcgagcatgacctcgcgatccttcgccagcaggcgccgcaactcaagcttcaccagttaccggttatcgacaccctgcgattgtcaccgttggcgtttccgcaaaacccttatcaccggctagtcaaagactacaaactcattcgcgatagcctgaattcaccactgtcggactgccgtgcgactcttacactgttcaaagaccagcaagctgcattcgcccagctcaacacagcacgacaggccgagctgctttgctaccaggctctgcttgccccctcgatggacgacgacctggggcactttttctacagcttgaccggacagttaccgctggatgtgtccgagctccgtgggcgactcgttgagctactccaagagaatgaccccaccttgagccgtgccctcaaggtctgctcgacccgcctcaccaagctcctcgacgtcgacctcctcgagaccgacctgcaccttccattggcatacgccttagcttggctgcgtgtctctggtggcaactccgtgctggccccatgggtgcggcatcagttcccagacgtagggcgactgatcgccgagctacgcgacacaccttgcggccaatcggactgcgactactgctgcacgacgcacgatccacggcatgagctcaaacggtacttcggattcgatgattttcgcctcgagccagacggccgaaccttgcaacacgatgtcgtgttagcaggcatgcgcagcgaacacgtgctggccatcctggcgaccggcgggggcaagtcgctgtgctaccaactgccagccctgaaccggttccaccgcaacggcagcctgaccatcatcatttctccgcttcagtccctgatgaaggaccaggtcgacggactactggctcgaaacgtccaatgcgcagcaacgctaaacggcctcctgacaatgcccgagcgcgccgacgtcctggaaaaagtccagcttggtgacgtcgggatactgctcgtctccccagaacagttccgcaacaaggctttccgacgcgccatcgcccaaagacagatcggtgcctggattttcgatgaggcccactgtctgtcgaagtggggcaacgacttccgccctgactaccagtacgtttctcggttcatcaaagaattcacggatgacggcccgcttgcctccattggttgtttcaccgcgactgcaaagcccgacgtgctcgatgacatctgcgagcacttccgggagcaactgggcattgagttcaagtccttcttaggcacccatgaacggaccaacctttcattcgaagtgtttccgtgcacacgggcagagaaatggcaccgtacccatcagctgctccaggacgaactgaacggccaagacggtggagcagttatcttcgtctctagtcgtaaaggtgcggaggagctctctgacttcctcattgggcaagcttgggcctgcaagcatttccatgctggcttggagcctcacgacaagaaagacatccaagacgagttcaaagccggcagcttgcgcgtcatcgtggccacaaacgccttcggtatgggggtagacaaagcggatatccgcctagtcgtacacgcagacatccccggttcgctcgagaactacctccaagaggcaggtcgtgctggccgtgaccaagggcaggcacggtgtgtattgctctacgacgcgcaagacatcgagacccagttcggcatgtgtgagggctcaaagctcaccctgcgggacattcaacaaatcctgcacaagctccggaaagagtacaaacggcgcaagggcggaaagctcgtaatcaccgctggcgaagtcctcatggatgagcaggttgacaccagctttgaagcaggggagcgtgacgcagaaactaaggtggtaaccgcggtggcttggcttgagcgtggtcagttcctcaagcgcgaggaaaatcaaacacagatcttcccagccagcctgaagctcaaaaaagaggacgcagataagcgactcgcaactgctcaactcccgccccgacggctcgaggagtttaaagccattctggattacctgtacggagccagtgccgatcaacgaatcgacactgacgctctgatggctctgaccagctctacatctgaggaagtgaccgccacgttgcggcagatggaagatctaggcctgcttatcaacgactccaagctgacactctacgttcgccatggcgtcgtaggagcctcaaatcagcgacttgtggcgactctcgagctagaggctgcgttgattgaccaattgcaggaagtggcacctgatgcagagcagggtggttggcaggacctacatctggcaccactcactgcggcactgaagacttccactggcgacgcccagcttatccctctacatgtgctgcgcttgctgcgaagcttggctcaggatcgtgacgatgatagccagcaacgaagcagcttcgagatccgtcagatcaaccaggactatctcaagcttcgaattcggggtggccattcgtggcggggcattcaaaagctgggcgaaaagcggcgagctttagccggtgtgatgctgaaattcatactcggaaagctagcacctggcgagcgaagcaaagacctgctcgtcgacaccacatttggcgagttggtagctctcatcgatcaagacctggagcttcgtgctcgtattcccgagccggagcgtcgtcgtgctgtggagcatgtgctgctctacatgcacaagcaggacgttcttacgctgaaccacggaatgacagtcatgcgccgggcgatgactgtggaaatcaaccctgagaagaaatcgggctatctcaaggacgactacctgaagctcgatgagcactaccgagagaagcgcattcaggtgcacgtgatgcgcgagtacgcggaagtcgcctgtgaagaaatggctgcagcgctgcgcctggtgatgcactacttcaacgacccgaaagacgagttcatcgagcgctactttgccggtcgtgaagaggttttgaagctggccaccagtgaagagtcttggcgtgcgatcgttgaaaatctaagcgttgcacagcgcgtcatcgtcgaggacaacgaagaccagaaccgccttgtgctcgcaggcccaggctccggaaagacccgggtgatcgtgcatcgtattgcctaccttctgcgggtacggcgggtacccgcgcgatgcatcgtcgcgctcaccttcaaccgacatgcagctaacgagatcaagcaacgccttctccgattggtgggcgctgacgcctatggcgtgaacgtcatgacctaccatcgcatggcaatgcgactcaccggcactcgtttcgagcgcggtgaaaccgtggaagaagggcgcctatcactcgtgctctcggacgcagtagagctcctcgaaggtaagcgccaggttgaaggtgaagacgacctgcgtgagcaattgcttcgcggctaccgctatattttggtcgacgagtatcaggatattgacgacgtccagtatcggttgattagtgcgttggctggccgcaaggctgaggaggagggaaggctttgcatcctggcagtaggtgatgatgaccaaaacatctatgcctggcgcgacaccagcaatcgcttcatcgagcagttccgcgaagactactcagcgtccagcagctacctcgtcgataactatcgttcgagtcgcaacatcatcgaagccgcaaaccaggtgattgagcgaaaccctcaccgcctcaagagccaacatccgatcaagattgacgtgaagcggactgagagtccgcgcggcggtctttgggaagagaaagaccccgcgcggagaggacaggtcctccggctactcatcgcaggcgacgaatccaagtacaacaacctccaagctcaagctgcaactgcagagctacaacgtttgatcggcgtcgagtccggtgaatggcagggttgtgccgtacttgcccgcaaccaccaatacctctggccgattcaagcatggtgcgaacaacacggggtgccgtactacctggcagcagataaagatggcgtactgcctatcaccgctcagaggggctttgttgcggtaattgaatacctgcgtgcctcaggcgagtcgttgtcacctgcgcactggtggcgtcgactagatcaaacgtccttgcagccggaatggcacaccttcatgagccaggcctttgctgagctgctagccgaactaggagattgcgagctggggagccaagcggttgtcgactggctgtacgactacgctcgcgaactgcgacagcagcctgctcaaggtctctacctgggcaccgtgcactcggccaaaggcttggagttccggcacgtcgttctcctcgacggcggttggagcaatcgctctgacacgcttagcgatgagcgcaggctctactacgttggtatgacccgggctgagcagaccctgaccgtgtgcgagtttgctgctggcaatcccttcagccgacacctcagcaacgcagcgacgagcaaagtcttccacggcgaaccgctgccggcgcttgaaaaacgctatctacagctctcgctcaaagacatcgacctcgatttcgctggacgccaaccagcggaggctagcattcacagagcgctcgccaacctcaatcctggcgatcggctccagctcaaacccagcgacggccgttatctaattctcaacgacaacggtgaagtcgtgggccgcaccgccaaatctttccatctgtcccttgagtgcgaaagttgccgggttgcggcagttctagggcgccggtcagatagctgcgaagagagttaccaggtcactcatagaatcgatcaatgggaattggttgtgccgcagttaatcagctctttgacgacttga

SEQ ID NO: 333802 - DNA, 810 bp, Pseudomonas aeruginosa
ttgcttcttaatgataccgatattcgagcggctcagttggccggtgatatttctttcggagagtcgttcagttatcgccagatccaatcgtcttcagttgatctgtctgctggaaggatatatttgccgggcagtgttaatgaagcaaataaagcgcaaaagttctccgatcttgcagtggggcagtgtactcttgaggctggtgagactattgtaattgagttggctgaagatgttcgtatcgggaatggcttcggcggtatacttatgccgccgaattctctgacgaagaatggaataataatgacgaacccgggtcatatagatcctgggtattctggaaaactaaccgtttgtcttataaatatggggaaattggctttttctatagagcaaaaccttacggtggcgacattgctattgtttaagttgagctctacctctggtggttataagggggagccgggggtaggggttggcctaactcagctttccaagctttcaacggatttcgctaacatatcggaaaggtcttacagttatattaaaaaggctatttgggggcatttggcaacggcgcttggtatcatttctttagctgttgctgttctggcattgttagtgcctagtttggtaactgtattgactggggctctggaggcaaagtatagcgaatctcagaatggtgagtctattaaaaggttggaaagccaaataaaagcactccagtctaaattgagtgaaaaggacccggcgacccttggatcgcaacagcaacacaccaaaaggttatcagatgaaagtctctag

SEQ ID NO: 333803 - DNA, 771 bp, Pseudomonas aeruginosa
atgaaagtctctagcccttatgtaagatgcatagcgaagaccattattgatctcgaggagatccagggtttcttagactctgagggtgaggtctggaaaaaaacatcaggctcgagtgggcacgatgatttgatcgaattctcaggtcgtatttgttacatgtcattcgggaagcgccagtcgcctagaagtaataaggaatatttaagaaatttaattgatagcggccatggtagtgttcttgagcatgtgtgttggacttttgttgcagttggtgtgtctcgaggttttactcatcaattagtcaggcatcgagccggcttctcgtatagtcaactttctcagcagtattatgatgagtctgacgcgaacttcgttgcgccaccatcactgaaaataggtacgtcactatataagaaatggatggatgcgatgcactcttccctcaagttgtatagggagcttatcgcaagtgcgaaggagctttctatttctgactcgctctctaataaggaaaggatgcgtgaactcagaacgacagcgcgatcaattcttcctaatgctatagagactaaaattgtctttactgccaatgcgcgcgcgatacggaatttcctcattgcacggggcgctatagagggtgattgggaaatgcgagacgtgtcttgtcaaattttaaatttagtgaaggcagatgccccctctctcttccaggatttcgagatcggtttcctagaggatggcagtaaatctgtaataaaaaaattctga

SEQ ID NO: 333804 - DNA, 4797 bp, Pseudomonas aeruginosa
atggctactttgacccgggtgtttcaggtcgcctcgtctcctgtagacgttattttcgtccacggtctagggggagaggctcgatcaacatggatgcacaaccccaacgaccacacgacactttggccaaagtggatcggcgaagacgtcggatgcaatgtctgggttgctggatacggtgcagcgctttccggctggactaatgcagctatgcatcttgccgatcttggcgaagctctcttcgctgctttgcaggctgaacaagaccttaagggccacaggattgtgttggtggggcatagcctcggcggccttgtaattaaatcggggatgacacaagcgtcggcgctcggagtccccgaacgattggcgctgctgcagcgaatctcgggcatcgtctttgtcggcacgccgcatcaaggtgcgagtcttgctacggtcgcagacagtctgcgcgggctgctgaggaccaatgctcaggtcatcaatatggtcaatgatgacgcttggctaaagctgctgaatggacaatttcgagctcttcacgctagttacaactttgatgtccgagtcttcttcgagtcaaagggcgttcttattgggcggaaaattcttggcatttcatttggtagacgactattaatcgtcgacaggaatagtagcgatccaggtcttacgggtgtcgcggttaccgcaattgatggggatcacattgagatcgccaagcccaaatctcggggggatttcatccacaaggcactggttgaatttcttaaggggattactgacggtccctcagataatccacctagtggcgggcgttctcccggaccttggccagtccccaccgatataccagcggccctcctgagggcctctgctccattgttaagctggcccagcacactgggtgacggcacttggcttcaacgttcagaactggtagagctcactgaaactctcacagtcgaaccgtcgggtacctatttcttgctaggtgaccccgggtgcgggaagtcttctctgctagtacgacttgcccaggaaagacagtccgccggttggtgcgtacttgccatcaaggccgatcgactaccgcctgatgtgttggatcaggaagcacttgcgagctatctgaatctcagctcggaagtgagcataatcctacaagagctcgcaaagagcacgccggtgcttgtagtcattgatcaggtggatgccttagcagatttagtcgtacaacactccgcgcggttacgggtattgctcgatttagttcaggagctcgctgacgtagaaggggtccgcacggtcatctcgtgccgaacttttgagcaaaagcacgaccctgctcttcgtaacctggacgcgactatcatgcggttggaactaccggagtggtcgaccgtagagcctgttttgacagcaaaaggccttcaggccggtgtatggaatcaagacattcagcaggttttgcggtcgccacatgctctagaaattttcctctctctccttagggactcgacagagttggaggtcctgcgaagtttccaggggctactggaagcgcaatgggagtctcaagtactgagcgacactagcggcaggcttcgagtaacacttcgtcacctagccaaattgatggctgaccgtgaggtattggggctacccctcgctcaagtcgaagaccattacggggagatccagacgctagcggctgcgggaattcttcgcttggaccagggaccaggacgagtggagtttcgacaccaaacgctctacgagttcgtccgtgcacgtagttttctggatgagagtggcagcctcaccgacacggtacgagcgcagcaaggcagcctgcgtattcgtccccagctgtggcatgcgcttggctacttccgaggcgcaagccccgaagagtacagctctgagcttggaaggctttgggcggctgatctccggccacatctcaaaatgctcttgatcgagttcctcggattgcaaacggcaccgattcctgcagagcgccggctagtagagcaagcgatggcagatcaatggtttcttccaagattcattggagccgctgtgggaagtccaggatggtttgatgtcttgttgccaagacatcttccgagactgatgtcgttacctgagcagcaggctcaaatgcttttgccaatgtttaggcaggcattgcgttgcagggcaagtgcggttgtcgatcttgtgcatcggcattggttaccccacagggaccgagatgtgctgagctggcaagccttaggcgggggagaagtcgcaccacaggttggtcgctggctagacagcctcgtactgattgctgggcgcagtgagatttccgactgggcgatagggtatgtggctggcgtggtgagcgcagctcaacctgatgaagcaccgaaattgattgccgcttggctcaagcgccagattgagtctgctactgccgctttggcttcatcgtccattgacgatgaagggggcgttgccaaagtctccaagaacgtgcagtcaattctcgaggcaaagcacttccatgatatggaagcgatagcagaggctgctccgaaggccttcgcaggtgctatgtggcctcttttcttggatgctatggaattttgtggctcggaaagctcgagcgtagtgatcggctatcgccaaagcagtggagtattgcttcacgatctggatgacgaggatggccgatatgagcgacccttgctgcagtctattcagcagagtatccaaggctgggctacttccgatccagcaggctttctggcgtttgttttcttgaatgagcattccgacctgcttttggtgcaccgattgctggccaaaggactcgaacgtgctgctgcacattcaccgcaacgcgtattcgagtatctcctaggcgatccgcgtcgccttgttctcgggccgtattccgatgtgcacaaggagagtgttgcgctgattggaggagttagtccacttctagacaattcagcctatgcccgcttggagacgctactcctcgattggcgttactacagcgatgccgctctgcacgatgatgatgcgggcattcgccagcgtcggctgcagacgactcgccagcaccgactgcgactgctccgatcattgcccttcagccggcgtagtccggccttgaaaaaactcgtggaagaagaggagcgcgcgttcccggggctgcccgacggggatatgcacttctccggcgtccaatgtatcggtagcccggtaagtgcggcgcagatgaatagagcgacggacgacgatgtcttgaatctattcaaagaactgacagatgactctggctgggatcatccgcggcagcgcatgaaagggggcgcgatacaggccgggcgcgagttggccgagttagctaagagcaatttgactaaggttctccgaattattcgggcgctcgaccctacttgcaacgagataccagtttcctgtgcgttacgcgagttggttccggctggtttgacagcagcagagctctattcattggtcgccgaattggaagataaggggtttgtcggcattggtttccggtgtgatgcggcctattcgatcgctaacgcttgcagcaaggaggctcctgttccgctaggtctcgtggatcggatggagtgttggctgattccggatatgtctggcggcgccaatgagcttggggctggtgtggaaggcgactcaacgtctgttctatgggggcatggctcgttgagtgtgctacccaacggaaattatcctacattgagcgctctaacgtcggcgtgtctaatcgcagatccacctcgccttgatcgttggctcgccatccttgagtcgcacgctgagcggatagaatcgcctcaggtgtggaatgcaatgattcagcgcgagttgaagtatttggacaatgttgaccagtcaagagctgaggcgttagtcgatcttttgatcgcaaatgccccaacggttatcaaaacccgaggctgggttcattttgttgcccatgcgtttcgatgggcttcggggcctgctgcaaggcgatggttaatgagaattgtcgagcggggaggagatggcctgaagtcagcgggagagttggcctgcttgaggcatgcgcttttcccggcagaggattggtcccgtgaactggtgggcgagcttagtaatgacgccgcctcaccggcggctctgggcgtagcgcacagcgtggccaatttgtggcatgaaccaatgactagacacgttgttcatccgattttgcttcagctcctgcgcagcggcaatgaccgcgtactgtcggctttggccactatctttttgtatgatggattcgcggctgattccgaaacgagagacctgctggataccgtagtggcctttcctaatgtgttgaagagcggtcgagctgagcacctacccgaaatgctcgtcagactggtcgagttcgagccagagcgagtttgccaagtggctcactcactggtgaacgcagcgggagaccagatggcgaatatggcgacgtcttggtacttgcgcaccgaatggctattggatattgcattgaagttgcaagacatggggccaactgagcgaatagctggatcagcactttttgagcgtatgttggagttcaacatgccgcaggccagggatatgacgctggatctggacaagcgcacgccggtgggcgctggtcccagtgcagctgttcgacgcaggacgcggatcaggaaacgaagaagcctgatatcgcgcgccacttga

SEQ ID NO: 333805 - DNA, 408 bp, Pseudomonas aeruginosa
gtgatcggctgggcgttctcggccaagccggatgccgaactggtgatcaacgccctggacatggcctacgaacagcgcggcaggccacagcaggtgctgttccattcagaccagggcagccagtacgccagccgcctgtttcggcaacggctctggcgctatcggatgcagcagagcatgagccgtcggggaaattgctgggataactcgccgatggagcgcctgttccgcagtctgaagtcggagtgggtcccgtcaacgggttacctgacggcgcaggaggcccaacgggacatcagtcattacttgatgcaccgctacaactggatcaggccgcatcaattcaacgacgggctaccgcctgcggtggccgaagaaaaactcaacccactgtccgggatgggttga

SEQ ID NO: 333806 - DNA, 384 bp, Pseudomonas aeruginosa
atgagcaagttgcgctttaccaccgaccacgaatggctgcgccaggacgacgacgggctgctgaccgtcggcatcaccgcctacgcccaggacgccctcggtgacgtggtattcgtgcagttgccggaactcggcgaacacgccgccggcagtgaagtggcggtgctggagtcggtcaaggccgccagcaacatcctgatgccgctggacggcgaggtggtggcgatcaacgacgcgctgccggacgccccggagctggtcaaccaggatccgctcggcgaggcctggttcttccgtttccgtccggccgacgccggcgcctgggaaaagctgctcgaccaggccgcctacgaccgcctgctgaacgccaacgccgacgcctga

SEQ ID NO: 333807 - DNA, 126 bp, Pseudomonas aeruginosa
atgcgccgactcttgcgcccggtattctgcgccgcgctcttctgcctgtacccagcgctggtccaggctgccgcagaaagcgaaatcctcggcctgttccagcgctggcaggccgcccacgggtag

SEQ ID NO: 333808 - DNA, 390 bp, Pseudomonas aeruginosa
atgactagctcgcccattgtcctggatgctcagagcgctgtgcgttacctggggcagaccgtactgatggaaatggtgtgggacgaagagccggaaccgatctggcgttgggttcgcgtcgtcggtgtcgtcctgcctgcggagggcctgcgcggcggtccgcacttcctcactctgaagcttggcgcagacaaagcattcgcggatgaagccttctgggaaaacatccgcacgatccgggtgatgcggtaccgcgaccggcagggttccggcaatgtactgggccgcgttacccaccctgacgactcgcgctcaagggccgcgctcccggctcgtcggaacagccccgccgttccggcgaacggaagcacgggcggagcgaacccttga

SEQ ID NO: 333809 - DNA, 216 bp, Pseudomonas aeruginosa
atgagcaaggacaaatggaatctggacctgttcggcatcgccacctttgcggagatgtgcagcgtgacgtacgacgaagcggcccagtgggcggaagacggcactgttccgagcatccagatggggtgcttccgcatgatcaacctcgtccgcttccgcgatgacatggagcgcggcaaggccaccttcggtgcgggggactatagccatgactag

SEQ ID NO: 333810 - DNA, 216 bp, Pseudomonas aeruginosa
atggaactggaagagctgaaccccagcgccctggtagggccgcagcaagatttggagcgcatcgagaagtgggctgaccgaaacggcatcagttacggcattgcccgcgcctgggtataccggggcatcctgccttccgtgaagctcggcaagctgcgcgtggtgaacagtgcattgttccgcgcctggctgctggaacaggagtggacggcatga

SEQ ID NO: 333811 - DNA, 222 bp, Pseudomonas aeruginosa
atggaccggctggtgaaggagagcgaaattggctttcaacgctggcatagcgtccgcttcaaaagcgttcgaatgagcaccgaagaactggaagtgctccaagtattgtttccaagctaccgcttgtggctaatctgcggcgaaattgcccctgagattgggcagactagtcctgaatacgatgatgcaaactcaaaattgcccaatcaagacgcgggatag

SEQ ID NO: 333812 - DNA, 1206 bp, Pseudomonas aeruginosa
atggaacttttaagtaacttacaaactgccattgacattttccagccgtttcgaaaactggggaaaatagcaataaccaaaggcaagtcacgactgacaactccatatagagtagaaaaactcacagatgattttttcagctctagattaaaagttggcgcatgtattacagtaagtggagtccttagccgatacgctccgacttaccgtcccatgtcatatctccctacaattacacgggactctcaagctaaagttacgggaacgaaatatgatttcgagtcacgaagaataattgaagacaaagtcctaaactctaatttcacttcatttcagtttccagtccaggccctgccgccgattaaaactgatgacggaagattttgcattgcttatctcttcccagacacatttaatggacttcttttagaagaagacccacaaaaaaaagaaaacccctcagaccgacttctaattaaagataactgctgccctatcccagtattgattccggaaatcatgctggagaatcattctgaacacgccgtcacccttactggagttttaactctactgccagacgaggtgcacgacaaaatagacgcggggatgtgtgaaacgcgagcggcgttttatcgagccttccatcgcccaacatcgctgcgagcttccttctgtattgactgcaggtccaatctcgactccgacataagatcaaaatctcgcttagagagctttccagctgcaatctatatcgagggacattttgaaggagttattgacagcacctactactatgagtttaaaaaatccgtcccacatggattggatttagacttcagctatgcagaccatccagggaaaactctatatacagtcgcagatccccacatatcattaataggctcattccctagcattttcggtttttatattgaagcaaacttaactgacagtagagatcttgacttaaagctaagcaaacttaacaaattttacactgaattcaggaaaaactccgccagaacagtaaagaaaagagacaatattgatctaagcttcaagccagactttatttttgattggagaaaacagaacttctttcaccccaaaggactgcttgcaaatagagaagtggatgaggttatcaaaagaaactcagagttggaagaaaccgctctttggctgagaggcaatcagcagtag

SEQ ID NO: 333813 - DNA, 378 bp, Pseudomonas aeruginosa
atgtcatttgagtgcactttagaaataaccgcaaactctagccaaaacttcagttcatctaaattttatgtaagcctacctaaacaatatgcatacaaagaaaatcaaaagaatggaaatatttcagtgtcttcaaacgacttcagcttctcaagctggccagagtttgaaaagaacacttacgatttccttgaaaatctaaattttatgagcagtgaaaaagagcttgatgctctggctttaagaattgccatttactatgacatcgaggaaaccgtcatatttcctttctgcttttctaacgacttaattaaaaaagcttacgaaatgaaactatctctggaaatcaatggctatccatgctccagcgagagctaa

SEQ ID NO: 333814 - DNA, 1653 bp, Pseudomonas aeruginosa
gtggcaccagcctcggcggtaccggcgatcacgctaccgttgctcggatcgatcaccggggctgctggcgccagcgagtcgacggtggcgctggtgggactgctgttgttgccggcggcgtcctgggctagcgcattgatcaccgtgccgttggccaacggcgtggcgggcgtgaagacccagttgccgctgccgtcggcggtgacctggccgatcgggttgccgttgccgtcggtgaggatcaccgtggccccggcttccgccgtaccgctgatgacgactccgttgctcggatcgatcaccggcgccggcggggcgatggcatcgacggtgacgctggccggaccgctggtgttgccggctgggtcctgggccaccgcgttgatcacggtgccgttggccagcggggtgcccggggtgaacgtccagttgccgctgccgtcggcggtggcctggccgatcgggttgccgccgccatcggtgaggatcaccgtcgcgccagcttccgcggtaccgcttatctcggtgccgttgctcggatcgatcaccggcgccgccggggccacgccatccaccgtgatcaccgccggcgcactgtcgacattgcttgggctgcgcgccaccacgttgaccaccgtgccatccggcagcgggatgcctggagtgaaggaccagttgccgctgccgtcggcggtgacctggccaatcgggttgccgttgccatcggtgatgatgatggtgttgccggcgtccgcggtgccgctgatcaccgagccgttgctcggatccacctgcgggatcgacggcagtgaggaatccaccgtcgtggtagcgggagggctggtattgccggcggcgtcgctcgcggtcacgttgaccacggtgccgttgggcagttgcgagccgggcgtgaagctccagttgccgctgccatcggcggtggtctggccgatcgggttgccgttgccgtcggtcaaggtcacggtgctgcccggctcggcggtaccgttgagcaggttgccgttgctcggattgaccacaggcgtgttcggcgccaccgcgtccacggtagtgctgccctgcgggccggtattgcccgcagggtcctgggccacggcgttgaccaccgtgccgttggccagcggcgtggcgggcgtgaaggtccagttgccgctgccgtcggcggtggtttcgccgatcgggttgccgttgccgtcggtgaggatcaccttggccccggcctccgcggtgccgctgatggtcgtgccgttgctcggatcgatcaccggcgccggcggcgccaccgcgtccaccgtggtggcggcctgcgggccggtattgccggtcgggtcgctggccgtggcgttgaccacggtgccgttggccagcggcgtgcccggtgtgaagctccagttgccgctgccgtcggcggtgacctgccctatcgggttgccgccggcatcggtgagggtcacggtggcaccggcctcggcggtgccgctgatgacgacgccgttgctcgggttgatcaccggcgccggcggcgcgctggaatcgacggtcaccgtcgccggcgggctgctgttaccggcggcgtcctcggccaccacgttgaccacagtaccgttggcgatcggcgtggacggggtgtag

SEQ ID NO: 333815 - DNA, 423 bp, Pseudomonas aeruginosa
gtgctgcccggctcggcggtgccgctgaggctgctgccattgctcaggttgacggtcggcgtggccggcgcgatggcgtccacggtggtgctgccctggccgccggtattgccggccgggtcggtagcggtggcgttgaccacggttccatccgccagcggcgtgcccggtgtgaagctccagttgccgctgccgtcggcagtgacctgcccgatcggattgccgctgccatcggtcagggtcaccgtagcgcccggctcggcggtgccgctgagcgtagtgccgttgctcgggttgaccaccggagccgccggggcctgcgagtccacggtgacgctggcgcccgggctgctattgccggcggcgtcctgggccaccacgttgaccacggtgccgttggcgatcggcgtggacggggtgtag

SEQ ID NO: 333816 - DNA, 1143 bp, Pseudomonas aeruginosa
atgagcaaccacagctacaagatttgcacgcgctgcatcatggatacgtccgacccccatattcattttgatcagcaaggtgtctgtgagtactgtcaaaattttgacgaggcaatcaagccaaattggcacactgataagcatggcgaagctgagctcaagcgtttggccgaggtgatcaaacgagatgggaaagggcgtgactttgactgcattattggtttgagtggcggtcttgatagctcctacgtcagttatgtggcgaaggaaaaaatggggttacgccctttattgtttcatgtcgatgctggatggaatacggatcaagctgtcggcaatattgagaaacttgtagatgggctggggctagatttatatacagaggtgattaattgggaggaaatgaaggacctccaagtcgctttcttgaaatctcagatttcagatcaagacctgcctcaagatgctgcgttcttttcagcactctataagtttgctcgtgctcataaaatcaaatatgttttgactggcggaaatttttctactgaatgctgtcgtgagccggaggagtggggggggtatccagggatcgataagcgtttatttaaggacatacataaacggtttgggactcgtacgctgaagaccttccctatagtagatatacttgcgtacaaaatctattatcgatatgttctggggatgcaggtgataaggcctttaaacctgctcccttacgttaagaaagatgcagaggaaacccttcagcgcttatacggttggcagtcatttcaacataagcatcatgagtcacgttttactcgtttctatgaagactactggttgccccgaaagtttggttatgaaaaaagaagggcgcacttctctagtttgatcatgactggccaaatgacgcgcgaagaggcacttgaacgtatttcgaaaccagaaatggatgagaactttctacactctgagtttgaatacgtggcaaataagctagatctttccatcgaggatcttcagtttatttttgatggagagaacaagacatttcatgattataagaataagcatttcatgatagggctgggtgctcgaattatgaatactctgggtttggaacgtaggttattcagatga

SEQ ID NO: 333817 - DNA, 615 bp, Pseudomonas aeruginosa
atgatcactattattgactatgggatcggtaatatacaggcatttgtcaatgtctacaaacgtctgcatatacctgtgcaggtggctcgtgtaaattctgatctgaagaacgtagaaaaactagtccttcccggggtgggttcattcgatcatgccatgctgcgatttactgagtctggaatgcgtgaagctgttgagtttttggtgaaagataaaggtatacccgttcttggtatttgtgtgggtatgcagatgctggctgacagaagtgatgagggtaagttaccaggcttgggttggattcctggccacgttcgttcttttcgctccgtaactgggctgcaaaatattgcaatgccacatatggggtggaatgacgtagtatcggttggtaacaatcctctgtttaatggcttggaacagggggcgcgcttctattttttgcattctttttactttgaaagcttgtatctcgaacatgccgctgcgggaactttctacgggcatgacttcaatagtgcagtctcaagggacaatattttcggtgtccagtttcatcccgagaaaagccaccactttggggtcaagctcctaaagaatttcgcggaactctga

SEQ ID NO: 333818 - DNA, 783 bp, Pseudomonas aeruginosa
atgctaaagcctagaataattccttgcctgctcatgcaagatggcggacttgtcaaaaccgtacgttttaaggatccacggtatatcggtgatccgattaatgcggtcaagattttcaatgagaaagaagcggatgagctgattatccttgacatcgatgctacctcgcagggtagagaacctgattataagaagattgctaaccttgctgccgagtgccgtatgccgttgtgctatggtggaggtattcgtaaaccagagcaagcgcgtttaattatttccctaggtgtcgaaaaagtagcaatcagtgctgctgcaattgaggacgtaaacttaatatctgaagttgctgaagaaataggtcggcaaagtgtagtcgttgttctagaccataagcagcgactattgagcaaacagcatgatgtttggacacacaacgggacacataataccaaacgcaatgtcattgacgtggcgaagcagatggaggatgcaggtgccggtgagatcgtgctcaactcaattgacaacgatggacggatgtgtggttacgagatagcgcttgccgtccgtttacgggaagcagtgaatgtacctgttacaatacttggtggcgccggttcgctgaaggatatggggagcttgattgcagcctgtggagtggttggtgctgcggctggcagtctttttgtgtttaaaggcagctatcgagccgtcctgattaactatcccagtttccagcaaaaaaacgatgtaatattttcggtactgaattcccgataa

SEQ ID NO: 333819 - DNA, 1122 bp, Pseudomonas aeruginosa
atgagggtcttgataaccggcgcaaatggtttcgtaggaaagaatctcaccgcgcatctggccgagcggggggatgtcgaggttgtaacctttacgcgtgaaagtaatctccaaagcttgccagaaatgcttggctcgattgactttgtttttcatttggctggtgccaatcgacccgagaatccagaggacttcaaatctataaattctgatctgaccaagacgctgtgtgatgccattcgggcaactggtcgttccattcctctaatttatacctcttcaacacaagcggagttgcagaatagctatggcttgagtaagcgcgatgcagaggaatacattcgaagactgaactccgaaacgggctcgcctgtatatatattccgtttacctaacgtgtttgggaagtggtcgcgccctaattacaactctgcggtggcgactttttgctataatatttccagggatcttcctattcaggtaaatgattcttcggctcaagtaacacttgtatatattgatgatgtaatccagaaatttctggctgtcttggacgctccaaccgctactcatgatgtcagtgtcgagccacaatacaagattaccgtgggtgatcttgccaagcagatacatgccttccgtgatagccgaaaatcgctcgttacggaacaggtgggagtaggtctggtacgggccttgtattccacctatttgagtttcctccctgtaaatcgcttcagttacgacctgccaatgtatggcgatgcaagaggaacctttgttgaaatgttgaaaacgcccgatgctgggcagttctcattctttactgcgcatcctggcgtcactcgtggtggacactatcatcattccaaaacggagaagttcctggtgatcaaggggactgcccgcttcaagttcaggaatatttctactggagcatttcacgaattatgcacccgtggtgagaaggctgaagtcgtcgagacagttccaggctggacgcatgatataacgaatattggttccgaagagatgatcgtcatgctctgggcgaacgaaatatttgatcgtgagcgtccggatacctatgcttgcccggttggcgaagtaagtgatttgtaa

SEQ ID NO: 333820 - DNA, 324 bp, Pseudomonas aeruginosa
atgcacctaatcaaatccgccttgttcctcatcctgttcgcctgcctgccgttttcggcttccgccgcgccggccgccgccaagcctccggtggtcgcgacaatgccgacggaggcgtcgacagcggaggtggtcaatatcaatacggccgacgaggcgacgctggtgcgtgggttgaagggcgtcggcgaggtcaaggccaaggcgatcgtcgaataccgaacggctcatggtccgttcgtttcgctggatcagttgctggaagtgaagggcgtgggaccggcgttgctggagaagaaccgggagcggatcgccatagagtga

SEQ ID NO: 333821 - DNA, 921 bp, Pseudomonas aeruginosa
atggggcttgatgatgcgctgatcttcacccgcgtggtggagtaccacagcttcacccaggccgcgcagagcctgggcatgcagaagtccacggtgagccggcgcatcgccctgctggaggagcgtctgggcgtgcgcctgctcaatcgcactacccgcaagttgcgcctgaccgaagtagggcaggcctactacgagcgctgccggcagatcatgcacgatttcgccgaggccgagcaggcggtcatgcagttgcaacaggcgccgtcgggattgctgcggatcacctcgccgatagagttcggccagatgttcctcgccagcctgctgggcgacttcatgcgccagtacccgcagatcaccgccgaggtcgagctggcctcgcgcagcgtcgatccgctgcaggagggcgtcgacatcgtgatcatggtcggccagccggaggattccaccctggtggcccgtcgcctgctctctaccagccgctggctctgcgccagccccgactacctggcggcgcacggcacgccgacatcggtggccgagcttgccgggcatcgcgcggtccttctgtccaccgactcccagcgctactggccgctttccggagacagcctgccctgccagcgggtgctgtcctgcaacaacatcaccttcgcccgcgaggcggtggtcgccggtgccggcattgccgcgctaccggcgctgatctgtgcggagagcgtgcacagcgggcgtctggtgcgtttgctggcggacgtgccgttgccggtcggcgaactgtatgcggtctatccttcgcggcgtttccaggcgatgaaggtcaaggccttcctcgatttcctgatcagccgcctgccggccgacaccggtcgtttactggagccggaggcggcccgcctgataacatcacgcccctga

SEQ ID NO: 333822 - DNA, 186 bp, Pseudomonas aeruginosa
atgccggaaagagaagaggcgggaaccgtgcgttcggtggagcgggcgctggcgatcctcgatctgctgggccagcaccaggcgctggggctcgaggagctgcattacctgaccgaactgcccaaggccacggtgtcgcggctgctgcataccctgctggagcagggctggtgtaccgcggcttga

SEQ ID NO: 333823 - DNA, 531 bp, Pseudomonas aeruginosa
atgagctaccagtacgactacaacgccgaggccaccggccacgtcattgggctgcggcgtggatacgaacagggctttgaagcgggcgaagttgcaggttggaacaaggccatgcgtgagtggaacaccgaagtcgaaacgcagtggaacccgctcgttgaccgcctcactgctgagcgagacgaggccatccgcacccgcgatgaactgctggagcaggtacgccatgcaggccagcaaacccgcaaatggcacaacgctttctacagcgtgctgtgcgccctcgatagcgcaatggacgtgctacagcacgcaccgcaggagatgcgcacccagatgatcctcgattacgccaaacgtgccgagtacatgaaagacaagggctggatcgactcgatgccgcaggaaaacagcgtcctgcgctcacgcgcccgcccaaccgctgatcagctccaaggatggtgggatcaagtcctccgccacgcgaagaaggcagcggaagccgacagtacccagtccctcagcccataa

SEQ ID NO: 333824 - DNA, 405 bp, Pseudomonas aeruginosa
atgagaatctgggcgttcgacgagaaccgggccagttttgtagaggcttcgccggagcagatgaccgctgatccggctgggtgctacatcatccggcgcggtgatgatgtgttcgtcaccgagtacggccaggaacggcccatgcccgagcggctgaccgtagccggggtgccgttcgaccgcgagcagttcgagggcacccatcccttgcctctgcgagcagagatggcgcgagacgggcagtgggcgcgggagcagttgcggttgcgtgatcagggcgaagtaagcctgccgctggagctgccgatctgggttacgaaaacaccgctgtccatcgaggacatgaacgagatagcggcggcaggctgggcggggaagctgggcgactccgagggcaaggcgtga

SEQ ID NO: 333825 - DNA, 588 bp, Pseudomonas aeruginosa
atgggcaagcgtcttggatacgctcgtgtctctacggatgaccagcggctcgatctacagcgggatgctttaacccgtgccggatgtgtcgacatctacgaggaaaaggttagtggaaaatctactgaccggcccgtccttgattactgtctccgcgcccttaatgaaggtgacactttagtcgtgtggcgtctggacagactggggcggtcgctgcctgatctagtgcgcatcgtcggggagttggagcggcgcagcatcggattcgagagcatcacggaacgtatagaaaccggcagcgcaaccggaaagctgacgtttcacctgttctcagccttggccgaattcgagcgcaatctgattcgggagcggacacaggcaggtttggctgctgctcgcgctcgtggccgcaagggaggacggaaacctgcgctagatgacaagcagattcgagagataaaggcgcttttgcgtgatcctgatattcaagtcgccgacgtggcgaagcgttacggtgtttcacgcgccaccatttacaagcacgttggtgcggtgcgcccagagcgcggcgcatccccgatgatttag

SEQ ID NO: 333826 - DNA, 1278 bp, Pseudomonas aeruginosa
atgacaccgctggagggagagttcgattacgtggtgggcaacccgccttatgttcgtcaggagttaatccctgccccgctgctggccgagtatcgcagccgctaccagacgatgtatgaccgagccgacatctatatacccttcatcgagcggtcgctgtcggtattgtcggatggtggcagtctgggcttcatctgcgcggatcggtggatgaagaaccgctatggcgggccactgcgcagccttgtggccgagcagttccatctaaaggtttatgtcgatatggtggatacaccggccttccactcggatgtaattgcttacccggccatcaccatcatcagtcgcgaagtaccaggtgcaacgcgcatcgctcaccgtccggccatcgaccgtgcgacgctgaccactctggccggtttactccgtacgccgacactgccgaaggatgctggtgcagtgcgcgaactcgccagagtcaccaacggcgcggagccgtggctactggagtcatccgaccaaatggcgctcattcgccgtctggagggctgcttcccgtcgctggaagaggctggctgcaaggtcgggattggtgtcgcgactggcgcggacaaggcattcattggcaacttcgatgcgctcgatgtcgagccagaccggaaactgccattggtgacgacaaaggacatcatgaccggtgaggtgcagtggcgcggtcaaggcgtcatcaacccctttgccgagtcgggcgggttggtcgatcttgacaggtacccgcgccttcgccgttatcttgaggcccgacgtgaggtgattgccggacgtcactgtgcacagaaagctccggccaactggtatcgcacgattgaccgcattaccccggcactggccgcgaggccgaagctcttgattccagacatcaagggtgaggcgcatattgtcttcgaaagcggcgagctgtatccccatcacaacctctactacgtgacctcagacgactgggatttgcgggccttgcaggctgtgctgctgtccgctgtctctcgcctgtttgtggcgacctattcaacgaaaatgcggggaggattcttgcgcttccaagcgcaatacctgcgccgcattcgtatcccacgctgggccgatgtgcctgaaccgctacgccgtgagctggctgaggcagccatcaagcgggacgtgcaagcctgcaaccgggctgtgttcaggctctacgggctgagccacgaagaacgatctgcccttggaggcaatggagaataa

SEQ ID NO: 333827 - DNA, 741 bp, Pseudomonas aeruginosa
atggcacttgatcttgtcgattacgaacagaaggcccgcgacgccgtaaaggcgttttggggcaaccgcgaagctgcacggcaaaagcagattgagtcaggcaaggccgaccaaggtgaacgtgctggcgtcactggcggcaagaacatggacgggttcttggccttggtgctcgacatcatcaaggctaacgggctggcacatgccgagattcaccagaatcgagcgatgctgaccctgccaggctacttccgcccgacgaagctgtgggatttgttggtgatctacaagggggagctgattgctgccatcgagctgaaaagccaggtaggtccctcgttcggtaacaactttaacaatcgaacagaggaagctatcgggacggcccatgatctttggacggcctttcgtgaagaggcgttcggcaagcagccacgccctttcgtcggctggctgatgatggtcgaagacgcgccggaatcccgcaggccggtgcgtgactcatcgccgcacttcccggtcttcgaggagttcaagggggcgtcgtatctcacgcggtatgacttgctgtgtcagcgattggtgcaggagcagctctacacgaccgctgctgtcattgcggcagagcgcagtgcggtggataccggcgacttcacggagcagtcgtcgatgaccagcctcaagacattcgtgtctgctttggctgggcacatcgccgcagaggcggcacgactgggctga

SEQ ID NO: 333828 - DNA, 249 bp, Pseudomonas aeruginosa
atgatgacaaccacaactgaggcgctttcagaggttttacgcgggtatggacgcgtcgatgaaacggcattggcatcactgctggaggtcagcgactgggagcgcatagcccgtcaggagctggagcgccgggctacccgcattgtgcagtcgctcgatgaccgtacccttgaggccatagcatctggtttgctcgatgtccgggccgtctgccgccaagtggccgacgagatcaagcagaccgcttag

SEQ ID NO: 333829 - DNA, 819 bp, Pseudomonas aeruginosa
atggcgctgccttctttcgacaacgggtggcgcgagggccagagcgtaaagccgcgcatactcgtgctggagatcaaagacaaggatcgcccggatgacaaggcattgggctgggtgctggtcgagcgggaggagacctatcggcgcgatcctcgggatggagcgatctacgaggcgtccattcggctttcctaccagcgcatcacagccaagttttcgcaccgggacggtggcaaagggcggtttgatggcagctactcgcgccacttcaactccgtctcgctgacttcgccctcgatgtcgaaaggggcggtattccttgatttgcctgggctggatggtcagcgtatcggcacctacttgatgaatgagatcgtccagtgggtgcagcagtggcccgaggcgaacgtcaatggcatcgagctgctggccggtcaggcgcatggtgacaacaaggcgcggcgcaactggttttatgagcagttcggtctggtcttcgactacaccgaccccgagcatcgggaaggccgatcccgacctatgctggccggagcgttggtaaaagtcgagacgtggaggcagaacatcaccgagcaccggatgctcgactatctggccgcagttctttacgccgaggaacgtgccacatcggagttgcaggcccgtgatcgagcctgtgcccaactgatctctgaacagaagaaggcagaggcccggcccttgcgctgggcgttgagacaactgtactaccgctatgctagcacggtgttcgccgggcttattctgtttatcttgattggcgtgtcgtggattagatag

SEQ ID NO: 333830 - DNA, 993 bp, Pseudomonas aeruginosa
atgtcagcagaaaacgagaacactgcgaaacttgctgaggttgcagccactgaactatttagtgaatttttttgggagcgaagcgggccgaccaatcacgattggccatgcgaggatcaagagcgccacgatgtaaagacgcatccttgtgatgtcgtatattactacgatgagccatattcgccagtcagaacttacgttcattgcgatctaaagagctacgcaaaaggaactattcgacccgcctctgtaaaagcggccgttgagagcttggcaaaacaagtggcatgtgcagagaagagcgatagctggcgagattttcatggtcacgatcatgtaaccgcctcaatctgtggcctgttgtttgtctataaccatgatggtgagtacgaggcggattttcaaaaaaatcttataggaataaaccctgattcccttcagcttcctcgcggctctaagttgtttgtattggggccaaaagaaatattctggctggataacataagagatgaaattcagcgaatgcgtgggaagaggccggcagaacttcctccgcatgaattttgttctttctatcatccgcagctcgtcaggagagcaaacctccaagtcagaacagccaaggctgctactcttgagatgctaacctccccaatcatcattttggagcaccgcgatcccaaaggaagtgctaagcggggggttgtcgtcttctactcaaggaaaggcgagacagcagacgagttcatgtatcttattgatacactcaggaaatatgagcttttagacgacaacacttcagttacgataaagacgcttggtgcatcaccaatttcctcgccgacattccagcgtgcgcagcagcagtatattgaaggcatcaacataaatgctacaaagaccgatcttgccgcttatgttaatgcgatcaagtatgagccaatgaataaagtcaaaagcacatactccgccattgacttggggacatggtaa

SEQ ID NO: 333831 - DNA, 1125 bp, Pseudomonas aeruginosa
atgactgattttctcgaccacctcagcgcaaacgacaacgacatttatgatcttctgatttctggaaaacagaggctcacggcctctgtactccgagagttggcgagagatcgaggaattttttactcaccagaagatagccgcgaagaactagccgatcgactttcgcttcttcctcacgatttccatgatattggaggaatcgtgcaaaagcgtgaaccggctcatcgccgcgaaaaagctacttttgttcggcttggcactcaattgtcggtcgaagaaatgaaagaagctgccgctatctatgctgaaaaggttgcagcaaacgagcaggtcacacatagacccaaaggtggcacagggtattccgtagatgtcacttacgacgagttcaaccacacgagaacgcgcttactacagcgtgagcgccatgaggcaagcattgaattcttcgttgaaaatggccagacggttgcaagacttcccgcaacggacaaagccaagcgagtttttgccgccatcaaggaagcagtcgaacaaaagcgaaaagaaaaaatatcagaagacaaaattgagttaaccggcctaaccactcctgccctgcgctccaaattcttcactcggctgatttcctctcttcctggctataagctgaagaatgtgatgaacctaaaggtttcatcacttgagtgcagagatgatgaagatgttcttgatctagacgaggatttggaagacgacgcatccaaagagatgttcgccgctgttgtgcacagtatggcactatccggccaaaatctcgtccagtcgcaagagtacaaagacctcacgtctcgcggattcttcattacctcgatcacatggcgatccgaatatgagcgtgagcctaacgatattgtccaatttgacgcaggttttgaagaccgaaaaacaggaacaggcttcaagtatcaagtgcaaggcgcatttcgtgcgcacaaaggtacgcacagaaaaactattgtccatgtatctgacctggaaagaacaaagctcttttcaattctggaagatgcggcaagaaaggttttatccgaccttctgagtgaagcagaagaagagtcacttgacgaacccaaggagtga

SEQ ID NO: 333832 - DNA, 699 bp, Pseudomonas aeruginosa
atgaaaagatttcgttggtttaaggttgagtggccttcatccattagaacccttgctaaacgcatcgccaagcgtcctttcaacgaagagtctgggcacggtttttttgttgaccgcgttcgagatgactttttggaagctcgctacgtagagaaaattgaatatacggatatcgtgaccgacccttttggcaatgagctaaagtttgatcgtgtggagtttcggcacactatttttcgagcctcgtcattcgctcctggcttagagttgattgatccccccaggagcgttcaagcgttaatgaatcgtctttcagaggcggtcgatttcgaggttgcgataactcctgtatcacttgatgtgctgaagtgggctaccctatttcaggagtctgggagtgtctcagcggaaattgattctttgcaaatcggggcgctggagattgaaaaaggcattgtggcaaaggtgctggtcaagggcgaccgagatgtacgtgcggcatgtgacgtacttacccatgaccgaaaattttctatagagaaggttcaacttcgcctttctaatccttatcgaaaaacaacagttgtgctttctggcacaggcgctgcggtattcagctcagataccttggcagaagagcttttgtctccgctgcggatagcactgactggtgccatgcaattggccagtcaatcgtga

SEQ ID NO: 333833 - DNA, 576 bp, Pseudomonas aeruginosa
atgcagattcgggtgcagacctacaagggcagagatgggcagatcaagcagggcaagtccgtctcgctgctacgctacgcctatgactccgagaaacggcgctccaagcaggtcatcatcggcacggtagatcgctgggcaacggtactgccgcctgacatggaagccatcctgactgacgccgagcgtgaagagttcagggaatggatggccgagagagaccggcagcttgttgagcacaagcaaaaataccacttgctgcacgctgccgagcacatgggatgggcggcaaaagcactggctgccggggtgaagccagtccggcccgaacggatttgggatgcccttgatgtgctggtcaaagcgctggaaaaggcaaatcacccaaggccaagtcgatcacgagggcgtccatcgaagagcgaaacgccgacgccggatgatcttgtcgcaagcccctacgatgatccgacgctgactgccgagcaggaagaaacgtatgaacggatggcggcgctgccggatttcaccgctgataaaggcgtatccaaagccaagcacaagagcaagcggtga

SEQ ID NO: 333834 - DNA, 705 bp, Pseudomonas aeruginosa
atggcaaaggctgaccagcggcgtcggctccgcttcgaactggtgaaaagtatcctgcactgtgagtcagtcaggaagctgccccatgaccaaaaaaagctgcttttccggtggctggcaaatggctggagcatcaccgataccccgcccgatacttcgcgtatccgggcgcttgaaaaggcggcatccgacgcccgtcggctgaggactgcgcttggccgtctcgatgcgaaggacgccgccagcctggacttcaactacagccagtccatcccgctctcaacccgtctgtacgccctggaggaactggccaatgatgccgatgcgctgggccgcgtcatcaagggcgaacaagcggacatcgtgcggctgcggaaacggaggacagcgaaaagcattgccaacacgctttccatgttcggaatcccgctcagcacgcgcaatgactgggatgtggatgagcgcaatgtgacgaccgccatgcgctgcgtgatgttcgccatgctggaagccgatgcgaagaagctgcattggggtacagccgccgccatcgtcaagctgggccttcagatgctgaccgatcctgacgaagagaaggtggtgttttcagaggggaaactaccagttacggcgggggatgctgagaacttccggcttttcctgcgtgaaatgcctgagtttaacggcatcaagttggtggagtaa

SEQ ID NO: 333835 - DNA, 219 bp, Pseudomonas aeruginosa
atggagcgcttgctcgagagcatttacatcaatgcccggccggcaatggagttgaggcttagcctcaccagctccggccgcaagagaattgtaaagattgtggatggggaggaggtcgaggttctgccaggtgaagtgcagggcatcctggaggcccaaaagagggatgttggaatcctcgctgatttcttagccaagagtctcttggcgcgacgctag

SEQ ID NO: 333836 - DNA, 843 bp, Pseudomonas aeruginosa
atgactgtgaggctggttggtaccgctgtagggtgcattaattacaaaggtcaatttgctgctttaatctataatctcaagtttagcgatggcagctctctttcggtgagtatgggtgagatggtatgtgcacagttggcttcgttgtttcaaggttacttagtcgaagtaggaggggttagcgagtcaccggaggcggagagagagtttaaaaggaatgagggggtgatgcctcgttctatgttagagaatccaagtcttgataccgtcgttagccatgttgttagtaggatgttagatggagggttggtccttagtttgatatttaagaatactggggatcttaaaactgtagttattcgtagagaggatgttcccagctttattggctacacgtttaatgcgcttcagggggtaggggttcttgaaagggttatgagggaatccgcggagattatgactaaaccctcgattatggtgtatgattgtaagttcaactctggtgatatcgattataatgatcggcgcgggtacaatattgatgaatatagactgctgccttatctctatggggtggtcattgtagataactcaggtgctggcagaaaagttgttgctggattctttcttaagtcggccttgactagtaatgatcctaagctcagggagcacttggctgacgcggccaagcagattgttggaagtgactattttgtaagtaaggaactttcgttattgcacacaaatgtttttgtgtctgacggtgagccattgagtatagaggaaatgcaaaattttctcgctaagctgtatcttgagcactctgtcggtggagtcgcatag

SEQ ID NO: 333837 - DNA, 663 bp, Pseudomonas aeruginosa
gtgagactgttgaagggcggctgggcagcgaaacgatttcaaggtcctgccctgccctgggcggggctgctgctggtcttgctggctgcatccgccgtagcggtagagcttctggtgaaggggctgccagccaaccacagcctctacggcgatgcgaaagcgcgctggacgatcaatgaatacgccgacctggagtgccccttctgcaaggtctacaccccgcggctcaagcgctgggtagacagccatccggacgtgaacctggtttggcgccatcttcccctgcagatgcatggcgaggcggcccgccaccaggctcgcctggtggagtgcgcagggatccaaggcggcgccaaagccttctggagcgctatcgatgcgatcttcgctcagtcggccggcaacgggggcgggctgcctggcggcacattggactttcctgaattggaccagtctcgactggagaaatgtgcaaaagacaacgagctggttgactcatccatcaagtcggacatcgacattgcacggtcgaagggcattacagcgacccctagcctgattatccaagacaaccagacgaaacgaagcgtgaagctggagggcatggccgacgaaaccaccttgctgtcggcgatagactggttgatccatagtggagattaa

SEQ ID NO: 333838 - DNA, 762 bp, Pseudomonas aeruginosa
atggccatcgtcctttccccgctgcaccgccgccgcctcgccgcgttccgcgccaaccgccgcgggcgcctggcgctacggctgttcctcgcgctgttcgtcacctgcctgttcgccgagctgatcgccaacgaccgcccgctgctgctggaataccgtggccagtggttcctgccggtgctgcgggactatccggaaaccgccttcggcggcgagctgccgttcccgccggactaccgcggtcgcttcatgagcgaacgcatcgcccgcgacggctgggcgctgtggccgccgatccgcttcgacgcgcgcagcatcaactacgcgcgcccggcgccggcgccgccctcggcggagaactggctgggtaccgacgaccagggccgcgatgtgctcgcgcgggtgatctacggcctgcgcctgtcgattctcttcgccctcggcctgaccctggcctcgtcgttgctgggaatctgcgcaggcgcggtgcagggctactacggcggctggatcgacctgttcggccagcgcttcatcgaggtctggtcgggtctgccgatgctttacctgctgatcatcctcgccagcctggtgcagcccggggtcggctggctgctggcgatcatgctgctgttctcctggacatgctgctgttctcctggaccagcctggtcgacgtggttcgcgccgagttcctgcgcggtcgtcacctggagtacgtcaaggcggcgcgaaccctcggcctcggcgacgccggggtga

SEQ ID NO: 333839 - DNA, 267 bp, Pseudomonas aeruginosa
atgacgaaacacccaagcggtagcgccgtaaaggctaccacagcaccgcgacacctggtcgctctggccatcgtcggcggcgccctgatcgcattccaggtcaacaagaccgacgccacccgggccagcctgcagagcgtcaccgacatggcccgtcgcctcggccagttgaacgaccaagacgtctcagttgtcgccgagctgctggccagtcctgtccgtaccgcagagcccgccatcccgttaggagaacgcccctatgtctaa

SEQ ID NO: 333840 - DNA, 231 bp, Pseudomonas aeruginosa
atgcagattgccatcgacacgccgtatgtgaccgtcaaggagttcgtccgacgctccgggcagtccaccagtgcagtggaacgcgagatcaagcgcggtaactacatcatccggccgaaggaggagggttcgaagtacgccgttctaataaacatggtccacctggccctggaggcggcagaacaggcgcaacaggtgcgtagcgaatcgaaatccggcaagcagcaataa

SEQ ID NO: 333841 - DNA, 240 bp, Pseudomonas aeruginosa
atggagcttgccgagaagctgaaagcaatccggctaaaggaaggtcttactcaggctgaactgtgcgacgcgaccgggatcgccctgagcagttacaagaaatatgagctgggattgcgagttgaggtgagttccattgcgttgctgaagatcgcaggccatgagcgtttcaagaagtacgtgctttggctcatgactggtgacaccgcgccgaagtgcggccaggtcagcccggtatag

SEQ ID NO: 333842 - DNA, 2346 bp, Pseudomonas aeruginosa
atgctcgatcaatccgttcagatcggccgcgaaggcgtcgacgagctcctgcaccgtctcgtcggagaacatatcggggctgaaggtccaagtcaggccgagttgcccctgatagacctgcccttcgacagagagccagtttgcaagcggcgcacgttcgtcctgtgcactgccggaacgctccgcggctggcacccacagggcctcgtcggcgaactgatggtcgaactggccgagataattgaaggttatgcgtggttgcggcgaccgagccagaacttcaccgcaagcagggtctgccaggtagcgcaacaggccatagccgatccctcggtcgggaatcgaacgcagctgttccttgacgctcttgatcgcggcgccaggctcgacagccggatgcaggtgcaccggatagagactggtgaaccaaccaacggtgcggctcagatccagctcgccccccaattcctcgcgcccgtgtccctccagttgcaaaagcagactttcgtgaccgctccagttacaaaccacacgtgccagggcggtcagcagcaagtcgatgacctgggtgcgataggctgccggggcctcctggagcagacgtcgggtagcctcggcatcgagggtcagggccagcttgcgggcgtggcggttctccaaaggagcatgaggattctggcaaggcaggtcggctggcgcgccatccaggtgtgtctgccagaacgccagttcgtcatgccgcttccctgccacttcacgcaaatgtgcgctccaggcctggtaggagtgtgtgcgcaataccgcaggcgagtcagagctctggtagaactgctgcaagtcttccagcagaatccgccaggacacaccgtccacgaccaggtgatgaatcaccagcaagagccgctgctcaccttcgggaagctcgaccagaagagcgcgcagcagaggaccggtgctcagatcgaggctacgctgggcttcctcgcacaacgcggagagttcttcgaccgaagcgacctggcgccgccagagcgggctttcaacctcaccggaatattcctgccgccagcacccttcttcctcatggaagcgcaggcgcaaggcatcatgctggcgaatcagagcgagcaaggcctgctccagacgttcgccatcgacagactcgcgagccttcaaaagcaacgattggttccagtgcctgcgattcgggatgtccaacccgaagaaccagtgctggactggtgtcaaggccacctccccgcctaccggtgcctgaattaccgcgctgtcgcaaggcaccgccacctgcgccaacccacggatggtctggtgttggaacaggtctctcggactcaacccgaaaccggcctgacgggcccgaccgaccatctggatagagacgatcgagtctccaccgagggcgaagaaattatcgtcaagccctacccgctcgatgcccagcagcgcttcccagatttccgccagacagcgttccgccggactgcgcggcatgctgtaaaccacctgcccaagggtcgcatcaggcctgggcagcgccttgcgatccaatttaccgttggggctcagcggcatgcgctccagagcgacccactgcatcggcaccatgtattccggcaggctctcagccagatgggcagagagcatcccgcgccattcgtcgggctcggcagccagcgtcacatagccgaccagttgcttgccatccaccaccagcacagccgcctcgcgaacagcgtggtgctccagcaggcgcgtctcgatctcacccagctcgatgcgcaatccacgcagcttgacctgatgatcgatacgtccggcatattcgatgacgccatccgctcgataacgtgcgaggtctcccgtacgatacatgcgctcgcccgtggcgaacggatcggcgaggaagcgttcggcgctcaacgcggggcgaagatggtagccccgcgcaaggccggcgccagccaggtacagctcacccagcgcccccactggcaccggctccagggcatcgtcgagaacgtagcaacgcagattggcgatcggacgtccgataggaaccgtatcgcgcccctcctcccgacagtcccaatgggtcacgtcgatagccgcctcggtcgggccgtagaggttgtacaggcgtactccaggcaattcggcgagcaccctttgctgcgcatccaccggcagagcctcgccactacagacaatccgcttgaggctggtgcaagcggaaaccccaggcgcctgcaggaaggcctgcagcatggacggcacaaagtgcaacgtactgatgctctcccgaccgatcagatccatcaaccgtga

SEQ ID NO: 333843 - DNA, 327 bp, Pseudomonas aeruginosa
atgcaaacgcccgcccttctcgtaggtatccagactcagatcgaactgggtcgtgcggcttttccagtcgagaggagcgaaacgcaggccggccacgtcatccagcgagccgatatcggctacttgaggctgatggttgtacatcacctggaacagcggactgtggctcaggctacgctcgatcttgaaggcctcgaccagacgctcgaaaggcagctcctgatgagcctgggcaccgagcacgctgtctttcagagaagccagcaacgatgcgaccgtggcctggccttccaccaccgagcgcaaaacctgggtattgacgaatag

SEQ ID NO: 333844 - DNA, 159 bp, Pseudomonas aeruginosa
atgatgcagggtcagcagcaatacatgctgctcctcgcccagacggatcaggcgcacgcgcagaagcggcccctcgcacaagtcgaaaggccgcagcgattcggcctgggcagtttcgcgcaagcaggtttcccgctcggcctcaggcaagagggatag

SEQ ID NO: 333845 - DNA, 195 bp, Pseudomonas aeruginosa
atgagactgattcgactgaaagaagtgatgcgactgaccggccttggccgctctaccgtctacaaggtcatgaaggaggggagcttcccaggctcagttgctttggggggtaaggctgtagcgtgggttgagtccgaggtgcaggaatggatcctggctcggcttcgggaacgagatggtcagccgtctctataa

SEQ ID NO: 333846 - DNA, 405 bp, Pseudomonas aeruginosa
atggaaacacgatgcctgatttgcgagtcgatgctcgtggtcaccaaggcacaggcgcaagcctgctccctgctgctgggaacgctaggcggcttcctggacggctgttcaaagatgcgcgtgcagagcaacatgcaccgaaaccgcgatatcggcgacatgtttcaaatgggtctagaacggcttacatgcgccgtagaaagcgcaacctctggatgcgcccagggctgggaatttgcccaggacattcagcgttttcacttcggggaattcgagtgcctttgcctgcgctgtggtgcacgtttcgaccagcagcctagcgacacccttacgcctcagccaggcgatccgccaactgctcgaccagccccaggatcaactgacgatccgcaggtgagaccgtag

SEQ ID NO: 333847 - DNA, 330 bp, Pseudomonas aeruginosa
atgtcgattaactgcccttcctgtaactctgctcgcgtcacagcacgcaaccatgcccgcaaaatcggtggtgcagccggtgctgtaggtggagccgcgaccggcgcggcgagcgctgccgccggagcacaaagcggtgcggctctgggcgcggtcgcgggccccatcggggcggccttgggtggcctggctggtgccatcctgggcggcttggctggtggcgcagtaggcagcctcgccggtgcacgcatgggcgaagagatcgatgcccgcgtgctcgataacttcgagtgccatgcctgcggccacgtcttttccctcgaccagtag

SEQ ID NO: 333848 - DNA, 669 bp, Pseudomonas aeruginosa
atggcgccgagcaatccgtttcatcgcatagctgaccttcctcctgaacaggccattgagcaactgctgggcataactgccgcggatctcaaagctacggcgctacagtgctttcggtccgcatctttggcaggcccgctgcagcccaaggggtcagatggcaccttggcttggattttcggcacggaagcctttagacaacagatgcttcccaagggatggaaacctgctgacccaagcaatcagccgcgtgtggtctctcccgacggcaagcatgctgtaacggttgcttgcggtgaccacaatacaggtaacccgtatgtcaaaaatccgcagactcggaacaagcgtggtaatcgcacgactaaaagcgtgtcatacaacgcccgacaggccgatttgttccctgtagagcgacgcagtcgacagattttcatcgacgatcaacaagccgagcagacgctctggatccttctgttctatgttgatcttgagaatcgcacggttcattacgaactctcgcgcccgatcaacatcggcgaaaacggaaaggttgacgactggaatccgcgctttatcatgccggcgctcgttctggatgccccagaagacaaccacggatctgatacagctcccgatatcgacattccagttacaccgagatcatga

SEQ ID NO: 333849 - DNA, 1107 bp, Pseudomonas aeruginosa
atgaccgagaccagcgatttcaatccggcccgattagtgctcgcccgccaacgccgtggatggacaaagaagtcgctagcagatgccacatctttaagtggcaaaacgatatctttgtacgaaagcggcgatttgattccgtcgcccgagagcctgagcagcattgcccaggctcttagctttccgctgtcctttttcagcggtgttgatgtcgacgcgcctactgatgagaacgccagcttccgttcgttctctcgtatgacggctggacagagagatgcagcgctcgctgcgggcggcattgcctatatgctcagcgactggatcgacagcaaatttcacctgccagaagcgtctgttccagattgttctggtatggatcccgaagccgctgcggaggctgtgcgcgcggagtgggggctggggctactgtctataaagaacatggttcaccttcttgagtcgaaaggtgtacgtgttttttccctggccgaagaaacgagccaggtcaacgcgttctcttgttggcgtcgaggcgtaacgcctttcgtatttctgaatacgcagaaatcggctgaagcgagccgattcgacgccgcccatgaactggggcacttggttctgcacaggcatggtgagaacaagggtaaagaggttgagaacgaagcaaacgcctttgcttcggcgttcttgatgcccaagcagaccattttggctcaggggtggaaatgtaggtcagtggcggatgtcatcaagatgaagaagatctggaacgtctccgccatggctctagcctaccgcttgggaaaagtcggaattttgaccgagtgggtttatcgaagcttctgtgttgagcttgccagtatgggggctagaactaacgaacctgatccttctccccgagaaacatcgcaagtgctgcagaaagttttgggtctcgccagagaccaaggcaaatcgctcagcgctattgcatcagagttgagtgtttcatctgcagatctcacgccgatcttgtttggtatggcgccggtggttgtccctggtactggagatgctagagcttttgaggttcgcagtggagcagggctacggttggtcaagtga

SEQ ID NO: 333850 - DNA, 2142 bp, Pseudomonas aeruginosa
gtgtctcccaacttgcggtgcagggactactaccagacgcagttcgcagggtatgcgcgctatctggcatgcggcgttgcgcttgatgagtgtctgcatgattttctcgatcaacgaccaagcgtaaagtacacccagaggcatcgtgcctctgggctggctggcgccgatttctggtggcagcccgcaaatgtagagggagctgctctggccagtctggcgcttgcacgtgtactgcattttgatgacgtgatcagtactgagctgttggatcacctggcagttcaccaccctgatcagctgcgctgggccattcgctactccaagcttttcacgcgcagagattcgcctctctggtttcatctgcagagcagctgcacttgcgatgagtggcagacgttctttggggtttgcgagcgcctgctgctgcagctggaaccctttgaagccgtgatcaagagtgctgagcgacaactgcagtctctgacgcttttggagctgctttcctatctcagcgtattggcctatacccgtctcggggatgctggtgacgatcctgcaggcatggattgggttgcttacgagcggatcatcctgcgcaagctgaggacttgcagcgagtctgactttcggctttctacggatgtgcttggccgttcgttgagacaacatttgtcgccaatgctgtttccgcagcctggggagggcgctgagtgcgttcagaacctggaagcgctcggcgtgatgatcgatgcaacgcgcgagctcattgactatgagcgctccatcgactggttttgcttcgatagtgaatgcgattaccagcttcagcctgggcaatcagtcattttcaacaaaacagacgagggtaccctgcgctggcagcgtactgagcgaaaaagccagctgctatggtgctactggatgtgccgcgcggtcgatgtctttgcggcttctgagctggctgggcaggtcatcgggagtgctgaaaaccatgaagccaaccagcttgcctacatcaaagcgattcgcagccagctctatctgcaggtggtttttgggctaggcgaaagcatcaggcttaacaatggggcggaggtctcgctgcatcacgccatgctggccagtgagctgactaacgcttttttcgagcaggcctatctgcgaccttatcggcgatacttggctgagtccgatgatcccatagcggcactggggcgtttggcttttgatgggctgctgcagggagagaatcgctttcccatgacctggtcggagttgccggagaaagtggcgcggatccgtgcgtggacggtcagtgatgagcatcccatgggggatcctgaggccgccaaagccattctgcagttttggaccagtgatcttcaggcgctgtccgagcagatcaagcaagcgcctaatcaaccgacgccaaggctatacgagcggccgttctacaaaatcggccgcttcagctttcagtttccttgggttgcgggaagacagaacagcctcacggccgcggtaaacaatttgcgtcgcgtagatccgcgcagacctgagcttcgctccgaaacagaacgtgtcgaacacgaactggctgcgtctcttcggcagcgaggtttccgggtggtggtgggctaccagccgcctcgcatggatgagggcgatgtaggagagattgatgtgctggcgtgcctcgaaggcgtgttgctattgctcgaggtcaagtcaggttttatccgttccaacggtcacgaagtctggctccaccgcacgaatacgttacgcaaggctgccaggcagctgaagcgtaaaagccctgcggtgctcccagcattgctggcggactctgacttgcgtgacgcgctggggctggcgatttccgatccgtcgccggccttgcacacctgggttgtagacacctcgattgagctggatggggaggttgttgatggcgctctggttgtatcccgagaagtcctggaagtcgcgctacgtgacgagcagcattacctgagggctttcgatcaggacgcggaggaagaggaggcgatcgccacactttatccagacggattcagcgttcaggcgtttatccgagtgatcgagcgaagcgaggtttggcggggcttactttaa

SEQ ID NO: 333851 - DNA, 246 bp, Pseudomonas aeruginosa
atgcagagtatcttggctgacgtcgctgtcagcgtttctgagttgaagaaaaatccgtcgggcatcctggctggtgcaggtggtatgcctgtcgccgtgctcaaccacaatcgcgtcatgggatacatggtgccggcagagctctatgagcagatgatggagcgcctagatgatctggagttggtcgaaatagtgaaggctcgctcgggcgaggagtctgtcccggtgcgtttggatgacctatga

SEQ ID NO: 333852 - DNA, 282 bp, Pseudomonas aeruginosa
atgacctatgagctggagttcctgccctcagccctgaaggagtggcagaagctcggccatacggtgcgcgagcagatcaaaaagaaactgcgcgagcgcctggataatcccaaggttcaggccgacgccctcagggatatgccggggcactacaaaatcaagctgcgtgcatcgggctatcgtctggtataccgcgtcgaagatgagcgcgtggtggtcgtggtggttgccgttggcaagcgcgagcgtggggccgcttaccaatctgccaagggccgttag

SEQ ID NO: 333853 - DNA, 582 bp, Pseudomonas aeruginosa
atggccgttcagacgtcgctatacaccctgcatatccagctggagccgctgcagttcgatccgccgatttggaggcggatccaggtaacgggcgactgttcgctgcgcaagctccaccacttcattcaagctgcgtttggctggaccagcagtcatctacatgaattcagcgagggacttaatcgctacatgccactggacgccgagttcgccgacatgttcgaagacgcgctggatgaccgcaaaatcaaactgcgtcgggtactgaaagatagcgaccgcctgcgctatctctacgatttcggcgacagctggcaacatgtgatcgcagtggaggccatcgagccctgtgacttcagcggcacctggtgcaaattgctagacggcgcccgcgcctgcccaccggaggatgtgggtggggttccgggttatcagcacttcctgcaaaacatccagctccctgacagcgacgaaggccgcaatgcactggaatgggcaggcggcagcttcgatgcagagctatttgatcgccgcgcagctgccgcggcagtgcaacggatctgcaataacttctggggctag

SEQ ID NO: 333854 - DNA, 1581 bp, Pseudomonas aeruginosa
atgaacatgattgcgttgtcgtggatggtgattagcggcagtttgttgctggttgtgctggcgggtgttgcagtctactggcaggtattgcgccgtcgtgaagcggttgcagccttgcagatctgtcagtcgcaactagagcagcacatggctgcatctcaccagaaagacgatgaactccgtgagcttagtgccggtctgcgggcggaaaaggctcatgttgagcagcttcagcggcaggttgaattcgctcagcaagaagctagtcgcttgcgtaccgaatatcacgatcaattcgctcaactggtcgaggtgcagagcgctgcaagcgccgctcgcgctcagtatggtcaactgcttcagcagcatgatgagctcaagcaggcgagtatccggctgcagcaagttcacgacgttctgcaggatcgctttgcggcactgaccaaggagcatgccacgctgagcagcacgctcgatcaaaagcagcagcactttgccgaacagcagcaactgctgaaggaaagccgcaaccagctcaagctagagttcgagcagctcgctggccagattttcgaagccaaaggccaggcgttctcgcagtacagccaacagtcactggacgcattgcttaaacccttccgcgagcagatcgagggtttccgcaccaaggttgaagatattcaccacaaggatgtacagcagcaagctgcattgacccaggagctgcatcacctaaaggagctgaatcgacagatcacccaggaggctcaggacctcactacagcgctgaaagggcagaagaaggcgcagggcaattggggcgagctgattctggagaatgtcttggagcgctccggcctggtcaacggcaaggacttcaagcgggaggtcagcttcaccggcgagagcaatcgccagcgccccgatgtgatcgtttacctgcctcaaggcaagcacctgatcatcgatgccaaggtctcgctcaacgcgtacacccgttacatcaatgccgaggacgatgccgagcgacgcatggcgcttgccgagcacgtgacggccgttgggcaacgtatcaaagagctctctgatcgcagctactttgacttgccggggctgaatgcgcctgagatggtctttatgttcgtgcccatcgagtcggctttcgtcgaggcgctgaaggcggacgagacactgttccagagggccatcgaacagaacgtgctggtggcgacgccaaccacactgctgaccagcctgaacatcgtgcgccagctgtggcgtttcgaggatcagaacaagcacaccgccgagttagccgagcgtgccggcaaggtctacgacaagctgcgcaccttccttggcagcatggacgccatcggccacagcctggacaaggcgcaggatgcctacaagaaagcctgcgatcagctggtcagtggcaaggctaacctggtcaagcaagtcagtgatttccgtcagttgggcgtggcggttaaaggcgagctgaacgaggtctgggtcgaccgggcggatctggagctcaacctgatctcccagatgccagctgagcagcaggcgtga

SEQ ID NO: 333855 - DNA, 204 bp, Pseudomonas aeruginosa
atgaccgatcggtggttgagcgtagaggaaatcggcgaacacttgggcgtgagtaaggacactgtctatgcatggatcgcaaagcggcacatgccagcgcacaaggtggggcggctctggaagttccagaaggctgaggtcgatgcgtgggttaaagctggcggtgccagtgatgatgccgcctcggagtcggcgcatggctga

SEQ ID NO: 333856 - DNA, 306 bp, Pseudomonas aeruginosa
atggaggtgcttcgtgagcacttactgatgaggcggcgcgtcctgtcctcggtagacttcgacgccttctggagcaggaaagccctgtggcacgttgagctagaccagatcgctgagtcgacgcaaaaaaagctcaaacagaacctctttcggatgttacgagaggcggatctgattggtgattcgctacaaattcagccggccctattgtcgccggcgttggcccagctgctggccaaaaggggtaaggaagagttgctgatctaccccgtaactgatcaggagattacgcgttggcttcaatga

SEQ ID NO: 333857 - DNA, 657 bp, Pseudomonas aeruginosa
atgaaccggaaaattagcgagcagccaatggccgttcgcttcgatcatttgctcggcgtaatcagtggtcagcgtttccttgaaatgagagggctgaacaacgatctgcccttttacatctgcgagttcaaggctgctgaagcggtggagatggagcgtgtacgccggcagctggtaacgcggctggcgaacatgagcattccctgtctccagggacgaggtatccaggctttggaaatcaacctgtatgacttgtctattgagctgctcaaggctcgagagggcagcagtgaggacggcaacctctgggacgaccttcttgccattgaacaggaggtagagaaagaacagctgttggagactctgcagaacgtcttgggcatcgaggagtatctgatccccgctatcggtgagcgactagcggctgctgagtacgacgttttattcctctccggcatcggtgaggtgttcccctacatccgttcacacaacgtgctgaacaacctgcaaagcactgccaagttcaagcctacggttatgttcttccctggtgagtaccggtactcgctggagcagggggcttctctggagctgtttggcttgctgcatgacgacaagtactaccgcgcattcaacatttttgagactcaggcctga

SEQ ID NO: 333858 - DNA, 3555 bp, Pseudomonas aeruginosa
atggaactcaacggcattttcctgaaccccgtcagccgtcctattgaaggggtgatcaaagctgatgatgaagccagcctttacaacgagctgagcgagtatgtgctgaccgacgaggtcgccaaacgcctggaacactttcttgacgcttacaccgactatcacggcgccaatggcgtgtgggtgtctggcttctttgggtcgggtaaatctcacttgttgaagatgctggcgcttctgttggaaaaccgcagcatcgatggctcctctgccctggatatcttcctgccaaagatccacgaggacgatgcactgctgcgcagcaagcttaagcaggctgtcgccatcccctcgaagagcatcctgttcaacatcgaccagaaggccgacatcatcagcaagacgcagatcgacgccttgctgtcggtctttgtcaaggtcttcaacgagatgtgcggttacttcggcaagcagggctacattgcccagttcgaacgtgatctcgacagccgtgagcagttcgacgcctttaaggacgcctatcagatcatcgccaaaaagccctgggagcgtgggcgcgagcaggccctgctggagtctggcaacattgccaaggcctatgcgcagatcaccggtgaagatccgactctggccaagggaatcctcgacaagtaccgcacccagtacagcgtctccatcgaggacttcggcaaccaggtcaaagcctggctagacaagcagccagccaatttccgcctgaatttcttcgtcgatgaggtaggccaatacatcgcagaaaacaccaagctgatgaccaacctgcagactgtcgccgaaagcctggcgactaagtgccaggggagggcttggatcatcgtcaccgcccaggaggatatgaactccgtgctcggtgacatgagcaagcagcagagtaacgacttcaccaagatccaggctcgctttgccaaccgtctcaagctcaccagtgctgacgtggctgaggtgatccagaagcgtctgctgaccaagaacgatagcggtgtagatctgctgaaaactgtttacgaccagcagttcaacaacttcaagaccctgttcgagttcgccgatggcggccagcattaccagaacttccgagatctggagcatttcacctactgctatccctttgtgccctatcagttcccgctcttccagtcggccatccgtggcatttctttgcacaacggtttcgagggtaaggctaactcggtgggtgagcgttccatgctcggcgtgttccgcgaggtggccatcgccattgataacgagccggttgggcagctggccacctttgatcgaatgtttgaaggcattcgtggcgcgctgaaaagcgcgatccagagtgcgatcaatactgccgagcaccacctgggcgacgagtacgccgttcgcgtcctgaaggctcttttcctggtcaagtacgtcaaggagttcaaggctaccctgcgcaacctcagtgtgttgatgctggagcgttttggcgaggacgtgcccgcccaacgcaagaagctggaagctgcactcaacctgcttgagcagcagacctacatccagcgcaacggcgatctctacgagtacctcacggacgaagaaaaggacatcgaggaagagatcaaaaacaccgaggtggaatctgcggacatcctcaaggagttggaggtcctactttttgatggggtaatcaagcagcgcaagatccgctacgagaacggccaggattactcctatacccgcaagatggatgatcgggtgctcagtcgggagcatgagctcactattcatgtcgtaacactgctcagcgacaacttcgacaatctcaccgtgcagcgcatgcaaagcatggggcgtgatgagctgcgtgtcgtgctgcctgccgatgcgcgtttcatgcaagacctgaccatgtataagcgcacggagacttacattcgtcagaacagcagcactcaacaggaggcggtgaaacgaatcctagactccaagagcttccaaaacaccgagcgccttgcggatatccaggagcgtgccaagcagctgttggcaggtgcccagctggtcatcaatgctgccgacatcgaagcccccagtaccgatggtcagacacgaattctgaaaggtttctaccagctcattcaaaccacctatccgaacctgcgtatgctgcgggatgtgccgttcagcgaggctgatattggcaagtacttgcgccaggggcaggacggactgcttggcaatgatgccaccagcctgagtgagcctgagcaggagctattggcttttatccagacgaatgcacgcagtggcgttcgcacaacggtcaaaagcttgctggagcgctttgagcgcaagagttacggctggtactacgccgcaattctctgcaaccttgccctgctttgtgcgcgaggcaaggtagaggttcgtcaggacagtaatcccttggaaggtgatctgctggagcgcagcctgcgcaataccaatgcccatgccaccttagtactagagccgcagattgagttcagcgcttcccaggtacgtgcgctgaaggatttcttcgcggacttctttgaccagccggccagcagcaatgaagcccgcgctctggcgcgagaaaccatagacgccatcaaggagctggagatcgatctggctgagttgcacggtcagaaggtgcagtatcccttccttagtgccttggacggtgtgctggcgactctcaaggaaatagctgccaagaatcctgcttggttcctgacggatctgtcccgcgcagaagatgcgctgctagaagccaaagagcaggtcatcgaccctgtgcagcggtttatgaaaagcccgcagaaagagatctacgatcaggctcgtctgctggtgcaagagcagcaagagaattttgcctacgtcggcacagctgaagttgacgccattcgagccgtgctcgcagatgcaaagccctggcaaggcaatcgtcttcaacaagttcggcagcagttggatgcgcttcagcttgccattgccaaccaactggccagcgagcaaaaagccagtgagcagttgctcgacgatctggagcagcgcctgcagggcgctgagggttacggggcactcgacgcggcgcagaaacagcagctctcagccccctttgcgcaggctaagcagcagctgaaagggcagaagctcattgcggtcattcgtgaccagcgtaatcgattcgaggacgaacaataccctcagttgttgctcaagctggatcagtttgcgcgtccaaaaccggttcctgctgagcaaccctcgccatctacgcagcccgagaatactaaaacgcttggcgcggatacgcctgaacaaccgacgctgaaagtggcggagcctcgcatcgtgccggcccgtcatatcaaagttggctactcgaagccctggttgaccagtgaagcggagctggacgattacctgcagaagcagcgtgaagcctggctgaaagaaatccaggccggcaaccgtgtgcagatctga

SEQ ID NO: 333859 - DNA, 567 bp, Pseudomonas aeruginosa
atgaaatactccgaccttatcgatctccccaagcctggcacctacaacattgggctggtctccgcgaaaaactcggacatgctcaaatacttcggacatcccgtcctcgatgggaagtatgactccaaggggaaatgcatgagcccgaatgacccagaattccagaagagggttgcctcacggaaggttgggccgtttagggcaacagggcttctgccggccttggattcgttgaagtccatcttcgagcgggtggagcgggaggtgccagacctatatcccttactcaggaacaacggcatgctttgttctcgctacaccaggatcaagggaaaaattggtccggggatctcgaaccactcgtggggaacagccctggacatgttcatcgaaggggatacggagaagcagggagacaacaaggttcagcgtgggctcctgatcctggccaactacttcaacgcggccggctggtattggggagctgcattccctacagaagatgggatgcatttcgaggtgtccagaggcctgctcacccaatggaaaaaggatggactgatctga

SEQ ID NO: 333860 - DNA, 2421 bp, Pseudomonas aeruginosa
ttgccgtcccagtattcacacaacacagacgatctcacaccggtcgacgcattgcccggatggaaaaagacactgggtggggtactggctcttggcatggacctgctcaacgctcggcacgactcctcttgggatgagggctatcgagcaggtgaagcgtatggcagtgaacagaaagccaaatcccaaagccaatcccaagcggagagcactaccaccggaccgcttgagattcgcgacctaagagagcgttccattactgctccgcgaattgaccaggtactcatagatgacgacaggctggtcgtttccacaggccttttggagacaatgcagcgagatgctgcatccctcctgccggcggatctgcagccgacacccgggcagtggaaagccatcgctaccagttcacgagctctgttggtgtccggccagggcggtaccgggaaatcgttcaccttggcgatgcgggcgctctatctgcacaagtacctgatgcagccactttcctcgatcagggttgttgtggattgcaaagaggtgaaagaggaattcgctaaacgactccattggctatttcggcgatggagcatcgaatgctcggaagcagatattcagggatgcatcactactccagcagctgcagccctggaacttgtgaactcccttgtaggttgggagaacgtacggccatttgaagtgagggtaaattccgatgtcttcgaaatcaggccattcgacaccaggctgtcatcggcccagacctctctccttcggaccacgcatagcaagctctatcgcagtaatccccgatatgccgaactggttgtggggttgtttcgccagtccatgctcttggagccgttggaagttgatcaccccgacgtggttaagcgtgcagcgatagggtggaagttgagccagcacgatcaagacctttgcgagaaagtcgagtcgttatggaagggagctggtgcttggcccttggacgggataaagcccggccgtcacaaggtggtggtacgcggctgcgaattcagtcttcatggcttcgtcccgcggctagatgcttttgttctgcttggtttcgatcgcaccgaggaccgttatctgacccgtgggccgggaatcaagctcgaggtatacaaggagtgtgagatcaagaaaaccctactccaggcctacctcgacaagcccgtgatccatcttgacagctatcaggacgccaagcagatggttgcgacgctaaaagccttgtccactactgctcccgacttcggatacagactccgcggcgaaccagcacatgttccactggtggaagcgttctaccaagtagcaacgctggtggagaacctcgggatgggtgtcccccaggcagtaggcaaactcaacttccttcagaacgatccggatgcgctgttcttcgaaggtcttgggcacttctggttgggttttgaaggcgacctgctcgcgaacgacccgcccctaatgacaatcaatcgtctcctggaccttttctctgagcggcacggggcgaacttgaagcggcttcctgcggccgcgttgaaccgattcagacatctcctgcttgacgatgcacaggatacgagcgcccccactgcagacttcctacggggcatcctttcggagttcaaacgtcgagcgatctcgcgccgagattccgatcttctgccctcaacattcactctcgccggcgatcccgttcaggcttcattcgcaacccaggggagctcaagccaagggcttcgccatttcgacactgaattcagggtttcaaaccctacgcgcgtaatcctccaggattgcttcagagggcaccagcacctcatcgatgcagcgtttagcgtggtgcggaatcaggtggacgtcggtaggcagtcaactgccctaatcgctccaaccaaacagccacctgtggaaattcatagcttcgactctcatgtcctcagccggctactgcaggaggccgtagaaggaggaggtgatgtgttggtcttggtggactcaattgcgtcgtaccagatggcagaaaccgcagtggcctacctggtgggccagatcgatggagcaagagataagggcaagatcaagatccgacctttccaacgtgctcggcctgcggtggcagaaacggtcatcctcgcgggtaacttcaccactcgacctcgatccgactttcgcaatcaactattcaacctggcggggaggtgggccgaaagcggaacgaaccactacgacacgctactggatcaagagaatcaacgtttggtgcacacaggtatcaccagggcacggactcgttgctactggctggtcccctctgtcgactccagcgccccagaatccgcagttggggtgtcacctgctttgagcaacgtcatagtcgacaaacgctaa

SEQ ID NO: 333861 - DNA, 627 bp, Pseudomonas aeruginosa
atgttgtccaccccctcgtccctgaacagccatgctcgactctttgtgtcgaagtcgcagtctcgaagcttcaaggctaagtcctatatcctccaacccggccacctcgaagcgggttctcaccttttggtcaaaggcagtgcgcaattggtgatcgagaacgatggtcgcgagatgattttgggactactcaaaccaggcgactactttggtgacctgcctttcccggttgtggttgatggccatctagtgagcgtacaggcccgctcacaatgccaagtcgccttcatgtccggtgctgatttccagcagatggtcctcactacacctgagatgctgatggacgtttgtagtcagctgaatgagaggctgagcgcggcaactcgaaaagtgggggatcttgctttcctcgatataaccggccgcatcgtgagcgtgatccaagacctggtgcatgcgagctttgcagtaaaggccagcgaggggactgtcattccaatcacccgacaggatctcggtcggttggcgagctgctctcgtgaaacggcggggcgagtgctgaagctgctcgaggaacagggcctgatcatctgctcaggccgcaatatcactgtgctgaatgcataa

SEQ ID NO: 333862 - DNA, 207 bp, Pseudomonas aeruginosa
atgcccatgcttgccccttggagtgaccacgagcaacctgatggaagcattcaggttcgcttcaacgatcagcaccggtttacccttaactgggttcaggagcggggccagtgggaattgcgccggactggccaagatgaagtgatcgagacggaccaatatcgcaatgatctcttctccgccatccaatcgggccgtatcacctga

SEQ ID NO: 333863 - DNA, 1014 bp, Pseudomonas aeruginosa
atgaggttgggacaaggtggagaaaagagcttcccggctctcgccgaggtagcaggaaaggcagacctggtcgccgtccaagaggtcatgaacgaggaggggctttcgagattggaggccgaactcgagaaacgaactggggagcagtggtcgtcactggccagccatgcggttggctctcgctcttacaaagagctgtacggtttcctgatgcgagacagtgcggtggcctatgaagacggagcggtggtctacatggatcgcaaagatcgattcattcgggagccattttctgcccgattcaagtcgaaaagagacggggccatttttgccgtagccagcatccatgtgctctacgggaaaggcccacaagaccgtgagccggagattcgtgaactcgagagctactggacctggctggaaagcatctatccagacacaccactgatgctggtaggtgatttcaatacgcctcccaaagatgaagcattctccggactatcgcagcacgcagcccccctaatcacaaagggggcaacgacgctttccgcgcgcgatggactctactccagcttgtacgacaatatttggatttccaggaagctccacctgaagctgacagctgcagggattatggactacccccgaatgatcggttggagcaatgagaaaagccgaaagcacgtgagcgatcacgcacctgtgttcgtcacactcggcaacgcgaagcttccccagggagttgtgatggtgcgaccggatgctgctaggaaccgagtagcgggggatgcaacgaagcagatattcgcagcccaatctcagaagggatctgcaactatcgcctccaacgtcagcgctggtgccggcgctgtccgagggaatgcaaattcccacatcttccacctgcctggctgcccaagctacgacaaagtgtcgcctaaaaaccgagtcgagttcagcggtccccaggaagcagaagccgcaggttaccggttggctgggaactgccgctga

SEQ ID NO: 333864 - DNA, 585 bp, Pseudomonas aeruginosa
atgcttctggtaatggcggtgggcctagcccctgcaaccgtactggctgaccccaccggcgaacccgtggtcaactttaaagtcgagcactactgggtgacggggaggagtgtccaggaaatccaggcgtccatcagtgagaacgccccgaccaggaatggtgacactttcttcgctggggctacggtttggaacttggattctagctatgactacgtcccgctcgccagcggtgggtgcgcgatctccaacccccgtgtcaccgtcaatatcacgatttccctacccgcattacgggacgatgttccgcgttcgccgggcgtaactcgagagtggaacaggttctacatcgcgcttcgcgctcacgagttacttcatgccgcaaatggaaagcgtactgcccagacactcctttcacggttgagcggagtacgcacggaactgccgtgcgaaaggttaagcgttgtcgtgagcaaggccggacaggcgctcatcaagaaactcggggagtatgactcccatctcgatcagcaaacaaaccatggcgcgactcagggggcactccttgacctccgtgtacgttga

SEQ ID NO: 333865 - DNA, 333 bp, Pseudomonas aeruginosa
atgtcggaccttgccgtgttcgtccagcagatgaacatccaagagatcgacccctgggccttgcttgctcaagctgcacagcttggcgatccggacgcaaatgtgtatctggccgaacgggaattgaaggcagaaaggctacagccctctctcgaatacctccgtcaggcatggcagatcggtcacaaggaagcactcaatttcgcgttcaacctggcgaccttcatgcaagggcagaagctgggaaaccgccacaagctaaaacaggaactccgggacatcgagaaccaggccaagaaggtgggtgtcaccctcacctatggcggagtttga

SEQ ID NO: 333866 - DNA, 213 bp, Pseudomonas aeruginosa
gtgcgcaagagcatatgcactcaagggatgcgcggtatcgatacgtcgatacagctgaagagctttttctcggctctcctcatgccccgttgcttcgtatcctcgtgccaacgcaatccctgcatccaaagcaccctggtcgaaggcgtgctcaagagcagatatggcagatttacgcttttcagtttctttcgggagcgcctggccgaatga

SEQ ID NO: 333867 - DNA, 252 bp, Pseudomonas aeruginosa
atgaaggtcagtctcattgaacacgcaggcagcgacgggcactgctttcttctgaagatgcactgcgatttggagatagttctgctcatcgggagaatcgacttctgcggcggggtgtacccagatcgccagatcaatctccggtcgatccgcagcaaggatttcctcattgagcattacgccgcagtgcgggagccgcagggcctgagccacgggatacatactggtaatggcttgctcagcctgggttag

SEQ ID NO: 333868 - DNA, 327 bp, Pseudomonas aeruginosa
atgcgaaagctgatcctccacctgaaaggggagtatttcgatgaaatcaaggctggccgcaagcccaaggaatacagactggtcaccccatactgggaaaagcggctggtagggcgctcctacgactgtatcgagctggcgcggggatatcctaaacggggtgataccgaaaaccggctgacactgccttggaaagggttccaaagggaaacaatcatccaccgccactttggcccgcatcgtgtggaagtgtttgcgatcaacgtagctgtcgagccgaaagacaggaatcctggggctgctggcccgcttcataacgagggatag

SEQ ID NO: 333869 - DNA, 618 bp, Pseudomonas aeruginosa
atgaaccgctacctgttcatcaagaggcaattcctcaagctgttcaagcgaaagcagcacgctgctttccaccgagccttgaactacctcgtcgcgagatggccggtggccaaaggtggcatgaagctcgtcttcacagaccttgatcaggtctcgcaccaaccatcgcttcgttatcgagcccgtatcccagtagaagcgaatcagctgggggtcatgcagaatcggggttacccgcatagcctgcaggctggatatgccgtagtgatctttcgctttccagatccgcttccgctcagcaggcttggccttttcgatcaggtcgaacagatgcattcgaagcctattggtttcgcggattcgatccaaagccaatgcgggcagacctatggcaccaggagagcgaagagtttccttggcactttgcccctcacccagccaaatggttgtcagggtttcaatggcaagggaaatgcccgtctcgccatctggcgtggcgatttcgatcccagcattcttgtcaaccgtaggagacttcctgagaggcacctggaaaagggcgtcgatccggatatgtgctttcgatttctccagcaagaaggccagttccttgagtga

SEQ ID NO: 333870 - DNA, 564 bp, Pseudomonas aeruginosa
atgatagggaacacgaatttgagccgtgcagtagacaccaagagccgagaaaccctcctgcggcttgccagcctcaccagagatctctcatccaatgatgatcgctgccgagggaatgcgtaccgcgacttgctggagcttgccgaggagggaagcagcgatgcgatgttccaggttgcccggtgcttgaatcaagggattggagtggaagtcgatcaggtcaagagcgatcactggctcagattggcgtgtgtgaccaatcccccctcgaaggtcgccctctactcattcggcatgcagaaccttcttcgtaaacgacccgatgcggaccccatgctcggtctcaatctcatcgaacgtgctgccactgcgggatacgtgacggcgatcctcgagctggtaaagctcctggagaacggtacagctgacatcgttcctgatctccgcagggcataccgcctgctagcaggcgcgattactgaccattccgatatgaagctgcacgaagcctatctcagctttgtcgagcgcaaccaaccactctctacgcttttggactcctga

SEQ ID NO: 333871 - DNA, 1134 bp, Pseudomonas aeruginosa
atgtaccaaattcagtgcaaacgccttgtcgaccaactggccttcggcctgtcgttgtcccaggctgaagccatagttgcccgggcctatggacgcgagagttacagcagcacctctgacaccttcggtccagaaatccctgggctccaggcgattcgcactcccgcggagattcttcagcttgaacgacctcaacaaatggtcgagttcatgcgcatggtcttgaacctcaccctgcctggccctgagcccgttcaccagcagatcccgccgaagaacttggtggcaaccatgtacaactttggcaacttcgacgccctggtgacgtatgtgaagaacgatccgatcgatccaaacgatgacaagcccgaaactcttctgaagttcaagaaccgttacggctacatggcgaactctcaggtgatcatgggtcggggatatcgtgggcataccttggtagcccaacccgatgccaagttggccagccgctacatcgatcaagaggcgatcctgaacaagctgaatgggctgcaggtgatcatcgttcgagatcgggtggacggtgacagctacatcaatcactacagccgcaaccatctggtgatgcgacacgctgcatctgaagacctgagttcgctgatactcggctctcgtgcaaaggatgcctgtctcactgtctcgatcgttcctgcagaacggtattcgcttgaagcgatcattgcgcctcatgtcgcagcgttgacgaagaattcaccggccggccgctctattatcctggacggcttgaatatcgatgaggattcagcgagcttccaggcaggcctgcgtttagcaagcagccagggcatcaacgttgtgctcatggccccggtcctcaaggcatcgcagtgggaccatttcgaaacccgactgatcttcgggttcgatctgcaaatggctcagactgcgaatgctgagatgaaccgggctatcgtccaggcggcgccttacgtagggctcaaaggggacagaatgcagttcctctactactcggctgcatccggggcgcgctatggggctatcccgctgattcccgaagaggagaagcgggccccgcttctcaagcgaatcttcggcagtccagcccgagcttag

SEQ ID NO: 333872 - DNA, 369 bp, Pseudomonas aeruginosa
atgacggcagccaatcgtcgttatacgcggtacgcgattccagagaactcgctgcaaaagcaacagatcaagaccaggggggtgctcggtttccttgcggggtggggagattgccgggtgcgcgacatctcctacgccggcgcgctggttctgacggacaagaaaatcgggatcggtgatcaggtgctgttgcgcctgaccgaaaaggatggcggggtgatggatttcgaaggcaccgttgccaactgctctaaggacccgatcacccaccagttccgagttggggtagctctaagtgagcccgaggcggaccgtcgcgaaaaaggtttcctgctgcagctgcaggatcggtaccgaccagtggcctag

SEQ ID NO: 333873 - DNA, 1035 bp, Pseudomonas aeruginosa
atgcccgcgatttcctctttcctcacttggcccaggacctggtctacccgctctcacatcatcccttggcagctccatgccccactattcctggtcgtgtttgcttttgtttcggcgctgaactcgattcccagtgatgggagctggcgtgatctgacgctgaatcaggtgctggaagactttggggttttcatcttcttcacggcgttgtggtgtgggatctactgtcatttccgcaggactgtcgacttgacttggctgctgatcattttcgtgcttgcgatctgccaagaggagttcaacctttggaacaagctgtggcaacagatctgccttctatttgggcatgagatttcttccagcgagcgccagcgcggagacgtgttcatgatggctctcgtgttcggatcattgttggtcagatttgtattagggggattcaagtccttctttcgtatccacatcacctttttcatctgcgttttcgtcacctttcaggggtggattcatttcatcttcccctactacatccagcagcacttgctgaacgaacggttgacttaccagaaggaactcaccgctacctacgaaggccgtttccgctttcagtgcgatcatctccccatcacctgtttcgagtgggtgggtgatgcggttccggtcacctcgatcgccaaacacgtttcgactgagtccatcacccaagtgctgcagtcggtgggcaatgcaacaacgagtctgaccggctggctgagtgtggttgaccgaggtgacgtagaggttttccgaggagttgatgccaaccagaaagtgctggttacgctgtacaagaatcacgagctgtaccgcgttgtcgtcgacgacgaatacccaacagaggcccacaatgtgatcagctcagccttactctctttcgccacgccttttgcgctggtctggtttttcggcggactgtgggtggttttcatgcaccaggcccgggtgtaccggataaagtacggcaagcaattcagagcaatggagaatcaccagtga

SEQ ID NO: 333874 - DNA, 264 bp, Pseudomonas aeruginosa
gtgaagctgttggagtcctggaaaaaggctgcgatcgaagcggcgctcgaccggcacaagaaaaccctcaccactgtgctcgaactggatgatcgagctctactcgatagctatgacctggtgttggggatgctggcggggcccaaaagcatccaggtcaggcggaacccgcgggtactggatgtgctgcgcatccgtggaagccaacgctcgtttgaaaaagccgtctaccacgcgcgcaaggcgctgacctaccaacaataa

SEQ ID NO: 333875 - DNA, 444 bp, Pseudomonas aeruginosa
atgcttgtggaagcaaaaacccatgttgcttgggacctggcctcgccccgagcgaagcgaagccaatttcgcgccgacagcttctacgtcgttatcgacggcttgcacatccagaccgttcgacaagctgcaactctgatcaagaatgccctcctctccattgagggcgtacaggtcaggggacccctggcgctgaaaactgagcgccggcgctatgtcttccttcgagaaatggtgagtaagggccagaaggggctccgcattcctgaagcgaagcgactcagaaatgtccttctggtgatgaaccccacgtccatcgctgtagcgtctctgatcgccttacccgttccatcaggggtgaacctgcggatagagacgtaccaagcgcaatacgaactgaaggaccctgccaaatgccaaacagcacagccaagcgacaagtga

SEQ ID NO: 333876 - DNA, 711 bp, Pseudomonas aeruginosa
atgccaaacagcacagccaagcgacaagtgactgtgtcggtactctccacgccagaacccagctggttcaagagttcctcgctgaccgcgggtagctgggctagctggttaatgatggcgcaccaatacggccgagtggtcgaccacccagccggcattgaaatcgacgcaaatcacggtgacttctacatcctcctcaacgggacgatggttgtttcgaccgtcccgccggacccgaacttgaaaccgctattcattgacacactgcggcgcggcgacatcatcgttccttcccgacataccgacctgaaattcacctatgtggtccgagggagcgcttcgctcctgaaagtatcgaaggacaagttcaacgccttcatgaacgacatgaagaacagtgaggtcgtgctgatggcggccgagctgaaccttctgaccaagcacgcaaccgctgcatcgacggtgcaaatgaaggaccaggacaagatctggcgtgtagtcgtgaatctggcttcccaccccgatgtcgcgcaccggccgggtggtgtagaggtgaaggccacgagggaagaaatccgccgcctcgcgggcgtggaacgccgctcagcttctcgtgccttccacctgttccaggaaaagggactggttgtcttcagcggctacaaacgtttcttctttgcacatggcaaggagggcctcaatgccgactga

SEQ ID NO: 333877 - DNA, 222 bp, Pseudomonas aeruginosa
atgccgactgaagccaatattgcggtaagcaaaatcgctgcatacgctgagtcaccggacgattacatcagggctggcggtaaagcctacaacgcaaaagctacccgctacggtaatcgcgctcatgagactatcggcaaggcaccgagcaaactcgccttcctcataggtgccggcctgctcatcgctgctctgatctacttcgaggttctacctcaatga

SEQ ID NO: 333878 - DNA, 525 bp, Pseudomonas aeruginosa
atgaacctgatcgtagtcattgctgtactgttagccgcatttttcctctacctcgccgtcaagggaaaatccaaggacgatattttccgggctttcggtcttgatccggcagcttacgagttaatcagctccgatcttgggaaagggcatgcaaggaagagaattcgctggcgtggtgtcggtggggagcctgacgcaatcttccgccataagcgtagcggtaggatcatcgtcggcgagttcaagagtcggcgatgggccaggcgtgtccggccgagggagtattttcagatcgtgctctacatcggtatcgcccgggccgaattcacctccaacaatgtgcttggaatcctcgctttcaacgacaagattctggagatcgagcaccaccccgagttgttctccaacctgattcaactccgagttgaggttcttgcctcgatgaaaaagaagaaggcgcttaattcgcgccctctcctttccagattccggttctcgctaccattcaaactggagcgcttctga

SEQ ID NO: 333879 - DNA, 3345 bp, Pseudomonas aeruginosa
atgaccgctttccaatccctacctgccatccctcaccttgagccgatctttgcagccatagcagctgctaatcctcatgacggccaagcccgggcggactccattgacccccgtcgctcgctggcactcctcgcccccgcaggatcaggaaaaaccactcagcttctcttccgcatgctggcctgcctcacggtagtagagcgcccggaagagattctggctattacgttcactaccaaggccgccggcgagattctggagcgcgtgaccagtgccctggccctggctgccacaggagtggaaccggtccaagctcacgagaagccgctgtatcagctcggccgcctggttctcgaacgtgatcggctgctgggctggaacctgatcttgaacccgtctcgcctgcgcatcatgacgttcgatgccttctgcgcctacctggccggcaaaacaccgatcatgagtggactgggtggcggtaaaaccgtcgaggaccctgcgttgatctaccgcagcgcgattcttgacacccttggcagcgtgaactcggatgatatccctgaagagctccgtgacgcgctggaagcagtgctcaccttcgcccgcaaccgtttcgaactgctggtgccgatgttctcggcgctgctctccaagcgcgatcagtgggccggcgagatcatgaccctggacctcccaggcatggagctggcgatcgctgaaatggttgccaagcatgccgccgaggcaatcacggtactgggcggttctccgttgacccaggcgatggacatcctgcagcacgcttccggggtatacgatggcttcgggtgggcagcccagcgtcccgctttggccatcaaccagacctccctggactatctgcgcggctttgccgggtttgctcttacaagcgaaaacactcttcgcaagtccgtaaacgtgaagaatggcttccccgcaggcgagccgctcaccaaggacatgaacgccctgctcaaggggctgaaggacgatccaaaggtggagctctacagcgaagccttggtcacgctcaagactcttccagacctgcagtaccctcagggcagcgccgcgatgtgccagcacttcacagtgattctgcgctacctgctcgcgaacctaaccctcaccttcgatggcaccgccacgatcgacttccaggaagtagctcagcgcgcaatccagtccttgggcctcggtgacgaagtcggcgacgctctgttggacgaggaccgtatcaaccacctgatggtggacgagtttcaggatacttcgccctctcagttcgagctcctgcagcgcctggtcgcacactgggaagacgatgactcgcgatcggtatttttctgtggtgatggtttccaatccatctacctgttccgagcagcaaccgtggagctgttcatcaacatggtgatgagcaaggtgttcggtccgaagtctctggagattcaccgcctcactgtcaatttccgctctgcgccgggtgtggtggagtggaataaccgagcctacggaaaagtgttcgccaagtccgactttcctttcgtgccgtcgattccgtttcgaaccgtggacgggggcgtgcatattcggcccatcaccactggccccattggtgaagctcaggaggtggtgaatatcatcaaggaggccctggccaagaacccggagcagaccattgctatcctggtacgtgggcggtctcacctgaagcacatcctgccagccctgaaggaagcgggaattcctacagctggccagaatatcgatccaattgccgaatccgccccagtgtctgaagtaatcgcgttgatccgcgccctctggcacgcagctgatcgtacctcgtggttggcaatgctccgttcggcgttcgtaggcctatcatgggacgattgccggatcattgctcagggcggcaaggtgatccgtggtgccctgaatgatgatcagctgattgccactctgagcccagatggccaagtgcgtgttgaacgcctgaacaaggtaatggagcgtatcgaacgctccgcgcgcggcactgagttggtttgggccgctaaagccgcctgggttgccctgggcggccctgctaccgttgattccgtcgaaatggctgatgtggagaccgtcttccgcgtgctcgctcagcacacgagcaacggggccctgcaggacccgcaagcgttcttccgtgccctggataacctctatgcatcacccaaagcaggggttgtccaggtcatgacaatccacaacgccaagggcctcgaatacgatagcgtcatcctgccaggccttaatcgaaccggtgcaaccgacgacacaccgctgttctactggcgcaacctggccggcacctttgccctggccccgaatgttggtgaccaagacgaatcctctccagagagccggcttttcaagttcatcggtcgacaagtcaagaaggacatcttggatgaggtgtcgcgcctggcgtacgtgggtactacccgcgccaaatgcgattgctacctgctggcggctgtcgacaaattcgacgaggacaagccgatccgagtagcttccggttcgctgctgagctgcctctggcctgagcttgaggaggacttctacgaggctgaaccgggtgtacccattaccgctgacgtgtcagtagaggttccctcgaaggcgcgactgagcgcatcgttcaccgtcgaactaccgcgcggcatcttcatccctgcggcgagtaacgatcagatcccgaccgagaacgaactggcagacgagttgagggaagaggagggtaatgactaccgagcgaagactatcggggttgtttatcaccgagtcgtcgagttgatttccaaagaagggatcgaggcctggagcatcgagcggttgcaaaccaagaaacaggcgatcgccgcacttctgcgtcgtgaaggttatcccgccgctgaagtccctgctggtgttgcgcgaatccaccacctggtggagcggactatcagcagcacccatggtcggtggattctcaaaaagcgggagagtggtggccaagaagtccaggtcagctcctaccgaaactcgcggtgggtgcatcgatacctggaccgtcccttcgttgatgatggggtgtactggatcattgactggaaaacaccggactgcccggaaggaatgcctgttgagcagttcctcagccgggaagtgaatcgctatgcgcccaaaatgcgggaatacaagcaggcggtccaggatgccggtgtcaccctgccagtgaagctggcgctcttcctgccggcagtagaccgcctggttgaggtggcctga

SEQ ID NO: 333880 - DNA, 2691 bp, Pseudomonas aeruginosa
atgaaattcctgaaagagttgagcgacctgaacgaaggcaccctggtgctgacatctaccgagcgggttgcccgccatctgaggctacagtcggcattgctgcagtccatgtccggcaaaaaagcctggtttaacaaagggcgaattcaaaccgtcacgtcgtggatcgaaaatgcgtggctcgaactgatgccggcagagcaactactgtatccggtacaggaactggcagtggtgaagggcctcgcagatagctccggcctgatgccagcaacgctgatttcctctactgcgacctctcgccgtattggtagcgcgtactccgaagccctcaaataccagatcccgatggatcaagaacggttccggttcaagcgcgagctggaagtcttctggcaactgcaagaaatgcttcgtcgggagtgttcctcccagggcgtagtcttccgagctcagctcccaggcttgctgctgaaagcggttcaagaaggtctggttgagcttccaagcaaaattgtcattgtcggtatcctcgacatgaaccctgcagagaaagtgctcttccaggcaattgctgctcgtggtgtcgaagtggaagaagtggacgtcgccggtgaccgctctacacctcagctgatccgtgcaacgaaccagggtgatgagttcacgctcgttgcagaatgggtgaataatcacctctcaccttacgttgacactccgctcgcggcgccccaacttgcgatcctggtacccgatattcggaatttccaagccccgctgattgaggcactttcgctgcactgcagcccggcaacgctgattccaggcgagtccgatgctgatatgcggactccatgggatatctccagtggcgcgaccttgggcagtcgccctctggtccgtgccgctatggaccttctgtccatcactcctcaagaggcggactccgaggccttcagtcgtgttctgcgctcgccgtggatcggcggtgaaacttctgaaggccgcgcgcgtgcattgctggatatctggctgcgcgacaacatgggcctttccatgggtggagaggacttcctgcgagcaatcggcgtatacaaaggtgatgcagtccctgacttcagggaacgcttcgcaggctatcttgctgcccatctcaacggagcggcgaagcgttatccgtcggaatgggcggagcagttcagccaggcgctggtagggatgggctggccgggaggcaaagaactcgactcggccaacttccagacaatgaaggcctgggacgaggcactgaccctgttccgcaccctcgacacacagcttggtcgtgtggaatatcctcgggcgtacatgtggctgcgggaaatcatcgatacccgtcagttccaaccgcgtatctcgcacgtggccccggtttcgatcctggggtatgaggatgcaatcggcttgcacttcgacgcagtgtgggtactgggggcatcgagtaccgtgttgcccgcccgagtggagccttcccccttcctaccgctggagctccaggtggcggctgggattccaggcgcctccagtgagggcgccttggctcgggcagagaaggtggtcgcagcactgctgagcacgagtgctgatgtaacagtttcctgccccggtcataacgacaaaggcgcctcggtttcctgtagcgaactgttcggttcctggccagcagcagctccttccgtacattctcatgggctgtttgtcgaccaactgttgggtatcctcgatcgcagccaagtggtccctgaaacggtcgcccccgtatccgcggatgagctcgcctggatcaaaggcggggtgagaatcttcaaggactatgcagaagcgcccttcctgtccttcgctcgaaatcgactgcgcgccgaaatgttcccggagcctgtcatcggtctcgacccacgcattcagggaaccatggtgcacctggtcctcgaactgttctggactgacgttcggacctcgaaagcgttgaaggccatgagtcacggccaactgtttgacaagatccgcgacacggtttcgaaagcatcggagcagttgctgaacaaactggtctggcgctacggaaagcgtgttatcgcgcttgagcgactgcggctggaatcgctgataaatgactggctctatctggagtcgaagcgcacacacgacttcgaggtcctcggcttcgaggagccacatgacattgcagttggactggtcaacattaccgtcaaggtcgaccggcgcgaccgcatttttctgaccgaggatgaatctgagttcagggacgtggtgattgactacaagtctggagcttcgatgaggatgaccagcctgaacgctgacactcttacggagcctcaactgcccatctacgcgaccaagattgatttccaacagaatggcggaaagcgaatcgacggtatcgcgctggcacaggtcaacagcaagagcctggggttccatacccgatccaatttcacgggtgagctggcaccaaggaccggcaagcatagtggcgtggataccgagggcgcttgggatggccagtgcgaggcgtggacgaatgcgttggacaaaatgagtcagggcttcaccgacggggaggcctggctgcagaatggcgcaccgcttcccatgggatacgagtatctcggtatcctcacccgttga

SEQ ID NO: 333881 - DNA, 744 bp, Pseudomonas aeruginosa
atgatgatcagccgtccccgaagtattgctgtaggagcttgtgcagggcctggcctggaactcgctctggttgtccaaccagtcatgcaccttggcagccgccatccctcagccattgcctatgagtgtttgctccgtgtggtcgaagggacccagttagctgcccccgcgcgcttgattgcaagcgcggaggctgatggctcgattgtcgaccttgataggtgggtggtctctcaagcggctcggatcgctggagcgtttccgaatgtgcacctctgggtgaacgcctcgcagatctccgtcagcgatatccgattcattgagcacgcaatatcggagtttgaccgacacggagtcacatcccgaatgacgttcgagatcactgaatccgctgatggagatgcctgcaaaatcgttaaaggtttggagcgtctcaacctcaaggcgatgcctgtgatgctggatgacatgagggatggattcgcgaagaggcaactcttgatgaaccgcgctgtgaccggttgcaagctgtcacgtcggaccacacgagacatcgctgagagccctgcagtccggggtgaggtagagaagcttgtgcgtgactgcagggcggcagggaaacgtgtggtgctcgaggggatcgaggacgcagctgagcttgaaattgccagggctctggagatcgaattttgccaaggcttctactttggccgcccggcacttccagaataccttttcggttga

SEQ ID NO: 333882 - DNA, 189 bp, Pseudomonas aeruginosa
atgagaaaaactgcatatcacctgggagtattcgcattcggaatgctttccgtaggacagatggttcctgttctgctaggtgatgagtctttaggtaactggcaattcgcgggactcaccttgactgtactcttgaccattgcctgttcttacaaagcctccgcttccaaagacgtggttgagagctga

SEQ ID NO: 333883 - DNA, 1017 bp, Pseudomonas aeruginosa
atgctgcttaaacccaaggagttcgacgccgaagcgtttgccaaggaagcgacgaacatcacactcagcgagcgcaccatggagatggtcgacaactttggccaggtccacagcccggagatcctgccgatctggaaggatttctatgaaaaaatgctagcggaaaaagggaaggggaataagcgcaaatctgctgacttcacgatcccctttaatggttaccgttaccgctgcaacctggccaactcaatggatggttgggtaatcgcgatgcgccgcctactccagggcaagctgaatttccaaaaggacctgaagctcgattacaacgtcgttaagtccctcatgaaaggtgctggcttgacgctattcgcaggcgtgatgggttcgggtaaatccacaaccatgttctcagcgctggagaatatggaccctctcgaaagagggttgctcggtacctgtgaggaccccatcgagtacatcttcgaaggcggtggcgtcattcagcgagaggtcggagagcacgtagaaagctttgagcaggccatccgggactgtgtccggcagaacagaaaaaccatcatggtcagcgagatccgagatcctgaaacggccaacgccgctctgctcgctgcatcgacaggtcactccgtattcgcgacgatccacgctgatagcgcacccgatgcgtacacccggatgctggcactggttgatccccggtatgaaagacttgtcccacagacactgcgcggaatcttctggcagcacatgctccgcttctcggacgggcagcgtgctccacttcccatctatgagtcgatcgaggtaactggagctgtgcgtcagatcctgcagggtggtccggagaagctgcctatgctggcgaatgagatgaagcgccaagggcggcggaacatggcggaaacagccatggcgtgggtaacagccaataaggtgtcgcgagaagaagtacgcgaattcacagatcgtcgtggaaggatcaacgagctctga

SEQ ID NO: 333884 - DNA, 1161 bp, Pseudomonas aeruginosa
gtgctgcccgtaacgcaaagtgagccatttgaaggcctcacggacacaattgagaacgggtatttcgttttcaccttgatgccgtcgttgtactgcccttacaactgcaagcactgctacctgagcaaggaacagcgcagcgacaagactctgatgtcgctcgacgacttcaggatggtttgcaggaagattcacacctacttcgaggagcagcagccgccccgcaggacgatcatcgcctacaactacggcggtgagcccaccgcggcgggccctgaatactttctcgcctactcaagaatcatggatgaggaactgccggcatcggccggctatgaagtccggcatgtgatgctcacctcgatgcttggtgtagacctcgatgtttgggcgccaatctggcatgagcattgtaatggctatgttcagacctcctacgacggagacatgcgctccagcaactacgtgcgtaagtgggaggccaaggtacgtgaagcagtaggccgcggcttgaaagtggccacgatcagcgtggtcaactctgctctgctggaacaaggcgcatcccggacactggatctgcttgctgaacttggagtcgaggagactggttggttgcccttcatgctgaacgagcagaacgacaggcctggccaatacgatcgcttcgccccaaccatgactgccttcaacgacttcatgatcgagatgctcaaccactggtacaggggcaaggtccaggggctgaagatgccaagcattggtgaggctcattttgcagtcaatcgcgccgccggcagcgaccttagcaacatggcagggcagaccctgtttctactccctgatggaaagtttgtactgcccaactatcgggatgggtggaaggagtacatgcactccttcggcaacattctggagccggagacaacgttccgagacatcctctgctctcgggagaggatcttgtacatgcggcgacagagcacgcggaacaacaatcccgaatgccggcactgcgagttccggaacgcatgtctgttggagttcgccaaacccaataagcccaacgatgaatgcttcggtgcgaagcgcttcgttgcgcacgctattgctcgcaacggtatcgagccgctgttgagcggtcccgtcacgctgtattag

SEQ ID NO: 333885 - DNA, 318 bp, Pseudomonas aeruginosa
atgaccactgacaaagggcccagttttctctcgatctttccgattctcgcaaagctgctgttctcgtatgggaagcgtttgctgagcgttgacacactcgtgagcctggaaaagaaaacgggagcgggttcaggtgagcgcactcctgaggagatagcgctggaccaggcgctcgaacgtaacccacatcagttgcagatcaacatggaacctggccacaaaccgacaccgagcattgcacaactgcttgagcaatctgccggtgaccgcctggtagtaaacgaggaggccatccgtgctgcccgtaacgcaaagtga

SEQ ID NO: 333886 - DNA, 1248 bp, Pseudomonas aeruginosa
atgcagccaggcatttcatcgtccggggcaaccgggcgaaacagctttctatttcaaataaacgtgactcgacgttgccagctgcgctgctcccactgctacatcctttcggacaaaaaggacaagagccccgacatgacggaagaagaattcctgcatgttgtgaagggcatcgtcgagcacatgcaagccgatcacaacttctcccagcgctacaaccacgtggacatccatgtgattggcggggagccttcaatgctaggggttcggttcttcgaatccgcgctcccgaaagccaaggctctgctgcgaggcatcccccaggcagtcgacttttctattgtcaccaatttggtgactcaagaagcccttgaggtggcccgtctgttcgataaggtgtccaccagctacgaacggtcaacgagattcaacaagcgtaagcaggaagaaatctggcggcgcaacgtggttaccctgatggcggaatccaagatgccgggggtttcggggccgaaagatttctctgtcaccacggcacttgtacggccggtcgttcaagccggagcagctgcgatgatcgaggagctggtcgaccttgggttcaccaagatgcacttcgggttcttcatcccgtcaggtgacggcgacctcaatgcgaagctcatccaaccaaagcaccgtgagaccgctcagttctatatcgaggcgcttgactggtacctaaagcatcgcgaaaacataaccgacctctggatcaacccatgtgagtcctggttggaggctgtctaccgcggcgagagtttagatgacgtggtttgcccgattgtccatggtgcgcttgatatcgactccgatgggcggactatcagctgcatcgagaaaggcggtacgaacgattacaccagccatgggaacatctttgaaacgcgcgaggtgattcaaggtgacggttccaaggccgtggaattcgtcaataccattcatgacgtcctcacctcgccgagctacctgaaagaagtggccaatgctaggcgacttcccgctgcctgccgggcttgcgatgagaggatgctttgccaggccaactgcggcgttcttcacgagcagtggaatcagcaggacgagtgcccgggcttcaagaccttcatcaagagggttcgcttcctggtagaggaagagggagtgcgaccgaagtccgtattgcagggcgcaaaccagctgcctcagaacctcattgcggtgggctga

SEQ ID NO: 333887 - DNA, 762 bp, Pseudomonas aeruginosa
atgagcagaaatcagctatcactccgccgtttcagattccacgatgccctgatcacttcgcctgtggagttgagttggcgcgggagattgctgcgagtaattgatgcctgtttcgatggcatctacggctcattgcacccagaggtcctggtggtcgggaacgatgttctggtcagcctagccctggcattacatctggccgaatgcggttttgaggtactgataagccccgataatctcgacatcgaatcgtggcctaatcctcactactcagcaaacaacctggccatcttcagcacctggactgatgaaatggcggaggtactcggatcacgcttcggcaagggcttcgaggtcgcaagcattgcatcagcaatcggcgcgctctgtgagggctgcaagcagacgggtagagtctcaattatcaaggacacagcgctgcagagtgaccgtgggttttgccgcggtgccccagggaagcatctactctttcctttgagacccgatatcaggcagcaggccggtcttcacccattctggaaggtcatcaccgctcggttgccctcgattcagttcaatcatcgggagcttgaattcgtaagcactgggctagtggtccttacctcacacccatcccgatttttacatccagaagcatcaacttgttcaagagttgggcaggctcgagtcagcgttacagacgtttccgagaagggccgccacaacgatctacggacagcgctcgccctgaggattacctaa

SEQ ID NO: 333888 - DNA, 636 bp, Pseudomonas aeruginosa
gtggtactgaatgacttgttccgcactggacactgtgtaggctcgattcccaaggaccaagctgatgcgctgcttcgcttggtcaagcaggacactttccttcctgacaaacctggaagtcctgacattgcagagtgggagtccgacgacccctcgaagaatttgaacgtgccgccagagtatctctcgttcatggagaatctcggcagcagcccagaccttgagcacttccgggcacacatgggggattggagcagagtgaatgtcatgctgcagcgtggacgacgtggtgactctatgggatggcatcacgacgcatacgaccccatgcacttgatctgcatggtctatctcagcgacgagctgtggacccccgaggacgggggcctgcttcaactcggtgaaggcgatatcgacgacatggggttcatcaccaaggacatccatgttcactcctcggtttccccgaatcacgggacgcttgtttggtgcatcaacaccaatccgcggtgggttcaccaggtcaccgcaatcaacaccgataagcccaggtacaccctcattgggcagttcggatatcgcgagaacgtaatgcggagcactgtacggaaacgctacggagaagctctccgatga

SEQ ID NO: 333889 - DNA, 1182 bp, Pseudomonas aeruginosa
atgattcatcagcccttcaccttgcacatccggatgacgaagtcatgtaacgcggactgcagctactgcagcagctggatggagaatgcctcgtcgcggatgtcgcctgccgctttcatgaagtcaattgacttcatcctcaaccgagcactcccccagatcggggctgcgccgacgttcctatcggcccagtacatagggggcgaaatcctcaccgttccttaccaagagttgaaggagtgcgttcggtatttgcggaaagcgtgcgcccaacacggaatagagatgcaggatggtgcccagagcaacctgatcggcactccggagaaagttagtcgactatacgacctgttcgaaggccgccttggcacctcggttgacgatttcagccaggcgcgcacagtgaaaggctcggcggacaactaccggctgatctggaaagaggcagaccattaccttcgaaaccagcggagcaccccgggcgcggtcttcgtcctggatcagtcaggcttgaactctgctaggcaacagactcggctcgccgcacgagaaggccgcatgctgacacttcgtccgctgtttcagggaggaacgcctggccaagcccttcaaggggcagaacggacgatgaaggcactcctagagaccttcgacgactggtttatgcgctacccgattatcgtggagccctttttccacctcaccaccgcgcgcgtggcgtccttagccggtggtaaccaccagatgccacatgcctgcgcattccaggcggactgcactcagcggtctctcagcttggagccgaatggcgacctacacgtgtgccaagaaatggcggacgcggggttatctcgggtgggcaatgcattggacggtgtgatcgatacgggactgttagaagctctggcggcccgttcagggcggctctctgccgactgccaggcctgtccatttgttaaggagtgccagggcggctgcatgttcgaatcgatccaacaagggaacggcatgtatggccgctctgcgcactgtgcgagttggaaggcgcttttcagacgcatcgatgccggcattcaggaacacggactggaggaggttagaggctggctccaccgcatcgaaacccgacatcacaaccacaagctagacggcctattcaaggcaagtctggcctctgcatag

SEQ ID NO: 333890 - DNA, 1644 bp, Pseudomonas aeruginosa
gtgcataacgccctggacatgctcaacgtctgtattgcaccaactcgcctctgcaacctcggctgtacccactgctacgtgaagccagagctgctccgggataaggccatgatggacgagggcctctaccggaagaccttcgatagcatcgaagctctgttcaaggcagaccggaaagtcaccaagatcaacatcgaattgctcggcggcgagctgactatgatgccgctggcctactgggaaagaaatctgccctggaccctggaggtcatggccggatgggagcgcgactacaacgccgaggccgcccttatttggtgtaccaacctgattttcaaggacccagggtacatcagccttctcaacgagatgggccaccgatatggctacgggttggatgtgtttgtaccatgggaacctgacaccaatcggttcctgaaggacgacaagcttctccccagatacttcagaacgctagaggccatcaccggcatcaagcgcaaaaccctctgcatcaccatgagcaaggccgtaattgagcgcgggcctaagttcatcgtcgaagagttcgtcagccgcggaatcaccgatatcacctgcgacatgctctacccggcaggcagcggcaagagttactttcacaagacttgtacctacggcgaagtgtccgactacatccttgctctgagcgagttggtgcccgacggggtgaccatcagcccgttggtggaaatggagacggcgtctgttaccgcgacccatttccactacccgggtaatgacagctacgacctcgaggtagaacagaacggcgaggtgaccttcaactccagctacaccggtgacgaggcgatacagccaactgaaccactctcagtgcaggacctgcggttcgcggaaaaggcaatcttcaacaatgccccagagatgctggtgcgccacagcatgccctacgaggagtgtggcacttgtgagtttgccgtcgtgtgctccggtggatgggcgtggcacaagaaccttcaccataacctgcgcagcatcatcgccgacggagactgtcctggcctaaagcgggtatggctgcaggccaaggccaatgctggcgctgaaaccgaccgctccaagtacctggcagtgatggaagccaggaagcgggaaggggcgcttcggctccgggttgcaaccgcgaacattgagcgcggccgggaagtccccctgatcgaggattctttcgccggcgcctacgacagcttcttcaatgagttcgaccgaccccggctcgtagaaatgatgccaggcgccctgttcgggaagtcttgggccgaacgcttgttcttctatgatgcgatcggcgcgcagatcgacacgccgaaaaattggtatgcagacgctgcagaggagggtggtgaggagcttttccgtcacatcctgtttggcaattaccagtacctgactttcgatccagtgcgcgtgatcagcgaaatccggtaccggcagcaatggaagctcgcgcgcctggttgaaaacatcatcgctgacctagccgcagggagcccagttcgggcgctgttggggggcgcgcatctcgatgaagtggtgctgatgtgccgggaggcaatggctgccatggagctcgccgcatga

SEQ ID NO: 333891 - DNA, 3468 bp, Pseudomonas aeruginosa
atgcgtctgacttggattctgggcgcatgtgccctgggactgtcctgcaacgcgcaagccttccccgtcgttatcgccggtggcgcaatgctcctcggcggaccgtcaacggtaattgcactactgatcgccgctggcgtctttgggtacctccgattctgttcgggcaagcatggcaaggtgaaaagcctggcgttgggattcgccgctgggttggccgtgctggcgctggtgctcaatgatcagcgggcgagtcagttggatgcgaatttcatcgactcaggttcgccggctgaacgcataaccgagattccgtttcgggaagttgctctggatgagcaggcgcagatgccaacggctatggacccggcagagttcatcgacagtttggccaagcgcaccatccgcgcggttcgaattgacccaatgcctgaaccgttcttccaggatttcggaaatggagtgtcggcgaaagagctcggcaaaagcccagctaaattgctggcgctgattcgtgaatcgtcggtgccagtggtgcttatcgaccagtatggaagctcggccgctgctatctcagaggctctgaaggcccgactcggtattgaggttcgatttctggtcggtggcactaaatctctgcatccatacggctggaagcaccttgcaaatgaggaagaccctcgggccatcctgccaagccaattcccaaaggtgattgccgcaacacctggcttgcagatcataagtgacacaacccgggaccagtttgaacatgacggctggcttcatggcgacatgatttcggatcttccaaccttcctcgccggtctggataacatcgtcgccaccatcggcgatcggcctatcctgatctctgcggcggaaggttacttcaccggtaatacctgggtaatcctaactctcctcaggtcccgaggcctcgatcctcagttcatccttccgactgaggatgagcttctggtaaagccaccgtactaccggcatttcaagaatgacgaacgactattcggcaactcggagacgttttcctacttagaacgcaagcctcgtgtcgtgtttctggacttccagccagctgcagactgggcaactacccgcgaacgcatccgcgggacagtccacatcgacatggaaaaggtcgccagaggccagatggccgaggagttggccaagctggaccctactgccacttacgccggactgggctatgaccggcgcagcagttaccactcactgttggccggcgaatacctgtcggaaaagggggccggctggctgggcatcaacactgagccggagctatttagccgagagcgactgtcgaatcccgacctgtacgacggttggcgcgaattctcggccaaggcccgcaatgaacttggcgaggcgggcttcaaggccgtttcccttctgggagatggcataaagggctatctcctgttcagcgccttactggccctagtgttgaccatcgccttctgcgcaactccaacggtggccgctaaggggctggttgcggttgcagcactcggcgtcttccaggtttctagctggacccttgaagagtgggtacgagccgacgtgcctacggactgggttgtcgctgtgcaactgacggcaggtcttctaagtgctctctgctggacggcgcaccggcgctatcggaaaagacggttcactgtcccattgggcgtacatcctaccgacctaccagagaagattcgcttactggccgaagctgcggagcatggcttccacgtcctgcctggcgtcgtcatcacccctgccctggtcaattcgacgggtagacatctcccacgctgggcacgcatgaagccaactattgttcgctctgctgcacggtcggagagctgtgaggcgacgactattggaatctacgactccctatacgccgacggcgagcaccaggtctgggcctcggccgctcaggtcattgccgagatagagcgctctggagaggagggtatgtgtttcgttcagccccggattcaaggccaaacattcggggtggctatgttcggtaccgaagccgatgaccacatgatcatttgcgaaggaggccatgctgaccaggttacggcaggcaccgcggcaacgtcgcgttttgcagtaccgatatgggatgtaaacaggctcgacccaagagaccgggctgtctgccgggtgctgctgcgcctgcagcgagttatgggcgccacgagtattgagtgggcccgctcggtatcggggaagctgaccatcctgcaggtcagcactgaccaactcggaagaataggcctcaagcaccgtatatccaaaaacactcgccgcttcgtcgttgctccagtagcacacaccggcaagctggaagctgccgtactcgccgcttgcgcaatcaagggggagcaactgaccgtaggcaggtaccggctggttcaagccaagtctttcattggcggattgttgtcgctctatcaggacatttcctcggcagttgactacacccggatgtccccgaccattgcatttccctccgcggcgatcattgaagctttcgaaacagagcatcgggaacgactggcgcagcgcactttatggctccccgacctctctgccgacaccgaacagctgattgcagcggtcacccacgaccttggtcgaattcgggacgtgtacgggcgattcaaccggttggcgactctggcagctgaactccgtatcaaggcgcgcatcaagggtttttcgcggccactatcctcgactgtacttggcgcggcattggaagaggcagaggcggacgcccgggccgatctgcttgagcgcatgggatgcctttcgctgaatggcttcgctatccagggtaagtcgagtctggacggagacgatcttctcggcggcgttatacaggctaccgactctccaatggcttggctgaaggatgaaagtgcggtgcaggtcatgtacgaactgaagcgcttgcgcccattgctcgccgagatcgagcaacgtggggcagtcaactccctcatgtcagccctagacgtttcagttggtaccgatactgactccagggcggcagcgctagaaacagtagcaatgcaaagcaggcctctcccgctggccaacctactggcaggtcatgaccgagatctagggctaaacgccttcgtatggggagtaccagctaaaggcatctgcctgcggctggccagcaaagatgagttccaaccaggggacgcactgctgattgaccgagcggaaatgagctatctcccgctgatagcgcgcgcaggcgcgcttgtcgttcgcgaaggttctgcgctgtctcatctcatgcagcacgccaggcgtcttcgagtgccgcacgtggtcggcgccgacattggggatcaaaaggactcggcactggtgttcatttctgcctctggagaggtgtgccgtgcataa

SEQ ID NO: 333892 - DNA, 1836 bp, Pseudomonas aeruginosa
atgaacattctgccctacgcccttccacgcaatcggtcgatcgagatgatgagtaccaccatctcgaccaatctcaattgcaacctggcctgcaagcactgttatatccaaccagacctgctcaggcgcaaggaatacatagacgaggcaaccttccgtcgcgaagtggaggttatcgtcgaggcattccatctcgaccagtccgtcacctatctgcatttagacgtgctggggggggaggcgacgctgatgcccttcgaattctgggagcggaacttaccttgggttctggaccgtatttccgacctgaatgctgccggcacgcctaccgagttcaccttctgctcgaatctcatgtggaaggatgaccgctacctggatttgcttaggcagttcaaggggcatcccgcaatggacattgcgatccccttcgagggaccagagagtggccggttcggcaaaaacatggccatcttccccaaataccttgaacgaatcgaagcgctgggcgagtgcaacatgctcaacctggtgttggtgatggggcagggcctcatagaccttggtccgcagtacatcatcgacaccttcgtgaagcgcgggatcagcgacgtgacctgcgacatgatcttcccgtggggatcaggccggtcctactttgatcgagcgcagccgtactaccgtgacgtggcccgtttcattgaggatttgactgaacttggcgctccctacggcctgactgtcgaccatctggacgacatgaggaagtctctccgcacactttcccgttctcagaacacactcaacgacgcctacgagtaccactgggatcaccgcggggagctatcgctgaacccgaaccaaaccggtactgaggcggtgcgcccatacatcaacctgaatgtttgggatcggaatgccgcgctgaaggtggtttgggggaacaacagcgagctcgatgcaaaactgtcctacgagcatgacttctgccgagggtgtgcctacctgcaggcctgcaactccggttggtaccctcacaagcagctctcacctgaagtgctcggaaagtacatggctgctccggaaggggagttcagttgcccagggttcttccagctatgggaaaagcaggctcagaccagcttcgatcaagtgggtgtgacgcgatacggcaatgcccgccgcgagagaaggatcagagctatcgcacgggcggctgccggcgaggccacagccttcttcgaaaccaattatgtcgacgactacgaaggctattttgatgcagtgagatctgccgtcgtggtgcgggtgatacccgaaatgctcttcggctgcaccgtccggcagcggctgtggttctacgatcgcctgggcaaacaagtcgtcttcgagggtggactaagtcgcttcggcgaggaagcttccatcatcgcgcattcgctggccggcaattatcactcccttgggatcgatgatgccctcatctgggactttgttcgccgtcggcccgatcaccacctgtctggcttcatcctggatgccgtgcagttggccaggtggatggacctaccaattgaagttgtaggcggtttcccacggtggaacagcgggcttgaagtgtccttcaagttcgaggacctgatcatgtgggggatgacttgcgccgtgcctgcagacattgccgactctttggaccagcgccgtgaccatttcctgaccccggatgcttacgagtacctgtcacgcatccacctgcaggccgtgtctttttcgcgaaaggcgcacgcggcaatcagggactggcagatcacaaaagagaggatgacatgcgtctga

SEQ ID NO: 333893 - DNA, 1725 bp, Pseudomonas aeruginosa
gtgcataaacaatcccggttgaatcaggccaacatcagcatcaccgctacccgatggtgcaatcggcggtgcactcactgctacatcgatccgtcggagttggccaatcccgtcgagatggaggaaggggttttcagggggattttcgaccgtgtccgagacctcgtagccctggaccgcggtttggaggaggtcgagtgggaaatcatcggcggcgagatcaccaagatgccagtcgagttctggcgtcgaaatttgccgttcgccctagagcaatgccgggacttcaacgcacaactcaagacaccgggctcggtcaacgtcctatccaacctcattttctctgaccagcgcaggcgagccgactacatcgacctgttcaaccagtacggcgattggccggaaatgtgcgtttacacctcgtgggagccggaaaccaaccgcttcggtaagcgagataagctgatgcccgcctggcgcgagactgtcagcgccctgaaggtgcggcaaaagatcctcgacgtcatcctcaccaagatcacggtcgaattggggccggactatctgttggaacagttcctgccgctgggtgtcaccgacttcagcatcaagatgatcagcccttacggctcaggcaaggcgttctggcagccgaacatgatcagcttcgcccagatgagtgactacctgtgcaggctcttcgagatagcgcctaaaggcatcaccttcacgccggcagacgagatgacgagcgccatgttccgaggcaccagctatcagtgcatcggcaacttccgctatgacctggcggttgagccagacggcctcaccagcttcaatgcctcacagaccacttcggaggccgccctcggtgacaccaggatctacatcgacgatccggattgggcgttcaaggttcttgcggacaacacctcggagctggataacaaactctcccgctaccacgactactgcttccaatgtgagttccactcctactgcgcgggcggctggtaccactatcgaattgccgaaccggaggatgtacgagcatgggactcagctgagtgccctggctacaagcgcctctggtcgaaagtgaaggatcgattcggggagttcgatacacggatgaacactcaccatgaagctatgcgtgccatcctcaagtcaccgacggatagcgtcacatccaaacaggtccatgacgagatcgccggccaaggcttggctttttacgcctggctaaagcaggtggagaatgctcgggttgctctgaaccctggagcccaaatcggcagaccgctcatggagcgaatctgggcgtaccaggctgtaggagcaacgataaacctaagctgtgacgattttggaattctttccaacgatctgaaacgcctggtgattgagcacctggtatacggggacaccccggctctgcagctggaccccgcgatggtctgggagtgggtgagaacctcgccagatgaccagttggccgcaatcgtggaggaaacctctctactagcccagggtctgcaagtgaaggacaaggacctcattctggccggccacaatactcaactgctgcgctgggtgctctcccatccctcgccggcggggccccctgcaggtgagcaccctgagccagagatcaaactcgtatcgatgcaactccagcgcgaggcctcgctgagatccaccaaaatgcggaacccgatttag

SEQ ID NO: 333894 - DNA, 1065 bp, Pseudomonas aeruginosa
atggcaaaatctgaagcagttgggttcatcaacgtaactcgccagtgcaacgttgactgtaagcgctgctatttaaccgaggccaaccgggccgccggtgagcgactccccacctacacgcttgcagccttcctgacatccgatttctgggcagaccggccggtgaccctgatctgggaaggtggagagccaacgatcgtgggccctagtcgcatgcagttgtacgtggaccaggcccgaggcctactcccacacgcttcccagaccatggtgaccaactgcttttctgtccccaattggctcattgatctctctcattcggctttcaacggccaggttgagacaaccttcgccctagggcacaagttcagcctatcgggctcagaagatctgtatacccggcgtttcctcactggcctgaaccgcttctgggatgcgggtgtggtgtgtaccgtcaacgtcgaactcaattccgagaccataaagcgcggcccgaccgcgttggcggagcttatgctctccacgaaggctaaggtctgggagttcgacatctctgttgacttccggaccttcctggcagagccaatctaccaagcatcctcggcgccggagctcccgctcaccgcaagctatgcagccgtttggaccttccttcacacgctggaagccacccatggccggcagcttagggacgccgggattaccatcggcgcactggagcaggtagccggcgaggccaacaaccaattcaacgtcctgtcagaagatcgatttctgaccctgaacccggacggatctgtaacgacaaaccccctctattccgatctcgaagggacgttccttggaaacctccaagacgcacctcttgacgaattgctctcatcaccccggcgcctggcccgcgttattgccgaacggcgccgtctcctgccttgcaggtcctgccctcatttcagctactgctccggcggacccgcccatgtgccagtcaccgatggctctggggagtgcgcgggtgggaagggaatgtgggacctgctactggagaagatgcgctgtgcataa

SEQ ID NO: 333895 - DNA, 1245 bp, Pseudomonas aeruginosa
atgacagttcaagttggaatgagagtttcggaccttgaagggatcttccttgcacagtccagccatcttcagacttcgcccgaacacgagatcaagcgggatgtatcgtacttcaacgtagagtgcgacacgactctcaagcgcatccctcgcgatgcctgtcacgtgggcttgcgtgcgcagagtcacccagactcaccggaccttcccagcgacgacttcactttcagcttgatcttggctgccggcagtctcaattcggtgtcgatcgacatcccttacgattgcaccgtatcgcccgacgaattgctgatgcacgctgaatcctcgggcttcaacatcaacttgctcccgccagggcacaccaccgtcgtcgacgagaaagtggaacgctactgcgaggtactccgtacctacgggaggatgtggcttgcctcgcctcaatcgaacatccgtgtcgcgccaatcgatggctacctcgaataccttttcggtgtggcggcagggcacattccggcatccatctcgaccgacgagatgatgaatactttattcaccgaaggcatgcctgaagtggttatggagtacgtgaaagtcgtaattcacgacgtcatcatggagcactttgggactgaggatgctttcaatgagatcctcgaaaaggtggccaaggcaattcacctcaagcaagcgcagttccgtgactcccgagcgcgcatcctggaggaagagctcgacctacgaacaccgttgcccaatctcattcggatggtgagtaagtccacggggcttagcctgtccaacgctgccggcatgctgtacgagctgaagcacggagtccacacggtattggataagtacctaccaccggatgagcccgcggttgaggggcaggctacccctccggtgaatacccgccaggccaaactcgccaatgccttaggggctgcatttgctgcagcattcggtatcgatgagatggaccaggcatgggcaggcgtcgagtccaccctgcaggtgcaagagcgcatcaacctcgatcacggaactgttcaacctggttccgttgcgtcgcgcatagccgtggcgatggacgttgagccgaagattgcagcgctggccactggtgagtttctttccatgattcgagcagttcttgaggctggaaaccatgtgagcccgcctccgcctccagcacccaaaccggtacctgcacccgccagcggccttatcgctgtcggctga

SEQ ID NO: 333896 - DNA, 375 bp, Pseudomonas aeruginosa
atgaagcagttcaccggcaatcgagtcatggtcgcaatcgcggtcagcgccttgaccgccagcgcttacgccgaaactcacaagtcgttcactgtggagcagtcgactgaagatctcgctgcagataaggaaatcgcccgtctgcgcgccatcctggagatgaacccgatcaagcctatggttgaacaacaccagaaggtgttgagcgaaatcgtcgtgggcaacatggtgggcggtatcgacaacatgctgctggcggccacagccacagcaaaagatatggactccacccggatcggcgactggggttactgccataacgcttgtcatggtgcctgccacggcgcgtgccatggctcgcgtggctggcgctga

SEQ ID NO: 333897 - DNA, 1119 bp, Pseudomonas aeruginosa
atgagcaagggtgcacccgacttcgatcacatgatctatgtgcggctcatcgaggcatgcaatctccactgccaacactgtttcatccccaacaatccgaagcggatggactggaacaatatcgagcagattccggcgaaggtccgttcttttgctcgaccaggccaggtcctgctgttccagctccacgggggggagccaacgctggttggtcaggagttcatgcgcaagtcagttgtgtttttgaagactgaactgtccgagttcgacgtgcgtttctcgcttcagacgaacttgatgaccttcgacctacgttgggctgagatctatcacgagttctttgatggcattgtcggggtgtcctgggacccggagatacgccttataagggctggacgtcccgaatcgaacgagcagttcgaaaataagttctgggccaacattcaggcactccaaagccttcagctgacaccgtacatggtcatcacggtgaccaaaccactgatcaacaggttcaggaacccaactgacctcattgacttccttctcgagcgcggaatttccctggcccactttgagaggctgaccagaactggatatgcgataaccaactgggattggctcggagtcacgaaccgcgaatacagcatgtggattggtcgctttgccatggcctacagccgcttcatgactcagcagcgggaaggtcggcaggaactgaacatctctccgctggatgggcttatcgccagcgtggaaaggctgcgccgcggtgagagaggaggttacgggtgtctctccggcgcttgtgatactcgctttcacacgttcgaccagaacggctattactccgcctgtactgcgttgacctcggagcgggataacaggaacgcagttggcgtgactgtggtggagcacacccagcttgagactgcccgagaggagcgtcaaatggactgctctacctgccagttcaagcctatttgtagctcaggttgtatggccacgccccgaatggacgagagccaggagtgtgcagggggatacatgacgttcaggctactgaatgaccacatcgcaaccagagataaccccgggttgatatcaatcgctgggtaa

SEQ ID NO: 333898 - DNA, 1143 bp, Pseudomonas aeruginosa
atgcttcaggtctatctcaagccaacaaacttctgcaacgtaggttgcgacttctgctacctcccagaggatgtgcgggccaataagtcccgtatgtcggaggctaccctccaggacagcttggatctgatccgcaacctggccgaacgggaggggcacgaccgagtctccatcctgtaccacggaggcgagccgctaagtatgagtgccggggtactcatggatctctcggacaaggtgcggcgcggcctctccggtattgaaattcaggaagccatccagacctcgctcattccactgcgcagttcacacatcccattcttgcaggagcggtgtgatggcttcgtcggctcctctatcgacttcagcggccgcaccatacagggctccaataacaagtacatcgatctttggctggagaaggtccacctggcccgctcccatagtcttcacgtgggcccaatcatggtgccgacgcgcaatgagcttggtcgagtagcggagatctatgggtggttcaaagaacacgggttcacccatttcaacatcgagcggtacaacccctacggggccgacggagaccgcccaagcaacaaggaacacagcgattttctgagcgacctgttcgatgtgtcgatagaggacttgcgacggaccggttcctgcgtaacgaacaatgccgtggcagcggccattggtggggtattgcacaaccaacccggcgagcgctggggcggaacctgccagcgcgactttctagtgattaatcctgacggggcgctcaacacctgcccggatcggatggagtacgagacggacctttggccaaaggtccaggatggcatcgatgccttccagtccagccctgagcgattgggctggatcaaggttcagcacatcgaccacatcgagaatcactgccgtaagtgcgagttccgttcatggtgcaagagcggctgcccaatcactgatcaccaggttcataccggtgcaggggagtgtgccggctatcgatcacacctagcgaaagtcaaagagttcgttgccaacgaagagggacgccgatttgctaccggctacctgtccgcggcaggcgcgctgccctttgacccgtacaccatcgggctggagcgcatcgcatga

SEQ ID NO: 333899 - DNA, 1197 bp, Pseudomonas aeruginosa
atgccatattcagtcgttattgctaagccaaccaaaaactgcaacgcggactgcacctactgctctgcgcctcctgacggcgcggacagttggtcgcttgatgatttcaagcggatgttcgatcgcctgcagccgtcgttcacgccaaacatcgactggatctggcatggcggtgagccgatgctcatgggccctgatttcttcgaagcctgcgctgagtacgcattggcccagcatggtggtgtgcactttgcaatccaaaccaaccttctggggtacaagtctgaacgatggaagcgagtgttctcggaaatctttgagggccgggtatctacaagtttcgacccttacaagaaataccgcacggtaaaaggctccgctgagacgtatgaccgtctgttctggcgagcaatggaccaggtaatcgccgacgactttcgaccgctcgtaatcggagtttacgatgaaggggcggctacggccgcgatggacatgtatgagcgagccctctcatatggctcagcaggattcgacatccggttcaactacgcctaccccgccggtcgtgccagggaggcgggtatgctcattgccccaacgacttatggacagatgcttgtagatctctacgatcgctggattgatgaagtcccggtattccgcattacgccgctggacttgatgctgcagaaggtggctggctacaagagcatgctgtgcccctggacgaagtcctgtggaggtcggttcctgaccatcgatcctgatggctcggtgtacaactgtagcgaattcagcgatttcggcgacaagcgctttcgcttcggtaacatccttaccggtgaggtgcaggaagcgaaaccagttgaggtcaagttctactctggtgccgacatcgctcccgcgctggccgcatcacctgcctcccgagaaatcatggggcgagcagtcaaccttccgccagactgcaagacatgcccgcatttcaccgaatgcgagggcggctgtgcccgcgatgccgtgctcttcgaaagagggatggggggcaagttcggctattgccagagctggaagatggttttcaatcgactcaagcagtcggttgtgactggtgaggctgaccgtattctctacaagctcggcatcactcccgagagcgcccgcgcgcgactctccgcatacgggtgggcgaactga

SEQ ID NO: 333900 - DNA, 987 bp, Pseudomonas aeruginosa
atgggaggcttcacgctgattgaattggcgattgtgctggccgtgatggcgatgattgctgtctatgccacacccaggtacatggagcagctcaaccagaagcgtgcaatcctgactgcgcaggaaactcagtcttttctggacgctgcgcgctcataccgcatgcagaatggctcgtggccaggccaagcaagcagctgtgcaaatgccaagagcgtgcttgagagcacctcaccaccaacacttgccggcatcagcgcaaccaacaagtacaaccaggcagttaccccagcttgcaatgcaaacacgttctcgatcacccaaagcattgctcaagactgggatggtgtagtcgcgaacaacctgcctgggacagtaatcagcaatgcagcgacatacaccattcgttcaacgatcgggattccaggcagtgagcccgcactgaactctaagctttctcgagtctacaccggtgaccctgagatgaatcggatgcgcaccccgttgttgcttgggggaaattcgatcaatgaagtttcgaacatgtatctgaacaacggtggtgcggatgctcgagtaagaacggatgctgggcgcttgatcctcagcacgccctatggcggcgaggtggccatcgagaatgggaccaacctttcggttgaaaacgtaacccttcgtcaacgggggaacgccaacctcatcgatctgctgccgaatttcgtgcagaagggaacctaccttgtccgacacagcgacggagttataaagcctgcgtgcccgggcggaggatctgcaagggcatctctgcgcccaggaacaatgcgtggtggctggcaggagggagaggtaaaccacggagccttcggcttcgagtaccggctcctcgactacggcagctactggatcgtttcgaccaatatcattggctctgaggtagagcggaacaaccttcagtcgcttgtcgacgtctactgctattacccctaa

SEQ ID NO: 333901 - DNA, 516 bp, Pseudomonas aeruginosa
atggttcgttcccgcggcttcaccctcatcgagctggccgtctgcttggcaatcgtcgcagtcatgacggttgcgctccttccaggcgcaatggagaagtatcagcagggaaaaatcaattcctcgattgagcaggccaggaacctgattcctgtctgcgagatcgcaaggacaaaagccgtgtcctcgaccgtcggggcgaacctaaaggtcacccatacttatggatctcttaccaactggtcgaaaacagcggatcttcagaacctgttgactgccgattaccgcttgccagctaccaacccgcttggctcaaacatcctcgtcaaattcgactcacagcgctgctacgtcgccgtagatctgcctttcaaggaagacaactacggtggatataccactgaaaacgtcggggcaaacacccggattatcatcacaaccaggccggcgcagagctcctcttccgcctgggtgtcttatcagaagcgaatcctccatgaagaaacgacgcgctaa

SEQ ID NO: 333902 - DNA, 1164 bp, Pseudomonas aeruginosa
atggcctactaccaactgaagtatctaggtgaatcgggtggtgtggtttccgtcggtgttgaggcagaaaccaaagagcaggccattgccatgtccggcatccccgagtcggtcatccatagcgttgctgtagaccacctcgggggtatcaaatcggccttgttcgacaagaagtttccccttgtcgagcaggtcctcatgttgtctgccattgcttcgaaaatttcttcggggaagaccttcggcaaggcggttcaggaatcagtgaactacaaagcactgaagatcacatttgctcaaatcgacgcctgtcaaacccccaaagagtacctgtcccttcttcgattcgacgaaaccgcagtcctcctggctgaagcgggggacaagacagggcgattgcctgatgctctgaacagggcatctaaagcaattgcagaacgtctggcagcgaagaaagagttctctgctcttatgaagaaagccatgatcaacgcatgctttggtctgggcttcatcatcggcattccgctatgggcagggggaactatccacgactttatccatgtacagcgcctcgacctccagctcaactccctgagccagctgatcttgcttctgcacacggtctacaccgagtacctgtacgtcctgcttggaatcgctgccgggatctatgtgtttcgggctcgggtatgggaaatggtgaggaacctgccaggtttctcgttcctcaatgagcggaacaaggtgcggatgggcctggagtttgttcagacttatcagctactgctcagcagtggctttaccaatccccaaagtttcaagttcatgatgcaacgctctcggggccgtgcacattctctctatcaagaagctcacgcgcgcctcgtcgaaggccgtgagctatccgatgttttcgacaaccccgagtggccaccactgattactcagaacctccagggtttcgacaaccagtcaccagctgggcgcgacaacgtgctgagcaatatggctgatgctctaaaggcctactaccttcggcactcggagaaggtggcccagatgtcatcggtcatcggattttcgatgatgctcctgaccatcatgatgttcgcaatcggcttttacctgcccatcattaaccttgcgtcggccatgcggtga

SEQ ID NO: 333903 - DNA, 462 bp, Pseudomonas aeruginosa
atgatcgaacgtagtaccaaaggtaatcgccagaagggttttaccctgatcgaactggccattgtgctgggggtcatcgcaatcctgactgccttcttcctgccgggcatgctcaaggcgcgtgaagactccaagctgagcactgcgatcactcagttgcagaaagacttccccggtgcaatcgcccggcaggtgagccgcaccaacacctgcagcacgaccaccatcactgcagccaagctgaaggaacgcggtctgcccgatctgactgtctggaacacagcctggaccgttgatgctgtcaccagcaaccaggtgaccatcagctacaccatcgacagcaccgacaccagcgccgctgccgacctggcatccgctctgaaccagagcaacaacatcgtgaagaactccgcaaccgcaaccggtaacaccaaagtgaccgtggcgtaccgctgcaactaa

SEQ ID NO: 333904 - DNA, 462 bp, Pseudomonas aeruginosa
atgatcgaacgtaataccaagcgtgtgcgccagaagggcttcaccctgatcgagctggccatcgtgctgggggtcatcgcgatcctgactgctttcttcctgccgggcatgctcaaggcgcgtgaagactccaagctgagcactgcgatcactcagttgcagaaagacttccccggtgcaatcgcccggcaggtgagccgcaccaacacctgcagcacgaccaccatcactgcagccaagctgaaggaacgcggtctgcccgatctgactgtctggaacacagcctggaccgttgatgctgtcaccagcaaccaggtgaccatcagctacaccatcgacagcactgacaccaatgctgctgcggacctcgcaacagcattgaaccaaagcaacaacatcgtgaagaactccgcaacagcgacgggcaacaccaaggtgacagtggcataccgctgcaactaa

SEQ ID NO: 333905 - DNA, 1758 bp, Pseudomonas aeruginosa
atgagcaataacatccaggggattcaacgaaagatcctgcggaatctggttgaggcggggaaaatcacgcaacagcaagcagatacgcagccagtatccgaagtcatcgagcaggttgttcccgacatcctccgcgtctgcaaggacgacgaagcagttgcccatgcgatcggcaaggcgctcggccgtgaagtgttcttcgagctggaggaagggctctcgattactcagggccctgaaggggagccatggttcatttacggtaacaccatcttcatggccaatccgttccacaaacggatgcacgagcgtgccacagggttcgccaggaccaacaacatccaccagccgaaggttggtgtggtgagcctgacccgcttggaagcgatcaaggcgatcgaaactgaagatgacgatagcgcggtccatgacagcgagcagctaaaggcccgcgcgacacagcgagttgaagacctggtgcgcgaggcggcaaaactcaatgcctcggatatccaccttcagcctacacaaggtgatcaggttcaagtccggttgcgaatcgacggcgaacttctgactcgcaagctctacacgtccaaaattcacgaggccatttgccgagtgatcatcgagaacaactgcggccttaccctggaactgaacgcagcccaggatgggaagtttgatttcgcggtctcgacccataagaaaatcaacctgcgggttagcacgcttcctgtcaccaagggctcggagagtacccccaaggtcgtggttcgtctattgggcaacgacacgagtttggccaacctggacagactgggcatgtcagccgaaaacaaggcgctgctccgtcggttgggtgaggcccccaatggcttgatcatcgttacaggccctactggctcaggtaagaccacaactctcaatgcgatgcttctggacatctatggccaggacccgaaccggaactaccacaccatcgaagagccggtggagatccagcatgagggcatgtcgcataccgaatgcggtaagcacttgtcgtttgctaccgctctccgagcgttgctacgacaagaccccgacgtgatcttacttggcgagatccgcgacaacgaaaccgccgagtacgctttcaaagccggccaaactggtcacctggtcttgaccaccttgcacacaaacaatgcccacgagtcgctggatcgcctcggcaggatggatattccgacagacattatcgcaaccaacacgcaagccatcatggcccagcgtttggtccgcagcctctgcaaaagctgcaaagtcgaatacctcttccggtctgatgagaagcgattcgccttgtatggctcgaacccggtgtttggcagcaacggcgatctcaagctctatcgagcaaaccccaaaggctgtcaggtgtgtaacaacggatcgcaccaatctggcggattgaaagggcggcgcggtgtcatcgaggtactcgagcttacgccggaaattcaggaggccattttgaatggaatctcccccagtttgctgagacgctcccaaatcgcagaagggaccttcaaggacctctgggacgatggtttgcgcctagtgttcgaaggtgtgatcgggttcgagcagctcgaaaaagagctacggccctacctctcggatcgagttggcgcaccgaagaatcgacatgagaaagcgggtattcgccccatccgcgaagcgagcacttcatcgttggtgccacagctgtaa

SEQ ID NO: 333906 - DNA, 543 bp, Pseudomonas aeruginosa
atggagtacaagcgcgatcagctgaaacttcaggctgaaatggctgactcctacaagaaaatgtcggatgccggcttcattgtggacgaaagtggctctccactgggtgtaacagatatcgcaactctgggtaaagaggtgcgcaaggcaggcactaaacccgataaagctgacctcccgttcggtcaaaacccagtcatccccaatgccgcaccgttcatgctcgaccagcctacgttagggatgagcggaccaaatggacaggctgctccaggcggtccagtccagcctggctcctctcagaaaaacgtccccgacgacgatgaagacaaggccaaacactttctggcgctcctcgaggttcgggctgactcgatcgtagtaatgaccagccaagggcgccgaatcgtacgcaatggcgaaaaggtcaacgactacacactgcagcgatttgggctcgacaaggcagttttcaaaggtcctgacggcactcgggaactggtaatcgattggaccaaatccaaacgctatgcggacgactga

SEQ ID NO: 333907 - DNA, 477 bp, Pseudomonas aeruginosa
atgattatcaagcgctcaaaactgtctatttcaacctttggcttttcgaatctgatgttgattgtcattgcagccgtggcagttggcgccgttcgattcagcatgaccatgggggagagccgcactctcccaagagacttcgatcagatcgatgcagtaattgaaacttcaagacaagacgttcagcggtatacggagctagaaaagcttccgaaactcgtgacctcttggaaaaaggctactgcatcatttgaactcgatgggctcaagttcgaaaccttcgacgcgaacaattcttcggagatggggaatacttattcaggcccgctaaaaggctggccgggccaagtaataggcgatccgcaggtagtgatatcaagtgtgcggtcgcttcaaaaggaaattcccctatatctctacgattactccattgcgaacggagtgatgaaacttaactttgtagtcgtgggtacctga

SEQ ID NO: 333908 - DNA, 936 bp, Pseudomonas aeruginosa
atgaatcagttgcttcttggcgtaccaatccagattggtggcgaagaggtcatcatctgccgtgactccatcggctcgcaggcgctcagcagctcccgcgagtcggaggtgtataccatcattgaggggccacgcgaagacggccggccagcgatctacatcgacgaagatgaactaaagtcgatgcgagagtcgtacccgggcattaacgtgtatggactctggcagctcctgttcgccaacaacctcgttcctctggggaacgaggttattattttccccatgggtcctgaccgcgggctttatctgcggttggactctagtacggatgtccataagccttcgagcatcctgagctcttctgagtttgtagataatttcatccctgagtggatggactacgacctctcaaatgcttctcgcattagtcttgataatcttgatctggtgttacccaccagtccggcatatacccgacaagaactattcgaaaagcaaaggcacgatcaaaccaaacgctggtatatggtcgcaagcatctgcggcctgatgctgatcgccacacttgtatataactacggcatgtacacgctgtataacgctgatatggcggtctataaaaccaagcaaattcaaagagacgagttagacaccaagattggcgagctactgcgtgaacgactggataagtggccggacaactctgctgagctcggcaagatcagtgagctggttgcttacgataacaaccttgaaacttcacctgatggtgaaactcatgtcgggttcacgacgctgcaccaatttgtaacgagcaaatacttgccattcgatccggctgagaaagtccgaggcatagtttcggaattcactccccacctgaattacgtcattcgaattgacccttcggaaattggcgggagcgacaaccaatga

SEQ ID NO: 333909 - DNA, 1656 bp, Pseudomonas aeruginosa
atgaagatgaaatccattgccctggctctgctggttgccaccggcctgttgggatgtaccagcagcttcgacatttccgaagaagcgaaaaatgcccccctgcgacccgaagcgaaagatgctcttcaggctgcccggggtaacactttcgtacgcgagatcaggactgaagatattgcgaaagcccggccgattttcctaacggcacagagcaagccgcttcgaagcgtgctgcaagacacgctgcctgggtacgcgatcattccgaagggcaaagtcaaccttaacgatccaatcgatgtagctgctgctgggatgacccttgcagatttcatcgaatacatcgaagggacccgagacctgaacatcgagatcgtaggaaagcgtgtaatcgttagcgacttcgaaacccgcgagtggaaccttgccacttttgcgtcgactcggaacgtcaacaacgtcatcgcatccactcagactcggggtgctaaagcaggcgacgacgattccaacaaccaacaagactccaacgtctcgactggcacaaccatcggtctgcaactctctgaagatgagtggctgaaagtgatggaaggcgctcggacgattatcggtgccgagaaagagtctgataaaggtagccgtggtcgcacgcagggttctgcaggtgcatcgagtgcggctgtcggtggaaacagcaacggcagcagcaacaataatggcatgacgagcggtttgaacttcgatgcgccctcgccagcagatttcggtctcctgacctcgagcgaagaaattgagccctacatcgaggggattcgctccgttggcattatcaccgccggcggcaagccctcgaaaatgaaaatcctcgaccgcttcctcaagcgagcgatcggcgaagccaccaaaattgtgaacgtgcaagttgaggcctacgacgtcatcctcaacaacgacaagcagaaagggatcgactgggatctgcttgttaagagcacagtaaacggtaacccgctgggacttcatttcttcaacacgaagactgaaaccaccgaccctttctggaatgtccaaggaacctacgaatctgagcatgtcaaagccgatgttctgatccgattcctggaaaccttcggtcgagttgagctcaccgaccagcccaacattacggtccggaatggtgtcccggcccaaatctatgcgggcgaagaactcacctacattgttgacgtcgagcaatcccaagatgagtcgggcaacgtaaccgttaccccgaaattgggccgtttgaaagtcggcgtgacccttagcgtgactgtgcgggtgctcgataacgaccagctcctggttgatatctggccggtgatatcgaacctgagtggcaacgacacgatcgccatcggtgatttccagttcgaaactcctcgtgtgaatctcaaggagttcagcacacaactgatcacaagttctggtcgcgcagtacaccttggcggtctcatcaccaaaaagatgaaccaggctctccgccatttgccttggcagaatctggtcaccaaagcagtgctgaaccctcttacccaggacatcaacaatcaactcgacagacgtgagctggtcctggttgtcacccccacattggtggagggtgctctctaa

SEQ ID NO: 333910 - DNA, 690 bp, Pseudomonas aeruginosa
atgatcgacctgtcgatcgataaccccgttgcctcggtagaagaaacagagaccgaacggcaatacaggaaaactctcgaagacctggaacgaaaccgccaggccctgactgccgcacgtagcgaagcagaacgcaatctcatcgctgcgcagaagacggcgatcgaggctgctgcaaagcgtaagcaggatctgctggcgcaagaggccgagattcgtaaagccctggaactgaaccgagcggcgcagtcgaaggctgatcaggtacaggtcgcacagctcacggacatcgaacagatccgcacagaaagcaaacagcttctcatgctggccgagaacaacgcggagatgatcgaaacggctgctcgcaaacgagtgaccctggagcgggtagacccgaccgtggtgatcaacgaaccggttgaggccgaataccaaggggcaactctgaaggagattgtggaagggatcatgccggtcggatggcgtgtgaaaacagccttctacaacaagcctgagcttgagacccgccgctacgagttcatttccactgacgcccgtgacatcgccctgcgcaagctcacggcttccgtccgggacgcccgtgttcgctaccagtatttctgggacctgactgacgaacagggaaatccgtctcccatgatcctgatcaccgaccgcccgaactaa

SEQ ID NO: 333911 - DNA, 1113 bp, Pseudomonas aeruginosa
atgatgatcctgctcaggaacaacaaggaccctcgaaccggagaggaaattggaggggtaacagacctcaacccctacaaccaacgcttcttccgatgcaaccgaaaacaggtagctctgagccgggagccgtcgacgcccattgaacacctcgaactggccgtgcatgagttactagctgctcatcccacagtcccagccagtgtcggcgctcaccatgccgatgccacgttacgcgagcattccctcgccatcgccaaggaggtcttgtcctatctgaagcgccagaatgtgcaggaacctctcgcttatctcgctgggctgtctcatgacttggataagttattggcatatgccgagaaggcgcctggccagtgggttaagaacaaggacgcaacacaccacaacacttacagcgcttacatcgtgcgtcagatgccggagttcgcgaagctccagccggaggatcagaacgtactcacccttgcgctgcgctactaccaccatcctgcaatgcttccggtttcttctggcccgcgcgttgagaagttggtccaagcgctgagacacgctgacggtttcgtgatccgtgcagagaagcaagatggtattcgcgcagccaaggaaagctcccagactgaggaactgatcagggaggccatcctgaaatttgtcggcgaagccaacatcaacaagttccgggcgactggagaagcagagggttggacgaaggacgccatggagttcgtcatcattccgatgtcacgaatccttgagtcgatcggctcacatttgccgctggagttgagccgtcagcttcagatgggagttgatacccgtaccttcacccaccctgctattccggtgatgctggagaccctcgagggtatggggcttttgctccatagctacaatcatcatgacagcccatcgggcctgtttgatgtgaagattggggtgatcaacttcaatgcttgcgtattgctagacaaggaaaccctgcaagagctcctacccggggttgtcgaccgttggggtatggcgaactacaaaattcaagttcgtcgccccactcgagatggtggcgcagaagaggaatcgggcggtgattga

SEQ ID NO: 333912 - DNA, 474 bp, Pseudomonas aeruginosa
atgaagaaatatgctctgcttctttgcctaaccctgactgggtgcactggtggcaaaaccatactcccggtcaccgcggcggacattcaggaccgcagccttatactcggggctcagcaggctgttcaacgagggcagtaccaggaggcagagcagctcctctccaagtacgtctatagaacggacaagggcgatctgaaaatccagttctgggggctcaacggagagagcaggaaaatcgcaatcgacactgtgatttctctcctctgggaaaccgggagggaccagacgctggctcagttcgcaaaagaatacctttcgggagacgagtacaaggtcactatgtgccgactctcggaacggcaggcgcattatccggaggcgtatgcctgctggaacaacctcggccatgaagacagagcggagaggactattcgcactgaggctgcccttcgcattctcgggaccgaatga

SEQ ID NO: 333913 - DNA, 1398 bp, Pseudomonas aeruginosa
atgtatcaagctgcaccatcccaacctacagcgctgagtcaggccattgccggactcactcactatgatcccatcaggatcgggagcgacagccgcggccaaaccgtggactgggtgctggcaaagtccagcaactttaacgtcctcttcgaaggggcaagcggcgcaggcaaatcccatacgattcaaaatctacttgcgcgtgtctacagccgtggcatgacattccacgtcctggacatcaaaggcgacttctcctacgagagtttcgaaaaggctggtctcagccacctggttcggccggaagacttcaacgacatcacgttcaactacttcgagggcggcagctccctcaacccactccaagtcccgaggacgaaagaggggggtggggtactgatgacagtcgaaggtatgaagcagttggtgaaggtttttgcaccgaataccggcaagcggcaattggactacctcgaagagattctgaacgaggtttaccgcaaagccggaatttcccaggacgacattgagtcctggatcagaccttccccgaccttagatcaggtccttgatgagatcgatctcgtgttcaactccatctcggccagcatggattcggggtcggtatccgacatcatgaaagcctatggccaggccaagtcgaaggcagagaaggccatcgtcaaaatgaaggcggatggcaaagatccattagagatcgaggacaaggtcaacgagatccttgatgacttggaaggagtcctgcatggctacgccaaaaagcatctggatttccaggcgctgcagaacaagtccactggcaacggaacgttctgggagttctggtccaaggattccctttttggcttgcgcagcatcatccagggcatggtgaaatcccgtctattcactggtaacccttcaaaatcacaggcgggcaaaatcaaccgatacgtcctgaccgatatctcgtctgaacaccagcagatcatcatgcgtattgtggcaagtcgtgtctttgcaatgggagtgatggatactcgaaggtctggtctcttcaatcccgagtacccaagccacatcctgatcgcggacgaagggaagcacgtcaaacaaatttcgtcctcgcctctgagtccagtgaaccgaattgcgaccgagggacgcggttacggtgtgggtgtttgggctggggttcagcagccagaccaggtcactccggacctcctgaaaaacgtctcaacctacttccttctcaagacccccgagacgacttacggtgaagtaagtcggatgttcggggtcaagccttcgcttctgaagcaactgcagaaccggcagaacgtactcttcagcgcaggggacgccttcactctagtaacccactttaaggagtag

SEQ ID NO: 333914 - DNA, 690 bp, Pseudomonas aeruginosa
atgaatgcccaaatccccattttcgcccgcatcaaacagcacaacgccgaatacccacgcgagctcttcgctgcgaaggaaattaaccggctgctgaccaacgtcgacttcccagctgaaaggatctggctggaccttcgtttcgacccctcaatgactgacccaacttcatccgctttggatgtgatgatgatcagtggggaggcgcacggcatagctgtactccggattcagcccctgtatctgcagcaggacatgcagacgatggtggacgaagcaatccctcacgagctcgcacacatcctgcacgcaatagacgtcaagcagaagggcgaagagatcgggaagttgcatgacgaagactggcaggagtggctattcactctggcaccgaacgctacgcctgccgcaaaggtaaagggtacgttcgacgatcgtcccgtaaagctcagtaaaggagggcttgccgtcgagtgcgagtgtggtggagatgaggccatcgctgttatcgccgacaccactggcaattccgtgaagcttcaggaagaagagctcgagtgctcctcatgcaagtttccatatcaccggctttcccaagactctgccctgcctgagggcatcgcctcggacctgaaattcctcgagggaatcaaatgtatcaagctgcaccatcccaacctacagcgctga

SEQ ID NO: 333915 - DNA, 906 bp, Pseudomonas aeruginosa
atgctgatcgacttcaaggccgagcacacacagtatcttaaagggcggccgtcagattctggctgggtgtatacacccgccaacccgaagatgccggccaaggggaagtacctggctgctcaccaggtgtttagcaataacgctctcaacgctgcgatctacatccgaaacgacgtgaatgccgccggcgaggcgattagtgtgcacacagcactccgtctcacgttctcccataaagcgaagggcaggtacctactaaatgacgacccggacaagctcagtctcaaccttgggctcggcgcggtacgtgagttataccgttggctctctgaccagcagccgcggttggaatacgaaatagttcgtgcgagcgcatctccaaaacgactccagggcttcactcttcaggacggccagttcgcccggatgcttactgcaacagagttcgactcggaagcagtaggtacgctgaccatccaggttgggctatcggatgacgatgtgatccatctgcaattttactgccttggttacgccaagctgatctatccaacattcactgatgtggcgatcctcgagctgctgaaagcgcatacaagctctaccgacctgacaagcattcccttcccagtttcgcatgcgaaatcggacaacgtagccgccccccagcgaacgcaagacgatgatcgtggtgtggctgaggatgaaccagatccagtgaggctggagcgttgcagaaaggcaatctacgccgttgggatgcaacgctggaaaggctcgagagatgtcatcgaattcatccaggactctgctcctatcgctcagatggaccggttaatcaaggacgggaacgccggggaatttacggagtggaaccgcatcgctgacatgttcaaaaactcctaa

SEQ ID NO: 333916 - DNA, 801 bp, Pseudomonas aeruginosa
atgctcgatcttgctgacctcgatcacaccctaatctacttcgtttcattcctcgcagccttcctatccatccgaccaactctgcgtgccgccggcacttgcggagcgcttttgctcgcctggacattcgtaaaactggaattgactttcgacctggccgacctactgctgaatgaaggtacaaatcctcagttcatcaccgcaggagtcgcggcattgggtatcttcggcctggcgatcagggtttcccgctctcggtggagaacaatggaccgtaccctgatcttggtagctctgatcagtgtttgtctcaccactgccgttttccacctcgtcctcgtgaaccgtgttcttcctctctgggcaaaggatctcgcttggacgaactacaacctggttgaagcctctgcagagtctttcgcccccaaatgtgagcaagcaaaagtgacctgctggcggggcaccgcattcgaggatggggccttcaaacccgaacttagggagcaattgaagggggttgattcctttttcagggctcaccccaagccattcccgcaaggacatggtttcggtgtgttcaacgacctctcggatgatggcgtcgcagctgtgctctattacctggacaagggagaggcacgaatcgtgattgatagcgcgggcgccacccgggtccatcatttggttcgagaactgttctacatgctttgcggagtcgcccattcggtctggattgctggtgcgctgttcctcatcgcgttccaccgccggcgtttcatgaaaaggggggcttcatgctga

SEQ ID NO: 333917 - DNA, 381 bp, Pseudomonas aeruginosa
atgaacggtgtatcgaacagagcctacgacctgctgaaatccttcgggaattctgggctcacactcgagagccatttccccaaaggggtggaaggcaacatagcccgccacacagcgcccaagttgatgtttccagactcaatgccgcttgaactcgttcgcgatcacatcgagcgctggaaccggaagctgcaggggctgtttcctggcatgggttattacgctttcagtcctgcggacgagatggcgaatccggggaaccacgtgctggttctctttgccgatgattccttcttcaaagcttttatgggcggcgtccagaaagtcgacgtactcacttcgctgtgggacttcgatgcctgcgttcggctgttgcggtaa

SEQ ID NO: 333918 - DNA, 594 bp, Pseudomonas aeruginosa
atgactcatgttctgaaagcaaagctgactgctgttgccgatgtggttgttctgaaactggctggtgctgtctggaaactggtgaaggtctttgacccgaggccggtccaggagcacttcgccgcgcgaccacctgtaaacggcgtgacattcggcaaagtcttcagcctccctcgggaggatgcaggccagtcgattgttcggttgggctggcagcacatcaaatcggagaacaagaaaacagggatcgtcagccgtaaaaagctggtgaagatcttcaaccctgcaaacggccactttgtggttctgtgggcaatgggagcaaacgaaggtcgtcctttgccccgggatgccatggcgatcgattacgacgctaagttggccctggggatctccaagaaggaagaggaagcggaactgattgttggcgaagccaacctcggtgaccgcgaattcttccatatgtacaccgaccatgacgcatccagtcgtagcgctcgcgctctcggctggtatctgttcatggctggtatcggctggtccgtgggagtaaccgtcgaaggattggttaccgcagtgctgcggatgttctaa

SEQ ID NO: 333919 - DNA, 771 bp, Pseudomonas aeruginosa
atgcaagtcgatctctttggtgaacccatcctatccaaccccattcaaccctcctcggaggcggatgcaccggtggatttgtttggagtagccatcaatcaatcaaccgcagttgagaaacccaaagcagttcgaaaggccccaactaggctggtaatcgacaggaaggccctctggtcctcctccggttatttgcctggcgtgaaagagttggatgaggatgatgatttgtcggatgcactctcgacgtcggatacccgttcagacaattccacgatcgagcgcctggagaaggctctcggaatggcaccggtcatcaaagatggcaagtggcaaaccgacgagctcggataccagtaccgccgagtaggcaagccgttcaaggggagtcgagttttcggaaaacgaggctcgatgatctgggaactcaatcgccagttcgtgctgacctccgcgagggatgctcttgaaccggtgttcactgacccctgctgctggctcatcatcaactccgtccatgtgctcgccatccggctgcgcatgatggaggaggatgaagatccgtatgcatgcctgcaggccttcctgcaggtcatgacgcagcacgacttcatcgataactcccgaacgggggaaacgatccgcaggttgaccaaacgggaccagatgcgggagaagcgtgcagcggcacggaaagcaaaagaagagaaaccggtttccgactcgctcatgcgagagatggaaaacgacgactttgattgcgacgagtaa

SEQ ID NO: 333920 - DNA, 1266 bp, Pseudomonas aeruginosa
atgactcaagtaatcagcgctgcaaatgacaacaaagtagtagtaatcaacctgctggtttccgcgatggcggccgatcgtcagatcgacctcgacgtgctgaatatcaaggttgaagagttgcacgatgagatccggaagctggtgactgagaagatcttcccgaaagactttctccgtaactacgcccggcttcgtgaaaacggcgaaaccctcctgaagcaagacggctccatcatgtgctccattggggcggtgatgagccgcagcgaagcggtcatcaagatccgcgagctgaacaagatcaaggaggagtgggctcagcaactcgctaaagatgaacctggctatcaggcaatgtgcgacaagcacctgctggagatgagccagaaggcaattgcgaaaggtgccgactctgcccaggtaatgctgctggccgaacaccttcgtaagcgccaaccaacttgggaagaggtagccgcacggttcaaattcgagtttgtcgtcactccggtaacaatggaggatggcgagttcgatgcggacctgtatgaagcacaacgcgacagcgttgttgctttgcgggagggtgtcctcggagcagtcattcaacacgtctgcaaagagtccatggagatcctggaaaccctcgacaagaagacaaccgggagccaatcgggcgaagtgaaggttaacccccgaactgtccgtcgtgctcaagcgatgtgtgtgaagctgaattccctggctttcattcacccgcttatccgtcccctccatgacgccctgaaaagcgaaatggacaaggtgccggctaacggtttccttactggtggtgaattccaaaatctgcgggaatgcctgaagtctctgcgtgaccagaccatcgtttgggaccgcttgaagaatggccaacccctgatccaggtagcaaccactgctgctgtgagcaacatcactcagcaagctcctgcgactgctcaagccaatcttgggcaagcccagcaagcaactttgaaccagcctgcttcgaccgcttcggcggccgcggcgtccatgcctgcaacttcggttgcgagcactgtacaggctggcgctgctgcacctgcagcagctgtagctcaaaccaccgcaactccggttgttgtggcacaagctactgacgaagaggacgaaaccacggtcccggacgcggttgagtccacgcctgttgtgcatgaggagccgaaaccggctctgtcgcagaacttcgcgctgttcctctaa

SEQ ID NO: 333921 - DNA, 279 bp, Pseudomonas aeruginosa
atggcaactcaaactcaagtctacggacggtcagtagacagcgttttgcactttcgtcgcgagtccacaggagttcgtcttacccaagccgaactccagggctacatcgaggaggtaggaacattcgcgcgcgatcttcgggtccgggatgagggcaacaccctcgtcttgagcttcagctggatgcgtgcaacctacagctatgtgctggacaaaacagagtacggctattcccaacgcactccgctgggagagggcacgattctacgtctgctgtaa

SEQ ID NO: 333922 - DNA, 2055 bp, Pseudomonas aeruginosa
atgagtaagctgcaacgtaccgcgaaacagttccaggacggttggatttccttccttcgtgttctggcaagaaactccaagatcaagttcgtgattcgtccgaatgtcagaccgtgcaccgacggtaaggtcgcgtacctgccgtctctgccggcgaatttgacagaggaagacttgatcctgttcaagcgttggggttaccacgaagtcggccacatcatgcacagcgatgtgccgttttttcaggagttcagcatggagcatggtgccttcgcgggcctgctgctgaacgctgtcgacgacgtgtatatggaatacgctcaaactcggtcttctcgacgttctgagcgtttcttccgtcagggagcagcgatcatgttcgatcgcggcatgttccgggacggaagccaaagcccccaagaagcatttgcaagctacaccttgtgcttccttcgcagccgtcggtggagtgagtaccagcagcctctagcggctgttcggaaaaacttcgatgcccacttcggtgagcatgccgaccaggtgcgcgaaaacctggaaaccatccttctggctgagtacccgagcgttcgttccactcaagacgccggcgatctcacccttcggctgatcgaaatgctgaagcagcagcgtgaccagcaggatgagcagccccaagaggagcctgaagacgacaattcggaaggtgacgaaggggatgaccaggacgatcagcaatcctcgcaaggggatgatgagagtaatcaggaagacgatcagacctctgacaacggccaaggccagggccagaaagatgatcaagaacctaccaacggtgacaccggtggtcagggtagcgatgacggtaaagctgaagacgagtccgactccaaggctgatggccaaggtgcgccgagcgaggatgacgctgatgccaataaccaatccgagaatgcccaaggcgacagccaagggcaaaacggggtcgacctcgccgagttgatcgagcaaatgctcagcagcaatggtggtgacgattccgaagtcctggatatggacaaagtgattcagcaactcgcgactagcatccagaacggtaccaacccggactatcaggatgctgctccggttccagctttcgaagttgaaccgagcgatgtggagaaccaaccctcactgggggctggaacggtcaaggacctggtcgaagggatgcttgtttgccctgctgacaaggaacatgcacgtgaactggctgatgcgctagaccgcaaggtcaatgtactggccacgaaactgcaggcctacctgttaaaccgagaagaagcggacgtctactcgacgcgccgcggttcgctcggacaatctcacctctaccgtgcaggtatgggagacagccgtatcttcgaacgtaaagaggaaacggtactccctaccgcagcggtctctgttcttgcagatctttccagctcgacaagctgggttgatcctagcgttctcgcgacgttggcgaaggcgaaagccaaggccattgctgctggggaagctatcaatgaaaaagagtacgaggtgcagacagttgccaaatccatccagcagagcctgctgatcatggagaaggtgttccacaggatcgacactccacgcgagttcttgggctttgctccaaaaactggccatctcaacacggtggtgaggaccttcggggactcccatcaaaacgcggttgaccgcattggcggtctggacagcatcaccggcgggaatcacaccccgattggtgaggcggttttccaagcagcccaacgcctggcaagccatccggcacagaggaagctgatgtttgtcctcacggatggtgctccgtcgtgtgcgaccctggctacagaacagactgcgttagcggtcgacgctggaatcaaggtggtgtacctcctcatcggcaatgaggtccgaaaggactggctggaagaggcgggtatcccgtacgccgttgctgcaaccgcagatgacgttggtccagctcttctggagcaagccaagcagctgctgatgtaa

SEQ ID NO: 333923 - DNA, 216 bp, Pseudomonas aeruginosa
atgaacctgattcagaaagcaatcaaagcagcaaaagacaaagtcctgctcaagtaccaccgggttgccgctcggatgtacctgaaacgggccacgtacgttgcagaccaagtgatctacacccgctttaaggtccccactcaagcacttcgtgtgctgcgagagaaggccaatgagcacgcccagaaagcctacgcaatccggaagggagtctga

SEQ ID NO: 333924 - DNA, 258 bp, Pseudomonas aeruginosa
atgaaaatcgcaatcgcgaaactggatgctgctctggataagttctggattggcgttgtgctgcatgcctaccaccgtttgatgagtgcgcattaccgccgtaaggcggcgcgcctcgcccaaaaggttcaaggccgtgcaaacgagatccaaaaccccgcctaccaagtgcgggccaaagatcagtttttaagccatcgccaccaagtcctgcgtcatgacttggaagcaaaattgatccgcggggaaacctgctga

SEQ ID NO: 333925 - DNA, 822 bp, Pseudomonas aeruginosa
atgttctacctgacgaacgattcgggacgtttcatcgctgtacgtggggacgtgaatacgttcctcgtgacagtgtgggaaggttcagtcatgcgaggtgtttccggtaagaaggagttgctctgcggaacagcggaggaagcctgggagcatgtttgtgcccaggttgccgacgctcgaagcaacggctattcgtcgcagccaatcgatcattcccccgtggaactcgatgcagcccagtcgatagtcgctgagtttgacctcctaagccggggaatctatgtccgtgtcaaaagctgcactgcagagcagttcaatgaggggcttgcccacttagagaatgtagttcgggtgctcatcgatgcgggtcatcccctagctttcaggatggtaggcaatgagtttgaagtcgctttgaacggggcttcgattcgtaaaggcatcgcctcggtacgggactgggaaaccatgtccccgaaggggcgagaaattttcgaggaaaggggctttatcgacagcaccaacctgctgccaagcgggaaggggttatggcgatttagaacccaagagtcggttttggatgtctgtgcacgggcttttcttgccgagctcaacaaagccggagccgagttctcggtaacgagtgactctgactacaccctcgatttccagcgaccgttccaacgccagtccgttcaagaaatggactggtacaagacgttccctggccttctgaaggtgcttgaagatgccagtctactaggtggctccaggaccaaggtttcggtgcccaccaacatcggtatgtccctgttcctataa

SEQ ID NO: 333926 - DNA, 1122 bp, Pseudomonas aeruginosa
atgaacaacgtagccaagaagaacatcaccgtcgaagagatcaaagccgctcacatccaagctgtcaccagccagaagttcgagccggtaatggtccacgagctgttcggcttctctacccctctgaagggttttgagaaaccgatcccggtaccggcagagcgtcatccgctttcgccgagtgtcgacagcaattacgtgttcaatgagagcctggttcgccgggttctcctgagcatggcgacgaaagactccatcatgctggtaggcgagaaggggaccggtaagtcctccctcatcaaccagatcaatggccgtcttaaccgtccgtcaatcgcaatcaatgccggccccggtgttgatgaaggttacctggtagggttccgtacccttgggaaggacggtgtgaaaagtgttgatggtgtgctgagttatgcctatcgccatgggctgagctgcaccatcgacgaaatctgcagcctgaatcccggcgtgcttctcagtctgaacgacatcctccaaggtgatgaggtcgtgacgctgaaacaccacgggattgaccctgaactggacccgagggaactcctcggcctcgaaggtgggatgaacatcgttcgtcacccgtcgttccggctgttcgccaccgataacactggtggtaagtcctcgcgtgatccccggtatgccggcacgaagggacagaacgctgcagtacgtagccgcttcacctccttcaaggccaacttcatgtcggctgagaaagagatggctgctctgcatggtctgaacactggagtggatgatctcaacatccaactgatggttgagttcgcgttccggttccgtgttgcgttttcgcaggaggaggcgttcgacaacatctccttccgtgagctcaaacgctgggttaccaaaatggctctgtatgatgatctggatgaatccttcgtcgacgctatctacggcaacctcgaagaagcggaccaggctctggcccgcgaactcttcgatgaaaccttcgatcgcgacctcgtacttccggaagagtacaccacctcggtggcggaccagctggatgcgctgacgaaagctgcggttagcaatgcggctcagatagcgtaa

SEQ ID NO: 333927 - DNA, 438 bp, Pseudomonas aeruginosa
atgcaacaacgccaatacagcgacaacgaactgttcgggatcatccaggaagtctatttcggggcaaccagctgggagcaaggccgtcaggctgcgctacgaggccggaccttatctgacaaccctgaaactcccgacaccatctcctacgacgagtggaagaaggggttcgttcatggagccgtctacgacgttcctcagtcagagcaaatcgaagagatcgtgatggttggcatcctgccggccattgaggtccaggtattgccagcacgctccttctgggccgtgctgaacaacctgcaaatcgatctgcatctctcggttcccgagctggctcggagaatcggactcgcagaagagcgactgtgcgctgggatgatcatgttcgggttttacgactcggatgcgatccccatgtacgaccgcgtagccgtctaa

SEQ ID NO: 333928 - DNA, 174 bp, Pseudomonas aeruginosa
atgaaggcgtttcaacaaggcaaagaagcatatcgttcgggcaactccaaccaatccaatccgtacccatccatgtcccaagagggcagggcatgggcaatgggctggttggtagcgaaagaaccaggcaactgggacgacatcgcacgcctctacgacgaccaaccaggctaa

SEQ ID NO: 333929 - DNA, 498 bp, Pseudomonas aeruginosa
atgcgtgagtcttatcgaatggagcgctacgctcaacgtgctgtacgaattcgccgtgacaaggaagctgaggatctcgccagtcgtaagattggtgatttcctgatgcggaattacttggccgaaggcgccttactagctgaagagtttgggagggtgtcgtaccacgagcgtttacagcttattgccaactcctctgaactcatcatgagctccgacggggaggaaggcatcaatgtggtatggggctcgaataagcaggtactaacgcacaggttgctgtctccgaggattcggagcgacttccacggtgcgcattacctcggttcgtggtcccgctcgatgcccaagtggaaacacaatgggcttcgagatgaaatcaaagccaagttagaagccagagttaaggaccgagttgaactgcgtaagcagggcatgctcgacttctctctggatactgacgatatgccaccgctattcctccaaccggagggctaa

SEQ ID NO: 333930 - DNA, 951 bp, Pseudomonas aeruginosa
atgacttcgttcgtgaatccgcattacatcttcaatccactcccggatgaagtagacataacgctgtctccaacgcagatcatgaaatccatggtttgcactcggctgctggggtactaccgagctcgtgtaaaacccgaggcaaccccgctcaacctactgttcggctcagccttgcattgggtgatcgaagggttcgtcaagggatacattccagaggaggaaatggccactcagtttattaacaagttcgaaggtttatccgacggaaagttgataagcatggccaagtctaagtctcgggaaacagcagaggttcttggtaaacaattagctgcaggctttccgtcttacttccgtaatcttggcctcaagccactgattattgaaggacagttcaagttgaaaatcgctgagcgtaccttcatcacgctagtaatcgactttgtcggtgaatgcacaaaaccaatattcaacccgaaaggggagatgttggctgatgttggcgacgtcgtgatcttggactggaaaaccgctgcacagcctgagggtgagttgttttcccgatacgggtatcagctgacctactactggctggcagtgaaattagcatgccagcagttgggaatcagagagccaaagctttgtggttatgcctcagggcagaagcccaacatcacgaaaccggactccaaatcagttgtgaacgccatctggcatccagtccactgggtaaaacggacggcggccgacattgaggaagcagtggaatatgcccgcgtagttgccaaacggcttcgcgcaggtgagtttttccgtgcccctcatatggcctacgactcaccctgcgatagtcactccaaacggtgtgacatggcggggctatgcctcgaaggttgcttgtcgggatacagcgttaaagcaggtctgacacttgcagacctaatctga

SEQ ID NO: 333931 - DNA, 1239 bp, Pseudomonas aeruginosa
atggatcgtcaagacgacaatcgtccgaaactgtctgaggaagtcctggagctggtgaagagcaacggcggttggcttaacgtgatcccacgtttgactagctcgttcgatgctgcactcaagaaccatggacatctggtcgactgccctttcccacaccgtcaccggaatgggggagggaagagtgatttcagattctcaaacaagccgggctacgaagaccgcgctatctgctcctgcttgcaggacggtggccgggacccagtagagcttctgatcctggacggcgtcggtcgcaacttcaccgacgtaatgttcaaagtcagagatgcactaacaaacggcaaaagctatacccgtaaggtcactcctgtagtggtcaattcacgggctggcataagtccggaggatgagcagaagcggaaggcgaagcacatcaagactgcagaaggtttgatctcgctaacccacccggatgctcttcctggccgtttgtactttcaacaccgcggtatcccgcttaacagcaaccttggtgacgtgaaattccacccggccctcgagtattacgaaacccgtaagaaagatggtcaggttgtgaaggagctcatcggtcggttcccggccatcgtgtcggcgtttcggagcaggactggtcgagtggtgaatttccacaagatctacctgactccggatggtcataagctggaaggtgtctcgaaggtgaagaaaattgattccccgttgtctggcttcaaaggagcgtcaatccgagtagcaaacgttgaaggttgcaggacgctgcatgtgaccgaaggcgtagagaaaggatgggcaatccacctggcaacaggcgagtctgttcgagtagcgcatgcctgcaccactctggcgacgttgtttgtcgatcgtgctgaattcgatagggtagttatctggtctgataacgacccatacaacgaagcacgtgggaaatatggcgatggacaaacctttgcgtggaagctctttattgagctgatgcgtaaagggttcgaggtggccttcatgctgcccgatgtgattcacactcctggagccaagggccaggattgggaagatatcatcgtggttgagaaggtcgttggacagccattgccgcaacgcttccacctcctgcgtgcgaaagcatgcgaaggtgggatcttcatgggcttcaagccagtcaacgcagatggcttgctcagtgcctgtgcgtga

SEQ ID NO: 333932 - DNA, 1200 bp, Pseudomonas aeruginosa
atggctaagacattagacctagggagtttgactcgactgaatgacctgatggaccttggccgggccgcacaggagaatcagattattctcctcagcgtagatcagatcgaagtcaaacctcaggtgaggaaagacttcaaggagatcgaggaactggcagctagctacgatgacgaagggcagcaaacccccatcatcgttggtccgatgaatcctgaaactcagaagtaccccttgaagaaaggcggtcgtcgctatgccgctgcggtacttcgcccaggctttaagctgaaagctatcgttgacggcaagaaacgcacgccggccaaggagatcctctcgcagctgatcgaaaacgagcagcggcaaaatctcaacccctatgaggttggtcaagccttggctgaagccaaagctgaagctaaggctgctggggagcccctgtccaaccaggacttggctacctacatggggaaaagcgagacctacatctccattcatttgggactcgcagaccttcccgaggaactggttgacctgatcaaaggaggcattacgagcgacagcgaagtcttacgggaaatgaagcaactgaagaaccttcagcccgagacgttcactgcattcattgaaagggcaaaagcggaaggctccatcagcaggcagcaagtacgtgatgcggtcagagcagcaaaaggcaagacagtgcccacgaaagctcctccggcacaagaaccgcaaactgaacaccaagctggaaaagtcgggcatccagctcaagatggggtagggaagggtggtaattcttctcaggcgaaccctcctggtcagaccgaccagtccccagtttcgcatgctaaacccgaggggcagtcaaaagcccagggccagggcgagacaaatacgccagcagttgtaaccaccccttcgcaggaacaggggccggccgctgcgccgaatagttcttcgaagaagaatggtaagggatacataccgattactgcggagcgtcaggtaatcggtatcaaggttgcactggacagtgcggtagcgtccgggtatttgatgaatgatcgcgtcagcgaagatccttccaaggcatggtgcatgctgatgatcggcggatcacaacagcccaagcagataaaggtggatcagatcgatatcgtcagcgtcgcagcgatggagaccgatggctga

SEQ ID NO: 333933 - DNA, 900 bp, Pseudomonas aeruginosa
atggccgcaatcccgttcaagaagagaaaactgctcgccgacgtccatgctgttactaaccagaagggcggcgtaggcaaaacgacgatcgatttccattggctggtttacttggtagagcagggataccgcgtgctgggtatcgacctggacagccaaggcaacttctccagtcgactcgcgcctgattcccgcaatggagggctccgcagcgcgcatctcttcaaagaagaactgcctgatctcaagcccctccagacggcactcggcgccgacttgatttatgccctgaacaaagacgatgagttgagttcagtagagcagattggcttgtcggcggtaggtccctttgccaagcacatccaaaagttggcagaggattacgattacatcgtaatcgacaccccacctaccaatggggtgcggatgattgcggcatctgtggtatcggatcacatctttgtacctgtggagctggcggcgttcgctgtagatggcgtgatttctctaatcgagacgttcgatatggtcgggccgttgttcggcactcagatcactcctactgggatcatctgcaacaaatacaacactcgcgtgaacgctcaccgcgagtcgttggaggacctgcgaaaagtagttggtcccaaaattcttcaaaacagtctctcgatccgaggggcaattgataccgcgctgcgccaatgcaagcccgtttggagcatgcgaaccaatggtgctgagcgtgagaccggcgtagaaatgatcaggctgatggaggaaatggcgcaccgagcaggcgtagaaatcacgcctgtggtgatcgcaccgaaggtgcctcggaagaaaaagccggtaaagaaaaagagccaatcgcgcgctaagaaagtgggggcaatctaa

SEQ ID NO: 333934 - DNA, 234 bp, Pseudomonas aeruginosa
gtgatctacgacgtcctctacgtttataaggatgaaggtagctggcagaagttccagcgctacctggaagcttacgggatcaaggatttcgaaccggtacacaaagggagcacgtactacctttacatggggcgcttttacgacaagctcgctgcagcgaagcgcgtcgagtatttaaaccgcacgaccaataccaatcatgcgaccgtgcacccgcaagaggtgccgatgtaa

SEQ ID NO: 333935 - DNA, 282 bp, Pseudomonas aeruginosa
atgctctttctgagccgctgccaatttcgtctcaagctgggagagttgccctttcagctcactaatctggttattgatttcaacaaccgcatttgctgctcgccgttcagcgtccgcgttagctaccgccattgcaaagcgttgcttctcaagagtgcgggagctttccgccttttgttccgcaagctgagctttcagtttcgccagatcggcctgcttggctgcatcagcagctttcaactgctcaatctcagccattgctcgattctcagcctcgagtaa

SEQ ID NO: 333936 - DNA, 861 bp, Pseudomonas aeruginosa
gtgtatcaatcagagaccggaatcaaccccacagagtcccattgcctgggtatcaacctagtacctgttgagcaccgagacgtcgatgttgatctcatgcagcctggcatctggcaaacccgtcggaacttcactcttgcagagctggaagagctaggtgacagcatggtcaaggccggggggaatgtaaccccggtggtgctatgtccccgggctcagggcggctacttcatcatttccggcgaacgacgttggcgcgcggcgcaactcaagatgatcccccgcctgcattgtcggatcgggcactacacggataaccaggcccgtttcatttctgctgtagagaacgttctccgggtgcaactcaacccgatcgaagaagctcaagcctatgcagacatacaagaaaccggtctctcccacgagcaaataggcaaggagctgggtaaaagcaggtcgcacgtctccaactacctgcggttgctcaccttggacatcactgccaaggacttcctgatccacggcaaactcacggcgactcaggctcgcccgctgtgctcactcgactcgaaaggcatccaacgtgaagtcgcgacgaaagccgtaaggctggggtggagcgttaagaagatcgaagatgaggttgccaagcacctcaacaagcctaagccaaaggtcaacttgcccaagcaagacgccgacatcgcacgtctgacccggctggtatccgatcacacggggtatccctgtgtgattcagaagacaccgagtggcaattggcagatgggctttctcatgacaggtgacgatcaattcgcagggcttctggagcggctaggcatcaaagtcgacgagtgttag

SEQ ID NO: 333937 - DNA, 387 bp, Pseudomonas aeruginosa
atgtccaatattcgatctgtctgcatcgtcgacgactcccccggaatgcggaagatgggggccggctttctgcagaaagctgatatcgaggttcacctcgcaaaggatgggtacgaggccctgcgtgttattcgcgaggctaggcctgatgcgtgcttcatcgacatcgaaatgcctaacctggacggattgaagcttgcctcaatcctacgagcttcgactcaattcaagcacctacccatcgccatgctttccagtgcgagttcacctttcgacatacagaaagggctcttggcaggcgcagatctctacctgaccaagccgttcacaggcgacaagatcgcgaaagcactcattgatatggaagcgattatcgatgagcagtga

SEQ ID NO: 333938 - DNA, 2010 bp, Pseudomonas aeruginosa
atgagcaacaatttttccttcgttccccttaccgcggtcctgctgatcgcaactggcagcgcggctgcatggactggatacagcttccttaaagacactcgggctgattccttctatgtggctgaaacctacgaactgaagtccgccgctatgcaaaccatctacttggcagacaaagcagcggctgatggtgcatatgcaagccagctcgtcgaggcggaaagtcaggtagagcgcgccctgatgcatcttcggaatggagacccaatcaagggtattcccggcgcaccggaatcggtactgcgtagcctggagtccctgagtgcttcctgggatggcattgccccctcgatcgccaaactgatcagtggacagtctgggaccgaagccttcagcctatccgccaaggaggcgaagacggccgttgtgaaagtgattgagagtggccgctcggctgaagcgctgctatctaagctgaatgctacttcccagcagaagagccagctggctcaggccctcactgagctggaagctgacgtagcgggagtcactgctactacagtggtcgatgccaccgggctgcaaggcgcagaggcaggggttagcaagtatttaggcgcgctcaccgcattcgggaattcgttgcctcgtgacaaggcaatgatggatgagttgatcaaaagctaccgaagcgctcaatccgctcagagcctgatcagccaggcaagcggcctttccgccaactcggcccagaatcttccgcatgctaaagaaatctggcaggcacgggacaagatcgcgtcttcgacagataccttgatcgcttcggtgaaggctttgccggatgcacgggccatcaacccaactctcgtggcagtcctgggtgctctaactatcggtctcgcgatcctgagtgtcctcttggtggctcgtgtatctgcttctcgggctcaggcggttgaaacccgcggcagcacgattgagggtagtcagcgtgaacggtccaaggagctgagtctccttttgactgaaattgagcgagtagggcggggagagttggaccttaccctgacagatgatcgcgattccaccaaagagatcgcgaaactgctcaaccaggtattcgcgcggttccatgagattttcaccgaaaccagccagaccgtaatggggcttgctgcggcgacggaacaaaccatcaccacagctcgcaatgttgaccgcaatcgtgacgagcaattccgggcgatcgagcacatcagctctctgatcgcagacatgaataccttcatcaatctgatccagcagctcatgggtgatacccagcgcgttgccaacagcgtggctaacaaagtccacgccggcagtgagtctgtgaatggtgtgcacgaaggtattttggtccagacccagcacctgaactctatccagcatcgaaacaagcatctgatcgaacggttccagatgctggaaaggatcagtgagttcgtaaaagaggttgcgacaaagtccgagctggttgcttacaacgcctacctggtatcggaccaagtcgagggcaataccgagctgtcccgtgcgatggctaagagcggtgaagcggtccaggacctcagcacccagtcgaaagctgtggtgagcgagattgggcaactgctcaaggacatgaatgaagctgctcgcgatacccagaccgctgttgacatatcactgagcgaaatgcagggcctgctgacccgctccaatgcggcgctcgcttccctgaaagacattcagagcattactgagagcctcaccacgagtgttgacgacgtcaatcagcggaccaatagcctcatttctcagtcgtccgaggtatccgagacgatgagctctattcgtcactacgcttccgaaaactcggctgcgagcgagcagactgcatctgcaatgaacaacctgaatcgccaagctcagaacctgcacagtggcattcaagacttctacagcaagcaacgcgaacgcgcatga

SEQ ID NO: 333939 - DNA, 255 bp, Pseudomonas aeruginosa
atggtcacctttgagcagcacaacattcttgctgagcgtccggtgaacttcaccgctcctgacgtgatcatcacccagaacatgctgatctattaccgcgtcgaaacgcggcacctaatactgcagaagctggcggccatgttgccgattggggggtacttactgaccggccccgcagaggacggtaactggaatccgctggggttgaagcgactccctaaccaccttctcaatctctttgtaagggttgcttag

SEQ ID NO: 333940 - DNA, 5766 bp, Pseudomonas aeruginosa
atgcccaagaatgtccacgcggcacatctttcctggattcggcccccgatcatcaagagcgtcgagatcgccaaggcgtctatcgacacctacttcaaaaaacatgctgatctacagaatcctcctcaaggggcacaggctgaatggtttgccaaccagaagaaggcgatggccgatgcattccgcaacgtcagtgaacacgtagagttgattcactctgcgctgactgtctgcgatagccccggaggctcggctttatcggttgaaatgcgggtagtctgcaccagtgtccaagaaaaactcctcgaagaggagaaggtggcccccgcaattctcgccatgatgtccggcatgatcatgctgccaaactatctcaagatggtcattgatggagcccctgatgctcctggcatcctctccaggcagatcaatgaaatccgtgaggtcaggggcgttcccttgcttgtcgaggacagcctcccccctagcatgctctcattcgagtttgttgatcctccccgcaagattcataacgttgacgatgcccggcagcaggaggtcttctcgacctcatctcgtcgcttccagacagccttcagttcctacattgggacccagaacaaaggggcgctggcggacatgcgccaggtcctccgagaactccaggaagtttctcataagccggaagtgggcgatttctggtgggttggtgagtgtctactcgaggcacttgccatcgggggccttcgtagtggcggtaacaccgtctcccaggtccgcatgctctctgtcgcggttcagaaaatcggtctaggtggtgaagaagccgccctggaagtcctgggtatcgatcgcttcaagtcgttgctctacgtactgagcctaagttcaaaaagcacgcctagcatcgaagccgcgttgagggtgttcaatgtcgggaagtcagtcgacaccgactcgttggcaaagcttcagagcaagctcgaatctactgaggctacaaccattgctgacgtcgtcctggagctgaagcctcttctggatgcagccatggtctctctggggcgggccctgggggcacgctctgacgacatcttcagtgtccagctgtctgcatatagcgcggcgatgcgttcagtagcgaacgtgttctatatggtgggcgaggatgagcttgcaggggttgccaataagtccatcgcactcgtggctggcaaggaaggtatttctgccatcgctgccgaggtggtagacgatctgaagtcttacatcctctacctcgacgagcgcatcaatctcatcaatgaaaatgacgcgacaaaggcactgaacattgagggtgtcggtgccgacgttctggacacactcgtctcggaatgtttgatcgaagtggtgaagactcgtcgttccgtttcggttcacgtagaaagtggcattggccaggatgaactgaaggacggacttgcatctctcgtcaatactgctgcggccttgaagttttcgggagcagaacaggttggtgatttgctcggtgcagtctgctctgggatggtaggtctcctagataatgcggaactcacgtacagcccggagctggatctgctggcgaaagccttggtggcgattgagatgtacctcgaagccatcaaatccaaacttgaacctgatcccgaaaacctgacgaaggcagctgaagctctccgcgaactcgggatagatttcacggaggtggctccggtaaccaccaacgaacttttgattaaatttgaggcagcccaggaagaggtacgcgaagacgatgatccgttcctcaccgagcttttcgagctgaggagcgtcttcgaagatagcttcacgagcctcgacctgcgtagtcgttcgtccattgagcaactctacaaggctgcagaccgcctctccatggccgcccgtatgcacggtcatgagtcgttcggaaagatcgccagtggtgttgctgccttcagcaaaggcgtaacaaaccgagccctcaaagaggatttcgaccatgcggaggagcatgacttgctgcgctccggcgtggagatgtgcctccgctgcatggatgaatactctctcaggaacaaggtctccttgtttgtgaaagatgtggccgatgcactcatggctaaagctgatccggaaatgcagttggcatacacgtctcatccagagataccggcatcgtctactaacgcaactcatcagcctgcagtccagaacaagctcgagcaagtcgttgccgagccggatgcagtgatactggcccatgagcaagaacgggaaatgcccgagggcgtcgatccggtcctgatcgatatcttccgtcaggagttcaccgagcaatacgcagcaatgagtgcgtatctcaaaagcgggcgaaaagacgtcaacgaagcgttttgccgtgtcgctcatacccttcatggaatttcgtccagtgctgattgcctcccgcttgcaagtgcatttgcagccctagagactcgcctgttccagttgagaagtgatgaggccgaactgctccagggtgatgtagaagccctcctggatttcctggcagatgctgaacgtttccagcaagctttcccttggaagactgaaactcccgcacttcactcctggctagaggttgtccaggcattggggtgcggagcggaagaggctgagtacgttgaggtcgctcaggtcactccagtttcgcatgctaaaccggaaccggatgctccgcaggaaagtcatcagccggaaaatttgaacccagtttcgcatgctaaaccgggaaactctgaaagcgatgatgtacaagagtccaccaccaagcatgcgcagcagccttctgccccgccggcgattgaatacaacccggagatggctgagttctatattgaagaagccgaggaagttctccctcagcttcagctgaacgtagaccgctggatgggccagatggatgaccatgacctggttaccaccatcaagcggcagatgcatactctgaagggcgctgcagcgatggcagaggcagcttcgatcagagagattacccattacatggaaagcctcttcgagagtctttccctgtccatcattcctgcatcagatgactgcgccaggctggtcgagtatgtgttggtcgcattggatcaaatgactagcgcgatgcgtcgcgctgtcgggtacgaagttccctcggccctgatccgttgcgttgaagctgcagtccagcataatcgagtggatcttggccttcttgctcaagagccctgcacagccggcgaggtcctccttcaagatatccagctagagaaggtggccacccaagatgccagggccgaaaccctagaagcttgtgaagcacaatctatcgcagagcttgaagaagaaacgcctaagactgaagagttcgagcaaggcatcgtccatcctcagggtgaggaaaactctttggcggaggaagagtcaggacacaaaaagactcgtcgcaggtctcgaggaaaaggtggtgcaaaacgacacgcggcccgtatggcagctcacgctcaacccgctcaggaagacagtctggtggtgtcctcggagccggaagactcagtcgaggtcgagagtccagctttgcccgccgtcccggaagctacccccgaagagtctggcaagtcagtgccggcacctgtagcaattcccgaactcgttgaagtcccaccgtcaatttctgccgttactgcacaagagcaggaagtacaccatgagccagagcggcaaagcagaactcttcgcgactcggtcgaaggcataacctctaaatctgccccaaccaagcctgtcagcagctcggtgattcgcgagattctggcgaaagcccatgactccatccacggtgtcggcagcaaacgtcgaagcggtggttcggaaaaaatcaaagtggatcagcgactactggacactgcagtcgagcagtccagcgagctgaccgcagcccgatatcgccaacaggcgctgcatgccgagttgatgatgatcgtaaccatcattcgggagaagctcgaggcgcaacagttgaaccacatgaagttcaccagcgccctgcgtcttcacacaaaccaacccgttccaaccgccttggcccatcaatcggcaggtgattttcagcttgagcgattcaatgatctttcagctctcaatgtgaccatgggggctcaactggcccagaccatccaagacgtcgaggaaatgttcgcacagggcaagctgatcaaagactcctaccgtcaacaggcggggctcatcagcagcctgcaacgagatcttctcgatagccgcctggtaccgttccaaaacattcgtccagccctgaccaatctcatcgagcgtgagtcttcaaaactagggaagaaagtagacaccgtcttcaccggtggcgacgtaatcgtggacaaagtcatgctcgatgctgtgcgtgatccactggtccacctactcaacaatgctctcgaccatggtatcgagcctgaagcacagcggattgctcaagggaaatccgcgcatggcagcttggaggtaaacgtctgccgacgagctaagaacatcgtcatcactgtcaaggacgatggcaaaggcatcgataccgcgatgatcaaggctaaggcactggagaaaggcatcatcaggcaggatgatcaactgaccgaatcggatctcctgagactcatcactcacaatgggttctctactgcagcaaaagtctctcagctgtccggccgcggtgttggtatggacattgtcgctacgacggtagaaagcatgggcggccggctggtaattgagagcaaggtaggctggggtacgaccttcactttggaaatgccattcactatcggctcgaaccgagctctcatctgccgtacgggcagtcaatggtttgcgattcccagctacaccatgtaccagatcatccagtgctcccgagccgatctggaaaaacagcggttggagaaggggaaagcggtacttcatcacgaaggaaagtccttcgaggttgtgcatctggccgaccttcttgcgatgcctgagatgcgttccactcacgatttggaccaggaggtcctggtcattctgtgtcaacaaggcgaaatggctattggtattgaggtcgacagcactgattcaatgcccgagatccacatcaggaagctggacggcatcctttccaaagtgcgcgggatcattggcgagacagagatgcaagacggttcgccggtcttcgtcatcgatgtcatggagctggtgaggctcaacctcaagcggacagacaccggcttcaaggttcggcaaaaccgtgtcaagtctgtgaaacgagatctaaaaccggtctgcctcgtcgttgacgacgctacgagttatcgcaagctgttgcagaagcacttcgaggctcgtgggtatacggtcattactgcccgcgacggtcaggacgcaatggacatgctccctctcgagagactccccgaaatcgtcatggtggacatggaaatgcctcgaatgactggcttggaactcacaaaggcactgcgagcccgggctgaattcaatgaggtaccaatcatcatgctcaccactcgcacaaatctcgaggacgaggccctgcgagctggcgtaaacgtttatctgaacaagccgtgcgacagcatcgcgctcgataacgcgattgcagaagttcgcccagaacaagcattgcaagggtccgctgcatga

SEQ ID NO: 333941 - DNA, 933 bp, Pseudomonas aeruginosa
atgagagtcggtatcatttcaactagcaacgtccaagtggctctcatccaagaggttctctcgccagttgtcggagaactcacggtctatgacatgagccacgtggagaatggagacctgtcagcgactggcgttcacgcactgatcgtcgacttcagcgacgaggcgattctcaactcagaagatgtcctcgaaatgttgggacgagatgagcctgtctgtgtgctcaacgaacgtgagttgtattcgatgagcgctgcagaacgtcaggcctggtgcaacaagcttgtcgatgagcttaagcgaagcatccccgacctcgcagaaagcctagatgcgaggaaagccgagattgaatcccgaaacgcgaacgacacctgggtgatcggctgtagctctggcgggcctcaagctatccgtgattttcttggcgagttacccacgttgccagtcagtattttcctggtccagcacctcaccgaagctgcattcaacacctatgtccagcgggtacgcgaatgtacctcgcggtgggaggtggtcgcggccgagcatggcgccaagcttaaggccggtaccatcttcgttgtcccccgtgacaccacagttgaagtacgaagcggggtgatccaactccggccggtcaagccaaacacctacagcccgtcgattaacagcgtgattcggtctgtgttcagttcgattgcagggaagcttggagtgatcatcctcaccgggatgggggatgacggtgcctcgggaattcgtgatctgaaaggaaaggcgaagatcgttatggcccaggatgcggagtccagccaggcccgttcgatgcctgatgctgctagggaaactggggctgtatccttctcgggtaaaccggccgagcttgcccgacatatgtaccggatgtacggcatcgggaatcactga

SEQ ID NO: 333942 - DNA, 531 bp, Pseudomonas aeruginosa
atgtcccaggcgctgcgcaagatcaccggcaacatcaagaacgccaactgcctggtcatcttcatcaaccagatccgcatgaagatcggcgtgatgtttggcagcccggaaaccaccaccgggggtaacgccctgaagttctacgcctctgtgcgcctggacattcgtcgtaccggatcggtgaaagatggcgatgagcagatcgggaacgaaacccgggtgaaggtggtgaagaacaaagtttctccaccattccgccaggctgaattccaaatcctctatgggaagggtatcaacaagctcggtgagattgttgatcttggggtagctggtggcttgatcgagaagtcgggggcttggtacagctacgcaggtcagaagatcggccaaggcaaggcgaatgcctgccagtatctgcaggagaatcccgcggtcagcgatgagatcgaggcgaagctccgcagccagaaaatcaccggtgttgcggtgatcaccgactctcctggtgatgacgatcaagaggttgcataa

SEQ ID NO: 333943 - DNA, 504 bp, Pseudomonas aeruginosa
atgaatgagcaacagaacaaggcccttcaggcggcactgggccagatcgaaaaacaattcggcaagggcgctgtaatgcgcatgggcgaccacgagcgccagaccattccggcaatcccaaccggctccatggggttggatatcgccttgggcatcgggggcctgccgaaaggtcggatcgtagaaatctacggcccagaatcctcgggcaagaccaccctgaccctgtcggtcatcgccgaagcccagcggcagggcgccacctgcgccttcgtcgacgccgagcacgcgctagacccggattacgccggcaagctgggcgtcaacgttgacgacctgctggtctcgcagccggacactggcgagcaggctctggaaatcacagacatgctggtgcgctccaacgcggtggacgtgatcatcgtcgactccgtggcggcgctggtgcccaaggccgagatcgaaggcgagatgggcgatgcccacgtcggcaggcccgcctga

SEQ ID NO: 333944 - DNA, 897 bp, Pseudomonas aeruginosa
atgagtgccagcatcgccactcttctttttatcgaccccatcaccctcgagtacaaaattttcgggccatgctgccatttctgcccagaccatctgatcgtctctcattaccagccagtagcgttggtggaagtgatcaaagggggtggagatacggtactcggccaacccattggtggcccactcagtgtgggcacggacaacaacgattacacatcgatggcagtccgtatctggcaattgccggactgggcgatcgacatcgcaatgggctatcagtcgtgcaagctttgtggtgttgatgctgctcgcactactaacttttccctgacctctaaattcgacatgtgcggtgcagtggccaaccctatcgtgtcaaagggcgtcagtgcgttcaattcagccctgccgaactgcttcccgaagctgctctacagcaccgagttcgacccgacttggaacaccggatgtcgggacatagcagcagcagaagccattgcgggagtgatttgcaatccgctcactggctcattctccatccctggaatggagatctgcattggacaatggggtggtctatatccccggcaaatggcttcccataacgacaacgcggcgatcgctgccggaattgccgcataccgagcaatccacctcagcggcttcacaatcggcacctttcccttcagcgcggccctctctgttgggaagctgcagcaaactcaaccctggccaaccgtcggtttcaaggccggtagcgctctcctggacacagccatgaggctataccccgtctcccttgaggagctgtatgccttcgtttggtggactcctgtggtctgctgcaaggagtacgaagagatcatgggggtttgctccccaacaatctgcggttga

SEQ ID NO: 333945 - DNA, 546 bp, Pseudomonas aeruginosa
atgcgtgacaacgacgatgcgtttcagacaatcgaggtaccggtaaacctcaacggaacggtgaaggtgcgtgtgcccagtcactgccacccagaagaagtggaaaagctggcgctggagcagttcaaagctcgactcaaccagcccgtgacttttggtgagtctggctactgctcctatgaattccgcggagaggcatggagcaccaaaggccaggcccgggtagggagccttgaatttgaggttcgccatgacatggccttgaacgtctctggggccatggttgctctagcacctgcggcaggacaattcggggctgacaggctccgagctcgactcacagcctacgtatcccgggaagcggtctacatcacgggtcgtaaacctggtaccgacctagagcatgtaatggtgatggtcgacatccaggacggagaaccgacggtgaacgtgatgtcgccagacggcgatgaccagtttgacgctgacggtagcatgccgatggtcagtgtgggcttcccgggtatgtgctggaacctcaactga

SEQ ID NO: 333946 - DNA, 1569 bp, Pseudomonas aeruginosa
atgagccacaccgaccgctctaacctgactgaaggcaccaacactaagctcgattgccgcatagtcaaccaggaggcccgtaagggcttcctgttgcctaactcactcccggccctgccttctttggaaggcccaaaggctttgctttctctgaaccaggaacagtccctgggctaccgcatcattcttggccaactcagcctgctgaaagcaatttcgagcgacaccagcattctccaagggctggtgaccgacatttggaactccattggcgagaacgatagcgtcgataaggccgccgcactgatcttccaggacggagcatgggttcgcgcgggctcaattcctgacagtgagtttgcatccattcttcgcaagaaactgaacaccatccagaccctgattgcggaactgaaagcgttcgctcttcccggcttcgaggacaatctgttcgtggcagctgtccgagacgaaatccagaagaaggttctggagatcctgccctacgacctcatcctcaaccgcgcggccggagaattccgaaccaagtgcaaggagctgtccagcctctgcaaaggcctggtgaagtacatctcagaggaggttcgccttcctcgttccaaggtcgcaagaatcatcaatgggaaatggacgtcacccaagctgatgcctggtctgatgctctctgggggctacgagttgaaactatatcctcagaaagagttgcgccggctgcgccaagagatcgttgaaaagcagcgggacatcctttctgcggcgtcgactgcagatatgccggccgagcagctgctggccgccttggagggattcaactctgccgagcgggttgttcacgagaccgtagggttctttgccaatgcgaatatgcgcctggttgaccagatcgtctctgggtatcgctttgccacagacctcgagcaagtccgttcggcagctcaacttggcctcgtgagaagcatctaccggtacgcaccggagatgggcttcaaattttcgacactgggcatgacttggattcgtcaaacgatcctgcgtgacctcacccaacaggagctgatccgtttgcccgaaggatcacatggagccttgagcaagcttacagctgctctgaaggagcaaccgaatgcatccaaaaagcacctgagcaaggtttgtggactctcgatggatgacgtcgagaatctcctctacttcgtgggtgtaggaaagcccatgtctattgactccaccttccaggagagtggcagttcagaggcggaggggatgcacgatctgctcgcggactcgaacaacagctttgttgaggaggtgatggaggaggatgccgccggctacataactgaggtgctcggggacgttctcaaccagcgggaactgcaggtagtggttgcacgctatggtattggaggagcggaagcccagactcttgcgaccctctccgagatcatgggtgtttcgaaggagcgggtacgtcagatcgaatgtgaggcgctgaaaaagctgagagaaagtgagcacgcagaatgcctgctggagattttggaatga

SEQ ID NO: 333947 - DNA, 570 bp, Pseudomonas aeruginosa
atgggcatggtagaactccagatcgagaaaagctcatccatgaagttcattctgcctgttgcatgccttgaggacgttgccagttttgccagccacggctacgtcaccatcacccactctggcaatctggtcagttttaccgcagtcaatgggaccatgacctcccgccttgtcgacggggccttccctaactactgcgctctcattgagcgtgcagagactggtcaacagatcaacttgaaccgtgatgcgattacgagcgctgttgctcgtgtcagtctcctctcggatggtaagtcccaggcagtccgcctcaagttttgccaacaaacggtcgaggtcgtctctgtgtcgaatgatgccctttcagaagccgaagacctgctgccgtgtgacttcgatgcggcccctttcgatgttgggttcaacagtcgctacgcacaggaagctttcaaagctgtatccagcaccgacctgcaacttttttattccggccctgcttctggcacgctcattaaggccaaagactgcccccatcagaaattcgtactcatgccggttcgcctgtaa

SEQ ID NO: 333948 - DNA, 489 bp, Pseudomonas aeruginosa
atgaagttcactgtccaggctgcacctttagctgccattctcaaacagtgcggtcgtgtcgcatctaagaaggccggggatatcaacggcaatttcctgatcgatgttcaggatggccacctcaatgtaacggcgaacaatggccaccagcagatgagccttcacctgcaggacccaaccctgatcgttcgtgaagctggctccgtctgcatctcggcatccaaattcgaacaaatcgtttcctctcttcccgtagatcgtgatgtgactgtatccgtgggcgaggagaaagccactgtcacctgtggacgctcacgattcagcatcgccaccctacctgcgtcttctttccccaaggctttgcattccgatggccaggtccaaacggcactgactatcgagtcgcatgccttgagggacggcatccgtggtatcgcattttgcgttgcccggaacgatgtgcgtcagtacctgaacgggatgcggtga

SEQ ID NO: 333949 - DNA, 1032 bp, Pseudomonas aeruginosa
atgcgaaaccggtcttgttgcccaccaggtcgagctgccagcgtgaaggcctggaatctgggagtcatactgttccccatactcatgggagggtgcgcggttgaacaacctcgctgggtaacggataggcccgctgcgtactgttacaaaactgctgacaaggtatgtcttgcggacctgatttcggcccacctacagaaagctcctggcggtacgattcgtgatgacgctatgtggagagccgccgctgcggttcgaattgcaggagctcagttcccagagactctgaaatcgcttcagtcctcagtagaggcgttttcctgcactgccaaaaggttctactgggacgaagcctccgcagcagtccaagaagctcagcagggacgatttcggaatgcactatccgccgcccaacagatcgatgggaaggacgcccgtacctatgccctttcgctgatcgtgcagatctcttccgaggccaaggatgacaaagcccttggtaaagccctggatgtattaagcaaagacgatgagcgagcttacatggatgccttgcttcttcggctgcaggtgttactcgctcagggagatctggagcgatcctcggctctccagaaccaccttcttgcttttttcgccaaagacccagagacaggggttgaaccagctacagaaatggcaatcacctatctgtcgcaggggttaaagctcgatgctcgggatttcctggtcagggccgctgatgggattccaggggtgaggtctgcggacaacctgaagctgttcaatcttgtcggccaggtcatcgatgggtaccgccccatacccgatgacttctaccagttcagctctgattcggcacgtttgcgggcttatctggtggtggcgcggtactaccgaaacaccgggaatcgggcaatggtcacttctatgctggccgacgcatctcgcttcacccaaaaggcaagtttcaaagccaatcgcaccgaggtcgcaagccggttagctgacttcctccgcgattcgcactag

SEQ ID NO: 333950 - DNA, 753 bp, Pseudomonas aeruginosa
atgatggattttgaaacaccgccaatcttcgacccatacgagcacagaccgtttcaaggttatatgtgcagcgaaggccggcaagtggagacctatctctctctcatgcacttcattgaggctgagaaattccgcggtttggacgagggctaccgtcggtacattctgagtatcgaggaccgcgatgacttcatcctcgaaacagcaggaatcacccagggtgtccgccgaccggactgggatgagatcaaagcaccaatggtccgcgcagggctctggatgcaactggtacagcacaaagatgcaatggtgccgctcataacacatccaggatgtgagtgccctgtgggtctggtcaatgaggcgattcaagagatatacgagcggcttcattctggcgatccattgcgaaaagtcttgctcgccggggacgattcgcctaatgccttgaggagttcgtcttttgatgaggtcctcgatcacatcttcaacgtccggcagcctgacgaagtaatcgtctcggctgatggcggggtatccatgcgatctgctgcttatgcggcacgacgctacattccgctgcggtttcttcctcgggttcaaagcgcaggagagtttgcgaagaacgcgatcagccaggccacccatgtctttcttttgggcaccaatggccaagcttcctttgctcaagcagcatacgatttagcatgcgaaaccggtcttgttgcccaccaggtcgagctgccagcgtga

SEQ ID NO: 333951 - DNA, 1413 bp, Pseudomonas aeruginosa
atgccaaccatacacttctacgacacagtcactgccgggcgctctccaaccgagggccaggttattcgctttgactcggcggtctatccagcccgaggatcggtagacctctcaactaccaacatcaagctccgagacgacgtatacctcgatcctgatgttgtgatgaatagtgacttggccctactggcgttcgaccagggttgcagcgaagtagagtgggccaggagggtcttcgcggatttcacccgaccaaacactctccatatagcctttggatcaacgacaaggcacgatccattcattcgagcatccttttaccggaatctgctcccgtacccctgcctgggcgtacctgacactgcccacttcctcgatctggatgtactacttcgagcaattctcctgatccgtccaggagaatgcccttgggatgttgagacgcttactggtggagcagccggcctctaccagttcctcatgtgggacgcgggactcggcactgagaaccgggcacttcgggtcaaagaggttctttccaaaatctcggaagcgagcccgaagcttctccaccatgccgtcacagtcagctctccttcccagatcaaggcactcttgggccttgatgggggtgaagtctgggacctgcggagtgtgaagcctgtggtgatggtccacccctcgctccccgacaatcgtggcgcaatcctcgctatgccagtggcagctgacgtgagttatcccgacctgatctgcatggtggacttagaggctgacctttcaagcttatgctcagactccacggagtcactccagcatttgtctagggcaaacaaaggggaccgctccgcgccgcttttccacatcagtatgtcccgaattcccttcgtggccccgctgagcgcaattcgaccggatgatgctaagcgcctgggcatcaatgtctccgcagtgaaggcgaacatccagcgcctgacatcagcgaaacacctggtggccagattgcgggatgaaccagtgctgcagctaaacgcacagcccgcagacgttgaccaccgaatgtgggcgggtgatttcccttcaactgacctcgacctaatgcgccagctgcattcttcggggttcaattcctggcaggacctcctcttaactggcactgaccgccgacttcgggatctcggtaaccggatgcttggtaggtaccagcctgatgccctatcgcctagcgaccgaggagtatggctgcggcatgtggatcagagagtccggggagatttcagcggttcgtttcggctggaacagctcatggaacgagcggaggatatgtgtcagcagtacccgacggcagcaggtgtccagggctttcgggaacgacttcatcgtttgaaggggatggtcaatgatggattttga

SEQ ID NO: 333952 - DNA, 822 bp, Pseudomonas aeruginosa
atgggggccgttcagaatttgatcccggaaaccatcagcttcaagactccagactcatggctgtcgagcgcgccacgaattgtcgtcatcggggctggtgggaacggcagcgaagtagtggattgcctcgcccagttccatcacgccatgatttcgctcgggcacaagcatggcctgcatgtcaccatcatcgacgactccgttgtacgcgaaccgaatcttgtacgtcagcgtttctggccttgcgacctcggccagtacaaagcaatcagtctggccaatcgatacaacctgatgctggggatgaaatgggagggactcccctatcgcttcccctctcgcgcaactgatgacgctatcggcaatgctgatctcatcatttcagcagtagacctaccctcggcccgtgtggccatcggcgcctgcgaagcggtcaaacataactgcatgtggctcgacctcgggaatggacaccgtcatggtcaggtggttttcggtggtatcaacaaagtcatgcgcgaccgattcccgaatgtcctcgacgcctacccggaaattccatcgttggaagatgaccacaccaaatcttgctcagcagccgagtccattcgtactcaggactgccttgtgaaccgtgcggtgaccacggcagggatgggcatcgtgtgggagttactgcgtactggtgaaacgtccaagcattggcttgtgctgaacttgggcacaggagagcagatgagttaccccttccctcctcctgcgccaaaacagacgaaggcaacaggcaagaaagggaaggtatcgaaactcagaaaagtgtga

SEQ ID NO: 333953 - DNA, 693 bp, Pseudomonas aeruginosa
atgctcagtgaaaaagtcgaatgccgcgccatgctcatccatcgccacgtcgagacccatcgactggatatcaccagccatgaggtcctgccactggagggggggaaaaccttcacccttggtgctggccgagccttttcgagcctggacaaggaggtgctgatcgacctccttcgtgaagaagaacccagcatcgagttcctgcctgagaacctgctggtgcggggccgcaacaaattggtgtggtacaccgctccccaggtgctggaaatcccgttccgtggcgagattatcaaagcaccaatccccggcctcatttacttggctggcggcgtgctgcgctgctatgcctacaaaggcaagagccgtccgacgccggaaactgaactgcacttcgctccgctgggcaacacctataacaacggtacattctgctcaggtaacgtcaatctgccgcgagaaatcctgatcgagaacatccccatctggcagcgttttgtcttggagagcacgaatacccacggcggaggggttatccccctaaagggtatcaaggacttcaaagagttggtgcagttctaccgcgacctttcagccaagcaagcgaagaagttccctgaccgttgcctcaagctctcggaagtcaaaggtaagcctctgaccctaaaagcagcaatcaatggggagggttga

SEQ ID NO: 333954 - DNA, 1377 bp, Pseudomonas aeruginosa
atgggcgctcttgaactctccagcttctcccggaactatcaattcccaagttccgcgctgagccctctggctctcccgcaggtcaccacggccatgcgggaggcccatagccgcgcttttggcgaatacagccaccttgtagatcgcaagagccatgctgccttctgtcttgatgcgcatgaaggcggcctgatcagtgacaaggagttggattggctcaacgcctatccaaacgactatggcttgcacctggtcaccaacgaggtgatcggggccattgaatcccgaattgggttctcaaaggtcgggctgattcctggagtcaagcgacgtaccaagctcattggaaccccagcgtacgaactccaacccgcagcgcaaaccacgctggcgtgcatcgaagcaggactcttcactgctgagtcggtagaggacttggtcgccctcggccccaactgtgcctaccacctcatacagaaggtcgagcaaagccttgttgatctggctactgccgattgcccggatgtaaaggattggctctacctcggcgttcagggggcgaagttcatcatcagtgccaagtatttcaaccggtacgagttgaccttgccagcagaggactgcgaggaattccgtgaggtagcagtcttccttttcaaagcactggacgccatgtccacgtaccttgttcatttccacacgccatccagcttcatgggcgtttacagctacgacaatcatgggttggcggacgcatatggtgcgatcaaagaacgcattcagaactcctcccctgaagaattgaccgcttacctgctggagacaccagaggatcaattcccctttgaagcatggcccatggggatcgaaggtgacgaccgcgatgaagactacatcgagggggtcgcgtatcagttgaaagaattggacaacctgactcgacgcacccatttcaccttgacgcatgagcaggactccaaccacccagtcgaaattcaagagttgattgaacaggttcaggattcgatcaacgcaggcagcccgttcaagcctgttctggaagtgatcaaggaagcatttgagctttgccatcggtacgcagtagagggcagtcgagcaatcagtgagcacgaccttcagggttcagcggaggaaggggtaggtgtgttcgagacgctggttgtgacgattcatggtgagtacagctcgctcgaagatgaagcctgcaacggattcgatgaccgggtgagcggtgtgggcgatctgcatttggcgcttccactggatggagagcttctggcacagcagaccgtgacgatactggacaaaaccaagcagtgcgtatcgctgcttagccgcctcacccaagctctctaa

SEQ ID NO: 333955 - DNA, 213 bp, Pseudomonas aeruginosa
atgagcatcgcaatcgtcaccctggaccgagtgttccgttatgccgggcgcgacttggacgatcccgatccgagcatggagccgagcgacgtgctgaagcactacagccgccagttcccacgactggtaggcgccaagattgttgaacctatctctgagggcgaccgctatgtctatgaattccgtgaagccagcttcggagacaagggttaa

SEQ ID NO: 333956 - DNA, 495 bp, Pseudomonas aeruginosa
atgaacaccttcttcaccgctatcagccaggcgctgaccgacagcaacaaacgcatcaacatcgacgtctccggcctcgaaggaggccgtgtgaaagtggtgctgagtgcaaacatcggccccacccctgcaaaggcttccgaagccgagatcaaactgcgcgcagccatcgccaagccgatgatgctgtcgggcaccccggaagaagtggaaaccgcgctgttcgagcgtgtccgcagtcatgcggaagtagtgaaccacggcatgtccgccctggacgaaatccgcaagctgagcgaggcggcagtgcaagcatcgaagcctgctcctagcgcacccaccgccgcgaaagggaacagcgctgcagcagaggacgatagcgacgattccgatctggaaagtggctctgagccggcaaccaagccgtccgcctccccagctccgtcccaagcggcggctcccgcccccttcgccaatctcgctgaacgattctga

SEQ ID NO: 333957 - DNA, 1833 bp, Pseudomonas aeruginosa
atgaccgccgtgattcagcacatccccacccaagacgcagcctccgcagaacaggccgatatgcagcatgtagctgttgcccgcattcgccgcaaccctacagtcgatccccgtaagggccggaacaccgctctctactctcagatcaaagagagcatccgtcagcatggggtacagcagccgatcatcatccgcccggttgatgagcccgagttcgactatgaggtagtcgcaggcaacacccgctggcaggcttccgtcgatctggaactcctgacaatcccagcgatcatccgtgacctcactgaggctcaagcacggatcatcgcggccatcgagaacatgcaacgtgcggatttgaccccgattgaagaagcacagcatgccgttgttgttctggctgactgtggcaacgatcacgcggaggtgatgaagctgcttggctggtcccgtccccgcctcgatagtcggatcatgctttcccgcgcctgcccggaagtccgcgatgctctgctgcaaggtcaaattaagatcggccacgctgaattgctgtgccgtctggtggaaagcgagcaggcgcccatcctggccaagatcatcgatcaaaacctgacggttaaagacacccaggaccgtctctttacgattgcccgcgatatctcgtccgctcgcttcgataccaaggactgcgcgtcatgccgccacaactcggctgcttacgtggacctgttcgatacctcagtagccggtgccaaatgccagaacgccacctgctggaatcagaaagctagccaactgatcgaggtcaaactcatcgaggcccgtgacgagttcggggtagtgcataccgacctgacactgccaaaggacggctatgtccaactggaagcgaaagggccgaatggcgttggtgatagccagatcacggcctgcctgtcctgctccaactatggggccgtcgtgagtaccacagcgggtcacgaagggaccgttgcaggaggctactgcttcgaccgtaactgcaacaaggacatgcgtgaagcctacaaggccgcactcgcagaagcggctgggcagcaaaacccccatgagccggctaacaatcgctcgactgaaccgctgtccaaaactgcctcggccaccactccggcatcgaaacaagctgcgggcaagagcaaggacaagcctgcacaaccgcaggcgttgaaaaagtccattcgccgtgaggcattcaacctctatggccaaatgggttccaaggcagttcaaggcaatcgcaggctcgccttggccatcgccgtcgtcagcatgtacctggagatgcgcagcagcttgcctcacgagctggccaaccggatcaagaagaagctgggcatgcctgaagccatgctggacagcagccgctgcaatgtggaggtagaactggccaagctggaggaatcagagctgctggagctgctgaccaatctcgcctcctgcaccaccttccgtaacgatagcgccgactctttcgagaagtcgctgccgggtagtcagtcgattgcctacatcaaacatgaaggcatgcagccggttgaacatttccagatgagcgagaactacctcaaatctctggtgaaagcgggaattatcgcggactgcaagcgctcgggattcgaggcgaagtacaacgaggtccacggcgacaaggctttcgtcaagctctcgaccgagaaaacagacaccctgatcaaagcggtactggaattcaaagaattctcttgggccgggtatctccccgaagcatttgagatttctgttcaggccggttctggcacacgtcgctcggcctaa

SEQ ID NO: 333958 - DNA, 777 bp, Pseudomonas aeruginosa
atgacttggagctatttgcgtagagacttcctccctcccctggccatttgcactttttgtcgtcggccattgcacagtgaaaagggcatcgtcatcaccgatgaggtcggtaccgaagctttcgctggccccagctgcgctaagaagcatctggggcagccggaagagcggctgcttgatgtatcgcgcctggccctactggttgtggctgacgaaccagcgcagcacaacgaatcggccccaacaccggcaagtccagctccagagataggggctggaagttcaccaacctctagcccacaacgccctcctctcccgcccatagacgaggtagtgcaatacgttcgcctccgatgtgaagcaatgaacggcttcaagttcgctgtatcgaaggtgttgaagctggctcacgacgagtacaaacaaagcggagagatcgaagatgatctccgcaagcagatcggcggcgctatgcgtaacgcggcggccaacaaatcggtcctgagcccaatcaacgtcaaacgctgcattggcctcaaccactggcttgtggaggcggttcagcacacgaataaggatcgacgcgagttcctggagcagatgcaaacgcacctccaccgtttctggatgctcactccaaagcagatggccgcgataaatcgttggggcgagcacatccggaagcgaatagacgatttcccgctcctcgatgaggaagcgttctcaggcgtcacccttcccgagttcatgcaacggaatccatccagccgccgataa

SEQ ID NO: 333959 - DNA, 465 bp, Pseudomonas aeruginosa
gtgatcaagcgacttctccccttgcttcttgtaattgctggcagtgccgaggcaagccaagctcaagtctctgtcatcgtgggtaccaatgagccggaggtgttcattgtgccgttcgacggccaagctcacgagctggacatccgtgattctcatcgctaccacgctgcatttgtcgacccggcgacgaagcgcgaaatctgccgtgatggtgaatacaagacgggactggtgctgaagctgcgttcgcttccgatcgaaggaactgaacagccgatcgaggtgttggggatggtttccgctctcagcgccatcaatgacggcgcaaaactcaagtgcgggaccaatcaggaggtcaagctgacgaacaccgccttgtctgacactgttcggctgcagcccaacaagaccaagccaatggtcatagacggcaaatggaccgtcttgctcaaaatgcagcgctga

SEQ ID NO: 333960 - DNA, 363 bp, Pseudomonas aeruginosa
atgacccaactcgctgcggcgacaaagtcggttctgcaatttgaaggtaaagcactggcttgcccgttcagcaaactgactgccaatgagcttctggagtacatcctgggctactacgagagtttgcacccaagcttcatccgcatcgagtacccggtaggcaaggaggaattcctctacaacatcctgaaggatggctatgggttggcaccaattaccagctggggacctgcccaggtggaagtattggtggtctcagccgaagacctgaaagcaacccccaaagaccagctggaccatgactcgttcatggaacaagcggcctggcgtctcatcacccgcacctttgctgaaaaactgtga

SEQ ID NO: 333961 - DNA, 636 bp, Pseudomonas aeruginosa
atgcgaatcatcacgctcgttcctctcgctgctctggccgtagccttgtcgggttgcgctaacaaggagttgcaagagacctcctacagttacgaatcgaaggctcactccgggactgtccaggttgtcgagcgtactgatggtccttcggatcagtgccccaaattttggcgggatggggagccgtatcaaccgaccgggctgaagcaaatgactggcttccggctgaaagtgaatctccatagcggctcggattcgagccacggtcaggacctggacttcgttctgccttcgaacaatgggcatcaggtagtcatgaaagactttcagaaggagcggtcttggctgctgggtgtcgacacaaatgggctggtgaaaacaggcgaacttttccattaccccgaaggattcttcatccgtgctgcaagccctcagatctcggacaacacgatcagcttctgcctcggggtggatcggatgtacgtaccgcaggctgacctgaacagcagcaccaatccactgatccggttggatcgcttgaatattcggtttgccggcgagagtggtgaggtcgttcggtatgacttcgggacagttgatccgattcgggtgactgtgtctgcggaggccctatga

SEQ ID NO: 333962 - DNA, 279 bp, Pseudomonas aeruginosa
atgagcactccgcaagaaatggcctggctcacgacgatttctgtgcccacggtgcaagctggagagaagtatgtgcgccttacaggactacccgataaccgtaggaaggacgcttggaagacgatcacgagtaaccatcctgggttagcggatctccttcggtcacctgagctaaaggaagtcgtcgcgttcttcgacgcagacatttacgtcgatgcggaggtggtgcctgctttgccggcggagccactcaaagggcgaaagcaggccgtaccctaa

SEQ ID NO: 333963 - DNA, 399 bp, Pseudomonas aeruginosa
atgcccaacaacagccagaactccctcaccagccgggcaaagacctggctttctgctccacgaactctcgaggaaatccaggacgctcatttgaggctggtcaagaaaacccagaaggataagtcgatcgacccgcaggacggtcgaacagctctcgaggcactgattgaagggtacgtggacgctggcggtgaaatgttcgatctgtaccaagcaccggaagagcaccagggtgcccaaaccgacaaagcggccgtgacgacggcctcggtgatagatctgtccccgctttgtcctgacgttcaaccaactccacctttgaccatggaggagaaagccaaggcaattcagaacatccgagcaatgcttgcccggcccagccaggtgtcgccccaatga

SEQ ID NO: 333964 - DNA, 201 bp, Pseudomonas aeruginosa
ttggccgggccgcgggcccagatccagatcatgggcgaagcctcggtgctggcggcggccgagatacaggtcatggtccagatcgtggacgaagccgcggtgtacgccgggggctggttgcgggccggggccagaatcatggacggagccttcgtgtgcgacgttggcctggcgcgggtccaggccaatatcgtggggtga

SEQ ID NO: 333965 - DNA, 1020 bp, Pseudomonas aeruginosa
atgtctacccaatacagtcacctgagtaccgaggagcgcgtcaccatcatggtgatgctatttcaacggcagacgctacgaactattgctgcgttgctagggcgtcaccccagcaccattagtcgagagatcaagcgcaacccccagcagccccactatgacgccatcaaagccacaagtagggcacaacagcttcgacatatgcctcgtcgtcaacggcgtttatctccagactctgagctgtttcaagtggtcgtcgaaatgctccgcattggctggtcaccacaacaaattgcccgcagactacacgctatctggcctgaccaacccgagcgacatgtgagccacgaaactatctacctcgccatctatgcctacccacgcggagagctgaaacgtcagctgatcagttatctacgtcaagcagacggcaagcgtcctaagcgaacacagagcaatgtgcgtcgagagcgctatcctgcacaactgagtattcacctacgccctcccgaagttgcagatcgtctggtacctgggcattgggagagtgatctgattatgggggccaataatcgctcagccgtcgccacaatggtcgaacgcacaagccgatatgtaatcctcgccaaacttgaagcccccaccgctgaagcggcggcggaagccattgtaagggagatgtcgcggatggccccatcactactaaaaaccatgacacatgatcaaggcagcgaaatggcccgccatgccgaaatcacggcgcgaacggggatgaagatctatttcgccgatccacattcgccttggcagcgcggtagcaatgaaaatacgaacggattgttgcgtcagtatctcccgaaaggcacagatctctctctagtgacgcaagcgcgactggatgaaatcgctgatttgctcaatacgcgccctcggcagacactgggctggaagttcccagttgaggtgctagtagattatcttcagctctcagcgaccaataagcttacaacaataaattga

SEQ ID NO: 333966 - DNA, 1188 bp, Pseudomonas aeruginosa
atggatgtaatcgaatcacagaacgacttgctcacaggcctcgattgtaattcgcaatccctctcgaggaaagaaacgggagtcgtagcccgtttgaatagcatcagaagcaaagctactggaaaaagaatccaggagcctgcggcatcatcaaccctgcccttgttctcggcataccagatcactcttgatgataacgatctgggaaatctggtgagcatttacgatgcgcttccacggttcgcatggtctgggaagactgtacgttcagtcgccgaaatgactattgttaaggaaggtacgattaacggggagccgtttcgtgtaattcttaaagccgttccaatgcagaaacggctcaaggtggatggcaagctatctaagcaagtagaagatgttggtgttttccccggcgctcgtgaggagttcgttgaagaggcacttcgcaaattttcaactcaaggcaatgccaaatttaacgaggctgagtgctctgttcaatttactctttatgaactacagaaagagcttcagtcgcagaagcatacttatacgtacgcagagctccgggaagccttagaaatcctcagcgaagctcctcttactatccagactcggacggcggatggcgaggtgattgacattaaatcgacctaccttcctttcctagctattcgtagtagaaataaaagaagctccgcatacgtgcagccctctccggatgacgaccctgagagttcagtgctttgcaaagctgttcttcacccgcttatttcaagaagcatcgcaaatggtgattaccggctttatcaatacacaacatccatggggcttacgaatggcattgctcgtgtcctatacaggatgctttccttcaaatggcgaaacgcatctccaagccatccgtatactttttcactggtagatttcttatctaacactgcccgaggactttcaaaccgcatgccggaagactttcgcgcaatgaacattgcgttggagcagttagttaaagagaaggctatccagcgttacgaacacaccaaaattgccaaatcaaaagggaaaggagcaaaagactatacctacaaactctggcctactaatgagtttgtttccactatcatcaaagggcaccaagcggaagctcgtcgagaaatccagttgatggcaaagcgggcgcgttga

SEQ ID NO: 333967 - DNA, 360 bp, Pseudomonas aeruginosa
atggtttcgaaagtccagcaggttgcagcgattgaagctcagatccaggatcttcaaaagcaacgagaagagatcatcaacagccctggataccaatccgaggccgagttcaacggcaagctgaatgagctccttggctcctacggaaaaggcttgaaggacgtcatcgccattcttgatccagaccggcgagcgccagagaaagtcgatcgcaaaggtgctcgtcgtgctcgcacgctgaagcgcttcaagaatcctcacaccggggaagtggttgaaaccaaaggtggtaaccacaaaaccctgaaggagtggaaggagaagtggggcgccgatactgtcaagggctgggcacagtaa

SEQ ID NO: 333968 - DNA, 435 bp, Pseudomonas aeruginosa
gtgaagcaggtaatcccccacaaacgactgatactcatcgtgagtttcgcagcctctatcgcggctacgattggtgcgattcagtacagccacacaacgccaggcgcgttgccggtaaccacctccacagagtcgagcgatgagatcgtgaaggcttcaattcaggaggattttctgaaggcccccgccaagttcgacatctccacggcggcgaaaaggctgtcggacgtcaccatcgaagggggctatcacatttgctctcctaaggacgagataacggcggatcagtacatcgacatctcgcgcatgctggacacacagcgctcccatgctgtcgagttcaaaaaagcggttgatctcgcattaagtgcaccggaaggcgtatcagattgcaccttcagggtgctgacgctgatcgatcgagcaacgccgtga

SEQ ID NO: 333969 - DNA, 177 bp, Pseudomonas aeruginosa
atgctcatcctgacccgtaccgtcggcgagaccatcaacatcggtgatgacatcactgtaaccgtggtggctaacaatcaaggtcacattcgcttggggatcaatgccccgaaagatgtgccagtccatcgcgaagagatctatcagcgtatccaggaagaaaatgttgctcggtaa

SEQ ID NO: 333970 - DNA, 336 bp, Pseudomonas aeruginosa
atgttgctcggtaatctgatgcgttcttctctcatcatctgggcagctctggtgtctgggtgcgccgcgggttggattcagagcccgagctcaaccacacgtaacctggtcgaggacctcaaattagaggggttcgtctgcaaggcgaagtggtcagcgatagagtgccgccaggaaacgccatacgtgaagaaggcccccaagatatgcacatcggaaaaagggtgtgtagagcagccgggtgagctgattaccaacgtctacttgatcgaacaagacgcctatggcatcccagccgtaaggcagtgggtggaatctgagccctcaccaaattga

SEQ ID NO: 333971 - DNA, 447 bp, Pseudomonas aeruginosa
atgaacatgcgcgcggcctttgccgcacttttgactcttagtcccatggcagccggcgcggcggatctgcttgagttcaagaacccggtttcttcggaactgcgtgtagaggctattctctgcaaatctccggagtcgcttttcctgctttacgaagggagcacgcttgcgatgaagggtggcggacagaatgcgttccagtcctacttccaagcctccgccacggccctggagaaagctggcgaatgtgttctggaaaaggaaccacagaaggtcaaggtgacggctatggccacactgaccaacccactcaaaatgcccgccggcggcaaagtctacggtcggttcaacatgaaggggcttaaccgtgatgtgtatgcaatgtcggaggacctgccagggctgaccgcctacatcaacaaggcggtgaatactgccgacaaatag

SEQ ID NO: 333972 - DNA, 705 bp, Pseudomonas aeruginosa
atgactcaagacgtcaccagaaacctgtgcgctcggcctgcgcttgagatcatttccaaaggtcgcacggaaatcatcgcctggaaccaggtggttcaaggactgaaggtcttattcaatttcaccggtatcgatgtcaccgagtggaaagaggcagaaccggacatgctcgaactgaggcttgagcgtggtaatcaatcctcgattatttggttcaaacctctggcaaggggtgtcaccgacatgccggtttttcctgtgatggtgggtgccaaattcatggcatgcaaaccgtccgccacgccgcacgacgactgtgagatcacctacttctacttgccttgggactgcacggcacaggatctgatcgatatcgctttcggcgaggtcacctacccgtggatcgagacagtccagaacttctcagctgcctacgctatgtcagctcccatcgagcgcttccctcggtgtgccctcgtcatgctgatggatagcagcacgaaggacgatcagcgtggctcggtctacttcaagctctggcatcaaaccgaaaactcagtagaactcctggagctggagcataccaacagtccattttcagctgctgagcaagcgaagcagcttggctattccccaaccgtctaccgctgccacagcggttgcatcgtcccatttctacccaccagcggattcgatttcctatga

SEQ ID NO: 333973 - DNA, 246 bp, Pseudomonas aeruginosa
atgttcagccccaagcagttcgcaatgaaccatctcggtaccgacgagctacctgacaccctagcgatggagcaggtactggaccttctgctagctgcccataccgcagcaggtgatcagcgttctgacctcgacgagtctcgcatcagggatctgcgtaaggcactggctgacatcgaaagcgctaccaaggacccggtctctgctctagtggcaaagcgggcccttaccaacgatgaggattaa

SEQ ID NO: 333974 - DNA, 921 bp, Pseudomonas aeruginosa
atgtggtttaagcatctgcttgcgtactcccttacccaggacctgcaactcaccgcggaggttctcgaacaggcattgaaaggcaagcctgctcgcccctgtgagaatcaggaactcactacctacggctttaccgcccctctgggaaaagggcctgatgcgccgctcgtgcacgcgagtcagggctttttcctggtagcggcgaagaaggaagaacgcatccttcccggcagcgtggtaaacgatgcggtcaaagagaaggtcgaggaaatcgagactgcgcagtgccggaaggtctacaagaaggaacgtgatcagctgaaggacgacatcatccaggctttcttgccacgcgcgtttgtgcgccgctccaccacgttcgcggcaattgctccaagtctggggctgatcctggttgatacctccagcgcaaaaaaggcggaggacctcctttccacactccgcgaggtcctcgggtccctcccggtgcgcccggtcagcgtcaaggtcgccccaagcgctaccctcactgactgggttaaaactcagaaggcagccggtgacttccatgtcctgagtgactgcgagcttcgagatacccatgaagacggtggctcggtcaaatgcaaagctcaggatttgaccagcgaggaaatccaacttcacctgtccgcgggaaagttggtcacccagctggcgctggcctggtcggataagctgtctttcatccttgacgacaagatggctatcaagcgtctccggtttgaagatctcctgcaggatcaagcagaacaagacggcggcgaggatgccttagcccaatttgatgccagcttcaccttgatgatgctgactttcgccgagttcctaccagcactcttcgaggcactaggcggtatcgaggttccgcaaggcgtctaa

SEQ ID NO: 333975 - DNA, 228 bp, Pseudomonas aeruginosa
atggctcgcatcactttcatgactgatcgagtgatcaatggaaagaaaagctaccacgtgacaaaggatggcccgtgtgtagccaccatctactacgtcgacaaggctgctctcaaggaaaatggcggcgggcttaaccgacctcattgggtcctgaagcatttatcaggaagagtcgatcggcacccctcccttgcagaagcgaaactcgacgcggccaaaatttag

SEQ ID NO: 333976 - DNA, 687 bp, Pseudomonas aeruginosa
atgacactggcaaaaaccaccagttcgacgtttacggttgacgtcctgggggaccaaaaggtgcctggtgacctgattcaccatgccttgatgcaatttctggctgacttttccatcaaggtcaacgaagtcagtacccgggaactgggtgtcgctgagaccttgctcagctgcgctgagcacggcagtgatccgtccttctttggtctgcaggtcgatgccgaccggctggacgagacgatccatacccagctcgagcggtcggtaactagctccctcaatgagggggtgttgagccagatcagttgggtgctgacccatcggggccccgacgctgcgctggacattctcggtgagctcgagatggccacgaatcatgcagtaagcagtttcggcaaagcgatgattcgcgaggtctctctttgggtaatgctcgaggacaatcgacctctgtcgttgatctggagccaggccaccattgatgagtatcagaaagctcagttggcgacacgaaatgattatgtcgacatcgatagccttttgactgatgtgatcctgggcctggtcggtcagaccggagccactatctgcaaccgtacggtattcgagcgggtgcagtggctgtcacaggccatcggcccgcaagccgcaaatggtgtactcgctgacttgacccttcttacctga

SEQ ID NO: 333977 - DNA, 210 bp, Pseudomonas aeruginosa
atgatcaccctcagcaccccaaatggcccaaccgttcaatacgccagcaccgatattgcagtggccatgatggacttcgcgcggacacacatgactggctacctggtccaggcgatcgaagacccagaggccaagttcggcatgcgcttcgaagcaatccaaatcaacaacgaacttacctccacctccaccaccatcaccgtgcactga

SEQ ID NO: 333978 - DNA, 411 bp, Pseudomonas aeruginosa
atgagcactccgagtcgcccgttagtaacgcctatagacctggctgcactccgtgaggcgtttcggctgagccagcaacaggtagccgagattctgggggttcatcgaaccaccgtaatcgactgggagaaagggaaccaacccaactggctacacctggcctgcctggggattcctacaaccctggtgcttcgcagcgcagtgtcggcgctcactgccgaggacctcatttcagcccgcggttacttgaacctcgagcaggccgagctggcatgtcacctaggtgttcacgtccgaacggtccgaacctgggagagcaaaactcctcccacctggttaccgattgcgctcatcggcctttcgctgcagttacaggcccccttctggcacgcccgcatcgcgacaaaatga

SEQ ID NO: 333979 - DNA, 717 bp, Pseudomonas aeruginosa
atgaaaaacacacgctctattgtccgggccccacagatggccctggatttcagctttcagctacctactcacgtttccatcaacagcagatctccagcgctggttcgcgctgaagaggacgaccaggtccaagcgccaagtaaacgcagcgccggcgcagaacttggtgacatggtggttgacgaccgcgtgctctcccaggggatcacgacctggcgaagtctgatcgatttcgcaatccgtaccggacacactgaactctatgaaagcgaggatggacgacaaggtctccgtcggccgggtttccgctatgccccaatttcccggctgccggaacgcgccccggagtatgtgaaagacgtactcacgggccggctcgcatcctacttggagcagaagaagctgcatctgacatcggcaagggttgccgcggacgataccttcaaggcccaggtggtgttggatggctcaaccttccagatctcgatcttcgaaggacgaaagcttgattcgacctggtcgttcaagcttatggatctgccgagaacaccaggactgaaggccgacgatgaggaagcacagcaggcattcgtcgccaaaaggatcaagcgcatccagcgagagggccgtatcgctggcggagacgctcgactgatcagcaaagcagtcattcgagctgtggagtcgatcctcaagaacttcgaggtatcgaaatga

SEQ ID NO: 333980 - DNA, 276 bp, Pseudomonas aeruginosa
atgaacgaaatcttcgagtgggtgggtacgatttgcggaatcaccggggcggcgttgatcgctagtaacgttcgcttatccccttggggatggtggttgtttttgatctcaagcctggccttgtgcagctacggcctaatcgtaggcgcttacgggattctcctactcaacctttgcttcgtcttgacgaacctgcttggcattgtgcgtgtctggctgccgtatatgcgttcgcgtggtcggatcacaaccgtccactccgaaatccacctctga

SEQ ID NO: 333981 - DNA, 402 bp, Pseudomonas aeruginosa
atgaccaacagaggctcgaccctcaatgagcgcatcgatcagcatctgaatgcgctacgcaacacccctcacggccacacctcaggccgcttcctatcattcgtggatgttcccggcgacagtgaaggcaatgtggagggtcctgatcacatcctccgcatcctgatgaatgacgtcgggaacaccgtcggtgaagacttcctcagtaatgtcgactcggtccctttggagcagttttgcctcatgtccgtaattcgtaatgagggcaccggcgggatgctgcgctccttgctcgacagcttcatgtccgcatatgccaatcccgctacctctgatgaggcaatcgccatcctgaagcgcctcgaagagctcaaaactgtgccagttccagcctccaactaa

SEQ ID NO: 333982 - DNA, 243 bp, Pseudomonas aeruginosa
atgatcaccgagtctttcctccgcgttgcattcatggccatgaccctgtttgtcgtggcctgcgctctcaccaccacgctcatgttcggtgagggcaccaccctcaatccgatcgcatggttctgcatcggcagtctttggatggcgttcacccttttcgcgctcctggtcgcctgggccactcatctccaccgcgcccaccgtaaaggccacccggctccggatctggccccagcggtgtaa

SEQ ID NO: 333983 - DNA, 456 bp, Pseudomonas aeruginosa
atgtcgagcaactcgcgtttatatccctaccacccgatctcgggtgatcgtctggccggcacttttgaagtgatcccagcttgggttccccgtgaaatccacaagacaggcgacaccattactcttgaggacggtagcgaaaccctagtgaactggaatggccaagagctcctgcagatcaacaaccagttggtcctggtgactgaaggtggagatacctgcctgaagagtgaggccatctggagtgagcaggacacacagcacatcgaggtctccctgcctggcccggcgtcctcctaccccactaacaacacgctcatgcatgcatacgtggatcttcatgttgcggcatcgtgtgcactccataatctgcagcaaggtgacatcgagggcgctttgaaacagctgcaagggcagttgaacgcgatactcgacgtggaccggctaactccatag

SEQ ID NO: 333984 - DNA, 396 bp, Pseudomonas aeruginosa
atgagtaatctatcccccttgcgagtcatgcttgtcgatgactcccgaactatccgaaaaacgggcgaagtcatgctcgctaaggcaggatgcgaggtgctttgcgttgtcgacgggttcgaatgtctcggccgagctctggactttaaaccagacctcattttcatcgacgtcctcatgccgcggctcaacggttaccagacctgccaactgattcgtagccgggacagtttcaagtcagttcctgtggtgatgctttcgtcgaaggatggcctgtttgacatcgccttgggcaaaaaacacggcgcaacagactacatcaccaaaccgtttacccaggacgatctactctccgcggtaaggaaacactgcccgcaatttgaacctgaggtttga

SEQ ID NO: 333985 - DNA, 327 bp, Pseudomonas aeruginosa
atgaatcgcaatcacaccccccaactttcggacaccgtagaaggtgtgctctatggctggaagcaccaggctggccagagtcccagttccagtaccttcgcaaggatctgtcccggcccgacgttcacaattctgtccgacggaaagatgcacaaggttgtcgacacgatctcgacagttgaagccacgccccatgatgagcaagacctgcgagatgcgatatctgcaggccaagtggagatttaccgcttggtgcgcggggcaaagcgaaaggtgctaatgcatgctgccactggaaacccgctgaaatccggaggcgaggcgtga

SEQ ID NO: 333986 - DNA, 570 bp, Pseudomonas aeruginosa
atgaccctgttccacgagcagtctcgactgcaacacatccactcaaacaaggatctgctgatgaaaaagtcagaaatcggaaaaggtcggttctacagcgatggcaaggttggactgcgggaagtgcttgatgaggggcctcaatacaagctctacgccggcgtcgaagatgaagactgcctgcgctttcgctgcctgaacgccaagtcctccaccgacatcggacaggagagcaacagcacccgtacctcttttgccgcctgggcgaaactggaaatccctgcagaccaggtccatacgcacctgatcgggcttcgcgctgacaaaattgcgggaaagctcactgagcctcagctgcggttcgtgcggtcctttgataacgacctgactgaaacggaatcagtggagtgcgatcgagaagagcatcgcgttgcgctctcctgcatgaagaagggcatcgtcgctgagatgccggaccggctcgactctgatgatcgttgtttcgacgtcaagctcactgcactgggcctggcagttatcgcgaatgtcctgagctcttcgaaccagtag

SEQ ID NO: 333987 - DNA, 750 bp, Pseudomonas aeruginosa
atgatcgaactgctggagcaaagcgccttcagggggaacatggatgccctgtaccggctggccaaggtctaccagaacggagaaggagtgccagctaaccctgagctcgcagtggcttatctaaccactgcatccggacttggccatgtcgagtctacccgggtgctggcctgggactatctacttgggaaaggggtaaccaaggacatcccatatgggaccgctctgatggagaaagctgcagagaccagcgtcagggccaaacgggaattcgccttgctgctcaataacacttaccaacccaacctcaacgatccatcccgagcaaaagatctcttgagtcaagccgcagccgccggagactctgaatcggctagagctctcagcatgttgaattctggcctcagcgtaccgcgcacgctcggcgcgtcagcttccctggtggtgcagcctcgtacggagggagaccccgcggatgtacgagcggagtctctcaagcagaaggcgtacaacggcgacatagaggcgatgtatcggtttgccctggggctaagcctggggaaatacccttcaattgatggccagttcgaggcgtattgctggtatgccgtagctgcaaatcatggacacgcagaggcagcagctgagctatccgcgctggccggagtgaagaccctttcggagcgaaaaagcccgggcaagctggatcagtgcatccaggaaacgaacgaagctgtcgaccagggctaa

SEQ ID NO: 333988 - DNA, 372 bp, Pseudomonas aeruginosa
atggaacatctatcgcctacgcccggcgcgtcaatccccgagtccgtccagtctcttccgatgcctgacacggaatcctacgaggcactgccgcagtttccgaagcgaagcccccttcccttccggcgcaccattcggcgacaagagctgaggcagatcatcccgctatctgagacgaccatctacgagatggagcgtcgtggcgagttccctcgacgtttcaacctgacaccgcgttgtgtagtgtgggacttggccgaggtggaagcttggattgaggagcgcaagcaggcgcctcgcacggagatcagcaagccggatgtccacctacggaaaacccgccctgtccgggcgggttcagatcaggaatga

SEQ ID NO: 333989 - DNA, 2025 bp, Pseudomonas aeruginosa
atgcggctgttcttgtgcgagaagccctcccagggcaaggatattggtcggattctcggcgcgacacagcgcggtgaaggctgcctcaacggctccggcgtcacgattacctggtgcatcggccatctcgtagaagcggcagcacccgaggtctatgacgcggcgctcaagcgctggtcgctggagcagttgcccatcattccccagcagtggcgggtcgaggtcaaacccaagaccgccacgcaattcaaggtcgtcaaggcgcttctggcgaaggcgacccatctcgtcatcgccaccgatgccgaccgcgagggcgagctgatcgcccgcgagatcatcgacctgtgcggctaccgtggccccatcgagcgcttgtggctgtcggcgctcaacgatgcgtcgatccgcactgcgctcggcaagctgcgaccatcatccgatacgctgccgatgtactactcggcgctggcgcgttcgcgggcagactggctcgtcggcatgaacctcagccgtctgttcacgctgctcgggcggcaggcgggctacgacggcgtgctgtcggtcggacgtgtccagaccccgaccctgaagctggtcgttgatcgcgaccgcgaaatcgcggctttcaagtcggcgccgttctgggccatcgacgtgtctttgtccacagagggtcaggctttctccgcgcagtgggttgcgcccgacggctgcaccgacgacgccggtcgttgcctgcaacagccggtcgcccagcaggcggcgcagcagattcgcgctgcgggcagcgcccaggtggtgtcggtcgagaccgagcgcgtgcgcgaaggcccgcccctgctgttcgacctggggacgcttcaggaggtctgttccaggcagctcgggctggacgtacaggagacattgcagatagcccaggccctgtacgagacgcacaaggccacaacctacccgcgctcggactccggctacctgcccgaaagcatgttcgccgaggtgcccaccgtcctggacagcctgctcaagaccgacccgtcgctgcgcccgatcatgggtcagctcgaccgcacccagcgttcgcgtgcatggaacgacggcaaggtcacagcgcaccacggcatcatcccgacgctcgaaccggcgaatctttccgtcatgagcgagaaggaacgggccgtgtaccggctaatccgggcgcattacctggcccagttcctccctcaccacgagttcgaccgcaccgtggccgagctttcctgcggccagcagaagctggtggctacgggcaagcaggtcgtcgtcaagggctggcgcctggtgctggacgagcccgaacgtgaaggcagcgctgatgaggacgccgacgcctctgcacgcagccaggtgctacccgcgttgcgcgaagcgatggcatgtcagatcgctggggccgacatcaaggcactcaaaacgatgccacccaagccctatacgcagggcgaactggtcaaggcgatgaagggtgttgcgcgtttcgtgaccgacccgcgcctgaagcagaagctgaaggacacgacgggcatcggcaccgaggcgacgcgggccaacatcatcagcgggttgatcactcgcggctacatcgtgaaaaagggacgctccatccgtgcatcggatgcggcgttcacgctgatcgatgccgtgcctgcggcgattgctgaccccggcaccaccgccgtgtgggaacaggcactcgacatgatcgaggctggtcagctcacgctggacgtgttcattggcaagcaggccgcctggatttcgcagttgatcgcgcagtacggcagcatgtccctgtccatcaagcttgcccatggaccagcatgcccgcagtgcggcgcatcgacgcgccaacgcaccggcaagagcggtccattctggtcgtgcagtcgctaccccgactgcaaaggcacgctgccggtcgaatctggtccgcccaagcgtggcgcttcgcgctcgcgtagcagcggccgcaaaggcgcctaa

SEQ ID NO: 333990 - DNA, 528 bp, Pseudomonas aeruginosa
atgagcgatccgaaccgcgaaccccgctacttccagggcctgcaacaggctgccttcgtgaagctggaacacgcggcctctctaaaaggccttttaaagccttttaagggtaagggggatcttgaggcctgggccagccagtgcttcgccatgcgcgacgagttgattggcttggctcagcggcaggtgctgcaacaggcagtcgggcatcccttccacctgctgcccgtggagttggcccaacaaaccactggcgcaggaacggcgtttttgcgctggcgcaagcacgaccgctcagccatgggcgtagccctgtggcaggaattgatggcgagcaccggcacgccggtcaacttactggccgagctgcacgcgatcgagcttcagcgcatcacgctgaacatgcagatcagcctgttgcacaccctgggcaggcaggcccaggaatgcgccagcaaggcggctgtggcggaagacgcctacctgcgccggctcaagtccatcccacctggaatgcgtgatcggtga

SEQ ID NO: 333991 - DNA, 786 bp, Pseudomonas aeruginosa
atggcaaccaatgaatctctgcaactgaatctcggctccctgcgcagcgcgatgtcgctgacgcttcacacccaccacgcttcgcgcatctggcatggccgtgccgccgccgaggggcgaccgggcatcgtcggcctgaacggctacatcgcccaaatgaacaagatgcggcgcggttcggagcaggacgacccgtactcggattggtggatgctgcgcatcgaggtcaagctcgaccagaccaagaccacgctgcaagcgctgcgcgagcaggtggatcaggcgctggcaagcgtaccgccggcactcagcctgggcgagaacctcaacgtgcaacccgtcaagttgccgctgttcgtcaatgcgcagctcggctttgccgccgtctatctgctggccgactacgacgacatcgcccgcaaactgatcctcgcccatcacacggcgctcatcgaccgcagcaccttggagcgctggctcaacgagggcgcccatgcactgcgcagcctgttctcgctggcccagcaataccgctattcgggctgtacgcgcgacgacttcgtgtcaaagaacgccgcagcacgggcggcgctggagaaattcggcgaactgccgcaggacgtgctggaaggcacgcaccgctcgaagttcgcgccgcccatcgtgcgccgtggcctgcaacagcgtgtcgagagtcctgctgcagcgcctgcccccaacgacgaggccgccaccggcgcggtgcccgaggtcggcgtcggcgagatcaagggcgagcaggcatga

SEQ ID NO: 333992 - DNA, 1245 bp, Pseudomonas aeruginosa
atggccgtggacgacaccgcaccacgagccctacgccaaggccccatcgcactggcagaactgttcgatgctgcgctgaaagaccttgcgcccaagcccgcccccagcgcacctgcgtctacacctgcacagtcgcccacgcccacctccggcgatgctttcctgttcagtggcaaccggcacgagacggtgccacgcaagttgttcctcgaccgccgcctgacgccgctggaacgaaacgcctggcaagtgttccgactgatgctcaacgacgatggcgtgaccgcatttcccacctacgagcagttgcgcccctggctagcgtccatgccctgcgcaggccaggcctcgcatgaaaccgtggcacgggcgctgacactgatgcgcctgacccgctggctgagcctggttcggcgacggcgcgaccccaagaccggccgcatcctcggcaatctgtacgtgctgcacgacgaacccctgacaccgttcgaggccatgcagctcgacccggactacctgcaactcgtcagccaggcgctcggccattctgccaaggccgtgcagatcgtgggcctgcacacgctcaaggaaatcggcgaagacccattactggccggacgcaccctcccgtcacggttgcaggtgatggccgaacgtctcgccaaccagaaccccacggcctgcgaaagttatccacaggaagacgccattcacgattccgaagaaggggctccgagccttcttcggaatcgtgaacgacccgctacggattccgaagcagggctgaaacccgcgccagacgtctctcttcggaatccgaagcaggcccgtacagtacgtagtagttgtattaatgaaatacgtactactgcgcaggcgcgcgcgctgggcgatctgcaatggcccaagcgctttgcacaactgaaggcggaacagcaggcgggtgccaaggtggcattgcagcaagttgatccctcgctgaggcaggacgtgctggacgaatgggccgcgcgttgtagcaaccccggcatccgcaatcccgcagggtatctgttcggcatcatccagcgggccatccacggtgagttcaatgcctgggcaaagaaagacccgccaccggcacccactcaaccaaacgaacggccaccacccgcaccgccgacccaaacgcagggtaagccggtgccaccagaagtcgccaggcagcacatcgagcggctgcgaaatctgctcgccagcaagtga

SEQ ID NO: 333993 - DNA, 561 bp, Pseudomonas aeruginosa
atgtccacagcacacccgctcaaccaggctgtcatcgcccaggccctctatgacctgcgcaatgggcaactgcgccgctgcaaactgatggggtttggcgaggcagagctggacgccctcaagcatcctgcgctgatcagcgtgctggccaacgccaacgtctcctggtgctcagtgacggtcaaccgcgaagtgctgcggcggctgctccagcaggcgcaggacgtggagaaggaaatcgccacggtcgatcgcatgctcaggctgggcgcgagcacggagatggtcagcaagttctatggcttgacgcatcaggaagtagcgcttcgccgtgaaatcctcggtctgcccaagcgcaagggccggcaccccgtgctggacgaggagcaggacacggagctgtggcggcaatggaaggccgtgaccaacagcagaaccgtcgatctcgaagatgacacttccatcctcgatgccgccatggacttggccgaaggaatgtcgctgcctctgtcggtggtctgggcctcgatcaagagctgggtcgatcagggattggcgtga

SEQ ID NO: 333994 - DNA, 1629 bp, Pseudomonas aeruginosa
atgactgagatcacttcccagcagatggccggcaaactgcttgcgtccgggttcgagcgcagcggcccgtcagcaacgaccttgagcgacccgatcgccgacacgcccatggtcgtgacgctcgaccaattgcgcccctacgaccacgacccgcgcaagaagcgcaatccggtgtacgaggaaatcaaggcatccatccgcgagcgtggtctggacgcggctccggccatcacccggcggcccggcgacgatcactacatcatccgtaatggcggcaacacgcgactggcaatcctgcgcgaactctggtcggagaccaaggacgaacgattttttcgggtctcatgcctgttccgcccgtggcccgagcgtggcgagatcgtcgcgctcaccgggcatcttgcggaaaacgaactgcgcggtggcctcaccttcatcgagcgggctttgggcgtcgagaaagcgcgcgaattctacgaactggaaagcggctccaccctgagccagtccgagctggcccgccgcctggccgccgacggataccccgtgcagcagtcgcacatcagccggatggccgacgcagtacgctacctgctgcccgcaatcccgaccgtgctctacgccggcctggggcgtcaccaggtcgagcggttgtcggtcatgcgcaaggcctgcgagcgcacctgggcgcattacgccaaaggccgctcactggttcaggacttcgacgagttctttcaggaagtgctgtcgcaattcgatgtccaggccgacgagttctctgcgcagcgcatacaggacgagctgatcggccagatgaccgaattgctgggtgttgattacgacgtgctcgctctggacatgaccgaatccgagagccgccagcgcgccttggtcagcgagccgacgccgccctcgacgccgcctgccctgccagagccagaggccattgcgcgcccacctgccgatactgcgccacctgctgcgaggccgacggcaactccctcgacgggcgagagcgacgcggaagccagtcattcggacgcggtcagcccggcgacagatggcgaccggcttcaggagcacatcgtctcgccggcgccgacaacggaacggcttgagtccatccagcgcatggtcgccgaccagttgggcgatgcactgccgcacgacttctcggcgaatgtcttgcagtccatcccggtgcaggctggtgggctctatccgatctcggatgtctggtacatcgcccccggcctggacacacccgagcacctgcgcatccacgtcgcgcagtttgcccgcgagattgcgggcgaggcacacctgggcgagtgcatcgatgaccgtccagaaggcatcggcttcgcctgccgtgcccatacctcaagcctggcgccaaagggccgtgccgtccatgcgctgttggcttgcctggccggtcagcagcccgccgacgtcggtctggacaacgggcaactcgtcatcgacctgccggcgctgctgcacggccagggcgacgtaacccgacgattgagcgacaccgcgctggtcaagctgttccgcctgctgcgactggcccgccgcctgctcgatctcgaagccggcgctgcggactctggaacctaa

SEQ ID NO: 333995 - DNA, 249 bp, Pseudomonas aeruginosa
atggccaacgcacatgaactggcccgaggtcacagccggctgcgcgccctgatcgagttcgccgtgggcgaaggctggcacgtcaagcgcacggcgggcggtcacctcaagttcaccaagtcaggctgcgccgcgatctacaccagttcgacggccagcgatcaccgggcagccctcaacgcccgtgcgcagatccgtcgcgccgagcgcgagacccgatcccaagcgcaggggggcggccatgactga

SEQ ID NO: 333996 - DNA, 876 bp, Pseudomonas aeruginosa
atgcaggtcgtatccatcatttcaaccaaaggtggggtcggcaagactaccaccgctgcgaacctcggcggtctcgctgcggacgccggactgcgcgtgctgctgctcgacctcgatgtgcagcccaccttgtcctcatactatgagctggctcaccgcgcgccgggcggtatctatgaattgctggccttcaacgagcgcgacctcgaccagcttgtgtcccgcacgatcatcgcgggcctggacttggtgctctccaacgaccaccgaggcgaactgaacactttgctgctgcacgcgccggacgggcgcttgcggctgcggcatctgcttccggcgctcaatcccctctacgacctggtgctgatcgacacccagggcgcgcgctcggtgctgctggagatggcggtgctggcctccgacctcgcactgtcacccgtgaccccggaaattctcgccgcccgcgagctgcggcgcggcaccatgcagttgctggaggacattgcaccgtaccggcagctgggcatcgcgccgccgccgctgcatctgctcatcaaccgcgtccatccggtgtccgccaacgcccgcctgatccagcaggcgctgcgcgatctgttccaggaccatgctgacatccgtgtgttggctaccgacgtgccggccattgaggcttatccgcgtgctgctacgcgcggcctgccggtgcatcgggtcgagtaccgccagccagtgggcagagtcgctcccgccgcgctcgccaccatgcgcgatcttgccggcgaattgctcccgcagtggcaggatcgatttgccgcagtgtccggccgtccgccacagcctcttgataccaggaggccccatggccaacgcacatga

SEQ ID NO: 333997 - DNA, 213 bp, Pseudomonas aeruginosa
atgtcgcaaacatctgtactgcagccaaacgagcgccgcatcctgcgcttggaagaagtcgaagcgaaatcaggtttcaagcgcgcccacatctacaacctgatgaagaaacgccagttcccgcaggccctgcgtctgggcgtgcgcgccgtgggctgggactccatcgaaatcgatcagtggatcgacgagcgcgtcaacaaccgggcctga

SEQ ID NO: 333998 - DNA, 756 bp, Pseudomonas aeruginosa
atgcacgagaacaaaaatgatgcaccaacatcaaaggtgttctaccgcccgctcgaagcgtccatccgctgggccggactgctgcgatacgagcaggtgattctggcttcggtctcgtcgccgatgaatctgccgcagtcgctggactgcccacgtttgggcgaactgcggctgtacaccgaccgcatctatgacggcatcctcaacggggaactgcccttcgggcagcacggcatcacgacgcgcgacaccacgttgatcgaatcgcctgatctgacggtgcgccatgtcgatctgaagtgctggatgcgccagcactaccccgagcagcggcccggctttctcttctcccgcagcgagcgcatcacccatcccttcatctctctggaaacagggcaagccatgctggtcgaacgccaggctttgaaatccgtcctggaacagaccaaacgtcagcttcgcgagttgcaggacaagcatgacgcgctgctcaagcagcccacggtgattccggcatgcgcgcagtgtccgatcagtgatcgagccgaggccacctacctgaacatcgttggcggcctgttggagctgatgctcggccagtcgccatcgggcacgccgtactccagcttcaagacgcaggaggccgtggtcagcgcgctggtcgcccatcacagcggcgccatgggcatcgcggagcggacattgaacggtaagtttgccaccgccaggcgccggctgcgtagcgcctcccgctga

SEQ ID NO: 333999 - DNA, 1929 bp, Pseudomonas aeruginosa
atgctttcagacctccaggttcgacaggccaaggtgaccggcaaggcgtattcgcttgtcgatttcgacggtctctacttccatatctcagccaccggcttcaaggcctggcacttccgcttcacttggggcggcaagcgcgagcgcatgtccttcggcggctatcccgcgctttccctgaaagatgcccgtcatctgcgcgacgaggcccgggccatgctggccaaggacatcaacccgcattcggaacgcaagcgcaaacgccacgtgattgtcctggcgggcgagcacaccttccaggccatctacgacaaatggctggcccaccgcagcctctctctggaaaatgagggccgccagagcacgcccaaacagatcgggcgcgtcttcgccaaggatgtgtttcccgtattgcgccacctgaccgtctacgacgtcactcgcgcccacctgctggacatcatcggcagagtggaaaaacgtggctcgctgtcggtcgccgagaagctgcgcacctggttcagccagctattcacctacgcctcggtggtggtgcccaacatgggcgacaacccggccaaggatttggatgtggtggcgatgccgctgccgccggtggagaacaacccctttttgcgcatgcccgaactgccggccatgctgcagacgttgcgcaagtacagcggccgcctgaatacgcaactgggtctacgtctgctgctgctcacgggcgtgcgcaccggtgaattgcgctacgccacgcccgatcagttcgatctggagcgcggtctgtggatcatcccggttgtcaggctcaagcaacgcaagcagctcaccaagaagaagcgccagcgtttcgccgacatcccgccgtacatcgtgccactgtcgttgcaggcacaagaagtcgttcgtcatctgctgggaaatctgaagccagcgcaggtctatctcatccccggtgattggtgcctgaaaaaacctctcagcgagaacacgctcaatggcgcgctcaagcgcatgggctatgaagatcagctcactgggcacggcgttcgcgccaccgtatcgaccgcgctcaatgaattgggctatccgcccaagtgggtagacgcccaactctcgcatgccgatccggatcggatcagcgcgacctacaaccacgccgagtacgtcgagcagcgccgcgtcatgatgcaagactgggccgaccgcctggacttgttcgagcagaatcagctcgaagttgccagcacgcacctgaccatcacgctgcagggtctgcccacgattgccggacaggcggcagcgcagccgcccgccctgaatccaaacgcccctcagttgatcgttgcgcctgcaccggatgcgccagcggttccagcttccgtctatcgactttcggcggtgcatctgcccgagtacgcgcgacccacgctgtcagaggtgcagcgcgagcgcttgcaattgctggagatgttcgaggcatcccacaacctgtcggtggccgactacgccaagctggttggcaagtcccgccgctggatcacttacgagattcaggctggcaatctcctgtcgatccatctgggtcaccgtggacagcgcgtcccggactggcaactcgaccccatcaaacgcaagctgattcaggctgtcctgaagctggtgccgcgcggcatcgacacctggcacatctatcacgcactgctgcggccatacgatgccctgggcaagtgtccagtcatcgaggcagtcgatccgaccaacctgcatcttgcagctcgactggtcgccgcacatgccatagaaaccgatgagcttgcagagcaatcggaagtatctccggtgctggccaggcagactgtagagcgcctggtaaaaacggcaatgttggttgatacgcccgaagatctggtcgcccgttga

SEQ ID NO: 334000 - DNA, 1383 bp, Pseudomonas aeruginosa
gtgactgatgccggcagcctgcgcggaaggctgctgctgtggctggccctgctcctgctgctggtgctcctggcgagcggcctgagcgcctactggaacggtcgcgaggtggccgacaccgcctacgaccggaccttgctggcctcggcgcgggcgatcgccgacgggctctacgagaaggacggcaccctgcgcgccgacgtcccctacgtggcactggataccttcgcctacgacagcgccgggcggatcttctaccaggtcaacgacatccacggacggatgatctccggctacgagaatcttccggcggcacccgccgataccctgcgcaccgacgactacccggccctggccaagttctacgacggcgtctaccagggcgtcgacgtacgcgtggtgagcctgctgcaaccggtcagcgaaccgagcatgagcggcatggcggagatccgcgtggcggagaccgaaggcgcccgcgagcgcatggcgcgcagcctgatgaccgataccctgctgcgcctgggcgtcctcggcgtcggcgcgctggtgctggtgtggctggcggtgagcgccgcgctgcgtccgctggatcgcctgcgccgcgaggtggaagagcgccagccggacgacctgcggccgttgccgatgctagaggtccagcatgaattgcggccgctggtggagtcgctgaaccacttcacccagcgcctgcgcagcctgttcgagcggcagtcgcacttcatcgccgatgccgcccacgagttgcgcacgccgctggcggcgctcaaggcgcgcctggaactgggcctgcgcgagcaggagccggaagcctggcgttcgaccctggagaccacggcgaagaacaccgaccgcctgatccacctggccaaccagctgctctccctggcgcgcatcgaaagcggcgcccaggccattgccgagggtggcgccgagcgtatcgacctgaccgccctggcccgggaactgggcctggcgctggcgccgctggcctatgcgcggggagcctcgctggcgctggaaagcgccgggccggtgtggatccagggtgaaccgacgctgctcaacgaattgctcagcaacctgctggacaacgcgctggcgcacaccccgcagggcggcaacgtgatcctcagggtgctggaggggggcgtgctggaagtggaagacgatggtccgggaattcccgccgccgaccgcgagcgggtcttccagcgcttctaccggcgcggcgacagccccggcagcggcctggggctggcgatcgtcggcgaggtctgccgggcgcaccgggcgcagatccagctcgaccagggcgaactgggcggcttgctggtgcgggtgcgcttcccggcggagtag

SEQ ID NO: 334001 - DNA, 1320 bp, Pseudomonas aeruginosa
atgcaagcgctgtacatgctggccctgtctcccatcgccgaaacccgaggcgatccgaatagctacggcttcaggatcgaacgttgtacggcggatgcgatggcgcagctcttcctgtgtctttccaaacaggcttccgcctgttgggttttggatgcagacatcgaagggttcttcgacaacatcaaccatgaatggctgctaaggaatgctcctacggatacacggatgcttcagcaatggttaaaagctggggtcatccacaaggggcagttgcacgcaacggatgcaggcacgccacaagggggaataatctcccccgtgttagcgaatctggcactggatggtcttgaaacactccttaagcaacacctaggagtgacaagggcgaagaagctgaaggtgaatgtggtgcgatacgcggacgactttgtgattacaggtacctccccggaggtcctggaaaacgaggtaaaaccttgggtagaacaattcctcgctacgcgggggctgcggttgtctgccaagaaaacacgtgtcgtccatatcgatgaaggcttcgacttccttggatggaatttccggaaatacgaaggaacgttgctgatcaaaccgagcaaaaagaacgttaaagcgttctacggcaagatcagagaggcaatcgacacccacaggacgagtaagcaagaggatctaatccaactgctaaatccgatgctgaggggttgggcgctataccatcagccagtagtggccaagcaaacgtacagccggatggaccaccgagtgtttgtaaaactgtggcgttgggcgaaacggcgacacccaaacaagtccctcgactgggttaggaagaagtacttccgagcctctggagagcggaactgggttttcgccaccacgacagtggacgatgctgggaggaaacgggagatcgagctttgctcgctcgcgagcacgccgatcgagcggcacaaaaaggtgagtggggattacaacccctatgaccctgccatggaggcccaaagcgaaaaactgcggatggaccggatgctgaaaaagctgcagtaccggaaacaaatcggcagcctatacgccagccaaaacggcctgtgtttgctctgcaagcaaccgatcaccaaggaaacggggtggcacgaccaccacatcatccaccgggccgttgacggtggtgacgctttggccaatcgggtactcttgcaccccaactgtcataaccagctccacacgcgtggtctgcacgtgaccaagccggctcccccttgggggcttaaagaaggcttgagccgtatgcgctga

SEQ ID NO: 334002 - DNA, 585 bp, Pseudomonas aeruginosa
ttgacggactatgagtttgcccaagccgctcatccgcacagctggctgctagttgcggacaacctctacgagcagtcgaaaggacttctacgtcagttcccaactggcaaaactatgcaattggatggcaatggcaccctcctgtgtgagtggccaagcagtagccggtcaacctttctacctgcaggttttgcgcttgagaacgctataaaagcctttctcgtgtacgagaatccacagtgggtttccaatgggatattggctcgtccgcttcggtctcataggttagtagcgctttcgcagcaatctactcttattccttggcaaaaacgtggtccaataatcctatctagcttcgagcgtgggttggaatcttgggcccgttatccttgcgcaataagtgctgcagaaactgaggttgagcagaacctttcccctgcgttatggaaaaattacttgaggctcatgcgtgcttacggaaaatcgctcatggcgctcctacagcaagactggaaaggccctcacggagttgagggccgtttcgagttcagtggtagttacctcggggcgcaatccatcaaatga

SEQ ID NO: 334003 - DNA, 429 bp, Pseudomonas aeruginosa
atggactgctttacgtctcccggccggcggctgtccagtctcgccctggcgcagcagcgcctgaagatcactggtttccagagcccggctgaggatcactcgctatttcctccctcccttgacgccgcggtgggatggggtgcacccaacatttggctttggctagtcgacaccgacgatcttgttgggatcggagtgcaccggaacgatgtactcgtggtcgaccgcgccctcgagcctagcgccggcaatgtagtaatagtggtggcgaaccatgagcatcatttggcgctcgtggagcgggtagcactggaacgactacatcttgcacgggtaggagccgacggccgccatcgcgaaatcctggccgacgaagagcaggtggaactatggggagtgatcagcatgctgctcaggagcatgctgtga

SEQ ID NO: 334004 - DNA, 684 bp, Pseudomonas aeruginosa
atggcctctaccgtgcagtatatggccggtaaatgtcccaggcgcgactgcgggttaccgccggtcagttcgagtcagcgtgcatcgattgctgcgaaacgtggagcaaacctcaatatgtgttggacagggagcgtgggcaggatgggcggaaggaatgggattttcggggcaggctggtcgggactcatcctgctggcaggggtggcgctacttgcgcctgaagccgcatacgctgggaagctaggacaggcactgggctctgctgctggcagcgtcggagggactgcggttggaggcgtatctgcagaagcaacccgacaagctcttgctgccaagggcatgaccgaggatgacttcttccgaatgctgttcgctcgaggcatccctcgcgcaaagcaagatctccccaagatggtcgacgcagaaacagaattttatgacgtgactggtagcggtagggaatggggatactggtatcgattccgtcggtatgcatctcgagacctggaccctgcagcggtaaaaaaggcactcggcccagagatcatttcgaaagtctgcgcgacgccgaacatggtctccccgttcatggagatggggggaacctatcggtacaactatgttggaagggatggccaactgatcatgtcagttcgggtgagtcggcaggactgcaactga

SEQ ID NO: 334005 - DNA, 993 bp, Pseudomonas aeruginosa
atgtttgcaaaccttaaggccctggcagtggccggggccttctttttgatgtccgtaacgacgactgtctcagcggactcttggaagcccatccgtagcgggtccagctctagtgggtggcaaaaggtcgtttgcgatcgatcggggaatggatggcggtcctgcaacatgggattgacgattgtcatccaggcaaccccgggctccctcgctgccctcggtgagaaggcgacgttggtggcaacagtccaggactacgatgggaacaacgccggcaggggcgtagtgatcaactggaccaccagcgacggcggtctcagtgctgcgacgacgacgacggatgcgaacggccagacatcggtcgttctcacttcgtcgaagacaattggcggggccaccgtgagcgcgacgtcgccggcggaaggaggtacagggcagatcactgtgccgttcaccgataagtgggtatctaccagtgcgatgtactcagcctggcaggactctggagccccgtacagttgcagcgcctggtcacccgacgcgagcacgatcaatcagggaacatcattcactcagtctgccgtttgctaccaaaaccagatcgcgtaccaacaaaaccgggaagtgagcctggtgactggccaggtccgaaacgttgggggggtgatcccgctatatcaaactgtccaggcagcacgttcccagcaagccgtcggtaccaaacagagcaccccgagttgtgcttggtcctcattcacaaagaacggggtctacgccaccggctgggatcatggcgtgtcgaacaccggtgggccgaaacaggggtaccggctttacctagggcagtacatcggagaggttgccaacgcgactgatagcttcgcctacaacggccgaatctacactataggaaaattccgacagtccacctgcctcggcaaaaactgcgcatcgagtcgtgaggaatacgaggcctgttctgttccgcagtaa

SEQ ID NO: 334006 - DNA, 861 bp, Pseudomonas aeruginosa
atggggcgggaatgccagcagggcttcaccttaatggagctggcaatagtgcttgcgatcacggcgatgctcgccgccgcagcagtgccaaactacatgaccagggtgaaccagaaacgcgcggacaccacagtccaagacacccaggcgatcatcgacgccgcacgggcctatcgaagcgagaagggcacctggccaggtgatgctacatgctcgaatgctattcaggcgctcggagcgacaaccccgccaatgctcgcaggggtgtcaaatatcaaccgttacaactacccgatcacaacctcctgcacccagtacaccttcagtgtcgatcagaacaccacccaagactgggacggggttgtggtgaatggtttaccgggttctcaaatcatcaactcatccacctaccagatccgcaccactgttggggttccagggactgaaccagccctggacgggaagctctcgcgcctggcctcggcgaacgcggaaatgaaccgcatgcgtaccaacctgctgatgggtaacaacgacatcaacgaggtcaatgcggtcaacgctcaaaccctcaacgctgccggcgcagtcaacgctcaaacggtcgctgctaccggaaatatcagcaccgccggctacgtcgagttcaccggcacggctgcagagggagggggctgcgcgaaagcggggctcgtcgctacgacatccaccggtgcgcaactcacctgccaagggggcaagtgggtgaagtcggttatctggagcccggcgatcgtaagcacaggtcaatcgtgtgccagcttcccgaaaggctctttggcgttcgacagtgcggggaatctctatgtttgcaaaccttaa

SEQ ID NO: 334007 - DNA, 708 bp, Pseudomonas aeruginosa
atgatgactgaccctggtccggagcaagcttccgccaatattggtgaacagctcgaaagtccatacacacggatacgctatgcaggagagaaagccctgcatcgactcttgcccattgcccaaggcgacggcatccagaaccaggtggtcaggtcgctgctgctgggctgttacaacggccaggatttcccgatcgatcctgcctcgttgagggtgcttaatcgcagcgtcatggaagactgcatagctctgttgctgatggactccgcccccgcgatggaggtacaccagtacgtagagaacggaagttcggtttacaatggaatggctgagcgttggcagccaccgagccgcatccaaatgcagataccgacgtcggaggacgaaacatcagaggtccttcggaccctcgggaagaagtccctgcagcatttaatcgctgtggctcaaggcttttctggacagtgccgccatatcgcgcggttcttggtggggtgttacgacggatgccgataccccttcgaccccaccaggttccgttgtatcgaccatgacctcttcctggagtgcatcgcggtaatccgcctgctgtacgaaacccgccatgggatcgacaagaacatccttgagggggtgagcgtgttcaacaggctgattcaggattggtcgatcgaaccctatagcgcagacgcggaagctgtgcgatga

SEQ ID NO: 334008 - DNA, 978 bp, Pseudomonas aeruginosa
atgtctgaaaacctcttcaagacctttctaaaaccctccccagactcatcgccttacagcctgacggagctgcagtccggcacgttccaagagtggttttctcggcatgctttcgacctggtcatcgattactcgcagttcctgctctacctgtccttctcgctctcgatgatcctgttcttccgtcgcacgctttcgcccaaactcatcactggcgccttcgctcttgctcttgtgatcttccgctacggggaaaaccaaactcttggccacctgctccttccggaagggtcgaatccgcagctcgttccaacgttcctcgccggcattgctgccagtgggctcatcttgctggtcgtcgtgagacggtggcggacgcttgatcggataatcatgttgggagcccaggccgccgtgatcggcactacgctgattttccacgtcaccctagtccaaactgccctcccggggtggaactggaacatcgcctggcagcaccgcaacctgctcgatcttcccagtgcggaatttcaggacgggtgcaaggcagagggggtggcgtgttggtcaggcacgtcgttacgtgctgaagactttccggcgccgctccggggccagatcttcggcacctatgtcgacctctccactcggccatttaccgaaatggggaccactgtcggcatcgacaatgatgaaaagacaggaagcattgcggccgttcttctgtacaggaaggcaggcctctacaaggtaatcgtcgactacgccgatgcggtgggcgcgcaccgggtgatcctgcgactgttctacgtgctctgctcggtcgcccactcgatctggatctacctggcccttttcctaatcgctttccatcacagacgattcagccgccggggccatgcgatgccgtccgctgggaatgtcagtgcagcgcaggttcctccgtttgaaccaggcccttccggcatccctaactga

SEQ ID NO: 334009 - DNA, 225 bp, Pseudomonas aeruginosa
atgcagtgccgatgcggggccgccaccaaaggccgaagctctgtcgtaaataagctggaagccgagttgtcgtaccaggagtgtgatccctgtggccgagtccacatcgagcacctgaaagtgcgcggccaaatcgtagcccgcggccgcgatgccagtgaaatattcaacggcgacctcgagcgcttcctcagcacaccccagcaggccgggtttgcgttttaa

SEQ ID NO: 334010 - DNA, 618 bp, Pseudomonas aeruginosa
atgccagaaatccaggaactccctcctgaggagatcccgaagcagatcaccgccaggcatgttacccgaagtcttgggcagcaccttgaagccttcctggctgcgaacaacctggaggggtggaaagccgaggaggagtatgtcctacgggacgaccgcctggccgatcagcttttgctgttgacccaggtaaccggcctctatatcgggcagttcaagcgttacagtacccgcttgctgaagctcgcacgaaggaatggggctgagatcaggctgactgaggtacaaggcatggtggcgcgcgccttgggttataactcctatcatgttgcctataagtgccgatcggttgacgatttcatcgacaacctctggccccaaggtgcggcaatgagtctggtgagtctggacggcgccgtcgccggcatgcgtcagcagagcgcagtgatacagcgcctgatcgaccgataccgcttcaacaaggagcgcgacaggatggtcaacgccggtgctaagccgggcggccaggccgatcctaagatggccaaaaagatgcagggtgagcgccgtaggcgccatagtctgcatcggagcgacgggatcaaacttcgcgattga

SEQ ID NO: 334011 - DNA, 477 bp, Pseudomonas aeruginosa
atggtcaaacgctcatttgccactctcactgccctggcggctgcactgacgctggccggctgttcttccacctgcttcaaagaatcgcccgcccaacaggtggccacgttcgagttcgtgatcaaggaaatcgatgccaacaagcaggagcgcgtgctgcagcggccccgaattgccgcgcagctcaatactcaagcggaatggcgtcagctgcatatcgtgaaagagggcgcgctcgaaaaatcacgctcgggatacatcgtggccatccatccctatgccgtcccagagaagcggcagtccgaaaaggcggtgaccttcgacctggtcgtcgaccagttcattcctgaaatcggcgcaactcaactagccacttcgggtactggggcggccgtaaacggcggcgagtcgacgatcttctggactgcggccgggaagaagtacaccctcgaaacgcggcttgtcagcctggactag

SEQ ID NO: 334012 - DNA, 1383 bp, Pseudomonas aeruginosa
atgcttacccaacacttaacagttgcgcaaagcaagtatttattcatcggcaaggactgcatggcgtaccggtgcaccgatggattgaatccgcaagatctggagcggcacgaactacgtccgcttgtggtcgcaacgctcagcgttgaggggcttgggatctactggcagcgcttgtacttcggtgatgaacccatcccactcgagtcttttttgtacttggcatggacagagttccacaccctcgggggcatgcctggccaccttcttgtggaatcggaattgctggacgattacccgttgcggcgggtcctggggcagatggataaagagaaagtcatcaagaaagtggccatcggccatgggcacccatttggatcaaccaggaggcaatcacagaacctggtcaagcacagcatggtttccctggaggagttgacggagcaccggctggagagtcaagaggcggtattggctcgcttgaaccagggcttggagggttatcaccgggtatgggaaaactcgccgaggcctggacatgcagaggatgctttccagaaccaccgcctgagaccggtgcaccttccgcactggccgcagcacctggtggggctggatattgccgattggatgaagcgccaggcgcgatcggtaccaccgatggcccctcatgaggagctcaaaatcaaataccagacgggatggatggtttccgtgaccaagaaacccgttgcaactgagatgctccgtgaggcatttcgcaccgtgatgatgaccggtgaccgtgaacctgcagggctctacgacatagaagatctgctctggtttaggtcggtggtccgggggctgcccttcccgcctcaagaactgttcggctctgctctggagccagggaaatggccgccttttctgaacggaagcctggccatcaatggcgcgaccgcggatcgactggagtccttgctggagcgcagcatggagcgaaagggtttggtgctttttccggaaagcgaggatgcgttctgtgattcgctgaacctgctcggtgggggtggtgatgagcgctgctgtgctgagctggtcggtggaccgtaccacggatcgtttcgcgtctttgccctggacgacgatgtgtggctgaacatcttggccatcccgcgaggatcaccggcagacacaccagatctgtcggagtgccttcatcagacgcttggcgaaatcgatattgggcctccgggcctggccgccatcaacttctggctggagaacctcatccagggccactcgtggaaccagagcttgctacttctggggatggtggaggtcatgctgtcgaccatagcgctatggcgtgaagccgatcggcctgcagattgcaggtaa

SEQ ID NO: 334013 - DNA, 255 bp, Pseudomonas aeruginosa
atgctgcagttcattcgccggatgctcggtatggaacaactgaacctcatggaggacaattcgactggctcccccagagcgatgagtgatgctgaactgcgcgagtgggcacaacagttgtacgtgaggtgtaataccgaaagactttccagttatggaatcaacccctggacactgctacaggcacagctggatgatcaagcactagctgaggtccgccgttggtcaggtagcccacgcccggatatgtcgtag

SEQ ID NO: 334014 - DNA, 360 bp, Pseudomonas aeruginosa
gtgaatcttctctcccactactgccggcatttcaccggcgccttcaagttcaagaaccgacagggtcggactttcttctggctctgtctgcttgccgacgtattcctggtatccgttttggtcgctttgagccccttcgggttgctcggcagacttctgatcctcctcgcgcttctggtcatcgccggcaatgccattcagcgtctgaaagacgccggcgtcaccccttggatgcttctgctgtggttcatccccttcgttggcctggcaatcctggccatcctgctcctactccccggccgtaagccggtcgacctgccggtcgcgcctccctcctcgccttatgttggcgggaagtga

SEQ ID NO: 334015 - DNA, 603 bp, Pseudomonas aeruginosa
atgcttgggcggggagcgcattccagcaacctgtctatcgttacagcatacgaagaagccactctggcgcggaggcaaacaatggagcaagtaaggctaagtgatcttggtaaaatttttgtagatgaagattcgaaaggctctgttttgcgaccgagggtgtctagtcgcggttatcttcttgtctgtgatgacgaagcggttagagattcagcagtcaattacctaaaaaggatagattacttcaggtatttagatttcaatgctgaacctcaaggaaagcatatttcggaaatggtaatgcaaatttatggcgttcgatactacgatcaaaagcggctagggtatgaggtttcattgttagcgcccaagtgttgcggggactccttggtcgtggataacttccaggacataggcttgcttattgttcgcgaagtaaagcttgcactcgcctttttgaggtcgcttggcagagaaccatattcgataactgtcatcggagtgggatcactagagtcgttggatattattaaacttgaccgccagttgaatgccgcatggacaacttacgagcttgttggggattctattaaacaagaatga

SEQ ID NO: 334016 - DNA, 399 bp, Pseudomonas aeruginosa
atgccaatctccagtgagtcactggctcatccgctaggggacagcgagcgcgagatcgtttgtatctgtcacaggtacgacgtcggtgagcagcaacagtacctgcagagcatcactggagagagtctggcaagacgagccgcgctgtattgccagctcaaggcagaaatgtggttcggtagcgcagtgcaggtgagcaccagcggaatagctgaggcgctatcggcgctttacggctacgagaaattaagagcccagcaaccctattccatagtcgacctctaccaggtacgagcaacggctgtcctcgccggttaccatgaggacctggtgaatgattcgacgcttgagcgcactggcctgagagatttcctcgagccgtatgtgcttggtcggtaa

SEQ ID NO: 334017 - DNA, 465 bp, Pseudomonas aeruginosa
atggatcaagtccagctcgaggtactcagagctgaagcaatagcggccgacaggtccttttccaaaggtcggcttcgggacgagttccggatgaagccgaaacctgatgcgacgccggtggcgcattacaagaacggttatggtgggaccttcggtgtgtaccgaatcgcggactgcctcccaatgcgggagcgcaaggctgctgccccctcccccaagcaagtccgggcggcggccatacttgcactgaagggccggatgcaaagcaaggtggccaaggcctctcatgtcgcggtgcaatggctggccacagcacctctcgtgcttgatgccgagaccaccaatgcgcacccgacgcatgtgctcggcgcgggcatgttcgtgggctgctcggtattcatagcggcgggttccgtcgtgggttccttttacagtttgaggatgctgctgaagcagtccgcgtga

SEQ ID NO: 334018 - DNA, 897 bp, Pseudomonas aeruginosa
ttgaccatttctaaccgtttcccctccggcgcatccctcgaccaggtgaagaaggatgccaaaaagctggccaagtcagaggggctcagtctccatgaggctctggaccaagctgccgccgcgcatggcgctcaggtcccctggcatcgcatccaggagttcctcgcctgcgatgatgacgagactttgctggccaggtttgctctcccgctgtacgccggcggcgtattcactgtatctcttactgagacacgccccatgatttcggtaacggggcgaactcgagcaggaaagtccacctcagcattgctaattgctgatcgttacctgtcttcctgccgcggccgggtgcacctggtaagccttcttcaccaccaaccgacatcagttgtcggagaggtctctgagtgcggctggcaggatgtctgggatcgaatttcgctgaagtatcctggacgttgcgctcttgtcgtttgcccagaacgtatggctcaaacacacatggtggggcctcttgatttgagccctacgaaacctgaaaggggagacctggttgtgctcgatgagcgctaccactgcgctaaagggcaaagtctggtcgacgtggcagagattgctcgcatgtggcgtgttggcctgatcctatgcaaacagccggggccgtgggagcacgagaccattcccgatgaaccagttggcgatccattttccctgcacatcaaatgcagccgcgaactgcgttcggatgattgcagactccagctggaagaaatggtgaatggacgtcggggcgaatgcctgatcgtgccaggcgctccctacggatcttcgaaacggaagttcaggttccaacgaagtgcgctgggagccctcaagagccatttcgctcgagagtga

SEQ ID NO: 334019 - DNA, 1074 bp, Pseudomonas aeruginosa
gtgatcaagaccaatacatctgccccccagctggacaagccgatgatcttccctgcggaggactatgctcgtgcgtgggtcgggtgtctggccggattccttccaggcctgaaagatcgaagtcgtgaagtgttcctgaggctgtcagggtggcatcactggaacgcaatggtcgaggcctgcaacccagaacagaactgcgtgttcatgactgaggatttgagtccggaacttcggctttcgactcttgcagaacatcgctcaatcctgatccacgagttcggtgtgaagccggcgaccgccaatttcttcctatgggcaaatcccctgggctcatttgaactcgtgccgcttcgcgcggccgtcaaagaggccctttatcaggagggtgagtcgccttcctcgaggttggacaaaatcctcatcgctctggatcaagaaaatcgagcgcttgttcctggtactgaagaaaactaccgccgaggctgccacttcaccaatgagcgggtgtacatggcgatgttccagcatctcggctggaacctggagctcagcgacgggcgtgactacgacgtaccatttggactacctgtcgcacggttgggctatttcagcgactccgaactcggctcggtccctgtgttcatgactggcttggcgcctgaccctgagctgaaccctgatcagaccagctatgcgatttatgaatggatcacttcaccgcagggagcgaaggcacaaaccgcagtggtctttttcagggagccacagcttcgagtgctcgatgacgtcgaaacctcgatcttcggcagcttccttgaagggcagagcgcatggcatctcaccttgtcgtctaactccaaatcgttggggagtgtggtggtcgacattgtctcgggccagactcttcctgtgcccgagcagcgcgacaatggcttcgagttggccatgcgatttgcccgtgcaatggagcgctactgcgactttcctgaattgcaccttcccaacattgaccggccagtggtcctcgccggcggcagtgggtggggagtagtgaagctgccccaggcctga

SEQ ID NO: 334020 - DNA, 1191 bp, Pseudomonas aeruginosa
ttgaccggcaagctttccagtgatcagttgcagcggatctacaaactgctgacggagaagcgcccccggcttgatgatcggatgagattaactccggccgagcgtgcactgttggagtgtggcggtatttcgagatccgacttcgatgatttgattatcgcgactgagtaccgcgggtttgctgcggccggccgatacgcagaggcactggctgcctacttcagaatccctaaagtcagcttgtgccggaagcccaggcgcctcgacgacgatgtgttgtggttggatggctatgccgttgccgatgccgttgctctgctgatcttcatggaacgcctgggcttcgctgtctcacctggtcagctggtgcaggcgataaagggcaacctggcaggcaagcccatgctgacggagtcggagtacctcatcctcacctatgaggtttcccgcggctgtaccacgacagtcctccggtcagatgtggagcgccagccggcatttccaacgaccaagcgccaccgggatgagttaggaaaccgcttcacattggtgctccaaggggaggatgtgttgtcgctggaagtagccgggccccgatatcgtgacgtcaactcggcactaaaaacctgtgcctactgcggtacgacctacctgcccagcagtcgtaatgatcgtgaggcacatcgtcaggttcatagagaaacacagcggttactggacccgggcccgaacaagcggtttgcggccaggctcaagtgtggcgctggcgccgagcgggtagacgcatcggtgcccatgtggatgcatcaggaggtattgaagcgcgcccagcgtttccgctcggactttgcctacgactttgtccagtggcccggaacgatgtcgactaaagcaacggctgactggcacggctacctgattccagctggtgctgacggcacgatcgcaggcgcttgtgcattcctttacgagacggaaacgaaaccatcaggcagcccctggactttatcctggatctggctggcgcctaaatacaggcgcggcgggctgttgcgagaacggtgggggagatttcttgaggcctatggagacttcaggatcgagagtccgctgtctcctgaaatggaggcctttgtacgaattcacggcacggactggcagaagagctgcttgtcgaatcatggcgagtga

SEQ ID NO: 334021 - DNA, 507 bp, Pseudomonas aeruginosa; identical to SEQ ID NO: 117510

SEQ ID NO: 334022 - DNA, 264 bp, Pseudomonas aeruginosa; identical to SEQ ID NO: 117508

SEQ ID NO: 334023 - DNA, 906 bp, Pseudomonas aeruginosa; identical to SEQ ID NO: 117507

SEQ ID NO: 334024 - DNA, 2976 bp, Pseudomonas aeruginosa
ttgtacggcctaccggacttcgacgatgctcagcggctggaatacctggcgttgaccgaatctgaactggcgttcgccagcagccggcctagcctgcaggcccaagtctattgcgtcttgcagatcggctacttcaaggccaagcatgctttcttccgcttcgattggcatgaggtcgaggacgattgcgccttcgtgctgagtcgctatttccacggcgaagcgttcgaacgcaaggcgatcaccaagcatgagcactacagccagaggggtcagatcgccgaactgttcggctaccggtcgtgggcggctagcttcctgccgcaactggcacagcaggctgaacagatcgtgcggcgcgacgtaatgccaggattcgtggccgccgaactgatcgtttggctcagcgagcacaaaatcatccggcccggccacaccaccttacaagagctggtcagtgaagccctgtccaccgaacgcaggcgcttgggcggcttgctggcagaagtgttggacgaatcggccaaagctgcgctgggccagctcctggtgcgtgacgacaccctgtctcaactggcagcgctcaagcaggacgctaaagatttcggctggcgtcagatggcaggggagcgcgagaagcgcgccacgctgaagtccttgcacgggatcgccaaggcgctgctgcccaagctcggcatctcgcagcagaacctgctgtactacgcgagcctggcgaacttctataccgtccatgacctgcgccacctgaaggcggagcagacccggctctacctgctgtgctatgcctgggtacgttaccggcagctcaccgacaacctggtcgacgcgatggccttccacatgaaaaaacttgaggacgagagccgcacgggtgcgaaacagtcctttgtcgccgaacagctgcgacgccatcaggaaacgccgcaggttggccgcctgctgtcgctgtacgtggacgacagcgtggccgatccgacgccgttcggcgaggtgcgccaacgcgcctacaaaatcatgtccagggaattgctgcaaaacacggcgcagcgcatgagcgtcaagccactgaacaaactggcgctgcactggcaggcggtggacggcctggccgaacgcattcgacgccatctacggccgctgtacgtcgcgctcgacttcgccggcacggcccccgataacccatggctcgcggcgctgacttgggccaagagcgtgttcgccaagcagcagcgcctatcacaacggccactcgacgaatgtccggcggcaacgctgccgaaacgcttgcgtccgtacctgctgatgttcgatgccgaaggcacgccgacaggcctgcatgccgatcgttacgaattctggctttaccgtcaggtcaggaaacgcttccaggcgggcgagctctacattgacgacagcttgcagcaccggcatttgtccgacgagttggtttcgatggacgagaaagccgccgtgctcgcgcagatggacatccccttcctgcggcagccggtcagtgcccagctcgatgcactggcggccgagttgcgtgcgcaatgggtggcgttcaatcgcgagctgaaacagggcaagctgacgcacctggaatacgacaaggacacgcagagactgacctggcgcaagcccaagggggagaaccagaaggcgcgcgagcaagctctctacgagcaactgccatactgcgatgtcgccgacgtgtttcgcttcgtcaacggccagtgccagttcctgtcggcgctgacaccattgcagccacgctatgcgaagaaggtagccgacgccgacagtctgatggcggtgatcattgcccaagccatgaaccacggcaaccaggttatggcacgtaccagcgacatcccgtaccacgtcctggagagtacctaccagcagtacctgcgccaggcgacgctacatgtggccaacgattgcatcagcaacgccatcgccgcactgccgatcttcccgcattactcgttcgacctcgattcgttgtacggtgccgttgatgggcagaaattcggcgtcgagcgaccaactgtgaaggcgcgctactcgcgcaaatatttcggccgcggcaagggcgtcgtcgcctacacgctgctgtgcaatcacgtgccgttgaacggctacctgataggcgcacacgagtacgaggctcaccacgtgttcgacatctggtaccgcaacacgtcggacatcgtgccgagcgcgatcaccggcgacatgcacagcatcaacaaggccaacttcgccatcctgcactggttcggacttcgtttcgagccgcgcttcaccgacctcgacgaccagttgcaggagctgtattgcgccgatgatctggcattgtacgagaaatgcctgatccggccggctggccagatcgaccggcaactcatcgtcggtgagaaggcgaacatcgaccgaatcgtcgccacactgggcctgaaggaaatgacgcagggcacgctgatccgcaagctgtgcacctatacggcgccgaacccgacgcggcgcgcaatcttcgagttcgacaagctcatccgcagtatctacacactgcgctacctgcgcgacccgcaactggagcgtaatgttcaccgctcgcagaaccgcattgagtcctatcaccagctacgctcgaccatcgcccaagtcggtgggaagaaggaattgaccggccgcaccgacatcgaaatcgagatcagcaaccagtgcgccaggctgatcggcaacgcgatcatcttctacaactcggcgatcctgtccctgctgctgacgaagtacgaggcagctggcaatgccaaggcgctggcgttgatcacgcagatgtcgccagcggcctggcggcacatcctgctgaacgggcattacaccttccagactgacggcaagttcatcgacctggatgcgctcgtggcgggactggagctgggctga

SEQ ID NO: 334025 - DNA, 660 bp, Pseudomonas aeruginosa
atgacagccacaaggaagaggcacagcgctgcctggttgatctctacggcttggatgctgatgactaccgctgcaatggcggcagagaaccctacccagggcgacccattctcaccaaccacactcaaggactgggtatcagtcatcagcaccctgatcaccatggccctggcgatttggggtatctggagcggcttgaggtcagcccgaaatgcgatccaagagaagcgaaaggaacaccgtcagaagcagcttgccgctgcacgggacatgatgaaggagattttcacagatccactcgcccgctctgcgatgcgaatgatggactggtcaggccggaccttcacccatgaaggccagacctacgtcgttcactggagggacctcaaaccagcccttgtcgtgcatgagaaggggatggggttcagcaagcagcaggagttcattcgtgactgctttgaggccttcttcgatcacatgctggtgctcgagcacttccttgatcaggactacctgcacgaagccgacattgctgtgcccttggagtattacgccgggcgcgtcatgtcatttcctgatacttatgacgggttcctgcgggcttatgggtacagcgaagcacgcgcattgatgcaacgccttgcggaaggcggaaaatag

SEQ ID NO: 334026 - DNA, 1077 bp, Pseudomonas aeruginosa
atgcgagggctatcgatcgtactgggattgagtttgctggtcggctgtactcatgagccgctttcagaagggttaccggttcagaatcaccattggggcgatgagccgaagattcagtttcttggcgtaggtggctggctcatacattggcgtggggaggggctattgctggcgccttcgtacaccaacccggccagcctcggcattcctgggatacccccggcccgagtggtagccgacaacgagaaggtcgacagacacatgccgcctgcagcagacgtgacgatgcttctggtgggtcatgcgcactacgatcatcttctcgatgtgccgcgggtcgtagataagcactctccgaaagcggtcgtatacgggtctgaaacggttaagcacattcttcatgcagcaaagaacagctcaggacagcggatctttggcgctggcgcggtggtggtgccaagtcagcagcagataaccgaccatcgtgatccctcccgacctggtacatggttttactccgacgggaaggtcatcactgatggggacgtaaacggagcaaattccgtgggttcgatccgtgtgatgcctattagaagcatgcatgccgggcacctcttcggccataacttcatcccaggtgagtacgactgggaactcgacgatttgccgactggtctgctggactggagacttggtgaagtaactctggcctggatgattgacctcctcggggaggatggtcggccggtttaccgcattcactatcaagacagcgccgctgaacctccatggggctttccacccataatctctgactcaaagcgcgtcgacgtcgagatcctttgcgggggagggtggaatcaagtcagttactaccccacagggctcctcagggtgaccaaaccgcgtcttgtgctgttggggcactgggaaaacttctttggcaacgaccttggtgaacctgctcgaaccattccgttgctcggctacaaagggctcctcgaacagctgaaaccctacaatgtggtggtgcctgagcccttctctgacatcctgctccccccgccgatggagtga

SEQ ID NO: 334027 - DNA, 579 bp, Pseudomonas aeruginosa
atggaagtcggtccccgcatgtactttctcgtttcagggttgctttacccggcagcgctgggagccgctcttgtctggacggttagtgccttgcatgccagggtatttctcgagagcgcgtccccaaacggctggtctctgtgtatggctgcctggttcattggctaccactgcctgcaattcagcaggctgatggtcaggcactatgatcttgggaagggctacaccaggcgcgccttcgtctctgacctggtggactgcttgacgctgctactgggtttcgctggtcttcgcttcttaaacgagccgatcccttcggagcaggtctgggttgtctatttggcactgcttggagttcccctctctgctgttattgcccatccacttcgcatgatgaaggggcccagggggctattggtccttggcatgctattggtatgccttcttggaatcgactacttcaaactgggtttcctcttgccattgttcaagccagaggtaacccactgggtattgctggtcgcgatgttttccatgctttgggccttctaccaccgcgtataccgcttcgaaccttga

SEQ ID NO: 334028 - DNA, 423 bp, Pseudomonas aeruginosa
atgtccaccttactcactcagcagcaactgctttccgcgccggagtcggattacatgtccgaccagcaactggctttcttcaaggaacttcttctcaatcgaaaactgcacctacagggcctgctcgctcaacgagcagaggcgttccgcgatgactccgaggcgcgtctcccggatgcggcggatactgcctccgcggaagagcagcgcgcgatggaaatgcggatgctgaagcgggaccaggcagagttgttggacgtggaggctgcactgaaaaggatcgaagaaggagattatggctactgcgctgagtttgggcagccgattgggctcaagcgccttttggtcgcgccgactgcaagcctttgcatcgatgctcaagagattcaggaacgtcgtgcgcagcgccagcgtgtagcatga

SEQ ID NO: 334029 - DNA, 348 bp, Pseudomonas aeruginosa
atggaattcaaagcgttgggcactggccgttccacattcgatgagcactacggggcggcagcctattccctgggcgatcagctcggtttcatttactttcgctcaaccggcatcgagccgagccattgggaaagccgtatctatgagaacggcctggtagcaatggcgccagtggctactgacacggctatccaggaggcattcgacaaagtggatctctgtgccgcgcatgccagagctttctccagagcgatggaagctctgagcgcgcatggttgctccgatgaggtgctctgtttgctaacagcggcagaggggcaaattcaggagttgatttccgctgtttag

SEQ ID NO: 334030 - DNA, 321 bp, Pseudomonas aeruginosa
atgcaaaccaccgtcaaaagcgctgcagaaatcgaagtcggcccattccgctataccgaacgagccttcctagctaccttgctttgcctggccatcggagcgctggcgttggcatcgatgctcgggagtcaccccacgagcgatgccaccttgggcacacgcatgctgtcagtgcagatgatcgctgcctacctgatcgtaccaatcaccagtgtgggcggtttcctgtgccacagagccggctctaaggcccttgccggaatgctcccccttattggagcaggcttcttggccggcgcgctgggcgcaagcttgatctga

SEQ ID NO: 334031 - DNA, 273 bp, Pseudomonas aeruginosa
gtgaataaacaagaacttatcaaccaaatcgccgagtccgcggacatcaccaaggctgtcgctgggaaagcactggatgcggtgatcgagtccgtgacttccgcgctgaaggccggtgacactgtgacgctggtgggctttggctcatttttggtaaaggagcgcgctgcgcgcgagggtcgcaatcctcaaaccgggaatcctgtccagattgctgctgcgaagattcctggcttcaagccgggcaaggcgctcaaggacgcgatcaactga

SEQ ID NO: 334032 - DNA, 486 bp, Pseudomonas aeruginosa
atgaaatacatccacactcctgaagcgaaggcattcctggtcgacggcagcacttggccggccaccataaacacttcgctcccccatttcctcgccaaggcatccggcatgctctttggcggcaagagcagccaggagatccgcctggctgaaggtcaagttctacccaaaattgagcatgcgcgcagtctggtactacgccagctccgcccattcctgtttgtcgacccgacagggctgttcaacggcatggagccggttgctgcatacgataagtcgctgatcgtcgcagaccaggtcctggtggctgttgatctgcttgaggacttcgacattttcgttgggctgacccgtctgtatccggccttggtgaacgatgctgcggccgtgagagccgaactcgccaaccagattgcccgtagctacaacggcgtccacaagagcgtacggaacgtgaatagcggccgcgcgcacccaagcggatga

SEQ ID NO: 334033 - DNA, 2217 bp, Pseudomonas aeruginosa
atgagcatgactgatcgaattcctgacggggctgaagccctcacccgcgaacgcggtaccctagtcgatattgttttccgtgatcccgccggtccttggtcggtttgtaccttccggcgggaagacaacacctccttcaccggtaccggcaatttcggcaacgcaatcctctatgaggactacatcctgtacggcaagcgcgtaccggatatcgacggcgctgatttcgatgtcagccagttcacctcgatgccaccagcgaaggttgagtcactggttggatatctcagcgtcctcactggcgtcccacgcagcgttacgagcaaggcagtccagcacttcggcgaaagtctgattccaattctggaccaatcaccagatagactcgtggaagctggaatctccccgcaagaagcccaggtcttaggccaggtttgggctgatcaacgaagtgagcaactcgcactcgcacagatcgacgtcgagggtattccgccggcgaagctggcaaccctgcaacgtcgcttaggctatgccgcgaacctcagtgaggttctgaaagaagacccttatctgctctacgtccatttcgaggacattctcttcacttccgcgctgaacctcgcgaaaaggtttggagtgaccaacaacacagtctctgcagttaaaggcgcggtggtcggcgtgctccgccgggaggcttggctcgggcacagctacgttgaagggaggccgctcatggagtcggtcatgaagatgcttcgactcaccaaagatgagatcaagcccctcattgctcaggccgtaaccgacctcgccatggccaaggttgtccatgccagcggcggacagctacaactcctgagcctgcacgaagcagaaaacaaactggccggcctcgtgcggaaatgggcagcactggactgcaaagacgccgaggacctggtgcccaccgaaaagatggccaccaagctcttgaagccactgggccttgaaaacgggactgcgaagacgttctcagcaggactccgctcgctcttgggagaacgttttgcgctgatccagtgcgaaaccctctcagaccaaatgctggttatcaagggccttcaactcttcctgaaagccttcggcgcagacgccatctattccgcttatacaaacgagatggctgacgaggtcaaccgactgctcgatgacgacagtgtcgtcgtcacgtactcggccttgataggcattgatccaaagacaggggtgccttcacagcatggcaaaagaccgatcaacgcggatgtgttgattcttgccggggcggactcgcttgggatagaggaaatggtgaacgtcctgcgcgccgtaccagattcgagcagggttttcctgcttggggcagcaaaggacctaccagctcactccattggccaaccgttcgcggagctcacccaaggcgggccggcgcgagttttccaggcgagcttttggttgccacccagatcaccgcaacgcgaagcatcgcggcgtatctggagcgggacgctcaaagcgaacgacgaaaccttcgacccaacccaagcgatatcttggctgtcggtgccatccgagctgctcatcgagaccttacctgttgtggttagggagttcgcccagcagctacaggtagacccgctgctcgatattagggttgtagtcccagccgccaaggggcctcgaggtgaggacatggtgggcccgctgtctgcagcgatcgctcgggagttcactggcgaggagcacctggttgagttccatggaaaagggctgttcaaaggattgcctttcgtagttaggcaatccgtcgccagcacaaaccatccacccttttccgtgttcaccgccgctgaaatcaatccagagcgcctgaacgctgtagaccgagctggtaaccattacttgctcagcctggcagagcgcctcgatgtgttccagggcgctgtcatgacgccgaagctcatccgggggcgagtctacgacgttgtcgtcttggtggtcggcgagggccagcaggacctcatcaacaccaccctcatctcgactctcctgaacagtgcgaagaccaccttgctggtggttggcgcactcgacggattgctgacgggatattccctgcgcgaaccgactgttgcccggtctcttctccctaaacggataaatccagatgtcgatcaaatcagcgcgccttga

SEQ ID NO: 334034 - DNA, 1812 bp, Pseudomonas aeruginosa
atgtcgatcaaatcagcgcgccttgaggcgcttgccgccgagcatgcggaaattcagcgacagcgaaatatcgcaatcagccttccgttggtaggggcagcaattccatttgtgccgctccccttgacggtggccatcgctgcaggctgtgctatctggtccctgctgcttgatcggaaagaagctgaagcgtctaccacggatatctgggacgccggttacatcgaagccccgattccggattgcgacttccgccgctccacttttctgggcaaggccattccttggacagagtggaaggatcgcgttgacgcgatcacgagtacgaagggcatcgccaccgctgacgatatccgccgggagttgatcgacacctatccatcaatgatcccattcatgctgtccgacgacatcatgactcgccatgtagcgctgctcgctgcaaccgggaccggcaagaccgaactgcttctggcaatcatccaacaacagataaaaaaaggggccggccttctgttaatcgaagcgaagtcagactctgatttctccggctcgatttacggaatgatggaagcggccggccggctcgatgagctgctgatcatcaacttcgagttcccggaaatgtcgcatacctacaatccgttcttctcgggcggggtccgcgcaaccatttccactgcaatgaagctccaagccaactccaaagaggagttctggacggacattgctcgctactccctgactgccgcggtgctgtcgctgaagctgcagcccggggagccagtgttccacatcaaggacatcattgcagtgctgtccgacttcgacctgctgctgagctttatccgcaacatacgggtatccgactccatctatcacagcgatggtgtcgagtggctgcactcataccttcgcttctggttcgacgaagaaaaacaggtgtggaacctgcgcgggtacaagcagttgctccaaggacttgtgtcaaaactttcggcgttcgcccactccgaatactccagcatcgtcaatacctacagcccggatgtcgacctcaaagaggcgatcctccagaacaaggttgttgtgttgtccatgtcgtcgcttgccgacaaagacggtgtggagctattcggcaaattgttcatctctgatcttgctcgagcgatcggcgaaatccagctctcgaaagccaaaccgctgatgatgtgcccggccattttcgacgagtacccatcattcatggacgagagccaggtatccctgttccagctggcgcgatcggcgaatgtgcccatcatcattgctttccagggcgttggcttcctccagaacatttcccctgccttcgtcgagatggtgctgggcaactgctggacacacctgtactgcgacatccgggatgcccagacgcgggagttcgccgtcaagcttgcggggacgatgatcaaaaggttcgtccaagagtcctctggcagcagcacgggacagagttacgcatccgagcaatcaggtctctacacaaacgactcggaaggcgccagctcaagtaccggatacaaggcgacgcgggaggacatcctgcaacccgaagactttgcgtcgctcgaccaaggcgacgggatcattgtcgcgaagtcgggaacctatcgtgtccgcatgccgttggtgaggaacagcttcccgaatgtccacttcaaggacatgcgactggtccgcaggccacgtcgagcgcgctcgggcgtcaacgcctggcaacgattccacgagaagaacaaggcaatgctggaaaagctgactcagggctga

SEQ ID NO: 334035 - DNA, 342 bp, Pseudomonas aeruginosa
atgaattggcaagacaaactgcggcagtgggattgggacttcggggttgtatgggactggtttctcgatattacccagttccatgtgcagcgaatcggttggcccgcttacttggccatcgctgccgtgatcatctgcctcgggcttgctttccagcctactcgcggcctgacctctctgctgattaacgccttcgtccgcatgattttcacctacgtgcagatcgtgctgtcgttggtaaccgtgcagttgtttggattcctgggcaaggtgctgcttgcacaattccatcgaaccaggcgctgggttggccagctgttcgacgagaaaaaaacctcttaa

SEQ ID NO: 334036 - DNA, 351 bp, Pseudomonas aeruginosa
atgaactttcacgcatgggctttagggatcggatatctggcggccattgccgttcagccagcatttgctgaatccgacccgtacgtaatcgatcagcgcgatccccggtatcagcgtgccattgagcacctgtctctcgctgctcaaaaccttcgcatggctcaggacgaactcaagaaggccgaagccagcgccccacttccagggctggatctcgtaaggatgctcgcacaggtccggcccgtggaagagaccatcaacgtagttctgcaaccggagcaaaagcggctccggtaccagaccgttacccccgatggcctgtttttcaccccaactcgagtcggagattga

SEQ ID NO: 334037 - DNA, 396 bp, Pseudomonas aeruginosa
atgcaaatgactggcctcgcgccgcaactgaaaacggaggacctcaaacgctttgcgttggggattctcgcactggcggtgaccatcttcatcgtcgccatgcccgatatcgcaatggctgcgttcgacggcgatttcgcgccggacgagacgatcgcgaagaactccaacaacagcttcctctactggtggcgtctgattgccagttacggtctctgggccgggttggcacttctgctgctgtcggtgcttttcgcaggcgcacgcggctggtgggtattcgtgctcgtggttctgatttccctcttcggtgaaaccgtagtggtcaaggccggtaacctggccggcttcaacatggccggtggtactggttccagttcttcggggaccaagtaa

SEQ ID NO: 334038 - DNA, 378 bp, Pseudomonas aeruginosa
atgcgcttgagagtcacaactgaagcaccgacttatgccttcgcgacgagcccggtgaacttcggaggcctcacccaagaggaccttctgttcttcatcgttcccttggtgatcgtcagcaaaaccacaggcgaaaacctttgggcctttgccgttgcatttttctgcctgtggctcttcaagcgttccacgagaaataagcctcagggcttcctagccctgatggcctcaactttcgtaggcgacctctacgtaatgacgagcgagttccctgcccttcaaaaggcagtcgggaagttcggtcgcttcactgcgcggatctggctcgagatcgggctgattccctcaccgtcttactgcaaccgatacgagccctga

SEQ ID NO: 334039 - DNA, 627 bp, Pseudomonas aeruginosa
atgagtgagcaatacggcgcaccgttgaagtatttcaatttgctcggcgcaagtgatcttcgtgcgggcagagccatcattacgctgatcgccatctcagcggtttttgcagtcgttatcgccgtgctggttggcatgaatagggaactgcaggaaacaaaccggagattgcaaagcgagcgaatcatgtatggattcccaaactctgaggggatctttatcagcgagcggcagattccacagagacacatcattgcattcgtggctgtcttccttgacaactactacaacttcactcctctgtctgctcgaaccaatgccgaagaagcattgagaatgatgtcgccacgtctccgcgcgctgaaggaagatagtttgaagatcgttgcaaaccagtcggttgagcagcagatcacacaggtattcacaaaatcttctccatatcaagtcgaagttaccccacagggttatgtggtgtccttcactgctgaacgccacagggccactttgaatagggttttcaacaaggctaagtacaatgtgaaaattctaatcaagccagtcaagccttcgaagttctacgagtgggcggttgtggctgatgacttcgacatccaggagatttag

SEQ ID NO: 334040 - DNA, 795 bp, Pseudomonas aeruginosa
ttgaagaagcgactgatagctgccggcctttgcgcagccatgtcaaccacgatatttgcgagcgacgagtgcaaccggaatccgcgcactgttgtttacaacaactcgccagttgacatttacatttcaaacgacacccagcgtgcagaggttttgttccccgagccctacctcgacggtatttatgtagaggtaactcagggcatggacttctacccgtcccctatcaaaaacaagctcgcatttcaagcgacagatccgctgtatacgggccttgtttatgtcgatgcgccgtccaagcaaacgtacattctcaaacttataacccggcctggttgcgcagacagccaagtcactatttcgggccagccgatcgctgataggtccgccatggcgcgagactcccgcggaagaattaaaggtctgatgaactatctctacgatgggaaactgccttcgggatatcgcgaacaggatttttcccgactttcagagactgatcgtgttgtgtttcggcagggctcgctggaattcaaacttcgctcccaagttgtgggtccgaagtacatcggcactacttacgaagtcatcaacaacggtcgcacgtcaacaaaagtcgccattgatcaaatcgactatggcaacaaggccgtacgcgagtcccttggaattgccagacaagtttccatgctcccttcctctcggatactaggcccctcccccgaatacattaccgaggtctacggagagtcacatcgcgggttgctattcatcgtatcggagaaagtacagtga

SEQ ID NO: 334041 - DNA, 1524 bp, Pseudomonas aeruginosa
gtgagcgccgataacgatcagaagaagaacgtaataacgaagcaacgcggcctatatatcgtcgctgcagttggtgcgcttggtgttgccatgaacttcatgggcggcaacagcgaaaccacaggtgcgacttcggttgacgcacccaaggcagttgaggttggcagtgacaaagtcaactcgatcaccatccaggataaagatgctgcactgactcagttcgccaagaagatcgaaacccttgaggacaaaatcaagcgaggcgaggaggatcgcgaggctctcaaggcgaagatgcttgaggaccaacgcaaagcagagcagaaatcgaacactgagattcgagctctcagtgaagaagttgcacaactacgaaaagatcaggttgacggtgtttacggtggtatcaacaagctggacaaaggctccagcatgccattgccaccctcctcttctgaaggactaaacctcgaggacttttcactcgagccgccaatgccggcagtctctgcaaacccatcgaactccaaccgttacggtccgaactatttcctgctcaatggcggggacgcgggcggtcagcaattcaacggaaaaagcggaggcggcgcgggctcaactgctgagaccgagcaacagctgtttgccaacatgtcagctcctgagtcgaatggcattcagcgcgctggcgtgaatacctacaacgagaccgacgcgaccctggcaaagctgaacggccgccagccgaacccggacccgatgccggcagcccagtctctcaacgcctccctgccaacccagagtccgcgcgaaacgtatgaagtacccgccttctcttttgtggaagtcaccacgcttcacggggttgcgtgcccgatcggcgccaacgctcctggggcatccgaagaagggaaaattcccgctcgaccggtagtccttccggtgcgcggcatcttcaagggtcccaacggcgccgaacgagatctcggcactatccacctgatgggcctctgctctggcaaccgcaactccagctcgaatacgggccgcgcgaccattcgcatcgagcaactctcctactgggacgagaccggtggtgcccagacggtccctgcaaccgggtacatcgtcgatacgcgagacaacgagcaagacgtctacggccgcctggacaaggcctcaggccgcaccctcgcactccagtcagctgcagcagccgcagcggcatatgcctccaccctgagccaggccgagttcactacgaatagcgcgatggaaaacggaaccagctcaaccaccagccagttaaccgggaacgccacgaaggcggcggtcaacgagggcatcgccgggatgttcaagaagatctcggagcgattcgagcgagaagcaaacgctgcggtagacaccgtcatcgtcgagccgggcatcaagctgcgcttcgtaacagaccaaaccttccgtgttttgaaaccagctgaggcgttcgacattgaccccggcatgtacgacaccctgatctag

SEQ ID NO: 334042 - DNA, 324 bp, Pseudomonas aeruginosa
atgaacatccgcccattcttggccttgtccaccgcattgcttctcagcggttgtgccagtgaggagcctttcaaaaacagtgcttcgatggaccagatctacgatgcggtccatggcagcgccagcagagacacggtctcgctcctgcgccaaggcctgcgcgcgcggccagagcttggctcatcggaaccgtactttccgatccgaaacccggacgttgtagcgccggtatgggtggtgccatacgccgacgctaaaaccggcgtgaagcatggcggccgctgggattacatcatcgtggaggaagcagattgggcaaactga

SEQ ID NO: 334043 - DNA, 474 bp, Pseudomonas aeruginosa
ttgggcaaactgaccatcggcttctgtctcctggcagcggcatccacggctttggctgagggtgttccccagatgtacaaggatgccattcgcgaacaccacacaaagatgatcctgggatcaggccaagacctgactgttcttcaacctgacgtcgttctctatcggaaaattttccaaaaggaaaacacaaccgatcaccgcgagctgattcaggcagacgaaatcccgtgggcacaactcttcaagaaccaagacctcacccttggtgaaatcgtccgactctcggccgcagcgtccggctacgactctcgcttcgatccgcaagtcaaccaagaccaagtgatcaagctcaactcgcatcccaactcgctgcgcgaccttgcggaatacctcacccgagtcagtggcgctcgtgtgaccgtttacccggaagggcgcgtggttacagcaacactcaaggggcagggttga

SEQ ID NO: 334044 - DNA, 2949 bp, Pseudomonas aeruginosa
atggccaaggtaaaaattgacgacctgcatctctacgacactgagttggctggcctggctcgccgcgggtatcagggcggcatgcccatccagttgctttccgatgcattcctgtacgagaagcatggcagctatttccacaccatcgatggtcgcttcgccaaaatctggaagctacgaggtatggatgcctcgctcctgaacaacgatgacctgtggtccctcagtaaaggtcttggtgatgtactgaacaagtatccatctggatcggccggtcaattcattcgtcacacccatcgagatattcgcgaagttcttgggatctaccgtgcaggtattgaaggcggagaagatgagttcgctctcgaaatcgcgaactcgatcgtcgaacgacagattgttgcggcaagctcgcctgaaggtttcttcacaaagctctccaccgaggtccttgagcgcatgcgtgaggactctctggccgagatcgaggatgagaagcttcgaaataatgtgcggactcttctcatgggcggagacccctgggcggaagagggagaggatgacgttcgggccaatgtcaccgagcagattgagcgcgaagtaagccaaggtcgctatccctttgtaacggacttctacctggtcttgctctggagtccggattacctcttcggcaagttcatcgacaacaccgcgaagaacgcactggcttcgatggggcttatcgacgccaacaagctggctcataaggaatacacgaagcacgcaagacgctttggccaactctgtcatgagatcggccaggctttggccacgttcgggttccagccgggctcgcttaacggccaaggcctcatcaaccttcagtaccagcttttcaaccccgttcgctgcttcaaggtcgacccgcccaagtaccggcctgacttgcccatcctggattgcttgaagaacccgagccaagtcgcgtaccgggaaactctcaacaatgccccgatgttcgcctctgtcgaaactgaggagaaaggctggacgattcacgattctggcgtcccctacttcatccgcccagtctcggtactgggtaaaccaacctcgagcttcccgggcatgctgcaggtggccatgtcgggcatcgagagcgaatcgctgatcaccatcaactggagcgtgccctccccagtagcgatgatgagccgcctatggactcgtgggcgcatgcaatccgggaaagaagccatgaaaattggcgacaaggatctgctggctcagcagcgcaatgacctggagaaggttaaatccaagatcagtgcggaaaacgccaacaaccgcgagcagttttttgacgtgtcgcttcacatcaacctgatggggttcgtcgaggcccaggtcgatgatcaagccatgcagttggagaacatgctttggcgtgtggggcacaaagaatcccttcgcggcgacgctgctgtcaggaacagcatgccgttgaacttccgcaagagcagcatgaagctcttccgtcgtgacacccctcacctcacggaaagcttgtcccatctgtgtccgttctttgttgaataccaaggctgctccgaccctgcaatcctgatgaacaacagggcgggacagccgatctatctggacctgtggggccagatgacgaacaccgcgcatagcctgatttgcggtagtaccggtactggtaagtcgttcaccttcaacaacctgttgatggccttgagggtgaagtaccgacctaaagtctggatcatcgacaagggcgactcctacgagagcctctgcctggttctcgatggcaactacattcgccttgcgaccgagccgttcaaagagccgatcaccgggcggaccatcaaccccatctgtatcaacccgttctggatcggtaaaaacgacgacggcaacaacgaaatgccgacgttggaagacatgttcttcattgctcgcatgctggtgatgatgatcacctccagcgctgcagagcagtccaaaacatcggtcattaccccagtgacagtgcctctgctgtatcaggcactcaacgagttctataccgactgggtagctaccaagccgaaggacgaacctcgtttcagggacttcatcccttacctcgacaaaactgagttcactgaacagtcgggcagatcgctcgtccaggcgctcaccctctactacggggccgggccatttgcagctctctttgacggcttcctgcaggtccaatgggagaacgactttaccgttctcgaaacccagcggatggcaaagtctcctgccctacccgtagtcactctggccctgttccgccagatcgacttgtactgcaagttcaagcttgaacgtagccgcaagaagatcgtggctgtcgacgaagcgtgggcaaccctttctgacccgactgccgcatcggcgctctccagcttctatcgagaactccgccgctatggtgccggctgcttgctgatttctcagaccgtgaaggacttcgtcaacctgatccgtgctgagtcaggtgggaatggcgagtcacaggacggcatcctcgagaacacaagccattacttcttcctggcctgctcgcagtcggactacgacatcgcgaaggaattcctcgcatttactgccgaggagattgagctttggcgatcgcttgcatctctgcccccgctgtacagcgaagtcttttaccggatgcggacaaccaaatccgaatactacagcggtgtcttccggctcttcgccagccccatggcgctttggatcgcctcgtcccatccggacgactaccaaatgcgcgagcgcaagacccaggagcttgtgcagaagcactccatctccgaatcaaaagctcgccagaaagcaatctccgagctcgcaaaatctcacccgtatggtgctcgataccatgtcaatcaagctgcttaa

SEQ ID NO: 334045 - DNA, 402 bp, Pseudomonas aeruginosa
atgaatgagcgttcactgctgcgagccatgcgtgaaacggcgctcacgcttctccaggacatcgagcaggggcttgagcgttgcaacctcagtgggggccgcgccgcctgcacgcgcagcctgctgatagatggctatgtattccacgcagaggcagcaatcagtggcgtactgatcaatccggccctacctgatggattcgacaatacgccgctcgatgcgcgcagcgatcagcaccgccagcgctggctgatgcggccatttatcgaaacagtatgctggttcggaactggcggacgtgaggccgaggaacgacgcgtgcagatgctcctgcgccagcacatgccggctcacgccgtagcagacctggaacagcatatcgccgaatgccggcagcgctag

SEQ ID NO: 334046 - DNA, 900 bp, Pseudomonas aeruginosa
atgattgaagaagccacttccagcaagcactcagacacgacggacgccccactggtatccgtcgtagcgccctgcttcaacgcggaaaagtacctggaagaagccctgcgcagcatctacgagcaggactacccgaatttcgaagtgatcatcgtcgacgacggttccaccgacaacagctacgccatgctggagcagttgcagaaagtccacggtttccagctctaccgccagcagaaccagggcgtcagcgcagcgctgaacttcggcctgcgacacgcccgcggcgactacgtagccacgccggacctggacgacatcatgctgccgcactcgttgagcgtgcgcgccgcgtacctcgaccagcacccggaagtcggctgcgtcggcgccctggtgatctacatcgacagcgaaggccaggaaaccaagcggcagaacggcaatcgcatccgccagctggacttcgactacctgctcggcaacgcctacgtctgcggcgccccggtgtccctgtaccgcatggaggccctgcgcgcagccggcttctacgatcccgagatcaaggtgcaggacttccagatgaccctgcgcatcgccagccagggctaccagatccacaagctgccggtgctggtcacccgctaccggcgccaccccgacaacctgtcgcggcgctacaaggtgctgctcgatgccgacctgcgcaccatcgccccctaccagtcgcatcctgcctacgagcgcggccgcacggagttggtcaacaaggccctgaaatacgccgtggtcgcggacaagcggcatgcctggcaactgctccgctcgctgccgctgcggcagtggaaccgcaccaccttccgccggttgaagcgcttccttctccatcacgagagctga

SEQ ID NO: 334047 - DNA, 642 bp, Pseudomonas aeruginosa
gtggacaacatcaccagccaacccgcccacctcaggcttgcgattgcgccaggcgtatcgtcatctcagctctcggcgctgctcgcgctgcaacgagcggaagaacccgaggtcagcatcacgttctttgaagtggcaggtgacgagctgcttgatgggcttcgtgaaggccgctacgacgtgggaatgtcgcttcaaggagcgagcgatccggccctggaaacccagcccttgtggattgagcacatggccgttgcgataccgctgaggcttcccttgcttgagcaggcatcgctcaccatcgccgacctccagaactatccgatctttcgctgggaggctgagacctgttcttcgctggatcgtcggctgctcgcgcgtctgcctgctgacccgcagaaccttcagtacgtgacttccttcgagatgatggcgctatgggtttctgccggctacggtgtcggggtatccgcacaatcgcgtatcaagcacgcccctggatggggagtcagcatgcgaccactggacgacggcccctacgaaatcgtggcgcacctgcataggccccaggggcaagcgaaccctgtttccgaacggttcgagcgcagggcactgcagatcgcaaaagcgctcccttcctga

SEQ ID NO: 334048 - DNA, 891 bp, Pseudomonas aeruginosa
atggaactgcgacaccttcgctgctttgtggctctcgcagaagagctgcacttcacacgggccgcagagcgcctgcatatcgaacagccacccttgtcccgcgccatcaaagagcttgaggatgatctgggtgtggtgctcttcgagcgcaaccgccgaggcacggtactgaccgaggcgggagcaacgttcctgcaagatgtgcgcagagtgttcgccgtcctcaaacaggctcaggagaacgtacaggcggtcgctgcgggcctgagcggaagccttcgcattgccgtatccgacggtgcaatcgatcccaggctgtcggccctcctggcccgctgccgcgaggaagagccggagatcgagattcgcctgtccgaagtgccgttggccgatcagttgcgtggtttgcgctcaggtgacttctcgatcgggtttgcgcacacggcggaagtcggcgacgacatcgttaccgagccactctggcacgatccgctggtggtagccgtgcccgcccggcatcctttactttcacacaaggctgttccgctgcatcagcttgcgatctacccactggtcttatgtgacccgcaggcatgcgaaggctaccatcgtgaactggcgcggctgctgcggcctttggagcgtccacccgacgtcgccgagcacgtgtcgtcattggacatgatgctcaccctggtcggtgccggctacggggtaggcttcatcaccgaaaccaggatcgcggcgagcctgcgccccgacgtggtgatccgccctctggccatggattccgcagtcatcacgacctacttgctacggcccgccggcgaggactcgccggtgtcggtggaacgattcatcgcgcgcctgcgcgcgcactcggacgattga

SEQ ID NO: 334049 - DNA, 3222 bp, Pseudomonas aeruginosa
atgaagctgatccacaacaccggttcgcagcgcgtcatcgatttgatccgccctcatctcaagcgtggcaatcagctcggttgcgtgacgccttcgttctctctttacgccttcgctgaagtccgagaggctctgtccaccctggaacgggtccaattgattgtgcctcccgacgatgcggtgcttgaactccttggttcggaaggtgaccgtgccgcgcgcaatcgtctgcaggcacgctggttggccaatcagtgcgcgaagtggatcagtgagaaggttgatctgcggcgggcatcaagatcagtgcctcaaggtgcagcagtcatgcgcaggctcgatggaacgcctgaacaagtggtgctggggtcgttcgccttcagcacatcaggccttggcctgacgccaggcaacccattgagcttgattcaggcatcggaatctgctgacgaggccgcgcagcttgcccaatggttcgatcaccagtgggcaaatctgcaaagcgtttctgccaccgattcggaggacaagagcaaagggcgtgatgccgttctcgaagcgctgcgagcccttggtgagcaccgcgacccgttcaccatctacacattgatgttgcatcacctgtttcgtgacagtggcgacgagatggatgaagagcgcatcgtcaagtccgccaccggcattcgcaataccgtggtgtggaagaagctcttcaagttccagcgcgacggcgtggtgggcgcgatcgacaaactcaaccgctttggcggctgcatcattgccgacagtgtcggcttaggcaaaaccttcgaagccctggccatcatcaagtaccacgaactgcgcaacgaccgcgtgctggtgctggcgcccaagcgcctgcgcgataactggacgctttacaaggccaacgacaagcgcaacgtccttgcaggcgaccgtttcaactacgacgtcctcaaccacaccgacctgtcacgcgatggcggcacatccggcgatatcgatctgtcgcatgtgaattggggcaactacgacctggtggtgatcgacgaatcgcacaacttccgcaacaaggccacccacaaaggcaaggagtcgcgctacgaccgcctgatgcggcggatcatccgcgaaggcgtcaagacccgcgtgctgatgctctcggccacaccggtcaacaaccgcctggccgacctgcgcaaccagattgcctttgccaccgaaggcgatgacaccgccctgatggagcacggcatcgccagcatcgaggccacgacccgcaaggcgcaggcgcagttcaaccgctggctggcgctggacgaagctgaaaaaacaccgacccggctggtggagatgctgggtttcgactacttcaccttgctggaccatctcaccatcgcccgctctcggcggcacgtggagaaatactacggcaccagcgagacaggccgcttcccggatcgcctgccaccgatcaacatcaaggccgacgttgaccttgcgggcgagttccgcgccatccgcgacatcaatcaggaaatccgccgactcaccttggccagttatgcgccgctgcgctatgtcctgccccacaaacaggaagcctacgacgccaagtacagcacgcagattcgcggcggagaaagcttcttccgccaagcggaccgcgaagaaagcctgattcatctcctgcgtgtgaacgtgctcaaacgcatggaaagcgccgtttcttccttcaccctgacactgcaaaggcagctcaaggacgtggaggccacgctgggccgcattgagtcgcatgccgatgcactggaggaaatcgacattgccgacgtcgatatcgacgaccccgcgttcgagtccttgttggtcgggcgcaaagtcaaggtgctgctggatgacgtggatctgatccgctggaagcaggatctgctggaagaccgcaaccgcctggcaaccctgctggcggctgccaaacaaatcgatgccgcccgcgacgccaagctgaccgcactgcgcgacttgatccaacgcaagtgccacgatccgatcaaccccggcaaccgcaagatcatcgtgttcactgctttttccgatacggcgcactatctctatgcgcagctcgctccctgggccaaaagcacgttgggtgtcgatgctgcgctggtcaccgggagcgccggcatacagaccaccttgcccggtctgcgcaaaggcatgagcgatgtgctgtcggcatttgcgccgcgcgccaaggagcgcccggccgaactggccgctgaaggcgagattgacttgttgatcgccaccgactgcatttccgaagggcagaacctgcaagactgcgactggctgatcaactacgacatccactggaacccggtgcgcatcatccagcgcttcggacgcatcgaccgcatcggctcgcccaaccagcgcatccagctcgtgaacttctggcccaacatggagttggaggaatacatcaacctggaacagcgcgtcagcggtcgcatggtgctgctcgatgtctcggccacaggggaagaaaacctgatcgagcaacaatccggcaacgccatgaacgatctggaataccggcgcaagcagttgctcaaattgcaggacaccgtcatcgacatggaagacctgtccaccggcgtgtcgatcaccgacctcaccctgaccgacttccgcatcgatctggcgcaatatctgaaggcgcaccccggcaagctcgacacccagccccttggagcctatgcggtgaccacgacactggatgccgatattccccccggcgtgatcttctgcttgcaagcctgcggcccggcagcaaagcccgccgcatcgtccgactacccgctcgcgccgcactacctggtgcatgtcggcgatgacggaaccgtattgctgccttacccccaggccaaacgcatcctggaccgcctcaagcgcctttcgctggggcgcgaacgacctgatgaaagtgcctgcgcgcggttcgacaaggccaccaaagggggcgaagacatgcgccatgcccagaagctgctcgcggcggcagtggcatccgtcgccggcaagcacgaggaacgggccgtggccagtctattcacgcccggcggcacgcacgccatgaaaggcgaattcgccggcagcggtgattttgaggtggtggcattcctggtggtgctgccggaaagggaggcagcatga

SEQ ID NO: 334050 - DNA, 807 bp, Pseudomonas aeruginosa
atgacggtcatcgacgcgcacgccgttatccaggcattgggcctgcccgacagttgccgggtagagcagcgcgtccccaagaaactgctgttggagaatggtgtgcctacggcgtccgacaaacgcttgatcaccgatgccattgaagaaatccagtggttcgccgcgctcaagcccaacaccatcggcgtgcctgactaccgggacgcgcagcgcgagtaccttgagatcgcagtgctggttgtgaccttgcggggtaccgtcaaacccgccagttgctcgcggctggctgaactggtgcaccgtgcggtgccttatccggtgctgttgctgttggttgaaggacaaacggtggccttgtccctggcccacaagcgctgggcgcagaacgaggccagcaaagtggtgctcgacggcagccttacgttggccttgctatcccacgcaaccgccaatgccacggcgaccgatgccgcagcacgctccgaagccgagcatgccttcgtgcaatccctgtcgattgcacaccagccccagacctcgttgcacgccctctatcaaggctggatggattgcgtgcaggccctgcaggctgcgcggcggacaggaaactaccgaaccacggcaacgccggagcaggcggcggcgcgtcggcaggcgctggccgattgcgagcggcttgaaggcgagatcagccgcctgcgggcacaaggcgcgaaggaaaagcagatggcacgccaagtcgaaatcaatctccaattaaaagcactgttggccgagcgtcagcagatcgctcaatatctctga

SEQ ID NO: 334051 - DNA, 1233 bp, Pseudomonas aeruginosa
gtgaaggccacagaaaccaacctgctcaagttcttgaagaaatctccgcagttcgtcattcccatctatcagcgcaattactcctggacggaagcccagtgccaacagctgtggtcagatttgctgaggtcgggtcgtgacgagcagattaatggccatttcatcggttccatcgtttatgtggagcgtggtctgtccaccgtcaccacccaggaagcactgctggtcatcgacggacaacaacgtcttaccacgtgcaccttgttgattgcagcactggccaagcactttgaagccaatcagctgcctgaattgctggacagtttctccgcgcgaaagctgcacaattactacctgctcaatcctgaagaggacggcgagcgccactacaaactcattctgtcggaaactgataagaagacgttgttggccatcatcaaatccgcaccgatgcctgcggagatcagtacccgcatagagcagaactacacgctctttcaggcgctgataaacaagcatcaggacgagctcaaagccatctgccaagggttggccaaattgctcatcgtcgaggtgtcgctcgatcgcactcaggacaatcctcagctcatcttcgagagcatgaattccaccggccttgagctcagccaggccgatctgattcgcaactacatcctgatgggattggagccaaagctccagactgagctttaccagagttactggcggccgatggaaaaatcgttcggccagaaggcctacgtgacgcacttcgatccctttatgcgtcactatctcactgccaaaacaggtgagattcccaacgtgcgcgaagtgtatgctgccttcaaggctttcgctcgcgccagccagcttgataccactgcgcttgttgctgatatccacgcctatgccagctactactgcgccatggcgcttggtgcggaaacggagtcgaaactaaaagaagcttttcacgatctgcgtgagctgaaggtagacgtagcctatcccttcctgcttgatgtctatcacgactacaagcaagcacggttggctgcggacgaattggtgagcatcgttcgcttggttgaaagctacgtgtttcgccgcgccatctgcgccattcccaccaactcgctgaacaagaccttcccaggcctgagccggacactgaaaaaagaccgttatctggagggctctgttgcaaagattggcggcagtcagaggtag

SEQ ID NO: 334052 - DNA, 765 bp, Pseudomonas aeruginosa
atgacggatttcaagtggcgccatttccagggtgatgtgatcctgtgggcggtgcgctggtattgtcgctatccgatcagctatcgcgaccttgaggaaatgctggcggaacgcggcatttcggtcgaccatacgacgatctatcgctgggtccagcgctacgccccggagatggagaagcggctgcgctggttctggcggcgtggctttgatccgagctggcgcctggatgaaacctacgtcaaggtgcggggcaagtggacctacctgtaccgggcagtcgacaagcggggcgacacgatcgatttctacctgtcgccgacccgcagcgccaaggcagcgaagcggttcctgggcaaggccctgcgaggcctgaagcactgggaaaagcctgccacgctcaataccgacaaagcgccgagctatggtgcagcgatcaccgaattgaagcgcgaaggaaagctggaccgggagacggcccaccggcaggtgaagtatctcaataacgtgatcgaggccgatcacggaaagctcaagatactgatcaagccggtgcgcggtttcaaatcgatccccacggcctatgccacgatcaagggattcgaagtcatgcgagccctgcgcaaaggacaggctcgcccctggtgcctgcagcccggcatcaggggcgaggtgcgccttgtggagagagcttttggcattgggccctcggcgctgacggaggccatgggcatgctcaaccaccatttcgcagcagccgcctga

SEQ ID NO: 334053 - DNA, 204 bp, Pseudomonas aeruginosa; identical to SEQ ID NO: 133770

SEQ ID NO: 334054 - DNA, 915 bp, Pseudomonas aeruginosa; identical to SEQ ID NO: 27201

SEQ ID NO: 334055 - DNA, 684 bp, Pseudomonas aeruginosa
atgcctcgggcatccaagcagcaagcgcgttacgccgtgggtcgatgtttgatgttatggagcagcaacgatgttacgcagcagggcagtcgccctaaaacaaagttaggcatcacaaagtacagcatcgtgaccaacagcaacgattccgtcacactgcgcctcatgactgagcatgaccttgcgatgctctatgagtggctaaatcgatctcatatcgtcgagtggtggggcggagaagaagcacgcccgacacttgctgacgtacaggaacagtacttgccaagcgttttagcgcaagagtccgtcactccatacattgcaatgctgaatggagagccgattgggtatgcccagtcgtacgttgctcttggaagcggggacggatggtgggaagaagaaaccgatccaggagtacgcggaatagaccagtcactggcgaatgcatcacaactgggcaaaggcttgggaaccaagctggttcgagctctggttgagttgctgttcaatgatcccgaggtcaccaagatccaaacggacccgtcgccgagcaacttgcgagcgatccgatgctacgagaaagcggggtttgagaggcaaggtaccgtaaccaccccagatggtccagccgtgtacatggttcaaacacgccaggcattcgagcgaacacgcagtgttgcctaa

SEQ ID NO: 334056 - DNA, 555 bp, Pseudomonas aeruginosa; identical to SEQ ID NO: 199598

SEQ ID NO: 334057 - DNA, 309 bp, Pseudomonas aeruginosa
atgacctccgcgcaaaccaaactgaaccagtcgatacaagccggcctattcgacgccgcagagcctgccccggttcttctgcaggtggtagacctgaccttcgacgagaaggtgaaagccgcggttgaggccatcaagcagcaggtgcgcgaaggtcgtcgcctagtggtggcctggtcgggaggcaaggacagcagcgtgacactgaatttggcgtttaccgccctgcgcgatctgatcgctgaaggccacagtgttccggcactgcacgtaatccattcgaacactgggatggcaatcgttatttaa

SEQ ID NO: 334058 - DNA, 426 bp, Pseudomonas aeruginosa
atgaacatggttgaagtacaaactgaggagctgatcggcgcggcactggactgggccatcgcaacgattgaaggcctgccgataaagtacgacccgatggctttcggaaatacagcgaatggaggctactggatctgggataaagcgcctggcggcatgatggccaagatcggcgacaaatacagcccctcgagcaactggagccaacttggcccgttgatcgagaagcgcgccatcgtcctgggcaaccacgaatcgggagacccgagccgccaaggtgaattttgggggagcgctcattgcttcgactcgggcaccagctttgaaacctacaagggcgtcaaggtggccgcctgccgcgctatcgtcgccaaagagatgggccccgtagtgcgagtcccgatagtgctggtccagccgggctga

SEQ ID NO: 334059 - DNA, 234 bp, Pseudomonas aeruginosa
atgagccagcagcactccccactccagcaactcaccgccctcggctacgccgtggcatctggagccatgcgcttagacgtcgcaatgtcgatgggcgtgtccatcctggcgcgtgacgatcagggtgccattctgcagatcagctgcagcaagggcatcctggctatcacagccgccaagcaaactccccagctcaccgccccggcgatcctcttgaatcgcgtcatcgcataa

SEQ ID NO: 334060 - DNA, 492 bp, Pseudomonas aeruginosa
gtgtcctaccgcgtaatccccaatgagcatgctgtacagcatttggaactgaagatcggtcgccaaagctcgaacttcgcaaacaacctgtattcggtcatgaattcgctgatggagggcaagttttctggcggtctctgggagctccgcgagtacaacaacggtgcagttgccatggttctgccgcaagcagaccgtgtggtggtcgcatcgcaggcttgccagcgcaatctggagatgtccctggaggccctgtccctcatcgcgaattccatgcttctcgtaggcctttgcgaacaagcggcctttcatggtcatgaggaagaagcactacacctgcgaaatctcaacgacgtactgcgcgatgcggtcgatggtctcatgacttgcgtgctgagggacggagagctgcaggaacccacagaagcggatcgccttatgccgatggcaaagcatccggaaagggctcagttccgtcggttcatcgactga

SEQ ID NO: 334061 - DNA, 660 bp, Pseudomonas aeruginosa
atgaagattacgaactcattcacccgccaggttggccagctggagaacactgatgatccagccaccccgatcctgttcaggtcgatccatcctgcccaggaccaagatctgctgagcagcattcaacacgacgtgggcctggctcccgggcttgccctgctctatgacgacgagcatgtcctcatctatgaccaagaggaggtcaacctccttccaagtgagcaccagaatttctatcgcgctgccagtagcgccagcacctggcttgggattgcctgggagctctgcgtaaacaccgacaacccggactcaccgatcgaggtactttcaagcggctgccgcgagcacatcgagcgtctggcaactgccctcaatgattcgatccagccctccacttcggtactcgtccctctgcgcagtgtcgttcatgaggtggacccgaatggcagcctgtatgccgtgacctgcagactcgcagatgatgatgatgattctgtctatcacgtgcgctgtgcggatgagggaaccgcccaggaagtggcaatccgcaacctctacgaagaggcgggctctagcccggaccccactgctgaaggtcatcgtcagcactacatcatcacctcccaactggtcgccaccccggtcgcgagcaccatctaa

SEQ ID NO: 334062 - DNA, 552 bp, Pseudomonas aeruginosa
atggcaaagccggaaatcgactggttggtttatgtgaatggcgtggaggtagggcaggtcccccacgaggaaatggagcagatcaccgcgacggtgaagcgcgactgggtggtgtatgtctcccagggtgtggaagtcctgaaaacggcgcttcggatgctgaagctcgcagtgatgtgtgccccggcggttgcgttgcttctactggtgttcgacgctcttagctcgccagttgaattcgatcgtgacttccagctgcgatctcctcacgagctggttctggcatatgctgcgttcggatacctgatcgcgggcggcaccacgctggtcatgctggctatggggtgccggtttggcttccaaaaccagtttacggcccgcgtcgtgcgctctaccaggagattcctggcggtaccagcggacggtgaggtgcaaatagaagggattcaccgccatccacaaccgcccgtgatgagttggtggcagattctccgtgcagcactcaaaccgctgtgcaagagaggggaggtgcaaccaccggcgcaaggatga

SEQ ID NO: 334063 - DNA, 378 bp, Pseudomonas aeruginosa
atgtcgaaccttatccccgcagaaatcctggccccagaagtaggggctcttgtcaattacggcaccgacagtttcggcaaggaaccaggtcggtaccgggtaaccggctacatgtgccgcgtggaatcgaaacctgatttcggtgacgacttccttggcgagatcctcttcgactcttgcagggacttccagggcggcaagatgcgttactgccttcgcgagcaggcaacgcatgtgaccttgaccggtatcgccggcgcaatcgcccccatagaagaatgcaccgtcacgggcatggttccgtggcccgacgaattgctgaaagaggctcgagagaaagcccgaagaaaaggtgagcgcggtgaaatgctgttctga

SEQ ID NO: 334064 - DNA, 261 bp, Pseudomonas aeruginosa
atggaaagcgagaatcaccgtcagacgccagcactccccgccgtgaccttggaccatgttcagggctttggggagcaactctgtagagccattcgtgagctacggtgtgacccggagttcagtgcaaagaatcttcgcaccgcatatcagcagggccacaaggatgctctcgagcaagctgaagacgccacccgtgaggcgcttgagcgactaatgaatgggctcgccggcggggatagtggcaccgcgcagagtgggtga

SEQ ID NO: 334065 - DNA, 705 bp, Pseudomonas aeruginosa
atgcacaagtttcgacgctctctgatggcggacgagatattcgaaggtactgatcttcgcacccaatgggagctccacgcccctatcgacaaacgcacattcttcgccctgggcgatatcctgatctgcttaggttggatgacctggtgcgttatcggtgatggtcgtcaactgctggaagcaagcctatccacagcagtcgttttctggatatcgaacaccattgcagcgatatgcctcttgcttgccttcaaccggatcggcaaggccatggagataacaagggaatataagcgccaggccgccctcctcaacaactggcttgcccagggttcgtatgaccatatcagcgtcgaccatggcgttctgcagctggaaatccagacattcccgctcgacagacttcagatcacggctgttcatggagagcttgacccagactccattccctccctgactgtctatggtgtgaccagggacagccaccagacgaaagacagccgcggcaatcgacattcgcatttcgtggttgcggtcgacttcctaatcggccatcaagaagctggaaggcgtgtggcggaggcaatggcattcgttgggaacgaagctgttggtaccaggttacagcggggtttcggtgacgctgccggcgagcaattgctacgggccttgaacgagaaagccagagacttcagcccagtctag

SEQ ID NO: 334066 - DNA, 336 bp, Pseudomonas aeruginosa
atgaaccaccgtatggatactgttggccgtgcccgcccacaaacatgcacccggagtctggacgaactgatcgcacgtcgcagcaaaatcgacaggtatgcctttgcgctggccgcaactgcgatcgcgctggggttcatcggataccaggctccctccgctgttgctcgccacctgggcttggttgggatgatcgtgagtgtcttctcgacgacctacctgatcgacatggccgacggaatgacgaacaccgtccgcgcgctgacgccgaaaaagggccagagcctcaagactgtacccacccctccccaacaccagccgacccaagctgcgtga

SEQ ID NO: 334067 - DNA, 621 bp, Pseudomonas aeruginosa
atgaatgaactgatctcaaccatcgacgtttccagcttgccgaagcgagaggcactggaggcgactgcccaggaaaatgccttccgcatcgcacgggacgctccctggatagtgaatgcaggcgaaatggcggctgaaatcggtgatcagaagggtagtctcaaggcgaaatacatgcgtcttcggaagcttggcgatcggattgcagaggccatcggccctcattcggcctgccagaagacctgcagccactgctgccatatcgcggtggccatccatgaagttgaggccgacatcatcgccgaggcgactggcaggaagcgcacccagtctccctccggggagccggtaggtgaactcgccaaccgttacttccggcaaccctgtcccttcctgaagcagaatgcctgctctatctacaactccaggcccatggcgtgcaggcttcacttctccatttcgggcaccaatgctatgtgcgatacgcgcatcgcccctgtcgactcgacggcgatcaatctgaacctcaatgacttttggttcggatacatgtccgtgatgcacgtgtcgccgatggaagatgttcggcactacttccccaatccccaaaccaggaaatga

SEQ ID NO: 334068 - DNA, 324 bp, Pseudomonas aeruginosa
atggcagagttcaccttcaccgcgcacctctacaagaatttcggcatcgcactccaggtctgggatgaggaaagccttccctactgcacactctctgtgaacattccggatgccctgttgaaaacggatgaattctgcgtcaactgggatgtcgacgaagacctggcacagcagctcctggccaccggccgattcgaggacaccggactcgcctgtactgccggtcatgccgttgcaccgatctggcgtttagtctgcccggagttgctcgagcatgtacggcagcagcgggatctcgcgcggcaccacgttcagcaatcctga

SEQ ID NO: 334069 - DNA, 417 bp, Pseudomonas aeruginosa
gtgagcaagcaagaacgtctggagcacgccaaccagctgatccaagtcatcgcccggcacggccggcgctttttcttcgatgatacgaccaacaccactgcccgactggagctcgaccagcgcggcaaagtgtggtttcacgaccactactccaaagcccgggtttacacccaccctgcaacattcgggaacggctggcacggttttacccacggcggaaccatgcggagtctggttgaagcgatgcgtgactacatccaacacggccgccagatccccgtgttctggctcggttttcagcgacagtccgacaagtccaatatctggggctatgaggacgaggcgatgtccgccgtcaggatggaaggcagcgcccttcccatcatccacgggaaacctgaagaggtgttcgactga

SEQ ID NO: 334070 - DNA, 225 bp, Pseudomonas aeruginosa
atgaaaaaccttttcctgatcgccctcatcggcctcgtgatctatgcagttcactcccaaaaagtggagaaggctgcagaagatgctgcactcgctcaggcttgcaacgctgaacgactcgctgcactgaaccacaagccgggtgattcgatccctaagcggaacctcgcctgcatctcttttgaatccaataaagagaaaacggtgtatgctcctcagggctga

SEQ ID NO: 334071 - DNA, 225 bp, Pseudomonas aeruginosa
atggtcgccatcaccgcgctgaagaaggacgatgtcctttacgatgtcgtctcgcagaaggccggcaataccactctccgccggcaggcggtctacagggttctcgttaccgaggtggctgaagatcattcctatgtcatggcccgctggaacggaaacgcggagcgaaagtaccgcgagggccaggttaagaagtggcgacgcaccgctcccaagaaggactga

SEQ ID NO: 334072 - DNA, 2658 bp, Pseudomonas aeruginosa
atgcatttcgatctcaattcccttgctgagcatcagcacgaaggcctcaacggcaccttgcaggtattccaacgggggaaccgtgcccaggttcacatggcatgcggcacgggcaagacccgcttgggccaagcagtggcgttcgcgactgctgctgattgtgtcctggtactcctgccttcgctttcgctgatcagccagacactggccgcctggatcagccttggtcaactccctttggatcgcatcctatgcgtctgcagcgacccatccgttgcggagagtgaggatgaggatgtgggcatcgtggacctgccggtagaggtcacgacagatccattggctattgggacgtttatcgagcggcggtcgaccggcccgctttatgtcttctgcacctatcactcagttcccaccctcgccgcaggcctaccggtcgggtttctcttcgacctgggaattttcgatgaggcgcataggaccgccggctacgtcgacgctggcttcaccttcgcgctccatgaccattcgaccctgaaaattggaaaacgactgttcctcaccgcgacgccaaagcatctgccggaaaccgcgcgagcaggcttcgaggtctactcgatgtgcaacgaagaggtgtacggcccggtggcctaccacctttcgatgcaggaagcgatcgcccgcgggatcatttgcgatttccaggtgatcatcaccgttgtgggggactcagggcccaagctacgcgatgcgtacgaagttgtggaggaagactgggcaggggccaacgctacaatccatgccgtagaactggtcagggcgatgcagcaagtcggagcccgcaaggccttcacgttccacaatttcatttcacagtcgcgcctgttcagtgacaccttgaacaaggtgggagatcgactcgcccccggtattcagggttggcacgtcgacggcaggatggccggtagcgaacgtcacctgatcttgaggcagttcatagaatgcgacatgggcgtcgtctcgaatgcccgttgcctttccgaagggaccgatgcaccggtcgttgatatggtcggcttcctcgatccgaaggagtcttcaaccgatatcgtccaggccctcggccgggccttgcgtcgtgcccctggaaaactgaaagggtatgttctgctccctgtccgcttgaagcttgggcacggagaaaccgtccaacaggcccttgcgcgatcttcgatgaagcacatctggagagtgctctcgacggtggccgagctggatgaccggataaaggacgaactggtgcagatccgccggcgggttgatcccgattcgtggggaattactccagtcagctccctgctcgacaagctggaggtgcacgccccggccgaactgctcgaggcggtgaaggagttcatccagcaccaactggttgaccgcctcacagtgtcttgggaaacctcattcggtcatctgcaacggtatctggaggagtttgggcattgcgccgtgcctaagcggtacgtgacagccaatggctcccgtcttgggctctggtgcgcccagcagcggaccctacacgctcaaggagttctggcagatgaccggcgcgttcaactcgaagcgatcggattcgatttcgatccacacgccacgtcttgggccgaagcattccaggaactgaggcagtacaagaggaatcagggccatgcaaacgtcccagccggccacgtcactgggaccgggcgcaacctcgggacctggtgcagcgaacagcgaaaggcctaccgcgctggcaggctctccgatagtcgcgaggagcagctccggtctgaaggattcgcttttgatgtcaacgaagacctctgggaagagaacttcaaggccctgcaggccttcatcgagcagaatggacacagcaacgtcccggaaaccgtagagggatctcggggcatcaagctagccgactggttgaggaaccagagaacgcgccgaatcactttggcaagaaagcggcggctcgaaggggtgggagtcagcctgcaggctgtagctgaatcatcctgggaggatggttttgaagccctccttgaatactttgaggacacgttgagtcccagcccgcctctggaatacgagagccccggtgggtttgcgctaggcacctgggtgagttaccagcgccagcgctatcaagccggaaagctggagttgaaccgcgtatccaggcttgagcgcctcgggttcgtgttcaacatggagtcagccgcgttcgaagacggcctgatgcaactccgtctgttccagtccactcatggccattgcgacgttccgaccacttatgtgaccgcggccggctacaaactcggctcgtggtgttcgaaccaacgcaccaggttgaaatcccggcccgaagatccgcgggcaaaggcattgattgatctgggctttaagatggacccgattgcagcagcctgggaaaagcatttcaccctagccacggcgtacgtggccgaacatggctcaatgccctctacctaccaagcctcttccggtgagaaggtgggagcctggctctaccggcaacagcaaaagctgaagaagggcacgttgccagaggagcaggccaggctgcttgcagattcaggcttggcctga

SEQ ID NO: 334073 - DNA, 954 bp, Pseudomonas aeruginosa
atgcaggaaatgctccaggaatggttcaactctgccactcagtgcgaggaagccgacgtcgaccacgagttcaatcgtgccctggagcacctgatgattttcgcggagcgcccccaggacctggttgctgaagacgcctcctacgatctggccacactcccacgcttcgaccaattttgcgaagaaagtgaaactgctcgcttgtctggtgaaggcgccttcatccgctatgaacatgcggcacaactcgttcgcgcattggaactcaaggtctcccaggctgactttaactacgacagcgatcgggctgcctggcaacgtcgggaagccgaactgctggcgctcctgggctccccgaccactaccccaattcaccagtgtcgagagatgcacaacccgctttgggaagattgcactactgaagacgctgagaaggcgcgcgcagagggcctggaggttcgtaccatgtactgcctccctgaagacgctgtacgggtggggttggagcaggagaaccaagatctacgcttgcagtgtggcggcatggaaatgaccatcgatgagctccgcggctcgctccgtcagctccagcaccagctggccgagatctcgacggacgcagttcaaggcgttgaaccggttgcgaagtgcggccgcggcccggtggcctctttctgccacctgacggactatggtcgccaagtgctgcccgaggggcggcattctctctacctggcggcccaagtaaagaacggtgtcctgctgatccccgacaatctgctcagtcaccgacaaagctggcgtgcagcgttcgagcgcctgattgagctggaaccagaaagccatcaacctgattgtgatgaacgtggattctggaagcatgagttgagggcattcgaccatatgtacgccgatctggaccgcattaaggcagcgcaccgcgacaaggtgtga

SEQ ID NO: 334074 - DNA, 450 bp, Pseudomonas aeruginosa
atgaccgaacaagccctcatggcaaccgaagcccttccgacccagacctaccgcgatccccgcgatgggaaagtcatctggagcaacaatggagaggcctggcacaacgaaaccctggccgaagtcctcaagcgcaacgaccacctgctggtgggttccaccgtcttccgcggcgaaatgcagtatcccgatcctgcagactacgtccccgacgtcgatgacgtcctcattcacatgcaagaagaggcagagggaagtgactgcggcgaatgggtggaggactacccggagccttctgatgaagcgaaagccgagctgaaggctctgcttgaaccgatcaaagcttgggcgcgcctgcattgccgtcccgacttcggtcttgtcgagaacgtccaggagcacgttcttacccaggaagacatcgatcaggccatggagaccgaggcgtga

SEQ ID NO: 334075 - DNA, 630 bp, Pseudomonas aeruginosa
atgcaactgcgcaacaccaccgaccaagacatccacctgtccgccgatcagctcgagcagaaatacagccccgccggcggcggccaacacccgacgttcacccgtgaagactggcgcaacgccgtcgtagcagacgacaccaccagcggctactggtcctgggtaaatggccagatccagtcgctccttgatgactcccttctcgagcccagcgccagcaaggtggttgaaccctccatggacctggtggctgacgagaaaggcgtccgccaactgcacttcgtagcaaccatccatggcagcgtggacgtgaacgatggcaaaccaggtagcccgagcgtcaccgagagcgaactcggtcgccagatcagcgattccatcaacaccatgatcggcaatggtggcctgaccggggacactccggccgtcgtcgacagcaaatcggtcagcatctgcgtcgccgaggtgctccatacctcccagcagaccatctccatgcttcgtgaacagggctacgccgttgtgctgttcaacaaagacgaactgggcaatgccagtgcatctgcacttcaaaaccgcctcatcgaattggcctccgacgagatccagtacttgcaacctgcagagtga

SEQ ID NO: 334076 - DNA, 1506 bp, Pseudomonas aeruginosa
atgcaggcagcaggatacgcacttcttcacgagcggctggcgctctcggctgtaccactaagtcttccagccattgtacagcctgtgactcgtcttgagcgcatcggccaaaccctggccgtaccgcctgccatcgcaccagccccggaggacatactggggaatgtgctgtttgccctaaagcatgagggcatcaacctttcgattctcgcacaaacgctcccgcggattccggttgaagagtttgagcgggcgctacaggccgcacccaacgggatctatatcagaaaggccagcttcttgagagaagccttcaccggcgagcaactggcccagcattcccccgtccgcgggcccttcgtccacttgttcgatccggagcgctacatcacaaggccgggcaatcggaactcgaagtggcgagttgaattcaatggccttggcgatctcacctactgcgccaccgtggagcggacgcctgccataaccgagctgctcgagcacgatattcttggccgcgcgaaagctttcatggagtctcttccgccgggaatgatggatcgcgccatcaactgggcctacctgagcgagacgaaggacagtttcgcgatcgagcgtgaggctccaacggaagacaagtcacggcgctttatccaactgctgcgccaggcccatgagcgccaaccgctgactgaggaatacctggttgggctccaaaacgcgacagtcgcaaatccttacgatcttgccgctgccttccggcatgaacagaaccacctcgctggcgctcttcaaggtgctgcaggggtgacatatgtgccgccgccacctgagctctgcagggaactgatggagagcctgatggggtttgccaacgaggcccccatgcagatcgatccacttgttgccgcgggaatcatctccttcggtttcgtattcctgcatccattcatggacggcaatggccggctttctcgtttcctcatccaccaagcgctttgccgtgccggcgcgctggagaatggtctactgctgcctgtgtccgtggccatgaagcgagaagagcgcatgtacctggaagcgctacagacgttctcgcgcccggtacgagacttctgggatgtgcagtggatcgactatggccaactagccttccagttccgcgggcacccggcggtataccgcttctgggatgctacgccttgcgtgaccttcactatggtaatggccagacatgcattggaggttgagctaagggaggaaactgcgttcttggagtgctttgacgctgtctatagggccgtagacgagcgatttgatgttcgcggcagtgagttggcacagctggtaatgatgtgcctgaccaaccaggggatcgtttcgaaaaaccggcgaaagcagttccagtacacggtgcctgaggaggtgttcgagttcatcgagcaggtcgcccagcaggtactgggcgaccaacgcaacgagggcaacgttggggaaggcgagtag

SEQ ID NO: 334077 - DNA, 549 bp, Pseudomonas aeruginosa
atggaattccacgaagttgtccgtctcgtcagcaccgtttccacgcatgcagccaaggtgctgtcggaggcactggccaaaccccgtgccggcgattggctggcgctggtcgacgatgaggccctgcaagcgcactccgcgatggagcaagccttgcgggaggtgcgcgaattgaagcgcaaagtgagtgaagacgctccggaagaggcttacgacttcctgagccgctgcgacaacaccttcgaatactcgctggccaccatcactcctcgccgtggagatgaaccggcggaggctcatgctggccgtgcaggatcagctaaccggcagttgacctacctggtgaagctggctggcgtttacatcacggcatgggatgagaatgacgcacagatgcgcgactacttcgaaagtggttgcctctgcatcctgaaggacaagaccctgcagaaagcgccagccgaaatgtccaacgaagacgcagtgaagctctacatggacaattgcaaatgcagccggcacccggagcatggtctccggaagggttaa

SEQ ID NO: 334078 - DNA, 948 bp, Pseudomonas aeruginosa
atggaaagggaacacttcctcgcccagccagatgtcgaacaatttgtccgctggctgaccaaccacctacccactctccaagtacacctcaagtgccttcccagtcagttcgttcccagggggctagatgtgcaagttcaaggcatcgaagccgtacagggccaataccaatggaagggcaaatgggcaacagtcaaagtccggctggatgctcttcgggaagacctcagatcggcagtacaggccgaagaccaggacgatacgttcagcgcctgtgccgccattctcgattgggggaatgtgccgtcttcgaagggctttctcctggaactcagccagaatggccaattggtcaagtacctgaccgaccggcaaccccttttgagccctgcaggcactcagaagctttcagatctcaccaaacaacggttcagcagattcaactcgggcctgactaaagtccatgcgcttttggatacggatggttcccccatctatgacggaagagtcggggcggcgatcgctatgctctaccacctgtataggggttcgtcagaggctcgggccgccggccaggcttcgcaccggatgttcggctggggaccggggctcgacgatccagaatctgacaggattcgacagatccgcaatcccgcaatgctcgggcgcggttacaacgggactccccagctcctctaccaaagccctcacatttgggcgcagcgccagctgatcctgggctggatcatgcgagccgtgctcgagcggactaccttgttcaaaggtgaggacagttccctggctcaccggtgccatgccttagaagcagggctcttcatgatgggctatgaccttcgcgcgctgatccctggggggtggtcgatacctgacccgaaaaagaaggtctatcgtcgccgcagggatgctggcacacctctggtagcctga

SEQ ID NO: 334079 - DNA, 249 bp, Pseudomonas aeruginosa
atgatggaagagttcaacggtcggccattgaccgacgagctacgccggttggccaggaaaagcatcggcgactgtcagaccgtcatggtcctggccgccgacgcaatccagaatcgcacgccggcagacttcaaaggcagacctctccacctggccctcggcagcttggcccatcggaatatgggggatgccaagacggcgatgttggtcgcggccgatgtacttgaagccaggcttacccagccatga

SEQ ID NO: 334080 - DNA, 222 bp, Pseudomonas aeruginosa
atggaaaccaggctctggactgttgcccgcttccctgttggtagttggaccacaggtggaaggccagaggattctgactacgaattcagcgaggtgtaccagatcccggcggagagccgggagaaggccaccaagaaggctcaggcagttcgctcccggcttaagaagaagggccttcccttcccgacccaaaaacaaccttaccgcgaagatttcaagtag

SEQ ID NO: 334081 - DNA, 342 bp, Pseudomonas aeruginosa
atgcgccctcaacagaaaactgtcctgggaagccacccgaccagcctgccgccacccagtgatgacgaactggccgacatgaaggccagcggctacttcttggacaccaagagattcccttgcgggcgcgtcgccggcgttatcaagttcatgttcacctacgccatcgtggccgacgtcaccgtaacgagctattcaaggcgttggtgctattccgacctgatggctaccctctgcgccctagaggactgggatgactacgagaccaggcccgaaggttggcatcgagagactcattctggagagcgccggagcgctgacgggaaggtcgagttctactaa

SEQ ID NO: 334082 - DNA, 162 bp, Pseudomonas aeruginosa
atgatcaacgaaaccacctatgcagggatcagcgttcccaaaagcctgatggaacagtgcaaggcgcttatcgccaacggaaaggtgattgacgctatcaaggctttccgtgctgagacggggtgcagccttcagaatgcgcgccgcgccctcgagctttga

SEQ ID NO: 334083 - DNA, 369 bp, Pseudomonas aeruginosa
atggatgcgaacctcaatctcaaagcggccctggcggtcgcactcaagacggccgagactcagcgcgccacagtacctgccttgcctgaaggctggattcaggctgcaagccaagcattcgtggctgatgacagccaggcaatcgaagctgcagccttgaccatcatcgatgcgcattctggatacgctgccagctgggacaagcgcccctggcttgctgacctgcgcaccgcggcgacagagccactcgcgcggcggctggcgaaacgcctggttgccgaggaaggccatgagcgcgcgctgcatgcctacatgcgccgcacaggtgctgatgagcctcgagctcgcagcgtactggcgagcttctga

SEQ ID NO: 334084 - DNA, 495 bp, Pseudomonas aeruginosa
atggctcggaaagtagagaaagcgcgccggcttgaggtgagtgcaggctcggcagaattggtttgtgttccctccgacaatttcgatttcaacgtgaaggcctgcgcagatgcggtcgcggcgtttaagagaatcgatcccaccctggcattcaaggattgggaggaaggcaccaccggatacagcattgagcgggcactcgctgatgctgcccggcgctgccgtgtagtcacggagcgtgaaggagaaaccagctctcggcgtgccgcgcgccttaaagtgttccggccgggacaagaagacctggagtgtgtgaaagcctcggactacgacaaggtggtaaaggcttgtaccgcggcggccaagattctggctcgtctggaccctgacctgaatttcagggactggcaggatggttctggccgcatcatcgagaaggtcctcgcccctgccgcacgtaagtgcaaagcagtggcagacgcagaagccctctga

SEQ ID NO: 334085 - DNA, 132 bp, Pseudomonas aeruginosa
atgctcgttgacgatgatgatctgtcgcttgaccggatggacgacaatccttcggaaatcgacgctgacgaagaagcccttgatgcccaggacgatgaactggcatccacatggacggataccgaggattaa

SEQ ID NO: 334086 - DNA, 492 bp, Pseudomonas aeruginosa
atgcacatcagcattttccattcggtacaggcacccctggatggccaccgcttcgcctatggaaccctggcagaggactaccagggcgacgacgtgatcgccaaagtcgtgttcttcaacggtaccgcccagattgctggccggtgcaacgtgaacatcaacaagggcctgatgcccagttccgaggacatcatcaaggcatacgttggccggcaattcaccttgctggacaaccaagcgatcgtcgacgagttgcagacagccttgaaagctgagtcgaagaagcgcgcgcagggtgtagcgcacatcaatctcgcagttctcgccggcgaggtgctgcactggcgacagcttggctgcctccctgagagcggcaagttcagagatttggcccgcatctgcgcggaatatgccagtagtggctctgagtaccaggaagccgagcgcctcgttgaaatcgaagcgttaaagcatgcccagtcggctcggtaa

SEQ ID NO: 334087 - DNA, 339 bp, Pseudomonas aeruginosa
atgaacaccctgacttcccctgtaaaacaactggccaatctcggctacgacctggtcaatggtgccatgcgctttgaggccgcgatgtcgatgggcgcctcgatcattgtccgtgacgaaaatgggaatgacctgcagatcagctgcaacgaaggcaagctggttgtgggcgctgccgtggcaaagcaagggctgaccgtacccgccatgatggtacgccgcaatgatcggcaaccctgcgacagcaaaggtgggatgagcgtgactccggctcatgtcgccaagaaacccaatgtgccggcggccatgctgcgcctgctggcacgcagccaaaagtaa

SEQ ID NO: 334088 - DNA, 702 bp, Pseudomonas aeruginosa
atggtcaagatctttgtggacgcccgggaggtcccatcacgtattcccgacgccctgcgcgagatgggcgcagaggtcgaaatcgtgaatctggaggttggggactacgtcctgagcgccgatctggtgctggagcggaaaaccgccctcgacttctgcatgagcgttaccgatggcagattcatcaaccaatccagcaagatgatgatgaacttcaagcgccggatctggctgattgaaggcgacgtctactccaccagggctcagattcatcctgatgcattggatggagcgctgagctacctagcggtcgtgctccaacaaacagtgctctggtacaaagcccccaggcgtgcggcaggcatgatctaccggctagccaagcacgagcaggaaggactcgactacgtgcctgccactcgcaaaggtaaggtgcccgccggcgttggccagtctttattcaccttggagggtttgaatggttgtggcccagttgccgcgcgcaaactcctcgagcacttccgttccgtacatgcggtgatcaatgcgtcggtggagcagctgtgcgcggtgaaggggatcggtccgaagaaggctcaggctatctacgacgggattcacttccaagtttcggaaggcatgtctgttgaagagcagcccagtctctttgctgatccgccggcatcagatccgttggtttga

SEQ ID NO: 334089 - DNA, 177 bp, Pseudomonas aeruginosa
atggccgccaagcaagagaagtcgatcgctttcgaagcaggccgccaggcctaccactgcggggtaccgcttgagcagagcgcactccgcaaactgcgcatcggcagtgcccagtacgaagattatgtcgacggctacgaatgcgcgaaggcagagacatcaaagcgccagcagtaa

SEQ ID NO: 334090 - DNA, 147 bp, Pseudomonas aeruginosa
atgatcgtgaaggtatccctcaccgccgacgaactcgctgacatggacatgacggagcaacagtttcatgaccacgtagtggcagccttggatgacgcgcaacccgatctgcccgggttcaatgtcgaagtagaaatccaggactga

SEQ ID NO: 334091 - DNA, 180 bp, Pseudomonas aeruginosa
atggcacaaagcctcgacgaattcatcgaagagatgaagaaggacctggagtccttcgcctcggaataccgcaagtcccacgcggaaaacccggagcacttcccgcttgttctcgacgacaacaacgaagggctatggctggagtttctggtggaccatgccaccagggatcgtagttag

SEQ ID NO: 334092 - DNA, 393 bp, Pseudomonas aeruginosa
ttgcgctggcagctaattgaagcagtagtcttggacaagccagccgagggcgatccatgcaacggttgcggcctttgctgtatcgctcaggtctgtgacctcggtatcgcgcttggtgatgatcggaactgccgtgcattgatccagaatgcggacaacaccttttcttgcggcctggtgctcgacccttaccgctacttggacgctgatgccgttaagccctggcggatcatcgatgagatgagcgggagcaatgctggcgaggaggcgctgaagaaaatgaacgccgagggcctcggcgctgggcgaggctgcgattccgatgatgaagaggcagcgcagatcctcgaagaggcacatgcaaactggcagttgaatctgcctctgcattga

SEQ ID NO: 334093 - DNA, 378 bp, Pseudomonas aeruginosa
atgcgcagcatattctcaaacccaatcttcgagcttgtagttgccggcatcgtcattgctgcgcttgcctcaggcagcatgtacatctgcgccaacctgttcgaagagttctatctcctcgccctcaaaaagggagatacggcattggttgaacgaatccagctccagatggtgttcggtgcagttttcaatctggtcgttgtctattttctgcacaaactctactcggccctattccttagtggggccaggctcaacgggatgtctgtcaacagggagccgatcatccgatcagctctcaacaaggtgatgtttggctcctgcatcttcggcatggcctctgttctgtcggtctttactctgaagttctggaggtaa

SEQ ID NO: 334094 - DNA, 423 bp, Pseudomonas aeruginosa
atggctgtgccgattaactctattcaggttggccgcgtcttcgaattccctggcggcgcacgccgtgtcgtgaagctttccccaccgctcggtaccgggttcaacgtggagtgggagtacgccgatggtcagaaacgccagggtaagcacggcggttcccagtgggtgcattatttccgaaggtctgcgaaacgggaactggtggtagacggccccggcggtcaaacccgtgcactgcgaacttccgaagttgttcctgtcctggacgcaccgatcgacgtctccatccatacgacctgccctagaaagtgggccttcgtggacctggagacgggtgaggtctggaagcacgacggacagacgttcatccgcgcttccactgatgaggtaaaatcggtgacccgtgcgcttggaagctgctga

SEQ ID NO: 334095 - DNA, 297 bp, Pseudomonas aeruginosa
atgagcaaactgttcaatgccgaaaaggtattgtggctcgcagcccaagagaagcccctgcatgtatcccctaaggaagccgcatgcttcagtgacctagacggaatcgtcgaggagcgactcgccgccggccatttggaaaaatgcggctcggacgactcgggggactactaccgctgcaccagggccggcctgatcgacctctacaaaatgaagatcgcttggcggaagaagaacggcaagtcgatcgaaaaggaaatggccaaactcaacgaactgctggccagcgccagctga

SEQ ID NO: 334096 - DNA, 186 bp, Pseudomonas aeruginosa
atgaccaccgaaacccatcgggactatccctcactggagtgcccactgtgcgagcgactgacaaagccgcggagcctgaacaaggatggcagcgtcacctacagctgccctcctgaccatgtgaaccacggccagcgatacacctggcgaatcgcagaaggcggtgaactggtcgagaagcggtaa

SEQ ID NO: 334097 - DNA, 291 bp, Pseudomonas aeruginosa
atggaacagctgactatcgatggaaacccggtcgaaaagacaatcaaccttcgttgtttccgagtggacgaccatgactactacgccgccgccgacgaggccgaagccctccgactgcactccgacctgacgggcattgactgtgaggaagtcgacagttgcaccgaggttgtcggcgatctgctcgacaaaccatggcaggaagaagacaaaccaggtgtcgctgtcggtacgcttcgtcaatggctggccgaggccaaggaacctggctggctggccggtaccgagtaa

SEQ ID NO: 334098 - DNA, 378 bp, Pseudomonas aeruginosa
atggcattcgagtacgtgcgccagcactatcaagtcccagcatgcgttggccggcgcgttaccgcttacggtgaaccaggcacgatcatggcggaccacggccattacatcggcgtggttttggatagcgacccgaagaagcggattcggaattaccaccccacggacgagatggtgtacggggaagttacgagtgacctccccctccgccagtttgaagtcctgatctgggggaggaattggtgggattctgcacggcaaaccatgcaagtttgggctgccaaccacgcccaggccaaatacaaggcgtaccaggaactggatgactgtttcgaggacgcaactgcgatgttcggcttcaaagcccggctggcctga

SEQ ID NO: 334099 - DNA, 225 bp, Pseudomonas aeruginosa
gtgcatcaaacccctgaaaccgcccccctcacggccatgacggagtcccaagtgctggcatggatcgacgagcagacctggtattcggacctgcacaagcctaccccgtcgaacttgctgtatttcgcacgcgccagggggaatgccaacctgacggacatcgatgaacgccggtgggtgctatcccataccccggccggatatgagttgaagtgcctggactaa

SEQ ID NO: 334100 - DNA, 135 bp, Pseudomonas aeruginosa
atggatcttgttcaactgcttgacgcgatccgcgcttactacggcgataccagccgcagtcgcgaggccacccgcgaaggtcttgaagaggcccagagcgaaatcgagaccctgatcgacagtttggctgactag

SEQ ID NO: 334101 - DNA, 273 bp, Pseudomonas aeruginosa
atgcctgagaagctgaagccggtttgtcatcgtgcgttcttcttgagcgctccccagcactgggggccatgcagcaaggagcaccatgacatggtcaaggccaacccaaaggaatggcctgattatgaggtgcaggagctttacgtccttcctgcgaatcatgtggtcctaccgcgggatctgctggagcgcattgcccacgacgatgaaggcatgtccgatctagccgactttgaagagttgaagcggctccttcgtctccagcaaccgtaa

SEQ ID NO: 334102 - DNA, 585 bp, Pseudomonas aeruginosa
atgaataaggtgcaacgctacagcgtggatgcaaggcatctgcacccacaaggcttcctgaccggccagggtatgggtgaggtcgtctacgtcgaagagttcgacaaggtagccgccgaatcccaggcaaacgccaatgcgctcgcagcggcacggaaagagattgccactctccgcgccatgctggggttggcaccggagtggatggccctcactggcccggggcaggtcaaacaaggggacatgcttcgctttaaggtcggagacagcgggatcgaagcgccagcgcaactggtacttcacgagggaaccggccgcgaagaaatcgtctacaaccgtgggaaaaaccactatttcatcaccgccatggccgtcgatggcaccagctctcacaagagcgtcatggtgaaaagcggccaggcccgggcgggtaatgaacagcttctgcgtcgacttggacaggtcatcgcttggcaatgcttcggcgactgcaggatgttcagcgaagaagcggtgccggcccctgcggaggtcattgcagagctgaacgctgtgctgaagggcgcggagtccgtccatgcctga

SEQ ID NO: 334103 - DNA, 216 bp, Pseudomonas aeruginosa
atgaagcgccgtccaactgggttcgttgcgacctgccagtgcggcgttgccattggtgcgatggacatcaatcgcactgagcgagcggatgcgggcaggctgctcggcaaatggctgtacgacggttgcaccgtcgaaccgcgcttcgccggcacctggtccgcggaaatcggtccgtgtaagtgccccaaggcacagggagaccagcatgaataa

SEQ ID NO: 334104 - DNA, 2247 bp, Pseudomonas aeruginosa
atgtctttcatcccttccccgtcgaaatccggcggccgaaccgaagccgacgtaacaccgcaagctatgggccttgcgatgaacggctatgagatccgaaatgctctggagttcctagccccggagcgcacccctgagcagatgagtcatcgactggtgatcgaactgcactccgcagctcaggagatccgctgtcctgagtccggcctttacgcgcgccacgagagactcccagacgacatcgccatctacctggttgaccatgagcccgcccaggtcctgcccacccagggtatagcgccgtacgacaaggacgatctcgatgctgacgatcaaccccaacatgtgcccagcctcgtgctgaacggctatcagttgctgaacgccatcgagttcctggccccggacaacacaactgagcagctcgagcagacgttggtgatcgaactgcatgaccaggacgaggacttccctgtggcaggcttatacgcataccacgaggagtgccctgaggaaggggcaatactgctgctcgagcaccaggaaggagtgctggccggaggtggtcaagaagagacctacgagaccaagattgcgaacaccctcgagctggtgaaacaggctgcagatgccatccaggttttcaccgggcacgacagcagcgcgaatctgcggcaccactatggcgagaaatggtgggagaagttggacgacttgcgtgacaaactgcgcgcaatcgggaagagcctcccgctcgcccactccgaccagttgctggcgctcgacaagcagtgccgggatgatgtcggtcgcgcgttggggctcatcccttcggaagatcgtggttttgcttggtcctatctgcttgccgcaatcaaaaaaagagtgggctcacacgtcctgtcctcgatcaaaacggcagttgagcaagctggcgcgcatgaggcagttcaggatcaacgacattctgattggtcgtgcttcgatccaacgttcgtcattgagtatctgcgcgagagcagcaccttcgatgctgacctcatcgggaaaatgttggagtacgccactcgccctgtcgaagccgggcaagcctcccctagccctgtgcttgggtgtgactaccgaggcaaacatttcggagcgccgtacctggatgctcaatgccagaatggctacctctgggacgaagatagctgcgatgagccaggggggccgctgctcaacggcggtgatattccgtgccccaaatgcaatgccgcggagtacgcggaatatctgcgcctggacgaggacgacaataccagcccggtgcctgttggcgatatcgaactggcacgcaagctgttcgaagaaatggcactcattgcggatgacgagaaatgcatccacatgctggccggcgcactttccaaagcacagcccctggcaccccgcgacgatattctctcccgaatgagcgaactggagtccgtcgccaaagaaggcaggccgaagaagatcgttgtccgactgaagcatcccgacagcgaacccagcggttgcagcagcctgctcaactaccacgaaccgacgcgccagcagttgattactgccggtatcccgctgagtcggcacactcggaatcctatcgtttgtttcgggatgatcgggtgcaagacgacggccgatggtgttatcgaatacacctggggggaatcccaggaggtcctgctcgacaaatccatcccgactgtagacatgacacgtccggcctggctgattccggaactcaaacctgacgttgtgggtgctctgctgctgggaggaatcagcggctcggagtacggcgacaacgacattcaggttgattccaaggtcgtcgagcggctccaggccgaacgtgtaaccaccgaagacgatgtagtggtcgagctggtaactgccgaccagtacaagcgcgacgtcgctggtctgcaagcacgtgtggatctcttcgaccggctggcggtcgctaacaaggcccttgccgactcgttccaagctgaacgggacactgcactggccagccaggcggctcaagtccgcgtgatcccggcaaactggaagatcgagcgtaccggcgagcgcatcatcgtccagcacctgcacaacggtgccggctatgccgcctcccgtgcgggtgaatccggcattgccgaggcggtactgttcctcctcgcttccgacctggttggtgatggcgttgtcgcccaggaggacgaggcatga

SEQ ID NO: 334105 - DNA, 258 bp, Pseudomonas aeruginosa
atgagccggaaacaaaccgccgaagacaaaatcgccaaggtactggactcgtatcacgcctacctgaaggaatggaagtacgacgaaaaaaagtccctcttttcttctggcgggtggggtttcaagggcaagaaccacaccgcccacgaaatgaacagcaagatcctcgcccgccgaaatcaggacgtgcagaagatcctcaagatcacttccgaatcgaacgccggcatgggtgacacctcgctctctgcacagtga

SEQ ID NO: 334106 - DNA, 606 bp, Pseudomonas aeruginosa
atgagtgagacccagcacaacctgagcacatcggccggcggccgcggctacctggtggattacttccagaccaaactcgggcgctacgacttcacccgatacatccgcgatcgcctggctgctgatttcgcctgcattttgtcccagcacctgacaaaagagcaggccgaaaccgacaccatgcgcgcggagctgcaggcgctgcgcgcggatcggacggcaggttggcgttgcttccattgtggcgagcacttcctcgacgaggccgctgccgcccttcacttcggcactcatgagatgcaatcgccggcctgccttatcgacgtggcggagtaccgcgagatggaagcacgtatgcgcagctacaacgacgaggatgccgaaatccaccgagcaatggcgcgccagcgaacccaacatcagctcgaacttcgccgggctgaagagcagggctattcccggggccttaaggacgccgcggatgccatggagcgccagcaaagcttgcatcaacttgagctaagccgcgctgaagggctgggttattcccggggcctcaaggaggctacggagcagatcctcgacaagcaaatgcaggaggactag

SEQ ID NO: 334107 - DNA, 711 bp, Pseudomonas aeruginosa
atgagtaacgaaacggaaagcaccatgccggcgaccctcccccagcagccggaggttctcgcgtacctcaactaccacaagcaggacgtcgccggcctttccttctcgccactttcagggcggtgcaagcagctgatggccgttgagcagtaccaccagagtgtggatgccctgacgtcccagctggacatcgctttgcaggacctggctacggctcaagccgagctgcagcgtaacaaggtcaccattgctgggatgaatgaggcccatgccaagctcgcagggttgtatgagggggctctctcgcagatcaagacgcttactgccacgcccaccttcaacctgtgccgctgcggcgatcaacgtcttccggccgtgaccctggaacgcaactccctgggacctttctggaaagctgcatgccccgcctgcaagcattcggtatcgaccttcaccgagcccggcctcgtccagctgtggaacgcactgtccaaggtgcccaggcccatacctgcacccaccgacgtagaagggcatgtcggtttggtcacctacaccgccttctggaacacctacgtgtccggctacgaggatgggaagcaggactcaagggccagcaactgcgcgaagtacaacccaagcggggcagctcacaagtccatggccctgctcgccagcctggcccaaccggagcagaacgcccatgagtga

SEQ ID NO: 334108 - DNA, 732 bp, Pseudomonas aeruginosa
atgagcaaaaccaaaactggacctcagggaggcacccctttgagcttcgatgagcaagggatcaccggacgttacaacggacagggcctactcgaggtcttcattccggcaggggtctcaccagagcctgtaagcaaaaacgatttctgggccaacgtagcgcattactccctggtcgctgcagctatcactctcacgctgcaaacccgtcaagacaaggtgagcctgaaggacctcgtatccatcctcagcgatctggagaagatgctggtgctggtcgaagcagcggaacccgtgcccagtgactttacaggcgcatttgaatgggttcgctcctgtcttcaacattggaaagaagatacggatggcgcgtggaacttccgccacttcaagattctgcaacaggggctcctggcccggctgaccacgatcctcgattccaaggatcatgtacctgaagtacgccgctattcgatcgacaccgacgggaacggggccttcgcagaagtggtacttgcggaagactacgagcgtaccgtcctggccatgcagtccgctgaagcggagcgcgatcaattcaaagccgagcttgagcggcttaaagatcaggcacctgtcgcattcatgttcagggggcccgatggccgtcttcgtatggatgcctgccgccacaaacccagcgaaccaggatgggaaggcgtgtacggagaatccaggcccgcccggacatga

SEQ ID NO: 334109 - DNA, 651 bp, Pseudomonas aeruginosa
atgagcctcaatccaacgatcatggacgaagccaaaaccgaagttctgagctgtctcgacaacgcgagccggtctatccacgagtttcacgacgcaccagcgttcatgacctggtgggaacagtacggttctggtgatctcggcctgacccacgaccagaaaatcgacctctactgtcagcttcgggttgaggtctacaccttccagggctgcctcgatgagtaccgccgcctactgacgggaaaaccagacatagcaatgagaattggcgattgccattatgcctacctcagcgccagcggggagctaataggcttgacggtgaaccgcaatagcacgatcgacgaggctgagccttacgacttcgatagcagcgcgttcaatacctgcgttgggggctggatggatgaggattaccgccagacacgcaaatggattaccgagcctgaattcgtgccggtgacagtcgatcctctccctgagaagtacatagagtttgaccatgctggccagcgctggtcattcaaccgagatgaactctccatgcttgagagtgaagacagctgcttccactttgtggcgtatcacttgctgtcggaaccgacgactgaatcggtgatcgctttcattgaatcgaatgggttgggttaa

SEQ ID NO: 334110 - DNA, 432 bp, Pseudomonas aeruginosa
atgaccacaaccaatcaacagcgggcggttcaacggaagcaacctaagaaggtcagccccgaagaactgcaagccatgatcgcccagtaccaggccggagaagtgattgcgtcccggctacccttcacattcccctcgggctttaagctcactgaggtggtcccgcaatgcaagctgtgcgggagtgaaatcagaaagcaagactttagggggatctggaaccaggtactgccggatgtcgtggtgatcgatggccacggagtgtgccggtcctgccgttgcatcacagcatttctcatccgagtccgaggggaaagccctgtggtcctggaatcgatcagcgatgaaggcgtttggcagcaatacacccaggaccagacgatgtgggcgcggatcaagcgccagctccgattgctgacctcccgcttctga

SEQ ID NO: 334111 - DNA, 822 bp, Pseudomonas aeruginosa
atgagcacacaaaacacacagatcgaactcggccagtacccaaccccggcctgggctgcagccgcgatcgtacgaaagaacttcagccacctcagcgccaaggatttcgtccttgagccaacgtgcggcccagggcgctttctgcaagcggttccccaatatgtgccggcgctggggatagagatcgatccgcatctcgctcagcaagcacgtgacctgaccggcaggccggtcattaccggcgacttcttccaggtggagttcgaagagcgtccaactctggtcctcggtaatccgcctttcgaaaccaaattcatcgagcgattgctggatcgtgtacacggcctgctggtcgacaatggccaggtggcattcgtcctaccctgctacttcctccagacagcggcgagagtgtgtcggtacaacgaacgctgggccatccagcaggagatgctgcccagaaacctctacgccgggctgaagcatcccctgactttcgtgacgttcaccaaagaccaagagcgcctgatgatcggcctcagcctataccacgaactggcgtacctgcagggcttgccgaaagatgtgcaggaggccatgagtcagggcccagccacctggcgcgaggtcgtcgggcaggccctcgatctgttcgagggtgaggcccacctgagccaaatctacgaatacgttgctgaacgccggccgacggcaaacccgaactggaaggagcaggtccgtaaggtctgccagcagactgcgcgccgagtgggccccgggcgatatgcgaagccggaccagctggacatgctggccgcatag

SEQ ID NO: 334112 - DNA, 840 bp, Pseudomonas aeruginosa
atgccgtggattgatctgaaatcagcactgaaaagcgaggccggattcctggagttcatcaggagcagctataggcacggcaccgtcgtggccctgtgcgctggcgcgattggaatcctgaaccgcaggttggaagccgcggtggctcgcaaagaccgtgacggtcagcgttacctctatacgcagatcgaagtgttgcgaagcgagatgcatgtacggctggaaatccgaaccgaccaggcgcttgcccgtggcgttctacatctcgccggcgaggccgccctggcgcgcgtgcacgactaccaacgagagcgatacctctccgagttctcgaagctgtacccggagatcgtgggcgctgtgggagtgatccgagcaaagttctgggaagcgggtgtatatggtcaagattttccgctctgggcccagcagaacggtttcaccgatacacaactcctgcaagccatccaggtatcgaaactcagggcctatgacgccctggtcgaactgaaccgtgagctggaggagaacgggaaaggcgcccggagttggaaactgaaaaccgagtgggaccgccggcggaaggagatcaagttactctctgatctgcaattcaggtctgcaatctacaagtgcatacgcgatgtgcttggcgaaggcttcatgcccgagcttgaaaaatggatgaccctgaatactcggataccccactttcggaagcttcgagaccgatctcgggactcgaaaccgaacctcaagctccaactgctcccgggccggaaatttcggcctgaacgcactcctcatcaaagcacggtgagttcggaacctcgggcatga

SEQ ID NO: 334113 - DNA, 378 bp, Pseudomonas aeruginosa
atggaaggaagacagttcatcaagagcgtgaccgggaattaccccgtttacccgggccatcccctggtactggcaactgcgatcatggagttctactccgactttccgacggcaaatgcgcctacagaacatggctggtgcgccgccctgagcgatagccgcatccctggagccggggaccacgtcggtgctgcggtgcgctgcttgaatattggagctgaaggcggttcagtagatgagatggtggccgccgcgtgcagttactgggagcgagggcaggccggcgggcaccatggatatgtctgtgccggcatcgagcaggccaaggccgttgagccgaagttccgcgagctggccgagcgttggttcccgaactga

SEQ ID NO: 334114 - DNA, 267 bp, Pseudomonas aeruginosa
atgaccgattccctaggccctttgagccccgaagaagaagaaatgatccgtcggcatcgcgacgagaaggcccagcgtgccgcggcattggcattccgcttgaaagccctcaaggtggccgctgagtacgaagcctggctgcaacaggatgaagagtgtggggattcgttctcgacgttcgtgaaccgattcggctaccaggacagcgattgccaacccatgcacgaatacgtcaagcgaatccataaggcagcaactcctgactga

SEQ ID NO: 334115 - DNA, 357 bp, Pseudomonas aeruginosa
atggcagacaaactctacaaatgcagccgctgtgatggcgctgggaaaatctggctgttcactgccgttctcggtggtgtctgctttcaatgcggcggcagcggaaagcagaaaactaagcccaagcccagggctgtcaaatgggccgtcttcgggcacagccgcgagacaggaaaaatcgggcgcctctacaacgtgagcgcacgcactcaggctgaagcgatcaacaaggcccgtgacacctacgatcgcgcaagtagtgcttggcgtgacgagtggagcatgcaacaggcttttgctcaaacctgggccgagctgcaagaggccggaacgctggaaaccgcaggcatcagctga

SEQ ID NO: 334116 - DNA, 186 bp, Pseudomonas aeruginosa
atggctgttgtcaatgttcacgaagacctgattcgccgcatgcgcgaacgtaagtattacgacctgagccaatggtgcgccgaagagctcgaggagaccgagcacgaagcggagcaacagggtgaatggcggattgccaaggagatccgcgaagaaattgaacgccagaaggcgtactacccctga

SEQ ID NO: 334117 - DNA, 258 bp, Pseudomonas aeruginosa
atgagcattcgcctggaactgcagtgcatcaaccaggaagacccgagcaccgacgactgctacagcatgaacgagcagggtgtgttcgaaactgctgacgatactcaggccgatctgatccgggcctacaagtaccttcaggacctggccacccgtaagggctggaaggcagccaagcttgcccagggcaagaaaggcatgctgtgtccgaactgtgtgaagctgtatgaggcacagactggccacattctgagttga

SEQ ID NO: 334118 - DNA, 996 bp, Pseudomonas aeruginosa
atgaccaccaagaccatcgccgccaacctgatcaccgaaaccgcccaagctgctctggctggctgcaactccctgcgcagcatccacgacaccgccaagaagctgatcaccggcaaacagttgggcttagacttcgatccgaagcgccagaacgccttcgaaatgcccaccgccctcctcgtctgcaatgtcgaagaggcaatccgcagcgaattcgaccaggatgccatccgcggcttcgccgattcctacaaggccggcgagcccgtcgaaccgctgggcgttgtcgccgaaaacggcaaactgcgcgtagtgaccggtttcacccgccacgccggcctgatgctggccatcgccgaaggcgccgacatcaagcgcgtgtgggtgagccaggtggaaggtggccgcgccgttgagatcgtgcgtcagtgcgtgagcaaccagcaggtgccggtttcccctcttgatctggccgaggcctaccgcgagctgatcgacgaccacaagttcactgtcgccggtgtcgcggccgcggtgcaccgcaaggtcagccacgttcgcaagatgctggcgctggtgaacgtggcccctgaggtcaaggagatggtcgagaagggccaagcttccgtctctactgccctggccgcagagaagcagtgcaaggccaacggcgaagacactgtggtgcatatgcaggagcagctcgccaaggcccagcgcaacggctccgcgaagatcaccgcgaagtccgttggtgcgccgtccgccctgtacggtcgcaaggacctggacgtagcagccccggtgctggtccagctggccgaccagctggagaaagctctgcccttcatggccaccccggagagtgtgaaggtcgaactgaccctcagcggtgccgacctgaacctgcaggacctggccaaggcgctggccaacatccgcgcggccgtaaaatctgcccagagcggcaccgagccggcggcgaacgtcggctaa

SEQ ID NO: 334119 - DNA, 381 bp, Pseudomonas aeruginosa
atgaaacacactccagcacacatcgccatccaggcccccgagtacaaggcagtcaagcaagtaatcgccgtcaacctggtggcgcatggctggaccgccgccagccagctcgatatggacatctgctgcctggtggcctcccaggactacgagaccgccgttggcatcaagaccgccacgctcagcctcgagccgcgatcggaaggcttccagctggtaggcaactaccagagtgagggcaacaacgttctgagcaccacctggctgaacatccccagcggcatgacctcggaacagatcgccgagaaagtgccggaattcctggagaaggtcgaccgcgaggtcaaccgcagctacgcccgccgcttgttcctgctctga

SEQ ID NO: 334120 - DNA, 438 bp, Pseudomonas aeruginosa
atgcccattactgaagctggcagcgctccggcccgatctttggccgtgattggcgtattgacctactccgcgattctggtggggctgtctctactagccgcctggctgatctcgggcccggtgggtagcactatctcgaattgcttcgcgctggtcctggtaatgctggtcggtactggacgaaaaaccctgaaagctgcatacggcacccccttgatgtccttcatggccatcgtctccggcattgtcttttctgcggtgtttatcgtggtcgccgctggcctcaaggcggatgtagcgctagcgttcgacgttacctcgctcagtgacttcgatgtcagcctcatcggcgctgtgttggtcgttttcaccgcccactttgtggcgcatttcctggtcagggcattcttctggcgggagttggccagctgggcttga

SEQ ID NO: 334121 - DNA, 423 bp, Pseudomonas aeruginosa
atgagccacgctagcccaaccgaaaagagaccgcgctacacgcccgtgttcgcagtcctcatctacgcattcatcctctgcaccacagtgctggtggccgggatgaccatcccatgggacatcggcacctacatcacgcactgccacgctgttgtcgggtgcttgctggcattacccgtcatcgccaaaggcaggcagttcaaggaaatcgggcggggagttggcgcattgctggtcgccggcctggtgatcggcttcacccttctccggagtgtgttcggggtgcagccgttgcccgaggacgtcgacttcctcgatctacgccctttcgccgcggcgttgatcgtcatctctctcggcatcttggccgagttactggtgcgacggagcttttggccaggtttcagggcacttgggcggtaa

SEQ ID NO: 334122 - DNA, 504 bp, Pseudomonas aeruginosa
atgactaaaaaatggattgaactggaacttctcgcagactcggacgcccggctgccggttgtcgaaggcggcaggattaccgtcgccgaggccagcattcgcaccatcaccggctactccgaccagatgctgggggacgggtgcatcctcgtcctggacaccattgcgaagaacggtggaagccgcctgattcgcgtccgtgacgcctatagcgaaatcgaaacccaactgtcggacctgaccgagtggattgaggtggacatcgtcaacgactctctggcgaagctcagcagtctccaaaccgtaggactgctgcgacgggaggggatcaaagctctgaacgaggtcaaggactcgttcaccggagcgcgcagccaactcactctggataccgttggtgatcacggtgttgcccgtgctctcctcctcaagcagtcgtacgaggatctcaaaccggcgctgcccgagcgtagcgccgtggtcaaacatcaccaggacgcctag

SEQ ID NO: 334123 - DNA, 447 bp, Pseudomonas aeruginosa
atggtcatcccagagctggaggcgctcaatgcagccgaacaggaagaagagtcagcactccaggcctgcctggctttcgcccgtgccgttctgccggtaagtctcctcgtacgtttccagtgtccggagggtgagaaggccctccagcaggttgcgcggtccattgatctgccaactctccccgcagaacaaagtcatcttgcccctatggcatctgaggcgcatgcgctgctgagcaaagaaccgggtttcactgcgattgccggccgctggcaacgtgcgtacgacctttacgacctcgccttgattgacttcatcgtagccgaggaagagcgcgccgcgaacgagcgccagcacgcccaggagcttgcagatacctacgctttgatcgagcaggagctatggcatgatgttcaggttgagaacctggagttggggttgatgtaa

SEQ ID NO: 334124 - DNA, 570 bp, Pseudomonas aeruginosa
atgatgaataatgatcgccggctggcctggcttgatcttgagtcaaccggattcactgagctgcataagcagatggtgtaccggcaccgaattttggaagtcggggttctggtaaccgacggccagttcaacgtccttgcccaacacgtcgtggttgtccataacgacccggctgacgtccttcccttgtgcgacgacattgtacggagcatgcacactcgcaatggcctcttcgacgatgtgtcggcttcctcaaccgacttggccagtgctgaacagcaaatcatcgagttcctggtagagcacggcgtgcaagccaaggcctcaccgttgtgcggcagtggtatccacttcgaccgaatgttccttgaggcccaaatgccggcgctcaatgcgcaccttcactaccgcaatctggatatcagcgcggtgaaggaattcctcaagacgatcagcccagcattcgaaccagccaaacgccagagccaccgcgcgctcgacgacattctggaatctgtcgaagaggcccgcctgtaccgggatctactcgcgcctatcctcgcagcctga

SEQ ID NO: 334125 - DNA, 420 bp, Pseudomonas aeruginosa
ttgttcagattactcatggccttcgtctggccaatgctggtcatctgggccgctctgcaggtcggccactctcttcaggtaatcgatcctgccaaggtaatcgtgcgcgacaaggcggcctgcgaagccttgcagatcccctacgacacctcatgccgtgtggttggtcgggtggaggcaaatctcgacgggacctggtggcttcaaccgagggatgcgggtgacatatacattcgcctgccggagggctccttcccctatctctacagccccgatgattaccacatccgcggcggcaagccggccaccatagccttggtggtggtgaccgctctgctcacgctcctcggcccgctgatcagctggcgcattcaagcacgcagggcaaaacgtgcaccggggcgcggggagacgatctga

SEQ ID NO: 334126 - DNA, 282 bp, Pseudomonas aeruginosa
atggaagtagagttggccgatcaaccgcttgtcggttggacgtacaacgacaacgagataagcgatctggttgcggcccgttccgctgcccaggccctggcgatcctgcatgccagttttcctgaccacacctactaccccgagtgccttgagcaggtcgacgaaaatggctttcgaaatcgtacctggtgctttgatgaaactcctgacgtgaagctgccttggtcggaattcatcaaacgaatcacaattccccgccatctaaccggcgtttacttctaa

SEQ ID NO: 334127 - DNA, 360 bp, Pseudomonas aeruginosa
atgaccatgaacactcccagcgccagcaaagtccagccacatctgaatctcggacctcacttcttcaacgccctatcttgggttcggcagaccacgttcccggaggatctggagcgtgatctggttgccctcggcacggcacctgccctcgcccaggagattgccgagacctatcgccactcgatgagcagggatatcgtgcgcttctacgaggagtacgcttactcggttagcagtgcggagtggcagcagccgctggcggcctatatctcggcccgcctggccgactacgaccggtatggcaagcacgaattaccgatggccaagtacctgctggcgcaactggacaccccgcaatga

SEQ ID NO: 334128 - DNA, 465 bp, Pseudomonas aeruginosa
atgcaacgcacccacgctcccactcagtccagcttgaccttctcggcgcaaacgcccccagcaagctctgctctagccctctgcccggcgcacctcctaccggacgcagtagttgccctggatgatcccatgctccagatcagcgacatggacattcgcgaacacatgcgcgctcgcttcagcttcgacgagatgctcgcagagatgagagctatcagccatctggcagagcagcgccagcaattcggctcccgggctgagatgggcttgggcggcccgcgcagctaccaggacgtggggaccgcggaatcggttatggactggatgcacgaacacgaactgcgcagggtgaaccagatcaagctgtcgctccccagctccggcgaagaagcattggccgcgcgcgagcgcatccagaagcgcattgcggcgcgccgggcagcccgcaccccagcagccgcctag

SEQ ID NO: 334129 - DNA, 450 bp, Pseudomonas aeruginosa
atgaagttcaaaccgtttcctcatcgcttgcgccgactcgatttcaaccagcgcaaggcttccttgttcgagcgaaagcagcaacgtgaggcgaacgctttgccgctctttgctgaaatgatccgagcggaacagcacgactgggaaaccgagaaggagattcgccagcgaagggatgatgcaaccttgatcaactggcgagctcgggaagcgcgagtctggcgcaaagccaggagcatgtttttcgccctaccgagcgacgacagggcttcggtcatccgcgattggaacaccatttggcgcaacgcatggactcccaccaacctgatttacctggtggagaagtacaacggcgtcggggcccagcgtgaagccgcaatgcgagaggagcgccagcagatggatgtccggatcatggccaggctctcacaccaacaaggcctcttttga

SEQ ID NO: 334130 - DNA, 393 bp, Pseudomonas aeruginosa
atgattcagctgacaaccgacgccgcggcccgggcgctgcaaatgaaacggccagacgagccgcataccgtccgagttgcctacaaggggcacaccttcgaagtgacgctggccacgggggcaccttccattgcacctctcgacagcacgccctggttgttcgagcacgatgacccagccttctacatcgacggcgaatggtgggaacaccacgttgaagtccgattattggttcccgatgctggcgcttgccagacccgaatgccggactccaaggtcagcgccagcatacccagcttcatcaaccccaccttcgatgtaattgtcctgtgcgaggaccttatcgcggagtgggttcgcatgggttctggcacgcatgcttcgcgccgatga

SEQ ID NO: 334131 - DNA, 645 bp, Pseudomonas aeruginosa
atgaaccccgcattcgaaaaagcactcgccgcacgctccctgtggatcaacgtagctgtcttctccagcatcgaagggtgtgattcccaggccgaggaggcgttgcaggaggcatatgacgccgtccaccagctggcgagcgatgacgtactgattcaccgccactacggaccccgggccccgctgctccttctggacgtgcctgagttggctgagcagtacaacctggcacacgagctgtacacggagctgtactacgagaactaccgcaacggctcgattggtcagatctcggctgggtggctgaaaccggcctcgcccctagatcagccgtacacgaaatggctggtggcggtggacaagcaggtagcggccttgatggaaatttcctactcgcaagtagctgaggctacccaggggcaagccaagaccttattgctggcctggagccgggggatggatgcagacgaggctgcggaggccgtagttcaggcgcacatcgaacgtgagtacgagagggagttagcggaggaggaagagcgccaggcgcactgggaagacatccaggatacatacgcctccatagaggcagacctctgggctggctggcgcgaagagtgcgtggaattgggcctggtggactag

SEQ ID NO: 334132 - DNA, 375 bp, Pseudomonas aeruginosa
atgctgaacctctacgacccggccgcccgccaggcgctgcgcatgccgcgtcaggaccaggaacatactgtcgaactccgacatcgcggcgaaggctggtgggtggacttcaaagtcaccttcatccccgaagacccgaagcaatgcgttcagcccgaaacatcgggaaccaatacgttggtacagcccgccgcgggggaaaacgtagagtggtggtaccaccgcatggtcgtaaccttcctgaacctaacggaggagccgaacgagagagatccactctcgattattcgacatgaacgactgatttcttccaatgatcactacgacctggtgctcgaggactgccggcagctgatgaaggaaaacccgttctag

SEQ ID NO: 334133 - DNA, 363 bp, Pseudomonas aeruginosa
atgttcgatctcaacaccgccggtgcacgtcaggctctgcgcatgcagcaacctgatgaggaaatggaagttcgtgtgcgatatcaaggccgaatcttcgacatcacgttcctccctgacgaggatggcacccaacccacagaccccaacgatcacccggtaaccgacgagcaggcaaaaggatggctgcgcggagagtggtggtatcaccacatcatggttcacatccgcaaccatgacggctcggagatcggcgatgtgaaggccacctgtgacagctacagcctcctgcccagcttcgccgaaccctacgacatcatcgttcgcctctgtgatgagctcctgaaagaacaccccttctga

SEQ ID NO: 334134 - DNA, 249 bp, Pseudomonas aeruginosa
atggcttcggatctgccagaagcccagaaggtcgtcctggtgcagcgtctgacccaagcgattttcaagcgctccgccgagcaactggcggattcaaccgacctggctggcatggttggccatcgcgtgatggcaagagctgctgccggcgggcgcgtcaccctggctgagttcgagcaggtggcgaggttggagaatcatcgcgatcaggtagcgggcactcccttggcatcccaggcgccagcctga

SEQ ID NO: 334135 - DNA, 546 bp, Pseudomonas aeruginosa
atgccaccgcgctttgtggatgcgtggggccagcccagaaggagcgggaacaaagacgataaagtgatggtgacgttccagatgacgactatcgaggagcgtcagacgctgttcccatcaccgcgcctggtcgacgagcccatgtcgataaaagacttctcggacgtcccctgctacgagctccacgtaaacggtgttttgaaggggttagcgacaatcgaccactcggtatcaatcgtggagcgcgagttgatcatccaggtcgagttagttgctattcatcttgatcgcgaactccgaaagcaaggttttgggcgggcttttctggagtgcataggtcgcgaggccggcatcgaggccatgactcacatttggcgcgaaaggtccgccgccacagcagataggtttactgtgaatttatcgtctgaccctattactgaggagggagcgatcgccaccgaaatactcttggggattgtggaggatttgattcttaatatctgcgccaattggacgatccgtccccaggtccgagatgacagctag

SEQ ID NO: 334136 - DNA, 468 bp, Pseudomonas aeruginosa
atgagccaacagaacgctcgttgcccgtactgcaagaccatcaacttgctcgccgaacagagtctggcgggccatttcatccagtgccagtgctgtggagcgcgcggcccaatcaaggactccgaggcagaagccattgccgcctggaatggggtagacgaatcgcgctcaagctccaccggcgacctgcaggtgctcggcttcctcagtaccgaggcagtggaggcactcctaaccgatgccgatgtagctgtcacctgtttcaacaaagccaggatgatccctaccggcgcgatcgccgttgtccgctatgaccatgctcaagcgcaggttgaactcgcagaggctgggcagtcactgctgacgcttccacttgagggagagcctcagtctccatccaatacctgggcctcgcccttgagatcgactagcgttgagcatgaggaagcccccgcttatgagccatga

SEQ ID NO: 334137 - DNA, 303 bp, Pseudomonas aeruginosa
atgcgcccattagacgtaattctctgcctcgcgttggcagccacttaccatcggaccgacgctgccgtcgtggcaacggcgaagcgtttactcaagcgagtagagcgccgggacaggcaatcgctctttgatgtgatcaaccacaagacgccgtgccgttacatcatccaccacttggtgaaccttcccgatgaggtcatctgtatggatctgccggctgagcgcgtagcaccacacatcaagctgtcgatggccaaggctcaagcagccagtgccatccagaaaccttcacctgccgcctaa

SEQ ID NO: 334138 - DNA, 786 bp, Pseudomonas aeruginosa
atgaacatggactccatcgacacagacgcggagtacaccatgacgcaacagccccacatcacgtatccgatacccgaacagtggtgcttggtgtttgcagactatccactgggtgagcccgccatggacgcaatccaggggccgctcttcttcagcagcaaacgagaagcgctgatcgaatacctgaagtacctatccccacgactggagcaggaaggtggcctaggagagttcctggatgccttgagcgatctgggcatggtgcccaaaaccctggtcgccgacaccagcggggagttgctccgtcttgcagagacggccgaactggagatcctggagggaatctgcgccggctacggccaggacaggacgtctgaaggtcgagaggtaattttcctgctcgaggctgttccacccgcaaggcaaccctcattcccaccggtaactgctccgctcgcacaatacctggccaacgatgacacctcggaagatgggccccgggtttacgcaacttttcatcctcaagcctggcagaacgacaacgcggtaggcgtagaccctggccctacgcagattgacgtgacgcccgaggtccttgcgatggaccggccctatgtattggcgatcatggacaacacccacgagtctgacggtttcattcacgctcggctcgcacctgagtgggtacgcgactggcaaggccccttctacatcgagtgcaaggaatctatcgagaagttctttgccggcaccgcaagcgtggataactccaccgtgactggctaa

SEQ ID NO: 334139 - DNA, 513 bp, Pseudomonas aeruginosa
atggaaacaaccatcaacaacctcaaagccatctctgctgcccgcatacggctgaaggacctgcacactcacgaagatggtgagggcgaaaatctggcttggtcctgcatcgtattcctcaaggggaagcggttggggagcgttcaggacccgggtgaagaaaagcccctgtcgatcgagatcgactccatccagcaagtggcaatggtaaagacgttgaaggagcacgggtatcagctcaacctcgaggctgcttctcggatcgacgccagcgatacccacgaattcctggagcaggctctaccgcaaatggctgacgaggtggagtggttcaacaaggcgaagccgctcttgaagtccaacaccttgttccgcatccgaggtgacgaggaaggaacgttccgtctgatcctcgcgttgtacaacgagaagacggagcacgccctccaatcgcggttcggcgatcagcttgaggctgtcctgaacaaccagttgaaggggatcacgctgtag

SEQ ID NO: 334140 - DNA, 564 bp, Pseudomonas aeruginosa
gtgtcgatcggagccagcgacggcttcaaccgtgggttcatcacggtaacgcctgatgccctccaagggcaccgtttggggacctatctcatgtggcgagtggtgcagttcctgcaccaatttccagatgcacaggttaaccccatcaggttgagcgatgcccaagcatacgagtccaatcacgtgcgcagaaaccggttctacgagcagatcggtctccagttcgattattacgatgggaagcatgagaacggtagatcgcgaccggtgcgcgccggtgacctcatccttgtcgagacctggaaacagaacattcaagaactgggaatggccgactatctcaagcaccaagacagccacgtacgtggtctgtgccacgagatcagcacgctggcgaatcgctgcagtagccttcaaaacgctcttgatgatgcgcgtcgacgtcccatccggtggggagttgtcaccttcatcgctaagcatctgcacatcatcgggccggcggtccttgtcatgatggcggctttggccgcctatagggcccttaacggcgattccagctga

SEQ ID NO: 334141 - DNA, 1116 bp, Pseudomonas aeruginosa
atgtacccaatcaaccgtgatgcactggtctgcccgatgcaccttcgtaccgcccggctgcgcctcaaagggatgtggaaggattctgacgaagcaaccaatgacgtagtacgtgccctagaggctggctggtttctgatcccagctggacgtgagggtaactacaccaaacggcagtttgaggcctttgataagtgcttcgccgcggccccctgggtgaagcagatccaacatgaggctggagattttgacgagaggttgcgggcccgcctcggtgccagatttgaacgtctgttttcaggtggacggaagctgacttctcccctcacccaggcacttgccctcccccatcgggtcgcgcgactaccgctgagcttcgaggccggcgcattcggccccgagcttctggtttcatgccttgaggatacccagaaggtgtgcctgcggattcaagacgaaatgcaaggtcttgagccggattgggtcctggctgaatccgtagatgtgggcgcccttgttgaacacctgaaccgggctaagtgcgtccacctcctgataccgattctggtggctaccagccccagctacctccccagggagcaacaaggatggctttggcaggtccaggtcgggaatcttaccgttaccgaatatctggacaggatcgcgagacgagaccaggaacataccgaccacgtttgtgagtcgtggaggaggcgattcgcacaaattcgcaccctagcttcggttctggagagccttccgtcttaccaccaggcgactattacccggcgtctccagtcggctgattggagattcagggcgaaacgttggcagggaagcttggtaattgatctcggtgaccttcatgaggtcggtgcgaggcaccagctgcgcgatggtttcgagttggtgaacttcgttttggccctggaccaggccctcgaacgggcggaaccgtgctgggactcgtatcaccgaggcgaacacagcgcatttgcccaagtcgagcgaatgagggaggagatggcccaggaaggcccgccgcggggcctaggagacgttttcaggtcgaaccaatcgtctcagctggaatcgccgttaagggccctatag

SEQ ID NO: 334142 - DNA, 1530 bp, Pseudomonas aeruginosa
atgatcagttctgtaaaccacgctttgcaaacaacctggtgggtacaagtgcggccgaggccaagccttcgtcaccgcgatgcgtttatccaactcctagcttccgcaacccacattctgagagacgtcgatggcagctatgtcactggagtacaagacgtcctcaccgcaatccgtaaggcgccctcgttgactgaggccgtattttctgaggtcgatcgcatgatggaagagcttcaatccgcaagccggcgagtgaatgacgcagccgctgaaacgtcagggccggtggcgctattcgtccctggctttggggtcagggcgcaagagttagctcgtggcctccaaggtatgggggcgaaggtcatcacgctctgccaccagatccccttcaaccccgaagatgaggccggaattcgccgctccagtatgctcatcgtcggtgacggagtgctcaacgatccagaggccatccccttcatctccaagatcgtgatgacctctgagtctgatgccctggtcgtgcttgtcgtggagtcctgccctctgacattcgagcagcgtcggacagccacggagctcggacaagttcgtatcctgggactcgatgatgacatccgcaacttgcgctccctattccggagccgaaatcgtgacatcgagatcgaagggtatcgggtgctgcttctggatgactccaggaccgatgcctacctcgcccggaaattcctcaccgaggaaggcctgatcgttgagcacatccagcatccaagccaagtgctggaagctctatcccgattccgacctgatgttttggtgactgacttccacatgccggaggcgaacggggacgtcgttgcctcgatcatcaggcaggacagggacgccaccattcccattattttcctgagccgggagtccaacgccgagaagcaactgctcgccttgtcccgaggggcggacggcttcgtccagaaacctctgaagcgaggagccttcatcaaggcgttgaagtcgataatcagcaggtccaagggattggagtccaggatgagaagagaccccctgacgaacctcctgaatcacggccaatttatggcgtccgccgcgactgttcttgccgaaggcccgccaagttcgttggttctgatcgacatcgatcatttcaagtcggtcaacgatacctttggccatccagtgggggatagggtgctggttggcctggccgaggtgctcaccgattcgctgcggactgatgactatgtcgggcggcttgggggagaggaattcggcattgtcatggtaggtgccaatccaagccaggcgaaaatggttgtggatcggctgcggtccatctttaccgcgattcagttccagtccgaagatgggacctcgttcagttgctcgttcagtgccggtgttgcgattctgaatgtaagcgtgaaggaagcgcaccgtgccgccgatgaagcgctctacagtgcgaaacggagtgggcgagatcgtgttgagatcgccttgcttggataa

SEQ ID NO: 334143 - DNA, 1233 bp, Pseudomonas aeruginosa
atgagcagtctcagcaatttaaaggaggcaacccggctgctgccgggttgggtacctccgttccttttgtcgtgcctggtagttggtctgtatgtactggccgtgttcacttataaggacagaccgagtgatctcgtagagacggcaacgacggctgccatcgtcctctccatcgtgattgctttcgctttcctggtgtcggcgattgttaaagccgatcccgggaagctggggaagtcgatgagcgatggtttcgctcgcggccttcacttcgtttgggcaacagcatcagcaggactggcaacctacgtaggcgcagctggcatttacagagcggtgacagacaacctgggtttcagcatctctgccctcctggttgctgccctgctgggaggcgcctattgggctacgtcctccaagaaagagaccaagccagaaaccacggacccgatttccgggatgtctaaagcacttgctctccctgaaacgttcgcgcagacgccagcccaacggccggcctttcaggtgacaatggctgatacaacacgcttggccatacaccaagccgcacggatcatcgcttacaaaggcagcaattgcctgatcgatggcagtttctacgcagacctcgatctcaatgcccgtaccgccaagatcttctcggacatgaacctgattgctactggccaattcatcaattggcgcatgcacatgcttctgattggtagcgcagcagaacaggtcatccgcggcaccgcaagcgaagcagccttcgatgacctgcagtcgttcgacgaccttgcttcgaagttcttgatgttgggcgacggccgccatgcgttctacaggccagcaaatgatgccgaagcaacgctgaaggcttcacgcctggcgatgatccgcaagaacgtatggtcgcgttgcatggctgccgttgagatgaacaaagaggccattatccaactcgtacgcctgatgcgtattcagccttgcctcacccatggagacatcaaacacctgcttgagaaggtcgagatgccgcttgatttccccatagcggagttcgataccgacgagatgatggagcgcgcgctgctcgggctcgtccatgaggccgaacctgtggaagaggatgatcactcccaaacatcgtccctggacgaacaaccgccaagcacccgaccggacaatgtgcgggagtttcagccgcgcaacaccacactccaggcctga

SEQ ID NO: 334144 - DNA, 318 bp, Pseudomonas aeruginosa
atggctgaaggaaaagcaagcagccctgttcgtcagatcctcacgttgatcctctcggtcacgctggtcctttacatcggcaagatctacctccgtacgccggagtatcgacacatcgaggtctgctacctgccccacaaggctgcccatctcttctgggttgatgtgtggggcgctttggtgcctgacgacaccgcctcatatctcaagcactcacgcgaccttgaggaattcttcaactcctgcgtccagcgcactgcgcactggacctggctccggtcttttggcccaagcaaccaaggtgacaacaatggctga

SEQ ID NO: 334145 - DNA, 1371 bp, Pseudomonas aeruginosa
atgcagcgccagtcaataaccgaattcctccatgaaaaggtgtatcccgaaatagatgcagtctcggcaggcttgctcgaccacctgaagccgacaaagcttcagacctcagggacataccggatgctctgcccggcctgcggaatgcatgaggccttccatcatcctggaacccacttgatccattgtccgcgtaagaagaactgtggcgagtcgacgtcgctgtgggacgtgatggagaaatcgggctactcgaggaaggagatcgtagagcgcctatgcgaactggcccgagttgaccccccttcgaacaaaaatcctgaaggtcgtatcaatggctcccctgcccccctctccccagggcgcgccattatccaagcgacccaaatcctggcccgcaagtatccggaccttcttcagcagctgcagacggatcgtggttacaacgatgagcagatggcgacgatgcgacttggcgtctattcgtcccccgaagaggttctggctttactcgaggagcgcggtatctcccgggaagtagccatcgccaagggatacatcttggtcgaggagaacaacccttcgaagtaccggcgaacgatgaacaatcgtgtcatcggttactggccgcatcctgatggggacgttcgtctctggggacgcctgccttccggcaaaggcgatcgatggaacaagaagtatatgttcgccgactcgctcaagaaggacaccccgtatctgttcagcatgaggaagcccggtcccctaattgctgttgagggtactttcgatggctggtcgatccagttcatggggttctggggtaccgctattgggcaggcttccatcaatgctggtcaggcggccttcctcgcaggtgaaggtgtcaccgaggtggcacatatggtggacggcgacatcgcgggttatgaaggcggaatcgtctcgatcagaaactgcgaacctgctggcatcgtcacagccatcgtcccgcttggccaaggcatggatgaccctgatgcactccgaaaagctggacgcaccgccgagttcgagaagctcattgcctccaggatgaacgcaggcgagttcctggctcgcatgtgccacacctatgcatcggaatctcccccgaacatttccggcattcgaaagatccacgcgatcgttcccatgcttaccccagtttcaacaaagcactggaaggactggagccaaaccttaggagtcagtgagcctaaggacgtcgcctcggtgcgcctcctctcctcactggtcgatggtggctttgatctcgacgaggctcttgccttggtcctcaaacgcacaggcttccgcatcacgctcacacaggaaaccgtcaatggctga

SEQ ID NO: 334146 - DNA, 732 bp, Pseudomonas aeruginosa
atgcgctcacagcgcaataattggctgacgggattgtcacgcgaggagttcgcgcagctcgatccgtgggaagtcgtctgccatcccgagtcaagaccacagtggatcgctgaggttcgttcaaagctgcgcgtcagcctgacggacgacgagatcctgtccatcctgcagatcgggctctacaaggccgtcgcttccgcgatcgagctttatcaagatgtcgagcctcatcaacgtgctgcccatatcatcggcgcggctctcaactacatacgttgggacggacgcggggatgtgcttgctgaagttcctggcagctcggctatcaatatgggtgacctagtaaccgaacttggtcctcgctcccattctctgcagtccgactacatgctcgcatctgcacagttttctgaggcgttggaatacgcacctcaatttctggctgatggggtccttctaccggacgagacgggccaaacctgccaccaatacatcgaacagatccgccaccttctttctgcccgagagcaccacatcctgcggctggctgttattgagaatcaggagtccggcgcgattgctgagatcctgaagatctcaagaaagcagacatggaaggtacgtcgcggcctgaagcgaaagctagctgagatagccagtgaggctggcgcctcgaaggagttcatccgagcggtttcgacaggagcagccgaatgcagcgccagtcaataa

SEQ ID NO: 334147 - DNA, 327 bp, Pseudomonas aeruginosa
atgatcggtgtacacagcgatgcaatgaaggctgtagcggggcatcacgccttcggcgcgcagagagtgaggggttggttggtggaaagcgtggacggtgtcccgtcaataatcgctctggtctatcaggacaatggcgacgtgtgcgcagaggtggtctggatggaccacacccatgcagcagatctcgacctcattgttgcttatctgaatgaaagagctggcgggggagagcacctggttggtgcccttcgcaacatctactgcggtgcgcggccaattgatgctggtacgaaactgggttttaacggcagcactaagcactga

SEQ ID NO: 334148 - DNA, 1014 bp, Pseudomonas aeruginosa
ttgaagaaggaaatccgtgatgccctggctaaagggtatgttgatgagtacgagcactcggtaaggcgccggtcagagacatttctggcgctcctcaattccctgcgtaccgcagcccggtctgctaccgaaaagctcatgcagcttgaaatcgctctttcacgttttccaattgagcaagacgggagaaccatctccacattctggaaatggagagcctcccgaaaatcgtctggctctctccggctctaccttaagtgcaacgagcggattgaggggcgactgcagagctaccgaaaggccatccttcctgatgccgagcctgacgtaatcgatctgctaacttcgctcctggggaaacggcttaccactgaatttctcaacgacctgggtgaccttctccacttttcagaacgtgtgagtcaatgggcgcatacgttgggaatgcctctagacatcgacgtcgttcgctttggctcggtgatcagcgcttgggttggtgcgattgaacggctggggggcagcgctccaatgaagcttgaaaccttgattggccgtttcgagttggtcgactcagaacttcaggaggccttaatcgagttcaaccaggccaggcaacctgtacgatataggtcgatcatctgccgccaggatgtcgatcaaagtgatccgctgggcccatcgcagccgatcttcagggtggtcagaatttttaatcgggtcactggggcccggaaaactgagccgatcgaagagttcaagcggagcatgctccgcgcggagatgaaagcgagcttggctaaagagttgggtcgaaacccgacacctggtgaggtagctgaagcaatagggcgtcagaagaggaggccgccgacgcagtggatcacgagtgatgtcatctctcactgctacctgggtaagcattcaggcagcatccttaggcaacaaaaaactatcgcagcgtctatggatgaatggctcgcactacgcggcctttttcaagcgttgctttga

SEQ ID NO: 334149 - DNA, 1053 bp, Pseudomonas aeruginosa
atgtctatgaagcttgagcaattggttgccatagatctgggcaacggctcgacgagctacaaggccggtaacgatgccagcggggaatatccatccttggttgcaccctatgccggcagcagtcttggtggagccctcagtcgggaagtcttcaccacgaagaacggtcgtcgctacctggtgggtgatgattgcagggaagagggtgcgcgctctcgaagcacagactcgagcttctacaaatccgacgagattcgagtgctctttctgaaggtgctgaaggatgcgaacatcaagaacccggtcatcgctacaggattgccgaccgaattcttcgccacccacgcggctgagttcgaggccgatctgaaaaagtgggcacgagaagacggctaccatcctgagctggtcaagatccttccccagttcgctggcccatggttcgatccagagctcgaggacgaagatggtaacccgcttgatcccaacgaaatggtcaaaggtaagtacggcatcatcgatatcggctacggcaccatcgacggtgggcagttcaataatggtcgtgtcagtgatatccgatacggcgaatccagtggagtctctgacatccacaaagcgatctacacctctctgagtaaccctgagcagttgaacgagctcatcacgaagaagggagcgaagcttccgaaaaacttcgcattagacaaccagatcaacgagtacacgatggatgtctggctgagggaaggccacttcatctggcgtggaaccaagatcgatatggaaccgatcagctttcccgcacgccaggctttcaccgatcagaccattcctcgcttcatcaagcagttgtggggctcaactgatttcctgaaagggatggtagccgccggcggtggaactaccgttcttggccgcactctcttgaagcgccacatcacctgcccgatctacagcgcaaaagaccctgacaagtcgattgtccgcgggtactaccgcttcatggtcagtcagtatttcaaagagcatgctttgatccgccaggggtaa

SEQ ID NO: 334150 - DNA, 438 bp, Pseudomonas aeruginosa
atgcgcagcattcagatgaacaacgacttcgatttcgatacagacaccagctaccttcagcaagacgatgcattttcggtgaacgaaatgctctcggaatggcctacgacgaagaatgcgtttgtgaaacgcctggccaacactttgggccagggtgcgaatttcgaagctctacgcctgcaggacttcatggacctggttggctctacggccgtcgctcgaccgcgtgagactgtcacatacgaggttcaccttcgcgatagggacaccctgcttgtcgatgctgccatcacctcgatcgccagcacgaatccccctatctctgcggacaacgctggcttctttaagtacgcccttcgctggtttgcaaaagagcgtccgaaaatcaagctctctgctcgagctgacggccttttctgggttcacctgcccgagtaa

SEQ ID NO: 334151 - DNA, 213 bp, Pseudomonas aeruginosa
atgctgcccgggttggatgaagagtcggccaaggcggtaagagagactcttgcgatccacggtatccacccaatccctgtgagcggtaactacaacgagaatcttcatcaggcccgcgccggcgagatttgcgttgggggggtcgtcaaggtcgcagatggctggttttcaaacatgaaggtgtaccggaaagcactggttcgttctgcttag

SEQ ID NO: 334152 - DNA, 603 bp, Pseudomonas aeruginosa
atgtgggatctgaagctgctcctaaaaaatgctgggcttccggtgtccatcaattatctgtcgtatggccagatgcctatgtccactgtgcgtacagctcaacgtgaccatggcgttgggatgacattcttcggagacgaatgtggcactggattccgggagtgtgtcgaccactactactactcgccggccctacggctgaaagagcgcggtaaggtatcgttcaaagagtggctcgccccttacagctacttccctgacaacgagtggggccagatgaatcaacggacgatgctggcacagggatttggtgcagacgaatcgtcggcgttctacgactggtggccaacgatggtttttctggtcaaccccgacaatgaagtcgtacgcgcttggcttcctcaaaccggtaacgccgcaacaccacataccattcttcgcgctgtagtggaggaaatggacgtggacccgaagacagtctcattgaccggggctcgcccagcccagtacaccaccttccccaaccatgcatactttggcaccagcatggaggacaaggcggtccaggatatcgccaagatccttgaggatatttcaggatga

SEQ ID NO: 334153 - DNA, 2049 bp, Pseudomonas aeruginosa
atggctgatgttgatgtcgataattccgtcaaggactacgacttcctcaagctcgtagattccaattttgctgacttggtcggttactaccttggtctttggcaggactaccacactcttctggttaactccgccggagtcattatcggaggtctaggtcttgcctggacctccatccttatgatgaggagccctgaggataagctgaggtcggttttcaccggtctcacgggcacctgcctaatgtttttgcttctttcagtctctacattcacattccccggcacaggtagctctgttcaaatggcgcgcggggggggatggtccctgactatagtcggcaacatctacgcaatctttaagtctgcacttgacaaggtcaatgaaggaaagattacggaagatgcattcagcagggcctaccacgtaacaaaccaaaacaccctaaaacgttttgctgacagccctgtgtatccactttattcggactatttaaacaagtgcgagcctgcattcattgctgctaatgggaagtcccccgaagcgttaagtgcaggacgatatgtcggcttcttcgggtctaccggaatcggtgctaatgagattgagttcgaagatagcagaggctttctggacaaggtcacgggcaatggcgaggccaattatgataaccctaccaactccacttggctgaagcgtgatggtggcaatgcagtagtggaaggtacaaagaagggtatggctatgctcgacaagatcgagggtgatagcaatccttatgacggcacgaacccaccccaaggcttcgagatcccaaccgaagcttattgggtgcagaagctctttccagaaaaagctggggaagttgctgaccaagcattgtctcttgacgctagcgactcgaagtacaaaaaatatttgaactcgggcttcaaagaagcaccaactactggcgcaaagcagaacttctatcccaagacctgcaaagacatgttcttgatgatcgatatggcacagagaaatttcaactctgccgtccaaaaacatgctcctgcttatcaggaaaactcattcagacgggatggtgatgatgcggcggcaataatgctcaatcacatacgaaatgaagcatctcagcggaaaaaaggacagtcggaattacttacctatggcggtatgtactaccaagattccgacgtccgcgatccaatgaccatgttgttcgagagcggaacaacgaaatttatggatataggcaaaaccttcagagaatggatgcttactgtaaaaatcccaatgatgataaacggtgccgccatgctcgctgcactaatgggtattacattccccatctttgcagttttcggcatcttctggtcgacaagggtgatttttacttctgttaaaattattgctttttgctttattgttgcgttcgttaatgacctctgcttaacaatggcctccacaatgcttgcagttaatgctgagaccatgcaaggctacaacatgggcaactatgctcaaaactcaaccctattaatatcggccggaacaggccagtacattatctttgttgcactaaccgttattgaaatcatcttcgctaaacttttgctctgggacgatgttaagagtcttggaggcttcaatcctgccggtgcaactacaggattggcggcaaccggcatggcggtcgtgggagcagcaatacgaattgcgggagctgctttgcctggcggaattgcaggtacagctggggctctagccagtggcggtgccagtgctgcgggtgcccctgccggaggtaatcctgcacctggtgggggtggcggtagtggcggcggtggtccagcgcagcagaaagtacaaactgcggcccaggttgcgggcgggatcgccggagggctgggaggtggtggcggtggacaaaatggcggtggccctgggtcatcgggtgccaacgcacgttcgggagtgaaaattccaactccgcaggcttctcagtcctccaaaggccagcgttcgagcctggacgatctcatctga

SEQ ID NO: 334154 - DNA, 1425 bp, Pseudomonas aeruginosa
atgaagctgaacaaacttgccgtcatggtttgcagtgctctcatcagtttcagcaccgcaacggcgtttgccgattatggatacggtcctattgatggcgacggtaaaagcgacagttctgactcgccctggtcccggcgaatggatgatgtgaccggattgttcggtgcaaggcttagtgggagtgccgttaacaaagctggtcgtggtggaagcggtagtttcgataccttcacccccttccaggataagcagcagttcattgttggagcgtatggcgctacccaggtgggtgtaggttgtgatggactcaacctcggcacagtcttggacggtcagatcgggcagtacggcgacatggttgagcagttcattcagaacgcgccggcgctcgccatcatgtacctcgcttacagccagccaaccgtgaaatcggtaatcgacgagcttaacgctgtcggacagtttggcctggatctttcgaacctcacctgcagtggtgtacggcagcgtgccgacaaggcttacgaagaaaacatgcaggtgatggccgaagctgactgcactgtcgaagagggctacaagtccgcgaagtgcatgtctggtgacgggatcaccagcagcctcattacccgaatgaaggacaccaaaaacacaattacaagccgagcgacatcattgatgaatggcgtgtcagggatgaccggcggcctggttggcgtgaaaggtggaggctcttcaagtgggagttcgtcgggatcgagcgggggaggatcaggaaatggttctggttcaggcgcaggttctgctccattgcccagcaagaactgcggtgccaagcccgaagatggcaaaacctccctcgtgctggctgcatctgagcttggttgtgaagacatcaagaaatattcgggcttactgccaaattacagtaccgaagaggacgcgcatacggtcactcctcggaccatttcgcttgaagatgaatcgaagaagctgactcaggagtatcaaagcctctacgcgaacgtatatcaagcagacccagcaaccttcgaaaaaagtgacgcttataaggagttggtgaatcgcggcggcatcgtcatcaccgagactgaatttaaattcatgcgcaaactaggcactacaaatcccgcattgtttgccaaagcccaacaaaatctcgccacgctggccatgatgaaagagctagacgaggtcatttccaaacttgaagtgggggtaatgaccgggctggcgaaccaagttgatgaccaagcaataagctccaatgatcaggctcggtattcaaatgcattgtcctcacttcgcaaagaatatgaaatgctccagaacaagattaagcatgacatggagcgaaacaaactaatcgagcagacagctaaggcggtaataaatggctga

SEQ ID NO: 334155 - DNA, 894 bp, Pseudomonas aeruginosa
atgaaccacaagctcaaaatcgggctcgccttcgtcgccggcgcactgatttccaacgcaggcactgtcatgtccaacgtgcccaacggccaggatgtcctcgcggaagccttgtcttcggcgctggataaggtgaatcggacggcacgggatcgtgagattgaagaactcgacaaactcccgaacatcctcgactgccaaaacatgcagtggatgaaaaactgcacagagctcaatcgaaacgcgaagaaaaacccgaacgcgcctctgcgaattaccaacaacaaagggctcgaattcaacttccaaccgggcaccccgagtgcagtcattcgcctacagctagaacagtctcccgaggccgccaacgagctggtcagctacatggaccaaacctggggccagtataagcaagcggcgaatctctaccagatggcgatgtggcaacgcggtgacctacaacacatcaaggggcttgacgcggccatggaagagtccgcggcgaagaagcccatcgacaccgactcgttgagcatctcggtattcactgaatccacctgccctgtctgcgaccgtcagttggccactcttggcaggctagttcagaaatatccgaagctgaaggtgcgagtcttccaactcgatcgagatgcaaaggtcttcgcagagaaagtgaccgcgcgtggcttgaccgggcggatgctcagccaagcagaaagagacaacgtcacgaagatgggcatcacagcctggcccatcacttggatcgacaacatgaaagttagccgaagagaaactctggttggcaacagaaccatgaaccagctggaaggccgactgatggcaatgacttacgtgaagaacaccactgttgcgaagaaggattccaaatga

SEQ ID NO: 334156 - DNA, 804 bp, Pseudomonas aeruginosa
gtgcgggtatttctattgctgctaagtagcctgctgatcagtacctcactgaacgcagcggagaaaggtccttcagaggatcagcgcgtcggcgaaggcctggtactcatgctcaaaggggaaaaccagaaggcctgggatcttcttttccccgaagccaaagcaggcaacgttacggcgatgtaccacctcgggatgatgatgatgcgggcaacaaataccccggatcatttgcagagggcaaagaccttcttcgaggcagctgccaagcgtggccataagggcagtgaggcaatgctcctgcaggtacagaaatccttagctgcagccacgccaggcaccctcccctcgattgccgggagaagcggcctcccggtcccggcagatctggaaggagctaaacggcaagccgaacgcatgaggcaacaggttggccgtttcatagatcctctacgtgaggccgctgcagaagtgacgatcatgtcgttcgtgtccgacaactcggatgcggtcgaaaagattcgctctgcgatcgacgaggtccgggcccgttttggtgatcgagtagacgctcagttctacgtcgtaatcgatcaggccacatgggaccccaagcgagttttcaatcagcaatccggccaacttccaatgttggggttcacccctgacatgggtgggcggattgccagccagtacggtgtgcgaagcacgccggcactggtcctcattcccaagaacggacaacccagggtcgtcaacaaccctgcctcattggttgccgatctcacatcgttcctgaactga

SEQ ID NO: 334157 - DNA, 705 bp, Pseudomonas aeruginosa
atgagatggattttgattgcactcctgttgatcacctcggccactgtctcggcccaggactatgactacctcatcgacgctactgcagccagatacggaaatgatcgactcgtgttccgggcaatggtgcagaaggaatccagaaaacagccgtgggtattcaacgtagacggcgaaggtttttggttccaaaccaaagaccaggccgtcaatgccctgtgggcactcacctccgcaccctggcttgtaaagatcatcccggacaaaaactccaaagcaatacggaggttcttcccatctgaacgagctgcaatgagtttcgccaatagctatcagcgcagcagacaggcccagggcttccccgctctccttcaacgaatggatgacacgaaagaggtcctcgatgggcaactgcgcgtgcgcaaagtctggctactcaataccgatctcggaatcgcgcaaatcaactaccgctttcacggcaagggaaaggcctctgtccagcagtggctcgatcctgctttcaatcttgactacgcagcccgccatctcacggacctgaaaaagcggtacggatcagatcttcaggcggtcggctactaccactccaagaccaaaaagtaccgcgacatttacatgaaagagttcatgccgatctatcacgaggagagagcccgtgcgggtatttctattgctgctaagtag

SEQ ID NO: 334158 - DNA, 660 bp, Pseudomonas aeruginosa
atggctgtagcgcgatctaacgtcctccgtcaggtctcaccggatgagcaactcaatctggagcgcctggccgacgaggtgaatcgcagctacttcggaaattccatcaacattcgcccgcgctggggcatccccagcgcctgcgagtccccagagcctaagactgagatcaatcatctctctccacaggagctgaaggatttgcaggcgggtgttgaggcctaccacaaaaaagatcttcaacaagccaaaacactcctggagcagttttcacctaacggcccaagagacgcagcactgctgtacgtacgagtgctcaccctgctgaaagatccaacctggccggatgtggccaaatcggtgaacagagtttgcgacgacacgatctacgtcgccccgggcagcatcgaaatggtcagcggcgaggagtcgcttctggttcatccgatcctctcaagatcggccggcaatggagcaccgattttcgtcatccggtacatcatccatcacgagatggttcacaagttccttggtacctcctctacggaccctcacccggaagcttttcgacgtcttgatgcctgcgcacgtgatcggtcacgcgctttgcagtggttgcgcaagaaccatttcacaacgatcgaggattcggcccgatga

SEQ ID NO: 334159 - DNA, 1284 bp, Pseudomonas aeruginosa
atgagcaacaacgaagaaaaaccttccctgaaggacctcgtcaataagatcagctcgggggttggcaacctcgcacgtaaaaagccaggacaggacagcgccagccaaggcacagagcccaccattgaccttggttcggcggccgcgaaagagtcgcctcaagccgacgcacacggcgacgaactggagcccttggaaccgatcattgcggaagaagatgatcagaaacccaagaagaccaacaagctttcccaactcacgatggggcaaaagctgattgcagcgatcttggtcgtggggcttgtcctcttcgccaaaggtcagatggagggttccagtacaagccaaacgccttctgagaatgaagcagcgcaggaggcccctacctccagcgaggaaggaatggcctttggtacagaacccgccgatcacacccaagcagaacttggcgcccaggatgatctgtctctgcctattgatggtcccggtcaaacttcgcggagtctcagttctgaaccagagccattccaaaaaccaactgaaatcagttcggctcctccagcattcggtgggctggaccagccattgagcgaggcggcaccccacaccaccgcatcccctgacctgggtgtccctgctcctgctcctgctcctgctcttgctcctgtcgcggagcctttctcgccgcatgaggattcgccggcaaatcctttcggtgctcaagcaccaatagcaagccaatctggggccgcaattacctcttcgattggcgcggaaaagcagccccccgttttcgctggaacccccagcgtcaacccggatagtgctcccgtaaaggaagcgccgaaaagcaatgaggctttgacaaaggctaacgctgacattgccgctcaggctgaaaagatctcagccctcgagcagaagctcagcaagatggaagcccaactcaaagctgaaaaggccaagcaaaccaaaccggctgttcagcaacgcatcaccaaagcgccgacaagaaccccagtggcgaagtcgtcgccagtcgcgataagcaaggctcgtccgcggatttgtgtgaaagcagtagcagaggcggccaggaactgcagcacctgtgttgcacacgccttcatcgtgcacgcgggagcagaggacatggttggccaaggcgatttccttgatgggtaccgcgtttcaatcgtgggcgatcgcttggacctgcaagacaaaaacggtcaagtggcccacaagttctggagttcaccaaatggctgtagcgcgatctaa

SEQ ID NO: 334160 - DNA, 264 bp, Pseudomonas aeruginosa
ttgcaggacccgcccggcctggaggaactggccaggcgcctgaactgttcgtcgcgcagcctgcgccggcaccttcagcagcagcgcaccagctaccagcaattgctcgacgagttgcgcttcgcccgcgccaaggagttgttgcagagcggcgacatgccgatctaccggatcgccgaggaactcggcttcagcgagaccgccagcctgcgccatgccttccagcgctggagcggccagccgccgagccatttccgcgcctga

SEQ ID NO: 334161 - DNA, 621 bp, Pseudomonas aeruginosa
atgtacgctcacgagctgggcgggcgcgccggtcgagaaatccaggtgcgggactatcacctgcatttcgccgaagctctcctggcacgcgatgcgtatgcgctcaatttcctggcaaacggattgaacaatgtcggcaaggcagtgttcaccgcggttaccggagtccagctgccgcgcactcaatccggcacctgggccactatcctcgaatgggccggcgtagatccgaagcaagacgacctcaagaaagccgagcatcacctgcaggttctgcacacaagcctgtgctcacgtttctctgaagtagaccgcctcacccgcttcgcggagagcggatacgcacagggcttcgttcaggtgatcaaggatggccgtcgctacctcatggctgatgcaagtggaaaggtagggctcaacctgagcactcgtgggcttcacggtgaacacacccgtccctacatcgaggcctaccttgctgtccaaaagatcaaagttgaactgggcctgcagaaggagccggtgtacgtgcctgcagacgcgcctgcaggcaaccattcgccagcgcccaagcctgctccggccacccagctgacagagcagctcggcatgggcttttaa

SEQ ID NO: 334162 - DNA, 543 bp, Pseudomonas aeruginosa
atgccaaaactccccatgcttgctcttgccgcagtcgcggccgctgtaatttcggtgcctgcatccgccggcgatcgcatcacgatccagaccgaagtcaccaagggcggcgttgtgctcagcagcggtacccaggaaatctcgaaaggggctaccgcccatttcaacgatgggcgtttcaaggaaatcgataccaacgtgacggtgacgtgccgggaaggcatcagccgctggttgaatcccttcaaacccgcctgtgacaaaccgactcgagagaaggaaaaggtgcccgttgggttcatggccgatattacggctcgagaagcgtccgacgacaaatttgccgtctctgtcgacggtagctacgttcaggtcctcgaagagcaaaaactcaaactcggagacaccgaactcgaatctgcatccttccgtatccaaagtctaaacagcagcatggtcgtcatggctaattccgaggtggaaattgctaacggaataggtgctgatgagatcaagctgaaggtaaaggttcagcgcctgtaa

SEQ ID NO: 334163 - DNA, 228 bp, Pseudomonas aeruginosa
atgcttcgtttgatcatttttgcggtgttcgctctgacctactatctcggccgcttcaagagtgactggctgtacgccttgttcgaccaggacatgaccgctgacccggatcgaatcttcggtctgctgacgaccatgggggccggtgccctttgccttctcatccttatgttcgttgccggctgcatggctgtcggtcagcggagcgccgtcgaccaagaacagtag

SEQ ID NO: 334164 - DNA, 330 bp, Pseudomonas aeruginosa
atgaaccagaacactgacgctaccaagccccaggacaccgaggtttcgtctcagacgcaactggcaatcctcctgtctatccgcggtggactcaccagcgggttcaccgcccaacgatgcatttcgcaaatcgctaaggtcggtccagttggtaactgggaggctgcagcttccaaatacgaagttggcagctcgctggcgcaggccctgttgacttcgggagccttcagttccgatgtccagttgctgatcggcttcatggatgaccaccaggtcaatcccgtccagcaacttgaccccgcaatcgactatctcaaagcagtcctgtag

SEQ ID NO: 334165 - DNA, 657 bp, Pseudomonas aeruginosa
atgttcaagaacgataccttcagccgcatcggcagctatcaccagatatccgcgtcggtttacaacctgatcctcggagcggtacttctctggggcttcgccctgaactggtggatggtagcaaccatcccgaccgaaaccatcaaagcgatcaacccgttggtgttcatcatcggatacttcgccagtgcgatcgtcggctgcatcattatcttcagctcgaagaacccgatcattagcttcttcggctacaacatgatcgtggttccgatcggcctggtattggtcatgttcattcccggccactcgcaggaaaacatcatcgcggcagtccgtgtcaccaccctcctcacggtatccatgatggttctgggaacgctgttcccggccttcttcaaacggatcgaggctgcgcttttctgggcgttgtgcatcacgatcgtggttgagctgctgcagatcttcgtgttcgacgtaaaactgggcgtaatggactggatcgtcgcagccattttttgtggatacgtaggtgtggattgggggcgggccaaccagatcgagcggaccgtcgacaacgcggtggacagcgcggcatcgctctacctggacatcatcaacctgttcgtgcgggtactggagatcatctcgaagaagtga

SEQ ID NO: 334166 - DNA, 258 bp, Pseudomonas aeruginosa
atggcagagttctacctagtcgttttcgcggagccgcctgcgggccagcaatacagcgatgaacggatcatttactccaacctcgacgacccacgttctcatgcccaggagcttggctatttcaagggggtggtccgtgaactgggctgcgacgtcccggagtctatgtggcgagctgcataccaagatagagagttcaacgtcgtcaacaaaaccgtcttttactctcagagcggggatgtagttgagcatctctaa

SEQ ID NO: 334167 - DNA, 351 bp, Pseudomonas aeruginosa
atgatgttggccgagtatcgtcacgccctcaacgatggtgtcggcgcggacattgatcgatatgagttgatctgttatcccgacttcatgggcaaaaagaatgtaggggttgcttacagcaccgagcttcagcgggtgtatctgctattcatcggcgcagatcgccctgagccagattatgaaccagtgtggctgctcgaccaggcaaaggaactcacactgctttcgcgcacattggtggtgccggatcagacctcaaatgcgtccacgttctggggaggaatcaagcgcggacctatcatttcgtaccgtttcaagctggccgatgcgccaacattcatcaacttctag

SEQ ID NO: 334168 - DNA, 390 bp, Pseudomonas aeruginosa
atggtcctgatcaccagcctggcaatcgaagaggcagcagaaacgctgaccgaggacggaggtcgattcggcgacacactctttggcggccaggtcattgaggctgcccgcgcactgctcaagcagcagaccgaggatcaggggccgccgcttcccctgggtgagttcttcgaacgcagggaggatatgggccaaggacgcttgcggttgatcctggacggggactctgacgtttgcgtagcagtgatcagcgacgagggtgaaatggcagacgtcgagttctgtgtgcccttctccggcggcggccgctccccgaaggtccgtgaagcgctgttgaacctgtgccgcgctatccgcgacgagaacgaaaccaacccgatcccagactag

SEQ ID NO: 334169 - DNA, 1512 bp, Pseudomonas aeruginosa
gtgatcgagatctacaacaaaggccagatcagggcgatcaaggcttacgccaaaactgccggtatcgagactcgtgtttgggtggcctccccaaatctgtccaacgactatctcgttggcctgctgtccggccgcacgatcatgtcggtgggcaacaacaccaagtgccaacagatgatgaagaagtcagcattggaccgaatcaagcgccaagtgcgtgcctggatagccgaaaaggatggagtcaaagcgaaagacgcaaatctggtaagcctgatcggcacacgcttcgaggaaagcgcgcagcgcgctgcacggatgaaggctcgaggtgagagttctacggaagctgtcgatgcgatggaagatggtcaactcgtgttgagcccgatcgccgaatgggatgcgttcgacatcttcacctacatcgggcacgtccgctccgagaagattgaggcctactccgacttcgaagagttggttgatatctaccgggacgccaacggcggggactgcatggtcaaccagtacatctcgggccgggagcagaaccgcccaccctgctccgccaggacaggttgctgggcctgcggacgtatctcgaaggacaccagcgccgaaaacatgatttcggctgagggcggaaagcacgcttggatgaagcccctgctcgacctgcggaactacatgctggcgcgacacttcgatccgtctgcgcgctgctggctggcgcgtacgatcaacgaagaaaccgggacaattaaggtcgtacccaacgcttacgctccgggatataccctggagctgctgcgcctgattctgacgatacaagtccgggagcagatcgctgcacgcaagctgggcattgctccccgcttccatcttcttgaccaccgccagctaatcgctctggactgcctctggggccggtaccagtaccaacgcagcttcatggccctgcgcacctggaaagagatctacgagcaaggcaagcgttatgacattcccgatcttgcctcgattcctaagtacaccgagaaggacgtttccttccgtgcagaggttcccttcgcggatgaggaatatttcgccgcgtggcgcggattccgcaatgtggaagctgctgccgtggattgggaagacaccaccgttcttccgaacggcaagatcgttcagaacgcgaacgtaggtgacgagttcgagatcgacgaagaaggtgcggcattgttctgggagttcgacctcgactatgccctgaaccgaatctcggtgctggataacccctctggcgttgtccattacctggtcggtctcggaactgtaaccctctacaagggcagcctgggagagtgggatcggatgatgcgcgtgggcaaccaggcctggttccacgggctgatgccgatcatcaatgacccgcatgcgctggtcgaaaccctgcaagcaaagttccagaaaaaggaagaagacaagcgaaatgccctgatcgggcagctggcgctgtttctctaa

SEQ ID NO: 334170 - DNA, 489 bp, Pseudomonas aeruginosa
atgaagatggaagaaccagacgacgtttacgcgatcctcagcgaagcaaaattgctagcaaggcgctactaccatttgactggaaagcctctgggcgtcaccggcgaggtggctgagtacgaagcatctcgaatcctcggtctagagttgaagcaagccagaacagcgggcttcgacgccatcgagactaaagatggcatagacctcaagatccagatcaaggggcggtatttcccgaaccgtcgcatgcgaggaggtaggcttggatcaatcgacctgaagcaaccttttgacattgtgatgctggttctgcttgatggcgactacaacgcattccagatcttcgaagcaaaaaggccagacgtcgaggcgttgctgaccaggccgggctcaagaagtaggaacgagcgtggttccttgggtattagccagttcagagcgatcagtatcctcagatggcaaagggttgaggtaagtcagcaagcttga

SEQ ID NO: 334171 - DNA, 216 bp, Pseudomonas aeruginosa
atgatccatcacgaagagtctgcagagttcatggtctttgcgtttgatgatcggagcgtgctggtcttgcttcagactggtttcgtcttctcggttgccagtggtaactccgtcagcctaggcaaaattaaggcctggctcgagggtcacaatatagtgcacggcccttcttccggtcccactgcagccaaccagtcctttgacctgccgaactga

SEQ ID NO: 334172 - DNA, 303 bp, Pseudomonas aeruginosa
atgaaacgcctctcccttagccacctcatcctctgtgcgctcatcgctggcagcatctcggtcattctcacctcaccggccagcgccagccagactgcccgtgaccgaggcccctcgcccacaccggccgcattcgccgcatgtgttaaccacaaactcggcgatcgggtgatcgtcaaaacagcagccggaaagtcgctgaacgggacctgccgcaaatacaaagacaagctggccgctcgcactcacatccggcacaagaaggacaagagctggtggaagtctcttacttcctggatctaa

SEQ ID NO: 334173 - DNA, 801 bp, Pseudomonas aeruginosa
gtgtcattgaagcgtatttccaacgagctcgagcagctctgcaccgtcaaggatctgttcgtatacgaggtgcccgctggcgatcgtcgggaggtctatcctgtcatcactgaatacacccgtacatcctcagaatcacggcacatgggcaactacgagttttacagggcacgcgcagtccacccggcagctagtggatcctcattccatacttggaacaatcaggtatcagtcgtcatttgccatcaaacccgacgcgtgaagttcgggcctactggtcaattgatcatgcacaaaaagggcgtaggtctgggcccagctctcatgtccaacgtgatcgagtggctcaccaagcaggatgttgcgggctacgcaattgacccaggttcccttgctgatatcgacgccagcactgaaaaagcacgggagcaacgcaatcggttctacatggctttcggcttcgttctttccaatcacgatcagagcaggacaggtatcgaagtcattggcggaaccttcactgcaaagtgcgtgggggacctgttcgtgcctgatcgctactatcgccgcctgaaaccttggttcggatttgagtccgaactgcgcgatgagcgtgagtgtggtgtgaagagcctggcggagctcaagctaattgatagatggaccgatagtgccaggggttttggcaggtggatcttgaaaaagatgggatggccagctcgatttaccacccggcatatgcacaagcgtaagagctgggagccgcagccaatcatgacatcagtacaaaccccagagtga

SEQ ID NO: 334174 - DNA, 432 bp, Pseudomonas aeruginosa
atgaccgctgtaaaactctcagccggcgaagaagcgctgatcgcctccatcatcgaacacatctaccccgccccccaagcaggcacttcgctgccggttgagcccggggaaaagcgtgctgcccgaggacttgagcgtaagggtctcgtggtgctcggtgtcgacactcaaggccgcgaccagatgacgtttacgacgctcggtcaggccacttacgaggagatcaattccaccgcgcgggagggaaacagtagtataagcaagtcaaaactagttcgaccaagtgggctggatactaagctgatcggtactatcagggccgcggtgagaactgctgagattgctaccacctgtgattggcttgtaagtgaaggctacgcatcagatgatagccacgcccgcgaactgattcagtcggcatgcagcacctag

SEQ ID NO: 334175 - DNA, 210 bp, Pseudomonas aeruginosa
atgaccagcaaaaacgccattaacgtcacctttgaagacctgaagctggaagacacagtcatcatttgggatcgtgggcacgacgcgcatggctcacgaggtacagtttactggctcgatcccgatactaggatggtctcagtaaccacaaacggcatggcagacacctgggaaggcttagccgatggacttcagaaagtcataccctga

SEQ ID NO: 334176 - DNA, 204 bp, Pseudomonas aeruginosa
atgaatcaagaacgtcgttccgccctgcttaatgccttgtctgatgaggtcagagtaccgtgggagcacaactgcgccggtgagatcttcgtgccaggtaagtcagagaacgaaaccctgcgcatcggccacttccaaggcgacgcggccctagcggcatacgtggttgcgatgcataacgcgacacttgcaggccagagttga

SEQ ID NO: 334177 - DNA, 411 bp, Pseudomonas aeruginosa
atgaacactcaaaccgagtcacctctcactgctatcgccggcgccgtcgtctgcaccgctccacttttcaagcacttctgctgcgccatctgtgaagatactggcctggtagccaccgagcatcagaacgaggctggcgattacctcaacggtcgctgttggaacagctgtgaagctggcaattcggtggtgtggagttccgaacaagaacaatgggtcaaaccctcggaacaggttcgattcacgctgcgcaagaacgagggcagcaccaagaagccctggatcgtcgaagacacccatgcagatcctgctgaggatgctgtgatttatcacttcgccagcaagctcaaggctgaacgtttcaagtcggacatggaagctgagtacggatccaagcagctgggcgcctaa

SEQ ID NO: 334178 - DNA, 327 bp, Pseudomonas aeruginosa
atgaataaggcagaactgagcaaactgttggaagaaaaggtttctgacaagttgaaggatgggtacgaaattctcaactatgcgatggatgcggcgagtcgggacaagctcaagcgggatttgaaggtccatggccgcaacgtaccgcatgaggatggtaaggaagatgagtggcgcaattacctatggcaagtagagcgtggcatctaccagggggaggctcggaccaaacaggttcagattgaaactgttcagaccttacagccagcaagcgccggagagacaacctcatccagcgcaggattgtggaaggcgaggcgccattaa

SEQ ID NO: 334179 - DNA, 705 bp, Pseudomonas aeruginosa
atgatccctaccccgcatatcaacgaaccaggccaaccagtgttcatcaagttcgaggttcagcgctgcattcgtgtcatgtacggcatcgaatctcagtacatgccaatcgacccgcgccaagtggaaggtgtactggagccagttcgcaacgaagtgagcctggccgaacaccctaacctgtctctgatcctgtcccagccgcctggaggcgctcagatggccatgatcgaccactgtgacggcgacgtatacctcgcggctgatgcagggcaggatccacactccgaggtgagtatggcccgcttcgccggtgaggcctggcgcgtcgtcgggtatgaagatgggtttccggacgagccctatcagctcatgacgtcggagagcatgctggcggcccagtccgtatgcaatggactgctggcgctgcttaaacctgtacgcgttgccatggggatggatggtggcgctcacaccttcatctttaccgatcggccggccgaggtcctggtcatggacagtgcccatgcggcacaaagcaaagagagtggaaccctcgttatcaatagcccatacctcggccacgagaatgaatatgccggcgacgtataccgcggaaatctggctcgtgacgcagtcagccatttctggcggcaggtcgaggcgcacgaagacgctagcgctgaagtgcttccaacctcttaa

SEQ ID NO: 334180 - DNA, 204 bp, Pseudomonas aeruginosa
atggatatcaaagacacctgctggagcctggatcaactggcaaactcaacagtaatggcccaatcgaaccgggaagcggccagctctgcttctaacgcgatccttacccttcgcaatatgctggatctgccggcaagcgcaaaagtggatgagatcgtcgcgaaggtccatcaactgatgcagcagatccccagcgccagctaa

SEQ ID NO: 334181 - DNA, 321 bp, Pseudomonas aeruginosa
atgaatacagctaccacggccactggaagctacatgagtcacgaaatgcagttggctacattgctgggaatcaaatccttgtccaatgacggtttcaatgtcactactattgctgacatcctcgaagggaaggtcaaggacgccgatgagcgaggcggggggagtaaagccaaggcgaatctagatcagggtgcacctttcattgttagcttgatcggaaccggcttgttctcttctcccgtcgaaaggatattcgcgatcatcgaacggcctgacagagcgattgatgcggcgatcgagttactgaaagcgatccgctga

SEQ ID NO: 334182 - DNA, 654 bp, Pseudomonas aeruginosa
atgttctacgaagacatcaagacagccatgcttgccgggaagctaaaggttggcatttccccgctgaacagtatctcgtaccgcgatcagatatccatcgatgctccagggctgctcggcattaaggcaaagcttctgacaaaggctgatcggttggcgctcgttaatctggtgaagcaaaccgcaggtgatgcagcgcgtgagttgaaggcctcgaccgttcagcaatggcttgaggaacgcaaagccgtgctgttaaccggtaaagctgccagcggcaaaaccactttccttcaagccgcactgcccaacgcggtctacttgaatggacgtacgtcggactgctcgaacgcaaactggttttggtaccaggtgagcaaagacccacacctccccgtggttatcgatgagcctcaagcgttccctgaactggttctcggcgagatcctcaagatcatcaaagagcaaaagcgtgggtacgtgctggttagccaggccgagggtggttcgggattcaatgagctatgggcgttgatgacaacggcgccggtcggtttccctggctaccctcagattgaccccaatttcgtctgggtcaaatttcagcgcagccgagatgtcaccactgccatgtgggtcggcaagatcgtttaa

SEQ ID NO: 334183 - DNA, 699 bp, Pseudomonas aeruginosa
atgaccgacctccccgaagctacacccgctcaaatcgccgcgctaaagctgcaagtgcccggcattgccaatcacatcaatgacttccagatgagcacccttgccgcaaatatgacctttgaactcgcgccatcggtgaccgtaggcttccacctcaaccagctggttcaagatggactggtgactgaggaaaaccttgtcgatgtggtccgggctattcgcatttccttgcttgggccaagcatggccgcggagatcgatgcggcgatcggcgctcaaggctatgcagtgaaaccagtcttcggaggcgacgattctccatcgtttgcctattcagtcggcctgactggcaccgtagggtttgagctaatctcgatggccgggatggatcatcagctgaatgcctatatggtcaacgcatacgctgaattggcaaaggctggcgaggtgattgagcaagagcgcaccgacctcgttgaattgtcatcagtgcccgggcagggcctgcgtacgaagtgtgtgccagttgacgcattagcggccatggagacgcatgtttgcgatgtacgtggtgaggtcgagcgggtctatcaggttttggttgcagacaaacacaacctgttcccagatgaagaaggctacgagcaggcatttctgcagccccgcttccctgcacctaaaaaatctgcctcgcattga

SEQ ID NO: 334184 - DNA, 330 bp, Pseudomonas aeruginosa
atggttgaatttgaggatggccgtaagctttacctcatttatgactgcaccgtttgctatgccttccgccccctttttgaaaccgcaaaagctgcctgggattggtacgtaggcggtaagcccgatattccggagccacctaacgcatcgagcacagaactaccggtaatcgtaaccacggacgtgcatttcgaagggcaggagcactggcagtacgaatcgagagcttcagccgattcaatgtggctgactgggccgcgaaattttgaagagcgcatggatgagctgagtcgagacgatggcccctgcgacgggtactactcgtcttaa

SEQ ID NO: 334185 - DNA, 300 bp, Pseudomonas aeruginosa
atgttttacaagagtttgttgaaagcgtttgaagccggggaactggcgataaatatcgatgatgctgataattcgatagtggtcactagccttaaaggttctgcacttatcaacctgaaagctaaattcttaactgaaaaggaaaggtttttcttagctgagtcagcaaaatacttcacaaaaccatgcaatccagaagaggctatgcaaagagctgttaaggacctcatcgaggattgcgacagaacgattgagcgagcccggccctatctaaaacctagagtcagcactaagccttaa

SEQ ID NO: 334186 - DNA, 1212 bp, Pseudomonas aeruginosa
atgactgacatccaacgctggatcaccgtgcctttaccgctcaccgttgacatggaagtggcatttgcagaggcctggtactccaagcggcgctgcattgatgacgttgaaatggctgatgcctgggaggcggcatgcaatgctgcacctgagtcgccccaggatccacgcactgaatcccttcagcgccaggtggctcgacttaacgacatggttcgcaacaccggtaaggcccgcgaaaagctgcaggcagcaaacgatgaattgctttccttactacgggagtcactggcccgcgacgatgcagggatttacagtgtgtccatgacgccgtcctaccgagatcgcgtgcgccaggcgctacacaaacacgaagttcgccgaccgggcgcagctaccctattccaagaaacggttgatcacttccaagaggccctcgaggctgagcgcccaggttccgagcagatccggggcatccttaacgacactatcgctcgagcagaggcagaacgtgatgctgcactcgctcaacttcaggcccttcagaatgaaccggtatcggtgaagctgattgttgtgcaccgaggcaatgaagttgacgaacctatggtgaccttcagccccgagtttgcccggcagtttgatgccctccccgccggaacagaggtatgcctgtacaccagtcagccgtcgcctcgtttccgcggtgagggcctggctcagttggcgtttccgaccatgcttcggaaaatgtggtccggtagtgacgttcaaggttggcttaacgaacaagggccggtctatgtatggccctcgctgcaaagagcctcattccaatcgcgcgtggcaccctggctggtcgagtgctttggagatgcgatcgcccaagacacacaagagcgcaaccaacggtttcttgaagaagcccttgagttggttcaagcatgctccttgacctcagacgaggctcaccagttggtcgactacgtatttggacgggatgttggcgagcagtcgcaagaggtcggcggcgttatggtgacgctggctgcactgtgtcactcccacgagctggcaatgcatcagtgcggcgaagctgagctttatcgaatcagccgcccagacgtgatggcgcggattcgtgaaaagcagaaaaccaaaccagcattcagccctctgcctggcgctcaccctgatcggtgcaaggagtag

SEQ ID NO: 334187 - DNA, 285 bp, Pseudomonas aeruginosa
atgccgcggaaagcaagccgactgaccctcgagataaccgggctcaaaattcaacgcctacacgacatcagtgatcaagagatcatcggcgagggcgtgcgtcaggcgcgtgatggcagcgggtgctgggttggccgtgaaggcccccgacggttaatgacaccatggctgaccgcccgcgaagccttcatcgacctgtgggaagagaagcacggccccggcagctgggaggcaaacccctgggtttggtgcatcgagttcaagagacacatcaatggcatctaa

SEQ ID NO: 334188 - DNA, 192 bp, Pseudomonas aeruginosa
atggtcatcaacgagaaagaagtgaaaaaaatcgaggcttatgcctgccctcgggattttcgtactggcaagcggactcgtatgcgcgactggcgtgtaaccgttcagttcgtagatggccacgtatggaacgacggtggccacggcacccgtaaagctgctctagcctatgcccaacgctatgcacgctga

SEQ ID NO: 334189 - DNA, 315 bp, Pseudomonas aeruginosa
atggataattcgaccgctgccaaaaatgcacgcgcttttccaccagagctggttgccaaacttgggctcattccagattctgttatcgcgaagctggctgaggcgctcccgctgcatggtcataacttcgcaatgcttaagcctgcggaactggaggtgttcgacttcttccgcaagcaaggccgcaagtatggtgtcgtcgcctcaatcgtcagcgatgctgaccctgttgagttagctaaggcctcctcgcagaagcaacaggacgaagtcatgcgccgtactaacagttctgtttcaatcgtcctgagctaa

SEQ ID NO: 334190 - DNA, 1029 bp, Pseudomonas aeruginosa
atgcgacctaagctagaccttggccctggccatgcagaggtacagtcaaggcaacatatctcccggcatgaatcgactcaaattaagaatcaagcaggtttcacgatgcttgaactgtcaattggcctagcaataatggcaattattgttatctacaccacgcctaacttgatcgaagatctgaatgagaaacgtgcgaacatcacagctcaggagacacaaacgctgatcgatgcagcccgcacttacagaattcgagaagggaaatggccaggaaacgcgacttgcgcagatgcatttttggttcttcaaaatacagtacctccatttctcactggggcaccagataaaaacagatttaactctctggttacgccgtcctgcactcaatatacattcagcattgatcaaaccatcatcaaggactggtcaggagttgttgccaatcttttgccatcgacaaaggaggtcgacacgtcaaaatcgctcattcgcactacaatcggcatccctggcaccgagcctgcccttgattccaagctttccaggattgcgactggaaacgccgaactcaaccgtatgagaaccgaattacttctcggcggaaatgatatttctgaagtaaatgagatagctgctgtatcgggggttttcagcggaaatctctcggtaaaggatgcgaccctgttacatgggctgctgaccgcagaaggcgagtctcagtttatgaaaaaagcagtattcaatgactctgtagttctaacaaagattgttacagccaagacaccttgccccgaaaatggcgcgctggcgagggatgctaccggtatgaccctatcttgccagaacggacaatgggctggtaacggaggtcttgaagggccgtacgctgtgaccggttcaaatctgggcgcatggaaaatgtgcactctgaactatggaagcggtaacgccaagtcgctcagctacagtggcggaaattggtattattccgggagcggcacacaaatagtctattgctatcgctaa

SEQ ID NO: 334191 - DNA, 1293 bp, Pseudomonas aeruginosa
atgaccacgctggcccgggggcgcaaaaccaccccgacttccaaagccaagccaaagaaaccaacgggacggttgagccgcgcccaatacgctggttacgaggcatggcttcaattcaaagtggcttacgttctctatctggatgaaagcaccagtacagcagaccactcagaatacgctcagtggttcgacgggggcgtactgggctcgcgtgcgtttcaccacgacgctcaaaccctcacctcgacaatcaacttctccagcctcatcacttcccggcccgacaccgtcatcgaggaggatttatcaacgcttcctacgcacctgtacgccctggacgttgaagacatagccgactttacgggtgatgacgtcgtgcaggcctgggagagccgtgcccactcttgtggctcacaagaagctgcggccgagatgtttgccctctacagggtgttgatcggggacgatgagttttatgccggcgcaaccacctacctttaccacccagacgtattggccatcttcaccccgatcgccgaggcagaagcgacaattcagaaagtgttggtcgatctggaagcggcacacgtgcagggcccggtgatcgataccctgccagaggctgtggaagtaccactgctcagcctgggcgacattcgagacctcagcacggagcagcttaagtccgcttgggcaaacaggccggatagcttcgcgtcacttgaggctgctgcagaaacactggccatcctccgatcgctcaactcggctcagctggagaagtccagctatcgattgatgatggatcacgaactgatacaggagcttggggattcgcttccaagcgaaagcgaagcatctgcgccgtcgccatcagtcgagctggccatgctcaaggtcgaccggcgaacagtgcgcacgcaggtttcagttattcgcccagggcaagccaattttcgggggaccatgtttgccaggtacggaggggagtgctgcatctctggctgcagagtggataccctgctggaagctgcccacatcattccctatcgcggagatcaaacggatgatgtaagaaacgggctgctgttgcgggtagatctacaccgcctgttcgatgcgcacctgataacaatcaatccggtcacactcagggtagaggtagccaactccgtagatgatgctgagtatcaagccttaaacggcaagcgtatgttcgtgttcagcccgaaaccgaggattctattcctggaaagccatttcctaaagttcgttgagaacaccacattataa

SEQ ID NO: 334192 - DNA, 402 bp, Pseudomonas aeruginosa
ttggctggggaaatttctgtaacgttcggcttctacttctgcgtagagccacaaacggttgagggcaagcaaacttccagcctttacgacctggtcgaaccaattgatgagacgttggctggacgcttctttcaagcggaagatgaaaatacgagtcgttatgcatacggttgtgccagcgggtggttcgggcaggagatgacaggcacaggtaatctgcctgccggggaccgctgggcagacttcaaagtccgcaacggggatttcgaagcgctcaagaaggagtaccagcgcttcattgaagacgacaacgttattcaattgaaagcgttgatggatgagcactatggaccggactcctacgagatccgcctgggatcatttgccggtcaatcgttctaa

SEQ ID NO: 334193 - DNA, 699 bp, Pseudomonas aeruginosa
atgaacaccccacgaactattcccgcagcgggtctgcgattcacgaagttcgccatggagcgttgcctgcacgttatctacgacagcggcgagcactacatgcccttggacgcccgccagcgcgaagagatccttgccctggttgccaatgcgaccaggctgactgatgaagacgccgcccgcctggcgctcattcactgcgaacttaacgagaccatcagtatcgtgctggataccctggacagccccctgtacgcgctggccagcgaccccaacgatcttgagcacatgctatcaactggtcattacgccggtgtcgtatggcgcgtggtgggcttcctgtctgataccccggacgaagccattcaactcaacgtcgggacctgtgaggcgagcgtgcgtcaggtgctggaagcattcgaatccttggttgaggcagcaactgccccagtccgccttgtggcagatgtcactggtggcgcactgcacggcatctatgccgagcgaccggcggaagtggcattcatcagccatcaccgtgacgacctggacgaggagcaggtccgggaaggctacaccgccaccaatggccagccagtggctatgtggctgcaagactctactggcggcgagaaaatcgtggttgaccactacttcaccgagctcaagaaatccgcgcaacggagcgcggcggcttaa

SEQ ID NO: 334194 - DNA, 501 bp, Pseudomonas aeruginosa
atgcaaggtaacatcagctaccgcccttcccctttcccaattgccactaaagccaccaacggtttccgaacgctggctgaactctgcaccttgtggaatgtgctcagcgccgtatgcctgactgatgatggtgctgaactggacaattcctttctgcacttcgacaagggagacgacgtcgccgatgtctggcactggtttgagcagcagaaccccttgttcgtagcagcgagtgctgggcagcacatcggcgatgaccatccattccgcaccttgggattggtcgaacaggccctggcccacgtcgcaagcattcacccttccgtcacgcaagtcgtctacggcgatgatctgcgctggcgctactcggcgagcgggggcgcaccggtagctttcaatcgcactgaaaacatcagccttctcgaagacgctgctgatgaagcattcgaccgtgcactgcagaacgtggtcctcaccttgggcaaggttagcagtagctga

SEQ ID NO: 334195 - DNA, 180 bp, Pseudomonas aeruginosa
atgcaaattcaacccgaaacaacgtatcggttcactaagagcggcaaccttgtccgcaccaaatcacccactgactacggcggacgtggcaactgggttgttgcccgcatcgacaccggaaaagaaatgattgtgccgggacgtgctctgatcgatcccgaccatccggattggtcttag

SEQ ID NO: 334196 - DNA, 705 bp, Pseudomonas aeruginosa
atgaaatccaccctgacttcggccgcaggcctgcgcttcgtcaagttcgacatcgagcgctgcattcgtatcgtgactgaggacggcgaacattgcctgccgattgaccctcggcagtgtgaagacattctagcgccgattgccctggatggatcgttgagcatcggagaccaccagcgtttgaatctcatcaccattgaaattggtggcgcttcctacgcggctatggacaccatcgatggggagctctaccagcgggctgccaatgcagaatccgacgattactcgcacatcttctcagaaggttcgtatggaggcgtcgtgtggcgcgttgtgggctacctctccaaccgtcctggcgatgccttgcagctgaacagcggtaatgacgaagcaggcgtgcgggcagccctgggcgctttccagtcgcttctttcgccagcacctgcaccctccccaactcgtgtggtagtggaactctccgatggcggcttggtgggcatacatagccaacaacctgtcgaggccatcgttgtgtgcttcgaccacgaggatgaaagcaatggaagtgtcagcgaacaggcacagtggttcaaggacaatgccggcaagactgcggcgatctggcatcaccgcgacaatgcaacagaggagatgcaggccttcttcgccaaggcagcagagcgctccaccgccccaagttga

SEQ ID NO: 334197 - DNA, 390 bp, Pseudomonas aeruginosa
atgccgatcatggccaccgcgcataaacttcggagtgtattcgtgaacaatcccgcaaccactgaacgcccaggtttgaagctcctcgcaatcgaagccaggcccgagtcattcgctttccactacagccgcgacggccgtgagtgggcggttgaactgggtgcggtagcgagcgagaaactgcaagacctgatcaacggcgcgtccgacctggatcaagcaacgctcagcgagctccgcaagtttggcctcgtggtgttgaatccggatggcggaattaaatacccggtctcagtgaccgagatcggattcagaactgccaaaggtctggccgaaattcaaaccgcgccagcggtgccaggccggatgctcatcacagaccctgagtga

SEQ ID NO: 334198 - DNA, 1056 bp, Pseudomonas aeruginosa
atgagttcaaccgttaccaccggcaaactgattggcgcattccgcggtcaagacggccagccttgctatgtcatgtttgagcaaacctacgaatcgaactgctacccccacacccctcgctggagcgcccgggcaattggatcgtcatcgcagatgattcgcgcgatctttcgttctgcctcggcctgcgaaggccaatcgctggtaggtgctggcggacggacaatcacgcctgagagctatatcgcgggctggctagcagagatggccaaccctgtcgcgatggccaacctggacatcatccttaaagctggaaaagagtggaattctccgctgaccatgagcgcgttcaacgactccaagcccgcgatgcaagcacagggctatgggacacaggtcgcggcgcttgaggccggcgaatccgtagagctttccctgtacgcggacagcaacctcttgggcaccttgtatgacggcatgactctaggcgcacaccgggttattcagagctacaacatcccactgagcaacccgcgtgacgaaagcctgggctacaagcctcagaaggccaaggcatacgacgttacatcgccgcgctgcatgcaggtccgggacaatgacaacgtcctgatgatgggcagtgacggacagtggcgctgtgagggctgggcatacagcatcgttgcccagttcgtagcctcgctttgggaagcagaggttaaggagccaggcagctaccgcaaacgcattcaggcactccgagcctcggtggaaaacgcagagccgatgcctgccaccggcgtaagggttatcgtcgacacgaccgtgaaggtcgaagactacaagcagcggaccattgagcgcttgttggcgaaggttgaacacagctctgttggtaaagaaatccacttcgctatgccgcaaggtcaggacgagatctactccctcacccagttccctgccgcaaacacgacttgggtcatcgacgccaagcccgcggcaaagcctaccccgcagcaagcacccatggagcaattgagtttcctggcaggctga

SEQ ID NO: 334199 - DNA, 492 bp, Pseudomonas aeruginosa
atgaccgcccacgctcccatcctgcccgaccagtcccaagcactttcgggtttcgtacgaatctatcttgaggaactggacggtccagccctggactgggcggttgctcaagcggccgggatcaaggttcagatagagtgcccccaataccagaacctcacacgagcctatcgcgttacctcgcggggcttgagcctgttcaagccgagcgcagactgggctcatgccggcccgttgctgcgcgaataccaggtggcgctcaatccagaggctcactacggggccgaaggcactgagaactccgagcgctggattgcaaacatctactacagcggcggcgaacaatacaccactgagcctgcgcgcaatgaactcgtagcgctttgccgtgccgtcgttgtcacaaagttcggggactgggtcagtgtgccagttgaattgagtgtggcaccggaagcggcgtacccaagcacagacgttgtcatgccataa

SEQ ID NO: 334200 - DNA, 588 bp, Pseudomonas aeruginosa
atggcacgtcagatcagcgaattcgagcagcaactgaataaactcatcaatccactgcgcaccgcacgctggtcagcggactaccgctgggatggcttggagcgcgcattgagtggtctcggtgaagattatggtggattggagatgatcccggacttccagcgcgggcatgtttggacacacgatcagcaagcccactacatcgaaaactgtctgcgcggcgttgtacctgtcagcggtttgctgatccagttcaatagcgctagctggaacgaaatcgccaaagcagataccgatctcccgcctggactgcaatgcgttgacggactgcaacgctttactgcaatcaccgagttcgtcaaaggcaacgtgaagccattcgggttcactgctaaggagttgatgggcacggcgtacagcgcacggaagttctacgtgaaggtcgctgtctatgacttcaccagccgcgagcaactgctaacgcaatacctcgacttgaacgcgggcggcacgccgcatagcgccaaagaaattcagcgcgtgcgtgagctgctggaacaagccaagaaagtcgtcgaccccaactaa

SEQ ID NO: 334201 - DNA, 405 bp, Pseudomonas aeruginosa
atgagcgcccacatcccggactatcgcccatccgttggccagactttgtttatgggatacatgaacgaccagccctaccttgtgtctgtaaccggctaccaccaagacgcccgctttacgaaagagcagatcgaattcactgtctgcaaagacggcaaggcgcacagctcgagcatcgatctcttcaagttctacccggacgccccgatcgatagtcaattcgtcttctgcgtggtgcagacgtcattcgatgggcgggagcttcttgaggtagaagaagcctacttcttcgatgcgacaaccgcgtttgcgcacaagaccagcctggaatctggcgtgatcaaatcccgactggatctgcatgacaaagaccggaccttccgcgtacaggttgagatggtgtaa

SEQ ID NO: 334202 - DNA, 636 bp, Pseudomonas aeruginosa
atgaacccagcatttcaagaagccctcgccgcccgcttgctctggatcaatgtcgctgcttttgctggcatcgaagggtgcgaggctcaaaccgaagccgccttggaggttgcctacaacgcggtgcacgatcttgcgtcgaatgatgttctgacctaccgccactatggcccctgcgtgccagtcttgcttcaagacatccctgagctggcagaccaatacagccttgctcacgagctctatacagaactgcatgaaaccaacgttaagagcggatcgattggcaggctctcagccagttggttgcaacctgagccacatgaacacttctcttacacaagctggcttgctgcggtcgatatggctatcgctcaactcatggacgctcgtgtcggtacggttgcacacattcgccaagggcattaccgcacagtgatgcaccaatggtcacatggagagtcgccggtcgacacggcagaggaatgcattgatgcctacgagtgcaaccaggaaatgttggaggaggaagcccaccgcgcgtactgccaggacattcacgacacctatgcgtcgattgaagcagatctctgggcgggatggcgtgaggagtgtgaagacctggggcttgcggcctaa

SEQ ID NO: 334203 - DNA, 684 bp, Pseudomonas aeruginosa
atgcacgagtacatagacgctttcaaggtagccatggtgcggaccgatgcgattgcaggtggattgtcgaactacccgctgaggatcactccagggttgaagatcgacatacctcagattgttgatgcgatcgctcgtgacttctcggagtttctcccgcataccgacgtgctgccagggaaatgcttcagagtcgcccgtgagctgtcatacatcctgcttgagttgggtgtccggcataccgtcactgttggagacatcgagctggttgatggcctctatgtgggccttgacctagagcagctgcagcgcgacgtcgccgggggctatgggttggactttcaggatgggcgtcctgtaggccggccgataaatgctcatgcctggatcaccttggaaaatgggtgtgtcattgacaccactatccttccttctcagcatcgcaaaagccaaaacccatctgagcttctcagttttgctgagtcggtctatttttccggcaagcagcacactccagtagtccggcacatgccgatgatgaccgggcttgtgtatcaccagttggtgctgataggggagggtgacggtgacgcacagaactactgccagtggtcagaggattacgcgaggttgatggggaggctggacttggtcaggttggtgccggcactcagacctaactga

SEQ ID NO: 334204 - DNA, 303 bp, Pseudomonas aeruginosa
atggctaccgcccacaccatcacactcgcttcgggactggcggtgcctgtcgtgcagtacaactcgaccatcaacggtaaagggttctacgtcagcttcaacgaccacgacatgtggatctatggctgcgacaccactgcgctagtgcgtgatcaaatggatgggttctacatcctcaatggtgatcaccgtgcagcctacgcatcgcttatctcgcaaggctttgaagcgtgcatggattacttcaaatccaacatcgggatcgcaaacaaacgtagcgaccttccgccgcaagccgcctga

SEQ ID NO: 334205 - DNA, 138 bp, Pseudomonas aeruginosa
atgagcaaggctgaagaaagaacaatgaaatcactgcgaaactggtgggctcagggcaaggcgacggccaagcaggtccgccagtgcatggacctggaacaaaaggctcgggttgagcagctgaaatccccactctga

SEQ ID NO: 334206 - DNA, 348 bp, Pseudomonas aeruginosa
atgtttctggttgcggtgctaatgcatcattggaagcaggacgacacgcgcggcttcgatctttcgctatggtttggtcaggagctctgtgggctctgctacgccacacctagaaagagcaagatctgcatcaagatcgtgattctcgagggcaagccagacaagtcgcaccccctacgaggtgccgtggctgcgctggcgctgaccgcaatcgagaactacgcccttatgatcggttgtacggagatcgaggtccaggagcctgcagcaggtgctatcccggtctatgagagcctggggttcgccttcgatccgacggaccggcttgtcatctctattgagcagtaa

SEQ ID NO: 334207 - DNA, 1374 bp, Pseudomonas aeruginosa
atggcctacgtagcaaaggtaaatgtaaggtatcgaaacgacgagacgggccgtgagatccagcttccaggtctgctgacgcagggaggggttttggtatcgcacctaagatacctagcagatcagcaaaccaagagcgcctcctggagggagcggagcgcgttcgcggtaaaacttttaatcaagtacatcaacgcgaacaaagatcgatttcaggacacaacagatctgttatctgcgttcgctcaatctatcgagttagggacgatcaataccagttcactgttagaccccagtggtttgtactggatgcccagaaaacctgatgatttccgaacgcttctatttcatctgaccaagtacacagactggctagccaaacagccagagtacaacacaaagcgcgcaaacccattccacaaggcgaacactgaagaggagaggatgaattggtgcgcatattacaataaagaagccaaggtattcttatcccacttgagcgatcctgatgaggcgaagaggcggaatgagaaagtaagaggtgttcgcacgagtaggactccgaagtcaagcggtcgtattacgaagaaatttcctgaaaaggagattaataatttactgatcaatggctgggtgcgtcgatgcgaagatccagatgcagtaaaacatgcattcatagattataaggggcgcgctcttactttgttaatgcattacggtggtgttaggaaaagtgaggcatttcagctctatctgcaagatatcatcgtcgatcgtaaacggggtgaagctctagtcaggatatatcaccctgcatttggagcatctcccgataaacagtatggttctcgaagagaatatctagcgcgtcgatatcggttaatgcctagaaccgattatccaaaatccaaggcactgcatgctggttggaaagcgccattactaaatgactctactgaaggtttttttcaggtgcacttctcgcccgttgcgatggcaaaagaatttctttatacgtttgaacgctatttgagctgtcagagggtggatgcgccagttggatcagagcacccctatgcgtttacaaatagcaaaggcgagcctgaaactttgaaaaatttttcccgtcagcataagaatgctgtcaaccgtattggcttagagcatgaaaaaaaatttggaactactgagcatggtcataggcatgcttatggatttcgtttgcatgcgtacgggttatcccagatagaaattcagaaggcgatgcatcataaagacccagattcctgcttggtttatatgcatcaaacagaagaagagttgagagccagctttgaacatgctgagaaagttgctagtggtctcttttcctga

SEQ ID NO: 334208 - DNA, 3474 bp, Pseudomonas aeruginosa
ttgccgtggagtccagccaaattttataagggtgagtataaagggtgggatgctttcagtggtatagcaaattatggtgctgttgctgaggcaggggaagccgttaaccgattgggtatcaaaacgtttgatgaatattgctcgcgttataaggaggatccgaggctaccatctaatcctcgtcaattttacggggaagcatatctagggttctcagcatggatcggtcggattaagccggttcgataccctacaatgggtatggcttccgaagcagccgttcgattaggattaaaatcatgttgcgactataaagcgcgatataaagaagatcctttgctgcctagtaatcctaataaattttactccggtgaatggaaaggttggccgttttttataaaggttaaaaatataaaaaaaggtaagggtaagtatgagacttacgaagggttcatgtcggcggtgcgtagaattggcattaatagtcgggttgaatatataactcgccataaggaagattcaaagttgccagcgcatccggagacggtttatgaaaaatattggattagttggcaagaagtatttggaagtgattcttgtgttgtgcggtgctcgacttggcaagaagccaagtctgttgctgcgcaatatagattctccaccagtgtagagtatcagaatggttgctcggttgatgctcggttgccaaagtggcctaaagaaaaatataaagattttccgggttggataaactttttgttgccggaaaattacatttgcttagacgatgtgcgatgcgctgtgaaggttttgggtatcagcagtagtgtcaaatacaaaagtgctcgtaaaaaatatccgttcttacctgctcatccggaaaggatgttttctgatgaatgggtagattggttcagtttgtgtgatagaccgcgtaattacagctacgaagagcttcaggaggtagttagatcgtacgcatgtacgacgattaaagaataccgggagttatgggggagtcttaaagatccaagaattcctagcagccctgaagaggtttatccgcaatggaagagctggcacgtatttttggataaaccctacccatacactttggagtacattcaaggttgcgggataggatggatccccagtatccaactatttttaaagaaacagaagaatggaggggggaaggaaacgagtatctgccgtttcatccgacatttcatcgaacctagtggtgtggataaaacgcctcgggagtttttgaccaggaaaggtttggacatcaagccgttcaagatgctgatggataaacaagtcaacagttcggtcgctcgagctctattgttgacagtcaattcctacttgaatgaggtgttgagaaatgatctcactattgaagacgaggaaactggtgagttgatacggttagatggagcgaacaacccatttgcaaccatggaatacgacagtaacggaaagccaaggcctagcgaaacaacaaagcctgcgctagcattccaatatgttgattcgatgaagaagtggatggttcctgaaagtgctactagcttttccgatttaatacagttgcatcagtttgattcggattaccttgaagtagatgaaagtctcatagatcgttcagatcctgattgtgtattcaaaacaaaagatgaaaaatatctattgtggtgcccggtctactggatgcttgcctattcccttgcttcagttcctgcgcgaggacgccagatcgcctacaatgattctggtgagtcggacgagtatattgttgatattaaggataaaaaggtcgtttgggttaaaaatgtaggttttttagctcagcgtaaaaatcaacaggcatttataaaacgctgtgaagataatgcttgggggatgcattttacctcgaataaaactagctacggcgggcagggctacgatgtgccttgggctccggagaagcttatttactggatgattcgacttcgtaaatggcaaaataaatacaatcctattaaacgtgttatgccatggtcagagtgcactcggacaaatttaaacgaggcacagcttaaacggaagggtgccaactgttttctattcagggcatttaatgaggaacagcctggttcgtttacatcgcagctttcagagcgtctggctgcggcgctctatttttcacagcctagaaatcttactttggcgagctttcgtaaagggggtagccacagcgctttatcccgttatgagtccgtgtacaccccgcacagcatgcgtgtcagcctgatcactgcttacgtcatggagttcggtcttccaattgaagtgattatgaagctggccggacacgcgtcggtcgtcatgagtatttactacgtcaaggtcggagccgcattcctccgtcgtcgaatggatgagggagaaaagctggcgctaagggatggggcttacgtagctcaggagatgcttgagcaaaatcggcttaatgagttaatgcatgagttagtcgctaacaatgagcaggcgttacaggtacttaaggccggaaacgttggcagtacattggttcgcgactacggactgtgtccgtatggtgcagcacgctgcgatgatggtggctcccgtgtgggcaagacgctagtttggaatgcggtgccggcggggtttcttggaatgcaaaactgccttcgttgccggcacttcatcacgggtccgatgttccttggggggatgcttgcgctgtggaatgcaatctccctcgaactcaatctcctagcaaagcattatttggacttcgaaacggagatcgatgattgcattgataaaattcaggagatggatgagcttgaatacgacctagaacaaactggaggaatttttgattctaaagagcgtaaccgcaccgaactagagatcaggaaacttcagtctgaaaaggaaagccttgccaaaaaaatggacatgtttttttgtgatttgcagatgctgactaaacagatcaacgaatgcaaaaaaattattgctttgccggaaggtaaggatgaaagcaaagttcagctcgttgttcaggagcagaatgaaataaaagtcgaaattgagcaaacttctctgtttcagcaattgaatgaagtgtgtatgaacgcaagtatttttcagtcggtctctgcagcttcagcgacacctcgtcgatcacagatgattgatcgcgtggcattattcaacaagattcgaccagctatgtgctgcctgagtgaaaaagaacagttggctgtggggaaccaggtaacaaagttcctgctgcaacgattgaaaacttgggagcgtgtcgatcagctaattgactgccatatcctccttgaggatttgggcgacgacgaacgaatttcgaaagaagagatctccgagcttttgtcctcgaagccaccccaattacttaatttgaaggagttgatggtatga

SEQ ID NO: 334209 - DNA, 597 bp, Pseudomonas aeruginosa
atgacgcccgatgaaatgctggcacatttgaaggaacatgcacccagacaacgagtgacgcttgatgcggtttttgctgtgtgccaagaacagattgaacgaggtgtcgctgatttctctttcgccaccatcgcgcgtatgggaactggacgaggcgttccaaaggtacaaagcattcggaacaagactggtgagaactaccggatgctgatcaagtgtttcgaggggagcataggagcacgcaagcgtttgcccaagcaaaaggccgctgatgcctgggttgacgatattgcagacccgagattgcgacttatggtcaacatcactctctccaagttggcggaagcagagcgcctcaatagagagctcataccaccggggacagagatccgaattgatgaccgagtcggaagtcagacggagtacagacttacgcctgtagagcgtcgtgcaattgagtatctgatatctgaagatttcttcataacatggcaactcaaaccaagtagtaaaggagcagttgtcgatgagcaagggaaaactgtgttcaagccagggacgttggatgcgctcacgaaaatcctaaattacctctga

SEQ ID NO: 334210 - DNA, 375 bp, Pseudomonas aeruginosa
atgccgctgttggcctacctggccgccaagaccaccaccattcacctcggcgccggcaccatcattgcgccgttctggcacctgctgcgggtcgccggcgaatgcgtactactggacgtaatcagtaacggtcgcataaaagtaggtctggcccgtggcgcgtatcaagttgaattcgaccgcatggccggcggcatgcccgcttcctccggcggtcaagcactgcgcgagatggttccggtggtgcgcgccttgtggcaaggcgattacgcccacgatggcgacatctggaaattcccgacatccaccagcgtgccaaagccgatccagaagcctaacccgccgatgtggatcgccgcccgctgcgcgagctga

SEQ ID NO: 334211 - DNA, 204 bp, Pseudomonas aeruginosa
atgctcccaaatttagttgtcaccgttgagccccattcatgcctagaagcgtgggtcgccacaaatcgcctcaggttatgtctagaatttatggagttagataaaaataacagtgtacaagactggtatttgtttattgaacgagcttatgctgaatcccatcacaatccatataaccaggctgaatatttccagcaagactga

SEQ ID NO: 334212 - DNA, 1473 bp, Pseudomonas aeruginosa
atgggcataaattacgaacactatcatgcatttcacgaactgccattagccggtacatggcgacgtggccgcgcatctacattattatcagtttctgatccatttaatggcaacctattggcatcattaactcaagcgactcttgaagacctaaatgatgcttatttgacggcagctgcagttcaactcgattgggcgagaaaaagtcctgctttccgtgcggaagtgatgctccgagcagttcaagttttcgatacacgccgtgacgaaatcatcgattggattattcgagagtctggcagcacccgcatcaaagctatggttgaatggagtgctgcgagagcaataacactcgagtctgcgtccttcccaactcgtgtacatggacgcatcatgcagtccaacgtggcaggcaaggaaaatcggatctatcgtgagcccttgggtgttattggagttattagcccctggaatttccccctacacctcactcaacgctcggtagcaccagcgctcgcgctaggaaactcagtcgtgatcaaacccgctagtgatactccaatttgcggggggttattgttggcacgaatatttgaggaagcgggattgcctgcgggagtgttaagtgtcgtcgtgggcgcgggcagtgaaataggcgatgcattcgtcgaacaccctgttcccaaatttatttctttcacaggttctacccctatcggcttaaacattggacgcttggcctgcggacaatatctaaagcacgttgcacttgagctcggcggcaacagtccatttgtagttttagcggatgctgatttagagttagcagtaaacgctgcggttatggggaaattcttccatcaagggcaggtgtgcatggcgattaataggattatcgtggaggcacccgtttacgagtcctttattgatctgtttgcacagcgagtgagggggcttaaagtcggtgaccccaacaattctgataccgtgattggtccaattattaattcgcgccaacgcgaagcactcgagagaaaaatcgcgagagcagaagaacaaggcgcgcgagtaatcgtatccagtcaggtcgagggacagttggtccccccccacgtgtttgcagatgtaaccgcggatatggacattgcgaaagaggaaatatttggcccacttgttggcattcagcgcgcggatgatcgtgaacacgcattaactcttgcaaatcttagtgaatttggtctttctagctctgtattcacatccaacttagagctcggtgtcgcgttcgcccgtcagataagcgccggtatgagtcacgtaaacgatattcccattaatgacgagccacacgttccttttggtggtgaaaagaactcagggctcggtaggtttaacggagaatgggcgatcaacgagttcaccactgatcattgggtcagtattcaatccagtcctcgtaaatatcccttctga

SEQ ID NO: 334213 - DNA, 717 bp, Pseudomonas aeruginosa
atgtggctccaatcagacaaccccgctcaggctaaagccggattagccgtagcgaccttggaaaatgtcacaacaaaagggacgatcggccttacataccttgaagtaaccaatactgataaacgctttgattacttgaatagagatggtacaaaaacatattctttacgcggacaaggtaacattggatacccagatctgtttctttctgcagaatatgctctgcagagaaaagatgacggaacaaatgaaaacgcctggtacgtagaagccggatggaaattttcagatctgtatttgcgtccaaccattaactatcgatacagtcgattttcggaaggatatgatcctttattttacggcaatgtacgggcactaggaacatggttccaaggtgaagtagcgtcaaactatgctggcccttttaactcaaacacgcggataaatagcatatcactttctatcgcccctactgatgcgatgtccataggtatgcttttattcaattttgacacactaggcaaagcggaaaattttaccaatttaaacgctaaagaaattgatgcctatgctttatggaatataagtgaacacacatcacttatgccattggtcggaatatataagcccgacgcaggttttgatcaaggcggatcccagctagggcattcgggctctaacgtttacactcaactccttattacaacaaaattctag

SEQ ID NO: 334214 - DNA, 126 bp, Pseudomonas aeruginosa; identical to SEQ ID NO: 329847

SEQ ID NO: 334215 - DNA, 594 bp, Pseudomonas aeruginosa
atgcacgtccgtcagcggctcagccaaggcgtcgtagagacgccggttggcgcgggtaatcgcttcggcgctcgcccgctcgacggcgttgagggcgggcacaatgaccgactgccgccgcaggtgctcgatcaaggctctggccagcacgatgcccttgtcggtttgcatggccagctcggtcagcaactggacagcctgccggtagtggccaatcgtgaacggctggaagccgaacaccgtttgcagctcgaccaggtgctcgcgtcgggtctgctcacgctgcccgtactcgtcccagctttcgatgccgaccttgagctggttggcgaccagtctcagcaatggcgggaacggtggctcatcagcgccaaggatgacgccgggaaagcgcaggtagcagagctgcaccgcgaagcccagccgattggccgggccgcgccgctgccggatgatggagaggtcgctttcgctgaacgtgtagtgacggatcaactcatccttggtgtccggcaacgccagcaggctttcgcgctcggcggcggagaggatcgaacggcggggcatgcggtttccttcttcttgaaaacgtag

SEQ ID NO: 334216 - DNA, 561 bp, Pseudomonas aeruginosa
gtgcaggggcaccgcatcggctacgtccgggtcagcagcttcgagcagaacccggaacgccaacttgagcaggtcgaggtcagcaagctgttcaccgacaaagcctcgggaaaggacacacagcgtcctcagctggaggccatgctcggcttcgtccgcgagggcgataccgtggtggtgcacagcatggatcgccttgcccgcaacctcgatgatctgcgccgcttggtgcagaaactaaccaagcgcggtgtgcgcatcgagttcttgaaggaaggcctggtgttcaccggcgaggattcgcccatggccaacctgatgctgtcggtgatgggggccttcgccgagttcgagcgcgccctgatccgtgagcggcagcgcgaaggcatagccctagccaagcagcgaggcgcgtaccgaggccgcaagaaagcgctgtccgacgagcaggctgctaccctgcggcagcgggcggcggccggcgagcccaaggcgcagctcgcccgcgagttcaacatcagccgggaaaccctctaccagtacctccgcacggacgactga

SEQ ID NO: 334217 - DNA, 261 bp, Pseudomonas aeruginosa
atgccttacgaactgaaacctctttcatgcgatccggccaaactcaccggcctgtccgagaagctgatcgtcagccactgggaaaacaactacggcggtgcggtaaagcgcctcaatgccatagcgagccccgccattggcggcgccctattcgccgccggctggctggcggcgccgctggtggcctgcggcctactcaaggtcgtctatgacgttgtgctttggcgcgcttttcggaagtacgagggaccatcctcttga

SEQ ID NO: 334218 - DNA, 915 bp, Pseudomonas aeruginosa
atgcgcagcttgggcagcttgctggacgctggcttggaagaagccaagtccaagcgcgatccactggcgtggatcaagcagaaagctgccgaagtagcagagcaggcagagcagcgagcagcaaatgaaccccgccagatgttcttgcccggcttcgatattggagcctttccaaaccatctgaacagatcaagcctcattgctcccatcgcacgagggaaacgcaaattccatcggcaagctgtgatggtgacgcggcgggattgcgtgctggagtacaccggggagcaactggacgaagcagacggcgacctcatcatggcattgatcgccttcgcccagccgttccgcttgggcacatcagtgccgctcaaccgcgccaagctgctgcgcaggctcaagcgcagcacgggcaagcacgattacgaatggctacatcgccgtatcaaggtgctgacagaggccacactgttccttgaggccaagaagccggacggctcgacccggtacagcatcggcaaaacggtgtctttccgcatcatcgcggccttcagctacgacgacgaggccgagacgtacagctacagcctagatccccgctgggtacagattttcggcaatcgggaatacagcctgatcgactgggacaagcggatgcagatcgggcgcgggcaggacatggccaagacattgcagcggctggtggccacgtccgctgacccagtacagcggtacgcactggactggctcaagggcaagatggaatacagcgggcggatgcgtgatttccgcgacgctttagcccgcgctgtgcgcgagctggagcggcttgagatcatcacggcccacaaggtcgagaacagcacacgaggcaacccgcagcttgctctgtggctcccggaagcagtggtatag

SEQ ID NO: 334219 - DNA, 213 bp, Pseudomonas aeruginosa
atgaggattttacgcaagaaggctgtctgcgagaagctgggcgaaatcaatgaagtgacgctttggcgcatctcccgcgctgatccgacattcccggtatccatccagatcaacaagcgtgtcgtcggctggcttgagcacgagattgatgcgtggctcgaacagaaggccgctgccgcacgcgccgccagcaacaacgctgtctatccctga

SEQ ID NO: 334220 - DNA, 1719 bp, Pseudomonas aeruginosa
atggatcagatcagcaagaacccctcccggtggaccgataacaggaaaacgctggacaacctcatggaagacgtccgtctagggaacgtcatcgaagctgacatcgggaaggaagacatctacatcacgaccaaggacgaacgggcctatgtcgtgagcgaccagttcggccaagtagcccggcagttgctcaacttgatctacaacgaaaagactccgttgttcaccattcaggaactgaagatcggccctcagatcagcgcagcccgttcgctggacgtagcggttcaactgatgatggtcctcttcttcgggtgcatgctctggcccatgttgagcccctacctcacgatccgtaggaaaaaagcgacatccaaggtcaccttcaaggacgtgatcgggtgcgatgaggcaaagcgaaccctgatggacatgaccgcatggctgcggaccccagagaatttcgccctgctgaacgcgcgaccaccgagaggggttctgtttaccggcgacccaggcgtaggcaaaacgctcttggccaaggcgctggcaaatgagtgtggcgtgaacttcatcgaagcgaatggcagcagcttcagcagcatgttctatggcgttggcatccagaaggtaaagggcctgttccgagaggcacgccgcaaagcgccgtgcatcctgttcatcgacgaaatagacgggattggccggcgcgtcgaccaagggcgccttgccgatggtgaagggaaccgcatcgtcaatcagttcctcaccgagctggatgggtttagcgaaaatgctggggtgatgctgatcgccgcaaccaaccatgtcgatgccctggacaaagctcttcgccgggaaggtcgattcgaccggaccgttcatgtccccctaccgacgctcgaggaccgggtacgcttactgcagctgtacctaggcaagaccaagccggcagaagacctgaactatgaccgccttgccaagaactgcatggggctgacgccagcagctatcgccttcgttgcgaacaacgcagcgcttcttgccgctcgcagcagcgataccgaagttggaatgcaccacatcctggaagcaatcgagatccagcgcatgggtgaagcggatgagaaccagaaactggcaagccctgaggaccgtcgtagagtggcagttcatgaagctggtcatgcactggttggcgcgcttctcaacaccggacgggtggaaaaagtcaccattctcccccgcgggcctgcgcaaggcgtcaccctgattcttccgctcgaggacaagcgactgcatttgcagtccgagattcaggcgcagctcgctatggttctggccggtcgcgctgcggaagctaacgtctttcaggaagtatccactggcgctgccggggacctgcaagaagccactaggatagccctttcaatggtgaccagttacgggatgtccaatgacgaaagcctcaccagcctggcgaccatgcgagagctcggcatagcgatcgatgcccggatcatcatggaaaaggtggatacgctgctgaacgctgggtatgaaaaggcgttggcactgatcgagaactgccgcccagagctggatttcatcgtcgagcaactgctggcgcacgagaccattggcggcgaagtcgtatatcaggccctggagccaatcgggttcccggtacagattgtggagtccgcggcggtcgcttga

SEQ ID NO: 334221 - DNA, 339 bp, Pseudomonas aeruginosa
atgaaactccagcacgcccacctgctttatggatcgaccaccattccggtgctgcccaccacctcgactcctatccccgaggagttcgatttcgcatctcccgaaggctgtgcgaagagcatcttcgccatcatgggccgtgcagccggcggacactcgatagatgcctgccaactgcgcatcaatcgcgagcggggaactgccaatctcatcgggcgcggagtgcatgtcttctaccgagacgactcccttcccccgctgaccgtcgatgaagcactcgaactggtgagcaggaaggtccaagagaccttccacctcggtacagtcgcaccctgctag

SEQ ID NO: 334222 - DNA, 849 bp, Pseudomonas aeruginosa
atgagcacgacagatgatggatttcctccgcgggtaaaagaagatctacggcgggatgttgggggttactgttcagccccattttgtgggattcagacctttgtctacgaccgggcccggcgcaaagacaagctgacgggcgatgctgcgcatatctgcggagcgcgcccacacgcggcccgatattacgatctgccgatggatgtggatcgtcacggctatgaaaatgggatttggctgtgcgcggtgtgccatcgcatgatcgatcacagtgcgtgcctttacccggttgacatgctgctccattggaagcgcctggcaatagacgctcaccaagccggaggacgccgccttcaagctctgatggttggcagtgatctcacccgcgatcatcaaaacgcggcgcaatttctcaacgacgtatggcaggtcagagtgaagttccgggaggcgaagttcaacgtatcgcccggggatcggttcaactccactgtaaagttcgacactgagtttgctcgactgattcggaaccgggccggcctgtacatggccaagccctggaacgcctaccatccgcactggacattcactccggaaattcaggtttgggaaagtgagatcgttcggatggctggacgcctggccgaaatgcctgccctggcattgatgggtgagggaatgttcgatttctaccaccaggtggacgaggaggggaatttggtgttccgcgacgaatcaacgaggtccctgcacatctttgtgcagatgctggagcgcttcgacgagttcctgacggattacaaggggccacaacagagcccctatggctcctcaccctatggcttctag

SEQ ID NO: 334223 - DNA, 876 bp, Pseudomonas aeruginosa
atgatcacgccatcggaaagctgcccggtgtggcagcgctatctcgaaatcgttgccgcagctggagcaatgcccaaccacctcccggacaagagttcgctctatcatcggctcctcgccggcaagcaaccactggtgctgcctcctcccctgtcccattcttacccctggtacgacgttgtggagtccgaaaaggtcttcgccccattagacgggccagtcgcttacgagccgctgactgaggacgaaccgcccgtcgatgcggtatggatcgatcagaccccctggcttgttgtcgaacggattagcaattcggaaatgatcgtctcgcagcctggctggctggatctcgggttccgatggcgctactggcataaaccaatccgcgcagatcaatccgaggcatgcatgatcgcccactatgatcgagctgttggccgcatcaccaccagtgctcagctcgacctagagtgccggcaccaagccgagcattggaaggcgcaccttgaaattgccgtatccgccttcagcaatgaggtcaagctgatggggatcgaccccgatcttgaggatgcagaagataccctaagagggcgaatgaacagggctgcggctcagatgcgtcttgaccgggcagtaagggatgcgcggacccgagtggagaaaggcctgcctgcggtgccgtctgatgcggaggtcgaagcctacgcgcatcgctaccggacaaacctccttgagggttcattccaggagcaagatggctggctatatgttgacggctgggcgttgcagcgaatctcgccagagaaactcgggcctgaacactatttgcctggcgcaccggctgcccaaccgcaagagagcctggaggactga

SEQ ID NO: 334224 - DNA, 261 bp, Pseudomonas aeruginosa
gtgctccaaccctgcaatgaaactgcgagaaatctgctacttcgcctcgaagcagctggcctgcgggagagagctacccccggcctcgacggtatcggcagttactgcatcggcgttcgggccaccaacgccatcgaggtgttcgagcttgggaggactctgggagctgatttcggcaagatccgcgtcgaaagctatgcggagggccacatcatcgcgttcccggaagcgctggtaaaactggatcatggttctgcctga

SEQ ID NO: 334225 - DNA, 633 bp, Pseudomonas aeruginosa
atgagcaccaataaccccaacgctctcgacctcaatcgcgccatcaacacctattccagtgacgaggcggagcgcctggcctatcagcgcatgcaggaggtcggcttcaagattgctgacatccttatagagatgcctctcgggaccatggctgatctgggccaaggcgagtgcctgttcgtagccccgtatgccggccgaatcgaggttttctctaccccggactggcatgacaactgccgctggggtgatgtcaactggttcttcctgaatgactatcagggcctttccgccgaggatctggacgaacaccgggtcacgatggaaaactggctgaagaacccggtattccggcaatgcgtgcctgcggacaacgcattcaaggtcgtagctgctcaggaagactgggcgcagagtcaaaccggggctgctccctccccgctgaatcgctatgaacatgacaacgtcaaaagcctcatcggcggctacatggtcacttccaaatccaaaccgcaggaaacgcgagtggagcaattcagccgggcgaaagctgagttgatcggtcacctggagcgccagctccagcaggttaaaggcttcaccttcgcggatctgtccaagaaagtgagttga

SEQ ID NO: 334226 - DNA, 591 bp, Pseudomonas aeruginosa
atgatcagcattcgagacaagaaggttttcgaatccgcggacgaagtccaaatcgaagtccaccaggacgacatccatctcgctgccctggggcagttcacagctgtacgttgcggctacggcggccacacttccttcacggtcattcaagaggacaatcccttcgattccaaaaagcccctgttgcaggtgaaggagggctacaacacactcgcgtggttcaccagcgaggtagaagccaacaagctcctagcccgccttcgtgaggtgtttctggagataagggcaaagcaggaagagaattaccggcatgagccggactcgatcaccgtcaaagtgatcaagcgctcaatcgagtggatcggaatcgtgctgacagcgctggtaatcgcctttgtcggcggcatgactgcatatcccggttggaagatgggcgaggggctgtaccactctgtgatcaacagctctgagacgtcggatggactgagcttcgactcggccggggagctgctcccgccggcagaatcacccgaagccgattctgggttggagcccaatcagcccagcgaaccgctaccggccaaagactga

SEQ ID NO: 334227 - DNA, 303 bp, Pseudomonas aeruginosa
atgcagaacgccaacaacatttccgcattcgaacagcgctacaacgaaaagctcgatgagctcgcaaccgagctggatggggccctgccttcctatcgtgagctgatggcccaggtatcaggcttgctggcagaagacggtcattctcttgatgtgatcagcggatatgacgacttcgaggcgttcttcacctggctcgacacgctgacggcatacgaccagatggatgaggatggttcgctcgaggaccataagcctctcttggcagtcatctacgaagccatacgcgcaggcgaggcctga

SEQ ID NO: 334228 - DNA, 450 bp, Pseudomonas aeruginosa
atgttcccgaagcaaaaaaacttctaccgagggaccaaagcccgaaccactaacttccagcccgcaagtcgcggaacttttggttccggcctgtatttcggggatcaagcctgtgccgatgaatacgcaggacctggcggctctgtctgggaggtcaagctcaacatgagcaaccctctccactgcctggccagccttgagcatgactacgacctggacagtccggccgttcccctcatcgagcagattttctcgatcgagactgcaattgagctgataaccagggctattgaaaccgacggctattttggagttgagattcagcagcgacttgagcagctcggtcatgacggacttgtggccacctacccggacggcagttacgaggtagtggtcttttcccctgcacaggtcctggatgttcgtcgactggatagccgcgcagcttga

SEQ ID NO: 334229 - DNA, 732 bp, Pseudomonas aeruginosa
atggtcaaattcacccccgaacttctcgacggttacacctacatgctggatggcgatcgtacggtggacactgccgttcaggagttgaaggaggcattttctccgcaggcaatcttcgattccgaggaacgcaggctgatcaagctgaatcctggtaccacccaggacctgcatgcctacatcagtgtcggatacaaccagttcggcgcagacgcccgagcagtagcattcaaaattctggtaaccgataccgaacagactgctggcactgctctcctctgcgcagagggctatttcatcgccacgacctgcaaagggttggatctggtcatcgcgatggacaatatcagccaggacgtttacctagccggggaactcttcagtcaaggatggccacgccgtaatggcaccttcacgcttttcacccagctgatcgttcaccccgatctgcggtcccctgtactccatgacctgatgctggagctcgaggggggtatctgctcactatcgccggacatcccaactctctcctcggggctcatgctggttttcaaccgggattctgagccgaccaacgtgctgctggagcagtgcagtatctgcaccgttcacgaacaacgggaccaactccgcctgttcagcatcccaacggaatctttcgtcaccgatcgacccagcgcacgcaccactcgcaagcgagtttgcgagttccggttcgacgcttgcgcttaa

SEQ ID NO: 334230 - DNA, 1017 bp, Pseudomonas aeruginosa
atgcccattcgccattgcattgtccatttcatcgacaagaaacccgacgggaacccggcggcactccactcccgggatgccgaactggaacacaacgaggccgcagataacctgcttgccgatctcaacgatgcctacaacgccaaggcaactaaaggttgggggcttttccatggtcaatcgggggcctatccactgagtgggtggctgagcgagtacctggatggcggacaggatttcgtgagcttcagccgccaggcagccgagcacttggtgaggctgatggaagaatcgagcctgactgtcgggggccatttcctgctggcgcattaccagcaaggcatgactgactacctcatgctcgcaatgctccatcaccgcgacggcgtcgcgctgaccgaaggcctcgaggtagccgccatcaagcatctcgatgtggggcaactccaccttgccgcaaggatcaatctgtctgagtggcgtaacaaccccaagtcgcgccagtacatttccttcctcaagaaaggtggccgcaaggctttcgactacttccgcgacttcatcggttgcgaggaaggccacgatgctccaagcgagacgcgaactctgctgaaagcattctccgacttcgttgaaagcgaagacctgccagaagcagctgccagggagaaaaccgacacgctggttgattacgccaacgcccaagcgcgactcgggcaaccggtaaccctggacgaactttcgagcctgatcgacgaagaccgaccgaaagccttctacgactacatccggaacaaggactatggtctggctccggaaattcctgcggacaagcggactttgaaggagttccagcgcttcacaggacgtgctgaaggcttggccatcaccttcgaagcccatcatttgggatcgacggttgagtacgatgaagagcaggatatgctgatcatccgcaacattccgcgccagctcaaagaccaactcgcgaagcggaaggactctcaaggggcctaa

SEQ ID NO: 334231 - DNA, 429 bp, Pseudomonas aeruginosa
gtgaccagtctgcaaccggaccagatcctcaaaggcgtcagagcaacgtacgagtcgatgctgcactcctcactcgggcatgggcgtacgaacggtacctgcctctacgccgccatcctctgtgaggccctgctacgaaaattcgccgctctggacccaattattcgaggtggtgacggtaagagggatggtggcctggttattgatggggttccgcacggccactactgggttgaagtcgaatatcagggcggaatccacgtcgtagacatcactgcagaccagttcggcctcgacgccatggtgtttgccccgaaagacagcatttctgctgcatacgtggcaggtgaccaggcgactgttgacgctcacgtccgggacatgaggaacaagatcaaagaagaatatgctgatcgggagctcccttag

SEQ ID NO: 334232 - DNA, 441 bp, Pseudomonas aeruginosa
atgactaccaagaacaacaaaccagaagtcctcgatgctcgctgggctgactggaaccaccaggtggtcaccatcaagagcgggcgcaaacatgcctgcaaggtcccttgcaaagattgcccatggaggcgtgattccgtcggagtcttcccggccgaggcattccgactttccgcggcaaccgcctatgacatgagcgaccgaacctttggctgccataccaccgggaaggagaagccaactacctgcgcgggcttcctcctcaggggggccgatcacaatctctcggttcggttaaatctcatcaatggtgaactggacatgaaccaggtttcggacggcggagtcgatctgttcgacagctatgcagagatggccatcgccaacggcgtcgaccccgaagatccgattttgaagccctgcaggaacaactattcctga

SEQ ID NO: 334233 - DNA, 714 bp, Pseudomonas aeruginosa
atgaacgtaaccttcacctacagctacaaccacagcatcgtgccccctcgctgccgcctgcctcgtacagtccgcgagcacgacggactgatcaccgtagaaattcgggaaatcccgccggagcaagccccggtggcgatcatcagccgaaacaacagcgaccaggggcacgatccagtggaataccgcactttcgagggctgcctctggacgaactgcaagctcttcgccggcgcgcgggacaacaaagcggaaggaggcccgaacgcgacccatcgcatgccagagcctgagatctctctggtgacggaaagcgtcacgctgagccattgggaacagggaatctacatcggcgcctatcagggaaaggccgggattgacgaatatctggagaggtgggcacgcgatcggatcatcatcgatggccaactgtttttgccggtcggagaacccatgtatgtggtgatgaccttcggcctgtcaaacaaccacggcggtacgtccctccattgcacagacttcttgaacgccaacattaaggattcctcctacttctccattttggagttcgatcgagctctggagtacgcccgtcaggtggcagcaaaccgcggcgacactatcaaattctccgtcgatcctggcttcgagtttcaggtcctgatccccaaggccgttcagtggaagaaccctggcttgtcagtggctacatga

SEQ ID NO: 334234 - DNA, 969 bp, Pseudomonas aeruginosa
atggctaagttatccaaagaagcggcgaagcgtcacaagcaggcgctcgacctggtttactcggacaagagcctgcgtctcgaggaccgctatttcatcttggaacatttccatgagtccgcgaccaacatgaatggtctagccggcgcattcttcacgccagagggactggccaacgatttctccatcgaagtcccggagtgtgagtccttgattgacctttgcgcaggcatcgggaggctggctttcgcctgccgcgagcgtgcaaagcgtatcgtgtgtgtcgagattaaccctgagtacgctgaagttgggaagcgagtgctcccagaagcggagtggatcgttagcgatgtgttttcaatcccggatatggggcgtttcagtacagcgatttcgaatccaccctttggatctgtgaagactggccaggcgttcgacggtcgctacacaggggcaagttttgagtacaagctcatcgaagccgcatccaagatcgctgatcacggcgtgttcatcatcccgcagacatccgccccattccggtactcgggccaacgctcctatagcgtcgagattacgcgggagtgtgagaagttcatgagtcagaccggtatcgtgctcgaccataattgcggcctggacacatccgcctacaagaacgaatggcacggcgtcagtccgatctgcgagatcgtcttgtgcgacttcacccaagaccctgccgaaatcccagccgctccggcagaggcagagcagaattccgtgtccaaggctgtagtcgcgcctcctgcactaatcccgccaccggctccagcgcagagcgaacccacgctggcgaccgtgcccgatcgtgctgtagcgccagcaccaactgcaccggcccgaatgaaagcctccaggaagccagacacaggttctgccaacccgcagtcctttgcccagctctccctttttgatgcagcgtag

SEQ ID NO: 334235 - DNA, 1356 bp, Pseudomonas aeruginosa
atgagcaccaccgtctaccatgccctcgagcagatcgcgaatacccctggcaccaacgacaagctggcgctactgaagacccacgtcgacagcgaagccttccagcgcgtcctgatctacatgctcaacccattcatcacttttggcatccgcccggcccgggctagccagttcggggccgaggagttcagccaggaaacctggtcgatgctcgaccaattggccgcccgaggcctcaccggacaccgcgctgaggaggcggttactcgggcattgacgtccttgaacccagagtcctctgaattgctctggcgcatcctttccaaggacccgcgcgccggcttcagcgaaaccagcgtcaacaaagtctgttccgggcttattcctgagttcagctacatgcgctgcagcctccctcaccacaccaatctttcggagtggaactgggctgctggtatctactcgcaggtcaaagccgacggcatgttcgtcaacgtgacgatcgaagccaatgaggtcagcctcacctcgcgcgctggcacccttctccctggagcaccgttccaagaactgctcgacgggcttcgtcagcttccgaccgggcaagcgcatggtgagctgctcgtcgaatgcgacggcaagattctcccccgtgaggtcggcaacggcatgctgaactcggtagtccagggcggccagttcgaccttggctgccggccgatcatcaaattgtgggatcagatcccgctggcctcggtcaagaagggtgggcgctgcgacaccccatacaaggaccgcttcggtcagctgaccgatctcgtaacggcgctcgcccactcggcgatctcgatgatcgagacgcgcatcgtgtactcctttaaggaggccattgaccactatgtggagcagcttgaactcggactggaaggcacgattatcaagaagcccgaggctatctggtttgacggtaccagcaaggatcaggtcaagctgaagctcgaagccccctgcgagcttgaagtggttgatttccttcctggtaaaggagcaaacgcaaagaccttcgggtcactgctctgcaagagctcctgtggccagctggttgtaggagtaagcggcttcaagaagaagaaacgagaagagatccatctcaatcgggatacgtggcgcgggatgatcatcactgtacgatccaaccagatcatgcgtccgaagaagccaggcaaaccatacagcctcttcctcccccgcttcgtcgaagagcgcttggacaagtcggttgcggatgatctggtgcggatcgaggagcagttcgaaaacgctatccgcatggctgccttgggattggctgcctaa

SEQ ID NO: 334236 - DNA, 642 bp, Pseudomonas aeruginosa
atgcctttgaatcacaccgagcttgaagatcgttggcatcggctctggcgcgcgcttggcgcagcacctgctgcaggtgccttcgactacctctgtatgcaatacagcgagcccggacggcactaccacacccttgaacacatagccgcgtgccttgaacacttcgactcttggcgtcatctggccgacaaacctcacctggttgaactggcgctgtggcttcacgacgtgatctacgacacgcaccgagtggacaatgaagcttgcagcgctcagtacgccatcgccttgctcacagctgccggcgttcccgagtacgccccagctgtggaagcgatgatcatggcgaccacccaccagactggctcccaggccgatgattgcggcctggtgctcgacattgatttggcggttctggcacagccaccacaggcgtataaatcctaccaacaggcagttcaacaggaatttgcctgggtaccggatgaccttttccgtgccggacgtgcagacgtcctacggggactgctgagctctcacccgctgtacggccaccctgaaatctcggccgcatgggaagcgattgcaaggtcgaacatcgaatccgaactgttggagctggaaggcccgcagtccaagtag

SEQ ID NO: 334237 - DNA, 192 bp, Pseudomonas aeruginosa
atgtgcaagctgaacgcccaggaccgggcgaccctagagaaagccaaggcccaggctgcagagctggttgaggccctgaccaagctcggctcagcgaagaacggactgctcggtctcgagggactggatctccagcagcaggcaatttccattgaaaagcgactgggcgcgatccagtccgtaacggagtaa

SEQ ID NO: 334238 - DNA, 351 bp, Pseudomonas aeruginosa
atgccgaccaaaacgactggctcggaactcaaggccttctacaacgacgacgggttttggaagccgaatggtgaagatgatgtctggcatgaggagcttgagcttgaagttaacggccaggtcatgaatgactccttctccatcggcgaagacctcaagccagaggaccaggttcgaatcatggctgggtgggtgcagtcgaatgacggttctgtcgacgtttccttcgaaacctacttcaagcgctggaagaagaagcaagacacggttttcctctcggtccaggcaccgaaggacaagctggatgccatcaaggaggcgatcatcgccgccggcggaaaagtagcatga

SEQ ID NO: 334239 - DNA, 204 bp, Pseudomonas aeruginosa
atgagcctctcaatagaggggttcgccaaggtccagcagtggcttctagatgagggattctgcagggatgaggtggccaccgctgagcaggtccaggcagtagcccagaaacttgagggtgaagggaaccgtctcatcagccttgcagaagacatccgtatccagttgtccgcggcacgcccagcggacaaaacggcatggtga

SEQ ID NO: 334240 - DNA, 234 bp, Pseudomonas aeruginosa
atgtcctgggcagatcgagcggcaccgatagtggcagaagtcatcaaccgcgttggccggaaagacatgactgcattgcgcaaggctctcgccgaggcatacccctggggaaaccgcgcaaacaggccttacaaagcgtggctctctgaggtcaagcgccagctcgggcacccgcttaacgcccccaggactgacctcaacaaccggcaaatcgatttcttgcaagatcagtga

SEQ ID NO: 334241 - DNA, 597 bp, Pseudomonas aeruginosa
atgaacaacacatccgtcagcgccggcctcggctttatgcgtgccgctttcaacggtataggcaaatcggtcggtgatcgggaacgctccaaacttctccatgaagcgatggaaatcgcgatcaagggcaagatggcctttgatctggatgacgttgagccgatgaaacgtttgcagatgaccacttcggtcggcgttttccgccccttctcggaccacaactacttcaccgcatgcctggcagggggaacgttttgccggctgtgggaaaaggccttcgacttcaaaccattcaaagccccgctggttgcgatatcgacttccgaagtcctgaaagacaatcgggttgcaccaggtgtcgcactgctggtgcccggcgatgacaccgacctgatgatgcctcgattccaggacctgcaggtgtggtggtgcaccagtctcagtaccagcaaagacacgattaccctcagtcgttatcgactgacagaggaccgtcgttacccgttctcccgtgaggggcatccggcaaacctcaagcgcctgacccgggcaacctggaaggacttcgtctgcggcgcaaatggtgctgagcaatga

SEQ ID NO: 334242 - DNA, 240 bp, Pseudomonas aeruginosa
atgatcccgctctacccagcgctcgacctccccgctcttgatgtagctcgtttgcgccgggggctagccgtgcaaacccggattttcttcgccgacagcattcctgggaacaaggcaaaggtcattcgcttttgggataccccaaagggcgtctttgtccgctgtaactacggcaagaaccagggtgggcagtcgttgctcaagaccatgccagccaacgtgctggccctggccgattag

SEQ ID NO: 334243 - DNA, 291 bp, Pseudomonas aeruginosa
atgatttctacgattccgcccaaatcccagctcgaagagctgatcggcgattcccagaacctcactgttggccggcgtgaatttgctgtttcaaacatccgccgcgagggcgatcttggtctgtttgccacgttcaaaaccaaacgcgcggagttcattgcgatgaacattcccgcccgtgtcatcgggcgtcccaacgccgaagcctggagtgtgctgtcccttcgtaaccgagggagcaagattgttgacttcgcgatcgatcagggccgcgtcctggtactggtgtga

SEQ ID NO: 334244 - DNA, 402 bp, Pseudomonas aeruginosa
atgctgaccatcttcatggcgtctgcatcgctggcttgttgggtatgcaccgaacgaacggctcagcgaggattcggattcacccctgcgaaaggtctggcaaagctgatcgacaacgtgcctcatctacttgcgttcgtcgcctcggccggcctggcagctcaaagccccatcctcggtgttgtgttgttggccatgcacaacgtggttttgctactgctggctctgatggtgagagccgacaccttggatgctcgatccccacggcttcgaaagcgcagtgatgcgttggcaacaatggacggccgccgtatctggaggcttacctccatgtacaccacgatcctcatgattgttcttggagtgccggcgttctcgctgctgctgcacctgctgaactga

SEQ ID NO: 334245 - DNA, 750 bp, Pseudomonas aeruginosa
atgagtaccaagatcaatcacggccggatcaaacgccgcgcaaccctggagcaggcacttgccgagcttgtacggatacgccctgctttcatccaggaagctcgcaaggcggtggctaccgtcattgctcgaaagctcgccttcggccgggacctggcggagaactactgccttgtcgatgaggaccgcaatcgctggtcccgaaaccatgtgttaggccagatcgaggacgcctaccgtaatcaggacaatacgatcaaaaccatgaattgggacttcataggttcggtatcagttttgccgttccgcggtgatgttctgatgctgacgtattggcgcaaccatgcgccgttcgctcgcctgattgaagacgcgggattcactgactaccactaccagaactcaaccgacaggcctgacacaatcagcgaagctgagtgggacaccaggagagatgcgtgggatgaggcactacccaccggcagggcagtcgatgtcgctttcgagttccagctggtggattggtacgacatcatttccgcaagatatgacgccgatctgatccgagcctgcgctcccagcgaaaaggcccgcagggagcgagtcgcttaccacctcacggaaatcgaacagttccacggatgtgatacgacacaaggcgcaatgcgcattgttcgcaaggttcgagagatctatccagatcgggtaacgtcgattcatctttgcgcaacgccgctgcaggaggtgtga

SEQ ID NO: 334246 - DNA, 582 bp, Pseudomonas aeruginosa
atgcccagcccgttattttcgctgttgctcaacgccgcactacacagtgcccagctccgcgtctgccgtgcgatctactctgacctttttgggacgggaagcctgtatgagcctcgcctacaaggttactactccaccctggacctggctcgaaaggctattcaggaacttgcggattactgtcgacggcagagcatcaatgcgagcagccatccattgttcgactcactcgacttgaaggatgaatttcttgcccgtgtagagctaggacgggaattcgtcctggacgatatcactcccagccagatctatgagaccggggagaaaggctggatcgttcagttccagggctggatgctgcgtcgaggcaagctggaagagatgaccgacagctacggtctaccagcgtttgctcatcccctggtgctgatcagcccaactggtgagcgccacactttagaaatgcccgacgctaggatcgagcgcgcacgtcttgcctattcgctgataatgggcaccgaatatgtgggcgacgatggacttggaagcgacccagaacatccgttcgagcgagtggcctag

SEQ ID NO: 334247 - DNA, 612 bp, Pseudomonas aeruginosa
atgccgttctacagacttcccaactccagcgaaccacattctgtcccgcctctaaccactgattccatggatttccgggcttactggaagggcaacgaagccattctgattgcccggccggggcgcgggctcatcctgcgctgcccagagagcccgcacttcaaagaggtcaacttcatggttggaggtgaagtctgctctgcaccactccatgaagatggtctgatcgacgttgatgagatcgggtgcctagatccccgaggttgggactttgaaggagagggatgggttgttcggcagttgaacaagcctgagctcatcgacattcgcctaagaccctacggggaggtcagcgacctgtacttcgaacatgatgacttcgagatccgcgacccaacgctcagcgagtgtgggcgctttaaggttgagcccagacattacgggttcatgaagatttcgcccgacgataccctgtggtaccggcctgttccacaaggcagccttgtggtgacccccacgcaagtagttctcatggatgaatcgggacagattcttgctgcgagggacatcgacgcgatcccggtacctggcgaggaagaaacgccagtctga

SEQ ID NO: 334248 - DNA, 1176 bp, Pseudomonas aeruginosa
atgtccttcctgcgccgcttcatcagcaccacccctgacatcgacagattgctggcagcgaatgctgcagttgctgtcggagtcagcggtggccaagacagtcaggcttgccaactggccgtacacgaacatctcaattcgatcggccataccggcccccgcattgccgtgcatgcggacttaggccgtgttgaatgggatcagagccttccgaagtgccaggagatggcagagttcctgggatgggagcttctggtcgtgcgtaccggcagcggcgacatgatggatcgctggttgacgcgctttgataacaacgtgaggcgctacatcgatctcgagtgcgttcagatgatcctgccctggtctactgcctcgatgcgtttttgcacttccgaaaagaaagcaaaaccgattgcgagcgccctcaagaaacgatttcccggccaggacgtaatcaacgtggtgggtgtgcgacgcgaagaaagcgcgaaccgggcaaagcaacccgtaagcaagccggatagcacgctggtcacccggggtaaggagggggcgacctggaacgcgatcatcgatatgaagcgggacgaggtgatcgacttcatcgagtcatacggactggccaggcacgtcggctacaccacctacaacatgaccaggattagttgcgcattttgcgtgcttgcttcggcaggggacctgaagtcgtcgactgggtatgaagggaaccacgacatttacagggaaatggtcgggctcgaaatcgcatccaccttctcgttccaatccggtaaatggctgggagacgtgaggcctgatctcttgacgctagacatgcgccaggctctggaggatgcaaagcgtaaggccatcacccgccaaaatgcggaggctcgccttccgaagcacttgctgtatgtgaagggatggcctgttgcggtacctacccacggggaggccgaactgcttgccgaggtgcgatgcactgttgccgatgaacttggcttggccatcaactatcgagatgcacaaagcatcatcgtccggtacgaggagcttatggccaaggccgcggcgaagggtaagggcctctcccctactttcgaacagcaagcctcaggcctgctgattcctgttcagcagatcgatgcacaagaacacgcctggcccttctga

SEQ ID NO: 334249 - DNA, 216 bp, Pseudomonas aeruginosa
atgagcatcgagcgtgaagaattagatggttttgaggtcgcttacagcgtacaggtcgacaacagtcggatgcttgaattgttagttgacgagattgaaacaggtgactgcttctggcagatcacgaattcctgcggacagattctggaccgctccgatcgttatgaggatcaggcgcactgcctccgtgacggtctgaacaaatcgttggcatag

SEQ ID NO: 334250 - DNA, 855 bp, Pseudomonas aeruginosa
atggtctacttcaactcgctcggcggggacctggttgccgcaattgaactcggccaactcattcgagaacgaggcttttcaacgagagtaggccgacgaggctctgcgggcactccacaacctggtcgctgtgagagcggttgcccatttgcattcgctggggggcgctttcgcttcctggatgaggattcgaagatgggcgtacaccgtttctatcgggctgccgggcagcaagcaaacgacctgtcattggcgcaggtcgcgtcgacactgatcgcaactcacctcagcgcaatgggagttagcctgagtctaatggaccgtatggtctcggctggtagtgagagcatgcggtatctgactccgcaggaggcttatgacctgggcctgatcaatgcgggtgaactgccggcgcggtggggtatcgaagaggtccagggagccatcgtactggtggggactcaggagaaggtgcagggtacaggtaagatcgccttggcctgcagtcaagatgccagtgtcgaactagctgcccttttcaagtcctggtactccccttcgctgctccggagaatggataccatcacactcactgtcgatggggctccgaccggccaagccttggccgaattgaatcctgagctccggaacggattcctgacattcacaacagaaccttccgcagagcaattgatggcaatttcgcgagccaggactgttgggttccggtacggcaaatccgggactgatcttcgggctggattcgacgttgaggtggatggcgcctcgtccatgatcggtagctttattcagctctgccaagggaaaaggctacgactggctgcccggctttga

SEQ ID NO: 334251 - DNA, 597 bp, Pseudomonas aeruginosa
atgagcaaactgaacaccctaaccttcttctccaacagcacctgctacctctcccatatcgttcgattggtgctggcagaaaaggcaatcgacgctcgcatcttagatgtcgcagtaccagccaatgcacgattgatggctcagttcggttccacgatgcaggcacccgcgctggctgagcgcgacctcgcacttcatgaggtggacatggttgtcgagtatctggaggagcgctacccgcatccggcgctcttacccagcaccaccgttgcccgcgcccatacccgcatgctggctcgccgtatccaccgggaactctatccgctcttggacaaaacccaagatggttgttccgattcgcgcaaggaactggcaagcactctgctggcgctggcaccgctctttgagcagaagaaatacttcatgagcgacgaactttcggtcgctgattgcaccctcgcccctctcctttggcgggtaaagtcccttgggataaacctgacaaaggttcgcggaatctccgaatattgccagcgcatattcaaccgccctagcttcatcgccagcctttccgagcaagagcaaaagctggcttaa

SEQ ID NO: 334252 - DNA, 591 bp, Pseudomonas aeruginosa
atgatcggcctgtccagcatgcaggccacctacgcagccttggaagcaatctgcggcgaccatttccacgacagctatgagaaagcgcgcatcgtcttcaacaaagacggtcggtttactacggtcatgcgggatggccagtgcgttgcgcacatggcaggccgattttcgaagcaggagcttcgtgacgcactcaaggggaacatcaaggatcatgggcgctatgttgccggcaagatcaaatcgatcctggaacagaagcttgtcctgcctgatacctacctgttccgaatggacatcgaggacgacctccgctgggtagattcgatccggagtcgccaattctccgcctgggtggttccaaaggttccggacaatgacgatcccaagcaagtgcgagctgagttccgattctggatcgccgaagctcgcgcaatcatcttcgccgacaagggcaaggcctgggcctggcaacacaaggccatcgttacagacggcctgcagcatccgaaggcagacacgcacgaggagctggcccacctggtcgcggatactttcaacaaggccgtggagcacgccggctgggactaa

SEQ ID NO: 334253 - DNA, 282 bp, Pseudomonas aeruginosa
atgccttccacacaactcgaagcctatgtggcacagcatggttcatccctggacttcgccggcgaacgcatccaggttcgaaatttcatccagcgcacggccgagtccgttaccgccgagttcctgggtagccgaaacctctacctaggtcgttgcgacaggctggatgacgatgccagtagctcgagtcattccgaagtttgggagctaatccggatttccggtcgaggtaacgtcgccggaaggctcaaggtggagaaccagacgatcactcaactttga

SEQ ID NO: 334254 - DNA, 381 bp, Pseudomonas aeruginosa
atgtccaccagcaaccaggcgtttgaatactacacgcggtgcatagaccttcatgacggcgagtccgcacgatcaaaaggacaagccatcagcgacttggtcgaggctgcgcgcaagatcaccttcaaatcgctggcgaagcacgtcaccggccttgaggaacttgagcaacagctcggttacgggcgtggactgcgtctgcgggacgattaccacgtcacctactggaagggcgtttaccgcggggagcctgtttacttcctgatccactccgccattgagcacgtattcatccgcccttcgtccagggtggcgatccgagacgtgatccgagccgaaaccgatcttcagaacgcattgttgcagcgcctcgctgcttga

SEQ ID NO: 334255 - DNA, 465 bp, Pseudomonas aeruginosa
atgaccactacgccaatcacgctcgtcttcaacactgatgacggcctcgatgatgccgtcatggctgaagcctatgtgctgactcccgatggccctgcccaggtcctggtcgatacccagaagctgcggggcgcagccgcaattcagtttttctaccgctaccccaatgccaagaagtatgggctcagccaatgcgcctgccatgccggggctgcaagcttcgctgcggcgcatggcttcgtcacgaccaatatgtcgctgaagaccgaggactcactcgacgatagcggcgatcacatcgagatcaccgtaaacgcccccaatgactcattcgtgggaggcggcgaagaagcacttcaagagtgggttggcttgcactatcagtctcacttcccaagcctcgattccacccgcaagcaggcttacctgcagcgctacgtagaaattcaccaccagcacctctga

SEQ ID NO: 334256 - DNA, 570 bp, Pseudomonas aeruginosa
atgaatgcaacgcagtcgaatttggcccttgaggtgcttcaaggtctggtggatgcgatgaaccaagacgaggatggcgatttccttctgttcggttcgaaccttccactgatcaatcaggctttcgcggtttgcggatatgcccctgcagccgtgatggacaaaaccgcccggaacatcgacatcctcactccaggtttccgcagagaggattgcccgcccggggaagcctatcctgactggttgaacgctcagctactcgcagcccactcggagatcactgcatctcttgcaagtgatcaaggtccaagaacaatccttgtctcgcggccgctgctcgaggtagctctggccaacctggcatccaccagtcccaaggtcgcagaggttcattcagcgctgtacctccacctccgggccacccggaagtacgagccaacgtacgtcaagacctgcatccctctactcgacgagatttgggagcatctgccgaaagacagctttgcagaacagcgggtggctgatgcgattgggggcctgattgagaaggaaccctgtcttcaggactga

SEQ ID NO: 334257 - DNA, 279 bp, Pseudomonas aeruginosa
atgcctgcaccaacaattcaagtcacgcgcctatcctgcctgcacctggacaaggaaactttcgacgtgcttgccaagcacggcgacgacaatgattggctggtatgtgcggtgtaccaggacggaatgttcctctacatcgaagacctgcctgagaccgtcccgcaagctctgcgcgacatccgccactggctcaatacgcataatcgtctcggatgggtgcgcctggacgagcagttcgataccgtggaaggactcgccgtttacgaccagagctaa

SEQ ID NO: 334258 - DNA, 489 bp, Pseudomonas aeruginosa
atgaagaacaaggacagcaactcccgtaccgcccccaaagtcatggtccgcctcaacagccagtgccatgaaggcctcaccgacctcgcccaacagcatgggaggagcatgaatgcagaatgcgtcatgggcctcatctcttggcttgaccaccagaaacgctgcgcagtgatccgcaagatgctgatttctcaacttgatgaagcggacgtcgcggtgcttctggcaaaactgcctgtcgtcaccgaagagcccggcctggcttcggacaagatttcgaccatgctgcgctacaccccttacattcgggaccgaatggcagagcaagccaaatcccatgaggtgagtgtccacagcatgctgctcacagccttggcgtggtgggtgaatgtctcgcgccaggtgaacgcattgcttgaagcgattattgaccaaggaggagcactccaagctcaactgctcgatcaaccagctcgatccgctgcctag

SEQ ID NO: 334259 - DNA, 666 bp, Pseudomonas aeruginosa
atgtcatcctcccgctctatctgcccccgcactcaaagcgccgctcttgccctccgtcgaaacttcgttgttggcccttcctatgaccagccaattgtcgagatcaacacgatcccagcgcgggtaatcgatatcgctgcacggcagaaatcctccggtttcgtttggatggactacggccaagaggtgcttcaggtcgcaacctatgacggcaacggattggtttgcttgggcaatgatatcgctggaccgaaagcatcaccggagtcgctgctggtctacgcagaaagcatctacccaacaatgcgcgtaacgagcactcctgcagtgcctgtagccggcatcgcttcgttctaccgacctgaccctgcttttcgaggtccgatagttcctcttgaggtgagcgatgaccgaatggaagcgctgctgctcagcaacaagatgattttctcctatcaaaactctgaccacttgtcgtccagcgaactcgttgtccaaacgttgcacctcctcaaaaccaagccagagggatgtggcgggtgggaagcccgggtggcggctcgaatccaggcgctaggcgatgcattgagcttctacgaaggggcggtcaggcaggcggtgaaaaatgatgacgagagtgctcctggcacaccggcagcggcttga

SEQ ID NO: 334260 - DNA, 198 bp, Pseudomonas aeruginosa
atgattctgcgcgttctcgctgtcatcgcctttgtcctactcgcttccggccttcaattcttcgttgtggagtacggacactgggcagagtccaacattatcgtcggcatctccattgctgccctgatctgcgcgttcttcgccggtggactgtcagccttgaatgatcaggccgcccgcaagcgtaaagaagggtaa

SEQ ID NO: 334261 - DNA, 822 bp, Pseudomonas aeruginosa
atggggaatactgtgtttcgacgcctttcttatctgatcgctgcatgtgaggcggaggagtggctaccagggcttatcagcaaactcctgggccaggatcacgccaacgaaatcgaggtcgttctcgcgtctgatgatggtgtcgacctacgtaccaggctgcctagcgatcctcgtcttgtacattgtccgccagcatttagaaccgggccggccgcggcgcgcacaagagcacttgtagctgcgtcaggaagtcacgttgttcagatggacgcagatgatgatgtatcggatgggttcgtcgaggccgtgatctcggctttgaaagtaacccctgctgtcgctctaaggactgtgtatgtccgaggaggggaggaggtgaagcgctttcagtccccaacgctggagctgggctcactgttggatttttatggcagcgtcatttgtgcggctcccaggaactggatcaggctctatccagcggcgattgctgaagacgtagttgcgagcatcgcatttttgcacctagcgggagggcggctgccagtagtggatgctgactacagagtgaggctccacccacactccttctgtgcccagaatgcttgctccttcacctcggcttatcggtcaggagtggttcgtgcgggttggctggcacaggaagtcggctgcccaggaattgaggctgcactgatccgaatgtaccgctcgcggattgccatgagccgggcctacgatacgttcttgttaggtgggggagagggggactatcacgactttgtgcaacagcaccaaaatcacccggtcatgcctgcttga

SEQ ID NO: 334262 - DNA, 288 bp, Pseudomonas aeruginosa
atgcagcaaatcagcctcaccctccccagggatttgaaatcctccggcgttgtcccagcacttgaatgtccagtccagcctatggaccacgtgatcttcacacctcatgacaagtccatgctgaaaccgacaattcgtggacgagtaatgaacactctgcgcaccgccgcgggaaactggcgatgcgcaatcgtcctccagggcgagccattccccaacggcaacagcgtgaacgtttactcccatgaaggatgctttgatgtagtcgaggggcacttcaatggttaa

SEQ ID NO: 334263 - DNA, 300 bp, Pseudomonas aeruginosa
atggttaagaggaccccagctccaggctccgcagctgaactgattgcacagcagggtatcgaggcgctccgcggccggcccctgaaagatggcaacacaatcgtgtacatcgccaacacagaggttgatcggctccaggcggaggagaaggaagatcaggagagcggcgaattccttttcccggcctggaggaagcgagtctacggtggggaatctcccgacgctcagatggtgcgctgggtgaacctgaataccgttttgccgacccaggatctgatcgaagaggaccatcatggttga

SEQ ID NO: 334264 - DNA, 387 bp, Pseudomonas aeruginosa
atggttgatcgaaaagcgctgcacctgatggcacggaatcccaggcttcacgcccagtatgttcggacaggacgtgtacctgagttcaagaagccggaaagccctctcatcacgctactggagtcgatcaatccacgtgacagactggccatcacagccgtggtgatcggcccggcattgggctatagcgggcggcgttgttttcagaatgccgcccaggccctgaactggctcaaaccccagtacacggcagcaagctacccgagcgagtcctggcggatcaaacgattcgcccaacgtctcggaatcgacgatcttgctgagtgtgctcaggttccggaagggatcatcaaagagtggaaccggaggcatcacccgggccgctga

SEQ ID NO: 334265 - DNA, 309 bp, Pseudomonas aeruginosa
atgcgctacccgaattccctcatgacaacctatttcaacggctgcgccggcgggcaatctgagccatgcgtcgttatttttcgcgacgaagaggtggtaatcgaatacacccgcaaggggcaaccctccacatatcggggacacctgaaggacggcatctactctttgcggtactggccagaagcagatggatttgttggggaggccaccctatgcgcaccagaggggaacctcatggacggagactggtgcgagcaggaaggcggcagcaaggatgtgggcacctgggaaatcgaactcagaaggtag

SEQ ID NO: 334266 - DNA, 852 bp, Pseudomonas aeruginosa
atgcaagacgccgccttcaccccgccaagctggatgaccccctacaaggagggaagccgagtcgggtactcccaggctgttatggcctatgccgactactacaacctcgatggcagtgctgatctggaaccggaatgtgaggagcggctgcccgtacatcgccgcgagatggtctcctacgcaagcagaactggtaccaagcagaatcttgccgccatgcgtgaggctggctggcgactgctggtgagtccaactggagtattacggacggaagatttccggtactgcctggacaacggcgcttggacagcatttcagcaaggacgtccatttgatgagcgcgcatttgggcgagcaatcgacctgctcggcgagggaagcgactttttcatcctgcctgacattgtggccggtgggatgagatcactggagttcagcctcaaatggaaggaacgactttcagggattcccaccctgactttgctggcggtgcaagatggcatggagcccgacgatgtacgagagtatctcaacccggcatgcggaatcttccttggtgggtcgacggagtggaagttggcaacggccaacgcatggggtgtcctggcaagacgaaggaactgctactaccacattggccgggtgaacagcgcgaaacgaatccacctctgcgcagccgcgggcgcgcattcgttcgatggcaccagtgctacccgtttctccaaaacgttgcccagacttgatgccgccctggatcatgcagaacggcaggtggatttcttttcacctcaggcgaagccaatgggtgagacagatttcgactgcgggtggcccttcaagctaacccgttag

SEQ ID NO: 334267 - DNA, 510 bp, Pseudomonas aeruginosa
atgcaaccgattcaacgagaccaaacccaagaccaaagctggacaccgttttattcgaagtggcgtcatggaggctggtacgtatccaatcttcgttacccaagcggggcttgcggctgcgtcagcaacaactatccggacggtaagtggcgtattgtctgtgaccgccgccgcaccgacttgggcaaggaaggcgacttcatctttgagactcgagatggagcagcacgcgccgagttcgacctggtgcagaacataatcgccgagcaagctctgcaagctgcgctgcaggatggatacctaacctggggtggatcgcctgtcacaggtcctcaccttccacacgggctcagtgaagcgagccaagtcgaagtgatcttccgcaacggccagcggcacaccggcagtgcacaggccttcggttggaaccacagtggttacaacccacacgctcaaatcgtggcctaccgtgtggtggatactacggcccactctcactttgctggctga

SEQ ID NO: 334268 - DNA, 282 bp, Pseudomonas aeruginosa
atgagcactcaatccgtaaacgaaccgtactcgagcattatccagcaagcgttgaccaaacgaggccacgatgcggacgacttttcgcgccatccccagtacagcgcgccaaactacgtggtgaggatgtgcaccagcctgaccgaagcggtccacaaagcgggtaaccaggcagtcactctggagcaactcattcgacttgagagtacctgcaccgggaccgattaccagcacaagctggcattgcgctgcaatcgcctggcgcaaggaatcggctgctga

SEQ ID NO: 334269 - DNA, 663 bp, Pseudomonas aeruginosa
atgaacaaactgctcaaacccttcagcgtcctcgtaatgctcgcttgcctggccggctgtgcgaccaaccccatgaccggtgagcgtgaaattaaccggaccgccgtcggggccgtagtagggactgttgcaggcggcctaattggcgcggcgatcggcgatagtcgtgcagccctcattggtgcggcaattggtgctggtatcggcggtggcaccgggttcatcctcgaccgtaagcatggcgagctagaggcaaagctgaaagggacaggcctcaccgttgaaaagcaggtggatgatgcgaacaccacccaggcactcgtggtgagcgcgcccgcggacattacgttcagcactggatcggcagatctgcaaagtcaggctttcccgtccctagcgcgactggccgaatcgctgcggaaccaaggtaaccttcgcattgaaatcaccggccatacggacaacaccggtccgttccaaaataaccttcgtctcagctacaaccgagcgcaggcggttggacagttcctttacgcaggtggaattcaggctgaccggattgcaattcgcggggtggccgattcgatgccggtcgcaggaaatgaaacacccgccggtcgccaagccaatcgccgggtggagttgcgaataagcgcgatctag

SEQ ID NO: 334270 - DNA, 420 bp, Pseudomonas aeruginosa
atgagcccgaagctacttgatctgctttacctcatccaggtctggttgaggatcaaccgattgccctacaagatccttgtgaacagtgggtaccgcaccccacagcacaactccaaattggagggcgcagccaagcaatcacttcatatcaaggcgatggccgcggatattcgcataccaggcttgtccgtcgacaacctgggaaagctggcccaggctattggcgtcggaggtgtgggcttctatcccacgaagggattcatccatgtcgacgtcggcaaggttcgaacctggcgcgtggccgaatcgaccgtcctggagccagaatactggattgtggagctactcgatccttcgaccgatgctcagtggctggccaaccttgcgcctgattggccagaacttgaaatgctcgcttga

SEQ ID NO: 334271 - DNA, 528 bp, Pseudomonas aeruginosa
atggataaagaccttcgaaatcgcttcatcgagcaggcaagggcggtccgccaaaccttcggggatggcgaagacctccatgccgatcaagctggtctatcgccttcggtccgccaaatgctccgggaaagtatggagcggcacgaagccctgaccgccttgtacaacgaactggatcgggttggcgtagggttgatcctcaaacattggtccgggaaccaatgggcgctggttcttcctgatgcctcagaacccggtaaattccgctaccaggctttcggtctgcacggctggattacccatcacacctgcacaactctggacgaagtcgtatcagacgccttctgcgccggttttcgtatggtggcatctccagataccctcgatcgggttgcatctacggtcgagtggaagaaagggtgcgagcgcctggagttcatcacgcggcacaattgcggcgagatcagctaccgggaaatgctggatcagttccaaaacatcgacgccaagtacgcatccgctgcttga

SEQ ID NO: 334272 - DNA, 456 bp, Pseudomonas aeruginosa
atgcaatacgctcaatccaacctgctttccttcctggcccatgctccggttgcggttactaccaacctggatcacggaaccgagacaccctcagggcacattttgatgaatgcagctcgcccactactgggccagaccacgttccaaggtgactttctccgcggccgcttctacgccacgctagacccggaagacagcatctctgaggtttttgcaagggagaacctgaagcttgatggcaaggtcgtcttcgtagtcgaccgcgcgaccgcgactgaactcatcctggatggatgccgctatcgcagccagtacatggccatggaggaagaagaacgctggtcgattctgcgcgatcgaatttccgatctgcaggacatgcccctggctggtttcatggacaaactggccaaagtcaagggcagtgccactgagaaccaaacccaagcagcatga

SEQ ID NO: 334273 - DNA, 342 bp, Pseudomonas aeruginosa
atgttccataccaaccagctccaagccctattcgatcaactggaagctctccaacagttcgacctggagattctgcccgccgacctgaaggccgtgctcgtgaaggtcaacgaggaaaggcagaagctcatcaccctggatcagcgactgatgatcggtgtccgcgatacccgtcattccaccgactactacccggtgctcgttccgcgctctcgtagctacggcgacgaggacttcaagggcacttttgacacctccgccgataccagtgaggactacacctacgtagtcgattgcgccggcacgaaggtcgatatcatttcgcgggagggtgaggcgtga

SEQ ID NO: 334274 - DNA, 642 bp, Pseudomonas aeruginosa
gtgcccctctctgcctcccctgcccctataccttctacgtccgctgataccctccgcctgaccgcccctcgccttatgcgacaacgccgctggcgagatgacaaacggttccagatgcgtcggatcgtgattctgaagaaccaggacggcgagattgttggatataggccaacgatccagcaaggcacgaaggagcatcgtcgagactattaccagaccttcaagatcacccccgaggtctccctcagcgaagctctacgcgcagctatggattggcgtgatttgacagagaagaagctaggcatcgatccaggcagccatagcgccgcgtgttcttccaaaccaatcgcaagtatttccttgatcgtttcccagtcaccaccctatcgcgcgcactgggcaaccaatcaaaccgccgacggcgcccctaaaatcagggtcagcattggcgttcgaaactaccaagatgcttacgaggaaacggtgcttcgtctggcccagcgcgagggaattccgcccccggagcaaataccccttgctccccctccccgacgtgaccagtaccgcaggatggtgaaagcaggcctacaggacattccgaagccgctacccgcacgatcgcgtcagaaatgtaggccctga

SEQ ID NO: 334275 - DNA, 333 bp, Pseudomonas aeruginosa
atgccctccatgcaatctcttatacgaatagccttggtgatgtccctcacactgatcgccggctgcgacaactcaattgtcggtgcctacaaggcaacgatggaatccgaaggaggccaggccaggacggttggtattgcggtgatccaagaagggaatatcagcgccgatggtcaggacgtaaaggtgtccagctggagcagagaatctggatcaattaccgccctcgatcaagaaggcaaccgcatcgttcgcttcgaaatcctggagaatggagacctcacccaagacactccggcaggaaagctgaccttcaaacggttcgacctgtag

SEQ ID NO: 334276 - DNA, 837 bp, Pseudomonas aeruginosa
atgctctacctggactctgcaggtggggacctggtcgcaggaatggagctgggtgaagcgatccggcgcagaggcatcaacacttcgatcggaaaaagcagtggtaactatggcaagcctctgcccgggatctgctacagcgcttgcgtccttacattcagtggaggccacttccggtttgcagaccagaacgcccgtattggcatccacaggttttatcgccggaccacctcgacgtcagacctggatgtcgggcaggtagtcagcgctgccatcaccagctacctgatccgtatgggggtcagccctttgctgttcgaaaagatggcccaggtcggtggcggcaagatgcagcttttaccaatttctgaagcctctggcctgtcattggtgaacaacgggattctatcgccccagtgggggatcgaaggcaagcaaggaactgtgtacctcaagggggaacaggaaacctggaacggtaccggcaagctgatcgtcacctgcgcgagtcacaacggcgtcaagatttccgctctatacgatgcaggcaccaacaaccaagagattttgcggaatgcgcggaattacaccctgagggtgaacagccagtttctccccatccctcatctgcaatccgctcccaagatcagtggtgattatctgacggcgaccttcacccctgactccagcatgatttgggatatgcagtccgctgaacaacttggatttggctttcaccccgcaggctctgactcattctacggcttcctgattgacgccaggtccgaacgggatctgatcagaagttttgtgcagcactgccagagtagggactga

SEQ ID NO: 334277 - DNA, 237 bp, Pseudomonas aeruginosa
atgctcataccctacgaccagctacagcctgaaacgcttcacaacctcatggccgatttcgtgagtagggacgggactgatgggggtgacgacactcctgaggccgtgaagatcgaacgagtgatgagggcgctgaaaatcggcgaggcggtcattctttacgatgtggcctaccagcaatgtatcttgactctccgctccgaggttccggccgagacgcttaaggcctggacctga

SEQ ID NO: 334278 - DNA, 528 bp, Pseudomonas aeruginosa
atgtcctctctctccctacctgctccaatccttgctgggaaccagcgctcgtattctataagcgcactgtgggaggggaccccggcccgcactaacgttgatcaggagcgtcagcttttgaacctggtgcttccgccgtggcagcgtccgcccagctggaacctcgaccaacaggtccaatttattgaggggattttcttgggccttggtaccgggtactacgttatcaatgggcgcgactatgacgaccagggccatgacaagcccatgtctgggtggttgattgatggtcaacagcgaatcactgcgatcgcccgcttctttcacggggagatcagcatcttcggggggatcttcttccaggacttgagcctggctgacaagcgccgccgcttcaacaacctgatcttcccctgcatcgagatggactacaccgatgacgagaaggtcctgaaggagctgtatcgccgactgaacttcagtggaaccccgcacaccgaggctgacctcgaattgctcaacgcttaa

SEQ ID NO: 334279 - DNA, 1149 bp, Pseudomonas aeruginosa
atgaatgccgaggatgttggcatttatggtcttgtggctgcgactattggttatggagtgtatgtagtcggatttgaattctataattactctaatcgtgagttagtcatcgctccacagagtgaatggttacccttgatacgagatcaatttctcctatatctcctaatatatgtagtgactttgccttttattgttacagtcttttggggtggatggcttccttggccgtatttttcaatttttgtgactcttttgttacttgaacatattgcccaagagttcaatagaatattggttgctgcttcgaagcaattattggcaagcgtggttctttttgttcgtagcggaatctggtgcttagtagttattctatgtatgtggttcgatccagtttttcgaacgctacagttcactttctatagctggattatatcttgcttgttcgcatgtattatagcgatttatcaaattcttcgcttaggtaaattgcgtggcagccgcccagtaaattggacttggatacgaaacgggattaaagtggctttaccatttttgctcgctagcttagccatacgggggatctatacattcgataaatattttgtggatagtgtttcaaatctacaagtgttaggtgcatatacgatctttgtaggtatggctaccgctgtcctatcctttttggatgcaggagtttttgttttctatattcctcggctaataaggtccgctaagaatgaatcgactcatgactttcagaaagtgatgcgtgagttaactattaatactgtgattgtaatatttttcctttctgttctctgttgtttcgctggaatccttattagtaattggctttcttcacctgtttataaagaaaacttagatatgttgtactggctacttttcgccagtgctctttatgggctcagcacgatacctcatctaggtttgtatgcttatggtcgagatagaccaatattacattcccaattatgtggattttgtgtcttcatactctctgcctacttattttcttcctcttggggagtaagctctattgcagtctcaatggctatttcattcttttttatctttgcttggaaaatatctgcatatttttcttttgttaaggatgcaaataattaa

SEQ ID NO: 334280 - DNA, 1239 bp, Pseudomonas aeruginosa
atggttttttcttttctgctcttcagaaataagaaaattatatgcccgtctaatgtggtttttgggaattacttcctatatttggtttttccagctacgcttttttatatactcgagtggctgtcttgggattatgtcttgccatgggggaagctcaatgattgggcatctgtctcgcaggaagccatcctagcttatctatacgtatttacactctttttcctatttacacgattttttgaaacgctttttgatcgagttgaaagatcggaaattatatatgagtatcgcgccagacctttagcgatattcctttgtgcattatctcttcttattgggtgtatttattttcttcaggtgacgggagggttggattcatgggtagaaaattatagtgaaacctatctttctaagaagaaaggatacggtttgcttaatttctttttaataatgtggtcaaattttctagcgttttggttgggtttctattttaaaacttctcatcgaaagagttggttcttggttgttttcgtacttttagttttgggtttttgtgcttatgtccaaggtataaaaagtcgaatatttctatttggtatattttttagtttaccttggctagcaagcgctcgtttgagtctgaaacaaggtatagtattgtttctagggtttatgtttcttttttctggtgcgatgtatgttcgctccaatggcttctataactcaccagagatgctgttagagtattttttaacttattttaataccatatttttacatgacatgattctgcatgacatgcaaccagactatttagcgactatgtcctttccgcttaacaaatggttaacttttattgggataccttctcctgactatttgcatgatataagccgttggcttacttctatttattttccttctcaatggtttaaggaatctgctactcaacagtggccaatagagactgaactctatttaaactatggggcatatatattctggagtatacctatttttatatactcgctctatatgtgtgctctttattctctaagattcagagggggccctgttctgctctttatctttatggccgagctttttttattcttgagcatgtttagaggaagcatgttgcaatggatctatattttccacgtgcttttctatcttatgcttttggtagggcagcgattgttattcattcgtattaaaagccgaggcatgcttgaatga

SEQ ID NO: 334281 - DNA, 759 bp, Pseudomonas aeruginosa
atgttgaacggtaagagagtgttgatttctggcgccggagggctgctcggtactcgtttggtagaacgattactatcggagaactccatagttattgctgctgatttagatgttgaattacttcgtgagcgtctgaaggccatcggtatttcagaacattccagtttatctctggaaaagttggatttaaatgattctgaagaggttatgtttttttttaacgctctaccttgtttggatggagcagtaaattgtgcttatcccaggaacaaacaatatgggcgaaagttttttgacgttgagctaaaggattttaatgaaaatctttccctccacctgggggcttcattcttatttatacaacaatgcgctaaattttttgagaaacacaagacgccattctctcttgtaaatatatcctcagtttatggagtagcggctccgaaattcgagatatatgaagatacttcaatgaccatgccggtagaatacgcagctataaaatcggcgcttattcatcttagcagatatgcagtatcttttgtcggtgatagtaactttcggtctaattgcgttagccctggcgggatattagacagccagcctagctccttcttattaagttatcgtgatgagtgcttgggtaaggggatgttgaatgtagaagatgtgcttggaagtatagtctttttgctttctgaccagtcaaaatatatgaacggacagaatttgattatagacgatgggttcactttatga

SEQ ID NO: 334282 - DNA, 699 bp, Pseudomonas aeruginosa
atgacgacagcttattctttcatctttgcgcgtgggaattccaaaggacttccaggaaaaaatataaagattctgggaacaaaacctctgctcgcacactctatcgatgtcgctaggtctgttcgagaaataagtaaaatatttgtctcaactgattgtaaggctattgccgacgtagctcagcaatatggggcggaagtcatctggcgtcctgaagagttagcaactgataactctccggaatggcttgcatggcaacacgctataaaaaccttgcgcgacaggggagatcaatttgatttatttgttagcctgcccgcgaccagcccattacgtagtactgaagatgtccaaaactgtatttacggcatagacgaaaatgttgacatagtcgtcactgctacaccagcggctcgaagtccttatttcaatatgcttgtgcgcgatgagcgaggcataagtacgactgtttgttctggggataccatttatcgtcggcaggatgctccaatggtatatgacatgactacagtagcatacgttactcggccggaatacatattaggaaatgagaggcttttcgcgggagttgttaggtcaattgttgttcctcgagagcgtgccatagatattgatgacatttatgattttaaaatggccgagatgttgattatggaaaaagagtctaatatatgttga

SEQ ID NO: 334283 - DNA, 1011 bp, Pseudomonas aeruginosa
atgacaagcaacgagtgttttctgatagttggcagcggaagcatagcacgccgacatatgagaaatatacagtctacttatccgcaggccaagatagtatgtgtctctgcctcaggtagagagttgaactcaaatgaattgccttcaggtgtatcagctctcggttctttgcatgacgctttgcaggtaatccccacttttgccattattgcttctccagctcctttacatgtagagcaggcgagtcttttggcttcgagtggtgtctcgattttagttgaaaaaccattaagtgattcattggtacgctttgcctctcagggtggagcttcgctgaacggaaaacgtattcttgttgcatataatcttcgttttatgccttcaataagagtattcaagcagtatattgatagtgggaagctagggcgaattcattctgtaagttgtgaagttggtcaatatcttcccgactggagaccagatagtgactatcgaaaaaatgtttctgcacaacgcaccttaggcggtggtgctctacttgagttaagtcacgaactagactaccttcagtggctctttggacccgttgccaatgtctattgcatagcacgaatatctggtgcattagagttggacgcggaagatactgttgatgccttgctcgtatcccaaaagggctatgtcatcaatctacatatggattttctgcagcgaactgcgacacgtaaatgcaaagtggttggtgagcatgcttctctggaatggaatattttagataacagtgttgttttgtacagttcattgggtaaaaaacaagtactttacagtgaccaggaatatgatcggaatagaatgtatatagatgaactacttcattttgtcgacgttgcgaaaggaaaatcttcggcactggtaacgatagaacaaggacttgagacattaaagttggttgaggcgctgaagcggtcttcagcaagcggaaaggtcatttctcttagggatttctcatga

SEQ ID NO: 334284 - DNA, 1047 bp, Pseudomonas aeruginosa
atgaagcagtgggaaaaagcgctcattactctggatagcacgatagaggacgcgatcactactttggatcgagttgcgatgcgaattgtcatgatcgtgaacgaccagcgacagttgcttggaacccttacggatggagatgtaagaagagctctgcttaagcaactaccgctgaatacgccagtagggaatgtaatgtgcaaaacccctagaacggccgagcgggattgggggcgagagcgtatcctgtccgtgatggagaagtactctcttctccagttaccgattatcgacgagaagcgtaaggtaattggtttacaaactttgcatgacttgctgaacaagcctcgtttggataacccggtttttctaatggcgggaggctttggtacacgtctccgtccactaactcataattgcccgaagcctcttttgaaggtgggtgaaaaaccaattctcgaaataatattagagcgtttcattggagctggcttccatcgtttcttcatttctacccattatatgccagaaatgattcgtgagcatttcggcgatggaagtcggtggggtgtcagtatccgctatgtacatgaagaaactccacttgggacaggtggggcattgggtttactaccccatcatgagatagactctccgttatttctcatgaatggtgacttgttaacaaccttgaatttcttgaatcttctcgagttccatactgcgcacggtggtgtggcaactatgtgtgtgcgtgagtacgagtatcatgtgccttatggcgtagtgcaaagtgatgggcaccgcataagctcaatggttgagaaacctgtgcaaaagttttttatcaatgctggaatttatctactttcaccaggtctcgtaaaaagtgttaaggctggcacccggattgatatgcctactttattagaacaggaaattgagcgacagcaggcagtaaacatgtttccggtccatgagtattggttagatatcgggcgcatggaagactttgtgcgggcacaacaagagttcgcatctttatga

SEQ ID NO: 334285 - DNA, 657 bp, Pseudomonas aeruginosa
atgcccgtaagtatgccgcttgtcctgatgggggcaggagggcatgcgaaggtattgtattcgttgattaatgcgtgtggactatccttactgggcgtttgcgatccaggcctcgctggagcggggacaagccattggcgaggtgtgccagtacttggaggtaacgaggtgctcgaaacgctcgatcctgactccgtaagactagctaatgggatcggacaggtggttggcaaaaacgtacgccagcgtatttatgagcaagcccgcgagaaggggttcatatttccacctctggtgcatccttccgtttggcttgatgaatcagtgacgctgttcgatggttcacaactgatggcgggagccatagttcaaccagatgtcaaaattggctgtaattctctgattaacactaacgcgagcttggatcatgactgtcagattggtgatcacgtccatgtcgcacctggatcagtgctatgtggaggggtagttgtcgctactggggctttcatcgggagtggagctacggtgattcagggaattactatcggtgagcgttcaattgttggggccggtacggtagttgtcagagatgtgccggaaaggagcatcttgaccggaccttcagtgcggccgaggccgttggcaggcgattga

SEQ ID NO: 334286 - DNA, 1086 bp, Pseudomonas aeruginosa
atgaaagcgccagatgaaagagcggttttcgttattgcggaagctggggtcaatcacaatggtgatcgggatcttgctttcaaactaattgatgtagcggcgcaagcaggggtcgatgcagtaaaattccagacttttaatgccaagcggctggcatctcgctctgcaccaaaggcaaattaccaaaagcatactactgatgtaactgaaagtcagttagcaatgttgaagaagcttgagctaccaaaagagtggcatttcgagctgcaggcgcatgcccaccataacggtattgaatttatttctaccgcgtttgactcggacagtctagcctttttagccgaaatgcagttgccttttttcaaggtgccgtcgggagaacttactaatggaccactcctatgggcattcgcgaaaacaggtaaacctctgattctatctactggtatggccacattgagtgaagttgagcagggcctagccatcgtggcccatgctttgtcatgcgataatgagcctaaagatatggacgaggtgtggagactttggagtaatccttctgttcgaatgcaattacaaggacatgtgtctttactgcattgcacctcccaatatccaacccctcctgacgaggtgaaccttttggcaatggacacgctgagaagctttggtcttgccgtcggatattcagaccacactgagggggggctggtgccgattgcagcggttgccaggggggcgtgcatcatcgaaaagcactttactctagatcgttcaatgccggggcctgaccataaagcttcgctggaacccggcgagttggcccaaatggttgctcagattcgcatgcttgaggttgcgttgggaagtccctacaaagcaccgcaacctagcgagtgggatacacgtcaagctgcacggcagcaggtggttgcggcgcgtgacatcgaagcgggtatgattattactcgggatgacctgacaaccgcgcgtagcgggcatggtttgccaccgacctctctttgggaactggttggcagcaccagcaagcgtgcctttctggcaggggaaacactggaaaaatga

SEQ ID NO: 334287 - DNA, 1155 bp, Pseudomonas aeruginosa
ttgattcgtaaagtggcggtttttacaggaagccgggctgagtatggtctgctgtattggttgatgaaggacatcgcatcccacaatgagttgcagttacagactgtcgttagtggaatgcatctctctcccgagtttggtgagacttggagagcagttgaaagtgatggtttttctattgatgctaaagtagaaatgttactttcttctgatactgacgttggcgtggctaagtctatgggtgtgggaatcctaggttttgctgatgcgcttgatcgcctccgtccggatattctcattattttaggcgatcgtttcgaagcgcttgccattgcccaggtggccctagtaatgaagattcccatcgctcatttgcatggtggggaaatcacagagggtgcttatgatgatgctatccgtcatgccatcacgaagttttcttatctacattttacgtctactgagcaatatcgcaagcgagtgatccagttaggagaatcgcctgagagagttttcaatgtcggagcaatagggctggatcatcttctccgaacatcaaaaataagccgcgaagccttatccgaaagtctcgattttgatttgtcctctccgtatctactggtcacttatcatccagtaacgcttgctgaggaagagccgcaaagcacctttcgagctttaatgcaagccttggattgttttccaagttataatgttattatcacttatccaaatgctgataatggcgggaggacgattattccattagtggaaacctatgcgcgccaatcggcgggacgcgtcaaagccattccatcgttaggtttcaagcgatacctgagtgctgtagccatggctagtgcggtggttggcaactcttctagcggtattattgaggtgccgacgtttggtataccgactgttgatatcggagcacgtcagaaaggccgattggcagctgaatcggtgattcactgtgcagctgatgcgttatcgatagaggatgctctgcggcgtgctttgacgcctgagtttgcagagagctgtaaaaaagttatcaatccttatggagcaggtaatacttctcagcgaattgtccatatcctcgcctgctctgaggtgaactataataagcccttctataacttgagctaa

SEQ ID NO: 334288 - DNA, 1152 bp, Pseudomonas aeruginosa
atgtttgatgcgttaattgattttgttcgtgagcaataccgcactcatgatttcattcctttgcatgctccggttttttctggaaatgaaaagaaatacgttgtcgaaactgtagattcgacttttgtgtcgagcgtaggcgctttcgttgaaaagttcgaaaataatatagcaacctatactgggtcgccgagagcagtagctacggttaacggtacggcagctttacatgtttctttattgcttgcgggggttaaagccggtgatttggttatcactcagccccttacatttgtcgctacatgcaatgcgattgcatattgcggcgcagagcctgtgttcattgatgtagaccgacataccctgggtctttctccgctagcgctcgcagcttggctggacgagcatgcccgtttggataatgatggagtatgtaggaccaaggttggagatcgtatattacgtgcttgtttgccaatgcatactttcggccacccggttgagttggacgccttgcttgaggtttgtgggcgttgggggttgattgtgattgaagatgctgccgaatcactcggaagtctctacaaaggtcgtcatactggtactttcggttcactcggcacattaagctttaatggcaataaaatcatcaccactggtggtgggggcatggtcctggcgggggaagagttaggagctagagccaaacatatcactacaactgccaaaaaacctcatgcatttgaatatgtacatgatgaaattggctacaattatcgccttcctaacctgaatgctgctctaggatgtgcgcagttagaaaatttagagtcgtttgtagcatccaaacgtttgctggcatcccgttataaagaattcttcgctatgcactccgttgaatttgtcatagaacctttgggatgtcgctccaattactggttaaatgcgattctttgcgagaatcagaggcagagggattctctcttggagataactaataaggttggagttatgactcgacctatttggaaactcatgacgcatcttcccgtatatgagaagtaccgacggggtgagttgacgaatgctttatggctagaagagcgggtggtaaaccttccgagtagcgtattgccggagccgtttccttga

SEQ ID NO: 334289 - DNA, 981 bp, Pseudomonas aeruginosa
atgaaaaaagttttggttactggggcggatgggtttattggttcacatctcacggagctgttggttggtgaaggctatgaagtaaaagctttgtctcaatataattcttttaactattggggttggcttgaagatgttgcttgtcttaaggaaattgaagttttaaatggagatgtgcgcgatcctcattattgcaaaaaaattacaaaagatgttgatgtggtttttcatcttgctgctcttattgctattccatattcttatgtggctccggatagttatttggagaccaacgttaaaggggttataaatatttgccaggctgccttggagaatggtgttcagcgggttgttcacacttcaactagcgaagtttatggtactgctcaatatgtgccaattgatgagaagcacccgcttcagccgcaatctccctacagtgcgtcaaagattgcggcagatgctatggcaatgagtttttttaatgcctttgatcttccagtcactattgctcgtccatttaatacttatggacctaggcagtcagctagagctgttattcccactataattgctcagatcgcaaaaggtatgaagcagataaagctaggagatgtgtttccaacccgtgattttaactatgtgatcgatacttgcagagggtttctcgaattggcgcgttgcgagaaagccatcggtgagactgtaaatattgggtctaattacgaaatttctgttggcgatacattgaaactcattcgggagttgatggggagcgatgtggagtttgttactgacgaccagcgcttgaggccagagaaatcagaagtctttcgtctttggtgcgataactccaaaattcatgagttgacaggtttcgagcctacctactcgattcgagagggtctgcaagaaacaattaactggtttgttcgcccagaaaatttggcgaagtataaggccgacctctacaacgtctga

SEQ ID NO: 334290 - DNA, 1050 bp, Pseudomonas aeruginosa
atgtccgataagcagagtagtgaagcggttaattatgaagtggattttatggagttgatacgtgagctctggaaaagccggtggcttgttgttctaagtgggttctttttagggcttttagcggcgctctatgcctatttaagtaagcctgtctatgaggctcgagttattgtactgcctccttcgttaagcagcgttgcaggcttcaaccaggggcgaactagtgattctggattgcagcctttcaaggttcaagacgtttattcggtttttattcggaatcttcagtctgatgaatcgcttcgccgattttttgagaatatttatttgccgtctctaactgatgcagaacggtcagagtcgcgcgagaaactttttcgctccttcagtaagcagataagcattagtctgccggatagagcgcagcctgatcgatatttaatagtagctaggcaaggtaatccagagttagctgctgagtgggtaaaaaaatatcttgccgacgcagctgatcggtctctgcaggagatgatggctaatgcataccgtgagattgaggttaaagctagggatgttgaacgacgtatttatgttttgcgtgaaactgcaaaactgcgtcgagaggaccgcattactcaacttcgtgaagctttaaaggtggccgactcgttgggtttggaaagacctccaataattaatgaccagatgtctgagcagctctcggcaataatgagcggtaatcttatgtatatgcgaggaagtaaagcattgaaagaggaaatcctggttctggaagcgcgaacttcggatgatccttttattccagctttaaggactttgcaggagttggagtcgctatacagggggctgagtatcaagtctgagcaggtcgcagtttttcgtcaggatggtgtagtggaagtacctgatttccccgtgaagccaaaaaagctattgatcttatttggcggggtgatgctgggagggatgcttggtatgctttttgttgtaattcgattgttttataggcgaaatgctaagctttcctaa

SEQ ID NO: 334291 - DNA, 936 bp, Pseudomonas aeruginosa
atgcaccccgcccctgacatgagcctctggcaaggccggatcgacagccaggaaggcgccggcgccctgcgctggcaccagtggatacgcccctatcacgagagcgccggggcagccagcgtactgctgggtttcgccagcgacgagggcgtgcgccgcaaccagggacgccagggcgcgcgccagggcccaccggctctgcgccgggccctggccaacctggcctggcacggtgaacaggcgctctacgacgccggcgacatcgaggctgccgaagacctggaaggcgcccaggagcgttatgcccggcgcgtcgccgagttgctcgggcgcggtcaccaggtggtcggcctgggcggcggccacgagatcgcctacgccagtttctccggcctggcccaccacctggggcgggacggggggacgccacgcatcggcatcctcaatttcgacgcgcacttcgacctgcgccatgccgaacaggccagctccggcacgccgttccgccagatcgccgagcactgcgaggccagcggctggccattcgcctattgctgcctgggcgtcagccgcctgagcaacaccgccgcgctgttcgaccaggcccagcgcctgggcgtgcgctacctgctcgaccgccaggtgcagccgtggaacctggagcgcagcgaggccttcctcgacagcttcctgcagtccatcgagcacctctacctgaccgtctgcctcgacgtcctgccggccgcccaggcgcccggcgtcagcgcaccctcggcgcacggcgtggagatgtcgctggtcgagcacctggtacgccgcgccaaggccagcggcaagctgcgcctggccgacatcgccgaactaaatccgcaattcgacaacgaccagcgcaccgcccggatcgccgcgcgcctggtcgacgccctggtcaactga

SEQ ID NO: 334292 - DNA, 1161 bp, Pseudomonas aeruginosa
atgaacgataccccagagaatccccacgtaccggtcggggaaaaattgcagaaagtcctcgcccgtctcggcgtcggttcccggcgcgacgtagaagtgtggatcgccgaaggtcgggtcaacgtcaatggcagcgtggccagcctcggccagcgggtcgacagccacgatgcgatcaccgtcgatggccacctgatccgccgcgaagaggccgccgagagtgtccgtcgcgtgctgatctacaacaagccggaaggcgaggtctgcacccgcgacgatccggaaggccgcccgaccatcttcgaccgcctgccgcgcctgcgcaccggtcgctggatcaatgtcggtcgcctggacatcaataccaccggcctgctgctgttcaccaccgatggcgaactggccaaccgcctgatgcatccttcctatgagatggaccgtgaatacgcggtacgggtgcgcggcgaggtcaccgaagagatgatcgagcgcctgctcaacggcgtgatgctcgaggacggcccggccaagttcagcgatatccagcaggcgccgggcggcgaaggcttcaaccactggtaccactgcgtagtgatggagggccgcaaccgcgaggtgcgccggttgtgggaatcccaggggttggtggtcagccgcctcaagcgggtgcgtttcggcccggtgttcctgacctccgagctgaccatgggccgctaccgcgaaatggaccagcgcgagatcgatatcctcagcgaggaagtcggcctcaagccggtggccctgccgggcatgaccaccaaggcgcgcgagaaggccgagcgccagcagcgcaagcaggcgcgcccgctggctcgcagcgaacgtccggaagccgggcgcaagcgcgcgccgcggcgcgaggatggcgacaacgccggccgccgcacgccggcctcgcgttcctcgcgcggtccgcagccgggcgccgagcgcaaggggcgcgagcagggaacgccagtcgccgagcggccccgcgagagcaaccgcaagccgcgcccgagcaagccgcgcgacgaacgtccggccggcgcgccgggcgacaagccggcggcgcgcaagccgcaggtcaagcggcggccgaagccggccggcgatggcatgcgtccgggcttccgccgctga

SEQ ID NO: 334293 - DNA, 2097 bp, Pseudomonas aeruginosa
atgagtcagctcgatgacaagatcaaccagcatttcgcgggtttagtcgttcgcaaggatctggtcaaagctgttaagggcaacgccatcgtgccgtcctacgtgctggagtacctgctgggccagtactgcgcaacgaatgatgagtcgacgattcaaaccggcatcgagacggtcaaagaaatcctgcgcaagcactatgtgcatcgcaacgaagcgggactagtgcgttcgacgattaaggagaaggggcgccacaaggtcattgaccgtataagtgtttctctcaacgacaaggacgatgtgtacgaggctgaattcgccaacctcgggataaagaaggtgctgatcgactccagcacagtgaaagcacatcagaagctgttggtcggtggggtatggtgcatcgctgatctggagtatgactacaccgaggataagtccgcctctccttgggtgctggcgtcgcttaagcctatccagatctctcgttttgatttcgacggctatttggagtctcgcaagcagttcaccacggacgagtggattgatctgcttatccagagcatcggcttcaatccgcagatgttcggcaagcgcaacaagctcttgcagctgatccgtctgattcccttctgcgaacggaattacaacctgatcgagctagggccgaagggcaccggcaagtcgcacgtctactccgagttttcgccccacggcatcctgatttccggcggagaggtgacggtgcccaagctgtttgtccacaatggtacgggcaagctcggcctggttggctactgggacgtggtggccttcgacgagttcgccggcaagcagaagcgggtggacaaggcgctggtcgacatcatgaagaactacatggccaacaagtcgttctcgcggggggtggaaacccttggggccgaggccagcatggtgttcgtgggcaacaccgatcacaccgttccgtacatgctcaagcacagcgacctgttcgatccgctgccggagaaatttcacgactcggccttcctcgatcgcctgcacagctacataccgggctgggaggtggacgtcatccgtggggagatgttctccagcggctacggctttgtcgtcgattatctggccgagatcctccgttcactgcgcagccatgacttctcggatcgctacaaaggtctgtacacgttgtcggatgaaatctccacgcgtgatcgtgacggtatcaacaagactttctccggactgatgaagatcctcttccctcatggcgaggcgactgactcagaggtcgaagatgtgctgcgctgtgccatcgaagggcgtaagcgggtcaaggaccagctgctgcgcatcgataccacctacccagctgttcgttttgcctatcaaggaaaagatggcatcgagaagttggtcagcaccctggaggaaggggagtacccgaaccagtaccaccggcgagtggcgagtgaagtgtcggagctggatctgttcgagacggctaatgtcgctcctagcgagccagttagcgatgcggccagtcctcagcccattcaacagcctgctggctcggtgagcaaagagccagagctgaaacctcagcacctggttattcaggagaaccagcgcggtgtcaccttcgataggctgtttgggccctatctgaaaggggctaagcggatcatcgttatagatccgtacctgcggatgttccatcaactgcgcaacctcatggagttgatggaaacaatcagcaagcagctggcttccggtgaggaagtggctgttcatgtcgtcaccgtagaggatgagttaaacggcgatcgccagactgaaagcctccagaaaattgccgatgcctgcgctggggtgggtattcagttcagctgggcgtatgacacgacagggactaagcatgatcgtgatatcactactgacactggctggaaaattattcttgggcgtggtttggacatcttccagcgcttcgaattgaacgacgcgtttagctttgcgaaccggctgcagcaacatcgccagtgtaaggagttcagcgccacgttcgttaaggtcggggatgccggctag

SEQ ID NO: 334294 - DNA, 2508 bp, Pseudomonas aeruginosa
atgagcaactcgaagattacccaggctctgaccaacctgttcgagaagcagcgtattgtcttctggtacgacaaccgtctggagtttcgtgcagatttcgaatcgctagagctgccgggtgtcgagaaaatcgagctagccaacaacgagttcggtgttaagtaccgcatcctgcgcgagcagcccgagcagaagtttctattgtatcgcgagggtgccgagccggcctacctggataactggctgctcgatgtgcaactggccagcggcaataccttccgcacggatcagcttgccctttggttggctgagctggagttggggcccgactgctattcggtgctggaggaacatgctgcattctttggtgcggctaagcggcgtgaacagttgcataagctgttgcagtcgggcgattcgcacagcatgctgcgcttcaagatgctcgccgtgtgtgcaggctgtgagccacgattggatgtaattcttgaagagctgcttgctgagctcgccaatgctgaagtcacacgcatcaagcttattgaaacaagcggcctggatagcttcctctgggagcagatgaagcgcgcctacggctatgtgtcggagcagccgggactgcacgatttcgtgatcgagcttttcaaggcctgcttcatgatgggcacggatcctgagtacaaggtacgtttgtccgcggagtccttagtctttctccggcgctggaaggacagccgttcgcatgagagcagcttcgagctgctctctgcgcagtgtgcagaggtactacagattggtgaaaagctgcataggctcgattatcgagccctccttgatcttgattactttgagctgatcgaccgcaagattctaagtgaactggttcgcgcgacggtagctcggacggcgaccgctgccgatgtggaacaatctgttcgccagcgccgccagagccactggttcagccatttcgaggatgtctatctggcactggaccatgccgcgcagttcctgcagacactggatgcagcaaagctggaaatggcctccttggccgatggcgtggagaagtatgcgaagagctggtatcggcttgatcagctgtatcgcaagttcgtccatcatgcgcgcaagtctggtcaggcctccttgctggaggagctcagtgcccagatcgaaaaccagtacaccaacaactatctggcgcgccttaatgatcgttggcagcagtttgtgaactctgctccgagctggacggctgctccgattatgctgcagcggaatttcttcagccgctgtgtaaagcctttccttgaacgcaagaccaaggtctgcgtactgatctcggatgccttccgctacgaggtaggcgaagagcttcagagcctgattcgccgtgaagaccgctttgaggccgagctggagccggcgctttccatgttgccgagctacacccagctgggtatggccgcactgctacctaaccaggcgctgcagctggctgaaaacgacagtggtgacgcgttggtggatggtcaaagcgcccagggttcggcaaatcgcggaaagatcctagccgctgcagtgccgtcctctgctgttgtgttggccaaggatctgctggccatgaaccaggccgactcacgggcactcctgcgtgataacgatgtggtttacgtctatcacaacctgatcgataagactggcgatacgcgagataccgaggagcgggtatttgctgcggcagaagagacattgtccgagcttgtccgcctggtgaagaagctgaccaacgccaatgccagcaacctgctggtcactgcagatcatggcttcatctaccagcaccgaccactggaggagagcgattttctcagcaacgtaccggaaggtgatgaggtgctctatcgcgaccggcgtttcgtcctggggcgcggtctgcgtagtcaagcaggtttccgaacattcacccctgaacagctgggacttgatggatcgctggatgtacagatccctaagtcgatcaaccgcttgcgtctcaaaggctcaggcagccggttcgtacatggcggagccacgttgcaagaagtggtgatcccggttgtgcgtatcaacaaaaagcgccaaagcgatgtgggcagtgtcgacgtcgagttcatcggtggcggcggcaggagcatcacgactggccaattggctgttgtgctgtatcagtccgaggcggtcaccgagaagaaacaagctcgccggttgcgtgcagggctgtacaccttggacggtgaattgatctccgactcgcatgagctgacgttcgatttcgcgtccgataacccgcgtgagcgcgagctgtcggtgcgcttcatcctgagccggaaagccgatgaagcaaacaaccagcaggttgagctacgactcgaagagcaggttgaaggcacctcgcatttcacccagtacaaggccactcggtatacgattcgtcgttcgttcaccagtgaattcgatttttaa

SEQ ID NO: 334295 - DNA, 1872 bp, Pseudomonas aeruginosa
atgccaggtagcttcgaaaaggcgatcacgattcgccaggctatacgcaacattgatgaccggacgtttttgttgccggcaatccagcgcaattttgtctggtcgacgcagcagatttgtacgctctttgactcactgatgcgtgagtaccccatcaacacattcatgatgtgggatgtgacgagccccgagatcaagaataaataccgcttttacagctttctgactgactactgccagcgcttcaaggagtctaacgactatgtcccgacccagggggaattcaaagacttcaaggcggttatagatgggcagcagcgcctgacctcaatctacatcggcctaaaaggaacctacgcctataagcagccccgagtctggtggcccaatacgcgcaacgatcaggtccttccgccgcgccggctttatctcaatctgagcaagggtgttgaaggggaagacaatgagtcgatggctcagtacgacttccgatttctgaccgagaagcaggtagcaacgtataagagcgacagcacctcgttttggtttgaggtgggcaaggttttggaactgcccgatgtgcgatctgatgagatcctgatggaggttgtgctgccttacctgactgagcacgggctggctgacaacaagtttgcattgaggacgttgaatcgtctttatcacctcgttcgcagagaggaggtcatccattactacaacgaggaaagtcaggatatcgaccatgtccttgatgtttttattcgtaccaacagcggtggtacgccgctggcgttctctgacctattaatgtccatcgccattgctaactggcagggtgacgcacgcaaggacattgatgagctgattgcggaggtaaggcagagttcagagatgcagttttcgattggtcgagactgggttctgaagacctgcctgatgctgatcggtgccgatgtgcggtttaaggtcaagaacttcgacgctgatcaagtcagtgtcatccagacccaatggccccatatccgatcctgcattgttacaaccttcaagctgttgcgtcttttcgggctgaatgaccattcgttgagagcaaagaatgccatcatccccttggctttttacttgtacaggcagtccttccaagacaagccgctttatctgagcatcaacaatatcaaccaattgcgcgatgagcgccttgcgctgtctcgctggttgcacatggtgctgctgcgcggcgtgtttggcggtcaagcggatggtgtactgacgagaatgcagcggctgcttaacaagcacatcaacaagaaggcattccctctggacgagatcattgaagccttcactgcgaccaacaaggatctgcgctttgacgaggcgtacctaagagggttgctcgatatccagtatggggacccgcggtgccgttcggtattgagcctgttgttccccgaaatcaatgaaaacctgcagttggacatcgatcacttgcatccacaaagtgccttcaccaaggcagagctctccaagcaaggctttcttaaaaatgactccgagctgatggcgttctaccagaacccagtcaattggaattcaattgccaatctgcacctgctgaacgcttcgcagaaccgctcgaaaaaggatatgccgctgatcgagtggctggccgaaaaagggtgcggcatcaaacgagccgatttgctgctagacgagactgacagcctgcagtttcaggacttccaggcgttctgcaatgcacggcgtgaggcccttctacagcgcctgcgtagcaatgtggtggtcagtggaccacagccagcgtctgaagaaatattggatgaagaggaagaaaccgaggctgtggtatga

SEQ ID NO: 334296 - DNA, 864 bp, Pseudomonas aeruginosa
ttgcagggcgagctcactcctgaagttcagcttagcgaaattacgctcacgtgtaatccgagttaccgatatggcagtgagaagagcgaagaagagctagaagccctgctgctggccgacaccatgcgcgagctcgtgagctacgctgtgggctgcatgtttggtcgctacagtttagataagccggggctgatcctggctaaccagggcgagacgctggcggactatctagctcaagtgccgcagcccagcttccccgccgatgacgacaacgtgatcccgctgttggatggcgactggttcccggacgacatcaccttgcgtttccgccagtttctgcgcgtggcctttggcgatgcgcattacgaggacaacctggcctttatcgagcaagcgctcaacgtaaagggcaagcgcaactacagcctacgcgactacttcatgggcgagttctataccgaccatgtgaaacgctacaagaagcgtccaatctattggctgttcagcagtccgaaaggcacctttagcgcgctggtttatctgcatcgttaccgtgcggacaccgttagcgtggtacttggctacctgcgcgatttccgcaagaagctcgcttcgcgtctggattatctgcagcaggtagctatcaacccctcttccagccaaagcgaaaagaccaaggccagcaaggaagccgatgccatcaaaaaacagcttattgagctggatgattacgagcgcgatacgctttatccgctggcgaccgagcaggtcgagttggatctggacgatggtgttaaggtcaactacctcaagctagggactgccctgaagaagattccgggattggaagccaaggaagactga

SEQ ID NO: 334297 - DNA, 3021 bp, Pseudomonas aeruginosa
gtgaccactctccaagatctcggcctggcctaccgcaaagccaaggtggacctgtactactcgtctcatgcatccctggacgcgatcgcggactacgaggacgcactccatgccaacctgactgctttgctcgcgaagctgcttagtgatgatgagtcctgggtcacgcaacccgagtttatcggcggctggactctggccaccaagtcggtggacatgtcttgctgggatgagtatcgaaagcagaatggcaatggtctgatcttttcatctccggccgaggagtgggcccatgcctgtggccttctggctgaaggcgaacccccccaaaagcccaaggccgaatttcgagtgatggcccagtgcagcctggactttcatgtgctgtccaccctctggatgctggaggttggccatctgttcgatgtccagttgaccgactgtgcctatggcaaccgattgcgtcgcacgcaagatgggaaaggcatcaatgcgctctcgctgggctcatttcagccgtacctgaagcctttccgcgactggcgtgaccagggtatcgaggccatgcgtactgctttgaacgcagacaagaagatcgtggcgctcacggcggatgtcagctctttctatcacgagctgaatcctggcttcatgctcaatccagccttcgttgtggatgtgctggggctggaattgtctcctgctcaatctaagctgcatcgccttttcattcaggcgctgcaagcttgggcggcagccacgccgctgaagaagggcctgcctgttggactgccggcttcagccgtggtggcgaatgtcgcgctgattgagctggaccgcgtcgtcgagcagcagattgcgccgctgtactacggccgttatgtagatgacatcctcctggtaatggagagcggtgccagcttccgctccacggctgagctgtgggagtggttgttcgcccgctccagcggcatgctggcgtgggtgccaggcgatgagcacaagcagatcggttttcagcccagctacttgagcaacagtgagatccgctttgctaacgcaaagaacaaggtgttcatgttggtaggcgagccgggtaaaaccctcgtggatgccatcgctcaccagatccacgagcgggcaagcgaatggcgcgctatgccacgcttgccacgcgctgctagtcatgtcggcactgatctgctggccgcaacgcaaagcgacggtgaggccgccgacaacctgcgcaaggcggatgccctgaccatgcgccgcgcgggctttgccatcaagctgcgtgactttgaagcctacgaacgtgacctgcagccagaagcgtggcgcgagcatcgccaggcctttttccgtgcgtttgtccagcatgtgctggtgctgccgcagttttttgatctgtcggtctacctaccacgggttattcgcctcgctacggcatgcgaagacttttcagccttgcgccagattttgcgagggctggagcaattgtgtacgcaagtgtcacaaggttgcgagctcagcattaaggcctgccccgcagaagacaatccaagccacagcgaaatgctggatcgctggcaaaaacagcttttcaccacggtgcgcgagagcatcagcgctgcctttccgcctcggctatcgaaagacggtaaggcggcctggctggcacacatggagggctatgcaccggcgaatatcgatgccttcctgaattggtattttttccccatcaagggcttccaaactcagcaagcacggctgttctcatttgatctggcgcatatgccgttccgtttccttggtctgcccgaggaaatggtggcccagcgcggaatcccggccaggaagaccgctacatcctgcacacatgctaccgatttgctaccggactctgtgctcgaaggcagccaagtgcttgccaagtggattcgcttcaaaggtttgccgcacgggctgctgtttgctacccggccttacaacttgccggagctgtttatcctgaacaaggcggcctacgatgctgcggcgcacggggccatgcaagctgtcgtcctcgctgtacgcggcttcgagcttggtgatgctgcgcccgctttcgacaagcatggcgtgctacagatcccggatggccagccgcagagcaaatacggcatagcggtctccagctggaaaacgcagatggctagctggacggcttcggtcatgcgcatgccagaccccgatgccgagcgctatggccgcctgtgccgtctgttggatggtgtgattgctcagccaagggaaagccgttatttggttctgcccgagctggccttgcccgcgcactggttcatccgtattgcccgcaagcttcaagggcgcggcatttcgttgatcactggcattgaatacctgcacgccagtaaagggcgcgtgcgcaaccaggtgtgggccgcgctatctcacgatggactgggcttcccctcgttgatgatctaccggcaggacaaacagtgtccagccctgcatgaggaacgggagttgcagcgcctggctggcttggagttgaaacctgaaaagacgtggcgagcaccgcccattctgcagcatggtgacttgcgttttgccctgctgatctgcagcgagctgaccaacatcagctatcgcgccgccctgcgcggcaaggtggacgtgctttttgtacccgaatggaaccaggataccgagaccttcaacgccctggtggagtccgccgcgctggatatgcacgcctacgtcatccagtgcaatgaccgccaatacggtgatagccgcattcgcgcccctgcaaaagacagttgggagcgtgatgttctgcgagttaagggcggtgtgaccgactactgcgtgataggcgagattgatgtgcaggcgctgcgcaagttccagagcagctatcgctctccggccaaaccgttcaaaccggtgccggatggatttgaaattgattttggccgcaaggtattgccggcgggagaaaatgagtga

SEQ ID NO: 334298 - DNA, 558 bp, Pseudomonas aeruginosa
atgccggcatatcgtgctgaagaaaccgctgagctgctgttcaactttcccgatggggtgagctggagcgaactggacaagcaaggagtaaagctgcccgtacgaatgaagttcgtcgatctggtgatcgagcgcgatcaggacatcctgctggtcgagattaaagatccatcgcactcacgaagccaggacagggaacgaaatgcatatctgaagcgcttggctgacaattcagtcctgacacaggagctaacacccaaggcgcgtgactcctacctctaccttcacttgatggagcgggacagcaaacccttcaaatacgtcgtgctgcttggcttagatgcttttgacccagatcgccagcaggcgctgatgttcggttttaaggaccgtctgctggcagatatccgggaggaatccttcgaggcctggaaacgcaagcacattgcagactgtgtggtgctctcggttgactcatggaatcagcattttcctgagtggccattgcgtcgtgaggcacccgtagctcgtcttgttccggagggggttcttcagtga

SEQ ID NO: 334299 - DNA, 1140 bp, Pseudomonas aeruginosa
atgattaccaacctgcagctccagaagttcactgccttcaccgatctggcgatcgacttctcgcctggcatcaacatcgtcattggtgagaacggtaccggaaaaacccagttgctcaaggctgtgctggcgctgagcgggccggaagcccaaggagagcaggccggtgagctgctggcccgcaagctgtgcagactctaccacccactcagcgggcaggtgggtgagctgcgccgtgttggcgcccgagggaagtctgtactcaggagcaccttcgcatcggggcaagcgatcaccgccaagttctatggtaacgactccgcaaccaaggtcactgccagcagcggtattgcgccagcacctgccatcttcattccgaccaaggaggtgttgtcgctggtgcgtggcctgacggccgagcagcccgatctgcccaccatcgagcgcatcttcgacgacggctacctggacctcgcccgccagttggtgagggagggcgccaacgatctgaacgccaaggttcagctagatccgaagttcgccagcatcgtgccccgcctggccaacctgatcggtggtcaatacctactggagaacggccgtttcgtgttcgagccgggccgttatgaggagaaggacgccgccacgcgcagcaaggcccagcacgcgcagatgtaccaggacagcagcgagtggaagttcgtgcccggcagcaaacagcgcctgtccagcggcatgacggcagaaggttttcgcaagatcggcgtgctgcagcgtctgctcagcaacggcagcctcagccccggcgcctccggtccactgctgtgggacgagcccgaatccaatctcaaccccaagctgatgaaggatctggtgctggcgctgctggagctggcccgcaacggccagcaagtcattctcgccacgcacgactatgtactgctgaagtggtttgacctgctgatggataggggcaagggggatcacgtggtcttccatcgcctgtatcgcgaagctggcagtgacgacattcagccggaaagccaggcggactacagcattgtcggtcgtagtgctatcagcaacaccttcgctgagctctacgacgaagacgtcaagcgcgcgttggggggcgagtga

SEQ ID NO: 334300 - DNA, 1767 bp, Pseudomonas aeruginosa
atgcccgttcgcttacagttggacgtggtactggcaccgcaaagtgctgcacgtcgtgagcgggcccaggtagtggctgagttggaaaaactgatcagcaactccagtcgcgataatgtgacagagcgtgttgcctacacctggtttaaccgcttctgtgccctgcgcttcatggacgtaaatcgctacacccgcatcggcgtagtgtctccagctgaggggcagtttcaacctgagatcctggctgaagccaagatggggcatatcgacgaagagatggtcccgagccagattcgtcagaaggtcctagatcttctggcgggtcgtgcaccaagcactgactcacagggcgaagcctaccgtctgctggtcgttgccgcgtgcaacgcttggaaccagtcgatggactttctgttcgagcgcatcgacgactacaccgagcttctgatgcccgacgatttgctttcgggcaactctatcctggcctacacgcgcgaagccatgacgcctgacgcctgcaaagatgttgaggtgatcggctggctgtaccagttctacatctccgagaagaaggacgcggtgttcgaagggttgaagaagaaccaaaagatcaccccggagaacatcccggctgctactcagctgttcaccccgcactggatcgtgcgctatctggtggacaactcgctgggccgactctggttgctcaaccggcccaactcacggctagaagagcaaatggagtactacatcccgccagagaagccagagagtgatttcctcaagatcaccggaccagaggacataaaagtctgcgatccggcgtgcggctccggtcacatgctcacctacgccttcgacctgctgtatgcgatgtacgaagaggagggctatgacccggctgatatcccggaaaagatcctcacccacaaccttttcggcatcgagctggacgagcgtgcaggagaactggctgcctttgcgctcaccatgaaagcccgagctcgccagcggcgcttcttcaataaaggtgtcaagccgaacatctgcgtgctggaaaaggtgagcttcagccgcgaagagctggacgagtacatgggctttgtcggccgtgacttgttcacctacggccttcgcgaaacgctgcagcaattcagcgaagtcgacaacttcggctcgctgatcgtgccgaaagttgccaacgtgaccgatgtgatggccacgctggaaagtaaggacatgagcagcaacctgttcctggccgagacgcacaagaaagtcctgactgttctgcgcatggctgacgcgttgagcccgcgctacgcagtagtcgtggctaacccgccttacatgggcggtaagggcatgaatcctcgcttgagcacttgggccaaggagaacttccccagcagcaaatccgacctatttgcgatgttcattgagcggggcttcgatctaactccgaaattcggctatagcgctatggtcaccatgcaaagctggatgttcttgtcgtcttacgaggcgcttcgcgagcgcattctgagcgagacatccatcgaatgcatggtacacatggcgaacatggtgatgggcatcgcatttggtacgtctgccactgtcctgaagaaggggggatctcccgaaactcggggggcctactgctatgtcgaatatgaggacattggggaagacaataagccgattgaatttccaccgcgaaatgagcgaaatctcaaggcggcacagaggcagggggctgcatga

SEQ ID NO: 334301 - DNA, 1110 bp, Pseudomonas aeruginosa; identical to SEQ ID NO: 323926

SEQ ID NO: 334302 - DNA, 321 bp, Pseudomonas aeruginosa; identical to SEQ ID NO: 323927

SEQ ID NO: 334303 - DNA, 2280 bp, Pseudomonas aeruginosa
atgtccctcgatctcgaaaccactgccgctgaagccacgcccgtgcagggcgaactgctggacgcggaatccaaccctctgaccctgagccttcaggatttcgtcggcgagttcggcgacgaactgctcgacgccctcaacagcgccaacccgccggtctataccggccaaccgcaggcgcaccggcaactcgtcgtcgccagcctcaagcgcaagctgttcccagcacaggccgaagtcgtccacgccgccgccgagctgctgatcgaccgtggcgaacgcgccgcgatcgtcaatggcgagatgggctgcggtaagacgaccgtcggcatcgccgcggccgccgtgctcaacgccgaaggctaccgccgcactctggtcctgtcgccaccgcacctggtttacaagtggcggcgggagatccaggagacggtggccggcgccaaggtatgggtgctcaatgggccggatacgctcgtcaaactcatcaagctgcgtgagcagttgggtgtgcagcccacgggccaggagttcttcgtcctggggcgcgtcaggatgcggatgggtttccactggaagcctgtcttcaccacgcgacgcacccgccacggcgacgtggcggcttgcccggactgcggcacggttatcaccgacctcgacggcgagccggtcaacccggtcgctctccaagccgatgagtaccgcaggaagtgcagccattgcgccgcgcccctgtggacgctgatccgcccgcgcagcctgtccggcagcgatcaatcctcggccgtgctcaaagccttgaagcgcattccgacgatcggggaagtcaccgcgcagaagctgatgcagaagttcggggacgggttcctggcatcgatgctcggcgacaacatccacgagttcatcaacttgatggacggcaacggcgagctggtgttttctgaccgtcaggccacgcgcatggaacgtgcgatggccaacatggagttcggcttcggcgagggcggctaccaaccgtccgagttcatcaagaggtacctgccgcaaggcacgttcgacctgctgatcgccgacgaggcccatgagtacaagaacggcggcagtgcccaaggccaggccatgggcgtgctggcggcgaaggctcgcaagaccttgctgctgactggcacgctgatgggcggctatggggacgacctgttctatctgctgttccgagccctgcctgggcggatgatcgaagacggctaccgcccgaccacgagcggcagcatgacctcggctgcgatggcgttcatgcgcgatcacggggtcttgaaggacatctactccgagagcaccggcacggcgcacaagacggccaagggcaccaaggtatcggtgcgcacggtcaaggccccgggcttcggccccaagggcgtcttgcgctgcatcctgccgttcacgatcttcctcaagctcaaggacatcggcggcaacgtcctgccgccttatgacgaggagttccgtgaagtcgcgatggacacggcacaagccgcggcctaccgcgatctggcgggtcggctgaccgccgagctgaaacaggctctggcgcgacgcgatacgaccttgctgggcgtggttctcaacgtgctgctggcctggccggattgctgcttccggtcggagaccgtggtgcatccgcgcacgcgcaacaccttggcgttcgtcccggctcagttcaacgagttcgaggtgacaccgaaagagcgcgagctgatcgacatctgcaaagaggagaaggcacagggtcgcaaggtcctggcctacacggtctataccggcacgcgcgacaccacgtcgcgcctgaaggtgctgctggagcaggagggcttcaaagtggcggtgctgcgcgcgagcgtggacgccagtcgccgcgaagactggatcgccgagcaactggaccgtggcatcgacgtgctcatcactaaccccgagctggtcaagacggggctggacctgttggagttcccgacgatcgtgttcatgcagtcgggctacaacgtgtactcgctccagcaggcggcacgccgctcctggcgcatcgggcaaaagcagcccgtgcgcgtgatctaccttggctatgccggttcttcgcagatgacctgcctggagctgatggccaagaagatcatggtctcgcagtccacctcgggcgacgtgcctgaatccgggctcgatgttctgaaccaggatggtgattccgtcgaggtcgcactggcccggcaattggtcgccgcctga

SEQ ID NO: 334304 - DNA, 1119 bp, Pseudomonas aeruginosa
ttgggcctaaagatgggcgacccatacttcaaagtgaagcggtttctcgaccagaggggagtgacagccttttcgagcaactatgcgctatacgccgacgtgtcgaatcgtgtgatgcggaccattagcactctggtcgccagcatcgaggtctactcagttgacgaatgttggtgtgaccttactggaatgcccggcgacctggagcagttgggccgggatattcaggcacgagttcgacagtgggtgaatatcccagttggggtgggcatcgggccgacaaagacgttggccaaactcgcacagtgggcagggaagaattggccggcaaccggcggcgtggtgaacctgatggactctcagcgccagcaaaaactcttgaaactcgcgccggtgggggaggtgtggggtgtaggccgtaagctctccagtcaactcgagactctagggatcaagaccgcattcgaccttgccagcgcggacccgaggcacatcggaaggatgttctcgaaggttctggaacgaaccgcccgggaactacgcggggagcagtggctgaaaatgcacgatgatcctgatccgaagaaagagatcgtgtcgtccaagatgttcggccggcgtgtctacctgcttgaggaattgcgccaggcagtggccgcgtacaccactcgcgcagcggaaaagcttcgggagcaggactccgtctgcagcgaacttgttgtctcggttcaaaccagcccgtttgccgatcctgcagaacgttactggaacggggccagaatgctcctaccaacaccaactgcagacacccgcgacctaattcaggccgcaaaccagggccttcacgggatctaccgggacggattcgcatattcgaaatgcaccatacaactgtgcaggctcagccagctggagggtctgactcacgatatgttcgccccgcaaccgcggcgaaacgtcgacagcctcatggcaacaatggacctggtgaatgaacgattcggacgcggggcattgcgggtagcatcaatcccagtggaagccggctgggcgatgcggcgcgagatgctttctccctcatacacgaccagttggcgggagcttcctcgagcacgatga

SEQ ID NO: 334305 - DNA, 408 bp, Pseudomonas aeruginosa
atgtgtatgccccaacagacaccaacgccaatgattgatcgctcccaagtcgagcaaaatcgctacctcgattactgcctgaagcacaaggtagagatttccatcattctgatttcaggaacccacttcatcggctttgtgcttgatcatgatcgcaagggccttctgcttggaggaaagcgggaggacaagcctgctcgctacatttccaagggttacatcgcattgatacggcccaacaaggatgaagaacttgagctgttcctggaatatcgcggaatgggaaccttcctgcaacggaaacggcaaaaccaggcgctgaagaaactcaaggctcggggtagtcagggggggaaagcggggggaccaacgccgaaaaaactctcgctccggccggccatcgattga

SEQ ID NO: 334306 - DNA, 2937 bp, Pseudomonas aeruginosa
atgctgtcgagtgcgacgatttctgtcgatgatcttcaggccagggcgctggccgcggatgaggctgcaaagcaggagtttcggaacaaggttctctcgtatgcgaacgacttcagattcgcgctgaaagaagccagccgcctgttaggagttagtgccgggttccttcgcaattatgccgcccggaacaacatcgagttctcagatcctgagctccgaaccaaagaggagagcaagtcgatcttcaagcagtacgaggagatccgcttgtctaaggaacccaagcgcgttgagccgcgaaagccgttgctcaagccagacgaactccagttaccgccgcaactcgacctgctttccaagaaagcgcactgggagcgccagaacaagttcctggagcgcgtccaagagctggcccagaccatgaccatgaaagaggtcagcaaactggttggtgtcagccttcgtttcctcaagaacttctcctacgaacacgacattgagttcgtgggttccaaagcccggccggttaatgaggcgctgtcccctgtcttcatcgctgaagagccgccttgccccaaactgatccagttcctgtcccgccccatgcctcgggcaaccgacatctacgaggacgagatcaccgagagcgaagaagtcctgaacaccgagcaggtcgacagcctcgcgattgtagaggccgtcaccgcccccgaatcgagcgagtgcacagcacccactgaagctcaggtggaggtcgttcaggaccagagtgtgggtgggaattcagagttcgatcgttatagtccgaaagctcctgcactccggagtgataccgacttgaacatccttaccctcccccacaatcgggctgatgagacaatatcgacatcagcttccgttgaccaactaaccgccgccggagcctctccaggcatcaacggtgagcgtttactgggcaaccttccactgccagcgacatttgtgaatcagaggagccagggcgcagcctggacggcctggtatggttcagcaaaagcggtggccagcgtatttgaacagatatgcaaagcgaagatctccgccctcggcgatacgcggatgctgatgcgtgtaccgccccacgccgcgctgacctcgttgttcatttctccgcagtgcttcaccgcgatcgtggacgcatttccggccgatgaagcagccaatcttttccccgctagccgcttggaggccaacctcaagcatttgctcggtgctgaagtgggagagatacgatcactcagtaatggaggtagcgcagcggaggttgcccgggccgtagagtcgatctggccttggacatcgcgtctccatgaccatggcggcttttctcggcacaactgcgtaaccctgctaacgattggtgctctgctgaaggcattccaccggcccaatctcgcgtcgacggatgggttccgcatcgacatggccatcacgacacttctgtcgctgcttcctgacccgctggatcgtctgatcgccacgtcgtcgacacgggttcggcagattggatatgcgggcctagcgggagtcgaggtggctgatgaagctggtgctggagagttttggcaggcggtagggactgaaacctttattgcctgtgtcaatgaggtcaaacggcgggctcccaaaattgagtcgggcctcactcgcgtttcgtcttcggagctgaaggttttcgaactggaacgaacgcttttggcggcgcgccccgactcccaggtgctacacgaaatctactccgactttgtcagtaataccggctcgcccaactggaacagcttgctcgactctctggagtcctactcggccacgaccgagattccgttggacgccaaagtcttcacccgtgatctgttcaacaagcctattcagaaactgccgactccaaccctggaggcagtacaaatcttgcgaaaagccatctgtaccagtcttctgcaggaggagcctctggcgttccaacagcgtgcagagaggcagatggacgcagtccagaaggttcagtcgcaaatcaaggatctgggtgacaacctgaccgcggcgaacatgctcaagctggctgatcttgcagagcaaggccggactcaaatactggcgagtcgtgagtggttcgaatcggaaataaagacctacgcggccgaggttcagcactggcgagagttcttcgcagattggcaacgcctggcggctcctgcggagcaactcaaggagaaggccaagtctaaaggcaaagagcagcccgttcaggtagtggagcctgttcccgaatctgacgtggtgaaggagttgcgaagtgagctcgctgatgcagaggaccgtaaccagcatctcgagcaggagctgaaggtagcgaagagtgaggctcatcgccttcgccaggctgcggatgcccggccacttcccactcaacagttcgcgcctgaagtcgagccatctctactgcgccgtattgcaactcgcaagggcatcactccggtcgacgtccttgcgtacctgcaggtgacttccggtgatcgcgttgagattctggagtcagcgtggaagtcggcgaaggcgtcggagaagtttgcctactccgagcgcatgctggatctgctggacacgctggtgaacccctacttcgactccctggctgcgggcaacccggactctgtgtcacgcgaactccttggcggcgcctatgtcgccaaggagtcggatgcgaccagcaattgcggcaagatgcgcgctcagcgtgaattcagctaccaaggccagcggatgtacttcgagcgtcatctgcgggttggatctggcattggcaaccaggtgtgcatgcgcatttactttcagatcatcgattctaagatcgtcattgcgtacgccggagagcacctggagattgccagtacgaattga

SEQ ID NO: 334307 - DNA, 2589 bp, Pseudomonas aeruginosa
gtgaacaagagcaccctgcgcaagactctgctggcggcatcgatcgcagcaagcactcacgtatacgctgtctcgggcgtaaccgacctgacccaggatgtcagcggtgataccgaagtcgccctgtcgctcagcgaacacggaaacgtcaccctgactggcaatgctcagcgcatcgaaggcgaggatggggttggcttcgaaggcgtgaagatcaacggcaatctggtcaacaacgccaacatcaccgcccgcggctcggctgtcgacgggttggacctggacatcagcgacgaccagaacgccactcgaaccgaagtcaccggcgacatcatcaacaacggcaacatcgacctgaccggggccggcgcggtcggtatcgtgatggacggcgtccgtgccaacagcctgatcaacaacggcaatatcgacgtcctggatgatccggacggcgtagaaaccgacaaagcccgtggtatcgagatcggcaacacgaagctggaaggcgatgtcatcaacagcggcaacatcgtcgccactggtgaaggcgcgaagggtattaccgccttctccaacggcgctgacctgaacaaccagaccaagatcggcgccgatgttgaaaacaagggcaacatctcggtgtccggcgacaactccattggcatcgaactggacgacgtgcagtttggccacgacatcctgaacaacggcggcatttccgctgcgggcgacaatgcgatcggcatttccgtcgacgacacccactacaacgccatcgtcaacaccggcctcatcatcgctcgcggtgccgactctcgcggcatcctggtgatggactccaccggccccaactccgacctgggcaacaacggcatcgtgaacagcggcaacatcgttgccgacggcatcgccatccagatcggcaatcgcccgggcaatggcagcggtacggaccacttcatcatcacccagaacggcggcctgattcagggtggcgagaaatccatcgatggcaacatgcagaccatccttcgcttcaacggcggtaccatcgccggcgacatcgaaggcctggactccatgcaggtcaatggcaacgccaacttcatcggtggcgaaatcgaagccgatgacgttcagatcaagggcggccaactgaacctgtcgaaccttcacaccgacctgaccggcaacctgagcatcgcctccggagcagctctgcaggtccgcctgagcgacagcaccaacgtgaacactccggtggtcagcgtcgacggcaccgccagtttcgctgccggcagcaagctaaatgtcaccgccaacccgggcgacttcaccggtacccgccagggcactgcgtataccctggtatcagcggacgacattcagaactctgggctcgaagtaaagagcagctccgctctgctgcaggtcaagtcctacgaaatcggcgagcagctggtcaccgccgtggttaccggcaaaaccggtgacgccgctcaggacatcctgaaaggccagggctccagccgtaacgcgctgaacgccatcactcctttcgtggactcggtcatgggcaacatgagcagcgacgaccaggtcttccaggccttcgccaacgcttctgaagctgaactcgccaagctggccgagcaactggcaccccaggtgaacggcggcgctacccaagctgcgatgggtacccaatcgctggtttccaacgccatcaactcccgtctgggctcctcgtctggcatgtcctccggcgacgttctgcaagaaaccggtgtatggatcaaggccctgcatagcgatgccgaccaaaaccgtcgcaatcagatcgaaggcttcagcgccgatactgatggcatcatcatcggcgccgacggcaagctgaacgagcagaccaccctcggtctggcctacagctacgccaccagcgatgtcgactccgacgacggcaacagcaccgatgtgaagagccaggctctgatcgcctacggcagctggaagcaaggtccggtcttcgtcgacgccagcctgaccttcggcaagaacgacaacgaatccaagcgtcacatcgctggcaccaccgcgaagggcgactacgattccgacctgttcggcctgaacgtcctgggcggctacggcttcaacgtgggtgacggctacatcgtcgaacctcgtgcagccctgcgctacagcaacctgaagatcgacggctacaccgagaagggctcctccgcggcactgtcggtagatggccagcgcatcgaagttgccgagctgggcgccggtgtgcgcttcgccaaggacttcaacgtcggcaacggcactctgaagccggaagtcaccctgatgacctaccacgacttcgccgccgaccaggctgacaccaccagcgcattcgtactgggtggcaacgccttcgtcagcaacgccgccaagccgactcgcaacagctacgaggctggcgtaggcgcggagtacagcgtcggtgccatgaccttcggtgcctcgtacaactacctgcgcaaagccgacttcaacgccgacaccttctcgctgaaagctcgctacgacttctag

SEQ ID NO: 334308 - DNA, 846 bp, Pseudomonas aeruginosa
atgtacatcgcccttaaccgcattatcctcgccgccggcgcgctcctagccctctcaggctgcgccaacaacgtcaacctcaaggaaatctcgagcgggtccagtctgcaccctgaggtattgctttcatccccctacaatatccaggccttagtgcccgccggtaccagataccgcacacttcgggtgtacatcgagggcgatggccatgcctgggccacccgaacacaaccgagcacagatcctacacctcacacgtctctgatggctcaattcgcggctgaagatcccgcgccagcagcgtacttggcccggccttgccagttcgtcatcactggtgcatgcaaaccagcgctctggacgtccgaacgctttgggcgggcgtctgttgatgccatgaactccgccttgaacaacctgaaatcccggtaccggactgagtccttcgaactggtgggatattccggcggcgctgccatagctttgatcctagccggcgagcgtgatgacgttggacaagttcaaaccatcgcagggaatgtcgatcctgtgacctggacgaagctcaagaacatcacccctctgctcggatcgctctcgccactggaatactcggctcgcctcgccggcatcccccagaggcacttgatcggccaaaacgacgaggtggtgcctgctgaagtcgtacgagcgtatagcctgcaggtccaggcaaaatgcctgtccaccgtcgtggtgccaagtgcgtctcacgaccgcggctacgccgacgcatggcgtgcggtaagggatctgcctttcaactgcgacatgagcggcagcccccaatcatcccaggctgaatag

SEQ ID NO: 334309 - DNA, 297 bp, Pseudomonas aeruginosa
atgcaacagcagatcatcatccagccagaaggcagcgaactgatctacgaggttctcgtcagccatgacggcggtaccgtctgggtcaactgttcggacggcaacagcgttggtcgcttttccaagcatgccggcattgaccttcatcggacgatcgcagagcagatggcgggggagggccaatgcctggactgcactcacgaaccggccgggcccgaagaatgggagcgattctgtggtgggttgacacaacacttcaacgtcacccttccgccggatctcattcgattcccataa

SEQ ID NO: 334310 - DNA, 1056 bp, Pseudomonas aeruginosa
atgagtaagcgacccgacaacgacaatgccggcaacaaggtgatggccatggacttcgagttgaagtcagccctcatcgatagcgccgcaggtagcccgaacaccgacaaggcctaccggcaggctcgtgagcatttcaaaagcaatggggggctgcttcctgccaccgaggagatggtggatcgctacgtccgcacttttgctggagagctctctgtcaacaccctgcagttgcgagttgcagccattgcgaagtggcaccaagagttcggtttccctgacccaaccaagagtaaggtgaagcggaccatgaagggcatccgggcgttgttcaacaaagcgcccaagaaggccctccccatcgcgatcgagaatctgcgcaagatgatcgactacctagacaccgctgagcgcgccgcaatttctgccggcgatctcgccaagcagctggccgcttcacgcaatcgcgcgctggtgctaatcggcttctggcgtgccttccgaagcgacgaattgagccggatcgaagcacacaacatcacggtgattccagaccgggatatgcggattttccttagaaaaaccaagcatgaccgtgatgcacttggccaggaattcatcgtgccggccctcatcgagctttgccccgtcagggcatacacgcattggctcgaagactctggtattcactatgggcccgtcttccgacctatcactcgctgggggcggatggcggatgaggggctctcgagttccgctatcggtcccatcctgcggcgagtagccgaagccgccggcgtagagcagcgctacaccagccactccttccgacatggctttgccaactgggcgatcgacgagggctgggacctcatcagcatgatgagatatgtgggttggaagagtgttcagaatgcccaagggtacgttcagcccaagttcaattttggcaagctcgccatcggtcagccggcctcgctcagtgcgccgcggtgggagcctggccatggtgaggtcttcccaggcatcgcggagcgtctggaagacgacgagtaa

SEQ ID NO: 334311 - DNA, 384 bp, Pseudomonas aeruginosa
atgaccgacttcacctccggcttcaacaccaccaacctcaaggttcttcgtggcttgatcaacagcgcactggccaacctccatcccgaaatcagcattgaggctggaaaaatcacctacgacccgcaggggacctgcacgatcaaggtcgaggccacggtaaagggcgcaaagtccaaagcccaaactgaactcgaacaagcagccaacctctacggatacgacgtgtcccaagctaaaccgcataccagcctgggcccctgcaagctggtgggtttcaactcccgggccagaaagtcgccatggatcgttgagtgcccgaaggggcgctacaagcttgaagacgatgtagttgagcggatgtggggccagagcaagcaataa

SEQ ID NO: 334312 - DNA, 426 bp, Pseudomonas aeruginosa
atgaaacgtgccatcgttttgtcactcgtacttacatcggtagccggctgtgatgccctaaccgaaatggctgccaatgtcagccaggcgtttattgcccaataccccgacctgcagaagccgatcagcctggtgttcgttccgggttacaaggtcatgatcggcggcaaggccacaccgatcaccggggaagacacttgcccaccgcaggacggcgttatggccaaattgttcgggcccaatccctatgagggcagcaacaaatgtgttgaggtttcgccgacagcgaccgaggtgcacgtgaagtttcccgacgtagctgcaggcgggagcctgaaggaggagaagtggagcgtcctgcgcgatgggggtcgtgtggcgcttcgccggccgaatggtgactttgtgactccggagaagtcctga

SEQ ID NO: 334313 - DNA, 294 bp, Pseudomonas aeruginosa
gtgcagcgtggcgacaagctgaaaagcttcaagaccgaggtggtgattccgctgttgatcctgggcttgatcgccatctggaacatggatcggcttgcggcaacattcttcgaagccgaacacgccacggtcagattgaaaaactgcgccagcgccgagtgcgagttgcacggcactctccggattgaaccaatgtccggtgactacctcctgaccagcgttgagggaagggtcacccgcttccctcaatcctctctggccagcgctcgctggccggccaagattgccaagtag

SEQ ID NO: 334314 - DNA, 1581 bp, Pseudomonas aeruginosa
atgagcctgttactcggtcccatccttcatttccgcggtatccacaacgatctgtaccaagtctctgctcttgttgtcctggataaaggtgaccccaaaccgaagcctgagcccacaaactgcgtggtcgacaaggtcacccgtatcgcttcgatcccattcggaagtccaacccaggatgtctggagggtagacctatcaacgtctcagaaagctgctaagtcgcagcagtgctcctgcagtgtgtcaggaggcaaggcgagcttcttcgttcctgcccttggggagtctccgagggttgcctatggctcgtgcaacgggttctctgctgacaagtaccgcaagaaggtgaaggataggcagaacgaacgctggttcgacatggctgctcgtcacaagatcaagggtaaagaattccatgtcctggtcatggggggagaccaggtctacaccgatgacttgatggtgatacccggagagatgaaggactgggcagatctgtggcatagcaagcaggtagctgcgaaatggtcacgaaagctggaaaagcaggtcgacgaatacttcacccaactctatgtccagcgctggaatcaggccggcccgcgcgagatgctgcagtcgatcccctacgtggccatgtgggacgaccacgacatcaccgatgggtggggctcatatcctcaggacctgcatgagtgcgacgtctaccagaacctcttccggctggcgacgcggtactacaggctctttcagcagcagctggctgaggatgaagtccacccctctgcggtacctaaccagagtccgcaggccaaaggcttcagccttgcctactccggtctcggcgaggtcgcttttctggttccggatttgcgcagcgaacgtcaccctgacctaaaacgtcctgacggccttagcccgacacagattgtctcggagtacacctgggaagctatcttcgcctggctggatcagctcgatacctccaagcacaagcatttgatcgtgtactccagcctaccggtcgcctaccttgacctgaatgccgcggaggtggctctcaatgctttgcccgggcagtgggagctcgaggacgatctccgcgatcattggcgtagcaaaccccaccgtgacgaaaggcagcgactgatcaagcgcttgctgaacttctcggcaaaaggcactcgggtgactatcgtcagcggtgatgtccacgtcgctgccgccgctgtaatcgaatcgatgctgccacagcatggaaatggtgctggagccatcttccagctggtatctacggggattgtgcacacaccgccgccggcagttgccgtctacttcatggagaagttcggggcaggtgaagaggtcattgagtacggtgttcacgcccgcatgctgccgatcggcttcaagggccactacctggtaccagaacgaaactggctcagcctggagcctgatgggaaggggcggatctgggccaactggcacgtggaggggcatgatcacctactgacccaggtgatcgatccggtcgtccttccgacgatgcttcagcctgtcgttatgaatcagtag

SEQ ID NO: 334315 - DNA, 1269 bp, Pseudomonas aeruginosa
atggcggacagcagcatcttcaccaacagccccggccaggaccaagtcctcaggcctttccagcggcttatctctacagcgtcgcatatccggcttgcagcgccctacttcactcgcccgggcgagatattggaggctgcggaacgtggcgcgaagatagatctcctggtggggctcaatccagcgacgaatcccgccgccctgcgccaagcactcgaagccgacaactgctccatccggtacttcacggatggcttccatgccaagatcttcctcttcgatggcgtggccatgttgggctcagcaaacctcacggatggcggcctggtcagcaaccgagaagcagtcgttctgctcgaccagcctggcgatgaagagcggatcagagacctcgaggcgctgttcgctgtgctttgggacagtgccgaggtattaaccaggcaggtctatctgaaattcaaggatgcctgggagaaggccagtcggatggacagtcgggataccccattccaaagcctcgctgatgtagagcctccaactgtccttgccggcagcggacataagaccgctcagcagcattacctcagtgatctgaggaagactatctatgagcaatacctgccggcgtttgaggaggtcgccgcaatccttcgtgagcaaggcactcgccgacctgaattcaacggccttgcatggggaccggaggtgaaccgctacttgaactgggtgcgactcgagcacgccccaggagatgctgcgtggcaggatgcccccatccgcaggcctcaagatcgaaggacccaaatccaaaccttggtaatggaatggctttccaccgctactcctcggattccagaggactacttcgaactgctggaaacactgcacgcggtgatggagagcccggagtcgattcgtgccagcagcaaggagcagatcgctgcagcactgatgtgtgtccacgcattctccgagcagctccgtttcacattgggtggcgccgaggctctgccggccaagttttgggaagggaaccgggaggacctcggtcgtgttcaggacaccctgatttacctgattcatggccacgaggagtttgccgcacgcattggctccgtactttacgatccgaagtacaaactcgcttccttcggccgattctgtgcattggagctggtcggaacgctgaagccagaacaggtgcccccaatcaacggacgcatggccaaggctctgcggtttctcgggtttgacgtccgcgccacatag

SEQ ID NO: 334316 - DNA, 474 bp, Pseudomonas aeruginosa
atgccgagtccggagcatgacaagctgacagccatgggggccaggtggttcaagaagaacggcttccctgtggttactaccgaaatttgggcagcagggagccgtgagcggcccgatgttctgggattccgctccatgtgttccggagtgattgaggtgaaggtcagcctcagtgacttccgggccgatcgcttgaagccggagcgggtttccggaggcttgggcaattaccgtttctacctctgcccggaggggttgatacggccggaagatcttcctgcccgttggggcttgctgtacgcaaaaggaagatctgttgtgccggtggttagcccccctggtaacctttggccaggcgtccctcgtaacgcgctcgaggaggacctggcggctgagtggctccccttcctccaccgccccgacctcgatgcggaacgggccgccctcttctcaatcgcgcgccgactcagttga

SEQ ID NO: 334317 - DNA, 795 bp, Pseudomonas aeruginosa
gtgcaccgccttacccaacatactgacgaccccgccgaacaggtgcctctggatctgagcgaggaccagcgggccgccatcaaggccacagtcaagaaggcgcagcagagtctcgccattttgccgttccttcttgaacagagcaccgtgcctggcctgacccgtgcccaggcgcgcatggcgatggaaacgaccgaatttgagctggccaccctaggccgcttgctcggcgtcgatacggagtcgaaagcgactatcgagcagcgtttcggcgaactgcgtcaggccaatatgcgcattcgcgacttggaggcgctgctgggccggcagatgccggcggaggccatacagccggcactcggcaacttggcccgccagttgcgcgattggtggcggctggagggcttcggccataccagcgaaattcagttcggggaatatagcttgcaggtgagattttccctgcagtccctttctgctcgaccgctcactgccggcgctgagcatctgtcccacgccgagcgcaaggcgctctggctggccgacctggagcgccgtggctttgtcctgcacgacgacgacggcaaaggcgtgaccgactgcccggcatcccgcgatgcgcttcgggcgctgtttgcccagagcttcccggggacgcacaagatcgcccagttcgtcagccgtgaaggcgaccacgcttccaagctggtcagcgtcgaggtgtacgtctatgacctggcgcaaatcctaaccttgcccgcgccgccgccgaatgcccaagacgttgacgcctga

SEQ ID NO: 334318 - DNA, 732 bp, Pseudomonas aeruginosa
gtgaacgagaaacagaatgcgctgatggccgttgcagttggtgccgtggtgctcgcgttttccgcgggcggctttttcatcgctctgggcgcgaagaagacggccgaccagtacgccagagaagtcgatcagctgaagcaagagattgctgatctacaggggcgtgccggcgacgccgatgccaagatcgagggtgtggttaggctggtgaaggaagtggtcgagcttgctcgcagccctgcggcagctggcaaagatggtaacgggaagcctccgtcgtctgtgcacgccagcccgctgggagcaacaactggcgaggccaagtctgccccaggatctactactaccccaagcgtcggtaccggagtcagcggccccaagaccaaggctctggccgagctgctggacactgaacagaaagtcgatgggccggtcactcctgacaaagtcgatagcctgctggtggagcgaatcagtagcaactggcaccgtccggctagtgcaaaggatggcatgcaggtcaccatcgaaatcgagatggatcggaagggcgtgatcaagcaagtccgtgttcatcagtcgagcggcaataaggcatttgacacctccgcggtcaaagcaatccaggacgtcaaggcaatcccggaaatagcctcccttcccaccgacgtgtatcagagcctctacaagaacagaaaagtgctcttcacccccgaaagtctcgggaagtga

SEQ ID NO: 334319 - DNA, 783 bp, Pseudomonas aeruginosa
atgtcacccgcaaagcagcacaccgacaacctggccaagctcattcattcggtgggctaccacccaccccgcgaggtctttcaagacttctgcgagatggcagccgtggcggtctcaaacgcagtagacgtgctccaccgggaggcccgggaagcccagtacatgcggctgatccaaaggtacaagccgaaggatcaatacctattccgtgcaatgctcgatgagttacagcaggccctggaaaaagaccccagcgatatcttgggaaggctgttcatggaggtaggcggctcgaattctcggagtggacagtttttcaccccagaatcgatcagccaggtccttacggacctgacgcttgctgatacaggacatgttcaaagtcttatcgaggagcgagggttcatcaccctttcggaaccctcttgtggggctggtgcgatggtcatcgcgtttgcacttcgcctgcgagaattgggcatcaactaccagcagcacctgcacgccaccctggtcgatatcgactgcagggccgtccacatggcgtatctgcaactaagtcttttgcatattcctgccgtggtggtgcacggagacacgttgaccctcaagcagcacagcagttggtacaccctagcccacgctatgggcctctttggtatcaaactgcgccgggggtttagtttggacagtgcaagggggcgggagttgattggcaatcaatctggtcaggaggacgcggactctttgcatgatcggaggatggccatggcgatcggctga

SEQ ID NO: 334320 - DNA, 603 bp, Pseudomonas aeruginosa
atgaataccttcgccgtagatgcagagtccctaattgcggttgccatcccagagcaggttgtcacctcctcattgagccccatcatcgagatccacaccgctggcctcaacgaccttccctaccccctgtccaccgccacgctttgggtggcatgctgtgagtcatggcctcatgccgatccagactgggaggggctgtatttcatcaacctggcgattcaggctgatcacatgttctcccaggttgggtccgacaatcagttcctgacgctggatgtgaggccggggaccgtttttctgaccaatcctctggcccttcactggctgcagccgagcgataagcaattgaaccggatcgcggaaggactgcaggagcgacgtaatggctacatcggcctgcagtgggaagtcgcctatcacgagatagatgcgaaggttctttggttgaaggaagagttagagaagctcggaaacgtcgagcagctgggctgcgacattgcccccttgcttatccaaccggaagcggactatgtccaggccccacctggtcacgatttcgtaattggaccggaggttcgggctttgccccgccgtaagagctga

SEQ ID NO: 334321 - DNA, 948 bp, Pseudomonas aeruginosa
atgcgtgacacatgggcaaaggtccttcgcttcagtttggactgcctcgggcatccggcctcccttgggcatatgctgcagcaaaaccgcgatctgaggttcgatttaccaggacagccctgttcgattgcctcatcagaggtcgttcggtggcacgagtggggcaaggggagctacttgaccggaaactggcgagcaccgggggagctgcttggatggaaggctgttggaaccgaattctgcagctaccactacaccatcgatgcgctggccaacgttggctacacagagatcgtcgagtcctgggagtgtgagatccaggatgtccaggggctttgtgcctccaagtcggagcttcgagatttcgagagcctcgatgctatggctgtggccaggacgcagtatctcgtaggggagatcactcacgcgaaccttgaaaagagcctggggtggtacgagatccgcatccttcatcgcgactccaccgacgacttctttgcatgccaccagtgggacggccgagttttcttgatgaactctgggggttcccatcatttcgtggctggccgctacctggctgcccggttggaagttcccgttcctctgaaaggccttctgcgcgtccaccgcctttctcaggccgcggtgtctcggctggttggcgagtatgaggtgtttgccctgaatgatgattcagaggctttccaacgattcttcgatgcaatgagggaataccgggccggtttcctttggacaccgttgcctcgccacctcgacggccgggcggtatttctccctcgaggggatgcaagggcaatgaggatagtgcccttgatgcgcgcggcgggccacttcgatctgggtgcgcacctccaggaactatctgccaggccagtacgtctcccgcgcattgcctcagctcgccggcagatggagcctgttgagtaa

SEQ ID NO: 334322 - DNA, 819 bp, Pseudomonas aeruginosa
ttgaggaaggaaagggcttacggcaaccctgatgagcgggaaatcgtcgacttcatctgcgccacgctcgagcctgtggtcgaggcgctggcagaagaaggcagtctcgtcttgaacgtatcgcaggattgcttcctcccgggactaccggcgcgctcgacctatgtggagcgcctggtactggaagtctgtgatcgatttggactctacctgatggaccggctcatctgggaaaaccccgcaaaggctcctggtccggttcagtgggcctcgaaatcccgtcagcaactcaatgtggggtatgagcctgtactctggttcgcaaagaacccgctgaaatgcaaatcgaacaacaaccgcgtcctccagccgcattccgaacggcatctgcggttgatccagaatggtggcgagaaacgccacacgaactacggtgatggcgcatatcgcctacgtccgggcagcttcagcaacgagactgccggatcgatcccgaagaacgtgatcacccgtggacaccgttgcgcctacggcactcaacaccgcaaagccgcagaggcccttggcttgccgacccacggtgctccgatgcccttttcgattcccgagttcctgattcagtttctgactgaggaaggcgatcttgtagtggatgcctgggccggtcgcaacatgacatccctggcagccgagttgctcggccgcacctggatgtcgggcgaactgatgctgcagcacatccgcactggcgctgaattgttccgtggacggccagggttctggctcaatccacagattgctgctgctttcggccgctga

SEQ ID NO: 334323 - DNA, 2097 bp, Pseudomonas aeruginosa
atggctaggcacgcacgctccaccaagggaaaagcttcatcagggaaaaagaagtctgggctagaactgaaggtcaggaacgatggccgccagtcaggatgtacggtcgtcagctttgacttcctgactgattggttgggtgaggatgcagaagactttttgaaaggcatttcgcgcttctctagacgctacacaagtgcggcccctacatacgctatacggcgtattctccagtattgggcaatgatgcatagaaagagaggctggaaaaaacctaaggacacagatgcgaataacttcaaacttcaactatctgagcttcggagaagcttttataccgatgagacagaaaaagggttggccctcataacgacctcaaataagtggatgtctttcgtaaggctaattgaggttctagtagttgcagaagttatcccaaagatcactataggtgcatacgttcgagctccaggaaaatcagaaataataactgaaaggcaatcagtggttgatggtgccgcggttgtttcggtaccaaaatcatttagaccggataagaactcatacaatgacgatctttttgagtcaatatctttaactgcttctgatgaaaagtacctgaccgagtacactgctagaataaatcgtgtgctggatacaattaagtcgtgcgcgctagaagactttaatctactaaaatcgaaacaggcagagggagatgcgctgataaagaataccggctgtggttatctgacggatatgaaagagaacccttggcttatgaggtattttgatttttccactaggcgccattactttgaggcagacggtggacatcctaacttgcttggaaacctactttctgttgttcatcatgagatgggggggatccctaagcctcatcgaaaattcaagtcgagtgacagaaggccggtatcgaacagcggaaattctcattggcaatatgttgctagatacggaaagaataagctcatcccgtatttaggattaatgaatagcgaggctgcggcagtttgcatgctcttgataatgatagagcacccaaggttcaattcgacttcattgtacagagctaaaattgaagatgcggatggattcgcaatcctcctgtcgtctgctgatggaaataatttgcgccttacggttaaaaagccgagagctagggagcagaaatcagaagtattgagtgacttggcgagagacgttatttcgaaagtaatggagtggactgcccctatccgggaagagttgagaaagcaggggcgaaacgaggaggcctcaaacctttgggtgggaataagctctttgaactatgacttgaagtccttttctgagaaggcgttggtaggagcgctttatatgaatccaatttggcgttcgacaggtaaggaagagtttagtacaagggcgtgttcatttgtagatagacacccggtactcatgccgtggagagataagatcaactttaaggcaattcgtgtcaatgtgggtgtggcaacatatcttaatacggatggcgacttggttgctacagctaaagcatttggccacaagcacattagaaccactattaataattatattccgcttgcgctgcagcgtgcaatttttgagcggcagatccgtaggcatcagaatctactaattacttcagcgatgaatgaagaaagcgaaatgctgaagatatcggactttagaacagtggagcaattacatgagtttcttaagtccatcgataattatttgtttgaaagtgagttggaagcgcaaagaagggaaacatccgaaaagataaccattgatattgccaccttgtccaggctcgtcatatctaatgatcctgaagcgcttgcggttgcaatgctttatcgggatgctctcgacaaagcaaccccaaccttcctaaataggccagacagtcttactggagtcacgccaaaattttggatggacttcattgacgcagttatggcacctcttccgttgtcaatgagcgatttaagtaatcttgttaagaaggcgcttttgaagaaagaagcgatgtcggctatggttgtcctaccagaggtggggtga

SEQ ID NO: 334324 - DNA, 501 bp, Pseudomonas aeruginosa
atgctgcgccccatcaggttgcctaacccctacgaaaggcatgaacacgcggagtttgaggcatacgcccaagtattggagaaattggcatgtggctgggaaccggttggctacgttggccttgaacctggtgaatggtctgagcccgaaaaagtgctccccgagggttttccgatccggagcgaaatcaccgaagcgcagtttgctcgggctcttcagcgctgcgcgagagtgaagcttggttacgagctggcagaggtttggggcatatgcttccgcttcagcgatgccttcttcagtgatgccctcgacgagaccatcattcgggaggcttctgaagctttacttgcagaggttgggccggccccttacccgatctctgcccatggcaaggaattggtctcgcttaacgatcggcatggcatcaggctgaccaccaaacatggcgagctgttcttcgaggtcgctcagaccatcgcgggtatccggcgtactttttag

SEQ ID NO: 334325 - DNA, 1644 bp, Pseudomonas aeruginosa
atgacggcgttgctcaccgataacctgccactgctggcgggagcacccaatggcaccaaaaagctacgtgagctgattctggagctggcggtgcgcggcaagctggtgccgcaagatccgaatgatgagccggccagtgagctgcttaagcggattgccgaggaaaaggcgcgactggtctctgaggggaaagttaggaagcagaagccgctggcggagattggcgcagaagagaaaccgtttgacgtacctaccaactgggagtgggttcgcgtagccgctgttggccacgattgggggcagaaaaccccagacaaagcattcacgtatatcgacgttggggctgttgataatgctgctggtaggattagcgcaccccaggttcttatggctgaggacgcgccatcgcgagcccggaaagtggttaggccaggaacggtaatttactcaaccattcgaccgtaccttcttaatgttgctgtcattgaagaggcatacgagcaggaaccaattgccagcactgcgttcgcgatcatccatccctacctagagatgcctgcgaggtattttctctgttatttgagaagccctgtttttgttagatacgttgagtctgttcagatgggtatcgcttacccagcgatcaatgacggtcagtttttcagcgggctaattccgttaccgccgctcgccgaacaacaccgcatcgtcgccaaagtcgatgagctgatggccctgtgcgaccggctggaagcccgtcaggccgatgccgacagcgcccatgcccaactggtgcaagcgctgctgggcagcctgacgcaggccagcgatgccgcagattttgcgcaaagctggcagcgcctggccgagcacttccataccctgttcaccaccgaatccagcatcgacgccctcaagcaaaccctgctgcaactggcggtgatgggcaagctggtgccgcaagatcctaacgatgaaccggccagtgagttgcttaagcggattgccgatgcaaaggagcaggcagcctcgcagggccgtgtgcgaaaagtaaagacagcaactgattatcgtgcctcagataccgaggtaactgtgcctgctggttggtctctctcaacagttggagaggtaacgatttgtcgggatggggagcggattcctgtttctcaagctgaacgtgaagggcgagcgaaaacatacgactactacggtgcttccggggttatcgacaaaattgacgggtatttgttcgataagcctcttctgctggttggtgaggacggagcaaatctaatcaatcgcagcacaccaatcgctttcatggcacgcggaaagtactgggttaataaccacgctcacgtattagatggagtgagcgaagcgctgctgttgtacgtccagctttacttcaacgccattgacttgaagccttatgtgactggtaccgctcagcccaaaatgaatcaggcgaagatgaatagcattgttttgctattgcctcctgaagccgaacaacaccgcatagtcgccaaagtcgatcaactgatggccctctgcgaccaactcaaagcccgccttaaccaggcacggcaggtgcacgagcatctggccagtgcgttggtcgagcaggccgtggcctaa

SEQ ID NO: 334326 - DNA, 369 bp, Pseudomonas aeruginosa
atgcgtcgcttaaagctacatatcgtggtgctgtcattcaagttcgccgtaacatggcgggccagcaagggagagcgaagcgtgtttggacttgggttatcgtggcttgtcataggtgtttgcttgctgcttgtccacggtgctggagtggcactgtactggcagattcttaagcagcgcgaagcacgtgccaacttgcatgcctcacagaccaagctggagtaccttcagatgcgggtgcatcagcaagaggacgaaatacgtgagctgacggccggcctgcgagccgaaagggcgcatgtcgagcagttgaagcgtcagcttgagtttgctcaggggcaagctatgcagatgcggcacgacagctga

SEQ ID NO: 334327 - DNA, 876 bp, Pseudomonas aeruginosa
atgaaacgcaaacaagaaatcgaatcggtgcgctgggatctggcactgcgttaccgcttgatcgaaaccgtagtctggtgggaaggccggctgaccacgaaccacctgatgcagagctttggcatcagccggcagcaggcgtcgaaggacatcaattcatacatcaccgactacgcgccgaagaacctggaatacgacaagcatttgaaggggtatgtaccgagccgccacttcaagccactgttcattgacgacagcgccagcgcctacctgcatctgctcagtcaaaattacgagcgggcaccgcatatcgacgggctggccttggcctatgcccacaccgaagtactgggcgtaccagatcgctcagttcgcccagaagtgttgcgccctctgctcaaagcttgtcgagaagggttgcgactggaatgcgagtatgtgtccttcaccacgccggaagttgaaactcgcttgattgccccgcacaccctgatctacaccggcatgcgttggcatgtgcgcgcttactgcgagaagaaccgtgattatcgcgacttcgtgctgagccgctttcgcggtgagcccgacctgatggatgccccctcggagcacactcgcgcgctcgacaagggctggaacaccccgctcacggtggttatcgcgccggactcgcgcctcaagccggagcagcgcgcgatcatcgaggccgactacggcatgcgggatgggcagttggtgatcgagacccgcggtgccctggtgcagtacgtgctgcagcgctatcagatcgacccgaccaaggtgcacgccaaagctacggcgcagcagatcgtcgtcaccaacctcgatgaactgcagccctggctgtatcactga

SEQ ID NO: 334328 - DNA, 534 bp, Pseudomonas aeruginosa
atggcgactcaaccgctgctgtataccctgcacattcagctggagccgttgaacttcaatcctccggtctggcgccgcctgcgcgtgaacggcgactgcaccctgcgcaagctgcaccacttcatccaggcagcctttggctggcacagcagccacctgcatgagttcagcgacggcatccatcgctacctgccgctggatgccgagctgatgtacatgtacgacgatgcgctggatgaccgtaagagcaaactgcgccgcgtactcaaggaggcggaccggctgcgctatctctacgacttcggcgacagctggcagcacgtgattgccgtggagagcatcgagccctgcgacttcaccggcacctggtgtgaggtactcgatggagcccgcgcctgcccgccggaagatgtgggtggcgtgccgggttacctggacttcctggcttcaggcggcagctttgatcccgagctgtttgaccgacgcgccgccaacgcggcggtgcagcggatctgcaataacttctggggctga

SEQ ID NO: 334329 - DNA, 180 bp, Pseudomonas aeruginosa
atgagtaacgcccttatcctcggaccactgcagcgcagcggcaccgccctccctctcttcgatgcacgcatcccggtcgactttcccagcccttcgcttgatcacatggagcacaagctgtcgctcgatgcctcgctggatctgcagaccccgtatacccaaccgatgacagacgactga

SEQ ID NO: 334330 - DNA, 1017 bp, Pseudomonas aeruginosa
atgtccgaagctaaggacactctcctaaggcttatcgccctgctgcgccttatcccgcgagcacctggccgtatagcgaccacgaccctgctggaaaagctcaaggaagatggtttctcggtgagcctgcgcacagttcagcgcgaccttgaccgactctctattccgttcgccttacaacgtgacgagagctccccgtcatttcgctggagcctgtcggagaatgcgcctatcgatttgtcggccatggatactcccacggcactggcgctctacctcgcggaaagccacctgcagacactgctccctcagagtgtgctggatcaactcggcccccaattccgcatggcccgcgactacatagacaatttggaaaacaatggtctggcgcgctgggcgcacaaagttcgggcgatccccaacggcaagtccctgcaacccgcgcagatcgccccatgcgtctgggatcaaacttccactgccctgctggagcgtaaacagttgcagatcagctacctaagtcgtagcaagagcgaactgaagcaactgctgattcaccccgctggcttagtttcccgccacgccatcagctacctaatcggcagcgtcgagggatacgacgaccttcgccaattcgccctgcaccgcattcaccaggccgagtgcctggaagccccagcccaagtccgtgacgacttcgagatcgagcgctacattcgccaggatctcaacacagatacgcccattgagcaggtggagctggttgccgacgtatcaccgccgatcgcctggctgctcggcgagacgccattgagcagtaagcaaagtctgaagccgctacccgatagcgactggcaacggctgtgcgcagtagtaccagatgatcgtgaaacgctgtggtgggtgtttgggctgggggagaatgtgaaggtgttggagccgaagaactgggtacaggtaatcagagaaaaagcggccgcattggaggccttatatacagagatagagcttccctga

SEQ ID NO: 334331 - DNA, 1713 bp, Pseudomonas aeruginosa
atgcttgaaagtcaaaaagagttcgccacttatttgagaaaaatggcgagcctgcttaacgggcaaccattctcatacgatcaaacattgcttgaaaaagtgatggaaaccgagttggtggtaccagtggtcggggccttcagcgccggcaagagctcgctgttgaatgcattgatgggcaaggacatcctgcccgtgggcatcgctccggaaaccgagctggcgaccgagctgcgctattcctccgaaccctatctgctggcaataaagccggacggagaacaagaacgcctgcctatcgacgccctgggtacgatcaaccggcgttccagcgagttttcccacctgcgtctgtacctcaacagcgaagcattgaaagcccttgcaccgctggttctggtcgacatgcctgggttcggttcgtcgttggaaaaccacaacaaggcaattgcctactacctacctcgtggcgtgcacttcgttgtcctgaccagcgtcgaggatggcaacatcacccaatcgatgttgcgcaagctcgacgaactgaaaacctacaacactgactttaccttcatgctgagcaagtgcaacctgcgcgcccccgatcaggtggaagaagtccaagcgtatgtcgacgaccagttgggcgtgtatttcggcaaccagtgccgcagcatcaccctcggcaaccgtggcggtgaagaactgagccgtgctctggctaccttgcagcccgatgccctattctcgcgcctgtttatcgacatcctcaaggatcagagtttcgacctactggcgcagatcaacctggcactgagcgtgctgaaaaaggacaagaccgaaagcgagcaggccacacgcgcgctcgaacaggccctggcccaactgctggaacaacgcaaggatgtcgagtcggatctgaaggagcgctattcggggaaaatgcttgatcgcaccctgcgcagcttggacaacgcgctcaatgaatcggtggaagagctggctgccctcggcaacgggaaaaacccaagtgcgctctccaacgccctctccgaaatcatccgtggcagcctcgccaacaccatcaagtctgaagtccaagacatatccaccagcatggtcgaccggattgccggcaacctcggctccgccagtagccagatggctgtgctggatatcggtggcaactggaactacgagctggccggaaaggtcaagctgtcgctggagcgcaccactgaaatgctcagcgattggtcggcgcgcttgagcaaccacgccagcgaaaagactgacaaggatggaaacgtcgcactctatcgcagcctgtcgacggtgcttgcggttaccaccagcgtggtcaacccactagtggaactggccataatcttccttcccgagatcatcaggatgttcaacagccccggcaacgagcgcgagaaacttcgccagaagctgaccgccgaggttttccccaacatcaaggcagaactgcgtggaaagataccggcgatcatcgacgaacagctcaatgccatgctgaagaaaatcggcgacggctttgaagaacagatcacccggcaaaaacaggtgatcgactcgatcacccaggaaaagctcgagcgtgaagcagaaattggtgaaaagaccgccaatttggaacacctcgccagcgcactgaaagccgctgccaacgaacacctgtaccgctag

SEQ ID NO: 334332 - DNA, 2244 bp, Pseudomonas aeruginosa
atgaactatcagagactcgttgccttcagcgagggcctgcacgatctggcaaacagcaaccaggacctgctcgcccaggaaatcgcccagttcaggcggatgaacggcatcgacgagccgcaccagctcgcccaggcctgtcaggaccttcagaatgaaaaccgactgatgaacatcggcatcgtcggtagagtcaaggccggcaaatcgtccttgctcaatgcgctggtcttcgatggcgagccgatcctgcccaaggccgctacccccatgaccgccgcgctcaccaccattacctggggagaagtgttccaggccaaggtggagttctacggtcccgacgacatcaattcgatccggttcaaggccagccagttcgaaacaaggctggctgcgcgcaagctcgaatgcctggacgaactggtcaagcgtcgtggcagccagaccagtggcgcgccgatagacatgcagcaactcacgctcatggccgaaaagcgggcactcagtgagctgcaacgcgaggaggggctgttcgcggcacacgatcagttccaacgcatggagaaatctggcctcgacgcgtccaccctgaaagcacacagcgaaatccaggccagcactccccaggatctggccgagcgcttgcatgactacgtcggtgctaatgggcggttcatgccgttcaccaagaccgtacatgtggcgatgccactcgaagcgctgcgagatatctgcatcatcgacactcccgggatgaacgacccggtgcagtcgcgcgaagagcgtacggtcgagctgcttaagatctgcgatgtggtattcatcgtcagtccggccggccagttcctcaatgagcaggacctcgaagtcatgggccgcatcacacagaaggaaggtgttcaggagctggtgctcgtcgccagccagattgacacgcagttgtacggcagcgaaaagcgcacacgcctgagcgatgcggttgacgccattcgccagcaattgtcgatccgtgcgcaaagcgctctgaccaacctcaagctgagcagcccggaagtcggtgcggtattcgacaacctgatcgcctcagtgcaccgcaacctgctgcacagttccggtttgtgccacagcctcaaccgacgtttcgatctgcccgagcgctgggactccaacgaacgagtgacgtgggaaaaccttagcaccgactatccggattacttcacccgcgataaccgcgaactgtcgttgcgcagcctggacaacctggcgaacatcgaggagatcaagagagtcctggccaaggttcgcgagaaaaaagccgagattactagcaagacgatcaccagcatgctggagcgcaagcagaaaaacctggaagcgttcaaggccctgatcatcaacctggcgcgcaaccaggttatgcaaatccgcaatgccgatacccagcaattggatgagcagatgaccttgctggaatcgaaaagactggagctatcgctggagctggatgtcagcttcaagtacgccattgcggattaccggcacaagttgcgcgacaacatgcgaaagaaggccgccgagctgctgcacgaaaccgaaaccggcatcgagcaggcgcaacactcctatagcgaaaccatcaccgtccaaaaatcaggatttggtaactggcttgcacgaaaaatctggggaggaggaagcgaggaaagaacggtcgttcgcaccaaagtcatcagtagccaggtggtcggcaacatcaacgctttcatgaacgaagttcaggatgagctggatatcaaagttgagaactcccatcgctggctggatcaggaacttgggaaaattcttacgcccaaaatccgcgaggtactccagaaggacaccaatgcacaaatgatcaggcaggcgatcacatcgaccattaacgctcttccagagcctgactttgcgctgaacatcccattgcccgacaacctgaaaagccggggtacgctgaaaggctacgaagccgaacaattcaaggacgacgcagacgacttcatcggttcgttgggcaccaagatcaagagcaagatcagcgcattcatcaaggaagtggagacaaacacaccgcccaccatttccgacgccttcgtcgacgaaatccagcgccggatcaatcagctcaaggagcaagtcgacaacgccgagcaaaccatcgacagactcgagcgcctggcacgcaaggccgaaggaattaacctgtga

SEQ ID NO: 334333 - DNA, 2022 bp, Pseudomonas aeruginosa
gtgaccacgccaccacgcctcgatgaacaggcattgccgacgctcaaggcgctctcccgtttctggcagttcaaacgcaagaagctggccgcagacctgctgggctatctaaacgacgcccagcaacaaatggacgagctgtacgccgccaatcagcaggtcagtgcccagcgtgcgctgcagcaagacgaaattgcgcagctgcagtcacgcagtaactcgcttgccgagcagttgcaagctgaaagcgtcaggctggcttccacagccaaagcgcttgacctggaaaagagtaagctgcacgaggctttgcaagcactggcccaagccaatacccagttccacgatgcgagactgcgcgaatcccaagccctcacccgcatcgctgagcttgagcaacagctgacagatcagcaaacgcagctcagcgaaaaagcacagttcatagacgagcttcagcagactctgaccgaagtacggcaacagcttgacgcgctgcgcctctacaagcgccaactgaccgagcaatgcaccgatcaggccacgcagatccaaacgctggaggtgcgcagccaggagctcgcctcgcagttgcaggtggaacaggccaacactgcgatactggaagaacgcaagagccaggcgctggcacagataactgaactcgaagcatttctggaggataaccgcaaccagctgttatccaaggagcagagcgtctgcctgctggaaagcatgaccgagcagctcaaggcctcacaccagcatctggagaacaactacgccgacattaacaaacagcacctgtcccttatcgaaaagttttctctggtaagtagagtgctggcccagcaaccacccagcaatcccggactggagcgcttcgccgagctgatcaacaatgactacatggactttgccaaccgcgagtcatcattggccgatgaagcccaagcggtactcaagatgcaggcgattcttgccgagatgcacatgctcaacaatttcccgagcatcgccggcaagaccatcctcagcattgccggtggcttcagcagtggaaaatcggccttcgtcaacagcttcatcaaagacccgagtgtcgagctggcgacggggatcaacccggtaactgtgatacccagctacgtggtgtgttccgaggaaacccagataaagggctattcctacaatggcggcgccctagatctggaaccgtcgctgtatgcctccatgagccacgagtacgtccaggccttcggcttcgatctgcggcgcattctaccgttcatcagcgtcaaggtgccgatggatccggacctgttcggcaatctgtgcatcatcgacacgccgggctacaacccgggcaactcgttaggagcgcaagcctcggatcgtgttaccgctgcgtcactgatcaaccaggcctcagcgatgatctgggtcatcggtctcgacccggcaggtaccatcgatcaatccgatatcgaattcattcagtcctcaccatttcgcgatgagtcgctctacatcgtgttgaacaaggctgatgtgaaatctgaagaagatatccggcagatcatcaatcaggtggccttggatctggaatttgcgggtatcgactatgcaggcataagcgcctactcctccacccgccgcaggacttaccccagcagcggcatcagcctcgatcagttcctgcgttcgatcaaccacaaggtggacgtggttgataaggtgaatcgcaaaatcaatgcagtgttcgattcctacaaaaaggccatcgaggccgacatcgcggagctggaaaaacgccaggacgagttcaatgcgttcaagctcgatgctctggagataggaggcactgagctctttgaccggatagacaaagcatttcctctatcgaaacagatacttgatacatcagtgcagaaaaaactggagcaggaatgtgaaaacctgcgtcgcgcactcaagatcgcagctcaaaaagccttgctggtccaagagtgttggcgctga

SEQ ID NO: 334334 - DNA, 1086 bp, Pseudomonas aeruginosa
atgttcgatcttgaccactccctcgcccaggaaatcgccgaccgagcgatggccatccttccgcgcaacgtgaatgtgatggacagccagggcttgatcattgggacaggggaggctgagcgcctctatacccgccacgaaggggctcaactggtcctcgccaataatagggctgtggaaatcgacagcgctgctgctggcgctctcagaggcgttcaggaaggggtgaaccttccactgtgcctggatggccagctgatcggcgtcatcggcgtatctggcgatcccgaggaggtccgcacgttcgctgagatggtacgaatgaccgctgaaatgttggtggcccagcggaacgaccagcagcaccagatttggctccagaagcggactgaagatgtactgtctgccatcctcctttccggccagtctgctcaccgagccatcgttgaggcccagcgattgggtctgaaacctgatcttcgtcggacggcaatcctcctcgagctggccaacccatccgacattgagcaggtcaccagatggattcagcaccaggtagccgacgcctggtgcgttccgttgcatgcatcaggcctggtctggtgcccacctcgcaccgttctaccggattttcgtgagcgggtaactcgcgccggcatttcattcagcagagtggcgatcggcaccccaaacatcgaaaccggatctctgcgctctgaggttgagcagctatctgacttgatggcctacgcccaagctaagatcccagataaccagtggcttgatctggccgctcacagaattccggtcgcagtgtggcggtatcgttccgagaatggatttcagcaactggctgagccttacctcgccctgcagcaagaggatggtaatggccagctacgtaagacattgaagtgctgggtggagcacggaagtgatggccaagcctgtgcagaggcactgaatatccatcggaacagccttcgttacagactggagagaatcgccgatatcaccggtttcgacctcgcgtcccccaagggcatcactgaactctatctggctatgatcctggctgcggagtag

SEQ ID NO: 334335 - DNA, 198 bp, Pseudomonas aeruginosa
atgatggacaaggacttagcgaaaaggcatcccggtaaagccttctacctcaggatcaaggtggaagcagggatcgagcatgtcgacctcgataacgctgtgaccccgcgcgaggcccggcaaatggcgatatcccaaggctacgccccaacgcattggatgactgttggtgatctccggccgacgcggttttattaa

SEQ ID NO: 334336 - DNA, 1104 bp, Pseudomonas aeruginosa
atgacgacggaaactcggagcaggaccactctaatctcggtaggcaagcagcttcatgcctcccctcaaaccggacaggaccgcgcctgtcttgttcgcctgagcgatgggacagagcgcttagcattgatccagcttgtaacctccaagcagcaaggatcattgcacagaggggcagagttcttccgcgtttcgtttcgattcgtaggggatgattcagatccggactgccagtaccacctcgatcagaacaccgtgtggtgtgtcatcgaccacaaagactgccagatcgtatttggccccaccgatggcattgagatcagacagccggggctcggcattggctcgtacctcatggcgcaactcatccgactaatccagcagtcggagatgcgtggcaactaccaggtccaggcggtacatcttcctatcgcggctcagaccaaggtcaagccagaggatgcccgggctaacgacgcgcggatcgagacattcctgactcgggttgggttctacgtctcaccagctgctggacagaaggtgattggggtgcggcgtgcccaagacctccgcccttggtggaaccaacagaaagtcagtttcctctccttccccagtttcgtggagttggcggcgaggtggcaacgagagaaaaaccagtcggaaaaagccgtcgaggccgcacagcgcattgttgaaggcgcccacctgcatgcctcccaacttcaaaccgcgcatgctgaagaggtcgcatctctcgaatccaagattgagcaactggaaggaacggtgagttcgcaggaagaacaacacgcagcgttaattcgcgagttactggagaagcaggcagaagaaactcaaggcttgcgtaggcagattgaagatatccagagtatgcatggccagatcgaagatcgggttacagccctgaaccctgcccagccctccgccggggatacgttggaggcccgggccgaatctgccacccagatgcaaagaactctgacaatcagcttggccccggccctcatgaagctcctctgggcagctttagcgctttccgcgtttgcattgggtgctggcgcgctgaccaaccacctctaa

SEQ ID NO: 334337 - DNA, 1212 bp, Pseudomonas aeruginosa
atgacgaaatcgatcaagaagaagcaccttctcatggcttccatcgcagctgcagtggtggctatcggtggtgttactgccatgctctccagttcagggaaaaagtcggcacttagctactacgacagcttcaaagagcgcttctacctgcaggacgtcctttccgaaggcgagatttcatactccgtcttctccggcgacttgaccgttaaaaatccagaaatccgcctcgcagcggttcaaaccaacggtgctgagcagttccttcagggcttgcgcggcctttttgaaacggcgattggccggtcgagcgaagaaggcctgatggggtggaccaagtaccagatgctgtccactaccggccgcaacgccgcgggcgtctacttaaaggcggatgcgctgaagatcaaccactccggcgacagcaaggacggtgagattcacgtccaattgctgggaatggaaatggcaaaccccttcatctcccgcagaggggccgaagtcgttctggtgagcgacctggctgccgacaacgaatgggcacctgcagagactgccagcagcgaagtcaagttgccttattcctggggcaccaacatggcagtgcgtagcccggtcacaggtgccttcatcgttggtgcaaccggagactttggcaccaaggtcgacctcgacttctacatccagcgtagcgacgatggggcgggctccatgaggttcgtggtgacccaccgcaatgacggcagcgaggtagggcagatcgttcgcgaggcggagtttgcttcccttcctgagctcgatgaggtgcagactttgctcaggaataccctgagcagcttcatcattggggcctacagctctttcaccggtcagtccgtcctgttggacgcagtcagcaagtttgcgctccaaaccaaggtcgaagactactcggtgacctttaggggcttctcttcgatcaaggacgcctttgattcctaccaggcaaacgccggcaaatcgcagttcgatgcgttctgccaagcagctggcctatcgacttggcaaagtgacttcggggccaaggcgagagaacacagcgacagcgaatgcgcgatcgcacgcaagctagtcgaagaaggtaagttcgaagagcactacaagttcagcgaaggaaagcccctctacgcctctcttttcgtgggccggtcctacgaattcgaagccaactga

SEQ ID NO: 334338 - DNA, 1125 bp, Pseudomonas aeruginosa
atgccatgtccctccacaggatttgctgagggctcattcgagaagctgtcatggaaggttccgaacacctatcgtggagacaactggaaccgagtgtttgtccacgccagcggtttgatgttcaacaaggacctggagagtgtcgttaagggcaaagagctctcctatctgagcccggatgccgatcaagcgctattcatcctgggcgagattcctagccggcaaatgaaggtctatctggccttccagcgaggcaactaccgggtactgggaccgttcaatagcgatccctattacgttgcgatcacacccgatgagtcgttcgcgcttgacccggtcgactacaagagggcgggcgaagaggtatttaagctgatcaggaccacctcctcttcaaccgtctctgtacagaacttctatgtggcgaaaagtctcgccgctctttacccggaaacaggttggggagatgacacgcagaaaatcatacgcaaccgcatcggggagagccgcggccagttctactttgacgtacaggaaggctccaactgggcccttcagcgcgaacagcaacgcttgcgcgaagagcggcgagtgcagcagcagatggcagaactccactctcgggtgcttgagcgctatgagcagctgaaggcgggcatgaaggactacgaaggcagagaggtcgaggcgcttgctcaaatggcaggcatccaggtccgcttcggatcaccgctggcgctgcaggacccgaattcctccaagaatgtgggcttgatgatgatccacatcgctggaaagacagacggcagctatgacatcgacttcccagccaaagggcggctgctatcgaaccagaccttcgagaaggagtggtatgtggtgccagtggcaaacctcactcctttcatgccgctggttgacggacgggctcttcccacgttccgtggcaacctgccagccgcacctgaagcctgtaagcaggaccattgcgccgacaaggtctcgttcggcgcagtcctggcacgtgaatttggtcctgactcagggatcgacttcaactggactccagacgtgtcacagcagtacgtaaacacctggaaaaacgcttctgcccagctccaataa

SEQ ID NO: 334339 - DNA, 852 bp, Pseudomonas aeruginosa
gtgcgtaagaagttcgtcgcgtcgatcctagcagtagcgatttcagcaacctccggctgtgcagaaatgggcatcagtaaagaacaggccggtaccgtcctcggcggcctcgctggtgcagcaatcggggcgaccatgggcaaagggaacggcaaaattgccgcaacgatcatcgcgataggcattggcgggtaccttggcaaccgaatcggacacatgctcgacgagaaggaccaacaggcgctggccctgcgaactcaagaggtcctgagtcagccgaccgttgctacccagccggtcacctggacctcagatcactccggtgcaactgcccaaatcacacaggggcaggagtacagcaagaccaagacagttgaggtcaaacgcgcgcccaaaatccagggagtcccttcgatgaagctgatcaacgaagcttatgtgaccaagtccagcctgaatgtccgagcagctccgaacctgaaggcagacaaagtcggtggactgccaaccaacactgaatttaccgccgtaggctccaccggtgactggatcttggtgggccgcaagggtgtgacggtaggctatgttcacaaggactacgtcgagtcgaaggcacaggcggttgccaagactgctgcacctgccgtgaacctcgatgaaatgaatgtctctgccagcaaagaaacccaggcgttcgatctcgattccatcccgtccctgcccaccgagcaagtcgtggccgaaactgcctgccggccggtgactgtgagtctcaaatcggccagtgggcaggcggaacagcagcaaaacaccttctgcaaacaggccaacggtacctgggaactgatctga

SEQ ID NO: 334340 - DNA, 1269 bp, Pseudomonas aeruginosa
atgcttctcatcgcactcgttgtgctgaatgccgtctgcttgatcagcggcctgctcttcaacgccgagttgctgaacatggcaggggcagacattcccctcaagcagctccaaaccctcgagatctacagtcaaattttggcatcggccagcgtgtgcctgttcgcctggcggatgtgcatttgggctcaccgccgatggggaggagctcaatacatcggtctcagcattgcgctcagtaccatagtcgcagctccagcaacctggtggattcagggtgaagccccggacctgatcgccgagaagtttccggccagcctgcgcgtatacagcctctatgcctacgtgacgaagaaagggttgctctacgactcactccagatcccaggtgtcccttaccaagagcatcgcgataccggcgatggcaaggcattcattgcgaatcttggggtgttgatgagcgtgcagggctcctacgtagaaaagatcgaccaaaacttcttcgggttcgcagcagcagttttcaccggctacacaaggcgaaacggcgattggctatatggacgcatccaagatgaggtcgttcctcagatagaggatatcgtcaggacatacgccaagctcgaggcattccgcgcggcgaggcttccaggcaatgagtggaaacccattgcctggccaaaggcaggggaagaactcggttacgacccgacccttgatgactttgcccggtccatcaaacctggcctgcgatctcgccagtccatcttgaacagcgccgaggtccgttatttcgccagggaagcaatgggcccgctctacgtcaatggcatggatgttctggccagccgacagcagttcgacaggtacctgccagggatagccaagaatatggcgttcgatgtggctcacaccgacatccacggtgaacagggcttgaacgtcctgaaaaatatgtggttcgtcccttggacattgatcagtggcctcttcatgggcgccctcaatctagtcggactggtgctctcggccgtggagcagcgcggttttattcagggccggggacgattggttcggctcggggctgtcgccgtgatcatcatcgtcccgctgatctatgggaactccatcatccagtcagctgggtaccgaaccgcatttcggagcatcgagaaggggccaaccatcatggccggcgttttccactgggcaatgtcggcagaagcgatgctctacgacctcaccaaacctctgctgaaagcagagtga

SEQ ID NO: 334341 - DNA, 504 bp, Pseudomonas aeruginosa
atgcagatcagccaagggcaacgtatcccgttgtctaacctcattcagggacggaccctttccgtcgcgatccagatcaaatcatcccctactgtcgaccttgcctgtttcgcactggatgctttcgggaagctctcagacgctcgcaacttgatcttctacaaccaacgcatctctccttgcggcagcttgagacaagttggtgcacagttcagcctgaaactttcaggattaccgtcatccatagaacggttggtattcaccgcttcaatcgacggtgaaggcgccatgggcaatattcgtccctccacctttgtaatcaaggaccggacgggtgaaatcgttgccacatgcccctttgctggcaatatcttcggggcggagaaatctatcatggtcgcggatctttaccgcgacgatggccattggcatttggcatcgaatcttcaaggttttgacgaagacctcaccgccttggtgaggcattaccgtgggcggtgttga

SEQ ID NO: 334342 - DNA, 1260 bp, Pseudomonas aeruginosa
atgcagatcagccaagggcaacgtatcccgctatcgaacctcattcagggccagtctctgtccctcgcgatcctgatcaactccccccatacagtcgacctcgcctgtttcggcctggatgctgccgggaagctttcggacgatcgctacatgatcttcttcaaccagccgatctccccttgcggcagcttgaagcaagctggagcagagttcagcctgagcctggctggacttccctcctccatcgatcgcttggtgtttaccgcggcaatcgacggggccggtgccatgcgcgatatccagtcctcatcttttgtaatcaaggacccggccggtcaagttgttgccacctgccccttcgctggcaacaccttcgccgcggagaaggccatcatggtagcggacgtctaccgcaaggatggccagtggcgtttggcgtcgaatctccaaggcttcaacgaagggctcagcgccctggtgaagcatttcgggggcgaggttgctgatgatgcacctcccgcaagttccccatcgccagcccccgttcaagccgccatctcgctggaaaaaaaggtggcggccgcggctccgcaactgatcagcctggccaaaaaggcccaggtaagcctcgagaaagcgaagctgactcatgtgaaggcgcgtgttgcgctggttctcgatgcgtcgggctccatgaactcccaatattccaagggtcgtgtccaagaggtggtcaacagactgctgcccctggccgtccactttgatgatgatggctcgattgactgctgggcctttgcagcaaagccgcaaaagctctccgagatcaccctgagcaactaccaagacttcatcaacaccgacaattacggttggcgtgactggaacgttggtagccggatcaacgacgagcccagggtgatggagcaggtgatcagctattacctcaacgacggtgaccggtcgcccgtttatgttctcttcatcagcgacggtggggtacacgagaacaggaagatcaccaagctcatgaccgaggctgcgaagctgcccctctactggcagttcgttggccttggaggtcacggctatggcatcctggaaaagctcgatgacatgaaaggccgagtggtcgacaactgcggattcttcgcgctggatgacctgcatcaggtaagcgaggagcaactctacgaccagctcatggaggaattcccgagctggatcaaggaagcctcggccaagggaatcattggctag

SEQ ID NO: 334343 - DNA, 1200 bp, Pseudomonas aeruginosa
atggggttccgcttcagcaaacgaattacgatcgttcccggcgttcggctcaacatcagcggttcgggaatcagtacctctgttggtccacgcggattgagcctaaccatgggcaaacgtggcacctacattaacgcgggcctgccagggaccggcctttcctatcgtgaacggctggatcgatctggccagaggcgcgcacctggtccatctggagagacagcggcctattccgggcccataaaggtcaaagtcgacaatgacggcacgttgatcatcacagatctggaagacaacctgctcccgccagagatcgttaagcgcgtgaaggtggagaagcgtgaggagatccaggcgcttctcgagaaagctgcagctaagatcaacgaagggctcgaagagtgcctttcggtgcacatgatgactcccaggccaggttctctgccggcgcttccacccgcgttcaaccttgaagaaccgcgccgaccatccattgacgcgcccgggctcatcgacaagatgctcttgcgaagtgccaagatggaaagggaggcccaggtacttgaagcccagtaccagcaggatcttgctgagtggaattccgcccgcgacgcccacgagaaggcacgtgccgaaatcgaaaaggccatccggctggctgcaaagggatacagtgctcagatggagcgcgcgctggactatgtgctttccggcatcgcttggccgaaagaaacactccttgagtacgagttctcccatgacgtaactggaatagccctggacatcgacctgcccgatgaaggtgatgttccgaaccgaaccgctgaagccaaaggcaatggcaagctcagcttcaaaaccaggtctgaagctcagacacgaaaggacttcgtcaccctctgttacggcaccgttttccgtgtggttggggaggtttttgccttgctcccaggcatccagcaatgcctagcttccgggtacattcagcgtacaaattcggcaacggggcgtgtcgaggatcagtacgtaatttcagcgctgatctctcgtgatcaatgggatacgttggactttgaccggctggatgcaatagatccaggcgcgacgttgaacgcctttggtgcagtagtgaacctcgacagagcttcacgattccgagagattacgcctattgactggaattcagttaatcacacctaa

SEQ ID NO: 334344 - DNA, 561 bp, Pseudomonas aeruginosa
gtgaccccaccgaaccccagctacccagagcagatcgccgccctgactgaaactgtcgcccggctgaccgccgagcgcgaccgtctgagcgcagccatgttgcattcgcagatcaccggcgcacgctggatcgcctgcaacgactacctgccagattgcacgcacgaagacgacgtcggcttactgtcgcagtcggtgctggtctgcgacgagagcgacctgtccagcctctacctgggccacatgcgcgatgacggcacctggcaattggaccgcggtgattcaaactgcatgcctcccaagaccatcacccattggatgccccggcccaattctccgtgtctgcaggagcagagccaggacccgcggaatgaacgccgcaaactgatggaggcagggagcttggaggccgccgtccaggtgtaccgccaggcgctgagcgaagccgtagaacagttggccagaggcaccctggatgccccgacttgtcaccgactaatgggacgctggcaaaccgcgctgctgcaagcggtgcaaccgctagcacgggcgccggaatga

SEQ ID NO: 334345 - DNA, 1026 bp, Pseudomonas aeruginosa
atgaaactcaggttggttttagctgtaggtggcgtgctggggttggtgggctgtgatgctgtcacagatttcaagctgggtatggcgcagcgggaattgcgcgaggaatgcttcggtagcttcacgaatacctgcgtgagcaagaccatcgacttcaatatcaaggtgcttgagtcagtacccctttctgggccggaagacaagaagggcatcattgcgatgttcggagacgaagggtgggatctctggaaggagtccgaggaagaagtgaaggatcaggttatcgatatcctcgaatcaagacgccctggattcttctcccgatggttcctgggtgacgcccagcctttcgatgagaaaggggtcatggagcttttgccgagtgacctgaagccgttccaggatcgtgccaaggcagtgtttgtcagcaagctgaaggcagcggggctcaaacctaatgctgaagcaggtgcgaaatacagcgatgagaaaaagctccctcaacagcaagaggcaccagctacccttggctccgcccagcactccgatagaccgataagtgaagtgtcaccgcaatctcagcttcaatcgcaacgccttcccgccggcggacatgcactgaccttgtccgcagccattgacagtcttgtcgctgccgaagtttcggaagacggcggaagcgagtaccaagaaggtcgcaaggttgttcaagtggatctcaatggcgacggagcagaggatgctgttgtcctgttcaccatcgaagggcagggcggtggaaacggctcgtaccaagccctggctgccctgtacaaggagccggacggctgggccctcaagcagaagcttatcgtaggtggcgcaacagacatccaggtcctgggccagaacattttcggcttgaaggtcctgacccacggcgatgacgatccaatgtgctgcccgagcctcgaaagcgtcgttaggtacaaatggacaggtacagacttcgctgaattgaccgccgctagccagagcgctagctga

SEQ ID NO: 334346 - DNA, 579 bp, Pseudomonas aeruginosa
atggcagtatctctctcgaagggcggcaacgtcagcctgtctaaagaagcacctggcctgagcgaagtcgtagtaggcctgggctgggacccgcgcgttaccgatggcaccgagttcgacctggacgcctcgatcttcatcaccggtgaaaacggcaaagtcctgaacgactccagcttcatcttctacaacaacaagaagtccaccgatggttccgtcgagcacctgggcgacaaccgttccggccagggcgatggcgacgacgagcaagtgaacgtcaagctgaccggcctgggcgccgacgtgaagaagctggtcttcgccgtcaccatccatgacgccgaagctcgcaagcagtccttcggtcaggtgggcaacgcctacatccgcgtcctgaacaaggccgacggcaaggaaatcgctcgctacgacctgtccgaagacgcctccaccgagaccgccatgatcttcggcgagctgtaccgtcacaacgacgaattcaagttcaaggcgatcggccaaggtttcgccggcggcctgaagcctctggctgaagctcacggcgtgagtatcggctaa

SEQ ID NO: 334347 - DNA, 579 bp, Pseudomonas aeruginosa
atggcactgtctcttcaaaaaggtggcaacctctccctgtccaaagaagcacctggcctgaccaagatcctggtcggtctgggctgggacccgcgctccaccgatggcacccagttcgacctcgacgccagcgctttcctgctgaacgccaccggcaaagtccgcggcgatgccgacttcatcttctacaaccagctgaagagcccggacggttccgttgagcacaccggtgacaaccgcgacggcgccggcgacggtgacgacgaagcgatcaaggtcgaccttagccgtgtgccggccgacgtcgacaagatcgccttcaccgtgaccatccacgacgctgaaaaccgtcgccagaacttcggccaggtcagcaactccttcatccgcatcgtcaacgaggccaacggctccgagatcgttcgctacgatctggccgaagacgcttcgaccgaaaccgcgatgatcttcgctgagctgtaccgtcacaacagcgaatggaagttccgcgccgtcggccaaggctacgctggtggcctgaaggccctggccaatggttacggtctgaccgtcaactga

SEQ ID NO: 334348 - DNA, 1035 bp, Pseudomonas aeruginosa
gtggaaacgactcacattggcttcccaccgctgaccatggcggtatttgtcggcctggcgcttgccgccctgctgctggacatggtcacccaccgcgatgacaagccgatcactctggcgcgcgcctctatctggtccgtgttctgggtggcgatttccctggcgttcgcaggtttcctctacgtgcaacacggcgctgaagtcgccagcctgttcgttaccggttacgcccttgagaaagtgctgtcgatcgacaacctgttcgtcttcatggccatcttcgcctggttcaaggtgccggatggtctgcgccaccgcgttttgtactggggcatcatcggtgcaatcgttttccgtggcgtgttcgtagcgatcggtaccggcctgctggcctttggtccctgggttgagatcgtcttcgcgctgatcgtggcttggacggcggtgatgatgctcaaaggtggtgacgacgatgatgctgaggaggattactcccaacatctcgcctaccgattcgccaaaaagctcttccctgtatggccgaagctgtacggccacaacttcttcgtgagccgtaaaaagctcgaagtcgaagtccagaagaccgagaacaaaggcatgagcctggcggcgaagggcggtctgttcgccaccccgctgttcctctgcctggtcgtagtcgaggtgtctgacgtactgttcgccttcgactcggtaccggcggtaatcgcggtgagccgtgagcccctgatcgtctactcggcaatgttgttcgcaatcctgggcctgcgtaccctctacttcgtcctcgaagcactgaagcgttacctggtgcacctcgagaaagcggtcgtcgtgctgctgttcttcatcgccgccaagctcggcctgaacgccaccgaccacctgttccaccacggcatcagcatcgatccgaacaccagcctgcttatcgtcctggcagttctggcagtcggcatcctggcaagcgtgatcttccccgaaaaggaagaagcgcaagccgaaaaccagtaa

SEQ ID NO: 334349 - DNA, 450 bp, Pseudomonas aeruginosa
atgctcgaatggctgaaaactaacgcgacgaaagctcgcgaaacactgactaccgaagtcgccaagttcaaaaatcggaccttcatggaggcagtagccaatgcgtgcgcgctgatctccgcggcggatggtgagatcaaatccgaagagaagatgaagatgaccggcttcatcaacaactccccggaactgaaggtcttcaacctgaacgacgtgatcaaggtcttcagcgatgcctgcggcaagttcgagttcgacttccagattggccaagccgaagccctgaaggcgatcagcaaggtcaaaggcaaggacggcgaagctcgcctgctggtgcgtgtggcctgcgccatcggcgcttccgacggtgacttcgacgacaaagagaaagcggcctgccgcctgatctgcctggagctgggccttaacccggcagacttcgaactgtaa

SEQ ID NO: 334350 - DNA, 1191 bp, Pseudomonas aeruginosa
atgacaacactggtacctggcggtaatgcgccggttgccaccggccaactgcgcgtggacatcagctatacgccgatcccaggcgcagaccttgatatctctgcgttcgccctgaccaacacggggaaagtccgcggcgatggtgacatgtgcttctacggccaaaccagcattctgagcggcgcagtccagctgacggccagttcggccggtcgtgctgaattcgcagtcgatctcagtcgtgttgatcctgccgtggagaaagttgcgctcaccgcgaccatatacgagaacaaggcaaccttcgatcgcgtttcgacgctggcgttggcccttactggagggattgaagctcagatcccaacacgcgggatgaacgaaacggcgctcattcttggcgagttctacctgcgccagggagcgtggaagttccgctgtgtcgcacagggcttcgcgggtggcctagagccgctggctaagcatttcggtgtcgatattgcagcgccgtcggggaatccggcccagaacacggcgcagccggcacccgctcccgcgccggtaccgccagccgcgccgaaatcgacgatcagcctcagcaaggtgaccctcgacaagtctcgctcgagcatcagcctggaaaaaacgtctgctggcttcggtgagattaaggtcaacctgaactggaaccagggcggcactggcctgcttggcggccttcttggtttacgcaatgccatcgacctggacctgggttgcctgttcgaaatgcaggacggctacaaaggtgctgtacaggcgctcggtcagcggttcggtgatctgcgcgaagagccgtacatccaactgatgggggatgaccgtactggctctgtcgctggtggtgaatggcttcacatcaacgggcaacactggagcgaggttaaacggattctggtgttcgccttcatctacgacggcgctcccaattggaaagcaaccgacggggtggtgaccattttcgttcccgggcaaccggagatcgaggtacgcatgaacgaggagggaggtcgccacggcatgtgtgcgattgctcttcttgaaaacgtgaatggggccgttaaggtctctcgccgagtcgacttccatcccgggcacgaagagatggatcgagcctacggctgggggatgcgctggaaagcgggctccaagtaa

SEQ ID NO: 334351 - DNA, 594 bp, Pseudomonas aeruginosa
atggcactcaccctgagcaaaaatcagagcatctcgctggagaaaactgccggcagcggactgacctcggtcagcctgggactgggttgggacccggtgaagtccggtggtttcctctccaagctcctcgggggcggcagcgactcgatcgacctcgacgcctcctgcattctgctggacgggaacatgaagccggtggacctggtttggttccgtcagctcagttcgaaggacggctccatcaagcactccggggacaaccgcaccggggaaggtgagggcgacgatgaaaccatcaacgtcgacctgcagcgcctgccggccaccgtccaccacctggtatttactgtcaactcgttcacggggcagaaattcgaccaggtagaaaatgcatactgccgcatcgtgaactcgtccaagaaccaagagctggcgcgcttcaatctcgcggagaaaggccagcacaccggtgtagtgatggccagcctcagccgcaagggtaacgactgggacttcaaggcgatcggccaatccaccaacggccgcaccgcggatgacctcgtcaacctggccattcaggcggtacgcgcatga

SEQ ID NO: 334352 - DNA, 729 bp, Pseudomonas aeruginosa
atgagcatcgaaatgctggaggcagggccgaaaggagcgaaggtgctctcggtgtttgacttcgatggaaccctcacccggcacgacagtttcgtgccgttccttcggtttgccttcggcactcgtgagttcacccttcgtatcctcaggctggtgctgcccagcctgaggtatctcggcaggggcatgtcgcgggatgagcttaaggcccagctggtgagcacatttctcgccggcgtggaagccaaatgggtgggccagaaagcagaagatttctgccagtcggtttggcctaagctcatgcgcccatcagggttacgatccgtcgcggccgaaatggcgtccggagcagaggtgacactttgctcagcctctccggccctggttttgcgtccattcgccgaccggctcggtatcaagctcatcgggacagaattggaagtggtcgatggccggctgaccggcaagatcagcggaaacaattgtcgctgcgagaacaaggtactccgactggaagccatctatggtccgctgacccaataccggttgagggcctggggcgatactcgcggcgatcatgaattactggctgctgcgcaagatgcgcattggcgtcattttcaccccgtatggcggcgttcccgcccgcggtttagcaaagcagggagcccggggagtgttcctccgcgtgcctcccactcgaactctgaagatcaacaaggagcgtaa

SEQ ID NO: 334353 - DNA, 948 bp, Pseudomonas aeruginosa
atgaaggcgatttctccattcgctctcggggcgactctgtacatgccggcaactcgcgatgacatcctggatgtcgtgttcgggatgaagattcctgagcttcgctcactggtggtatgcctggaagacgcagtggcggcgatcgacgtcgaaagtgcgctcgcaaatctgcaggcgctcctcatgggcatcgacgcccgtggcggccgcccggaacaggggccgttgctattcgtccgtcctcgcgatgcagagatggcagcagtgctgaacgaatggccgctgatgaagcacgtcaacgggttcgtcgttcccaagctaacgctgaagtctcttgctttctgggaggccgcggtcagcaaccctaatctctatctcatgccaactctggaaacgagcgatgtttacgatccgggtgccatggtggagctcggtcaggctctgaaagccaacctgaaccaacgcatcatcgccctccggattggcgggaacgacctaatgggctgcctcggcctgcgccggaaccctgccaccacgctctacaacacaccgatgagctacgtgattcccatgctcgccggcgtaatgggagcacagggctttgccctgacggcccctgtattcgaacagctggccaccccccatcttcttcgggaggagttgaagctcgatatcgcgcatggcctggtaggcaagacggcaattcatccaagccagatcagcatcattcaggacacgctccgcgtgagcctggaggacctcaactgcgccaagctgatcgtcaacgatgtggcccccgccgtcttcaagcacaacgacgcaatgtgcgagccggctactcattacaagtgggcagtaaacatcctcgagcgcgccaagtggcacggagtgaagcccgccgaaatgggtaatggcgaactcagtgtccgcctggccgaggctaactga

SEQ ID NO: 334354 - DNA, 1095 bp, Pseudomonas aeruginosa
atgagtaatctcctcgcaaccctgaacaccgtcggcagcggtagctacgcgccggaagacgtccatttccttctgcagtcggtggaaatgaatgtcaccgatgtcgaggagaaggagcgcctgattcaaagcaatcagaagcactattcggagatgatcagccaagaacacgcgcctaccgacgtgcacaagtccctgtacgcccgtgcgcttgtgcagaacggggcgcgcatggctgaagatgttcaatctctggctttggcgttgaatgccgcctacaccggctccagcatcgccctggtttccttcgtgcgcgccggtcttccacttggcgtcctgctccgtcgggcactggtcgagatgggccgtgacgcccaccattatggcgtaagcattatccgtgatcgcgggatcgatacggtggccctccaagcgatcatccagttgcacggtgcggagaacatcgtcttcgtggatggctggaccggcaagggagcaatttctggcgagctcaagcggacgctgggagccgacaagcgtttcccggaagaaccacgtctcgttgtacttgccgacccctgcggccgcgcatggctcgctgcctccgcagaggactgggtaatcccgtccggaatcctgggcgcaaccgtttcaggcttggtatctcgatccatctggccgactcaaggagggcttcatggttgcgtggtttacgaccacctgcatgaacacgacgttacacgtgagttcatcgacaagatcgaggctgagcgccaagcgctgaacagtgttcaaactgcatcgccctggacgcacgagcagcgcctgaagctccaggccgcagctgaaaacgtggtcacctccctcgctacccgcttcggcatcagcaacctgaaccgcgtaaaaccgggtattgccgaggcaacccgagcagtcctgcgccgagtgcccgatcacgtgctggtccgggatcgtaacgacggcgacgtgcaactcctgctgcatctcactgagcgcgctggggtaacggtggaggaggccggcgaggcactggggccgtaccgtgcggtaaccatcatccggagtacgaactga

SEQ ID NO: 334355 - DNA, 759 bp, Pseudomonas aeruginosa
atgagcagtaatcgtcccctggtattcgtcgacctcgacgacaccttgttccagaccgctcgcaagatggtcgaaggtacgccgcgcactaccgcgacgctggatgtacacggccaacccaatgggtacatgaatccggtccagcactccttcgtcaactggctgctggcttcggccgatgtagtgcctgtcaccgcgcgcagcgtagaggcttacagccgcgttaagctccccttcaccgagggggctatctgctcgcatgggggtgtaatgctccggcctgatggcacactggatcaggactggcatggacagatggccgagtccctttggaccttccaggatcgactgccggcgttgagcgaagcaaccctgcagatcgggaaggacatgggttattcgctccgcggttgggttgtggaagaagagggcctgcgccactacgtggtgaccaaacacaatgaatccgatgacgctgtcctctccaaggtcctgaacgaggttcaggctcgaggcatgctggaaggcatgcacatccatgccaacggcaacaacctcgctttcctgcccaaggggctggctaagcgcctggccgttcaagaatggctgcgccgtgacgccaaaatcaacggcgaacgcccggtcctcggcttcggcgacagcatcactgacctgggattcatggacctttgccacatgtgggctacacccgctcgcagccaattggccaaggccgtggaggagatgatcaatgagtaa

SEQ ID NO: 334356 - DNA, 1128 bp, Pseudomonas aeruginosa
atggaaaacaacgtagtaccaacgtccctacgcgcccaactcaagcgggggcttcttgaggtcaaagtcgacgacgccgtcctccctcccgctaacctgttcggttttgcagagcgccggaatcccaagcgggcattcctattcgtttccaaagtgctgggccgccatataccagtgcgcccatcggtcatggctgccagcttcgagagcctggctgctgaaatcccgcctgatctccctggaccagtgctggtcattggcatggccgaaactgccgtaggcctcggtgccggggtgcaccgcgccttcagcgcaactcgccctgacagcatgtacctcatcagcactcgccatcccctcggcaccgagctcttcgctcgtttcgaggaagaacacagtcacgccagcgcccacctgatccacatgcccgtcgacccagaaatccgggaaatgatgctccaggctcgatcgctggtactggtggacgatgaggcttccaccgggaagaccttcgtcaacttgcatcgcgccctggtagatgcaggcctgagcaagatcgagcgtgtcgtcacgtgcgtcctcacggactggtctgctggcgctgtgcgccatgccatcggcgagcaggcgacagcggtgtcgctgatgcagggctcctatcagttccatgaagaccaggcagcgccgctgcccgaaatgccagacgtaggggccgtatccatcggggagtggccactttcggcagataaagactggggccgcctgggcgtccgtcatgtggaagacacgcttgctcccgagatccaggtccaacccggcgaaaagatcatcgtgttgggtaccagtgagttcgtctggcgtcccttcctgctggccgagcggctggagcgtgcaggcgctgatgttcacttcagttccaccagtcgctctccaatcgccttgggccactccattcagcatgccctgtcgttctctgacaactacggtcttggcatcccgaacttcctctacaacgtgaagccggggcagtttgaccgagttctgatctgcaccgaaacccccgcgcaggcagtccctgcagagctggttacggccctgagtgcggaggtgattttcgatgagcagtaa

SEQ ID NO: 334357 - DNA, 1140 bp, Pseudomonas aeruginosa
atgatggtgctggcgcctggcgcaaacaccgctttgggagctgcgcaatgctcctggacgctggagtgcggaaattcctcggcattcggggaatacgcagctgttgctctgcttccactagacgataaacgtcacccccaaggggaggcagcactgttccaggtcacccagccctggatgcagtggagtggcgcgcaggagaaagtcagctgcagcttgaatctcgcccaactgccgaccggcgccgaccgtctgctcctggtggtttacaccttctcggcaatgggaccagtcagcgaactccggtcccttcgcctgcaagtcgactctcagatcgaagtcagcttggacctatccgacaatggcgaatcagccatcatcgtcggcgagttctactgccgcaatcaacagtggaaattccgcgctctcgctgaagggtcggcatacggtctctcagcgcttggacgtcggatcgggctgaatatcgacgatgcccatcctcatcgccgcttcggttcctcagatcagaaccgatcggcagccggcgcgaccggtaccggctttgctgtgacatccactcatattctcacgtgtgcgcatgtgatcgagggcatgcaagagatccacattgcttcgttcgagggtcggcatcgtgccgaggccgtagttgttgaccagcggaatgatctggcgctcctccgggtgcaaggtgcacctgccttcaaaccagtggctttccgcgatggtattggctgtgacctgggggaaacagtagttgccctcgggtacccactcgctgggctggccggtggaggaatacacgttactcaggggggcgtatctgcactctttggcctacacaatgacgccagcctgctccagttcactgctccgattcagccgggatcaagcggaagccctctgttcgatggttctggatcggttgtggggatggtgacctccactgttcctgatgcgcagaacatgaacttcgcagtcaaggctggacttgccctggcgtttctcgacgcctgtggtgtagagcccaatcgtgccccgacaggaatgaccttcacgacatcccagatggcccgtgaagcccaacaatcgctttggaaaatcgaggcgcggaatccgtaa

SEQ ID NO: 334358 - DNA, 1014 bp, Pseudomonas aeruginosa
atgaggacacacatcttgatctggtttcttgagggacaatccagccagcgcgacattcttctaggagcgcgtgaggccctaccaccggaggtaaagatttttgcctcccatcgccaagaaaggcctgaaatcaccggtcacgccgacgtgagcttcattgagccgaaggacaaccaagaacgaatcgactgggtaatcgagacagccttgacccataagatcaaagttatcctggccggccgagtggggagtgttttcgaggcccagcgtcgccgattcgaggctgcagggctggtgctggttaccggtggttcgaccatgagcacgttcgagctggtagacgacaaaagcaagttcactgctgaagcagagcgcgctggacttgcctgtgtccccgcgattacggcaaccaacgccgaggaactcatcgacgcctacgaaacccttcgcgctcacggagacgtttgtgtgaagccggctgtgggcatttacggccaaggattctggcgattcaagtctgaagcggacccgttccgttgcttcgccaaccccgactctcgggaagtccagttcgaaacttacctgcaagcctatcgcgccggcggggagcgtcccgccatgctggtgatgccgtacatggcggggagcgagtgctcgatcgacatggtttgcgagtccggccgtccggtggcatacgttggacgccggaagcagggccttcaccagacattcgagaacgattcgccagcggttgaactcgcactgaaagccgctgctcactttcagtgcgatggactggtcaacgtccagacgcgggatgatgcagatggtgtcccgcatctcctcgagatcaatccgcggtactcgggcggcatcggttacacccggcatacgggaatcaacctgccaggtatcttcgccaccagaaggctcggactgcccgagccggtgagtcagtggataccaaatatcagggtgaaagccattaccgttgcggtgccagtggcgacctga

SEQ ID NO: 334359 - DNA, 183 bp, Pseudomonas aeruginosa
atgactacggtcatggctgccctggattttgagaccaatttccgcttgaacaggcgctctcggcatcagatgcagatattggtaatcgaagcgatgaaggaaggggctgatcctgaagccctcctctcctccgcccagaaagtcattgatgaacgtaccaaggagttggacaagctggactag

SEQ ID NO: 334360 - DNA, 573 bp, Pseudomonas aeruginosa
atgagcccgatccgcacttgttccccaattgccaagagaacaaccgagacctttgttgaccacgtcaacattggcggcgagcgtcagagagttgaatttcagcgggaggttatctggctccaggagtctgagacgcagctcctgtacgttcacggaggcaagatcctcactaaggggccgtgtcacaacgactactacgggtacctcacctctctcaatccgcaagagcttggcgctctgaaccttgcagatcacttcagcgttgatcagcaaagcaccctggatatccagctggtcactaccgttttcctgatacctgtgcacgagtcgaatgagaacaaggagcacaacaggacgaaacctgcggactatcgggatcactacagctacattccagatggctggcgctatgagcggcagagtgacgggcacacgatctaccctcagccggagcgcgaagaattgggtaaggagatcgtctggtcgacgcagtggagtgaagaggaaaacctgcggaagctggaggactttaagcgccgctgggccttttccgtgggccaggtgagtagctag

SEQ ID NO: 334361 - DNA, 192 bp, Pseudomonas aeruginosa
atgagcaacaacacccaagcccaagaagccaaatatttcgacctgcacaccaccggtatcggctacctcaatcgcatccgcgaagtaccgatccgccgaggtgaaccgttcctcgccgctactgttgctgccctccatggcgcggcagacgtaagcgtctggccaacacacctccccggttcttccagctag

SEQ ID NO: 334362 - DNA, 753 bp, Pseudomonas aeruginosa
atgaacatgcagaccagcaccgacaggaacctcaatttcgacttcgtgcgcaggcaagtcgagcaaccgccagcatgggcatcagaggtcctgctgtcgtgggaggaagcctacccccaggaaaagcacgccttccttcaaagccactactggaccgagacgggatcgatcaatgtgttccgcgtcgtgggtaccgaccgcaaagactaccggggaaggtcctggctcgacttcctcactggcggcaagcgaatgcagcgaaacctgcaggccttgctggacaacccgagctactacctgcagccaacggagcgtaggcccgcgatccactacaacacgctcgatggcttgagcttctacgtcggctccgacggcaaccaccgcacctgtattgctcgattcttcctggccgagcagcagaagagccagctccacgacgtgacgctcaaccactaccaggtcaacgacgccttctaccgcctgtacgggcaactccggcaacaggtcctgctacaagggctgcctgtacaagttcatccggagcgcgtgcagttgggccgggaagatactgctggctggaagatggatacctaccagaccactttgaactggctgaacctcaagactcaggaggaaatatctctgaacgaagcccaggcgcgggagcaactcatcgacctcattcggagaaaaccatctgaagagcaaccgcgaggctggaaggcaaggctgaaatgtctcatttcaggctga

SEQ ID NO: 334363 - DNA, 1122 bp, Pseudomonas aeruginosa
atggctctcatgttcccgcggctcgcccgcaatttcgtgaaaaacgggtacttcccgaccgacgaacccacgctcgaaagagcgctcaacgcattgatgcccagtaactctgaatccaatgggccgatgtgcatcctcgatccctgcgccggcgaaggcgtggcaatcgctgaagcggctcatgccctggggcgcgagcatgccaaggcgttcgccgtcgagttcgacgcagagcgggcgcgccatgcccgtggtctggtcgatcactgtctgcacgcggacctgatggacacgatgatctccaagcagtccttcggtctgctctggctcaatccgccgtatggcgacctgtccaaggacgtcaacggcaacattggctatcaaggtcagggccgagcccgcctcgaaaagctgttctaccagcgcacgctgcccctgttgcagtacggcggcgtgctggtcttcatcgtccccggctacgtgctcgatgccgagctggtcggctggctgacacgccactacaccgacctgcggatctatcgagcggtggaaacgcagtttaagcaggtggtgatcttcgggcgacgggtgcgtcagcgtgagcagacacccgatgccgtcaaggccgtgcgcagtctgttgctgcagattgggcttggcgaaatcgaagccgaggagctgccgagcgaatggccgttcctgccgtacatcgtccccgccagcccggcggagccggagcatttcttccgcgtgacgatggagcccgaacagttcgccgacgaggttggccggctgcaaggcctttggccgtcgctggacacgcacttggggaccgcgcagcagtcgctgcgtccaccggcgcgggccttgtcccactggcatctcgccctggctctggccgcaggcgcgatctcgggagtcgtgcaatccaagacggggcgcgtgctcgtcgtcaaaggtgacacccacaaggacaagacgctccagcgggaattcaccgagcgcgaagacggctcgatcgccgagacgcgcatcctcaccgacaagtttgttcccgtcatccgcgcgtgggacatgacgcctgattccccgacacggggcgaggtgttgaccattcgctga

SEQ ID NO: 334364 - DNA, 312 bp, Pseudomonas aeruginosa
atggcagcccaagcactttccatcagccaaacaccgagcctgcgcttctcgccaggccaggtggtcatgacctgcggcgtcgatgacctggtccgacagggccggctcaacccgactccctacctgcgtcgccacctcggcggcgattggggcgacctcgacgacagcgacaggcggcagaacgatgccgcgctgaagtccggcgaggatcgtctgttttcttcttacgaggtcacacccggcctgaagatttggatcatcaccgaatgggatcgcagcgtcaccacgctgttgctgcccaacgagtactga

SEQ ID NO: 334365 - DNA, 2280 bp, Pseudomonas aeruginosa
atgcccgttgatctcgacaccaccgccagcaatgcagcgcccgtaccgggcgaactgctcgaagcggaatcatcccctctgaccctgagccttcaggattttgtcggcgagttcggcgacgaactgcttgattctctcaaccgcgccaacccgccggtctataccggccaagcgcaagcacagcggcaactcgtcgttgccagcctcaagcgcaagctgttccaggcccaggccgacgttgtccatgctgccgccgagctgctggtcgatcaaggcgaacgcgctgcgatcgtcaatggcgaaatgggctgcggcaaaacgaccgtcggcatcgccacggccgcggtgctcaacgccgaaggctaccgccgcacgctggtactttcgcctccccacctggtctacaagtggcggcgcgagatccaggagacggtggccggcgccaaggtctgggtgctcaatggcccggatacgctggtcaagctcatcaagctgcgcgagcagttgggtgtgcagcccacgggccaggagtttttcgtcctggggcgcgtgcggatgcggatggggttccactggaagccggtcttcacccagcggcgcacccgccacggcgacgtggcagcatgcccgaactgcggcacggtcattacggacctcgacggcgaaccggtcaacccgatctcgctcgaagccgaggagtcccgcaggaagtgcagccactgcgccgcgcccctgtggacgctgatccgcccgcgtagtctgtccggcagtgaccagtcctctgtcgtcctcaaagccttgaagcgcatcccgaccatcggggaagtcaccgcgcagaagttgatgcagaagtttggtgacggcttcctggcctcgatgctgggtgacaacatccacgagttcatcaacctgatggacggcaatggcgagctggtgttttccgaccgtcaggccacgcgcatggaacgtgcgatggccaacatggagtttggctttggcgagggcggctaccaaccgtccgagttcatcaaacgctacctgccgcaaggcacgttcgacctgctcatcgccgacgaggcgcacgagtacaagaacggtggcagtgcccagggccaggccatgggcgtgctggcggcgaaggctcgcaagaccttgctgctgaccggcacgctgatgggcggctacggcgatgatctgttctacctgctgttccgggcactgccagggcggatgatcgaagacggctaccgcccgaccacgagcggcagcatgacctcggctgcgatggcgttcatgcgcgatcacggcgtcctcaaggacatctactccgagagcgccggcacggcgcacaagacggccaagggcaccaaggtatcggtgcgcacggtcaaggctcccggcttcggcccgaaaggggtcttgcgttgcatcctgccgttcaccatatttctcaagctcaaggacatcggtggcaacgtcctgccaccgtatgacgaggagtttcgtgaagtccagatggacgtggcgcaagctgcggcctaccgcgatttggcgggtcggctgaccgcagagctgaaacaggctctggcgcgacgcgatacgaccttgctgggggtggtgctcaacgtgctgctggcctggccggattgctgcttccggtcggagaccgtggtgcatccacgcacgcgcaacaccttggcgtttgtcccggctcagttcaatgagttcgagatcagccccaaggagcgtgagctgatcgagatctgcaggcaggagaagacacagggccgcaaggttctggcctacacggtctataccggcacgcgcgataccacgtcgcgcctgaaggggctgctggagcaggaaggcttcaaggtggcggtgctgcgcgcaagcgtggatgccagccgcagagaagactggatcgccgagcaactggaccgtggcatcgacgtgctcgtcaccaatcccgagctggtcaagacggggctggacctgctggagttcccgacgattgtgttcatgcaaagtggctacaacgtgtactcgctccaacaggcagcacgccgctcctggcgcatcgggcagaagcaacccgtgcgcgtgatctacctcggctatgccggttcctcgcagatgacctgcctggaactgatggccaagaagatcatggtctcgcagtccacctcgggcgatgtgcccgaatcggggctggatgtcctgaaccaggacggtgattccgtcgaagtggcgctggcccggcaattggtcaccgcctga

SEQ ID NO: 334366 - DNA, 579 bp, Pseudomonas aeruginosa
atgcccgccatccatgtatcccggcgtctggtcggcgctggtctcctggccgctgccctggccagcggctgcgccaccacgaccgcgccactggcaccagacgccatagaggaaatcgcctccgttccccaacccgaggcacccgagttcattcccgtcgtgcgctatggccgctacacgctggttgagctggcaccctcggcagcgcagcgtgacttgctgttgcagaccatcgatgtgtccatgccggaggatgcccgtgccacggtgggcgatggcctgcggcatgtgctcaaacgcagtggttaccagctttgcgagatggcccacgccgtgaccgagttgtatgcgctgccgctgccggcggcgcacctgcatcttggccccatgaccttgcgcgatgcgctgcttaccctggctggcccggcctgggaactgcacgcgaatgaccgggcacggcagatttgctttgagcaggctggaggcagtgcgaccgccgagcacgaacacgaaccgcctgctgccgaggcggtgcagacgtttccgctgatgccttcggtttcgggaggccagccatga

SEQ ID NO: 334367 - DNA, 642 bp, Pseudomonas aeruginosa
atgaatgccgcgcagtctccccgtcgcccgatcaccgccatgatgttgcagagcctgatgtggctctggctgatcggcctcagcgttttcgtcgctctcggctaccaggcggtgaacgagcaggtcgaccaggagctgcttaattcccgcctgcaacgtctcgaagcgcaggcggtaggtctggccgaggccattgaggccatccagcagcgtccaaccgtcgcaacggcggcagaccttaaagacacccgcgaactcctggaagcacgcgctgcccaggtcgagacaacgctgagcggctatgccgctgctgacgaccttcaggcgctgcgcacggaggtcgagcaaatcaagacgcgccagaccgttgcgcgcaccgcagcacccgctcagccgcgcacaccgcgcaggcctaacgccaagccggaaccgctgccactgccgttccgcatcgtcggcgccgaacttcgcgccggccagcgcagcctgtccgtcgcgccgagcagcggggacttcacgcccgaccagcttgaggtactgctgcccggcgattcgctcggcccatggcgctttcaggcggtcgagggcaactccgccgtgtttcaggccggcgaccagacccgtcgcgtggcgatcccttga

SEQ ID NO: 334368 - DNA, 738 bp, Pseudomonas aeruginosa
atgaagcctgccattatcctttccgcgcttctgctggtgtctgcccagttgtccgcttgggcgcagcaaccgaccacggcccccgccggcaatgcccagagccaggagcgtccgctggtcactcgcgccttggacgaccgggtggcaagcgactggggcttgcaaccgcaggagtgggcgcgctatcgcgaactgatggatgggccgctgggtatctactcacccaacctggacccgctgtccgccctgggcatcgaggcgcgcaccgacgaggaacggctccgctacgcagagctgcaggtacagatcgaggcacgccgtgtcgagaagctgctcgcctaccagcgtgcctacgacgaggcctggcagcgcctgaatcccggcatgcagcgggtgaacctgcctgacgacaagcccgacaccggcacaagcgccaatcccttgcgcggttcaggccgcacggcagtgttcatcaaggacggctgcgcggcctgcgggcagctcgtgcagcgcctgcaatcctctggtaccgagttcgacctgtacatggtcggcagccgccaggacgacacacgtatccgcgactgggccaagcgggcgaacgtcgatccggcgcgcgtgcgcagcggtggcatcacgctcaaccatgatggcgggcggtggctgtcgctgagcttgcccggagaccttcctgcggtcgtgcgcgaggtgaacggtcaatggcagcgccagccatag

SEQ ID NO: 334369 - DNA, 606 bp, Pseudomonas aeruginosa
atggcagcgccagccatagtggccacctccgtttcgcagtgcttgcgcgcactggtgatcgcggcgggcctgtgcgcctgcgccgcccatgcccaggagcttccgccaccggcttaccagcttgccgcacagcgcgcaggcatcccctcgacggtgctctacgccgtagccttgcaagagagcggcatccgacgcaatggacgcatcgtcccgtggccgtggtcgctcaacgtcgctggccagtcgcgtcgttacgcaacacgcgccgacgcctgcgccggtttgcagcaggcgatgcgcgccacgccgcacacgcgcatcgacgcgggccttggccagatcaacctcggctaccaccaacagcgctacgccagcgcgtgcgacctgctcgacccgtaccgcaatctttccatcgccgctgaaatcctgaaagagcagcacaccactggcgaggactggttgctggcaatcggtcgctaccaccgtcctgcgggcggagaacctgccgcccgttacaggcggagcgtgtcgcgccaccttgcccgtgtgcagggcacgcacccaaccaccgcggccctcgctgcgcgccaggagacatccccatga

SEQ ID NO: 334370 - DNA, 549 bp, Pseudomonas aeruginosa
atgacgaacctccctctgagcaacttcacgctgaagggtctgctcgtgctgctggcggctctgccgctggcctcgcgtgccggcgagccgctgatcgtggtcgaagaccgtggcggcgcgtcggcgctgccgtactacgaggctctgaaccttcagccgcgcgccgatgcgccggcccgaccgcccatcccaatgctcccggtgcccgccacgcccatggacgaggccgcgatgttgccggtgcgcagtgccaagctcacacctggcaccgtcgcgcggcgggtgatagaggcgccgggcctgcggccctttgtggtcatcggcgacgacgaggcgtcccgcgcctggcttcgtcgtcaggcggcctcgctgcgccagcgcggcgcggtgggcctggtggttaacgtcgagaccgtgcagggcctggcacggctgcgcgccctggtgccgggcgtagccctcgcgcctgtggccggtgacgacctggccgagcgcctggctctgcgacattacccggtgctgatcacagccaccggcatcgagcaatga

SEQ ID NO: 334371 - DNA, 2187 bp, Pseudomonas aeruginosa
atgtcggggaaacagccggtcgaggttttgctgcgcccagcggtggagttctataccgtcgcggcgtgtgcaggcgccgcgtttctgtccctggtggccccgtggtcgctcgcgctgagtccggccatgggcgtcggcagtgcgctggcgttctgcgcctacggtgccatccgctaccgcgatgcccgcgtcatcctgcgctaccggcgcaacattcgccgcttgccgcgctacgtgatgaccagcaaggacgtaccggtcagccagcagcgtctgttcgtggggcgcgggtttctgtgggagcagaaacacacccatcggctcatgcagacgtaccgaccggaatttcgccgctacgtcgagttgacgccggcctaccggctggcgcgcaggctggaggaacggctggagttcgcgccgttcccgctgtctcggctgcccgcgctcacgggctgggatgtgtctttcaacccggtgcgcccgctgccgcctgtgggcggcctgccgcgcctgcacggcatcgaacccgatgaggtggacgtcagcctgccgctgggtgagcgcgtcgggcattcgctggtgctgggcaccacgcgcgtgggcaagacgcggttggccgagttgtttgtgacccaggacattcggcgcaagaacgccgacggcgagcacgaggtcgtcatcgtcatagaccccaagggcgatgccgatcttttgaagcgggtgtacgtcgaggccaaacgcgcgggtcgtgagggtgagttctatgtcttccatttgggctggcccgacatttccgcgcgctacaacgctgtgggccgctttgggcgcatcagcgaggtggccacccgtgttgcagggcagctctccggggaaggcaacagcgcggcatttcgcgagtttgcgtggcgcttcgtcaatatcatcgcccgcgccctggtggaactgggccagcgcccggactacatgctgatccagcgccacgtcatcaacatcgacgcgctgttcatcgagtacgcccagcactacttcgccaagaccgagcccaaggcctgggaggtgatcgtccagatcgaggccaagctcaacgagaagaacatcccgcgcaacatgattgggcgcgagaagcgcgtggtggcgctggagcagtacctctcccaggcccgtaactatgacccggtgctcgacggcctgcgctcggcggttcgctacgacaagacgtatttcgacaagatcgtcgcatcgctgctgccgctgctggagaaactcaccagcgggaagatttcccagcttctggcgccgaactattccgacctggccgacccccgcccgatcttcgattggatgcaggtcatccgaaagcgcgccgtcgtctatgtgggcctggacgcgctatccgatgccgaggtcgccgcagcggtcggcaactcgatgttcagcgatctcgtttcggtggcaggccatatctacaagcacgggatcgatgacggcctgccgggcgcatcggctggcacgcgcgtgccgatcaacgtccacgcggatgaattcaatgaactcatgggtgacgagttcgtgccgctgatcaacaaaggcggcggcgccggtctgcaagtcaccgcgtacacccagaccctttcggacatcgaggctcgcatcggcaaccgcgcgaaggccggtcaggtgatcggcaacttcaacaacctgttcatgctgcgcgtgcgcgagacggccaccgctgaactgctgacccggcaattgccgaaggtcgaggtctatacgaccaccatcgtctccggcgcgaccgacagctccgacatccgcggggcgacggatttcaccagcaacacgcaggaccgcatcagcatgtccagcgtgccgatgatcgagccgtcgcacgtcgtcgccttacccaagggtcagtgtttcgcgttgttgcagggcggccagctttggaaggttcgcatgccgctgccggcaccggaccccgatgaggtcatgccgcaggatctgcaacaactcgcgggctacatgcgccagagctacagtgaggccacgcagtggtgggagttcaccagttccccggtcttgcaggacacggccttgcccgatgacctgctcgatgaggtggccaccgccgacgctcctgcctccggcacgggcgatatggccagagacgaggccgcaccatga

SEQ ID NO: 334372 - DNA, 750 bp, Pseudomonas aeruginosa
atgagcgatgccgccggcaccacacgaagggagcaaggccgccgccagggtctggtcatcggcacgatcacgctgccttttcggctgcttggggtactgatcggctcgctgctgttctccatcgtcatggagtgcgtgggcatgcacttgttctggaaggatcaaagctggcggcactcccagcagatgctgcagtacgagctggggcacctgtctagccatttcacgcgcagcgtgatcgtgcaggagccggggcgcacagcgcacgagttggtagataccggctacgaatgggtgttcgtgcgttcggggctgctggagcgcatgagccagaccgccgagcgcgcccgtgcgtcgagccagggccagacgcgcaacttccgctatttcatcagccaagtctatgtttggaccgagagctacctgattgcggcagcgttcacgacgctgacctttctcgtgcgtctgttggtcctggtgctcaccctgccactgatcttcacggcggcattcgtaggtctgatcgatggcctggtgcgccgtgacgtgcggcgcttcggcgcgggccgggaatccggcttcatctaccaccgcgcaaaggcgagcctgatgccgctggccgtgctgccttgggtgacgtacctggcgctgccggtatcggtgcatccgctgctgatcctgctgccgagcaccgccttgcttggactgggtatatccctgactgcggggagcttcaaaaagtacctctag

SEQ ID NO: 334373 - DNA, 1371 bp, Pseudomonas aeruginosa
atggggctaaagaccgagctgaaagctctggtggatgagttagatcgcgtgcacaagggggccactccatggtccgaagaggccggcattcctgatttcatcaccgctgagaacggtatgcagcggtacttcaccaagaaggcaagagaggcgcttgggcagttctccagcaccctccatcagaatcggactctgaactcagtgaagatcgaacccgaggcctttcagaaaattgcccgccaagccgttgccgatatgcacgcctcgggtgagctttcggggtttgatgaatgcgatcagggcgggctgcttcccaaactgaaattgcttatcgaggaacgactcgcaagcatcaccaacgaacacacgcactatttccctgcctggaccctgggcatggagaggaagtctccgttctccctcggcccggtgacattcttgaataggtcggactggatagattctgtagatttccctcagcagggaaaggatcactatctgaaccaaccagaggcgaaccaccgctggaaggaaattctcaaggatgccttgcagaaggccaatgatggctcctccatcgaagggctggccaacgccgtctacagtgcgatagtcggatgtccagccttggtcaaggtaacagtccgtggctatgagcgtgaattctcacgcaagctggcgagattggttggcaagacagcgcttgacgctatctctctgggctttggagcccccgagtgcttcctgcaacaggcgcttcaagacgagcgcctaccgcctgcgggtagcgatcgcctggtcgaaaccaaagggtttctgtggttgcctggaagctcgctcgggaagcggattccttcgcaacctcctgaacgagtaaggcaagcgttggatgacatgacatctattcttccggcattcgcggcgatccttgatgggctgcttgatccatcgagtcacccgcatcccaagcttgccaatcgatgggctactgcgctggattggttcggcgaaggaaaccgtgagttaagcgatgctatagcgttggcgaagctcggaacctgcctggatgtactgagctgcggcggcaggaacggcggtatctgtaaaatggtcgtgcatctgaccggaacgagtgacgacacgcaggtaatacgaggcaaccgtcctcgcacgctgaagcaattggtcaaggacatctatgaccatggtcgatcgcagatactgcatggcacgcactacgacagactggaatcattcgcggcagagcggcagtatgcagcctacctcgcacggatcgtattgattgagtgcgcagtgcgactacagcgttatggtggtccagatgatgacggggcgttcagcacaatatag

SEQ ID NO: 334374 - DNA, 381 bp, Pseudomonas aeruginosa
atggtggcttcaacctggctgcgtgccgcgcatcgcggcgtgcccacttttctcgtgacggccctcctgctgggccagtccccgatggcgttggccgagccccccgcgcagcgtcaggaattggtcgcggcgctgcgccagctcgacgcgctggagcgcaccgtcgccgacagcgccgcgcatgctcccgtccagccgggcgagcgctaccacttcgattacccgcggctgctggctgacctagcgcgcgtgcgcgccggcatccaggcgcacctctctccttcgcgtgctcagccgcgcgaccccgccgagctggccggcgactaccgcaccgagcgggccgtcgagccatcgccgacgaccgcggaggccaagccatga

SEQ ID NO: 334375 - DNA, 234 bp, Pseudomonas aeruginosa
atgaacggcgcccaagtctcggcatttcaagccaacagcggcatcgcgccttccgcgatggcgaccgtcctggtcggcgtcgtgttcgcggtcctgctcgtctggggcgtctgggccatccgaacggcttacgtagggtggtccgagagccgcctcaaccagcgccagttcctcggcgtctgcatccgcttcgtcgcgatgtacctcgtcctgagtttcttcctcctctcctga

SEQ ID NO: 334376 - DNA, 360 bp, Pseudomonas aeruginosa
atgcaaaaccgcatcctcacttcccgttttgtccagcgcaccaccgtggctctgggcgccgccgcgctgccggcgctgtcgttcgcgcaaggcctgccgcagttggagaacccgacccggggcgccggcagcggcatcatggagacgatcaggaactacggctacgacatcatcatgctcgtggccctgctggttgtggcgtcgatgttcattggcgtgtgctaccacgcctacggcacctacgcggaaatccacactggtcgcaaaacctggggccaattcggcctcacggtcgccatcggcgcggtgctgctcgtgatcggcatttggctgctcaccgaagccaccggcatcctgtaa

SEQ ID NO: 334377 - DNA, 411 bp, Pseudomonas aeruginosa
atgtccgagcagcagcacgtccgtgctgacgggacggtcacgttccttccgcaccggctcaaccgccatcccgttgtcgtgcgcggcctcaccgccgacgagctgtggatctgctgcggcctgtccggtgccgccggcctgctggtcggtgcgccgctgtcctgggtgttccgcacgatcgcgctcgcgcccacgttcgtcgtgctgggcgtggccttcggcgtgttcatcgggggcggcatcctgcgtcgcctcaagcgtgggcgtcccgacacctggctgtatcggcaactccagtggcgcatcgccacgcgctatccgctggtggcgggctgggtgggcggccatgtgctgatctcacgctccggcttctggaccacccgaaggtctgctgcaaggggggcacgatga

SEQ ID NO: 334378 - DNA, 690 bp, Pseudomonas aeruginosa
atgagccgcttcaagaacgagatcacccatctgcaggcgcacatcaagacgcttcgcctgggtgctggcgcgctggtcatcgtcgccctggtgatgggcggcggctggtggagcgctccgcgcgacctgaccatccacgtcccgcctgatctgcgctccggcagtacccgcaagtggtgggaagtgccgcccgaatcggtctatgcgttcacgttctacgtgtttcagaccctccaccgttggcccacgaatggcgaagaggactacgcacgcaaccttcacacactctcgccgtatctcacgccgtcctgccaggctttcctgcgagccgactacgactaccgccgcagcacgggtgagttgcgccagcgcgtgcgcggcatctacgaaatcccgggccgtggctacggcgacgaccctacgacgcgcgtgcgcgtggtctccgaccgcgactgggtggtgacactggacatcagcgccgacgagtactacggcgcggaacaggtcaagcgcgccctggtgcgctaccccatcaaggtcacgcgcgtggacatcgatcccgcccgcaacccgttcggcctggtactcgactgctacgaaggggcgccgcagcgcatcggcgccccggagccgacgcgcccggcgcccggtggtttggctccgcaagcgccccaaggagaaaccccatga

SEQ ID NO: 334379 - DNA, 933 bp, Pseudomonas aeruginosa
atgaagcatcctgtactcgcactgctggggctgctggtcgtagtcgcagcacctgtcgcccatgcggtggagatcctgcgctgggaacgtctgccgctggccgtgccgttgcgtgtcggccaggagcgcatcgtgttcatcgacaggaacgtccgcgtgggcgtgcctgccggcgtgggcgaacgtctgcgcgtgcagagcgcgggcggtgcggtgtacctgcgcgccagtgcgccgatcgaaccaacacggctgcaactgcaggacgccgacacgggcgcattgatcctgctggacatcgccgccgagccggccaaggacggcgaagccgagctggagccggtgcgcatcgtcgagggcaacagcaccccggcgcgctatggcgatcagccggagggtgccgacgcgcccccggcgcacacccagaatcaggcaggcgcgcggacggcgcggcgcgaaaccccggtctcggtcgcgctgacgcgcttcgccgcgcagaacctctatgcgccgctgcgtacggtcgaggcgctgccgggtgtcatgcgggtcaatctgcgccgcgacatggacctgaccacgctgatgccgacgctgccggtgcgcgcggtcgcgctcgcgtcgtggcggctggaagaccagtgggtcaccgccgtgcgtctcaccaacggcagcagcggctggatcaccctcgacccgcgtgtgctgcaaggcgatttcctcacggccagcttccagcacgaggcgctgggtccacgcggaacgcccgaggacaccaccgttctgtacctggtgacgcgcgggcgtggcctcgcgcagtcgctgctgcccgctatccaccgcttcgacccggctgcgcatctgccgcagccgcaaatcgagacacgggacaacgaggccgcggatggcaaggagactcgccatgcgcagtaa

SEQ ID NO: 334380 - DNA, 1419 bp, Pseudomonas aeruginosa
atgcgcagtaacggactcctgaagtggctgatgatccccgtggccctgttggtgctgttcgtcgccatccggctgttctccggtgggagcacgtcgacacagcccgcagccgatgccggcgcccagctcacgcccgaggagatgaaggcgctgggcatcgagggcgataccccccgcgataccgtggcgaccctggtggcgcaggtgaagcaattgcgcaccgagcttcagaccacgctcttggacaacaagtctcagcgcgaagagaaccagcgcctgcgccagcgcgagaacgccatcgaccagcgcatcaattcggcgctggagaccgagcgctccaacctgcgccgcgaccagcagcaggcagccagcgagcgccagcagaccgagggactgctcgccgacctgcagcggcgcctggaaggcatcggcgggcgcggcggcggccacgccgatctacccgtgggcctggggctgcgtaacggcgacgaggcaggcatggaaggcggcgtgcgctgggtcgagccggacgacgcgaagcccactgatgggcgtaacggcagtcgtggcacgggtggcggcatgagctttccgacgagcttcggccccgcgcagagcacgctggaaaccacggcacaaaccgtggcgaacgcgggcgcccgcgccgcaggcgtcaagagcgccaagccggtctatacggtgccgaccaactcgacgctgatgggatcggtggcaatgacggcgctgatcggccgcgtgccgatcgacggtacggtcaacgatccgtatccgttcaaagtcctggtcggtcccgacaacctcacggcaaacggaattgacattcccgacgtggcgggcgccgtgttttccggcacggcctcgggtgactggacgctctcttgcgtgcgcggccaggtgcgcagcatcacctttgtgttccatgacgggaccattcggacgattcccgaagaccgcgagggcaaccagcagaacaaccagcagcgcgacggcctgggctggatcagcgacccctatggcattccctgcgtcagcggagagcggcgcagcaacgcccagcagtacctcggctcacaggcgctgatcaccgcggcgggtgccggcgtcgcctcgctcatcgacagcgacagcggtcagatgtcctacgtgggcgccgatggctccatcggaagcgtcggcatctcgggcaacgaagccgtgggccgcatcctggccggcggcgttcgggacatggccgattgggtgaacaagttgtacggccaggccttcgccgccgtctatgtccaacccggcgcaaaggtcgccgtccacctcgaaaagccgctcgccatcgatttcgatcccgaaggtcgcaaggtcgatcaccgtgcaggagaaagccatgctctcgaacttgaataa

SEQ ID NO: 334381 - DNA, 441 bp, Pseudomonas aeruginosa
atgctctcgaacttgaataagggcctggcgctggcccttgccgtcgcggtgctcggcggctgcgccaccagcaaggaaaagctgctgccccacggcgacagcacgatgatggacatctggcagcagaacgccggtgacggcggcggtggcgccggccaggtggcacgcaggcaattgctcgacgcgcgccagagcctgcgccggccgctgaccgagatggatgtacaggccgcgcccgccgagcagatgcgctacacgcgcacagcgcgcaacgaggtctatcgccagttccagcgcctgccgaatcccgacctggtgatgtacgtgtacccgcacctggcaggcacggacccggtgcccgtgccgggctatacgacggtttttcccttgtaccagcgcgtgcagtacgccatgcccggcgagcgcgtggaggactactga

SEQ ID NO: 334382 - DNA, 2871 bp, Pseudomonas aeruginosa
atgcgctggaaactcccctggccgaagctgactgcatccgacgcagacgatgacgagcagccggacggctggcagcgccacgtcgaggccctgcgtcaggccggcatccccgaacccggcacggcggtccatggccacaggccggcgaccgtggccgacgagcaggcgctgtacgacgttgcgccgtcgttcgcggaattcctgccctgggtggagttcctgccccagtcgaagtcgatgctgctggaagacgggcaatcggtcgcggcgttctacgagctggtgccgctgggcaccgagggccgggaacccggctggctcgcgcatgcccgcgacgccttggagaacgcgctccaggactcgttcgatgaactggacgagaacccctgggtactccagctctacgcccaggacgaacccagcttcgaccagtacatgcagaccctgcgcgactacgtgcagccgcgcgcccgcaatacggctttcaccgagttctaccttcgcttcttcggacaccacctgcgcgcggtagcgaagcccggcgggctgttcgaggacacggtggtcacacggctgcgctggcgcggccagacgcggcgcgtgcgcatggtcgtctatcgccgggccaccgggcaggcgaaccgccgcggccagacgcccgagcagatgctgaacatcgtctgcgatcgcttgtgtggcgggctggcgaacgccggcatccaggcccggcgcatggccgcggccgacgtccatgactggctgctgcggtggttcaacccgcgtcccacgctgctcggccctgggatcgaggaccgcgaacgcttctatgcgctggcacgctaccccgacgagacagaagacggcgagatcgagctggcgagcgggcgggatttcagccagcggcttttcttcagccagccacgctcggacgcggatcacggcacctggcacttcgacggcatgccgcatcgtgtgctggtcactgaccggctgcgcatgccgcccggcacggggcatttgactggcgaaacccgcaaaggcgatgcgatcaatacgctgttcgatcagatgcccgaggacacgacgatgtgtctgaccatggtggcgacaccccaggacatcctcgaatcgcacctgaaccacctggcgaagaaggcagtcggcgaaacactggcatcggagcagacgctcaaggatgtgcaggaggcccgctcgctgatcggcagcgcgcacaagctgtaccggggaacactggcgttctatttgcgcggccgggatgaagccgaactggaccggcgcggccttgatctggcgaacgtgatgcttaacgccggtttgcagcccgtgcgcgaggacgatgaagtcgcgcctttgaacagttatctgcgctggctgccgtgctgctacaacccgagccaggatcgacggaactggttcacccaactgatgttcgcccagcacgtggcgaacctctcaccggcctggggccgcagccagggcacgggccatccgggcaatacgttcttcaatcgaggcggcgggccgatcacctttgacccgctcaaccgcctggatcggcagatgaacgcgcacctgttcctgttcggccccaccggctccggcaaaagcgcaacgctcaacaacctcttgaaccaggtcacggccatctaccggccgcgcctcttcatcgtggaagccggcaacagcttcggcttgttcagcgatttcgccaagcgcctgggcctgactgtgaaccgggtcaagctggcccccggctcgggcatcagcctggcgccgttcgccgacgcgcgtcggctgatcgaaacgccgagcgacgtgcagacgctggatgccgatgtgctggacgaggacatgccacccgatgcatcggccatggaagcggacgagcagcgcgacgtactcggcgagttggaaatcaccgcacggctgatgatcaccggcggcgaggataaagaagaggcccggatgacgcgggccgatcgctcgctcatccgccagtgcatcctcgacgccgccgagcattgcgtggccgagaagcgcacggtgctcacgcgcgacgtgcgcaacgcgctgcgcgagcgcggccaggacccaacgctgccagagatgcggcgcgtgcggctgctggagatggcagatgccatggacatgttctgtcaaggcacggacggcgaaatgttcgaccgcgacggttcgccgtggcccgaagccgacatcaccctggtcgatctggcgacctatgcccgcgagggctacaacgcgcagctctccattgcctacatcagcctgatcagcacggtgaacaacattgccgagcgcgatcagtacctgggccgcccgatcatcaacgtcaccgacgaaggacacatcatcaccaagaacccgctgctcgccccctacgtggtgaagatcaccaagatgtggcgcaagctgggggcctggttctggctcgccacacaaaacatcgacgacttgccgcgcgctgcagagcccatgctcaacatgatcgagtggtggatctgcctgtcgatgccgcccgatgaggtggagaagatcgcgcggttccgcgaactctcgcctgcgcagaaggcgctgatgctttccgcgcgcaaggaagcagggaagttcaccgagggcgtcatcctctccaagagccttgaagtgctgtttcgggccgtgccaccgagcctctatctcgcgctcgcgcagaccgaacccgaggaaaaagccgagcgttaccagctcatgcagcaacacggcatcagtgaactcgacgcggccttcaaggtggccgagaagatcgaccaggcgcgtggcatcgagtcgccagccttgggcctgccgcaatag

SEQ ID NO: 334383 - DNA, 753 bp, Pseudomonas aeruginosa
gtgaaaccgaaacgtccttccattcctatgccggtacaggcgctccgccatcggcgctggccctggttcgtggcgattggactgatcacactgctgttgatctggctcgtgtcccgcgcacccagtgaacccgcgttgcaggctcccgcgcaggtcagcaccgcgcaggtggccgggcctccctggcagatgggcaacgcgcagggccgtttcacgctgacgctctatgccgacctcgaatgtccgttctgccgagcgtacttcccgcagctcaagcgctgggtgggtgccaacgcggacgtagctctgcaatggcaccaccagccgctggccgcgcacgaaccggccgcctccgccgaggcacgcctggccgagtgcgccgccgaaagtggcgggcatgctgcgttctggcaggccattgaatggatctatgcgcacacacgtagcgacggcttgggcttgcccgagggtctgcgctatcccggcctcaacccagccgtcgagcagtgtttggccagcgagcgaccggatagggtgattcgcgctcaggccgaggaagccaccaagggcggcgtgaccgcgacgccttcgattcgtctgcaggatcgccaaaccgatcaggcagtcgtgttgcaggggccgatcgaaggcgatgcactgctgtcggccatggacatgctggtggctgaggatgccgccgctccaccgaccaccgaaatgcctgccgacgttgtcggcgacatgcccaggtag

SEQ ID NO: 334384 - DNA, 495 bp, Pseudomonas aeruginosa
atgtctgtcgtcatcaatgactcctgcctggagtcgctttccgatatttctattcagaacgaggactggatcgttcagcaagccatcgtgttgctggagcggcgggttttcaaagcagggccacgtcttgagcggcccgcagcggtcagggactaccttcgtttgaagctggtcgccgagcccaacgaaatattcgtcgtcgtgttcatgaacagcatgcacgccgtgctggccgtggagccgatgttccatggaacgatcaatgcgacctcggtttatccacgtgtcgtgctgcagcgagcgttgcaactgaacgccgctgcggtcatcttcgcgcatcagcacccctcgggcaccaccgagccatccaatgcggatcggttgctgaccgagcagttgaagacggccttggcgcttatcgacgtgcgggtactcgaccatttcgtgattggtcaaggcgcaccgtactcgttcgccgagtctggtcttttgtaa

SEQ ID NO: 334385 - DNA, 447 bp, Pseudomonas aeruginosa
atgccagcatctttattccgcttcgcatccggctggcgaacccttggcctggccgttgcactgccggcatccttggccgttttcagcccagccaccttcgccgccgatgtggtggtcgtcaccgacagccgccacccggtcaagactatgggtggagagcggctgatcgagctggatgaaggccagcgcatcgaagccgagctttccgcacagctgcccgccgatcccgagcaggccacggccatcgtcaagcgccgcctgaacaacggcggtgccggcctccagcgccgcatcgcttccgcataccagggcgtcgccgacgcctggagcctgggcgtcaccagcattccggcagtcgtggtggatcagcgttacgtggtctatggcgagccggacgtggcccgtgccgtcgcgcgcgttgcgcaacaccggaggccgcagccatga

SEQ ID NO: 334386 - DNA, 618 bp, Pseudomonas aeruginosa
atgcaagacaagtcccactgggagtccgtgtacacccacaaggcagccgacgcggtgagctggtaccagccacatgcagacagctccctcgcgctgattcgtcaaacaggtatcgctgcggatgctgcgatcatcgatgtcggcggcggtgcttcgaccttggtggacgacttgttggcagcgcattacagcgacctgaccgtgctcgatatttcggccgccgcgctcgatgtggcgcgtcatcgactgggaggcgccgccagcgccgtacattggctggaggcagatatcacccaggtggactttcccgagcaccgcttcgcgctctggcatgaccgcgctgtgttccattttctaaccgatgccgcagacagagcgcgttatctcaacgctgtggggcgtgcggtcaagcctggcggctttgtggtcgtgggcaccttcgccgaggacggcccggagcagtgcagcggtttgcctgtcagacgatacagcgccgacaccctgtacgatgagtttggcgcgcagtttgagctgctggggaaggctgaggaaaaccaccatacgccgtttgggacggtgcagaagttcctctactgctattgcagaaagctcggctga

SEQ ID NO: 334387 - DNA, 1206 bp, Pseudomonas aeruginosa
atgaccgatcccctcaagaccgaccgccgcccctgggctgtatttctgatattccttcgcctagggctgacctccttcggcggcccaatcgctcacctgggctatttccgcgatgagttcgtggtgcgccgacaatggttgagcgagcgcagctatgcggatctggttgccctttgccagtttctgccagggccggccagcagccaggtcggtatcgcgctcggtctgtcgcgctctggctatcgcggcgcgctggccgcgtggctgggcttcaccttgccttccgcaattgccctgatcttcttcgcactcggcatcgccagttatggtgatgccatgcctgctggcgtgctgcacggtttgaaggtggtggccgtggcggtggtcgcccaggcggtctggggcatggcgcgcaatctgtgtcctgatgcaccgcgtatttccatcatggcggcggcgacctgcttcgtgctgctcgtaccctctgcctgggggcaagtgagtgtcatcatccttgccgccatcgtcggcctgctgctgttcaaaccacagcagggcgaggcccatgatccactaccgatcagcgtgcgacgtcgcgttggcttgttctggctggccctgttctttgccctgctgctggggctgccgttgctgacagctgtgttcccgaaccagacattggcgatggtggatgccttctaccgctccggttcgctggtattcggtggcgggcatgtcgtactgccgctgttgcaagctgaggtcgtaccaacagactgggtcgacaacgacgcattccttgcgggctatggcgcggcgcaggccgtgccgggtccgctgttcaccttcgcagcctttctcggcgcctcgatgaaccaagcacccactggctggcttggcggcctgatctgccttctggcgatctttgcgccgtctttcctgcttgtggtgggggccttgccgttctgggaacacctgcgccgtaacctgcgcacgcaggctgcactgctgggcatcaatgcggccgtggtcggcctgctgctggccgctctctaccagccggtatggaccagtgcgattcatggcccgaaagactttggcctggccctcgtggcactggtggcgttgatgttctggaagctgccgccgtggctggtcgtgctcggcagcggtatcctgggcgggttgttgagcattgccctgtga

SEQ ID NO: 334388 - DNA, 2691 bp, Pseudomonas aeruginosa
atgccattgttggacgagattattgggtgggccggcggactcagaccctggcagcaggaagcactgcgccggatatttgcccgggccgaactaacccaagatgacatcgagaccattctgcgaatggttcgcgagcaagaacgggaagacgcaaccacggggggagcacggccattcacgttggacgacgtaccaggcgccggaagtggcgcaaccgtgcggttggtgggtgtctcggggctagaccaggtaaacggcttcccgtccggtcgtgcctttgacctcgcaccggagggcatgaccattttctttggtcataacggcgccggcaaatccggctacgcccgcgtcttcaagaatgcctgcaacgctcggcatcgggtggaggtcctgcccgacgcttttggggcggcaaccccagctagaccgccatcagcagatttcgccattttggtggatggcactccggaaaccgcacgttgggtccagaacgggccggcccatttgcatttgagttcggtctcggtctacgacgcggcctgtgccaatgactacatcgacgcggaagggacccctgcatttcagccctacggactcactcatctgacgcgcctggtcctacttcagcgtgatttacaggcacggattgggaccgaacgcaatgccttggctctggatacccggcaattcgaaccgctgaagggtgacaccgaagtcggccgctacatcgccaaattaggtggggactcggaccgcgccgtgcttgctcgattagggacggtcggtgacgatgaactccggcgactggagtttctgaagcggacattactggaaagcgatcctgtgccgcaggcgctggccttggaacgtttggcgacacgcttggaccaggcgcagcgtcgagccgaggaagtccagcgctgggtgaatgatcgtgccatagcacgggcaaaggaactgattacaacggaaaaaaccgcgcatctcgccatgcaactggcgcaagcgcgtcttcaggatcgagacacactgaacgccatggagttgccggtaacgtcctcacccaccgccacgctgctggaaggcacaggagctgaactctggcaaacgatgtaccgagccgctgaggctttctctcagcagacggcataccctgaacatcccttcccgcacctggaaccggacgcttactgcgtactctgccagcaaccttattcaacggatgcctcggagcgcatgcggcgtttcgcggcatttgtcgccgacagcgccacggcggatgcgcaagccgccacgcttgcgcgcatgaacgctctagggaaggtgcaggctgtcgatctaaacgttctggatgtgccaacacgggctgacgtggaggagcgactgcccgacctacacgctgccatcaccgcagcggcatcggtctggaccgcccggcatacttgggttagccaagccctgcaaactggaaactggtcccccgagtcagaaccgcttcctatcgaagcaaacctcgatagtctcttcgccgccaaagctgcttcgctccgagtcgacgccaataccctgcggacctctgccgatcccgctgtacgcttggcgctgacccaagaactggcagagctagaagcccgacaacgcctcgccaaccagcttggcgcggtggagcgctttgttcaggacagtcaggtccatgccacattgagccgctgccatgccgccctcaacccagcggcagtgtcacgcaaactgacgtccctggcggcgacgcatgtgaccgaggctctggccgcttccatgaatgctgagttgaaagccctgggctataagcgacgggtgcaacccgacctgagcgggcgcacagagctgggggtgaccaaggtcacgctgcgcctgcaggaaatcacggcgaaagcctccaaggtgctgtcagagggcgagcagcgcgcgttggggatggctatgttcctcgccgagctcgaatccctgccacatacttcgaccgttattttcgacgatccgtctacgtcgctggatcacgtatatcgtcgggccatagctcggcgtttggtagcgctggctgagacccgccaagtgctggtgttcacccatgatgcggtgttcctgaccgagctcgcgatggcgcttcagcgtgctgatcgctcggccagctacaagaccatcggttgggacgagtcgccgggactagtgagcgaggggctgacgtgggcgacgatggacaccaaggcccgcctggccgatctcgaaagtcgtgcgaaagcgctgaacgttccggtcggcagcgacccggatgatgagcttgagcggcaaattgcatcgggatactcaagcctccgaggcactgtcgagcgcgccatccgcgaggtttttttgaacaataccgtccagccgttcagcgatgtggtgagcgtagaagcatttggtgctgtcattggccaccccgcagaggagtgggagcagttgctggcagtgtatgcgcgggcctgcgaagctaccgaggcccacgacaccccaggcgagcgccaactaccgcttcccgcgcgcgaggagttgctcggcgatatcgcccaggtcctggaattaatcaaaaacgcgactaaacgccgaactgcctacgagaatctacgccgggagcggaccgcgcaacgcaagaagctcttcggcggctag

SEQ ID NO: 334389 - DNA, 465 bp, Pseudomonas aeruginosa
atgtcatccggcaaacctgaatccgctgacccggctaagcgaatgagtgccggcgagcagtatcgcgcagcgttcgagcggctgaagagcaacaagcccgaacgactgccgaaggggacgcccgtaagtcagaacaacgttgccaaggaagccggcagcgacccctctgcactgaaaaaagctcgtttccccctactgatcgctgagatccaaaagtacgtggaaggacacgctgagcaacgtccgccatcagtgcgccaagtcagcttattagcccgcagaaaaaatcgtggacttcgagaacggatcgaggaaatcacgcagcagcgtgaccacctagccagcctactcggtgaggccgacgccaccattcttgagctgtacgaccgtattgcggacttggagcgccaactgccggcctccaatgtgcttcctcttaatccgcgaggccacaaaaaactttga

SEQ ID NO: 334390 - DNA, 2040 bp, Pseudomonas aeruginosa
atgacgaaaaatattctttccgaacttggcctcggcatcgactcgcccctagcgattcctgatgcgccgaactaccgtccgccgtgctggccaccgcagcgtgattggccggtcatcatagatgccgctggccaggtggtgagccgttggggcgatgccatttggcggctcgacgcgtgggcgggaaaacggctcactctcaatttcggcgatggcccagctaagaaatatgtcgccgcgatcgatcctgcgaacgccgatttattgcggaccgtaatcggctggtggctatacggccccaatggagcccgtggataccgaggcctgaaaacgcgcttcgaccagatgcgtcggctgttcgtcttgtgcactcaagaaggcattctcgcatccgaactgagtcattttccgcgcgttgccgaccttctcccggaggtgctccaggcttcccggtccggtgagtttttggcattgctgcacgaactgtatgagcggcgggatgcgctggggttcaccttgttggatcgcgcagggttggcacgcctcgcagcggccatgcccgaccaccagaagctccagaccccctatatcccgccccgcatttggcactatcaaatcacacgcttgcgtgaatgcctggatgactttttggcgcatcgaggccaagtcgaggagtgcttccgcttctgtctggctgcctatcggcacaactctgccagtctccaaggacaacgcaggccacaatcgttctatccgtttcagtggccgtcggatggatcaaacggaaagtggactgggcggcagtactacggcccattcatcgacacagcgcatcggtttggcatggtggaactatttcgtcgctggctgggagtgagcgacgacgaaattcgcattcaaactctgagtcgctacctcaacctcgtgagccgatctggactgtgctatctgctgaatttcagcctcatgcgagtcgaagaggcttggaacctgcgcgccgattgcttgcacatagaacgtgatccgcagtttggcgacatccatgtattgcgcggacgaacgaccaagacgatgtcggattctgaggcactttgggtgacgtccccgtcagctcaggtggcagttgaagccatgcgtgtggtcgcagacctccgcgcagaatgcgattctccccccggcgaggcctcggtgccggatgatccggccaagcgctatctgcttgattattgccttgaaccgtggggaacgaagttcaccaagatcaaccgcacgattcggccatcgattccgagctatgcccatgtgcttcagtggttcgacaagctgttcgaccctgagcaattgcgcattacgccggaagatttcgcattggctcggttggtgacgccgacgctgaccgacgagtttgcggtcggcaaaatctggccgttggcctggcatcaactccgacgaaccggcgcagtgaatatgcaggcatccgggctggtcagcgacgcttcattgcagtttcagctaaagcacgtcgccagagcgatgagtctctactacgggcaaaaccattccagggtacggctggaagagaaggcccatacctactacgtccgcaccatgtacgaaactttgggtaggcagctgcaacagctgacgagcaatcgattcgtcagcccccacggcgagaagcgaaaatctgagattgtccgcctgatctcagcctctgatgctaagaaagcgatcaatctggctaagaaggggacggtcactcatcgaccgattttgctgggcatctgcacgagccgtaccccctgtccctatgggggcatcgacaatatcgctcgctgcggagggggcgattcccccggagaaaccaaaccatgtgcggacgttctctatgaccccgagcaactcgacgaagtcgaagtgttggaggcggtattggatgagcgcctggccgctgccgaggtagatagtccgctaaggacttcgttggaagcccagaaacgtagtgtggagaattatcgccatgtcatccggcaaacctga

SEQ ID NO: 334391 - DNA, 1731 bp, Pseudomonas aeruginosa
atggatagttccgaattcgacctcactttcccgatgcttgagtatggggccactgaaacgccctgggacctccggccgctgctgtttcgcggaggtgcagcagcaaaggtgaagcatgtgggccgccagatcgcgcagagcgaactcggcagtcccttgccggaacgtttcgagctggtgacgcggctgcatgagcacatgactgacgaccttgctggtggcggaagtcgcttctcggtgcagaacaagatcagtgcattgcgtcgattctttgcctggatcgattcagaaaacgtgaatctcagtctcgagacggcggccgacacgttcattcgttggaccgatcacttgctccagcgtcatcgagtcgaacgtaatttcagcgatgggtccctgtacgatctcaccaggctcacggcgacgatgctggaccgagcactggaccgccaagcaagcctgagcaagagcacacgtattcgcaagccgcgcggcaaaggcaaggtacatacgagcaaagcggacaagcagagtctgcaaaacaccttcgcattcggacaccttctagctgacgtatgcgaggcattgacctggagggggacaatggcccccctcccagtgtgtatttcgttacgcaccggccaagtgctggaactatggtcgggattgcagagccccgagaaagtagcggcccgccgtaccaggccgcaaaaccaagcgcaaatcgaagcatccctggcggcgcgtgccgcccacgatgcagatcggacactgcggacccgtttccccatcgtcaatttacggatcgagagtgaattgctgatgttcatcgcccagaccggtctgaacctccagcaagcacataccctgcgggttgagcagtttcattacaccagccacttagacggctaccagatacgtacctacaaaaatcgacgggaaggagaagtgctattcgagatttttgccagttatcgagagtggttcgagcgctatctcgaatggcgttccgaatggtttcccaatgagccggatggtttgctctttccgcttatacgtagcgggggacgaatcctagaagaggcgacgcagttcacgaacgttacgcgcatctgccgcgagcttggcataccgcttgtgagaccgcgaaaactgcgcgggacgcgcatcaactggttgcttcgggagtcccagaatccccaacaggttgcggagttggcccagcatacggtgcaaacgctgatacgcgtatatgccgacccgcacccgcagatcgctatggtggaaattacgcgcttccatcagcaaaccgatccgtccctttcacctcctgctcctggtagatgtgtatcggccacacctgaaccagtgggcacgatgccgaagaatggtccgcgacccgactgcatcaatgctgccggttgcctgttctgtacccagcaccgggatatcgaaagtgaggatcatgtgtggtctctcggtagcttgcgccacctcaaatcgcttgaactggcacgctaccgcccacccagttcgggtaagcacctgacgacagagcatccggccctgctggtgatcgatcggctgacggccaaactgcgcttcttcgaagaaagtagcgaggtccgcaggctttgggtcgaagaagccagagcgcgcataagtgaaggtgactaccacccggcctgggatggcttcatccaattggcagaactgcgacaaagatcagcatga

SEQ ID NO: 334392 - DNA, 282 bp, Pseudomonas aeruginosa
gtgtttcggctcgacctgcggcacaagccagtcgtcgtcctgagcaacaacgacggctgcgtaatcgctcgctcagctgacgccaagccctggctcaaaatgggcgagcccttttttcagatcaaggacaagctccgcaagcacggcattgtggcgtgctcgtcgaactacgagctctatggtgacctatcggagcgtgtgatgaccgtcatcgagtccatggtgccggcgtcggaggtctacagcatcgataagagtatgttgtatagtgcggacgcctaa

SEQ ID NO: 334393 - DNA, 768 bp, Pseudomonas aeruginosa
atgagggttgctgaagttctcgacgccggcgcggtagccggagggcgccaggctggcgccggactcggcgacatagtcgctgacgccgctctcggcgatcggctcgcggctgaagtagtcgtaggccggttgccagtgtgggtcgaagtacagggcgaaagggtggaactccaccaggacgaagcgcccgccgggaaccagtacctgggcgatgccgtcggcccagcgcttgaggtcggagagccagaccagcgtgccgtaggaggcgaagacccgttcgaagcgttcgccacgggtggcggcgacgggcagccagcggaggatgtcgtcgcgctggaagtcggcggcgatgccgctgtcgcgggacaactgacgggcgaagtcgatggcgctgtcggcgatgtcgaccccggtgacgcgggcgccaaggcgcgccaggctcaggctgtcctgtccggcgttgcattgcagatgcagcaggcgcaggccgtcgagatggccgagcagttgcagttcctcgggatagagcgtggaaccgccgttgcggaagaaggtggcctggtcggccttgtggctgttgtgcgcccgggtggcggcgttccacgacagccggttggcctcgtgcaggtcggatcgcatggttcgactccttccctggagtgcgccaccgcgcggatggcgggtccgggggattacatgtccttgatgctgcgcacctggtccttgttgacgcgggtgcgcttgccgtccagttgctccagttcgtag

SEQ ID NO: 334394 - DNA, 492 bp, Pseudomonas aeruginosa
atgcgcaccacccgactcaaacacaaagtcagcgccccgggtcagggcgaactgttcgccgtcgaccagattgcgggcatctacaaggccaaccccgacaagcccctgacgaacaccgcgctctacgagatcgtcaccaaccaccttggcgtttctacggaagccttgaacgagcttgcgcctgttggggagagtgggcagaaacacagcctggttcgccgcgctatccggtggactcagcaatcactgaaacagatgggtatcatcgagcgcgtcaacggagagcgcggcgtgtggcgcttgaccgaagatgccaaacgcgacctcaatccagcgaagtctggtgtgaaggtgctcggctttcgtactgacctgggcctggcgatctgggggccaagcgcggatatcttcaaaaggctcactgtaccggtcgtgcttgcgctccattttgtgggagaaactgctgatcagggatttagaagccaatgctag

SEQ ID NO: 334395 - DNA, 357 bp, Pseudomonas aeruginosa
atgaacaacgattttctcaagcgcgtttcccagtggatcgtaggggaagatacgggtctttccgctatagcgatttggtcgagcatgatgggcgtcctgcccgaggatggcttctgcacaccgtccgatccttctgacctgggtcgatgcctgcgcctgctggaactggtacccgagtggaaggcgcgaatctcggagatggccatccacggacgcgaatgggctgctctcgtttcgcattgggaggaactccatcagctgatggacgatgaggtggggatcgactggagtaaggggaacagtgccctgcgcacctacgaacgaatgaaggccattcaaggacatcatcgaacctga

SEQ ID NO: 334396 - DNA, 1125 bp, Pseudomonas aeruginosa
atgacaaccaagactcttcgcgaagcccttaatcactaccgtgagaaagtctcgattctcaagaagggctacaagcaagaatgctatcgcattcagcagatagccaactcgctcctgggtgagaaaatcgtgcgcgagatcacatctgttgacatcgcgacttacagagatgaaaggcttcagcagctcaatggcaaaactggtcaacagatctcgccggctaccgttcgcctcgagatgtccttgctgtcgaatctgttcgagcttggacgtatcgagtggggcatctgcgatgacaatccagtcctcaaggttagaaagcccaaaatgccgcctggccgtgagcgtcggctgacctcaagagaggaacgcctgatcctccgttacgcccacaattatgggaactctgagctctacgcgatcatcatcgttgccctggaaacagcgatgcggcaaggtgaaatcctcaacctctcgtgggaacacatcaacctcaaaacgcgcattgcacatctccccgatacgaagaacggaactcgccgagatgtccctctctccatcaaggcacgagacgccttaatccaactaggtgttgccggcaatggccgggtgttctcctacacgaacgccggactcaagaccacatggcgagtcatgctgctccggcttggaattgaagacctccacttccatgacctgcgtcacgaggcgattagcaggctctttgagcttggaaccttggacatgatggaggtcgccgcgatcagcggtcataaatcgctttcaatgctcaaaaggtacacccatctcaaggcgcagcgcctcgtcaagaaattggaaggaggtaagagccggggccgccaggtggtcatcaaccaccttgttccgtatcccgcctctgtagctcggacaagcaaggacgtgacgattcggctgctggacttcgaagggctgacggcttcagctgctacgaaggagtctgcgattaccttggcacaggaccaactgttgaggcgcctgatgacctcgatacgggacgccgaaaccataccccagccggatcagtacctggacatcgttcatgaggcggacatcgtcatgatcgacccgcttgcagcagcataa

SEQ ID NO: 334397 - DNA, 771 bp, Pseudomonas aeruginosa
atgcgtggctcacctggtcgccaagcgggcttctcgcttttagagctgtcgattgtacttgccatcatggcaatgcttgccgtcgccgctgtgccgagatacatggaagagatcaatcggaaccgttcgcgagttacgactgaaaacactcaagccatcctggacgcggccagggcctaccggctgtccaaaggagcctggccaggtggcgcatcctgtatcaatgccatctctgaaatggtgagccaatccccggcaatgctgccctctggcctggacgtgaacaaatacaacaacactgtctccacatcctgcacggcatggacgttcagcgttgaccagtccatcgtggaagactgggatggggtgctggccaacaacctaccggggacttcgatcgtcaatgcatctcaaaaccgaatccgaagcaccattgggataccgggctcggagacagctaacgacgcgaagctatctcgcgtagctgagcaaaacgtagaactcaaccggatgagaaccaacctgctgttgggcaacaacgacatcaaggaggttggtcgaatcgaagcggtcaatgccgccatcagtggactggcagaggctagccagttgagggtgaatggcgtatctcagttcaacggagaaggtaccttccaagacgggatttcgctgcagaaggtcgtccaggagaacacgtcctgcccaaagactggtgcgatcgcaaggtctagcgccggcgtaatactttcttgccaatccggtattatttag

SEQ ID NO: 334398 - DNA, 435 bp, Pseudomonas aeruginosa
atggttttgattgaaatggcgctacagcgtgcgctgagcgcatatatgggcaaggtcgataaggccggcatgccttatatcttgcatccactgcgtctgatggccagattcactgacccattcgagcaagcggtatctcttctccacgatgtgatcgaggacagtgacaccaccgcggaggatctactcaacgaaggctttccggagttcgtagtcgaggtcgtcgtcatcttgagccgtcgacgtggagagagctacgcggacttcatcgaacggatttgtctaaacccgctggcgcgcaagatcaagctggctgacatcgaagacaacctaaacgtgctgaggctggcgagcctcggggagtcggatcttcgtcgtgtgtcgaaataccatcaggcctggaagcgcttaagcaccttcgaagcaggccagtag

SEQ ID NO: 334399 - DNA, 345 bp, Pseudomonas aeruginosa
atggttgctgatagttttaggggtaagcccgcggtcctgcagaacacctctgcgttgagtgtgctcctaacgcacttggcagaatctggctggcttccgcatgaggtactgcaaggaagcgaatggctgtacgcccccgacgtaacgaaggtccaggaaaagattatttgctgcgacccaccggtgattcggctgttgaagaacggcagcaacactgcgctgattcacttgaagtggggcgaatcgccttccaggatggtcgtggattacaccaagtcctggggattcgagcccgtgatccagcaggcgctggcgcgcatgaatgaagcaggtgtcagccagtag

SEQ ID NO: 334400 - DNA, 423 bp, Pseudomonas aeruginosa
atggctgacagcctacccgagcgcatcaaaatgaagatcacaatcgagatcgatgcgccatctgatgccctggaagaaatccccaagatgatcgataacgccatcgatggggtgaagttcggatctgccagcggtaatggctttctcttggggcaaaaagggtcctaccgctacacagtggaggacaatcttccgagaaaaccagccacgcttgagactctgtttgaaatgttcgacggccagcttgctcctggggagctgacctctgaggtgagcatggccattctggctgtcggaggagaggatgcactccagtggtggacccaacttggcgagcatgggagatacagctggataaacaaaccaggcatcaacaccccgatcgacgcatggcaggaatataggcgccagcaggggcactga

SEQ ID NO: 334401 - DNA, 639 bp, Pseudomonas aeruginosa
atgtgcagccactatgaggccccggaaactcagcggttgatcgatggatttggggtagctcccgaggggcagttcaagatggatctctggccctgctacgaaggtccatttatccgtctgcgtgacactgaatcacctgatgaggaagggccggaatttgaggcgttagtcggccaatttgggctcttgccattttgggcaaaaacacgaacgttggggcgtgatacttacaatgctcgcaccgagactgtggcgagcaagccttcctatcgagtggcttggcgtgaagcgaagcactgcatcatcccggccgcggcaatctatgaaccagattggcgtacaggaaaatcggtcccaactcgcatcagcaggaaggacggcggcatcatgtcgatcgctgggttgtgggagcggtggaagactcctgagggcgatttgcattcctacacgatgctgactgttaatgcggatgaccacgcactaatgcaaaattttcataagcctggttcagaaaagcgcatggtcgtcatcctgccaaacgggctgatccaggattggctgcgcgcgccggcggagcgaagtatggatttcatgcagcagtaccctgccgatcgcctccaggccgaagctaggggatga

SEQ ID NO: 334402 - DNA, 174 bp, Pseudomonas aeruginosa
gtgtacgaagaccaccagctcatttgcagcaagtgcagcgaagccttcaccatccgcgaattcagtcccaatgcgctgggcgacctggaccgctggccgcttgaatgtccgcactgcggggaaaccaccgtggagaaatcggcgggctacttcgaggtgatccaagaccaataa

SEQ ID NO: 334403 - DNA, 2967 bp, Pseudomonas aeruginosa
atgccccgtcgctcgatactctcggcttctgagcgcgagactttgcttgcgctgccggaaagccaggacgatctgatccgctattacaccttcaacgagtccgacctgtcgctgatccgtcagcgacggggtgatgccaatcgtctcggctttgccgtgcaactctgcctgctgcgctaccccggttacgcgctgtccagcgacagcgtgctgccagatccggtcattgagtgggtggcacgacaggttcaggctgcgcccgaaagctgggcgaagtacggtgagcgcgatgtcacccgccgtgaacatgcccaggagttgcgaacctacctgggcttgttgccgttcgggctgtcagactttcgcgccctggtacgtgagctgaccaaccttgcccagcagaccgacaaaggtttgttactggctgggcaggctctggagagtctgcgtcagcaacggcggattttgccgaccctgacggtgatcgaccgggcctgctccgaagcagtggcgcgagcgaaccggaggatctaccgtgctttgatcgagccgctaagccagcagcatcgcaacaaactcgacgaactgctgaccatcaagacaggcagcaatagtacctggttgacctggctacggcagtcaccgttgaaaccgaattcgcggcacatgatggagcacatcgagcggctgaagatttttcaactggtggccctgcccgaagggctcgaccggcatatccaccagaaccgcttgctcaagcttgcccgcgaaggtgggcagatgacgccgcaggatcttggcaagttcgagaacgaacggcgctacgccaccttggttgccgtggtgctggaaagcaccgcgacagtgaccgatgaactggtggatctacacgaccgcatcctagtcaagctgttcagcagcgccaagaacaagcatcagcagcaatttcagaaacagggcaaggcgatcaacgacaaggttcgcttgtactcgaagataggtcaggccttgctggaggccaaaactaccggtggcgatccgttcgccgccatcgaggcggtcatcccctgggacgaattcgcccagagtgtgaccgacgccgagctactggcccgtcccgaaaccttcgaccatttgcacctggtcagcgaaaacttcaatactctgcgccgctacactccagcctttctggaggtgcttcaactccgggccgcaccggcagctcaacgtgtgctggatgccatccagcagctgcgcgagatgaacgcagacaacctgcgcaaggtgccatcggacgcaccaactgcgttcatcaagccgcgctggaaaccgctggtgatcacgccggaaggcattgaccggcgtttttacgaaatctgcgccttgtctgaactgaaaaacgcgctgcgttccggcgacatttgggtcaagggctcacggcagtttcgtgactttgaagattacctgctgccgcccgcgaagtttgccgcgctcaagaaggaacaggcgctgccattggcgaccaatcccaacagcgaccagtacctagaggagcgcttgcagctgctagagcagcaactggcgaccgtcgccaagctggccaaggacaatgaactccccgacgcgatcctcacagagtccggactgaagatcacgccgctggatgcggcagtaccggtcaccgcccaggcgctgatcgacaagaccagtcagctactaccgcgcatcaagattaccgagctgctgatggacgtggatgagtggacaggattcacccgtcactttacccacctgaaggatggtgctcaggccaaggatcgaacgctgttactgtcagcaatccttggtgacgccatcaacattgggctgacgaaaatggccgagtcgagtccgggtatgacctacgccaagctgtcttggctgcaagcctggcacatccgtgacgaaacctactcggcggctctggctgaattggtcaacaatcagttcaaccacacctttgcggccaactggggagacggcaccacctcatcctccgatggccagcgcttccgtgcaggcggtcgaggcgaaagcaccgggcacgtcaacccgaaatacggcaacgaaccagggcggctgttctatacccatatctccgatcagtacgcgccgttcagtacccgagtggtgaatgtcggagtgcgggattcgacctatgtgctcgatggtctgctgtatcacgagtcggatctgcggatcgaggagcactacaccgacacggctggcttcaccgatcatgtcttcgccctgatgcatctgctgggctttcgttttgccccgcgcatccgcgacctgggcgaaaccaaactgtatgtcccgcagagcgtacaggactacccgacgctgcgcccaatgatcggcggcacgctgaacattaagcacgtccgcgctcactgggacgagattctgcgtctggccgcgtcgatcaaacagggcaccgtcactgcctcgttgatgctgcgcaagctgggcagctatccacgtcagaacggcctggccgtggccctgcgggagctgggccggatcgagcgcacgctgtttatcctcgactggctgcaaagtgtcgagttgcgtcgtcgcgtgcacgctggattgaacaagggcgaggcgcgcaatgccctggccagggcggtgttcttcaaccgccttggtgaaatcagggatcgcagcttcgaacagcagcgctatagggccagcggactgaacttggtgaccgccgctatcgtgctgtggaacaccgtctacctggagcgggcaacccaagggctgactgacgccggaaagccggtgaataccgatatgtatcaatatctgtcgccgctgggctgggagcacattaacctgaccggcgattacgtctggcggcagagccgcaagctggaggaagggaaattcaggccgttacgacagctcggaaagccttag

SEQ ID NO: 334404 - DNA, 243 bp, Pseudomonas aeruginosa
atggccaacctgatgctgtcggtcatgggagccttcgccgagttcgagcgagcgctcattcgcgagcgaatcgcccaggccaagcaacgcggcggttaccgggctcgtaaaaaagccctgtccgacgaacagactgtcgcagtccggcaacgggccgctgtcggtgaaccaaaggcccagctagcccgtgagttcggtataagtagggaaaccctttaccagtacctacgcacggatgactga

SEQ ID NO: 334405 - DNA, 132 bp, Pseudomonas aeruginosa
ttgcaggggcaacgtatcggctatgtccgggtcaacagctacgaacagaacccgaaatgtcagctgaaacaaaacgaggtgaacaaactgttcaccgacaaggcctctgccaaggatacccagcgtccgtaa

SEQ ID NO: 334406 - DNA, 1044 bp, Pseudomonas aeruginosa
atggaaattgtccacgcgacccgtcctgatggatcaacggtacagctacgagttgatggttcggaggtcggcacaaccgacagcgaccagaagctgcttcatcttcttcccaagctacttttggatgaacctttaactgaggccgtatccctggaccgagtggtgttggaggtcatctccaacgtcgacggtttgctcccggccgaaggcgtggtgatccggcagccgtaccccaattcctcctacctggtcggtggttcggtgcgtaatcgcaatggttggtgcgtaccggcggccaatctccctgagcgcttcgaagtagagttccgctggaccttcgtgtcactgctcagtgacggaagtgattgggtggttcgccatttcatccaactggagctggagcaaggcccgtttcggacgtacaccatggcggtgtccaactggccaaatggccgtgcctcggtcccgaacatgtaccgctatgccatggcatttctgaagccctcccaggtgctggagcagcacagaaaaggaaggccgacgctgaatgtcggcctcctacgtgatggcatgctcggcgtgactttccgagaggagatgcggattcccacaatcccctacgaacaggcaaccagcattcacctttaccagaaacagcagctacatgaagtggtccaggttacggatttcacgttgctgaatgatgagcacaaggcaaatggtgccctggagatgccagcaagagtgcttctggatgcgatctctctggcagcaaaggttccctacaagcgccccgaggtaccttccgcgacacctggaagttccgaggattgccttgggcaattggaatcgcaccctgctctgcagatgctttccgactggtggaacgctcaccggattccggtggctggagagttgcctgcggcgatggtcatgccctacatccgggttcaagatgataactcctactggtgtgggtaccgggagacacccaacagcaccattgaggggagcctacagaattcggaaaaaatcgtacgctaa

SEQ ID NO: 334407 - DNA, 558 bp, Pseudomonas aeruginosa
gtggctgacctctacaagtcctacggtgatctggagtcgatggtatcccgactgatcagccgccaggttcccaaccagatcgaaaataccttcggccgctacacggcgattcgtgcggttcaagaacgtgggcagttcgtgatcgacgctgccgcggcgctcaaaggctccgtcaatggccctgtcattatcgacagcattcagatcgagaatctggatttcagcgatgcctacgagcgctccatcgaggatcgaatgaaggcggaggtccaggtcaaaactcgtgagcagatgctggcaacggagaaagtccaggctgagatccgcgtgacccaggcgaacgcagaagctgaagccaagctcgctcaagccaaggcggacgccgaggcgacacggcttcgtggcgaggctgaagccgaagccatcaaggctcgtgcggcagcgttggcgagcaaccagaacctcgttgagctgaccaaggccgaacgatgggatggaaaacttcccaccaccatgatccccgactcggcaattcccttcctgggctccaagaactga

SEQ ID NO: 334408 - DNA, 201 bp, Pseudomonas aeruginosa
atgaggataatccgcctgaaagaggtcatggatcttactggtctttcccgatccacgatttataagtacatcgcagaaggtcagtttccagttccggtgccgttaggggatcgatgcgtcggctggctagaaagagaagttcacgactggattctcgctaaggtggctgagcgtgataaagctttaggcctggctagctga

SEQ ID NO: 334409 - DNA, 405 bp, Pseudomonas aeruginosa
atgctgcgtcatcccgataacaccaaccttcacatccacactggtgatctgtttgaaggtcttccagtcatgatcgagaaggggccgtttgtaactgagtacctgactgcattgaaacgcgccgttgataacacgctgaaccagtatccgaggctattgggctttagaattgatctacgtctgccagtcggtatcaacttgcctgattatgcatacaccaatcaggtcatcagcaggtttattgaatccttcaaggccaagatcgagcacaaccgactgaaggcccgtgagcggtatccctacgctcatggatgtaaggtccgttacgtatgggctagggaggaggggacagggcaccgtccgcattatcacgttctgattctgctgaatcgagatgccttctag

SEQ ID NO: 334410 - DNA, 243 bp, Pseudomonas aeruginosa
atgggcaaatcccgagggggactgagcaccaagatttacgcagccgtagatgccatgggcaatccggtgcgtctgctactgacgcctggtcaagcctcgaaatacagacaagccgaagcgctgatcgagggttttacccccgaggcggtattggctgacaaaggctatgactctgacgccttcattgggctatccagcgcaggggcgcggaagcggtcatcccctcgaaaagaaatcgcctga

SEQ ID NO: 334411 - DNA, 1830 bp, Pseudomonas aeruginosa
atggatgcccacaccctgcacgatcagcaacgtctggtaattgcccgccagcgtttcgtcgaaggtgtcgccctgccctccaatcttctgccgagcaccatcgctcactcctgggcgcgatcacgtgaagccggcctgttgccctggcaatcctggctggcagaacaggacgacagtctgctgccgcttgatgagtcagaccagcaacttgcagagtgtgtacgaccagaaatcgaccgactctggcagcaaatcggcggtgcttcatggacaattttctgcgtcaatacgcggggggtcatcgtccacgcgcgccaagcacgcacgctcgacgggccactgctgccgttgcaaattggacgtcgcattcaggaatccgacattggcaccacagcacccagctgcaccttggccgaaggtgttccgatggtactgatcggcaaccagcattacctcagtgacttcgagcatttcttttgcgtgagtgtgcccatccggggcctgcatggtgaagtgattggcgtgctggacatcacggggatcggtgaccgtcaggctggtgctgtattggaacaattgagtcacgcggcgatggcggccgaaaatcgcttttttaccacgctgggcgattgccggatcctgtcgctgcagcatgacccacgactgttgggtacgccattgcagggcctcttggcagttgaccagacaggacgcattcaaaatgccaatcgcgctgcccagcgattgttgggacttgaacaatttcgccccataggcaaacgcctggatcaactgttcgaagaaagcagcgctatcgatctgcaccgagcacagcaacaattgaccctcagcgacggttcccggttgtatgcacaggtgattgagcaacgtcgagaatcaactgcgctgcacgtctgctccccgctcctttgcgtgtccatactgggcgccgaccctcagctcaatcgccagttggacaacgcccgcaaggccttcgctgcaggcgtccccattttgctgcagggcgaaacgggcaccggtaaagaggtattcgcccgagccttacatgatcaatggaacgcccaagctcccttcgttgcgatcaactgctcggcgatcccggaaagcctgatcgaggctgagcttttcggttatgtggaaggcactttcaccggtgcgcgcaaaggcggggccagcgggcaactggaagctgcacatggcggaaccctgttattagacgaaattggtgatatgccggcggcgctgcaaacccggttattgcgggtgctccaagagcgcgagatcactcgtctgggtagcacgacacggcgagccctggatgtacgggtgatcagtgccacccattgcgatctgcagcaacgcatgcttgataaaagttttcgtgaagacctttattaccgcctcaatggcctgaaaatccgcttgccggccttgcgtgaacgtcaggatctgaacaccttgatcgacctcctgcgccaacgctacggcgctccaccgctggagcaccaggcattaatggctctgcaccgccaggtctggccaggcaacattcgccaactggaacagacactgcgccttgcggcggcgctggccagtgaccaaccgatgatactgctggagcaccttccagcagatatgcgagctgaaagtgagcaggagagagggagcgatttgcaggacgccgtgcgccgtactgtcgaatcagcgctgcaggccaacgctggaaacatttctgccaccgccagccagctcggtatctccaggaccacgttgtacaaaaagctggggcggattaccaagtctgagtaa

SEQ ID NO: 334412 - DNA, 891 bp, Pseudomonas aeruginosa
gtgcatatcatttcccgaaattccttgggcttactggcgttcgcgctgagttcaacaaaagctctggccgtcgacgtcaatgctggcgactacaccgccctgcccgccggtaccaatgtcgccgcctggtatcagcaatatagccatgctgatcgcttcaacgctgatggtgcgcccgataaccggcgggataccagtctaaaatcgaatatcagcatcctgcgattgatccacttcatggacatcggcggtatgaccgtcgacccgcaaatactcctgcccttcggccatgtgtacgacgcgcgtatcgcaggccagtcgttgggtagcgccagtggtctggccgacccgatcatcggcgctaccttctggctggtcaatcagcctgccgccggggccagtggccgctacttcggaattaccccttttctatacctgccgtggggcagctatgacaaacacgacacactgaaccttggcgagaaccgttttaagggcgatttgcagttgggctgggttgagccactgtggggtaaggtatccatggagctgtacggtgatgccgtggtgtatggacataatgatgatgctggcaccggcaaccagacgctcaaacaagacgcgacctatcagctacaaggcaacttgcgctatgacttcaatccggcccaacgcgtggctctgggctacagcaccagcacgggtggcaaacagtatctagatggtaattacaccgggcaaaaaaccgaggtgcagcaagtgcgcgctgaattccagcaaatggtcggtcgtactgtgcagctcagtgcgcagctaacccatgatatccatgtggtaggtggttttcaggaggacataggcgtcaacctaagggcgctgctgccgttttga

SEQ ID NO: 334413 - DNA, 651 bp, Pseudomonas aeruginosa
gtgaaggtgagccgcgaagcaccgctggagttactggggccactgggctgcggtatccagacgggggcaggagcagtgatcaactcactcaaggttactcccggtagcagctttgccgccttcggcggtggcgcggtggggctgagtgccgtgctggcggcccgggtggcgggtgccaccacgatcattgtggtcgatgtcgtcccttcgcgtctggcgctggctaccgagttaggcgcgactcacgtggtcaacagcaaggacgccgatccggtggcattcatacgcgaaatcaccggtggtggcgtcaatttcgcccttgaatccacgggtcgcccagcggtattacgccaagccgtcgatgcactgggtagccgcggcagtctgggggtcgtcggcgcaccggcgctaggtaccacagcggagtttgacgtcaatgacctgctcttgggaggcaagactattcgaggcattgttgaaggtgacagtgtgccgcagaagttcattcccgagctcgtctccctttacctgcaagggcgtttccccttcgacaagctggtgaagttctatagcttcgaggacatcaaccaggcagccgaagacagcgaaaaaggcatcactctcaaaccgatcattcgcattggcggctga

SEQ ID NO: 334414 - DNA, 279 bp, Pseudomonas aeruginosa
atgaacacacctgtctaccgcccgatcactgctgctgtcactcgtggcaaaggcgcaccttttgcactggaagccgcgcagatccgcaatccccggggcgatgaagtgttggtgcgcatcgtcgccaccggcatgtgccacaccgacatgatcgtccgagatcagtattacccagtgccgctgcctgcagtgctgggccatgagggcgcgggagtagtggaagccattggcccactggtcaaagggcttcaagtgggcgatcacgtagtaatgagttaa

SEQ ID NO: 334415 - DNA, 1479 bp, Pseudomonas aeruginosa
atgagtagcacgtccttgcctgccatttttttacctgccgaactctggaacgatcgcctgttcaccgggacttgggaggctggccccatcgcagccacgcaagtactcgaacccgccaccggcaacctcttgggctacgtcgccaatgccgatgccgcgcgagtggctgcttcggccaaaaccgccagcgccgcacagacctcttggcaccagcagccttacgacgagcgcgcggcgttgttccgtaaagccgcgaaaatcgccgaacaacacttcgaggccatcgtcgactggctggtgcgtgaaagcggttcgacccgtgccaaggccgcattcgaaaccagtatcagcatcaaagtcctgcacgaaagcgctggtctgccctcgcgtagtcaaggtgaagtgttgccttcggtacctggccgtctgagccttgctcgccgccgtccactgggtgtggtgggagtgatctcgcccttcaacttcccgctgtatctggccattcgggcggttgctccggcgctggcaacaggtaacgccgtcgtactcaaaccagatccacgcacggcggtatgtggcggtttcgtgattgcccggttgttcgaactggcggggttgcctgctggcttgctgcacgttttgcctggcggtgtcgatgcgggtgctgcgctgaccagtgatccgcatgtggcgatgatccagttcaccggttcgaccggtgccgggcgcaaggttggtgaagctgcaggtcgtcatttgaaaaaagtttcgttggaactgggcggtaaaaactcattgatcgtgcttgatgacgccgatctcgacttggccctggccaacgccacgtggggcgtttacctgcaccagggacaaatttgcatgtccacaggtcgcctgctggtacaacgtgcaatctatgaccgcttccttgagcgcctagtggccaaggccaagagcctgacggtcggcgacccagccaccagcgaagtacacctgggcccgctgatcaacgcccagcagcgtgatcacgctcaccgcgtagtgcaagccgcgcaacaagccggtgcgacgctggaagcaggtggtggttatgaagggctgtttttcgaaccgaccgtgctcggaggcgttacccgcgacaatccggccttcaacgaagaaatttttggccctgtggccgtagttgtgcctttcgataccgacgaagaggccgttgctctggccaacgatacggcatacggcttgtctgctgccgtactgtcccgggatgttggtcgcgcactcaagctcggtgagcaactgcgtgtaggcctgctgcacatcaatgaccagacggttaacgacgaggtcatcaatccgttcggcggtgtgggcgcatcaggcaatggcaccagcatcggcggcgctgccaactgggaagaattcacgcaatggcaatggctcaccgtcaagggtgaagcaccggcctacccactgtaa

SEQ ID NO: 334416 - DNA, 1500 bp, Pseudomonas aeruginosa
atgggaaatatggtgggttacgcccatttgatcaatgagatgaggctgaaggctatcggggtaaagaacccagcactcgttcaacccgtcacccgcattgagcggatcaacggcgcgcttgcagtaccgcaggcggttgcgccggaggctggggattttctcgcccacatcatctttgcgctcaaacatgagggcgtcaacctctctattttggcgcaggctctgcctcgcattgaagctcgaatccttgtcgaggccataacccaatctcccagcagcggctatctgcgcaaagtctgcttcctctgggaagcctattccgacttattactggactacacggacaagcctcggggccctggcgtcctgctgtttgatccagagcggtacatcacgggcccatcggtgcgaaacaaccgctggcgcgtggacttcaatggtcttgggacgctccaatattgcgcgacggtagaacgcacgcctgaggttcaggccctgcttgaatacgacattctcggccgttcgaaagagttcattgcctccttgcctaaggaaatgatggatcgcgccataaactgggcgtacctgagcgaaacagattcttcatttgcgattgaaaaggaagcaccaagccagcagaagtcagagcgttttgttcaattactgcgccaggcacatgaccgccagccgcttaccgaagactacttggtttctttgcaaaacaatgcgatttcccaaccgctcgaatgggcggtggccttccggcatgaacaaaaccacctgaccaactcctttcgaggagcggcgggggtcacctatatccccccccctccagatctttgccgggagctgatgttcgaactcatggccttcgcaaaccgtgcacccttggagcttgacccgctggtggccgccggcattgcctcattcgggttcgtcttcttgcaccccttcatggatgggaatgggcgactgtcgcgcttcttgatacaccaggcattgtgctgcagtggtgcgctggagaacggcttgttacttcctgtctccgtggccatgaaacgagaggagcaacgctatctagaagctctgcagagcttctcaaaacctgcacggcaattctgggacgttcgttggatcgatgccgacaacatgtcgcttaacttcaccggcgacccaagcctatatcgctactgggatgcgactgagtgtgtggccttcacgctggaaatggccaagcgggcattggaagtcgaacttagggaagaaactgagtatttgcaacgatacgacaccttgctcaaggtggttaatgacaactatgacgtgcgcggcaacctcttgagtaagctgattatgcagtgcttagaccagaacggggtcgtatcaaagggtcggcgcaagcaatacaacgggtatatccaagaggaggttttcgacttcctggaaggtcacgcccaggcccttctggcagaagcctacacagagcccgacgacgaatag

SEQ ID NO: 334417 - DNA, 354 bp, Pseudomonas aeruginosa
gtgtatccgcgcggcggcttcctgcaccaggccgacgaccacaaggctggcgccgtggtggcccagcgcgccggcgatgtcgtcacgcgccgcgggcagatccacgtctaccagccgctgctcgcgaactcgcggcccggctactggcctgccggcgcgctgatggaaggcgatgcctcgaccggcaagtggcaggaactcacgcccgtcctgtcctcgtcctgcacggtcttcccgcgcagcggcttcctgacccaggcccagcaaggcgactacgcctgggcgctgtggcggccttattcgtgctgcgaacgccggggccaggtgttcctcggcagcgtcgatttccaatga

SEQ ID NO: 334418 - DNA, 1395 bp, Pseudomonas aeruginosa
atgaagcgtcctgaactgatgaacctctccaccaaggcatgccgcctgctgcgccccacagtgctggccggcgcgctcgccctgggctgcggcctcgcgtgggcgcaggctggcttccagaccagcggccccgtcatcggcgatgaagtcatgtactcgatcggcggcggcagcgcggtatccatgggccgcgccgccggcatgcgctcgatcggggtcggcgtgggctggaacagcaatctcatctgcggcgacatgagcatccagaccacgctgcgcaaccagctcaacggcatcacgaacggcttccagcagatcatgagcaacgtgatccagagcgccacgagcgccgtggcatccctgcctgcgctgatcatccagcgcgccgatcccggtctgtacaacctgctgaccaacggcgtgctgcaggcgcggctggatttcgaccgctcgaagctgacgtgccgcgccatggccgagaggatggccgacacggcgggcggccagttgggctggagtcagatggccgaaggcatggcgttgcgcgatgcggtgtcgagcacggatgccgtgtcggcgatcgagcaggccgaaacgcgccgtggcaacgatggcgtgccctgggtcggcggcagcaatgccggtggcgcgggccagcccgccgtccgggtggtcggcgacgtgacccgcgcgggttacaacctcgtcaacggccgcggcgtgactgacacgtcctccatcgcgcccaccagttgcgcaagcctgtcctgccagacctggacgtcgccgcagcaggccaccgaatgggcgacacgggtgcttggggaacaggtgcagcgcacctgcgatgcctgcaccaagaccgagacggtgcccggcgtcggactgacgccgctgatccaggaggagtacgaggagaaactggaagccctgcaggaactggtctcggggacgcgcaacacgacgttcgagcacttgcgtgcggccggcagcacctcgctgcccattacgcggggcgtgatcgaggcgctgcgtgacgagccggacaaggagctgctggcgcggcgcctggcatcggaggtcgcgctgtcgtcggtgttggagaaagcgttgctgctccagcgcacgctgctgaccggcaagaaggaacccaacgtggcggcgaaccagctggcggtcgcggcggtgaaccacgaaagcgacacgctcgaccaggagatccgcaaccttaagaccgaactggaactgcgccgcgagctggccaacaactcgccgatggccatcatccagcgccacggcacgcgcgcggccggctcgcgcggcatctacgaaggcgacccggtgcccgaccgcctcgaccagttgcagaagggcaacccagggagccggccatga

SEQ ID NO: 334419 - DNA, 360 bp, Pseudomonas aeruginosa
atgagcacgacctcgtggcgcccgcgctggctgttcagccggcgcgtggggcaggcactgctgtgggcggtgatgctcgtcgccgcggccgtgggcgccaacatcgtcggtatctacctcgtcggcagcgttgctggatgggagcagtggctggtggctgccgcgggctacttcctggtgtggcggttgtgcctgtatggggcgacggcctatggctgggtctggatgcgccgccggctgctggcacgcgaggaacaaaacgggacagatgggcaggcacggcgccgcctggtgcgcagcgagatcgccggcgtcttcgccatcgtggtgctggaagccagcctgctgatgcagggctga

SEQ ID NO: 334420 - DNA, 1524 bp, Pseudomonas aeruginosa
atgacgcttttcacgaccgactacctggagtactacctgaccctcgtgtcctggatcgtccataacggcatctgggcggtgctggtctccagcggtgtcttcgcgctgccgttcgttgcgatcatcgtgcaggaatggttgaaggcccgctcggagggagccgacgaaggcaacaagggtgtgctctcggctgcgcgcatcgagaaccgggtgttcgtcgccatcgtggtggtgatgtttgcgggcatcccgttcatcgacgtggatctcaacaccatccagtacgacagctcgcgctcggcccagtgccaggtcagcgtgccgcagcccacggataccggctggtcgcagtccttcagcaccatcaacaaccagagtgccaaggtgccggtctggtggggtttcatgcacgcgctctcgcgcgccgtcacgggggcctcggtggccgcaatcccgtgcggcaccgatctgcggcagatgcgcatggagatcgacgccacgcgcatcgacgatccggtgctggctcaggaggtggcggatttctcgcgcgactgctacgggccggcgcgcgccaagctgttcatgcagcgcccgaacctcgatgagacgcagatgcacgacgtgacctggatcggttcgcacttcttcacggacacgagcggctactacgacacctaccgctccagcacgccgcgcgacgactggccctacgacagcacccgcgatgcggggcttgcgcaagtggccagcggtggcggctacccgaactgcaggcagtggtgggccgacggcagcaacggcctgcgtgcgcggctgctggggcaggtggacccgagcctgttgaatcgcctggcgggctgggccggattcctgagccgtgccgaggtggacgattccgtgatccgcgcgattgcctcgccacggcagcagaagctcaaccagggttcggtctataccgactacggcggccagatcgacaagaccttgccgaacatcgtgacgcgcgcggctggcgacgtcgggatggccgtgggggcggtcgccgcgttcccggcgatggacgtggtgcgccaggcgctgcccatggtgctcgcgctgctcaagatggcgctcgtgatctgcatcccgctggtgctggtcgtgggcacctatgacctgaagacggtcgtcaccgtgagcgtcgtgcagttcgcgctgttcttcgtggatttctggttccagctcgcacgctgggtcgattcaacgatcttggatgcgctctatggctgggggttcggctggaaccggccgcacaccaacttcgacccgttggtggggctgaacaatgccttcggcgacatgcttctgatgttcgtcatgggcacgatgttcatcgtgctgcccacgttctggatcatggccttggcttgggcgggtgttcgcgccgggaatgtcctgcaaggcctcgccggggcaacgggggacgccaaggctgccggaggcaagggcggaggcattgcgatcaatgccatctcaaaaaagtga

SEQ ID NO: 334421 - DNA, 363 bp, Pseudomonas aeruginosa
atgaacacgacgacccgaatcagcacctcggagcgcctcggccgcaccgtcggtcgtggatggcgcacttatgtgcgtggcgagcgacggttgtcgaactggctcgcctccaagggggtgccggtcgttggtgccgctatgggattgtgggtggtcaagctggtcgcacttggtgtgctgctgtacaccgcgtcttggctggcgctgctgctggtggccgcggtggtggctgcatgggtggcgcgcaatgcgggcctggacgacgacccgaccgagccggaatggcgcaacgggcctgctggattcggtctgtacacctacgatggtttccgaatcgatccgcacatcgaggacgacgagtag

SEQ ID NO: 334422 - DNA, 459 bp, Pseudomonas aeruginosa
atgcaacagcatggctggacgctgctgttccacgacaacttgatcgagcagatgatgaaactgcgcgcagctgtgctgcgtgcgcaagagagcgacccggagcgcttcgggtccaacgccaacgtcaagttcttccgggccttggtccagttgatgcaagatgtggtgccgggcgatccagcccgcgacgaatatcgtcagggcaacaccatggggccggcttatcgccattggcggcgggccaaacttggaagacggtaccggctgttcttccggtacgactcgaaggcgaaggtcatcgtatatgcctgggtcaacgacgagcagaccttgcggtcatcgggcagcaagtcagatccatacgcagtgttcgagaagatgctcgggcggggaaatccgccagacgactggaacgcattggtacaggtaagcaggcaggattggagcaaactggagtag

SEQ ID NO: 334423 - DNA, 318 bp, Pseudomonas aeruginosa
atgcctgccattcatgaagttgccacgctgacctccaaaggccagatcacgctacccaagtcaatccggcaggcgcttggcgccgataccggcagcaagctcgcgttcgagctgcgtggcagtgaagtcgtcgtgacccgtgctgatgccgagcacgaagaccccgccattgccgcgttcctgacccttctggcccgcgatattgaggctggccggaacattcgcgggttgccgaaggatctggctcgcacgatgctagagcatgcgggccacaaggtgagcctggccgacgatttcgatgaggacgtggaaatttga

SEQ ID NO: 334424 - DNA, 1863 bp, Pseudomonas aeruginosa
atgctctccctgttccagcgaaaacgggcctcggtcgctgccgctccgtcgccaacgccagccactgatcttccgaaagggctgctgcggcccgagtcggccgcatccctactggcgataccgcgccggcaaaagctgctggaacacatctggcagcgcacatcgctgtcgcgcaagcagttcgccatcctctatcgcgctccgctggagtgctacgccgagttggtccagcagttccctgcatcggaggcccatcaccatgcgtaccccggcggcatgctcgaccatggcctggagatcgtcgcctacagcctgaagctacggcagtcccatctgctacctatcggcgccaaccccgaagaccaagcggcgcagtccgaggcctggaccgccgccgtcgcctacgctgcgctgctgcatgacatcggcaagatcgccgtcgatctgcatgtcgaactggccgacggcagcacttggcacccttggcacggcccgttgcagcagccgtaccgcttccgctaccgcgatgatcgcgagtaccgcctgcacagcgccgcgacgggattgctccaccaccaactgctcgatcgccaaatcctggactggctcagcggctaccccgcgctctggggaccgctgctttatgttcttgccggccaatacgaacacgctggggtgcttggcgaactcgtcgtgcaggccgatcgcgcttcggtcgccctggaactgggcggcgatcctgcccgcgccatggtcgcgcccaagcacgcactgcaacgcaagctgctggacgggttgcgttacctgctcaaggaggagctgaagctgaaccaacccgaggcctccgatggctggctcaccgaagacggcttgtggctggtgagcaagacggtctcggacaagctgcgcgcacacctgctgtcccagggcatcgacggcatccctgcgaacaacaccgccgtgttcaacgtgctgcaggatcacggcatgttgaagcccacgccggacgggaaggcagtctggcgcgcgaccgtgatcagcacgacgggctggtcccattcattcaccttgttgcgactggcgccggcgctgatctgggaatccggcgagcggccagcaccttttgccggtacggtggcgatcgacgcgacgctcgcagaaaacgacgccagtgcgccagctaccccgcctgcggtcgtgatgaagcccgcccaggaagaccaggggccccgaccttgggaaggcggcagcgccgctgccttggctccgccgcccacggcccaccaggccttgcccgacgcgctggaggacatgctcacgatggttggcatgggtgattcgagcggcacccagcaagatgcggaagtcgtttcgagcatgacgcctgccacgcgccccgaggcgtccatgccagcgatggtcacggtttcaccgacgtctatgcccacggctgcgacatcgccctcaacggcgcggccctccggcgagcacttcatgacatggctgcaacagggcatcgcatcacgccggcttatcatcaacgatgcgaaggcgctcgtgcatacggtgagcgataccgcttacctggtcagcccaggcgtcttccagcgctatgcgcaggagcacccacaggtaggcgcattcgccaagcaggagaaccagcaagattggcggtgggtgcaaaaacgcttcgagcggctgcaactgcatcgcaaacaagctagcggactgaatatttggacttgcgaagtcaccgggccgcgaaaatcgcgcaagctacacggctacctgcttcttcagccgcaatcggtattcggtgacgtgccaccaaacaatccctacttggccgtgcttccgacgtga

SEQ ID NO: 334425 - DNA, 582 bp, Pseudomonas aeruginosa
atgttcgagatgaagaacgagaatgacgaaactgccaccaagaagaagaacgaagacttcctgaaggagctcgacaaggatcgcaccgagaagggctgtgagtatgcggtgctagtttctctactcgaaccggacagtgagttatataacactgggatcattgatatgtcccaccgccacccgaagatgtacattgttcggccgcaatttttcattcccatcatcacgctgctgcgaaatgcggcgatgaattcgctcaagtacaaattggaactggcgctcgtgaaggcgcaaaacatcgatatcacgaacttcgagacccagctggatacgttcaagaccgcattcgcgaaaaactacgacctcgcctccaggcgatttcagacagcaatcgatgaaattgacaagtcgatcgaccacctacagaagacgaaggaggccctgcttggcaccgacaggaatcttcgacttgcgaacgacaaggcgcaggacgtgacgatcaagaagttgactcggggtaacccaacaatggctgcgaagttcgccgaactcaaggacggcggatcttctgatgctgaatga

SEQ ID NO: 334426 - DNA, 2916 bp, Pseudomonas aeruginosa
atgcagggttggcacacaacgtttttggggatgcgtgggctcccccgcgatatcagcgacttcgagatgaaggcatttttcaccttcgatggtgccgagcgcgacgcaatcaatgcacgccgaggtgattcccacaagcttggtctggcgctccatattggtttcctgcgcatgagtgggcgtttgctcggtgcctttcgggtaattccagtagccttgtggcgccaccttggcaacgagcttggcattgcagcaccagaagtcgcctcgctgagagccatgtatgaacgcgggcgcacgctattcgatcaccaacaagtagcctgcacggtccttggattccagtggatgagcgagcaccagcgccgctcactggtacgtgaactgcgcgacgaagtggcgcgctgcgccgaccgcgatcagctactcgtgcgggcgcgtcaatggctgtacaagaacaagctggtgatcgtgcacgagcgggcaattcggacactgattgcggcggcacttgcccagcttgaagttgaaacaggcaccgccatcgccgccagcgttgatccagcaacacttgatcgctggcgagcctcagtttcagagctgcgcccagatggacaaacccagcagagttggctatgggctgcaccggcgaaacactcaacccgccaaatcagcgaggtactggagcgcatcgacctgctttacacgctggacgttcataagcacctggcagacatccccgatctcatcttgcgccgctacgcgcgccgacttgtctccaggccgccctcagccggagccaagatcaaagagccagcgcgcaccgtggaggtcgcatgctttcttcggtattgcctgttcaccaccacagaccagttgatccttatggtgcagcgccggatcgccgatctgtggcgtcaggctgccgccgatgtccccgctaccgtcaattgggccgcaatgtacaaaacgctgctcggcgaacttgttgccttgagcgcgcaaggtgcggtgccagatgctgagttgcgtgcccgtcttgaagccttgatcaccgaaacccagaaacgcaaaccaccgagcagggcctccctggtccgcgagggattgattgatggaattcgccccgtgcggtcgttgctcgtcgccattgcaaagctgccctggcaggccaccggcgagcatcctgccatcgagtaccttgccaagctgcaagctttatatctcaaaggatccagaaagctgccagttgaagtggtggcaccaagtctgggaatgatctggcaggtttcgatctccagcccagaccgggaacgggcgtttcaggcgttggaggtggccaccctgtttgccctgcgccgcgcggtgcgcaatggctcggtctggattgagcacagcctgagctttcggggtcgtgcgcgcttgttcttcacggacgagcgttggcaggcagagtccaagaaacactatgcccgtctatcgttacccagcaaggctgccactttcttgaagcctttgctggccagagtaactgccggtgtcgatgcggtggccgctgcagcccgcagtggcgtactgcgcgtggatgatgaactccatttgtcgccattgcccgcagaggacgaagacccagaagtgaccaagctgcgcgcggctttggatcaccgcatcggtgaggttcaattgccggaagtgattctggccgttgacgcccaggtgcgctttagctggatcatgctcggacgtgagccgcgctctaccgacgagctgctgatggtctatgccggcatcatggcccacggcaccagtctgactgcggtcgaatgcgcgcgcatgattccgcaattgtctgccaccagcattcgccaggccatgcgctgggcgcgggacgaacggcgtctgagccaggcctgccaggctgtgctggaattcatgcagcgacacccgattgccgccacctgggggcggtccgatttggcatcttctgacatgatgaccatggagaccaccaaacgggtgtggcaagcccggcttgatcctcggcgcaacacaccttccattggaatctactcccatgtaaaagaccggtggggcatcttccatgcgcagccctttgtgctcaatgagcgccaggcgggcgtggccattgaaggtgtcatccgccaagaaaagctggagaccagccagcttgctgtggatacccatggctacaccgactttgccatgtcacatgcccgtttgcttggttttgatctttgcccgcggttgaaggaactcaaacagcgccacctctttgtgccacgcggcaccaaagtgcccgcagaaatcgctgcggtgtgcgaagccaatgtcgacgtcgctttgatcgaaaagcattgggatagtctggtgcacctggcagcctcggtcatgagcggacatgccagtgcggtggcagctcttgcgcggttcggttctgccgcccagggcgatccaatctatgaggctggcgtgcaattggggcggttgctgcgtacggcgtttttggctgactactttgtcaaggacgctttcaggaacgagttgcgccgggtgctcaatcggggcgaggctgttaacgccctcaagcgcgccatttataccggccggatcagcccggcgcaggccaaacgtgtcgatgaaatgcaggctgtggccgatgcgttgagcctgatggccaacatcgtgatggcgtggaatacctcacagatgcaggcggtcctggatcgctggtcgaaccgccgccaggtcattccaccggaactgatcgggaagattgcgcccaccaggctggagagcatcaacttgcggggtgtgtttcgcttcccggttgaccgctatgctgaccaaatcctgccttcgcggccaaatgcatcgataactggcaccaatggatga

SEQ ID NO: 334427 - DNA, 615 bp, Pseudomonas aeruginosa
atggcaaagtcgtcccgcgttttagtagctatcgctatcaatagttttatcattccatgcgcgcttgcgtattcattgcacgaggatgatagatggacgctaaatgccgacgcagagctctcaatgggagttttccatagcaataaaagctatgctcaatcgagtgctagtgatgcaggaagctcttcgtggcaagaggccgcgtttaaatatggactgagcggcacgttagcagaagttataagtggccagctgtatggatcattaaattgggtcagtactggatctttcggagatggcgacgctgctggttggacagacggcacggaacggactaccaaaatcgaagacgcgtatgctggttggcgttccggaagtacatttcctagtctcggtgataacggattagatatctcgtttgggcgccagaatattgttatcggcgatggatttttagttgccggcgattcgctaaatcatggcaaaggcatagcagaaggcacgctcaatcgcggcggagcctactacctaactggaagaaaggattttgaccagaccgctgttttacgcgtaggtggggccagtggcttaagaagccctgaattcatagaataa

SEQ ID NO: 334428 - DNA, 909 bp, Pseudomonas aeruginosa
atggcacagctcaaaaagttcgatcgaaatatcaactctctttccgaaatcttgttagcaattgaggaagacggaggatgcatagttaaaaactttatttcagctgatttaacgcgccgggtaagagaagagcttgcccaagacgcgatgggtatcactcccggcgcatcgtatgctgacccagatatgactgtgttttggggacataatactaaacgattcactcgactactcagccgatctccctcattttctgaagtgctagaacacgagttgatgcatgcctgggcgagcacaagtttgactggtgattactggctcaacaccgctcaagcaatgatcgttggaccagggtctaaggcccaagccctgcatcgagatacagtgatttggcctattctcgcgaatctcggtcctgacgcacccgaggcaatggtcagtatcatgctcgcgctaagcgacttcaaagcagaaacaggtgcgactctcgttgttccaggaagtcataagtttgcagacttcaattcgaccgtcagtaaaagcgatactgtgcaagcagtcatgcctgcaggttcagcacttctctatacgggaaaaaccattcatggcgccggcgcgaacgtcactactgaccaatggcgttttggattgcacatgagttttgttttaggttggttgacccccgaagaagcgtcacccattggcgtgccatgggaaattgcaaaaaacttttctcctactgtccaacgccttcttggatatgcgtcaccacgggatctcggcgaaggcgcatcgccaaaaaactggatggtagattttgaagatgttcgtgcacatttgggtgttaaatacgaacgaccttcaaaaaaatccctgcaaaacctaaacgacgcagatgtaaaagtttag

SEQ ID NO: 334429 - DNA, 1041 bp, Pseudomonas aeruginosa
atgactattaagcatgctgatatcgtctctgttgatcgttactgcggaatcaacacgagcgttagtgcgtctcattttttacggcattgttctccagcgttaacggaacgtgagttgcaaacgttggaattaatatcaaagggatttaacaataaaaatattgccaaagcatttgatgttagtgaaagtacggtaaagagccatgtcaaaaacctgttaagaaagttcaatgctcgctctcggcttgaattggcagtattaagttaccgcacgacaggtgggggcggggcgatgggcggtgctgatatttctagctttggctcgcagagcgacgatggctggatctctatttcaaacgccaaatttgtcatcaaccgttctgggtatatcgttcggcataacaaggattggcagttgttgatgggcggggatacgtgtgggagtatggttgtagacaatgttcatcatagagacaaaaaagcgtgggagacgtttttaaatgctattgttcagttcgtccctaactcgcatatttcagatgtaagatttatatccaacttgggagatgaattgacactaactttaaactcttttatatttcatgatgaattctattttgtggttgagaaagttagtacggttgtggattataaagacaggtttaattttggcttcgctaatgcgtctaacttgatcgagtccctgccagggcttttctacaaaagtcgcaaggcttcaacttgggtcatggagtatgtaagttcgggcagtgttaaattgcttggttatactccggaggagttggttgagcgtagagatagtacttgggaagaacttatcatccctgaagataaatttattgtttggagtactgtcgaggaggcagtcagtgggcatactccgtttagaattaaatataaaattagatgtgcggatggtgtcgtcaagtcaatatctgaatggggagtaggaatttacggccccgaagggcaaccgatcggtatcgaaggcgctatctttgaggataatcgcgtaacataa

SEQ ID NO: 334430 - DNA, 978 bp, Pseudomonas aeruginosa
atgcgtcgagtagatcgcggcagtgtagatgttccaaaatcgctcctgctcggcggcgcaggcccggcagagttggcaaaggtgaaggaacaccgcgacgcaccaaacccgccagccaaccaaaatggtggcaaaaagaagagtttcacttatacagcgtacaaaagtgccgatgtacgggccgcccttgagaagttgttttacgacaaatgcgcctactgcgagacagtctacgccgcctcagcacctgtcgacatcgaacattatcgccctaaaggtgccgttgccgaggacgtggcacatggcggttactggtggatcgcgatgggttgggacaatttgttacccagctgtatcgactgtaaccgcaagcgtgggcaggtcttggtcgagccatcgtctagccttgccgtactcgctgcgactgtgaagccggcggtcagccaatcaggcaaaaaggacagttttcccctcgcagctacgggtgtacgcgcactggacgaggaggcagaactcgaggatgaacaagcgctgctaatcaatccgtgctgtgacgacccagcaactagtttgatgtacagttttgacccagcacatccggctgggctggttgtaccgacaggagaactggatcagcaggtacgcggcgcggtctcgatacagatttatggcctcaatcgactaaagctcgtacaggatcgaacgagattgctgagacgtctcgagttcctcggtgatctcgttatcgatctcgcatcctcgattactgaacttgagacgcccgctgtccaggcagcattgcaaggaacaccagcagagaacgtcgcgtcgaggctgcgcctactgcgtgatcggactttggccgagataaagtcttttaccaaagacgatgccgcctattcatctatggccagcgcttggctcgagcactttaaagcgcgaattcgtcctgctacgcctatcgaagctcttccttag

SEQ ID NO: 334431 - DNA, 2316 bp, Pseudomonas aeruginosa
atgcaaaagcttgaaagaccggacaaatcgccggcagttctgcggtcgaaagcggcgattcaggcgcgacaacagatgcgcgacttttgggcgctcgaccgacaacgccgtgctcagactagcgtgccagctatcggactcagttcgacagacgaacgtttaattgccgcggttgccgcgatgagcctaaaccgctgtgccttctgcgaagcaaaggacgtgctttctgttcaccgtttccgtccagcaggtaacgcactacctctcgtcgaaacgagtaacgcacacctttactacctatggctcaccgacgcgtggcaaaacctgctgccaatttgcaccggctgcattccgcgtgagacacagtttccaattgccggtgcccgcgcgccgctgccgtcgcttcgccagatcgatgcctataccgagcgagacgacggtctttggccgtcttatccaccaaaggaaaccattctcctgctcgatcctgtgcgagaccgtgacttcgagaaacacctcgttcccaagcttaatggcgaaatcataggaagctcgcgaaagggcgaaactaccgtactcgtcttcgacctcaatcgtgccgagcgccgtcaccagcgtcaccagacttatcaatcgcttatcgaccgcctcctcctactcctccgggaaggtaagaagctgaatgactcccccgattggcagttgatctttgattttccgacgatagagttcggtgggacctggttcatacttttgcgtcgcatcgcgaggtggattgcagtttcgaaagcagtgacatggcaaacttccagcaaccaaatccgcgtctttttttcgagacttgccgacggtggcgatgctattcatcacctcgaggcggctctttcagcaatagcagatgaggatcagggcctgcgcgccagtcactgggcaatcggctcggtttacacggcacgcacgtcaatcgcagccgtcgaaataagcaatttcaaagcgattgaagggctgcaactatccttaagcgagccagctgcacgaccgggagacccagccagccggcgcgcaccatcgctggtgattcttggtgaaaatgcgaccggtaaaagttcgattcttgaggcgatctcactggcgcttactacctctgctgcgcgtaccgcgcttaatgtgccatggacccagatggttcttgatccctcgcaactcggcctcgagcgcggaaacatagcgttgccagccgaagtgcgcgtgaagcttacgaacgatcagtcggtgacgttgacgattgagcatggctcaccgaccgtactcagcgaactcggaaaccatcacgtaccagtatttgcctatggtgcattccgacggttcctgaccggcacgcgcagagctgcaccccataagcatatccgcaacctcttcgacggcagcacactttccaatcccgagccctggctcaaagccctgaaacgagaccagttcgacatggtgatccgcaccttgcgagacctgctatcgatcgagggggagttcgacgtcatacagcgcgagcgcggctcgcgccaactgcgcatggttacctcgctgacagaaccagacggtgaactacgttacagtcgaaccccgctgcatgcagtatcgtcaggctatcgttcaatgcttgccatggtgtgcgacatcctgcgcggcttacttgatccccaggtatacgaaggatttgaaagctttcggactgccaaaggagtcatcttgattgacgaaatcgaggcccacctacatccgcgctggaaagtgcaggtcatgtccagtctgcgtaacgcgcttccggggatgacattcatcgtcacgacccatgacccgctatgcctacgtggcatgggagaaggtgaagtggtagtgctccaacgtatcgcggccaccgatagcgagcgcgcaagtcagatgcctataatcgtagagcgcatgatggggctaccgtcagtcgcagacctgcggatcgagcaactgctaacttccgactttttccagatgctctccacagacgatgccgcggccgatcgtagtcttgcagggatcgccgatctcattgccgcgcgcgcgcggggcgatgaactgtccctggaagatatccgtattctctcggattttgagtgcgacattgccagtgcgcttccagttgggtctagtgaagtccatcgcatcgtgcaggacactgtcgcggagtatcttcggcgtcgtcgcgacgccagcagccaaacactccagcggctgcgtgatgatgccaaagctgagattctcgctgcgttggaagcgctctga

SEQ ID NO: 334432 - DNA, 3825 bp, Pseudomonas aeruginosa
atgcagtcagtaccgctcaagcgtaaatttacgcccatccccgcagcctatcagaggcgtgattttccactagacgaagtgtggtcaagcctcaatcgaggtgagaacaagagctgggacgaccttctcggtgagtatcgcgtagtggtactggcggaagcgggcgcgggtaagacctatgagctgcaatctgcagccaagcgactggttagccaaggcaggcttgggttcttcattcgcatcgaagatatcgacgacgattttgggactgccttcgaggtgggctctgaagcagctttcgaagattggctggccgggactgacgaagcttggtttttcctcgactctgtcgacgagatccggctcaccgagccgagagcgttcgagtcagcgatccgcggctttgccaaacggatccgtaatgcccgccagcgagcgcatatctatatttcaagccgtccctatgcctggcgcccagtgcttgatcgcactttgatcgaagaagtgttgccgttcgaaccgcggcggcaggaagcgaccggtggcgatgatttgtctaccgttgtccaaagcggagaggccatagagggagactattcagcggtaggaatcagtaaggatgatccgcccccaacgcttcagttgtatcagctagccccgctggatgaatcagagattcgcctgttcgccgagcatagcggtgtcgaagacagcacagactttctggcggcactcgagcgcagtaggctgtttccgctcgcacggcttcctttcgacctgcacgatcttcttgcgacatggcgcgagaccaagagtttggcgagtcggctggacatcctacaggaaggcgttcgtcgccaactgacgctgtcgcctcaggatgagtcaaccttgactctctcgcgcgcagaggaaggagcacagctcattgctgtagcggcagtgctgaccggacgtccgaatatacgcctcccgggctcatctggtgccgaagggattgacgccgaattgctgctacctgggtgggccaatgctgatatcgcagcactgcttatgaccggcgttttcggtgaaccaatcttcggcgaagtgcgctttcgccatcgtgaggttcgcgaactgctcgctgctcgttggatcgaacagcagctaaagcgcggcggcgggaggcatcacatcgaaatgctgctattcagcagccaatatggcgaaaacatccttaccccgcgcctgaggccagttcttccttggttgatacttttcaatgactctatccgcgaccgcgtactcactgaccaccccgaggtcgccgtggaaggcggtgacgcggcccgcctccccgtcgatgtccggcgcaatatactatccatgctgattgaccaagtgattgaccccacttcaggtttacgtggattggataatgcagagatcgccaaaatcgcccacgctgacctgcaagattatgtccatacgcttatcgaaaaacattttgaaaacgacgatgccatctttgtcctcgggcgcctagtttggcagggagaaatgcgcaactgtgttgccagcctgtctaaaatcgctgccaatccagctcgcggcatctacgctcgcctcatctcgatccgtgcggtcgcatgtctcggtagtccggaccaactctatacgctttggcaatcgctcaatactaatgctctgcaaatccagcgtcggctgttggcagagctcgtggacaacgctcctgccacagcggagacaatcgaactttttctagcatctatcgacaattccgagccgcgccatgagttcgaggtcaccggcttgaccctctcacttaatggcttcatccagcgactgcctctttccactgttctcgagacaggcgaactgttgttcatcttcgccaaggggttactgcaatatctcatgcgggaaccgcatgttgagcgtggacaatgtcacgtctcggaagcctttcaatggcttatgagcccggcgctgcattgtatcgagcggctgatttatgcgcgctcgccagcggcattatcgaaggtttccctcgcgatcctcgctgccatcccagccctacacttctggcgcggcgatgactatcaagagcgaaagtcgatcgtaaataaacttgttccgaaatggcctgaactcaacgacgcactattttggtggacggtgaccgagtatcgagctgtgcagggtgaagagctaaaagatgattggccagtcagctggatgggacatttctggaaattcgatgagaccagtttcgcgcgcacagttacctggattcgagaccgaaaactttccgacgataagcttgtagcgctgtcgcgtgctgttcgcatctacgccgaaaatgaccaaccagcggcgtggctcgaggatttacataacgcggtggcaggcaatccggacttggaagtgtccctcaattccaagctctatccgacgacttcgcctgaaatgcagcggtatcagcaagacgaacgcgaccggcacatcaaacagaagcgtcgagacgcgaagaactccagcgcgcgcactaaattcgtggacaggctcaccgctaatcctgacatcatccgccaccccccgaacctcaagccaggtcaactaagctcggagcaatatcatctactgcaaattatcgaaggagacaagtcacgtaacagccgagcccaaggcgccaattgggcggcacttatccccgagtttggagttgcggtagccgaagcctaccgcgacgcggcgattgcattctggcgcgcctataaggcaggaatccgctccgaaggagccgacaccaacagcatcccctacgcgctcattttcgcgatgtctggactcgacatcgagctccgcgacagcgaaaaaacggggctggtgctcagaaagacagacgcacgtcgcgcgcttcgctatgttttatgggagctgaatggcttcccgcgctggttcgaaaagttttaccgagcatggccaaagatttcgcgggatttcctctggaaggaagtcgagtgggaactcaagcatacgccctccgaacagtcgctttactatgtgctgcacgacctcgtctattacgcaccatggctccataccgaattcgcaccgttgctcagtagttggctttcacagcatcaggcccccaatcaagactgcctgcgttattgccgtgcaatcatgataggaggtggtttggctgctgcggacatcgccacgctctcggtgcgcaaaatagcagacccgggtacgccgccggagcaactcgcaacttggcatgcgctgcgaactgatgccgatccagcccggggcgtcccggcgctcaatggcttgtttgattccggtaccctccttgatcccgttggcttcgtcagctctttcagcgtcgcgttgattggtggccgccgaaacgtgagtccaatcttcggccacttcaaaacgcctagctaccttaaagagctctatctgctgacccatcgcacggtcagggtggctgacgacatcgagcgggccggcaaaggtgtctattcgccaactttgcgcgacgaagcacaggatgcacgcgagaacttattcgctcttcttactcaaatccctggtgaactcacctaccggacaatcctcgaattgtcgactgaacacccggccccccgctatcgcgactacatgcgcacccgcgcctacgaacgtgccgtggaggatggcgacctaccagcatggagcgaatccgaaattgcacgactagtccaacgcctgagcgcgtatccgatcattgccgcgctacctgacggagccgacaatgcaaaagcttga

SEQ ID NO: 334433 - DNA, 474 bp, Pseudomonas aeruginosa
ttgagtaccaacatcatcacaaaggaaggtcatgacgccctgaagcaagagctcgacttcctttggcgagagaagcgtcccgacacaactaggaaggttacctgggcggcatcgttgggtgaccgcagtgagaatgcggattaccaatacaacaagaagctgctccgggagattgatcgtagagtccgataccttcgtaagcggcttgaggacgtgcgggtagtcgagtattcgcctgagcaggagggaaaggtcttcttcggagcctgggtcgagattgaaaacgaggcgggggaaatcaagaagtttcgggttgtggggtacgacgaaatctacggtcgtaacgattacatctcgatcgattcgccgatggcgcgtgcacttttgaagaaagaggtgggcgccgaggcagttgtgcagaccccgggcggagaaatgttgtggtggatcaacgaaattttatacaaaaaatag

SEQ ID NO: 334434 - DNA, 273 bp, Pseudomonas aeruginosa
atgtccaagaatcgtggcaacgaataccgctaccagatcctgaggtctgaagcacgcaaggcagcccaggcgctggcgcactcaaacgagaaccttaaggcccggggaatagacactactcaaatccgcttcgatagcatcacgccagtggagatcgaagcctcggatctttggggtgatgaggctaccctctatccttggtacgatgtacacccaatccccccacttcccatactattgcctctgcaggcctttaaatccgggcgttcataa

SEQ ID NO: 334435 - DNA, 627 bp, Pseudomonas aeruginosa
atgaacgcagcattccgtgaagccctcgccgcccgcttcctgtggacggactacctcgttctcgaagccattggagcatcggaacctcaggtcgataccgcgtaccaggccgcttgcaacgcagtagatgagctcgcttcgaacgacgtgctttcccaccgccactacggccctgttgcccctctcctgctgcaggatgttcccttgctggaggaccattacaatctcgcgtacgagatgtattcagagctctactacaagaactatcacgacggatctatcgaggtgatgcagtcgcactggctaccaccagtcaaaccgctggaccttccctattcccaatggatggccgcagttactcgcgcgattgccgatctgatgcaaatgacctgtgccgaagccgcggttgctacgtattcctttgatgaggactttttccattcatggagaaaccaggacctgccagctgttgcagctgaaaagatccatgagtcttacaagcgccatatcggtgggctgggtgaaatcgagctcgaagagttcatgcatgaagttgcccgggatcttgaagatgtccgccagcaagaagaccaccacttacgttgcgattgcaccgaccattcttaa

SEQ ID NO: 334436 - DNA, 276 bp, Pseudomonas aeruginosa
atggtgtatgcccggatcgcggcacgcaggattggcggggaaggccgctggacgcttgacctggctgatctggaagtcacgaatgaaggcgagcgagggaaggggcaattcacacatttcctgagccatgcagaacggattgcggacagcaatgggttgatcgtgtacgtgcaatcgatcgtcaatcagcgactgttgaacagcctcgtagccaaaggctatttcttgcaggggtacgatgcctaccggttgcgccaggccccaccgccaccctag

SEQ ID NO: 334437 - DNA, 921 bp, Pseudomonas aeruginosa
atgaaagggccggtcgcgacagtcgagctctgggaaaagggccgatgtgttttcagtcacgcggtctctagggagctgctccaggctgcagttgatgaaggttgtcatttgctgcttgtaggaggagacggggcaccggtgcttggcaaagatgcaatggtccccctaggtcatctgttgaaacgacaacggagccagcgcggccagcaacctgctgttcagccaaacactgaagatcgctcgcccggtgtcagcttggggtggcttatcgcactgttcgaatgggcctgtcagaattccccgctcgcagaaatccggtacgttcaccatgccgagttcacccttcccacaccgaagcagcccttgcttcggattgaacagcatgactcaggccgctacgcccctcggacttgggagaatgccaagagcgctgacattaccgtcgcctttgcctccgatttcacaacccggggtgagcaattgacactgcgggcggccggtgaagcctatgtggccatccccgtttcaatcgagccagtcgccgctgcccggcgcctctataaggcgatgtcagctgcaaaggcgcgcaccttgaatgtcgccgggaacggtatctacacactgtctaagcatggctggacgcaggagagcatcaatgcctgggtgtaccaagtcatcggcaaggtccaccagcactggccaatcgagttcatccgatctggcggccagacaggagttgacgttgccggtttggttagtgcgcatgcgttggggattgattgtcttggcctgtttccgaagcacttcctccaacgagcggaggacaacgttgatgtgcgtcgcactgcaacagaactcgaagctgaaattcggacctgggcattgatgcttggagttaagaatccatcgactgatgaatag

SEQ ID NO: 334438 - DNA, 1035 bp, Pseudomonas aeruginosa
atgagccgcgttgggatcacgaaagaggaggttcgccaggcgattgcgcaactccgtaaccagggttccccagtaactgtgcgttccatacaggccatcacaggcggctcctactcgacagtgcagaggttctggaaggatctccgcgacgaggaaatcgaaatgctgggcgatggcgggcgcatccagaccgagctgcaggccttggtacacgcgcttcacgacaagatgaaagagaactccgagcggatcgttcgtgaaggcgagcagcgctgcgaggcgcaaatcaaggaaatggaggaggtccttgatggcgagcgagtggtgcaccaagccaccgtcgatcagcttgcgaagactgaaggcacccttgccgatcgcgaacggctgctgggcgaactgactgagcgcttgaactcggccaacattgagttgggccgcctggcccaggagctgactgacacgcaacgtaacctggaggtggagaagcgctcgaccagcaagctaatccacgaccttcaagcagagcgggatgctcatgagcactatctcgcagccctgaacgagcaacgccggcaggagcaggcgactttcgataacgcgctgacctctctgcgcgaagacaaccgcaccctctcggcggacaacatccaactgagaggggaaatcctgagcctgaataagcaactgtctggcatgacctcccagttgaccgacctgcaagcgcagaacaggaagttggcgcttgaggctgacagcgcgaaggacaagctgcaggtcgcagagcaatcactcatgaacctgaggatcgaactcgccacggtaaaaactcagcattcggaggccgaaaggcagcttgaaagcgccgtcaaggagagacgagagaccgaggagaaactggtggaagcaaaagcctctgctcgaactcagaacagcgaggtgagacgcctttccgcccagctggagggcatgaaggcagagctttcctcccgcgtccaatccgcggaagaacgtggtgcggaaggaaacacctga

SEQ ID NO: 334439 - DNA, 1200 bp, Pseudomonas aeruginosa
atgcaacttcgtgcagcagcctccggtctgcttctggccctcctggccggccaaactgtggcagcaagctttgactgctccaaggccagcagcttccccgaaaaagaaatctgccgtgatggctacctttccgggttggacgattggttagccaaatcctataggaccgctctggaggtaaatcctgaccagtacgaggcggtccgtcagtcgcagcgtgaatggctcgctacaagggatgcatgtactgaccaaaagtgcctcgacaaaaccatcggcgcccgcatacaggcgcttgatcaatatgtgacggcagagaggggtaaatcggcatcggctttagctcaggcccagctcatcaagcgccaggaagaggaggccatcaggcagcggcaaactgaggagcgcctggcggctgaagacgcagctcgacagaagcagatcgagaatcagcgccagcaggcgatcatcgaactccagcagcgcgctcaggccgcccaagcgatcgaatctcaacgggcgcaccagcaggcaccagcccaaatcccgcagtaccaaccaccccaacaggttgcgcaagcttcgagtacaacctcgttctcgccgtcataccgcgcgccggagaaatctctgtggcagcagttcaaatccagcccggcctggaagtacatgctgctggcgggtgcgcttctgacagcttgggcgatgtggaggcaccatcaggggcaagcaaccatctacaacgactatacggatgccgcaatcacgaacctcttgccggctgcaggcgtggtgttggccttcttgatgaactggctcgagctcccccgtcaactcgcaatggtcgcaggcctaacgggtttcatgcttgcattgatgttcgcggtgtatgcgtcagtgcgaaccaatcagggatggctgagcatcagcctgtcactcatcgccaaaatgactctggtgtcagtgttctatgcggtgctcggcgcactggtggcatcactattcgtaagcacaaagtacaaaggggagtcccaggctagagcgaatgcaaggaatcgaagggagaagaaagaaacgatggccatgatcgccgcgctcactactgcctacaccttcctttcggcttggctgtgccggcggcaagagttcatcccagtttctgaatgcctagcttttgactcgaccgcaagcgttgcttaa

SEQ ID NO: 334440 - DNA, 1092 bp, Pseudomonas aeruginosa
atgaccgagttgaagctgacacctgaagaagtacggcaggtagctgtagatgacaggcgattcaagctgcaaacaaagttcgatctggaatcaggtcagggcgttctccctttcacgaatgagcgtttctttgagcaaagcaaccccatcgtccgttcagccctcttctcagcgggcaagattcccaaaggcctcttcttccaggaatggacagagatcttctccttgggatcgggctcaatctggtaccgcggtccggcgctgtctacagatcacgaactcgtcctggcccgaatcatggtgctggcccgcggcaggtcactgacccagtccgtcaaagtcaaacaggctgatgtctgtcgttggctcaagctcgacgactccggtgcgaacttcaaaaaggcccgaaggattcttgatgacctcgccggcggcgaactgcggatttcaagcaagcctgctctgaagagactctacaacctgctcacacgaccgccgctcggactgcctgatagggacttctttctcgagtacatcaagaatcgctacggagatcagatcaaggagatcgcggcggcaattgagtcagatgatacggtggtcgatatcagcatgcggttcttgaccaaccaggcaaagaaccacaagacagggcgactactgcttaaccttgacccgatcgctgcaattttcttcgatggtgtgaataccaccctggtgccctttgagatcatggatcaattggatcgatttgggaccaagcttttgcccttcatcgcatcccatagagatggggtatggcctatcgggcttgagaagtaccacgagttcagtggttcaaaatccgagtatcagaaggtcaagcggcgggtgaagtcggatctcaaaaagcgattcgaagactggcaggcgaaggcctggattgaacctggttgggacatctccaggaacgatgacggggacgaaatagtccgagggttgaagatcggagcgaaggtgcgcatccgttctgagctggaaatccttacggctgtaggggatgacttagaggatgcggaagacattgatgctgccgaggctgaatcagcttga

SEQ ID NO: 334441 - DNA, 222 bp, Pseudomonas aeruginosa
atgctgaatttgccggaattccgtgagctgggaaacgcgccgaggggcggccttgatgacgtctgtccagggcttgcttttctggtaccggattcctttgagcggcaactggctttgacggtggttacccttcaggaagaccggattctcgtgagcggtacccagcgcatgccaatcctcgaggtggataggccggaatatcgtgagcgcaaggctcaatga

SEQ ID NO: 334442 - DNA, 1389 bp, Pseudomonas aeruginosa
atgatctgggcgcttcaagggcaatcttggcttgtgctacgaagcaacgcggttaaccttggggtattcgctttctattgctccgaggtccgcttgccagctccagcaaaaacacccaacagtggcgctcgcccttccccactgtttgatacctacgaaacctttctctcgtcttcggctgctgagtacgttgcagagcggccggcgattgaggagttcctaaaggttttcgctccccatattccggcagcaaatgacctcgcccatgctcgagcgtttttgaagtcctatagcggccaagcaaccacgtttaaggcctatcgcacgcaggtagagcgcatcctgttgtggtcctggatcatcgcagggaaatcgattttggacttgcgccggtctgacgctgagagattcatggatttcaacgtggctccgcccgcgagctgggtgggagatgctgtacgccagaggttcctcccaagggggggcgtctacgaaccgaaccctgcctggcgccccttcggcatcaagatttcgaaaagtgatcgaaagagagccaaggaagccggcgaggagttgggggtgtctggttacaaaatggctcagggcagtatccggcaggtcttttccatctgtagttcgttcttcgaatttttgactcaggaggacctggctcaaggaaaccccttcaaggcgatcaagggcaaaagtcgttggatcaggaccacagccaaacgaagtggcgggaaatcccttacccagctgcagtgggacttcgtgatcgagaccgcggagctcatggctaacgaagcaccggaatctcatgagcgcacgttgttcattgtctcttctctgttctctatgtacctacgagtctcggacctggtaggtaatcagctctggactccaacgatgggttcgttcgtcaaggaggatgaaacttggtggtacgaggtggttggtaaagggaacgtagaagcgcgcattgcagtgaagcctgactacctcaagtacctgaagcggtaccgtcagagccgtaatctcacgcccctgccactgaagggagagcaggcccctctcctcacaaagttgaatggtgccccaggattgagtgatcgccaggtgcggaacattgtccaggaggtctttgatcgggctctgaagcgaatgcatgaggagggacgatcggattgtgaagttgacgacctacgggttgccaccctgcattggcttcgtcacacaggggcgacctttgatgctcctcatcgtgatgcaaaaaaccttcaggccgatctccggcacaagtcgatgagcacgactcaggacatctactacaactcgctggacgatcagcgtgcggctgaagttgaaggcctgacggtcaagcgctga

SEQ ID NO: 334443 - DNA, 783 bp, Pseudomonas aeruginosa
atggttgggagtttcctcaacgtcgtggcctaccggctgccgatcatgctggaacgcgcctggacaattgaggctcaggaatgcctgggcctaccctcaagcgaaccagttggccggttcaccctgtcgtcgccctcctctgcttgtcccaattgcgggcacaagatccgcccctgggaaaacctcccagtggtgagctacatcgcgttacgcggcaaatgctcaggctgtggcaccaagatcagcatcacttatcctgccgttgagttggcgaccgtcctcctctccgcgtcgctggcctggcactacggtgtaactcctgctgcttgtgccgcaatagtgctgctgtggatgctcatagccctttgcctgatcgacctaaaggtcatgctgctcccagatgcgattacacttccagccctttggctcggtctggttgcgaactatttcggcgtattcgcgtcgttgcacgacgcggttgcaggggcggtggtgggatatatgacgttctggacgataggtaagctcttctacgtcgtccgcggtgtcgagggcctgggccaaggtgattacaagctgtttgcactctttggtgcctggggggggtggcaagtgctgcccgcgactttgctgatcgccagcgtgaccactgctgctgtggggatggcgatcagactcggccgaaaggaccgctatctgccgtttggtcctggtctgatcgtaggtggggtgatcaccctggttttcggcagtgaaatcaatcattggcttttgtaccggtaa

SEQ ID NO: 334444 - DNA, 405 bp, Pseudomonas aeruginosa
atgtccaaggccctgattgtcgacgactctcgcaccgacgcctacgtatcccagaaatgcgcggatcaactgttcgatgaagtcaaggtggtgggtaccctgcaggagctcctgcaggtggtgccgtcgttcaatcccgacgtcattttcatggatttgtacctgggcgaatggcacaacggcctttcccatattcgtgagctccgctcgggccatggcgaactcagcatcacgccgatcatcgttctctcgagcaaggccgctgaggaagacaagcgtctggcagtcgaagctggtgcggccggctacatcgtgaagccagctactctcgacaaaatgatggagtcccttcgccgctacgtccctggcttcatccccaaaggctgggagtctgtcatagcgtga

SEQ ID NO: 334445 - DNA, 525 bp, Pseudomonas aeruginosa
atgcgttcgctcacactgattcccttgctgaccagttgcatcatcagtccgctgtgcgcctcccagccgtttcccaacacccaggtcaccgatggacaactattggcgcgggacttcaatcgcggcggccactcgcatgtacagaagcgagccaataatcctcacaaccatgccggtaaacgccagatcagagtgcacaactacgctaacgaggccgtgcccttcatcgttcacggcaaaaaggccttccgcggaaagcatgtgaagaaagatttcgtagcgaatggccggcgtttcaaaggatcacccacgaactctttctcgccaggccaagcgcagcagcgtcccaaaatgctctttggaaaggcccagcgctttgttgctggcacgccaaataggcagttggtggtattccggcagccggtgtacatcaataatggcaatgggttccaggaaaaggtgttaatacatgtcttcgatcctagacaacgggcattcatcgccagacaaatccaagatccataa

SEQ ID NO: 334446 - DNA, 1227 bp, Pseudomonas aeruginosa
gtgcgctcaaaagatttttcttggcggtactcacttcccgccacgctattgctgttatcaccattcgacttgctggcgtcattgggcatggacatgtacctgcccgtgattcctttcatggccgatgcacttggtgccggtgcggggacaattcagctgtcattgacggcatacctggttctgcttggagccgggcagcttctctttggccctctatcggatcggctgggccgccgccctgttctgcttgggggtgggattgcctatatcgtcgcttcgattggccttgccctggcctcatcaccagaaatcttcctgggctttcgggttcttcaggcctgtggtgcttcggcgtgtctcgtcgctaccttcgcgaccgtgcgcgatatctacgccggccgcgaggaaagcaacgttatctatggactcctcggctctatgctcgcgatggtcccagcgataggtccattactaggcaccttgatcgatgcctggctgggatggcgtgcaatttttggcttgttaggaatcgcaatgttcggtgctgctacggcagcgtggcgactctggccagagacccagaggcagcgcacggcacacccacggtggtcgcaattactgcttccattgcgttgcctgaatttctggcagtacacgctcggttatagcgcgggcatgggtagcttttttgtctttttctcaactgccccgtggctaatgatgggacgatacgggttatcgcaattgagcttcagtttgctgtttgcgacggtagcaatcgcgatgatggtgacggcgcgggtaatggggcggctggctccgcagtggggagttcagaacgcattgcgggtaggcatggtctgccttatggcaggcgggttgttgctggctgctggcgaggcactgataccgctatcgttacttggctttatcgccccaatgtggcttgttggtgttgggatcgctactgcggtctcggtgacgcccaatggcgcgcttcgtggtttcgatcacatcgctggcaccgtcaccgcagtttacttctgtctgggtggggtactgttaggtggcatagggacactcattattacacttctgccgagtggcacgaactggcctatcgtcacttatagcctaaccctgccggcggtagtgctttgtttgtcctgggttaattctgagggacgcgatatcagcgacgacgagcatgctgccgtggatccatag

SEQ ID NO: 334447 - DNA, 609 bp, Pseudomonas aeruginosa
atgctgccgtggatccatagggcagccattactcccagtcagaccatcatcgtgactaggactaggttatgtggtcggtaccggaatggtcttgtcaatttgtcgtgctttgctggacgaagcgcattgctttacgacacagacacggagagcatcaaagtgtttaagatttctcaagtaacgcccggcacgatacccatgtcgctgctactactggctgacccatccgaacgtagcgtcgcctcatactgcgatggcgcgctttgctacctagcgacggaggacggtgccgcacttggtgcatctgtgttcaatactaggtgtaaggatgttcttgagctattcaatatcgccgtggcgcccgaggtccaggcgcggggcattggtacggcgctccttgaacatgccgttacggatgctagagagcgagggtacgtgcgcattgagcttggaactggcaccttcgggtatcagttggccttctatcaacgtgtcggttttcgagtcgataaggtggtaaaaaattactttctcgataactacgatcagcccatctacgagatgggcattcagcacaaagatatgttgcgtctttcgctaattttatga

SEQ ID NO: 334448 - DNA, 759 bp, Pseudomonas aeruginosa
atgctaattcctgccgaggcgaagcgggcgctgccagttatccagcaatccttggcagattcgcttgtggctgtctacctccacggctcggcagtagcaggtggcctgcgccccaagagtgatgttgatgtgcttgttgtcatcgaccgagcaacgacacatgcgattcgcgctcgcctcgtcactgaattgatgaagatttcaggacgaccaggcggcgacaccttacgtccccttgaactgatcgtctttcaccgcgctgatcttgctgagtcggtttatccagcgcgtagcgagttcgtatatggtgagtggttgcgcgacgcatacgagacgggcgaagtgcccaggcccgaagctgacccggagctgactctagtgctggctcaggcccgacaggaagcaagtcccctgttcggccccgagccagcagagttgctgcccgctatcccccaagcggatgtacaccgtgcgattaaagatgcactcccttctttgcttgatagcctggagggggatgaacgtaatgttctgctgacacttgcgcgcatgtggcggactttaaggacaggggagttcgttcccaaggacgttgcggccgaatgggcgataccccttcttcccgctgagtcagctgcactggttagctgcgcacgtaatgcatatcttggcatgatggacattgactgggaagctcgacagcgagaagtacggcgtgtagccagcgatttaagtgagcgtgtggcggggatgctgtga

SEQ ID NO: 334449 - DNA, 804 bp, Pseudomonas aeruginosa
gtgactgtttgggcatatgcattattggactcgcgctttaactgggttcccgttcaaactggtgaatcgggcgatctcgtctttcgacgtgacgacggcctcgcctacgtcaagttggcaccggctgcatgttcagtgaatcttgccggagagcgggaccggctcctgtggctccgtgagcggggcattaccagccctgaggtcatcgactggcacgagacggaagaaggcgtacgcttaacgatgaccaccgttcccggcgttccagcggctgatctcacgggggctgacctgctcaaggcgtggccatcaatggcgaggcaactcggaattcttcacgagcttgcggttagcgaatgcccatacgatcgtggtttgctgctcatgtttgaccgtgctgtggatgtcgttgcccgcggcgcagtgaacccgggctttctgtccagtaaagacaaggacgttcccgcatgccaactattggcacacatcactgatgaactcccggttcggctcgatcaggaagcagcagagagggtcgtttgccatggcgacgcttgcacgcccaacttcatcgttgaccctcgaagccttcaatgcactggcctgattgacgtcggtcgcctcggaaaagcagaccgctacgctgatttggcccttatgattgcgaatgctggtgaaaattggactacgctggcccaagctgaacgagcttttggaatcctattcgagaccttggggatttcggcacctgatcgagaccggctcgccttctatctccggcttgatccactgacgtggggctaa

SEQ ID NO: 334450 - DNA, 1293 bp, Pseudomonas aeruginosa
atggctatcctcgaaagagtctgcataacgccaatggcccccgatttttcagatagatcaaagggaatttcatggacaccgaaagaaaagggtcgggtcatccccaaagtgcctcacgttttctttgacgatggtgagccttggcttgcagctaatgtctacgcattgggcaagctggaagcagtatcaggcaatgacatcaagacagtgacctcaaatatgggtcacctcaaggcatacgccagctggctagaagcccatggtgtggattggcatcatttcccgaaaaagaagaaagatcgttgtttgtttcgctatcgtggcttcctggttgagcagcgtcaggccggtcacattagtccgagtacagcgacagcgcgaatggcggccattgtgcatttttatcgttgggctcaggtgtacggctggattgagcgtcaacccatgtgggaagacaggtccaaaaccgttcagttctacaatgctgttggtttttcccgaaccatgtcagtggtatcgagtgagttgtccattccaaatcgcaagagtggcggcacggctctggaaaacggtttgctgccgttgagcgataaaaatcgaaacatcttgcttcgtttcctgcacgagcagggcaaggttgagctttatttgatggtcctgatcggtttcttcactggggcaaggagtgagacgatccgcactcttcgcctctccagtctcgaaaatgcgacggatgactcgaccacgccaggcatcatgcgcgtaacggttggtcccggtacgcaggtcaagaccaagtttgatgtcaggggctcactcttgttcccttctcagctgcttcaagagcttgagcgctatgcctattcagctcgacgtttaactcgccaagcgagagcatctgaaggcgaccgtactttgttatttctatctgagcgggggaatgcctactcggagacatcgttcaccaaattgatcagctatctgcgtgaaacattgatgagtgcgggcctcaaacagttccaagagttcaaattccatcaaacccgagccaccttcggcacccagctgatgcgtttggcaatggacgttcttccgagtcaggtggatgccatcgtattcgtcagagacgccatgcttcacaaggatgaggctacgacctggaaatatgtgaaattcatcgagaaagaacccatcaaagaggcgctgtcagacgaattctttaacctatacacgggtaaagcgggtgatgccaaaacgttgattgaacaggtgacctataatggccttgcctga

SEQ ID NO: 334451 - DNA, 1758 bp, Pseudomonas aeruginosa
atggccttgcctgatctcttaatccgctctccagacggtagtgacgcccttcgtagcgagccccttgctagattggacctgaggcgcttcttgtacgtgggcgcggtaaaccatagagcccaacaggctttacagaaaatcgatcgtggtgagctgggtgatccgcaactggaacggattgagcttctgctggcgatcaaaaacgagatcgtgacccgcctagtgtctggccagtcgcgtcattcggtccctcactatattgcgacccttacgcattttttacggtttctggatgacaatcaaaaatcgttcagcatcgatcaattagaagcgaattatctggaatttgccgaacgcctgtttattgcggcgaataaaaaaagagcgaccctgaatagaaactcagcctatggtcgagctgtaatattatcagcactttttggttccattttaaacattccaacgaccgtgcgattagttaacagaacacggttaaagcccttcccccgcgccaaaaaatcggtgaatagaacggtcgagaagcagagccttgaggctacctttaagcaaggtaattttttagttgatcttgtgtcggggctgtcgatcgaagcagtccatggtccgttacctcttataataccgatgcgccccggactggtcgagcatgatcaggtgcaattatacgcaggattatctgagctagagtggccttcgacaccaaaagaccaatggactcttcacgaaaaacaacgctatcgaaacgcaatgcgactcaggcgatccatgcgtgatataaaagggaaagggggagccaggagatggcgcttagtaaatctgcgcgtccaggcggaatttctcatcttccttgcacaaacagggataaacttgacgcaagcgaaggagttgaagcgaggcacccttaaatacaaaccacttggagatagctggcaagtaaggtgttacaaaaggcgcaaaggtggtgaggtaagctttcaagtttataagtcgtataagccattccttgaaaactatcggtcatttatcagttatttttttccagagtccgaatctttattccccttgtttgatctgaatggacaaaacgagagtgcgaccaaaactggcttgacttcattcgtgctgatccgttcattgttgactggctacgctatcccttgggtaacgccaagagagttacggagcaccagagtgaactggctgttacgccgttccggggatgcagatctgacagccgagatggcgcagcacacccgaaaggtgctgaaacaacaatacgagcgtcccagtcagcaacgcgcaatgatcgaggtcacgcagttctggaacaagcacgacccgattaagcagggcgatctcacaggctcggtaattgccagtagctgtaacggtaagcccgaggcgactgatgacaagcctgcttcagtcgccgaacccaactgcatcaacccatccggctgtttgtggtgccgacatctccgggattcagataccgaggattacgtctggtctttggcctcaatgcgtcatcttaaaagcattgaggtgagtataacgccaacccgagaaacagtgcctgctgatcaggtgatagaaaggttatcggccaagctcgcgtggtttcgaagctccagcccccaacgcgctcagtgggccgatgaggcacgggagcgaatcgcagaaggcgattatcaccccaactggtctcacatcattgagttcctggagcaaggatga

SEQ ID NO: 334452 - DNA, 2010 bp, Pseudomonas aeruginosa
atgaacgccgacaatttacgctttatgtctcagtccacgttggtaacgactgagtctccgctgtatcaaccaccgagttttcccccgcctgaggattgggtgttgtcagtcgatgagaagggccgtgacctatcgcgctacggagatgatttctgggattatagggcctttgagacaggagcgacgtttaatttcggcagccataaactttcagatgccaatgtgcagctcaccaagaaggcgatgttcctggtgctataccaccctaagctgtttggaggaagaatcaggagtgccgcctattgtttcaactgcctgattagtatcgcaaaggtctgcaatgagcaaggtattttgatttctgatctgcccaagtttccccacgttcaccaagatgttgcgaaggcattgcaaaatgccagttacaagatctatattaattttctgcataagttgcagctgcatgccgatacgcttaattttgcaattactgaccaaaggatgctggcttttttagcgtctcagcagaagggctgggagaaaatccaaaccccgtatatccccccgcgaatctggacttatcagatcaatcgcttaaacgagtgcctcgatgactttctggaacatcaagcggcgatcgaaaaagcgtttacttggatatcggatgcttatgaacacaattcggcggcgcttcctcagcacgataggtttcaaagccctttcggcgaacatcgtttttacaagaagaagcgcattttattcgacggggggttcgatgaattcctggccgagtatgggttattagatctctttgaaagatggatggggtcagagaagcagcgcagcgtggcgcagtttgcacgctatttcagaatggttcgcgatgcgtcgttactgtacatactgaacttttctctgcaacgagtcagtgaggcaatgtctctgagggctgactgttttttgattgagcaggatgagcggttgggggagattgcactaattgttggagagacaaccaaaaccgatccggatgacgatgcccgctgggttgtaccaagatcggtaaaaaaagcggtggacgtagcggccagcattgccaaattgcaaatgcgtcattacacggaagacgtatcggcttcggacgccgtgaaggcgtccactctgctagcgctgccaggcagggagccgtggactcccagaaaaacccacagtcgaaacgtacacggagaactggcggcgatggtccgtctcggaccatttattgccagttaccctcgcgtattcgaccccaaagaaatcactgtaaccgaatctgactggaagattgcagtgtcgatgactccgaatctaagcaaaaaatccggatttggggtcggcctgccctggcagtttactgttcatcaattacggcgcaccacgagcgtcaatatgtttgcctcgaacatggtctctgacaacagtttgcagtggattatgaagcatctaagccgcaatatgacgctgtactatggtcgtaactacacaaatttgaggttgaattccgccgccgaaacagccgtcattattgaatcctataaagcgatttaccggcagttggtggatgtgctgaccgatagtgtggagtacgtgaaaccccacagaaaagagatgatcccgtcaaaggttatcaatctcgtagagacccgcgaggagcggcagctaaccaagctcatcaagcagggcgctattgggtgtcgtcgtacactgctgggctactgtatgaagcccggttactgtgaatacggagggatcgaatccgttgcaaaatgtgccggaggtgatggcgggggcatctgtgccgatgcaattttcgaacgtaagaatgaagcaaaactcaggcgtctgaaagttgcacatgaaaaggaaatggagtccttggaccctgacagtccgcgctacagtgcgataaaacaagaagtttatgcgataggggtttatctcgatgccatcaacgaacaagaaaaccgctga

SEQ ID NO: 334453 - DNA, 282 bp, Pseudomonas aeruginosa
atgaaggcaggcattcgaatactggtgcaggccagcgctatcgtcccgttgctggttggcggggctcaaggcaatggtgggttggaataccaggtcttctcagagcggttccacgaccttgcagccaccttgaccaaacactccggtgatggatggagcctgaaggcggtggaggtcatatccctcaactgcccgcaaggcgttaaggagtgtgctttggtggttatggagcgagagctttccagcaagccaagagcgtcagcgaacaacactcgaaactag

SEQ ID NO: 334454 - DNA, 1935 bp, Pseudomonas aeruginosa
atgccacgaacacgtttgttcctccctctctcccgtcctcaggcaaatgctttggaagatcgcgactgcgcccccgtagtgctgctttcgcagtggtctattccgtccttggcggcagtgatcgcgatccagtcactaccgacgctggctcagacaatagatcccagtgctcgactggagcgcgcattagcgggccttattgatgccggctttgacctggaatccgctggccagggagcttctttctcctcgctggtgatcagccgcttcaaccctcagttgttcagcgccgggctaaatcagctgcggccactgtcaatccgtcttctcgaacccgaagatctggatgcagaggattacctcactgaagaccgaaaatgggacttcgaattcaccccacgccatgcagaggccttgaacccatttaccgagggttttgttgacgcagctggaaactccttcaacctcgccccccaacaggcccgggcattccgtgtctttaagtcagaactggatgaggactttcacctccaggctctcgccggaacgggaaagacgttcatgatcgaacgtctcatcgactgcctcacctcttaccgccctctcgtcctggccatgaccaaggtgcaacttgatgccctgcagcagaggatcggtacagggcgggtaacgggtatgactttttcggagcttgcagtccgctcgcttcaactggatgtcgggcggcatggttccagatctttccgcttatcgatgagacgagcgcgtgtagagatgagccagattgccaaccacctagaattcaagcccgttggtaacctcactcccagtcaagtcgcctcagtggccaacaggactgtcttccggtactgcacaagccgtgacgccgagattggagttcatcatcttccatcattgggcgggtcgtactcggtgccccagaaagagcttctggtccaatgcgcaaatcgactctggcaagagaccattttcccgtcgtcttcatcactggagctacctgtccgtggctaccaccggatcaaagaggtttcgctcagcagtacagcggccgtcgagccaggcttcactcacgtgatcgtcgatgaggcccatgacctccctgccccaatggctcaattcctggatcggtgctctatcccggtgatcaccttgggggattcctgccagcgcctggacggggccgctgtggagcgtgcgccacacgttcgccggcgtgaaatattccactctctccgttctggccgagagatggaagctgcggtgaacaccctgatcgagcagaaccctgtggtcgacgtgcacccgctcgaggggaaccgcgatcaggacacaagggtcgtgttctatagccgtcccttcattcccgagcaacccactactatcttggtgtggtctgaatggggaatgtttgagtggttccagcgcttggccaacgcgaaggcacagttcagccttctgccagggtgcgagggaggttttaggtggtttgtcctcgactgcatagggctctaccgcgaaggaatcagaccgacacacggcgccctgttcaagtacacctcctgggacgcgctgcgaagggatgtctcgaagcgggagagcgcctttgatcgtatcgaccggatgcttgaaaagggatattccacaatggacttcgagcgcagcctcatgaagttggaacagtctggcaagacgccatacaaactgggaacggtcgttgcggccaagaactcggaggtcaattctgtgatgctgacccctgagctactggatagcaccggttccgatcgtctggatgctgcccgggcttttgctgcggtctacacaggaggtacccgcgcccgccatcagctttttgtacctgggcatttacaggaatgggcttccgatactgcggccagggcgaagtgcacctag

SEQ ID NO: 334455 - DNA, 396 bp, Pseudomonas aeruginosa
atggccagcaaagccgtattagagcttcgccccaccaacttcgcgggcttgatggacgctctcaaagaggtgaaccgtgtgatgttctctcctgagcgcttcctcaaggttttttcgatggaccagcagaccttggcgctccgggcccatgtccatcgcaacaccgtgcgcaacgcgcctgaatcggaaaaggtccaagcctacattcgtgattcagtgaaggttctgcgtgcagtgaccgacatgggcacggacgtgacgaatgccatcttctggtttaagaacgagcctctttccacgttcaactacaagaccgcggaggaagtggtcagcgaaggaaaaaccgagcagctgatcgctttccttcaatcctgggaagctggtgcgcaaggatga

SEQ ID NO: 334456 - DNA, 1251 bp, Pseudomonas aeruginosa
ttgagtcaatccctgaaacccggcgagaacacaacgatcaaccagcccaaaggccaggtcctggtagcgcattccgccggcgcaaatctcgacgtgaacctgacggccttcctcgtcactgacacaggcaaagtgatcgatgacagcggaatggtcttcttcaatgcaccagagcatgcctccggcgcagccgctttctctcctcccatcaaccaggccggaacggtcagccacagcatcagctttgacttgagccgtcttccacccacaatttcgaagatcgccatcaccttgacccaggacggcagcggtggaggcttcgccgaagtgcccaacctcactgctcgagtcatcgccggcgaacaggtactggaccttgcccccggggccttcgaccgggagacggggatcatcgtgctcgaactctacattcgaaatggccaggcaaaggcgcgatcagtctggcagggtttcgcctctggcttggccgggctctgtggcatgtacggtgtagaggtcgacgaagcgccggcagctgctccaaccccggccgcgccccctgcaaagccggtgaacatcaccaagtcagttgtcaccttggacaagccaggaacctcacacaaagtctcactggagaaaggtgcggccgcgccgaaggcgatcaaggtcagcgccacctgggtggacaacggcgacggtcgggacaatgacgacctagaccttcgcatcggcatccttcgcccagacggtcgaatgtccataatccaggcgcctgacaagcgaggctccttcgatgctgatccctttgtgttccataccggtgacgtggtgagtgccagcgcctccgctcctgggatcgaaaccgtcgagatcaacccggccatctcccatcgcatgggtggcaaagttgcgctggtctgcagtgtctattccgcggtcgacaatggcgccgtgtcggttgcctccctcaagccgagaatgcggatggagtatggggaccaggtagtagagtgtgccttcgaatttaaaagcgggttcttcagcagtctgatttacacctacgtcctggggacgatcgaaatcgacggcgatgaaattcggataagccccagcggagtgacctccaaaaccggttctgaagccacgccctggctgatccgcaagggagacaaggtcgaactgacgatggacggcccgcacgtgttcaaagggcgtccgctcgagcggaaaggaagcaaacagtacgtgtaa

SEQ ID NO: 334457 - DNA, 1056 bp, Pseudomonas aeruginosa
atgcgtacccgtgaagctggattcacattgcttgaactctcggttgtaattgcaataatgtctatgttggctgttatgtctgttccaagatacttggaggagataaacgacaatagagtaaaactcgcagcctctgaaactcagactgtgatcgatgcggccagaacatatcgagcgcgaaacggctcctggcctggtggcgctacgtgtttgcaggctatccaagcactacaagacaacgttccccctctcattccgggtaacctttcggtcaacaaattcaataaggcggtgtccacctcatgcaccgcttttacatttagcgttgaccaggaggttgcccaagactgggacggtgtgctttctaacatgctccccgggacaagcatcgtagacacagctgcgaaccgaataagaaccacaattggagtgccgggctcagagccagcacttgattccaaactatcgcggattgtaacagctaatgctgacctgaataggatgcagactaatctcttgcttggcggaaataatataagcgaggttaataatatctcggcggtatcggcatcaatcagtgggaatgtgagcacgaatactttaactgcccaatctgcttcgatttcagggcaggtcaattcaaactccgctgtaaccaactatgcaactatcaacggaacagcgactatcggtagccaggtaacctacggcaccgccgctgtgtatggtgaaacctggtttggtggggcctcgcaattcgatgggaatgtggtgctgaaacagggggcggtcatcgccaacatcgttggcgaaaataccgcgtgtggaatcctcggccagcaggcgcggaattcgactggtgccactctttcttgtgacaattaccgctggacaaagcctggcggcatcaatggcatgaggaactgccgatggatcactggtgcaccgtttgcgacaaagatttgtcctgcaaacatggtagccacaggcatgaactataacggctacggcagcggatattctgaccacgatgtgtactgttgcgaggtgtactga

SEQ ID NO: 334458 - DNA, 192 bp, Pseudomonas aeruginosa
atgtctgtcgcactttctattccaaccccccgtaagcagcgaatcatcgagatagcctcggagatcgtggatacgaaggttgagcgcggagaactcgaccccaatgatgagggtgcaatggacgccgcatgcagggaggccgtcctagatgcaaagacgctctacgatgctgccgttgaatacgtcagctga

SEQ ID NO: 334459 - DNA, 255 bp, Pseudomonas aeruginosa
atgagagaaccaatcattacccctgaagacaacgcccaatacaggctgctcatggccgactgtgttcagctgatgcgtacgtccagaggcgagccggtgcccacgtgccacttcacggcgatggagttccatgagtgcgactctgaccccagcggccgcactgatgggtatcagtgtcggcattgcggccacactgagtcgagcgccgaagcctgggcgaaagtcgaggcgcgcaaccaagggcagactgcctag

SEQ ID NO: 334460 - DNA, 1092 bp, Pseudomonas aeruginosa
gtggcggaagccattgccctgggagtacgagattcggctcctgacgctgaaatcgtatgcgtgccaatggcagacggaggggagggtaccgtcgacgcggtcctggctgccaccaggggggaacgccggttcagccgcgtccgtggaccacttggggcagaggtccaggcaacctgggggtggttgagcgaatcccgcacggcggtgatcgaaatggcggctgccagtggcatccacctggtagcgcccgccgcccgcgacgtgacgcgcgcatccaccttcggaactggtcaactggttctgcaggctctaaacgccggcgcgcaacgaatcatcatgggattcggtgggagcgcgaccaatgatggcggtaccggaatgttgcgagcgcttggagccaagtttctggactctgccggcgatgagctcgaggagggtggactggcgctcaatgcccttcggcggatcgacctcagtagtttggatgaaaggctacataaagtccggattgatgttgcctgtgatgtcgacaacccactcaccgggccaaaaggggcctcccacgttttcggcccacagaaaggtgcatcacctgatcaggtcctggctctggatgaatcattggccgcgtatgccgacatcgtggcagagcagctccaggaagacgttcgtgatttccccggggctggcgctgctggaggtataggcttcgctgcaaaggcatttctccaggcagaattcaggcccggcgttcagctgatcgcagatctgtctgggctgagcctggcagttcaaggagccgacttggtgatcaccggcgaaggtaagctggacgagcaaacgctatatgggaaaacccctgctggggtagctgctatcgcagctgcagcaggggtaccgactgtagcgatcgccggcacgttgggagctgggtatcagcgtctgcgcaacattggaatcgttgcagccttctcaatcacttctggcccaatgaatctggagtccgcgtgcgctgacgcagcgatgctgcttcgtcatagagctgcggacgtggtgcaactgtggaaggtagccagagtagggggggcctga

SEQ ID NO: 334461 - DNA, 282 bp, Pseudomonas aeruginosa
atgatcacttatgcgtgtgcattgaagaaggcaaaggaacatttaatggattcggaagtccctttgcaaattacatatgagggtgagttttccgaagggtggtatttctgctaccagtcaaaggagtttatggaaaccggtaatttgtcagctcaactcgcagggaatgcgccatttttgattgataggcaatctggtgagcttcatattctcggaacagcaaaacctttagagagttatttggatgactacataaaaaacaaatccgtgaagttggggtga

SEQ ID NO: 334462 - DNA, 756 bp, Pseudomonas aeruginosa
atgtcgaagtcgttgatcaatgaagcggtcctgactcaagtgctcaaccacctgcgcaacggccagctcaggcgttgtgccgagatggggctgcggccggagattctggctcagctccaacagcctgccgtcatgagcatcctgaccaataccccggtttcttgggtagacgtcagagtgaacatcgacgtcatggagaaaatcctggccacagccgagcgcagcgcgcaggaagagctgcagatcgaacgcgcactgaagctgggagccaccacaacgatgattcagagctttttcggtctgtcgccggaggacaccgccaccaagcgcttgatcctggagatccacccgcgccgcggtcgctggcggcaacttgacgaacagaccgaacgccagatttggttccgctgggagcacctgatgcaggaaaaccaggtccgcctcgaggacagcatggagttgctggacatcgcgatgatcctcaccgaagaagtcaacgccggagtcgaacaagacagtccagagttcatcagcctcgccatcgtttggtctctcatccagagctggttgaaagacagcctctaccaaccaaacaggaaagagcaggccaagcccgccaccctttacctggccaacgtcagcgctcacctcccctcgcctacggctcacccgccacagagcccccgcttggagattgagtctgcgcagcagcaactcctcaacctggttcagtccgaaggcgatacgacaccatga

SEQ ID NO: 334463 - DNA, 270 bp, Pseudomonas aeruginosa; identical to SEQ ID NO: 324452

SEQ ID NO: 334464 - DNA, 363 bp, Pseudomonas aeruginosa
gtgaaagaattgtttggtcagccatacagcgagtcagacccttattgggtcgttaaagggtattttgacaggatgtatgatgatggctacttcattgaggcggttggctatatcgtgaagagatgggggttcagtacggatggggcgtactgtaacttccctgatgaaaatagtccgtttgatgaggagcacttcgagggggttgagttttcttatggctatccccctaaggatgaagacaccattgttgtgagcgaggttgtttgttctaagttcattcggctcgcttgtgaaaaatatcttcagcgccatcctgaagatgctgagaaagtaaaagagcttttagataagctgtctttctga

SEQ ID NO: 334465 - DNA, 627 bp, Pseudomonas aeruginosa; identical to SEQ ID NO: 324103

SEQ ID NO: 334466 - DNA, 1203 bp, Pseudomonas aeruginosa
gtggcgcagcccggggataccggctggtcgcagtccttcagcaccatcaacaaccagtcggcgaaggtgccggtgtggtgggcgttcatgcacgcgctctcgcgcgccgtcacgggcgcttcggtggcagcgatcccgtgcggcacggacctgcggcagatgcgcatggagatcgacgctacgcgcatcgatgacccggtgctggctcaggaagtagcggatttctcgcgggattgctatgggcctgcacgggccaaattgttcatgcagcgccctcagctcgatgagcagcagatgcacgacgtgacctggatcggatcgcggttcttcaccgacacgaacggctactacgacacataccgttccagcaccccacgcgaggactggccctatgacagcacccgcgacgcagggcttgcgcaggtggccagcggtggcggctacccgacctgccgccagtggtggagcgatggaagtaacggcctgcgggcacgcctgctgggtcaggtggacccgagcctgttgagtcgcctggcgggctgggccgggttcctgagccgggccgaggtggacgactcggtgatccgagccatcgcgtcaccgcggcagcagaagttgaaccagggcagcgtctatacggactacggaggccagatcgacaagaccttgccgaacatcgtgacacgggccacgggagacgttgggatggccgtcggcgcgattgccgcgtttcccgccatggacgtcgtgagacagtctctacccatggtcctcgccttgctcaagatggcgctggtcatctgcatcccgctcgtgctggtcgtgggcacctatgacctgaagacggtcgtcacggtcagcgtcgtgcaattcgcgctgttcttcgtggatttctggttccagctcgctcgctggatcgacagcactatcctcgatgcgctctatggctggggctttggctggaaccggccacacacgaacttcgacccgctggtggggctgaacaatgcgttcggcgacatgctcttgatgttcgtcgcgggcacgatgttcctggtgctgccaggattctggctggcaagcctgacctgggttggaattcgggcgggacatgccattcaggggttgtcggacggcagcaagagcgccggccaagccgggggcaagggggctggggcactcacgggaggcaagctgaagtag

SEQ ID NO: 334467 - DNA, 651 bp, Pseudomonas aeruginosa
atgcacgcacacacttcatccaccacgctgttccacatcgacgaatgcccggacgttatggccgacgcttgcgtcggcgatgaccagggcaacctgatcttcctgtccatctgggcgcgcgacaccgccgtccagcagttccttgcccgcctgaccctcgggcgcgacgagcagggactggaccagttccacatcatcaccgacgagggcggcagcgtcccggtgttcatcggcaacgtcgatcgtctggagaagcgcatcacgcgcgcttaccgacgcacgctgttcggttcgctgtccaacgtgtggctgctcgaccggcgctgcgtcaagcccgatagggccaacgccagcgcattggcactgctgccacgcgacagcgcccaccggctcgaccgcttgtggacgttggtgcgggatacctgcccgttaccgctactcgaccactggcgcgagaccgtgctggaactgctgcaaagccgcgagatgctggcccgccttccgttcgccctcgggccgctggaaggccatcggctcgccatcgacgtgccggcgctgagcttggcgctgggctccctgatccgcagtgacgcgctcaccgcctatccctatccggccaagatttggacgccggaagcggtagcggcttga

SEQ ID NO: 334468 - DNA, 888 bp, Pseudomonas aeruginosa
atgactctaacccctaagagcgaagcaattcgtatatctcgagttttgcagcacgtcttggggcccgatcgattcccggtcaacgttagagagttggcgcttgaatggtcgtcgcagacttgcccagatcagccaattctgggaatcaagccggtgccgttaccttcgttcgaaggcatgctagcaaagagcccaaagggcgatgggtggatgattggcgttaacgaggatgttgagtcagaaggtcgaattcgcttcaccattgcccacgagtttggccactacatactccatcgcgagcgtcagtctcacttcaattgctcgaatcaagacatgcacacctgggatccccatgggcgtgagatagagctcgaagccgatacatttgcatcctatttgctgatgccgctcgacgacttcaaagcacagatagatgggcagccattctcattggacctgcttcgtcactgcgcagaccgatacggtgtttctgtcacggcagcagccttgaaatggcgggaggttgcaccaggtcgagtgatcgttctctcagccaaagatggcttccttgactggtcctgttcaaacgagcgggcatttcgatcaggtgcttacttcgcaactcgcaaagcccccattgaactgcctgctgagtcgatactgaaccatgcagcacgatcagtgggtggacagtccggagtcgttcctgcaagtgtctggcttccgcgagaaaataccgagcttgaaattgaagagcatgcctttgtcatcgagggccatgactacaactacacgctaggtgttttgatcctgcctgaagtagaaaggtatctcgtgggcgaggatgagctgctttcccctttaactggggtaccgtcattccgatag

SEQ ID NO: 334469 - DNA, 651 bp, Pseudomonas aeruginosa
atgcccgcaaacccttcttccaccacgctgtatcgcatcgacgaatgcccggacgtgatggccgacgcttgcgtcggcgatgaccagggcaatctgatcttcctgtcgatctgggcgcgggacaccgccgtccagcagttccttgctcgcctgaccctcgggcgtgacgagcaaggcctggagcagttccacgtcatcaccgaccagggcggcagcgtcccggtgttcgtcggcaacgtcgatcgcctggaaaagcgcatgacccgcgcctaccggcgaacgctgttcggttcgctgtccaacgtgtggctgttcgatcggcgctgcgtcaagcccgacaaggccaacgccagcgcactggcattgctgccccgcgatagcgaccaccggcttgaccgcctgtggacgttggtgcaggacacctgcccactgccattgctcgaccactggcgcgaaaccgtgctggaactgctgcaaagccgcgagatgctgacccgcctgccgttcgccctcgggcctttggtgggccatcggctcgccatcgacgtgccggcgctgacccaggcgctcggctcgctgatccgcagtgacgtgctcaccgcctatccctatccggccaagatttggacgccggaaacggtagcggcttga

SEQ ID NO: 334470 - DNA, 402 bp, Pseudomonas aeruginosa
atgggctggtatttctccccccaatcgcggtctgaactgatcgcggaactgatcacaccgcaagagaccgagcgcaccagcgtgaaggtcatcgcccacgcactgcgtggcaacgtcctctggtctgttacgcaagtgacggccaaagccgacggcgtacatcgtgatctcgcgccaggtcagtccctgcgctatatccgctgcgatctgctgcaacgcagcggcggccagtggggctacaagccgctggacgaatccatgcacccgtactactactcgtgcccgctgtcctatctggatctcgcaccggagcaatccgccgactggcgtgcaggcgttcgcgcctaccacgcgcagaggcgcatacccaaagcagccccggctacgacgctgacggcctga

SEQ ID NO: 334471 - DNA, 699 bp, Pseudomonas aeruginosa
atggcagccacatcggcatccgataaatcggtttcgcccattgtcgtccccggccaactcacgctgcgcaccattcgcggcaagaacggccccttcaccgtcggtcgcctcgccacgcacctcggtacgttcgaggtcaaggacccggagctggagcaataccccgaaggcaagtacgacggggagttcatcatcaggtacatcttcccgaagtcctacccggtcggtggtggcatgcgtttcgaaatccgcgccagtctggacggaatgacgctctacgacatcgacaaactgagccgtgacgaggcacgcagcttcgccactcaggacctcgatccacttgatgaagagctgggcgaacagcctgcggtaacgccggccaaaccagccaaaccagccaaaacgtccaggcccgccaagcccgcacctgtgcaggcatccgcagacccgctggtcgataccaccccctttggtgtggatgcgccgacgcccgctacggcgactgcctccggcagtaccgaagagggcgatgccgcgctgttcggcctgctgtggccgctggatgagtccgtgaaactggattcgaccatcgaccgccgcaccctgcgcgcgcagatcgctcgcttgagcgaactgggttatgcgctggacttcaagacgcaagagtggagccgccaggccgaactgcaacccgcgtag

SEQ ID NO: 334472 - DNA, 279 bp, Pseudomonas aeruginosa
atgttccccgacctcatctcgcccgcacgcgacttcgagcatcagcttggagcctgcgtcaacgccatgggccaggacgacgccatcggccagatcctggtattcgagcgcttgagtggcacgctgcacatgcgccatatcgccagcgccgatctggccgacaccgacattgacgactacgaaatggtcgttttcgacggtggcaacaccggcggcgacacgtggaagcacgtgttctttccacgtcagcgcgaacactacttcgtgtaccaagcctga

SEQ ID NO: 334473 - DNA, 738 bp, Pseudomonas aeruginosa
atgtctcagaatcccaatccctttgttcgcggctactggaacttgaaaatcgtccgcacgctgtccatcagctacgaggacggaagcccgcatgtctggcgaaatatccacccgagccagcaacatctttccgaccaggaactgatttcatcttcctgcatcgtcaccagcgatttcgcggtggtcacgaacggctctgaacctataagcgccgaggtgctggccgaatgcgatgccgatgagggcgttaacggcgaaggcgtgatcggtgccgtggtctatgccattcatggcgaggacttcgacgatcgcctgatccacgtcggtgacagctattcggtcgaggccgcgcgggaaatcgtgcagcgcctgagtttcgagaccggctactacagccgctgctgggaaatcagcagcgcgcacatcagccaggaaaccggccagtacctcgccaatctggcggacctcgccacgccggaggcctttttgttcatcgcctttcgggttccgtacagcccggcgatcggcgtcaagctgatctcaacgccctggacggaccagaacctggagcacgccgatggcatcaccgccgagcagcttcggcaggagcaccgcagcaagggcatgccagacgacctggcgaacatcctggaactggctggccaggccgatgtgcgcatcctcatcctcgacgccgacgcgcccgtgttgccgggcttgccgctggccgagtcctag

SEQ ID NO: 334474 - DNA, 393 bp, Pseudomonas aeruginosa
atgaatcaactgctgccgcaggaagtcgtcgatcagatcatgcgggaagagcagcatttcgctgccgcgccccaagccttcttcgaggcatggaagcgtggtgccgagatcgctggccccgaatggttcggcgacggcacccgtgaaggtctgaaccaggccaagagcaagtgggatctgcgtcccaacatgctgctgctcaatgatgccctcggcgtcctgagcagcggcgaacgcatgttcctgtccgccatggtcagcttctacaacgcgcgcgagggcggtgccatgctcaagcgctgccacttcgacgggctgtcggacttcgacggcctcgatctgcaacgccgcaaggtcatcgccgacttgatggtgaactacagcggctggtga

SEQ ID NO: 334475 - DNA, 1602 bp, Pseudomonas aeruginosa
atgagcctatcgtcagtgttggcctgttctgacaaaatcggcggcatgactttgcttcctgatttcgaccaattaaaccctgaacaactgcgcgctatcgccgcgcagctgatgcagcgtgtcgagactctcgatcaaaaagtcgagtccatggacaagcagatccatcactacaaaacggtcaacgacaagctgacccacgagatcgcacagctcaagcgtttcaagtttgccaagcgcagcgagcaactaaacccgtatcaaaccagcctgctcgatgacgtgatcgatgccgatatcgcggccatcgaagccgagcttgaggcgttgcaacccgctccagccccgaccgtggctcggcaaaaacctaaacgcaccgccttgccgcccgagtttccacgcacgccaatccatcacgaaccggacaacactcactgccaatgcggctgcgccctcaagcgtatcggcgaggatgtcagcgagaaactcgactacacgcccggcgtgttcacggttgaacaacacatccgtggcaagtgggtctgtgaggactgcgagaccctgatccaggcacctattcctgcgcaggtcatcgacaaaggcatccccacagcaggtttgctggctcaagtgatgatcgccaaatacggtgatcatttgccactgtaccgtcaggaaaagatctttggccgggccggcctcgccatcccgcgctcgaccttggcgcagtgggtcggcacctgcggtgtgcaactgcaaccactggttgatgctctgcgcgaagtggtgcttggacacaacgttgtgcacgccgatgaaacgccggtacaggtgctcatgcctggcgcgaagaaaacccatcgggcctacgtctgggcctatgcaaccactgcgtctgccgatatccgcgcagtggtgtacgacttcagccccagccgctcaggcgaacatgcccgcgccttcctgcaaaactggaagggcaagctggtctgcgacgattttggtggttacaaggccagttttgcactcggtgtcaccgaaatcggctgcatggcccatgcgcggcgcaagttcttcgaacttcacgccacgaacaaaagcacgctcgccgagcaagctctgcgttatatccagttgctgtacgaaatcgaaagtgaaatccgcgatttggagcccgatgtacggcgacgaatacgacaagaaaaagccgtccccgtgatggacatgctgcacacctggatgatcgcccagcgcgagctggtacacgatggcgtggccatcgccaaggccctggattacagcctgaaacgctggacggcgttgtcacgttatctggatgacggcgcggtgcctattgataacaaccacatcgagcagcaaatccggccatgggcgctcggacgcaagaactggctctttgcagggtcgttacgcagcggacaacgcgcggctgcgctgatgagcttgatccaatcggccaagcttaacgggcatgatccgtatgcttatctcaaggatgtgctgatgcggctgccgacccagcgcgccagtgagatcgccgggttgttgccgcataactggctgccgttacgcaacctgtaa

SEQ ID NO: 334476 - DNA, 609 bp, Pseudomonas aeruginosa
atgaaacacgaaatactcgagaagaacgtcggcctgctggcgctatgcatggccgtggccgtgagcatcggcggcctgacccagatcgtgccgctgttcttccaggacgtgaccaacaccccggtcgaaggcatgaagccctataccgcgctgcaactggaaggccgcgacatctatatccgcgaaggctgcgtcggctgccactcgcagatgatccgtccgttccgcgccgaaaccgaacgctacggccactactcggtggccggcgagagcgtctgggaccaccccttcctgtggggttccaagcgtaccggtccggacctggcccgcgtcggtagccgctactccgacgactggcaccgcgcacacctgttcaacccgcgcaacgtggtgcccgagtcgaagatgccggcctacccgtggctggtggagaacaagctcgacggcaaggacatcgagaagaagctcgaagtgatgcgcaccctcggcgtgccctataccgacgaagacatcaagggcgccaaggactcgctgaaaggcaagaccgagatggacgccgtggtcgcctacctgcaggtgctcggcacctcgatcaagaacaaacggtga

SEQ ID NO: 334477 - DNA, 162 bp, Pseudomonas aeruginosa
atggctaaggccgatcatagggcagtcacgcccagaactgaacgttttgccaccgtcgccgccgattcaatagccccgggagtgccggggctatttttattgaaaacaacactacttaccgtagttgaatgcaataccaaatttcatttcatcaacgtgtaa

SEQ ID NO: 334478 - DNA, 396 bp, Pseudomonas aeruginosa
atggagctgggtcagctcatccagcagttggaggaaatgccggcgcccgatggcttccggcgcatcacccacatgctggtcgatgcgggtgcccgggatttcacctgggtcgatccgacgccgtccaagatcatcgagacgcctccggcgatcagcttcacggtctcgaccgcgaagttcgagggccgggtgacggtgctgtacgaccgaggcggcgacacctacgtggtggagctgcatcgcgacggcgaattggtcgatcggcatgacgaggtgtatttcgacatgctcggcgaagtgctggagcgactcatcgacgacggacgttggcgcctgatcgatgtgagcgtgatcgacgccaaggctacccggcagcgccaggcggtgccggcatga

SEQ ID NO: 334479 - DNA, 429 bp, Pseudomonas aeruginosa
atgatctccgtcctcggaaccctcgatccaagcactactgacctccctctgtactcctttcaggtgccagcaggcttcccatcgccggcagcggatcacctggaaaaacgtctctccctcgacgagcttttggacgtgcgagcgcctcacatctacctggtgcgcgttgaaggcgattccatgatcggggcgggaatttatccaggcgaccttgtcttggtcgaccgctcgataccgcctgagccaggccacatcgtgattgctgcggtgaactgtgagcctctgtgcaagcgccttgctcgagagggtagccaagtcgtgttgcggtcggagaatccgcactacccctccaggtatttgctggaaggagaagaacttgagatctggggtgtggtgacctacagcgtgcgcagccatgccaagctctga

SEQ ID NO: 334480 - DNA, 246 bp, Pseudomonas aeruginosa
atgcaacaaccggagaaagtacgagccgcgttcgagcgcgaccttggcaacaaggtgctgttcatcaaggacggcaagctgctgtttatcgatggcatcaacctcaaggccatcgccgaccgtaaggcgtatttcgcttcgctgcgtgcgcggcaaacgcaacccattgtggtcctggccgaactgggacaggacgaggcattcgccctgtggaagcagtatgtcctgggcgacaagaccgagtga

SEQ ID NO: 334481 - DNA, 396 bp, Pseudomonas aeruginosa
atggaactgggtcagctcatcgagcagttggaggaaatgccggcgcccgacaggttccggcgcatcacccacatgctggtcgatgcgggcgcccacgacttcacctgggtcgatccgaagccgtccaggatcatcgaaacgcccccggcgatcagtttcacggtttcgaccgcgaagttcgccggccaggtgacgatcctctaccagcgcggcagcgatacctatgcggtggagctgcgccgcgacggcgagttggtcgatcggcacgacgaggtgtacttcgacatgctcggcgaagtgctggagcggctcatcgacgacggacgctggcgtctgatcgatgtgagcgtgatcggcgcggagacgtcccgacggcgccgcgctgtacctgcgtga

SEQ ID NO: 334482 - DNA, 543 bp, Pseudomonas aeruginosa
atgaattcaggcttcccattcaatctttctggaaaggatctccctatagcagtacttgacgtctgggaacgagaccttaccgaaaagacatctctaatcaaaagtctggagcagcggtggcgcgaccacaaagcccacgacaaaaaatactcatggtttaaagacgacaaccaaaaatgctctctcgcttacgagtggctacaaaagaacacatacctcaccatcttccgcactcccatcgaaacatatgaagacctactgatctttttcgacaacgcgaattacaccagcgagaaagaagaactttatattgggaaaattaaaaaactatggaaccaaagaaagtacagaagcaccctaaagggcaagtcacagtataactttgtcctgtcagacaagaccatcgagatgctagacaaaatttcagaacaacacgaaatcagtcgagctcgagcactagaaatactcgtagagatagaaactgaaaaaggcttatacatctcagaaaagctgcaaaactctaaactgcttcgcaacacttag

SEQ ID NO: 334483 - DNA, 519 bp, Pseudomonas aeruginosa
atgacgcgcggccgaaagatcctgacctggagcctcgccagcctggtcctgctgctggcggcgttggtggtgttcatcgccaccttcgactggaacctgatcaagcccaccctcaacgaaaaggtctcggcggcgctgaaccgcccgttcgccatcaacggcaacctcgccgtggcctggcgccgcgaggagggcgaggaaggctggcgcgcctggatcccctggccgcgcttcagcgccgaggacatcaccctcggcaacccggagtggacggcgggcaagaccaaggcgagcgagttcgccagcctggaacgcatcgaattccgcctcgcgccgttgccgttgctctggcagaccatccgcattccacagatcaagctgacccagccgcgcgccgagctcctgcgcctggccgacggccgcgccaattgggatttcgacctgcctgcctgccagcgacagcgacgagccgtccgcctggcaactggacatccgcgagatcggtttcgacaagggtag

SEQ ID NO: 334484 - DNA, 858 bp, Pseudomonas aeruginosa
gtggtgtcaagaaaagatattaccgtcaatgacggcgctattggagatagggagttgaatatcgaaaaactgcaggctgatatcggaagtgggtatacgcagaaaatcgtgaagcggcttcatgactttgcatatataccgatgcctgtcttggaggagattaaaagcaatgctctcagtgagaactgggggaaaaatcttcaggcgctaaagaaatatctcgcagtgaatgttgcttggagtgtcgaacagggaagagttaccttcggggaagatcaattttatctcactgccggtagcttgcagactagatacggtacgcctttgtatcttgtattcatggccggagatgaggaaggaaaggcgccatggaagttaattaaaggtggcccccatatcaacgctccatctctgccatctgcccctgagataccaactgggctacaaatgccaaagggggcagagattgtgatgcagcatgatcatatgctgaaagacaatgccgatagggttgagttcttaaaagatgctccgcctgttgctcagatgtgcgcaatttctggtgccatacaatggtcaataaataggagcttgcagcttccttactggtattttggaagcatgaattatcttgttccgctttacttgcgtgatcgagaggatattaccgccgccccagatctggtggctcctattcaaattaccaatgatcaaatattggtcaggaccgtcctcgaaccacacatgccttattcgaatgccagggttggcgttaaaagacatgatcagttgccatcttggatgttgaggacatggaacgatcacgctgatgttgaggctaacggtgaagagcaatag

SEQ ID NO: 334485 - DNA, 1914 bp, Pseudomonas aeruginosa
atgatcaagcgcaccctctaccacttccacttctgctgcggcctgggcggcggcgccaagggcttcaaccgctcgcgaccgcgcgtcggcaatgtcgaagcgcaatgggaatgtctcggtggcatcgacgtcgatgcgggcgtattgcgcgatttcgccaaactggctggcgtaccaggcacccagctggacctgttcacccgcgaccaatacatccgcttccatggaaaggagccgcccgccggttggcgggaggcgactccggaggatattcgtcgcgccgccggcgggcgccgaccggatgcggtgttcatcagctccccctgcaagggcgcctctggcctcctctccgagaagatgagcctgaccccgaagtaccaggcgctgaacgagttgacgctgcgctgcatctggctgatgggcgaggcatgggctgatgacccggtgccgctgatcgtcttcgagaacgtcccacgccttgccagccgcggccggcacctgcttaaccagatcaacagcctgctcggcggcttcggctacgccgtggcggaaaccactcacgactgcggcgaactcggcggcctggcgcagtcccggaagcgcttcctcctggtggcacgccatgtcgagaaggtgccgcccttcctgtacgagcctgagaagaagtcgctccgcgccgtcggtgacatcctcggccgcatgccgctgcccggcgatatcgaggctgccggtccaatgcaccgcgtaccgtccttgcagtggaagacctgggtgcgcctcgctctggtgcgagccggcagcgactggcgcagcctgaacgacctggccgtcgaagacggctacctgcgcgatctgatcatcgtgccggagtaccaccggggcgtcctgggcgtgaatcactggggcgattcgtgtggcgttgtcgccggcgcgagccgcccgatgaacgggcggttctcagtcgcggatcctcgcgcgccggcaaacgccctgcagtaccagcagtacggcgtgcgccgctggaccgacacctcgggcgccatcatcggcgtcaagtcgcccggccagggcacgtactccgtcgccgatccccgcggccagagtttcggcaagtacccggtcaccgactgggacggtccgtccggcaccgtgatcgcggccagtactaccggccagggtgctttcgcagtagcagatccgcgcccgggcggcgtccggcacaacaacgtgttccgcgtcgtcagcatggggagccacgccggaaccatcactggcgggcactcgccgagctccggcggccaggctgttgccgatcccaggtaccacaactggcaccctggggcgagcagccgcaaattgcacgtcggcgagtggggaagcgctaccggcacggtcaccggctcccagcaggtggccagcggcgctctgtcgatcgctgatccgcgcgtgctcgatcgcaccaagggcgacgcctacctgaccggcgggcactacggtgtcgtcgggttcgaccagtccgccggcgcagtgtcggccagcgccagacacgacaatggccggtggagcgttgccgatccgcgcatgccggccgcgaatgaccgtctgacctgcatcatccgcagcctggacggcacctggcacaggcccttcaccaccctggagttggccgcgctgcagagcctggtggacccggaagaacagttgatcctcgacggcctgagcgacagcgactggcgcgagcgcatcggcaacgccgtgccgccagccgcggccgaggccatcgccggcgtgatgggcaccactctgctgctggccgaggccggcgaaaccttcctactcagcagcacgccgatctgggtacggcaggtcgcggtagggttgagcgtggctcaacaggagaacgcggagcgctga

SEQ ID NO: 334486 - DNA, 315 bp, Pseudomonas aeruginosa
atgcctatcaagatgaatctgtctggcctgaagcgtctgcagcaaaacctcaagcaactcgatggcacgcatcaagtgccgtttagcgagatcatgagtcccagctttatttcgtctaacagcaagtttgcgaatttcgacgagtttgctcgtggtgccggttataaggttgaaactgcggaagatctacgggcgattccagacgagccatgggacgcttatgtccgtagtgagactcctttcgagagttgggcagaaatgctcaaggccggcatagtcgcgcatgccaagcgctcacttcaaaaggggttgtaa

SEQ ID NO: 334487 - DNA, 1638 bp, Pseudomonas aeruginosa
atgatcatccacaacgtagtccaaggctcgccggaatggcacgcgctgcgtgcccagcacttcaccgcttccgaggctccggccatgatgggcgcctcgaagtaccagtcgcgcagcgacctactaaagcagaagaagaccggcctggccgccgaggtcagccagcaccagcaggcgctgttcaaccgcggtcatgccgctgaagctgccgcccggctgatcgtcgaggagatgatcggcgaggagctgtacccggtcaccgcaaccgagggcaacttgctggcgagcatggacggcatggacatggccgagaccgtcctgttcgagcacaagctgtggaatgccaacctcgtcgcccaggtccgcgctggcgaactggagccgcactactactggcagttggaacagcagttgctggtcagcgccgccgagcgcgtgatcttcgtctgctccgacggcacccgcgccaacttcgttcacatggaataccgcccggtcgccggccgcgccgaagcgctgcaggctggctggcgccagttcgccgccgacctcgaggccttcgaagtcgaggcgcccaaggccgaagccgtgggccgcgcgccggagcacctgccggccctgcgcatcaaggtcaccggcatggtcgaggccagcaacctggcagaattcaaggccaccgccctgggcgtgctggccaagatcaacaccgacctgaccaccgatcagcacttcgccgacgcggcgctgaccgtgaagtggtgcgagaacgtcgaggagcgcctggaggcggcgaagcagcatgcgctgagtcagacggcctcgatcgacgagctgttccgcaccatcgacgagatcgccgcggaaacgcggaacaagcgtctgacgctgaagaagctggtcgatactcagaaggaagccatccgcttgaagatcaagggcaaggccgagcaggacttctgcgactacgtggcggccatcaaccagcgcctgggcaaggtgcaactgccggtcatccctgtcgacttcgccaacgccatcaagggcaagaagacgatcaccggactgcaggatggcgccaacggcgagttggcccgagcgaagatcgaggccgacaagtgggccacgctcatcgagcagaacctggccagcctgcgcgaactggcgaccgaccacgccttcctgttcagcgatgcgcagcagttggtgctgaaggccaacgacgacctgatgctgctgatcaacgcgcgcatcgccgagcaccaggcggaagaggagcgccgcctcgaggccgaacgcgaacgcatccgcgaagaggagcgccagcgcctggaactcgagcagcaggaagccgctaccgcgcagcaaccggatcccgtagccgagccggagccagttcccgctgcaccggcccctgcccgcgccgccggacgctctcgcactgcgactgcaccgaccacccaatggatcgcccgcgtcaccgacaagtccgcgctcatcgcagcgattgccgcgggccacaccaccgaggacctgctgatcatcaaccagccggccctggacagcctggccaacagcaatggccaaacgctgaacctaccgggcgtgatcgtcgagaaggcacccgcgaaagcggcctga

SEQ ID NO: 334488 - DNA, 699 bp, Pseudomonas aeruginosa
atggacgacaccatcctcatttaccgcgcgacctacggcactcccgagcaagtcgcccagctctacgcggccttcgcgaaagctcagggggcattcgagccgatcgcaaaaaaccgcgaagtcgaaattcccatcaaagacaaaaacaccggcgcgcaacgcggttcctacaagttccgctacgccgatctcgaggaaatcaacagcaagacccgaaaaccgctcagcgaaaacggcctgggcactatgcagtcgatcgggcgcagcaccacgaccaccgggacctcgatctacacgcgcctgacccacgccggcggcgcctgtatcgaggatgaaatccctctccccgcgcaagacaaacgcgacatcaaggactacggcgcgatcgtgtcctacctccgccgctacgccaagaccgcgctgctggacatcgccgccgacgacgacctcgacgccaacggtgaccgggacgacgacacccaaccgggcgcacaggcagagcagcagccggagggcaacggcaaaccgtcgtacccggacgagaagctggagaagatgctgccgcaatggcgaaacctcatcaccagcggcaagaagaccgccgaccaggttatcgccacggtcagcagcggcaacaccctatccccccaacaggtcgagaagatccgcggcctggtcaccgtaggagcatccgcatga

SEQ ID NO: 334489 - DNA, 138 bp, Pseudomonas aeruginosa
atgaacgcgaagcgcaaagccatctggtacggcgccctcggcgcagccgctctctacatcatcctgatgctcggaccagctatcggcggccgcatcactgcagaacaccccgctacggcaccaaccgccgctaagtga

SEQ ID NO: 334490 - DNA, 144 bp, Pseudomonas aeruginosa
atgtggacataccgcgagcgccgcaaccgcgcggctttcagcaacgcgcaactcgcttacgaccgtgccgtcgacccgctctgggaccagccggaaccggagcccgaggacgagcaggaggacgacgatggcctgggcgaatga

SEQ ID NO: 334491 - DNA, 372 bp, Pseudomonas aeruginosa
atgctgatcttgacccgccgccccggcgaaaccctgcatatcggcgacaacatcaccgtcacggtcctcggcagccagggcgaccaggtgcgcctcggcatcaccgccccggacgacgtcgccattcaccgctccgagatctaccagcagatcggcaacgtccgtccggtgccgccggcggagctggtcgaggcctggaacagcaggcattccggcccggccactgtcgactattgcgcgtaccgggacgccacacccgttcgaactcgcacgctcgggctggcgcggctatccgccgccggcatggcggtcgtgtgggtcgagggccaagccacgccggtgctgctgcgcaactgcaccgctgtctcttga

SEQ ID NO: 334492 - DNA, 285 bp, Pseudomonas aeruginosa
atgaaactctacacaagaaacgatgggcttcttgctctcaagaaggaacgcattgaagcatgcaaggcggcgggagttaccgtgcttggattcggtgagcatctgcccaaggatggaatcctgatagctgactgccgtccgcgcggattcgttggaggtcgtgtgcttgagcgcgatcccgcagcaacgatgctgtacgtcggagacgtattcaagccggaaaagacctactacttcgagagtttcgagcgcgccttaaggaaagccaagaagctcgcagcctaa

SEQ ID NO: 334493 - DNA, 264 bp, Pseudomonas aeruginosa
atgagagccgaccgcaagccaatcacgtcggaacagagggctgaggccaagcggctgatggatgccgagggtccgatcaagggaatgatgcgagtcgcctatcgctgcgacatctgcgagcagattttcatgcaccgcttcatcccctacggcctaggtcgcggccaccgcttcaacttgtgcatgtgccagctcactgcgaacaacatgcacaacacgactcgcgttctggaaatgcgagatcacgagaatcaaaacgaataa

SEQ ID NO: 334494 - DNA, 174 bp, Pseudomonas aeruginosa
atgttcaagaaaggccagtccgtgatcctgaccaacccgcgtggcgtcgcgaaggaaggcaagttcctgcgcaccatcaacaagggcaccggccgcggtggcggtgagtacctggtcgtcgaagtgaacggcaaagagctgcaggcccgcgcctgcaaggtgaaagccgcataa

SEQ ID NO: 334495 - DNA, 1251 bp, Pseudomonas aeruginosa
gtgcgtacacactacgataatcttcatgtcagcgagagtgctagtcctgaggtaatcagggctgcgtataaggctctggctcagaagtggcatcctgataaaaactcgaatcgacaagaagagtctgagcgttattttaaaattattaatcagtctttcgaggttctatcagatccagagaagcgagcggcctatgatgcatggttgaaacagcaaagagcgaactctgttttaggcgaggccgtcataaaggaaggcgagacagccgctgggccagttagaaatgttcctaatgtagagtttgaggccggtttccatccgtggcgtcggtactttgcaagaatgattgatgtttgtgtttttgttataattggatttgtatttttcttggcaataataaaaaatgaaaacctaccattgctgacttttctttttagtaatgtttttctcttgttcgcatctttttttgtattcgttattgttgtggaggttctgtttctgcttgtatgggggaacacagtcgggaaggctctcatgggcgtcaagatagaaagtgcagatggtgggtcaatagagcctctgcaagttgtgaagagatctgttctggtcaatttgcttggccaaggtgcgcatataccaagtcttagtggattgttaaatatagtgagttacttttaccttagaaataacggcttatcctactgggatagagtttccggtacggatgtgctctgtaagccgattagtgtcaagcaatgggtttttagtgtgcttgttgttgttgttttgctggtgtctacaaatgccatattcactatttttgaggttaggtatcgtcaatccattgaggctttaaaagagcatggcgcttctagtgtagataaaagtacttactcttctgccgcttcgagtatccattcaacaatgcttggcggtacacactacgactctatatatgctgcgcatcccgatgcggactatatttttgagtctgatctttttagaggttgggtcgctttggctcctgaaagaggacgagtgttggaaagcggaaatgtaagtgaagttatatctctgtttaatgaatataagatgtatcttggtagtggctctttgaaagtcgagtcctctcaagagaatatctcgccaccttcaaacgctgaagatgctgtatgccagttcaagcctgttatgacagatgatgactacaaagcttgtggcttgcgtccacctggagtgtatccgcactaa

SEQ ID NO: 334496 - DNA, 522 bp, Pseudomonas aeruginosa
atgggtgccatcaaggaatggatagtcggcgcgctgctggccttgtttgccacggcgctgctggtcggcctgggttatctcggcggacgtgtgtcgatggtgcgcgagtacggtgaactggtcggacagatgaagcggcagaaccgcgaggccgccgacaagctggccgagttgacagcccagcgcgacatgaaacaggcggccctgaacaagcaggccgccgaccgggaaaggagggatgccgatgctaaagctgaaatcgctcgccttgctggtgagctgcgcgaccgccctgtgcgcgtgcgcatcgtccccgccgcaggtgggggctgtagtggtggcgccgcaggtgacgcagccggcaccgccgaagctggtgcaggagacgccgcctcggcctacgggctactaccggaagaaaattctcgacgctttaacgactccctgagcgaagtcgaaaccctgagcgcggcctacaactcgtgtcgcgcccggttgattccccaagagccgaccccgtag

SEQ ID NO: 334497 - DNA, 561 bp, Pseudomonas aeruginosa
atgcccacacccggcacgggttccgtcccggaattgcaactcgtcccgttccagctggaacacttcccaatcctgcaacgctggttcgccacggaaaaggagctggtgcaatgggccggccccgccctgcggcatccgctgagcctcgagcagatgcatgaagacctcgcggaaagccgccggcgaccgccgctgcgcctgctctggagcgcttgccgggatgaccaggtcatcggccattgccagttgctgttcgaccgccgcaacggcgtcgtccgcctggctcgcatagccctggcgccaagcgcgcgcggccagggcctggggctgccgatgctggaggcgctgctcgccgaggccttcgccgacgccgacatcgagcgcgttgaattgaacgtgtacgactggaacgctgccgcccgtcatctctatcgacgcgcggggttccgcgaagaaggcttgcgccgctccgccacccgggtcggccgggaacgctggaatgtcgttctcatggggcttttgcggcaagagtgggcggcgggaggcgccggcaacgactga

SEQ ID NO: 334498 - DNA, 516 bp, Pseudomonas aeruginosa
atgtcctactccgaccccaggcattgccaccaccagcgcgtcacccaatggctcgccgcgatacggcagcatgccgcctggctgtacgccgcggatgagcagcacctgtatctggtggccgaggcaaacgaactctatcagtgcggaatcgtgggcctgcaggaccgccacgacatggtcaccgacgccttggggatgtacggatgggcgatcgagcacggcatcacgcgcgagacgtactactgcgcggactgctgctacgacgtgctcgacggcggcgtcgtcgtcgggagcgtggacgacgagggcatctaccacgggcccgcacccgcacgacagcggctgggctacgtcggccgggatccgctcgacgggataacatacctccgcctgggccaggcgcttgagtgcgccggcgtcgtacgcggcctggtgatcgaactcgacgccggcgggacgctgctgcttgtcgagcagatccccagcgacttccggccgtggcgttggcccacctga

SEQ ID NO: 334499 - DNA, 630 bp, Pseudomonas aeruginosa
atgcctatcactgagcagcaactgctgcaaatcctcccgaacgccggccctcgagccggcgtttttgttggtgcgctgaatcgcgggatgacgcgcttcggtatcacttcgcctgtgcgcgcggcggcgttccttgcccaggtcggccatgaaagcggccagttgacccgcctggtggagaacctcaactacagcgcccgcggcctggctgcgacctggccgagccggtacctcggcgccgacagccagcccaacgccctggctcagcgcctggcgcgcaacccccgagccatcgccaacaacgcctacgcctcgcgcaacggcaatggcgacgaggcatcgggcgacggctggcggtaccgcgggcgcggcctgttacagatcaccggccggtcgaactaccgcgccgccggcgccgggctgggccagccgctggagcaggaaccagagttgctcgagcagccggagttcgctgcgctgtcggcggcctggtggtgggccagtcacggcttgaacgacctggccgaccgcggcgagttcgccgccatcactcggcgcatcaacggcggcacgaacggccaggcggagcgcctggcgctgtgggagcgggccaaggcggtgctgtcgtga

SEQ ID NO: 334500 - DNA, 249 bp, Pseudomonas aeruginosa
atgagcaacgatcaacaaatccgcgaactcaccaaagtcgtgaactctcacgcctcggatatccaaactcttaccgctgcggtgttcggtctgatcgcccatctcaacgagacgcaaggcaatgctggcgtcgactcggcaaaaggcaaggctctgtcagtcgctaagagcatgggctcaaccttcggcgcaagaccgaatacacaacaactctcgatcctttttgatagcgccaaggttcctaactga

SEQ ID NO: 334501 - DNA, 231 bp, Pseudomonas aeruginosa
atgagtactaagcaagttgagacgggtagatttcaggtgcgcaatgcatccgggcaaacctttacggtcatcgagtccaccaccgtcgtgcagacccaatacttggacgggtcgcagggtgtcgtccatggcagcaagggataccgagtagcgggagctggtcctgtaaacaagatcagcgaaaacgaattcgagatcgccgcgactggggaagtgctgaagcgtatctga

SEQ ID NO: 334502 - DNA, 258 bp, Pseudomonas aeruginosa
atgacctcgaccacatcccccagtttcccggacggcacgccaatcctgatcagacctgagggcttcgacctgattagcggaaagttctatatcgcgcgccaccgggatggcgaaaccacctttaagcagtacatctacgacgctggtcgtgaatacctggtccctcttaacgccaagttcgagaccgtcgagatggatggcgcttgggatattatcgggcgcgtaatcgaccagaaggcgccgaggggcgtgctctag

SEQ ID NO: 334503 - DNA, 423 bp, Pseudomonas aeruginosa
atgaaagtcaggatactggccggtctagtcatcgcaacctcatcgtgcctgagtctggctgagccgacatatatcgcgaagatgaccggcctgcctgccgtctgcaagcttgagagcatgtatcaacaggccgaggtcgatgctgctgcaaagaagtatggcgaaggtagcaagccttggtctaaagctttccatgccaggctggatgccgtgcgcatctgcgtggacggggctaaggagaaaggaaagctgctctacagagcggaactcgccagcaggcctgagctaaagccacaactttcggacatgtacaccgcgtggctcaactatctggatcaccttggcgaccaggacgactccacattcgaggcggcttatgatcaatctgcgaatcgcttaaaggccgaactggacgctagctga

SEQ ID NO: 334504 - DNA, 252 bp, Pseudomonas aeruginosa
atggtccgcaaagcagcatcatctcgccccccctccccctatgaactcctcgctctgcgaatccagaagcaactgctgacgccacgtgttcagttggagcgccgatctgtcatttcacgcatgccggacgagcccgaggatgcctggcttcacttgctcgacgaactggcccaggaagattcactgacgatcacgcatcacccggacggatcggtcgagctagcctggccccaccctgccaccgactggtaa

SEQ ID NO: 334505 - DNA, 372 bp, Pseudomonas aeruginosa
atgctgatcctcacccgccgagtcggcgaaaccctgcatatcggcgacaacatcaccatcacggtcctcggcagccaaggcgaccaggtgcgcctcggcatcaccgccccggacgacgtcgccatccaccgctccgagatctaccagcagatcggcaacgtccgaccggtgccgccggcggagctggtcgaggcctggaaccgagagcacccggcgcccgcgctgatcgagtaccgcccgtaccgcggggccgaaccgcagcgcacccgcaccctcggccgggccagcgtgtcgcttggcggggcggcggttatctggatcgaaggccagtcggcgccggtggcgttgcgagcctgcaccgcgatctcctga

SEQ ID NO: 334506 - DNA, 204 bp, Pseudomonas aeruginosa
ttgctcgaccgtattcgtgtggtgttggtcaacaccagtcatcccggcaacatcggcggggcggcccgtgccatgaagaacatgggcctgtcgcaactggtgctggtgcagccggaaagctttccccacggcgacgcggtggcgcgggcttccggcgccaccgacatcctcgacgccgcaagggtggtggacaccctggaatag

SEQ ID NO: 334507 - DNA, 1776 bp, Pseudomonas aeruginosa
atggccagaatgagagcaatcgaagccgccgtactggtgatgcgccgcgaaggcgtggataccgcgttcggcgtccccggtgccgcgatcaaccccatgtacgccgcgctgaagaagatcggcggcatcgaccatgtcctggcccgtcacgtcgaaggcgcctcgcacatggccgagggctacacccgtaccaaggccggcaacatcggcgtctgcatcggcacctccggccctgccggcaccgacatgatcaccggcctctactccgcctccgccgactccatcccgattctctgcatcaccggccaggcaccgcgcgcccgcctgcacaaggaagacttccaggcggtcgacatctccagcatcgccgcgccggtggccaagtgggcgaccaccgtgctggaaccggcccaggtcccctatgtattccagaaggccttccagctgatgcgcagcgaccggcccggcccggtactgatcgacctgccgttcgacgtacagatggccgagatcgagttcgacatcgacgcctacgagcccctcccggtgagcaagccgaaggccacccgggtccaggccgagaaggtcctggccatgctcgacgaagccgagcgcccgctgctggtggccggcggcggcatcttcaacgccgacgccgccgagcgcttccgcgaattcgccgagctgaccggcatcccggtgatcccgaccctgatgggctggggcgtaatccccgacgaccacccgcagatggccggcatggtcggcctgcagacctcgcaccgctacggcaacgccaccctgctggaatccgacctggtgctcggcatcggcaaccgctgggccaaccgccacaccggcagcgtcgaggtctataccgaaggtcgccgcttcatccatgtcgacatcgaaccgacccagatcggccgggtgttcatgcccgacctgggcatcgtctccgacgccggcgccgccctcgacgcattcctcgaagtggcccgcgaatggaaggccgccggcaagctgaagtcgcgcgccgcctggctggaaagctgccagcagcgcaaacgcacgctgcagcgcaagacccacttcgacaacgtgccggtgaaaccgcagcgcgtctacgaagagatgaacgagttcttcggcaaggatgcctgctacgtcagcaccatcggcctgtcgcagatcgccggcgcacagttcctccatgtctaccaaccgcgccactggatcaactgcggccaggccggcccgctgggctggaccattcccgccgcgctgggggtggtcaaggccgacccgagccgccaggtggtggcgctctccggcgactacgacttccagttcatgatcgaggaactggcggtcggcgcgcagttcaagctgccctatatccacgtactggtgaacaactcctacctgggcctgatccgccaggcgcagcgcggcttcgacatggactattgcgtgcagctggccttcgacaacatcaacgcccccgagctggaaggctacggcgtcgaccacgtcgcggtggtcgagggcctgggctgcaaggcgatccgggtgttcgacccgaacgagatcggcgccgccctggccaaggcccgcgaactgatgcaacagcaccaggtgccggtggtggtcgaggtgatcctggagcgcgtcaccaacatctccatgggtaccgagatcaacgccatcaacgagttcgaggaactggccgagaaaggcgccgacgcgccgaccgccatctcgctgctcgactga

SEQ ID NO: 334508 - DNA, 1437 bp, Pseudomonas aeruginosa
atgactcaccgcgtgccttacctcactagtgatcttgagcaactcaagaagcggcttccgggaattctcacatgcccccatgaagtggccgcgcatctggccaagaagcaatacccggaagaagttagtctactcgctaacatccttgctgaagcgcccgatctgctgcatcacaagtgggcgtctgcaatacttgctcaggtgccgctaagcgcctgggtccgtggaactggtggtgaagcccagattgagccgagcaaagaagcttcgttgcggttcttagcccgtgacccattgcccgagaaggccaccgaagagctcaagcagctggcgtttcggcagaagatattcgagcttttactggataagatgccggctgccacgcaacgcatctatcggccgatgctccagtgggtcgctcatgatgagctgggggggcttagtatgacccgccacccgatgagttctgataccagctttggccataacctcgtcttctttgaatcgctgatggatatgcagattcacgcctacgagcggcagtgggctgagtctacaaattggtcgtcagaggagagcattcctgcacaagtgactcgtgagtgttctcaagctgcgctgaatcacgtggcgagtctcgtggataaatggatcgctgaggatgcgggacaggccgagaacattcccgacagcctgctggccctggtaagcgctaatctctcagtcaaccgtgtccttcttgaattcgccgggctggagtcccgtggaattgaggctgccgggatggcgattgggctgcttgaggggctcaatcgtcagggcatcaccgaagtgcctatggaggttgaaggtttgggtgctgtcgaaggagcggagaagatcaaggaaatcttgatccgctggtttgctcatggtggggctctgttgggcgtcgacctttttacacgaccgatgaatgtttctgacatcgaccttgtagtcaattggagcctgcagcttcaggagaactatataggtattcggggaaggcgtggtggaggggaggaagccaaggcgaaccacggagcctcgaataacctcttcatttttgctattgcgatagtgggggccttctacagtagcactagaacggaccatgagtttactggaaacagtaactccagctactcagtttttccaggacgaaaattaattgccaatggggagcgcgagacacctccgacccacgcgaatcacctgctgatgcaggcctacggacaaatttactttgctaactcgggatgggatcttcgcgcagatcttctaccaacttactttgaaacggcaagcataaagcgtgctcatattcagcaactgctgcattacgcaatcaagagcagaacgccaagtcagttattgatgctcaacaggcgacttcagcttttcaggggctcatag

SEQ ID NO: 334509 - DNA, 294 bp, Pseudomonas aeruginosa
atggacaagcacacctcgccctacgtgggcatgtttactgcgggaaacgaccactaccacggcgtgcggtcggtcaacgaattcggagccatcgcgcatgctggcaagctcgcgcaggtctacctgcgcgaggggagggcctcgaccgaagaggaggcagttttattagctaacaaggaagtccagcgtctgcgttggaacgccgagggctttcaagcgcatcgcgtagcccgtgacgagctccgtgctgagcaggagcaaatgccacatttgaccgggccaatcaccgcctga

SEQ ID NO: 334510 - DNA, 897 bp, Pseudomonas aeruginosa
gtggatcaacgaatagttaatctagtcgctggcagcagcttcgaactcagcttgtaccaggcggcactgcgaaacctgtccgatacgggaaaccagcttcgattcaacaattttgcctatgcaatgcgtgagctcagcaggcatttcctacatcggcttgcccctgatgccgaggttctgaagtgcccttggtataagaacatcaccaaggaagagggaaaaatcgccaggtcagagcgcgctgcctacgccgtccacggtggtctttccgaggaatacgtggaaaaaaccctggggctcgacatagatgagatgaacaagcgcctgaaaggcgcaatcgacggtctcagcaggtacacgcatatccaggaagacgtctttggtttacctgccgagcaggcagaagcgctagctcaggagacaaccgagtcctttgccggactgttcgacgcgatcaagagttgccataacgacatcgtctacaaactccacgaggcgatagatgatgcagcggtcgaggaggttctccgcgataccatccaggctattgacgagctggcgactcaccacttcatcgacgagatttgcgtaaacgaaaccagcatccgaatcacgcatgacaccgttcacttcagcgttgcaggcacagtcggagtcgagttgcagtacggatccagctcggactggagcaagggcaatggcgcgaagattgacgtatccttccccttcagctgccaactgacttgccccgctgcagcccccactgaggactccctcagaatggtgcagagcagccttgctgttgacaccagccgctggtacgacagcgatgatgaagaattcgaggaaggagacgctgatccgcaggctacagatgcctgctcgcccagaggataa

SEQ ID NO: 334511 - DNA, 1842 bp, Pseudomonas aeruginosa
atgcgactgagccgaatcacgatcgacaacttcagaaacttcaagcacctcgacgtgcacctagggcagcacgctgttgttctgggcgaaaacaaggtaggcaaaacgaacctgctgttcgctttgcgaatcatcctggatccgactctccctgactctgcgcgaaggctgcgtctcgatgacttctgggatggccaacccagaccgctgaaggccgatgatgcaatcgagatctcggtggagttcagcgacttcgaggacagcgaagagctgctggcagtgctcgccgaccacctgattcagcccgtgcccatggtggcgaaggtcacgtaccgtttccaaccaatctcaggcctcgatcgagcgccacgcagcgaagcggattatgagtttgtgatcttcggtggcgatcgcccagacaactcggtcggctacgagatgcgacgctggatgccgatggacctgttccccgcgcttcgcgatgcggaatccgaccttgctcggtggacccgctccccacttcggccgttactggatcgagcagctcagaccattgacgaggaagaactgaaagagatcgccgaagaggtacatgtaacgacatcaaggatcgctggtttgccccagcttgatgatgtggtgaagcaggtcaatggtcagctcacgacaatgatcggcgagaatcatgcaatcgagacggccctgggctttgcgccaacggagcctgaacggttgctccgagcgctgcagatgatgatcgatggcggcaaacggggggtcgcggaggcaagcctgggctccgcgaacgtgctgtaccttgcattgaagcaccttgagcatcagtacttggtagaagaaggggaacgtcagcacacgttcctggctatcgaagaacccgaggcccacctgcacccacaccttcaacgcttgatctaccggaattacctcaaggcgcgcgatgaggagcagcaaggtcgtgagctgcgcagcatcctgctgacaacgcactcgcccaacgtagccagtgttgctccgctcgccaacgtcgtagtgctgaccaatgttccgaaggaagggcatacggttgctcgatccctcgcgggtatccaactcgaagctgctgaccgagaggacttggagcgctatatcgacgtcacgcgcggtgagctgttcttctcgaagggtgtcatcctggtggagggcgatgcggaaaagttcctcctgcctacgctggccaagctgtacgacaagaccttcgatttcgatgctatgggcataaccgtctgctcgatcgctggaacaaatttcgctccgtacgtgaagctactcgggccccaagggctcgacatcccattcgccgtgctgaccgactttgacccgaagggcttagcagttagccaggaagacgaggacccggacgacgatggtgtgaaggacaactacggggaaaaccgcgtagtaaaccacatcatgcagcacttgcttcccgaagaggtttgggagcagctcacattcaccgaagtgctgaagagtgcgccagatttcggcatcttccttaacgagttcacctttgaggtcgatgtcttcaaggccggtgccgagaagcacttccagaaggccgccaaggagctgtcgaccaataagaaaatgcacgcgcgcttcaaagccttggctaaggatcctacggccttggacgagcagcagttcctcagagacatcgactctatcggcaaggggcggtttgcccagcgcttggcctcagcactactcgcggcaaaagctgatgtatgccccgactacatcaagaatgcgttggaatacatgagggagaaactgggatga

SEQ ID NO: 334512 - DNA, 1767 bp, Pseudomonas aeruginosa
atgagtaccgccaagccagcctacctcactgctgcagaggacctgcgtggtaacgaggatcaatggagagcctacgagtcaacaggcaactgcgtcatcctcgccggccctggtagtgggaagaccaaaaccatcacggtcaaaatcgccaggctgctcgctgagatagtgcgtcgcccccaacgcatagcctgcatcacctatagcaacgcctgtatcggtgagctgagatcgagacttaccaagctcggtattgaagatgggaatcgcactctaatttctaccgttcactcgttctgcttgacggagctcgtactaccttacgcggctatgggcagtctcgccgtgccaatccccctagcagtcgcaacaccggcagaatctcgcaagcttttcatcgctgcctaccgctccgtgtacggcgaggcacccaggagcagctcctctcgcacatcgttcgacaagttacgacgcaccattccagaccgaaactccgccgagtggctggcgtggaataagcgcgaaacaagagttgtcgaagcctatgaggacctactcctgacgagagggctgatcgattttgacggtatcgtgcttgcaggcctggagctaatcgagaaacacggatgggtgcgtcaggctatacgggcgaagtaccccgcagtagtgatagacgagtaccaagacctcggtctaccactgcaccgtatagtgcgggcattgctggatgctggggtcagaatcatcgccgtaggtgacccggatcagtcgatctatggatttaccggtgccaatccggccctactaaagaccctggcgcaggaccagcgcatagaagccatcacactcaggatgaattatcgctgtgccgatcgcatcattgcggcgtcgaggtcgctttttcctgaccgcgcggaattccaatcccatgatgatcggcaaggcgatattcgcattcacaagttagagcgcgacctcctagggcaggcaaagtatgcgttcgaaacgctgatcccagctctgctcgacgccaatccgacctggaagccaggtgacatagccctgctgtatcggtctatggctgagggtaagcagattgccctggcggctgatcgcttacaaatccgctacttccgcctcgacaacggttcgcctatcaagcgcacacgcctcacagagtggctgacagaggccgcgcagtggtgtgccggtgggtggaaaactgggcaggtgcagctttcgcagctgctcaagtcctggcagcgcatgcaacgctctggaaaaagcgaggcccaattgctcgcgtctcgcaaacgactgattgctgcccttttctcattgcgggatggcagcctgacgcttcgtagttggctgaaatctctagatagcgccattctcggcgacatgctccgcagcgagcccggcctgagcgacgagatcgacatccttgctgaccttatcaacgaggcagatacgggtggagcgcttgaacagttcacagtcgagatctttggcaaccagggtaagagcccagatcaaattaacctgatgacgcttcacagttcaaaaggattggagttccaggctgtcatcatgctcggccttgagaaaggcgcgttaccaagtagctacgacaggactcccgagcaagtgcaggagtccacacgcttgttctacgtgggcgtgacccgcgccaaatcccaggtccaccttacgttcaacaccgacgagtcaccactactcaccacgattcgaactgcgacctaa

SEQ ID NO: 334513 - DNA, 2967 bp, Pseudomonas aeruginosa
atggtcagccaaactaacgaagcagcactcgaaacacacatcgagaccacactggccaaggacggttaccgcattggcagtccggctgactttgacagagagtttgccgtcgacgggaagctcttctggcagttcctcgaagccacccagtccaaagagctggcgaagctaaaggatcgtccgaactggcagcgcctgttgctggaacgactgagtaagaggatcaagaaggacagcgtgctggcggttctgaagaaggggctggacatcgatgatgcccacttcgatctgctctatcggctgccctacaacgacttgaacccggaagtcgttgccaacttttcggccaacatcttcagtgttacccggcaagtgcattacagcgactccgacaccttcaagtcggtggatatggtgctcttcgtaaatggtttagcgattgccacgctggagctgaagaacccttggactggtcagaacgtccacaacgctatcaagcagtatcgcaccgaccgtgatccatgtgagccgctgttcgagtttggccgctgcctggttcatttcgccgtggacccagacgaagcctacatgtgtgcccaactggccggcaatgacagcaatttcctaccctttaataaggggtttaataatggacgtggcaacccggtcaacccgacagggcacaaaactgcctatctctgggaagacattctccctcgtcatagcctgaccaacattatcgagcagttcgccaagttcaccgtcgagaaggacaagaagaccggtaaggagcgcaaggcgctattcttccctcgctatcaccaactggatgtggtgcgtggcatccttgctgacgccaagcgctacggggttggccaaacctacctgatccagcattcggcgggctcaggcaaatccaattcgatcacttggctggcctaccaactggtggagctgtacgacaacgctggtttcaggaacgtcttcgattccgtggtagtcgtgacggatcgccgggtactcgatacccagctcaaggacaacatcaagttgttctccgaaacaaaaaacatcgttgcccatgccgaaagcgctgccgagctgaaggcgcacttggagctgggcaagaagatcatcatcactactgtgcagaaatttccgtttatcgtggacgggataggtgatctgaccagccgcaacttcgccgtcatcattgatgaggcccattcttcgcagtccggtagcgcttccgacacgctgaacaccaccttgggggcggaggatgaggaagttccggaagatatccaggacaagattcttgcagccatgaagggccgcaagatgagtaaaaacgccagctacttcgccttcaccgctaccccgaagccagccacgctggaaaagttcgggcgacaaggccctgacgggaagttctatcccttccacctttactccatgaaacaggccatcgaggaaaaattcatcctcgacgtgctggagaagtacacgacctacaagagttactacgaggtccagaagtctgtagaagagaaccctctgttcgacaccgccaaggcgcagaaaaagctcaaggccttcgtcgaggccagcccccgaaccatcgaggtgaaggccaggatcatggtcgatcatttcatgagcagcgtctggcaggccaagaagctcaagggcaaggcgaaggcgatggtggttacgcgcaacatcgaatgcgcaatccgctacttcttcgccatccgcaccgccttgcaagaggccaacgcgccattcaaggcgttggtggccttctcgggcgagaaaaccgttgacggtatcaagtacaccgaggacgggctcaacggcattgcggctcgcgacttgccggaggcgttcgagaaggacgactacaagatactggttgtcgccaacaaatatttgaccggttttgacgagcccatgctgcacaccatgtacgtggataagaagctgcagggcgtgctcgcggtgcaggctttgtcacgtctgaataggtgtaactggaagctgggtaagacagacaccttcgtgctcgatttctacaactcggtggacgacatcaagaaggcattcgatgacttctacacggccacaacgctgagcgagcctactgacgtcaacgtcttgcacgacctgaaggatgtgttggatgacttcggtatctacgactggtcggaagtgacgttgtttaatgacaaattcttcgccagtgctgaagcagaagagcttcatccgatcatcgatgtggtggtcgctcgattcgaggctgatctagacgatgagcagcgtatcgacttcaaaatcaaggccaagcaatttgtgaagatatatgcccaggttgcggccatcatcccattcaacaatgtgagctgggaaatgctgcactggttcctgaagttcctgattccgaaactaaaggtgaaagacccggatcaagacaagctggatgagctgctgaacagcgttgatctatccacttatggtctggagcgctcacgccttgagatcaagattggcctggacgcttcagaaaccgagctggagccccaaaacccaaatattcgcggcggccacttcggtgaaggcgacaaagacccgctcgatgagatcgtgcgtactttcaatgagcgccacttcgcaggctgggaggccacgcctgaggagcagcgggtaaagttcatcaacattgccaagcatgtgatgaaccacgtcgactacaagattcaggtcgaagacaacccggatagccagaaccgccagttggcgctagagcgcctgatccaacaggcgatcagcgtcgagcggcggcgggagctggacctctataaacgctatgcgtctgacccggatttcaagcgggcatttgatgcgagcatcttcaggatgctttcgtcgaaggacatcggctctcaactgggtatggggagcatgtaa

SEQ ID NO: 334514 - DNA, 816 bp, Pseudomonas aeruginosa
atgacgggtctttttgatcccacagatcaggttgattatctgaagaagaatgaagctttgctggtaaagcaaatagataattctcttgaaaagtatgtttctggtctgggtgttggctatgtcagccataccccgccttccacggatcagaatttcaaggatttggataaatattgcggcgacatcgtggcggcgttaggggatatttctgccttgatcctggaggtaaaatttaatcatggtggaagtttaaatgacctcaactcggatcagaaaatcggcctgattgagcttcggggtcgtggtgtgccagtgttctacagctataacgtggatgagttcagtcgtttgcccaagggggcggcgcagcaattgagtttcatgactgcgatagagccttcactccagctaaacaggaaagcgatcatcacccctgagcataatcttaaggctgcggtagatcacttgattaataccccggcagagcatgatgggttggctgtggctgtggctttggctagtttcgtggatgccgaagaaagcatcatgaattcaggggttgaaaagctcacgacaaaggcacttttgcttatatacgatcacaatacgtgcagattgacatgtctcagtaaagaagctgtgttgtatgttatacagcgcgttatcaatgatgagtatgtggcagagagcaagaagtcagctcatctggccgtagccattaactccttgctcgctgcttggtgcaatgagctagataactcggaagaaaatgaccagcggaatgaccatggctctggtccagggatgtcgttctga

SEQ ID NO: 334515 - DNA, 1293 bp, Pseudomonas aeruginosa
atgcaactctacgagagctacaagcccagcgggattcagtgggtggagaagatcccgagccactggggcgctgagcgcgccaagtggctattcaacaggatggagcgccccgtaaggcccgaagacgatgtggtaacggcatttcgggatggtcaagtgacgctgcgtaccaatcgcagaaccgagggcttcaccaatgcaattcaagagcatggctaccagggcattcgcaagggtgacttggtgattcatgcgatggacgcctttgccggtgcgattggtgtttccgattctgacggcaaatcgacgcctgtgtatgccgcttgtgtgcctcgcggcgagtatccggtaaacagcttctactacgcctatctgctgcggtacatggcacattctgggtacatcgagtctttgtcgaaaggtattcgggagcgttcaaccgatttccgttttgccgagttccgtgagttgcctttgcccatcccgaacaaggacgaacaagatcgtatcgttgccttcctcgaccagaaaacagccgagatcgaagccacgattgagaagaagaagcgactgattgagttgctcgaagagcagaagcaaggattgatagaccaagcagttactgttggcagagctttttgtgttccgctccaaaaaacagaaactccaggcttgtcggaggttgcagctacttggtcaatgcgcaagctcaagcatgtatgtcagtatcaagagggccccggaatcatggcctcagatttcaaggagtctggggttccactgattcgtattgccggggttaaggggggccaagtttcacttgaggggtgtaactttctaagcgagcagaaagtgaaacgtagatgggagcacttccggctaaatagaggtgacttgttaatcagtgggagtgcgtcgtcgggaatcgtttcagaggtcaccgaaattgctgatggtgcagtcgcatataccggcttgtttcggataatactcgatcagggattgcttgaaaaagatttcgcaaagctctatttcgtatcatctgcatttaatgaacaaatggaccttttcaagacaggggtagggctccaacactttgggccatcacatctgtcgcgagcgtggattgcattgccaggcctgaatgagcaaaaagaaattgtggagtttgtgggcgagcgtgcggcttgcatcgacgaactcatcactgcgaccaaaaaagttatcgagtctcttcgtgttggtaaaacgagcttggttgcgtccgttgtgttagggcagttcaaggtttga

SEQ ID NO: 334516 - DNA, 1710 bp, Pseudomonas aeruginosa
atgaaggaaattcaggccaagacgcgcagcgtacgcgagctactgagcgataccaagtacggcattgactactatcagcgcgaatacaagtggcagaccaagcagattgccgaactggttgctgacctcaccacggccttcctagaagagtaccaaccgcaacatgagcgcaaggacgtggcctcttacgggcattacttcctgggttccatcgtcatcagccagccggacgagaagaagcagatagtggatggtcagcagcggctgaccagcctcacgctgctgctgatctacctgcacaatatccagaaagatcggcccgacgcggtttccatcgagaagatgatcttctccgaagagtatggggagaaatctttcaacctcgacatccccgagcgcaatgagtgcatgaacgcgctgttcgatggcacgccctacgactcggtggatcaggtcgagtcgatccaaaacctgatcggtcgctacaacgacatcgtcgaagcgtttcccgctgagatagcgaacgataaggcgctgccgtacttcgtggactggctacgtaacaagacccaattagttgagatcacggcttacgcggacgccgatgcctatacgatttttgagacaatgaatgatcgtgggctttcgctctccaacacagacatgctcaagggctatctgctggcgagcatcagcgatacagccaagcgggccgaggccaacaaggagatcaagcactggctgatggcattttccaagatcgactatgaatggggagcaaaggagacagagtcagacttcttcaaagcatggttgagagcgaagtatgcgcgtgacatccgtgaaagaaagaagggggcaaaacctgaagacttcgatctgataggcactgagtatcaccgctgggtcagatcccaaaccccgctaattgggcttagcagcagtgacgatttcaatgcttgggtccgcagagatatgcgtttctacgcgcgagtctacatcgagctagttgatgcaacctggtacttaactccggggcttgagtcagtccgcttcaattccgatcacggtttcactcagcaatttcaagtattgctggccccgctgttgccgaccgacgacgaagctacggttaaggctaagctcaagctgacggcagattacctcgattgttggctgaatcgccggctgtggaatttcaagtccatcgactattccacgctgcagtacgcgaccttcctgctcaccaaggagttgcgcaatctgtcactggatgcgctacgcgacaagctgatcacccggcttaccagtgatcagatcgaactgccgctcgacgaccagccctacctgaacaactggaacgctaagagcctgcaccgccagttggcccgcttcacgcactggctggaagagcaaagcggacagccggggcggtatttggaatacatcgttcgctctggcaagaacgcctacgagatcgaacacctgtgggccaatcatttcgagcgccataccgatgagtttgcccatgcgcatgagttttccactcaccgcaacagggtggggggggcttgtgctgctgccaaagaagatcaatgccagcctgaacgacaaggcgtacagcgacaagctggagcactaccagagcgaaaacctgctggctcgttcgctgcatcccatgtgctacgtccacaaccctggtttccttaa

SEQ ID NO: 334517 - DNA, 2355 bp, Pseudomonas aeruginosa
atggatcactcagtacacaacaaaatcgtcagcttcatctggtcaatcgctgacgactgcctcagggacgtttttgtacgcggcaagtaccgcgatgtcattctccctatgttcgtcctgcgccggctggattgcctgcttgagcccacaaagggagctgtactcgaagaggttcgcttccagcgtgaagacgcggaaatggctgacctcgacccgcatggactgcgagaggcatcgggttatgtgttctacaacacgtcgcgcttcacgctgaaatcgctgcttggcaaccactctcagctcgaagccaacctgaagaactacctcgatggtttttctgacaacgtgaaggagatcgtcgagaagttcgatctgcgcaaccagatccgcaagatggtgcagtctgatgtcctgcacgacgtgatcgaaaagttcgtttccgaggagatcaaccttagccccaacgaccgcaaaggcccggacggacgtacccagccggggctctccaacctaggcatgggctatgtatttgaggagctgatccgcaagttcaacgaggaaaacaacgaagaggctggtgagcacttcacgccccgtgaagtgatcaagcttatgaccaatctggtcttcatcccggtcaaggatcagctgcctaaccccctgaccatctatgacccagcctgcggcagcggcggcatgttgactgaatcgcaggacttcatcaccgatcctgaaggcgaggtccaggctaaggtaggcgtttttctctacggcaaggaagtcaaccctgagacttttgccatctgcaaatccgacatgatgattaagggtaacgacccggagaacattaagtttggttccacactggcgaccaatgatttctcaggcaagcgcttcgacttcatgttgtcgaacccgccttatggcaagagctggaaaagcgatcagaaaagcattgtcgagggaaaagaggtcattgatcacaggttcctggcatttctgaccgattacaagggagagaaagcccagtggcttcccgcaatcccaaggtcctcggatggccagctgctgtttctgatggaaatggtcgacaagatgaagcgctcgaccgacagccccatggggtcgcgcattgcttctgttcacaatgggtcggcgctgttcactggtgacgctggcggtggcgaaagcaatatccgccgttacatcatcgagaacgactacctcgaagccatcatccagctaccaaacaacctgttctacaacaccggtatcacgacctacgtctgggtgctatccaacaacaaggcagccccgcgcaggggcaaggtgcagctgatcgacggcagcaacctttaccagaaactgcgcaagaaccttggcgagaagaactgcgagtttacagacgagcatatccaccagatcacccagctttacctggagatgccgagcggtggtatttcccaagtcttcaataaccgcgatttcggctactacaaggttacggtggagcgtcctctgcgactagctgcgcagttcaccgctgaccacatagctaccctgcgctttacgccaggtatgcaggacatcatggagtggatctacggcaagtacggcgaagaggtttacaccgacctgaagtcgcatgcagaggcaatcgagatccatctagaacacgaagaaattgcgctctctccaaaaaaccggaaagccctcctgtcagagagcacatggcgagagcagcgggaaatcatgcatgccgctcaacggcttgcagagaagatcggctccggggagtttctcgacttcaaccgctttgagtgcatcgttgatgaaaccctcaaacagctgggtctcaagctgcccgcacctgcccgcaagcaaatcctcaacgcggtcagctggcgcgacgagcgcgccgagaaggtcgttaagaagatcctcaagctcaacgctaccaagctcgcagagttgttggccgaactgcgcacgacgcaggataagctcgccgattacggctactggcccaacgaaaagggcgagtacattgagtacgagccggacagcgaactgcgggataccgagaacgtgccactggcgcttgatagcagtctggccgcgtccggcgtgattcacgactatttcatccgtgaagtgcgcccgcatgtggacgaggcttggattgccatcggcaagaccgtgatcggctacgagatcagcttcaataaatacttctaccagcacaaaccgctgcgcagcctagaagaggtcacagcggaaatcctgaagctggaagcagaaactgacggcctactcaagcaactggtgagctttgtatcggaggccaagcaatga

SEQ ID NO: 334518 - DNA, 186 bp, Pseudomonas aeruginosa
atgaagcgcccaaaggatgaaacgttgaccattcgcacctcggcagacatcaagcacctgctgcgaatggctgccgagaaggaacatcgctctgtcgcctcaatggtggaggtgctgattctgaactatgcgcatgagcatggcctcaaggctgattctgcgcaggaaaagccacaagagacatga

SEQ ID NO: 334519 - DNA, 618 bp, Pseudomonas aeruginosa
atgtccgtcgcacaagcaatctcgcaccgaatcaagcgaatgaagaagggtaagcctttcgtgcgcacggtcttcgcagagttgggctcccgtgcggcggtcgataaagcactctccaggctggtgcaagcaggccgtctggagcgcgtagctcgtggcgtttatatgcgaccaaagctgagtacctacgtcggctgggtaagaccgagcccgattaccatcatgaatattctcgccaaggcgaatggtgagacgatacagatacacggagcggaggccgtgcgcaggttggggctcagcacgcagatgcaggtggtgccggtctactacaccagcggcagaacccgagaaatcaaggccggcaatgctgtggttcgtctcaaccatgtttccagtgatcgcttgcagcatgccgggaacaaggtaggcctggcgctcacggcgctttactacctcggtaaaggtggggcgtgtccccacgcgctttccaaaatagccgataccctgagcccggacgaattgaccacgctgcttgcctgcagaatgcccaaatggatgcgggcggcattggctcctttcgctgaagaagcatcactggcggtgtcttcggggcgctag

SEQ ID NO: 334520 - DNA, 159 bp, Pseudomonas aeruginosa
atggtccccagggctctctgctccgagcagataggtaatggccaagagagtgaccgggtggatgtcgagtaccttgcagaggccatcgagtttttcgagcgtcgggctggtagccgcccgctccagcatgctgacgtacgtacggctgctaacaattga

SEQ ID NO: 334521 - DNA, 3858 bp, Pseudomonas aeruginosa
atgccctccgcgaagagtttatttacctacgtcgaagctcaggctgcagtgcgggcgataggcatcaggagtcaacctgagtaccagaagcgtcgccgcgaagattcaaggctgccggctagcccagataagacctatgccaacgccggctggacggactggtattgctttctcggcaatataaggtcctccttttatccaacctacaccgaggcacaatctgcagttcagacgttgggcattaaaagccgacctgagtatgagaagtgctatcgtaaagatccgaagttgccggctagacccgataggatctattcccgtgccggctggacgaactggtacaacttcttcggcaaggaaaggccagagttatatccaacttatgccgaggcccaggctgcagcccaggcgctgggaattaagagtcagcctcattaccagaagtgctaccgtgaaaactcgaagttgccggcctcgccctataagacctacgccggcgtcggttggacggactggttctcctttctcggcaaggaacggtctgacttctatccaacctacgccgaggctcaggttgcggcccaggccttgggcgtcaaggaccagtctcattatctgaagcgctaccgcgaagacccaaggctatcgatagctccttataagatatatgcaggtgctggttggacagactggtacaacttcctaggcgagaaaaagcctcacttctatccgacctacgccgaggcccaggctgtagtccaagcaatgggcatcaagagccaacctcattatgagaagtactaccgtgaaaaccaaaggctgccgtcccagcctgaaaggttctatgccgatgtgggttggacggactggtacgattttttgggcaaagaaaggccagacttgtatccaacctatgccgaggcccagtccgcagcgttggtattaggcatcaagagtcggcctgattatcagaaatgctaccgtgaaaacccaaggctgccgtcccagcctgaaagtttctattccgacgcgggctggacgaactggtatgacttcctcggcaaggaaagacctgacatatatccaacctatgccgaggcccggactgcagccattgcgctgggaatcaagagccggcctcagtaccttaagcgctgctacgaagatccaaggttaccagtacatcccaatgtgtcttacgccggcgctggttggatcgactggtacgctttcttcgccaagaagaagcccgacctttacccaacctacgtagaggccaaggtcgcagtccaggcgctgcacatcaagagccaccctgagtacctgctgagagcctgtgaggacccgaggctaccggcatggcctaacacggtctatgacgactctggctggctggactggtacgactttcttggtaatgaaagcccaaatgctgccttaactgactacccgctcatatgggctgatgtagagaagtggctgaatacccaaacgagtattgccgtaaagaggtctgcggtcagggttttccttggtgatttttaccacgctcagggtttgcccgatgatgccaggtacctacttctacggcgcaacctattcaacgctgaggcctaccagcaattcattgatgctcaggctgaatccatgaagaggccttatcacagcgctatcaaggcttatttcggctggctgctagaggagtactgtaccgatgctgatgccgatgagcgcattgttcttcccgaataccgcaatcccttcgagacagtgttggccggctttgccgatagcttacaaggctaccggccaagtcaatccactaagccgcccctcggctacgaatacatcctacgcgcgagaaacttcctcgtgccagacggcgagcaggtcttacaaacccgaccgagcctcagtgacttgccccatctgcaggatttttttgatggtcgatttgactggatttacgtcgaggaatcggtcatcgaccgaaacgatccgaattgcatctggcgcaaagtcgaaaaggcagaccgtagggtcgatgggaagcgcgaactggtggatagctatcaggtttggtctcctgtccgcttcgtggccctctatacgctgctgcgtttcccactacgaggccagcaaattctgtggctggatagcggcgagggggataaagaaatcgccgttctcgatgctgaaaacggtggtgtgcgctggaaggaaaatgccctcgccgttgctaggacctgcggcaagaaacgccggccccaaggcgttgtgcagcgcggtcacaatgacgctcccaggctatatgtgacgactaacaaaactggacgaggtcaaggtggctatagtgttgattggattcccgatgatctgctttattggctcctgttgctgcgcgattggcaggtaaagtacaacccgttaaaacagccgactcgctggactgacatctctcttcgcgtcgaaaccaataagaagattttgcaggcgcgaggcacccaatgctttctgttccgcacggacgcctcaggtcagccacttttcactacgactgccttcactcataccttgcccgcgttgctctacgctatccagcgtcccggcgagaaccttgcccgcaaatcaggcaagcagcgctttatcagtccttacacccctcatagccttcgggtcagcttgattacggcattcatcgttgatggcgatgcccccattcatctgatctccaagctagtcggccatgcttcgctggtcatgacgatttactacaccaagctgaacaacacgcagatgcgtcgtgctatgggggaaactgagaagcgcgcggcactggccgctacagagcgtcatgccgaaattatcagaacgcaggggctgcagcctcttcgacaccagttaattgctacggatagcaaccgctcgctgcttgattccgacgtgcccaattcggcctgcgtagtattcgattacggtatttgtcctatgtcagcagctttatgtgataagggtggaaagccgattgccgaaaggaaggttgagagcctatatgcgcctgttgaagccggatatttggggcaaaagaattgccctcgttgcaggttctttgttaccggtgttccttttctcggtggactggtcgcattggccaacgagctagcgcttgaaattcatactgaaagtgggcgtttccaagagttttctaacgagttcgagcgattagatagagaatattatgatgcttgtcatgatggtcgtttatatgcagacaaagcaaggttagatcaaatgaactctaatcaattgcagagcgcagcgaagcttgatggtctgctagctgattatgttgctgtcaatcactacgttcagggctgcttgaagttgatcaacagtagtgagcaagactgcgacagtaatgatggtgttcggcttgttgttgccagtgattttgctgttgatgttaatgtggcgtttgaagagtccgatacgaactatcacttgctggccgagatttgtcagaatgcgagtatctatcagtcggtaaacccatctcgtgctgtgcctttgatatcacaatgtattgatcgcatggctgaaaataataatctcgcgcctgcgatgtttcgtcttagtgaggaacaaaagctggtcgttattaatgaattgaaccagcttctacttcagcgtcttgggtcctgggagaaaataggccagctgatctcgggcgagctaatgttgctcgacatagatgctgatacgccagagctgagtcgtatttcgattgaggttggtcggcttctttccaatccaaactgcattcagcaacttgctcaagagggtttcagcaatgcatga

SEQ ID NO: 334522 - DNA, 1386 bp, Pseudomonas aeruginosa
atgccaacaatccttgagtcgtctcaccaagagttcaggtcctttgtggtcgatgcgactggcatacagcatgtactaccagtcattgtgaccgagcatggggttctggatcagttagctcgatacatgcatttgaatcaccgaaagagtcgctcttggcaggaggcctcggtttttgcagtgcggctgttgttggagttcatggaggccaaccatggcttctatgacgaaccgcgcgccctgttcactgcgttttcagatgcattgttcacaggtactgtctcgaacatcggcgatccttccggtctgtggtggcagcccaggcaaccggatgatgctggcaagctgatcggtctcatcacgaaattcaccgattggttggcgatcgtcaatgaggacgccaagtttcaacttaatccctggcggcaagcgactcggcatgaggaacggttgaattgggctgcgtattcgcatcgcagggacaacgcttttctgtcacacctttggcgctcaaaaccgcagacgagccattccagagtagtacgctcaagagcgctgccggtggagcggcatacacccgccaaggcatttccagaagaatactttgatctgttgatatccgagggtttccgcaggcggacgcgagactcacgcgggtcgacagacctgcgcaatgtactgattaccttcctcatgcattacggtggtttgagactatccgaagcgctgtcgctctggagtgatgacgttagtatagaggcgggggaggttatcgtccgtgtgcatcatcctgaatacgggttggcacctggaggcaaaaccaatcgcaccgcctatttgcaaaataaatacgctcttcagcctcggaatcgcctggtaaaagctaccgatccgctgtttctcggttggaagaatggtctgattactgaccctcaccgccgatgtttcgaggttttcttttaccccaatcaggtcgggcaggtttttgcctgtatgtggcgtgattatcacctgaacgggcaacgggtgaagcagaaggctggcgaagaacatccttacgcattcaccaacagagatggcaagccatactcccatcgtatgttccgcaaggctcataagcaggctgttgagcggatcgggttagttcccgagaagattgagggtaccactccgcatggccatagacatgcctatgggcagcgtcttgctcgaaatggtgccgattctttgctgatcaagaatgccatgcaccatgcgtctatcggctcaagccagacctatacgcagcccactacgacacagatgcgccagagtcttcgcgatctggaaactcggctgcgattgcagtacatgggcgatcccttgaacccacttgcccggacgtga

SEQ ID NO: 334523 - DNA, 126 bp, Pseudomonas aeruginosa
atgagtgtccgtgaattccccatccactacatcgaaccggtgttccggcccccgagcgaggcgcattcgctgatcctcccggtgaccaatggctgttcctggaacaaatgcggcttttgcgattag

SEQ ID NO: 334524 - DNA, 867 bp, Pseudomonas aeruginosa
atgaatgcgaaagcgacttcggttgtatccaccaagggtggtgtagggaaatccaccaccgccgccaacctcggtgcattttgcgccgatgctggcctgaagaccctcctcatcgacctggaccccgtccagccctccctatcttcgtactacgagcttcctgaagtcgcccagggcggcatctacgacctgctcgccgccaacataactgacccagcgaggatcatctccaggacgattatccccaacctggacgtcgtgatttccaacgaccagaacaaccagctcaacaacctactgctccaggcgcccgatggccggctccggctggcaaacctcatgccgtccctgaaacagggctacgacctggtgctgatcgacacccaaggtgcgcgctccgctttactcgaaatggtcgtgctcgcatcggatctggttgtttcccccctgcagcccaacatgctcactgcccgcgagttcaaccgcggcaccatgcaaatgctcgatggactgcgcccctacgagcgcctcggcatgcggatccccaaggttcagatcgtcatcaactgcctggaccagaccaatgactcccgggcgattcacgagaatgtgcgtgccatcttcgatgagcatcaggatatttctgtactcgaaacgactgtcccggatgccgtcgtgtttcgcaatgcagcatcgcgcgggctaccagcgcaccgcctcgaaacgcggcaaccctcgaatcgcacatcagcgcccgcgctggaaatcatccgtaacctggccatcgaggtctttcccgagtggactgaccgcttcctcgcgctgacgccggaggcggtagcagcactggtcaagggagggcgctga

SEQ ID NO: 334525 - DNA, 555 bp, Pseudomonas aeruginosa
atgaaccggcattactacatcagcgacaacctcgacgagctggaacggctcgaagccgaactggaagccagcggcatcgccaccgagcagatccacgtcctcagcgaaaaggacgcggagaccggccagcgccatctgcacgaagtccctccgttcatgaagaaggatgtggtccgctccggccgtgtcggcctgctggtcggcctcgtcctggccatcgtcgccgtggccttcgcctatgccagcggctggacggaaaccgccgccggctggattccggtgatcttcctcggcgccgtgctctgcgcgttctgcctgtgggaaggcagcttcttcggcctgcagcgcaccaaccgcgccttccgacccttcgaagaacgcctgcaccaggggcagcacctgttcttcgtcgatgtgaagaacgcccaggagccgatcctggtcaacgtggtcagccaccacccgcgcctgcaggacgccggcaccggccccgcggtctctccgctgctgctgggctggcagcaacgctggcggcagttccggcggatggtctga

SEQ ID NO: 334526 - DNA, 1308 bp, Pseudomonas aeruginosa
atgaaccgtcgtcgtcgctatacgggttccaatccatcgctgcgccgggtgctctatcgcgcacacctgggcgtggcgctggtcgcggtattcaccgccgggctggcggtgaccctggtcggcctgctgaccctgcgcgcctatgccgaccccaaccagcaactgatcgcccgttccatcagctataccgtcgaagccgcagtggtcttcggcgatgcccaggccgccgaggagtccctggcgctgatcgcctccagcgaagaggtctccagcgccatcgtctacgaccgccagggacagaccctggccagttggcatcgggaaagcaccgggccgctgcacctgctggaacagcaactggcgcactggctgctcagcgcgccgaccgaacaaccgatcctgcacgacggccagaagatcggttcggtggaggtgaagggctccggcggcagcctgctgcgcttcctgctcaccggtttcgccggcatggtcctgtgcctgctgcttaccgccctgggcgccttctacctgtcgcggcggctggtacgcggtatcgtcggcccgctcgaccaactggcgaaggtcgcgcataccgtgcgccgcgaacgagatttcgagaagcgcgtaccggaagccggcatcgccgagctgagccaactgggcgaggacttcaacgccctgctcgacgaactcgaatcctggcaggcgcgcctgcaggacgagaacgcctcgctggcgcaccaggcccaccacgacagcctgaccagcctgcccaaccgcgccttcttcgaaggccgcctgagccgggcgctgcgcgatgccaacgagcatcgcgaacaattggcggtgctgttcatcgacagcgaccgcttcaaggagatcaacgaccgcctcggccatgccgccggcgacaccgtgctggtcaacatcgccatgcgcatccgtgggcagttgcgcgaaagcgacctggtggcgcgcctgggcggcgacgaattcgccgtcctgctcgcaccgctggcgtccggcgccgacgccctgcgcatcgccgacaacatcatcgccagcatgcaggcgccgatccggctcagcgacggcagcacggtgagtacctcgctgaccatcggcatcgccctctatcccgagcatgcggataccccggcggcgctgctccacgacgccgacatggcgatgtacatcgccaagcgccaggcccgcggcagccggcgcctggcggaactcaacgacccccgcatccttcaggaagaaaaggagatagacagtgctaccccagaggctccacccaagtag

SEQ ID NO: 334527 - DNA, 132 bp, Pseudomonas aeruginosa
atgagcaagggactgaacgcgaagaaggaaactcgtaggaaaccgctgaaaaccgcccaggagaaacgcctggcgaaacgagcgaaaaaacacgctccggcggcgccgctcggcaccccatcgcggagctga

SEQ ID NO: 334528 - DNA, 990 bp, Pseudomonas aeruginosa
atgagcgttgaaagcattcgcatcgagggtatcgacacgccggtctcgcgcatcggcctcggcacctgggccatcggcggctggatgtggggcggcgctgacgacgcgacgtcggtggaaaccatccggcgtgcggtggaatccgggatcaacctgatcgacaccgcgccggtctatggcttcggccattccgaagaggtcgtcggcaaggccttgcagggcctgcgcgacaaggcggtgatcgccaccaaggcggcgctggagtggagcgacgcgggcatccaccgcaacgcctccgccgcacgcatccgccgggaggtcgaggactcgctgcggcggctgaagaccgatcgtatcgacctgtaccagattcactggccggacccgctggtggcgcacgaggaaaccgccggcgaactggagcgcctgcgccgcgacggcaagatcctcgccatcggcgtgagcaactattcgccggaacagatggacgggttccgccagttcgctccgctggccagcgtgcagccaccctacaacctgttcgagcgcgccatcgacgccgacgtgctgccctacgccgagcgtaacggcatcgtcgtgctggcctacggagcgctgtgccgcggcctgctttccggacggatgaacgccgagacccgcttcgatggcgacgacctgcgcaagtccgacccgaagttccagcagccccgcttcgcccagtacctggcagcggtcgcgcaactggaggaactggctcgcgagcgctatggcaagtcggtgctggccctggccatccgctggattctcgatcgcggccctacggtggcgctgtggggggcgcgcaagccggagcagttgaacggcatcgccgacgccttcggctggcgcctggacgacgaggccatggcccgcatcgagcggatcctcgccgagaccatccaggatccggtcggtcccgagttcatggcgccgcccagccgcaacgcctga

SEQ ID NO: 334529 - DNA, 1617 bp, Pseudomonas aeruginosa
atgctcgacttctccgcccacgcgcttccctacgcctcgcaacgttcgccggtccatgcccgccgcggcatggtcgccacctcgcagccgcaggcggcgcaggtcgggctggagatattgcgccgtggcggcaatgccatcgacgcggcgatcgccaccgccgccgcgctgacggtggtcgagccgaccggctgcgggattggcggcgatgccttcgccctggtctggacccgcggacgcctgcacggcctggacgccagcgggcgcgcgccgggcctgctcgatcgcgagcgggtgcgcgccgccggccacgagcggatgccgctgtacggctggacgccggtcaccgtgccgggctgtccggcggcctggggcgaactgtcgcggcgcttcggcaaattgccgttcgaacaactgctgcggccggcgatcgagctggctcgcgatggctttccggtctcgccggtgatcgcccgcctgtggcagagcggcctggacaagttccgcgcggcgttgccgcagcggcccgagctgcgggcctggttcgacgagttcctcatcgacggccgggcgccgcgcgccggcgaggtgttccgccagccgggccaggccgacaccctggacgagctggcgcgcagccagtgcgaaagcttctatcgcggcgagctggccagggccatcgtcggccacgccgagcgcagcggcggctacctgcgcgcggaggacctggccggctaccaggcgaagtgggtcgaaccgatctcactgaactaccgtggctatgacgtctgggagattccgccgagcggccagggcctgatcgccctgatgaccctgaacatcctcaagggcttcgaattcggcgagcgcgactgcgcgcggacctggcatcgccaactggaggcgatgaagctggcgtacgttgacgggctgcactacatcagccagccgcagtcgatgcgggtctcggtcgaggaactgctgcacgaggactacgccgccagccgccgtgcgctgatcggcgagcgcgcgctcgatcccagccccggccagccgaggccgggcggcacggtgtacctggcctgtggcgacgaggagggcaacctggtctcgttcatccagagcaactaccacggcttcggctccggcgtggtggtgcccggcaccggcatcgccttgcagaaccgcggcgccgagttcagcctcgatccggaccacgtgaattgcctggagccgggcaagcagaccttccacaccatcattcccggtttcctcagcaaggacggcgtgccgctcggcccgttcggcgtgatgggcgcctatatgcagccgcagggccacgtgcagatggtgatgaacctggtggacttcggcctcaacccccaggctgccctcgacgcgccgcgctggcagtggctgggcgggctgcgcgtcggcatcgaacatgccgcgccgcgcgcgctggcggcggagctggcgcagcgtgggcaccaggtggagatcgcctacgactcgaccagctacgggcgcggccagatcgtcctgcgcgacccggccagcggcgtgctctgtggcggcaccgagccgcgcaccgattcgcagatcgcggtgtggtga

SEQ ID NO: 334530 - DNA, 666 bp, Pseudomonas aeruginosa; identical to SEQ ID NO: 322996

SEQ ID NO: 334531 - DNA, 1299 bp, Pseudomonas aeruginosa
atgtatgtaagcaaagtacttctgaaagacattcgcggattttcagacttgagcttcgacttgacccggccggatggtagttacgctggatggaccgtcttcacaggagacaatggctcagggaaaagtaccttgctcaaggccattgccatagccttgacgggtaaggatacggcccgggcactgcaacccagctttcatcgctggattcgagatggccaggatgaagcggccgttgagcttggtatctttcctgttgccgatgacgatactttcacagagggcggacgtgtaaccgaaaaaactttccttgctcgtattgcgttcaagaatggcctgaaggaacctcaggtcgagccggcgttaccgaccgggatcactagaaaaaactacgctacaccacaacgcacgatctggtcacaagatgccaaagggtggttctcatgcggctatgggccatttcgccgtgtctttggtgcttctcctgaagctatgcgccagatggttgcgcctgcgaccgaacggtttgtaacgatgtttcaggaggctgcttcgttggccgaagtggatcaatggctgcggacacttagtcataagtccttggaggacaagtcgggggccaaggagcaactcgccatcattctagaggttttgcgtgatgaacttatgccaaaccagattaccgtagatcgtattgattctgacggcttatggcttaaggatcgcaatggcctccagttgtcttggatagaaatgagcgatggttatcgtgcagcgttagccttgctcaccgacattcttcgccacttgatcaacgtttacggtgtattcaacctcacggcacgtgatgccaatgggaaactattcttcaaacgcagcggtgtggttctgatcgatgaaattgacgcccacttgcatccggagtggcagcgcgaaataggtttttggttgaaacgtcattttccgaatatccagtttttggtaacaacacatagtcctatcatttgccaagcagctgatcctaacgggttatttgtactgcctgaaccagggagcgaagatgggccacatgcgttgagtaccgatgagtacgaaaaaattattgcttcgcgacctgacacaatccttctcacgtcggcgttcgggcttcagaatacgcgctccccaagagctgtggaggcgagggctcagtacgcgaagttgaaagcgaaagagcgagcgggagcgaaactcagtaaggatgaacgccagcaggtgcagcaactacagttatttgcattggcggacgaggagttgtga

SEQ ID NO: 334532 - DNA, 738 bp, Pseudomonas aeruginosa
atgcagcgtgttcatcgtccgatactaccgggccgcgctcaggcatatctcaatcgtaaggcgcaggcaacagttgggatgcctaatgtcgagcgtacatggaagtctgtgcgtaacaccaagactctgaccacggttgtcgaaatattgcaggcaatgatgggtccccgccagcgttgcatgtactgcgttgactctcatggtagtgacatagaacatttctggccgaaggcctcatatccggatcgtgctttttcgtgggaaaacatgcttttgtgctgtaccgaatgcggacgattcaaaggcaaccgttttcctttatcggacgccggtcttcccatgttggtagacccgagcattgaggatccgtgggaatatctggattttgatccagatacgggaaacctgactgcccgttatgatgttgagcatgatgcgccctctgccaaaggggagagcacggtgcgggtgctccagctggatcgacgtgagggtatggcggaaggctatcggcgaacctaccagcgtattgtcgattgcgtagctaatgcgttgactgaagatgagatcgattccagaaggcttacagaggagctgcaacgggtggacgaccatggtctgctgggttggtgcattggctcggtcgggtgttgttttcagccctttcaagagttgcgtcgcagggcgccggatgcatggactgcctgcatagcagcgcttcaacaacaagaggtttga

SEQ ID NO: 334533 - DNA, 1098 bp, Pseudomonas aeruginosa
gtgaaggcgctgctcggcgcgctgctgctcatcctcggggcctgcgtcggcgccgcgcgggcggacgacggcgaggaaccgacggtgaacctgtacatctggggcgagtacctcgccccggacaccctggagaacctccgcaaggccaacggcatccgcgtggtggtcgatcatttcgactcgctggaaacggtcgagaccaaactgctcaccggccacagcggctacgacctagtgctcagcgccggccagcacctgtcgcgggcgatccacagcggcgcgctgatgccgctggacaaggccaggctgccgcacttcgccggtatcggcgaagcattcctgcgccacatgcgccccttcgatccgcacaaccgctatgccggcacctatgcctggggcaccaccggggtcggcttccaggagcaggcggtggacacgcgcctggccgaagcgccgcgggacagttgggcgatgctgttcgatccggcggtagtggcgaagttcgccgactgcgaagtcagcctgctcaacgatcccaacgaagtgttcggcgcggcgatgcgctacctcggcctggacatcgaccggcaggacctcgacgacctgcgcgcggccgaggcacagttgcgcaaggtccgtccgtacatccgctacttcgacaacgaccgcaacatcaaccacctagccaatggcgaaacctgcgtcgccatgtcctggaacggcaatgtggcgatcgcccgcgcccaggcgcgacaggcgcagaaaccgttccagctggactaccggattccccgcgagggcacccagatctggctcgacgcgctggtcatcccgcgcgacgcgccgcatccgcaggcggccctggccttgatggactacctgatgcgtccggaagtgatcgcgccgatcaccgacagcatccactacgccaacgccatcggcgccgccgatgcgctggtcgacccggccatccgcaatgatcagggcacctatcccgatgaggccacccgcgcccgcctgtacagcaagaaggacaacggcaaggccttcaaccgcgccctgacccgtgcgttcagccgcgtgaaggcgggactctaa

SEQ ID NO: 334534 - DNA, 318 bp, Pseudomonas aeruginosa
gtgcataagctgccgcagccggaggcgctggagtggaccgccgaggaagccgccgggctcgaccaggtagaaggcacccacccgcgccaggccggcacgcgcatctgcgcgtcctacatcaactactacgtcggcaattcggcgatcgtcctgccgctgttcggcgaccgcaacgaccgcgtcgcccaggcgactctcgccgagctgttcccgacgcaccgcatcatcggcatcggcaactcgcgggagatcctcctcggcggcggcaacgtcgcctgcatcaccatgccgcaatacgccggaggagcgcgcccgtga

SEQ ID NO: 334535 - DNA, 741 bp, Pseudomonas aeruginosa
atggcccgcaccctcacctccactcccaaggccgatggcttccgcctgcccggcgaattcgcagcgaaggccggctgctggctcggctggccggaacgcccggacgtctggcgcaacggcggcaagccagcccagcgggtctgggtcgagatcgtcagcgccatcgccagcagcgagccggtgaccgtctgcgcttccgccgcccagtacggcagcgcccggcgcctgctgccggagcaggtgcgagtggtggagatgagctgcaacgacagctggttccgcgacagcggcccgtgtttcgtggtcaatccgcacagcggcgaggtccgcggcgtggacttcgagttcaacgcctacggcggcctggacggcggcctctactatccgtgggacaaggacgaccagatcgcccgcaagattctcgaactggaaaacctcgagcgctaccgcgcaccgctgatcgccgatctgggcggcatccagagcgacggccagggcagcctcctgaccaccgagcagtgcctgctcaaccgcaaccgcaacgcgcacctaggcaagaccgaggtgacccggcgtctggaggactacctgggcgccgaacaggtcatctggctgccgcgcggctgcaagttcgacaagaccgacggccatgtcgacgacctggcctgcttcgtccgccccggcgaagtggtgctgcaatggaccgacaaccgcgacgacccgcaatgggagatctactag

SEQ ID NO: 334536 - DNA, 552 bp, Pseudomonas aeruginosa
gtgaccgccgaactggcgcagaagtggctggtcggccggctcgccgacttcagccggcgccatccgcacgtcaccctgcacctctacgagcaagccatcgacgccggcgcgccggtcgccgaaatcgatgtggcgatcacctacggcaccggtccggccgacgccagcgatcacttcgtgcgaccgttgccgccgctgcggttcttcccggtgtgcagtcccggcctgttcaaccagggcgacctgcgccagcccgccgacctggcccgccactgcctgctgcacgacgaccaggacggcaagacctggaccgcctggctcgccacccacgccggcctggccctggaggccgccgcgctcggccagggcgtgaccatgggcgacaacctgacctgccagggcgacctggccggcggccgcctggtacgcccgttcgccgccagcgtgaccgccctcggccagtacgcgctggtctgcgagcggctacgcctggagcgcggcgcggtggccgaattcgtcgagtggttcggcgagcagttggccaacgcctga

SEQ ID NO: 334537 - DNA, 222 bp, Pseudomonas aeruginosa
atgcgccgccttccgtctctcaccgccctgcgcgccttcgaatgcgcggcgcgacacgcgcacttcggccgcgccgccgccgagctgtgcgtcaccgacagcgcggtaagccaccaggcccgccagctcgaagagcaactgggcgtcgtcctgttccggcgccagggccgccaggtacggccgaacacctgctgcgcagcctgcaacaggcgttcgagctga

SEQ ID NO: 334538 - DNA, 612 bp, Pseudomonas aeruginosa
gtgtatgtcgctgatgttggcgagaccttcaaagctccgaatggtgagagcgatgcccggctgagggtgatttactccaacggcactgagagcaatttactgcgaagatccttgcagcgtgcgctctacaaggacgatgccggccggcgtattaccgatgcggatgcaggcccgttgtttggcgaaacactggagcccgacgacatcgagagtggcaccatttacgtcctgcgcagcctctcaacgcatcccttcgtggccgagcatcgcgagctgatccacaagatcggcgtcactggcggcaaggtggaaacacgtatcgccggggctgacaaggacgccacctacctgctggcagatgttgaggtggtcgccacctacaagctgcacaacatcaatcgcacgcggatggaaaacctgttccaccgcctgttcagccctgcccagattgagctgacgatccctgatcgcttcggtaatccggtcaaacccagggagtggtttctggtaccgctgcacgttatcaacgaggctgtggagcgtattcgcgacggctcgatcgctggagtgatttacgatccaaagtcggcatcgttgcgaagtgccggctga

SEQ ID NO: 334539 - DNA, 369 bp, Pseudomonas aeruginosa
atgtcggggcagaagttggtggcagaccttctcagtggcgccgggaaatcgcttgaggagcaccgcaagcgtgaacaggccctgaaagacgccctggcgaacgagcgtaaacgtagcaatcaactcgacgagcgctggaaggtaaagcatggagaagccatcagacaaatcgaacgactggccaccctactaaccatgtgggaactcaccttagggcagaccgatcctggctacgatggggatgaagccagacttcaatctgagacgaagaaaaaggtcagcggcattaagaaggccataaccgataccctcaaaatgcatgaacagcaggaggcaagactgtatagcttggactctcctactacatag

SEQ ID NO: 334540 - DNA, 1305 bp, Pseudomonas aeruginosa
gtgaaagcaaccgttaccatccgcgagtacgctcgccttaccacggctgaggttgagccgacgttggatgttgctcagctatcgcagagcgcgttcgactggctttgtgagctgagtgcccgctttaaccgtaatggcgctacgttgctgcaggtggacgggcggcatgcgttgaagtgggactcttacgtaggggtggtggagacgccttgtggtacacggctagagattctgcccaagcaccatgagcaggacgattgcgtggtgcagagtcggcagttgctgcgcaagctgattcagcaggctttgcagctcaagccccgtgagacttggtttgccagcctggagctgttcgatgcgccgcttagcgagtgggtgatggggcagtttttggcggagctggatttgttggttaagcgtggtgtgcgcttcgactaccagcgcatagaggaagaacagcgctttctgcgtggccaactcaatgtggtggcgcagatgcgccaaccgccggggcgtcagcatcacttccagattcgccacgatgtgttcctaccggatcgtgccgagaatcgcttggtgaaactggcgttggagcaggtggcgaaaagcacacagaatgctgccaactggcgcctggccaacgagttgcgcgccatgctggcggatgtgcctgctagccggaaggtgagtcaggatttgcgcgcctggagcctcgaccgtttgatggcgcattaccaggcaatcaagccctggtgtgagttgatcctcaaccagcagatgccaatagccgtgagtggtgagtggcgcggtatgagtctgctgttcccgatggagaagctgttcgagcagtatgtggaagactggctgcgccgccgtcgtgtgccaggcgtgcacctgacgcctcaggcctctcgccatagtctgtgtcaacacgacggcagtgcgatgttccgtctagagccggatctgttgctgcagcaaggccagcaggcctgggtgctggataccaagtggaaacgtttggattcggcggatcgccagaataagtacggccttagtcaggcggacttctatcagctgtttgcctatggccagaagtatctggctgggcgtggagagatggcgctgatctaccccatgacggctcaatttacgcaggctcttccgccctttgatttcagcccagagctcaggctttgggtgttgccatttgatttggataacgacgtactacgggcagccgatgaggtgggtttcatgcgctgcttgagccagccggaccagctttggccgcgctcggcgtaa

SEQ ID NO: 334541 - DNA, 1122 bp, Pseudomonas aeruginosa
atgaacgacccactctggatctggcagcagcccgactggccgcagttcaactggcaagccgaagcgcttgcaccactgctgcgctcctgtagccaggctcagggtcgtttgttaggaatgctcggtgctgtggggagtgacaccgaagtgcagagcagcctggatgccatgctgcagaacatcgtcacctcttcagccattgagggagagcaactgaatgtcggttcggtgcgctcatcactggcacggcgactgggattgcacgaagaaggtcgaaccacctctcgctccgaaggcctggcggaactgctgctcgatgccacccacgcacatcaagagccgctagacgaacagcgactgttcacctggcaccgttggctattccccactgatgagcaactgctgactcgaccgctacacatcggtgcactgcgtggcgaagagcccatgcaggtggtttccggtcgcatcgaccgcccgacagtccatttcgaagcccctccccgcgcggggctggaagcgcaactggcggactttctcgcctggttcgagagcagccgccgcgatgccagcctcgatccctttctgcgcgccggcatcgcccatttctggttcgtgaccctgcaccccttcgacgacggcaacggtcgcctcacccgcgctatcaccgatctggcattggctcagggtgagcagcaagccattcgcttctacgccatgtctgcgagcatcctcgacgaccgcgccggttactaccgcattctcgaagcaagtcagaaaagcacgctggatatcaccaactggctgcaatggtttctcgcgacgttgctcaacagcctggagcaggctcttgctcgtatcgaccgcgtgctggtcaaggcgcgcttctggcaggcacaccgcagccaaaccctatcggcggagcaagtcaaagtgcttaaccgcctgctcgatggcggcgaaagggggttcgaggagggcatcagtgcggcgcaataccaagctgtggccaaggtttccaaagccaccgcgacccgccacctgagcgacctgctggaaaagggctgcatcgagcgactgcccggcagagggcgtagcacccgttaccagatagcacgctga

SEQ ID NO: 334542 - DNA, 966 bp, Pseudomonas aeruginosa
atgccgtcccgaccccgacccagcttcgtctcccacctgttgcccggctccctggcgctctgcggcctggccatcgcctgcgccgtccagggcgaggagcgacgcagcctcgaacccatggtggtgaccggcagctacaaccccagcgacaccttcgacctgccgttctcggtggatagcatcgagcgtcggcagatcgccgacggccagctcggcatcaacctctccgaagtcctgccgcgggtacctggcctggtggtgcagaaccgccagaactacgctcaggacctgcaaatctcctcgcgcggctacggcgcccgctcggccttcggtatccgcgggctgaagctgctcgccgacggcatcccggccagtacgccggatggccagggccaggccgcgaccctcaacctcgacgtcgccgagcgcatcgaggtactgcgtgggccggcctcgacgatctacggcagcaacgccggcggggtgatccagatgttctcccgcgacggccagggcgccccgcgggtcggcgcggaaacctccgtcggcagcgatggcctgagccgcaaccacctgtacacggaaggcgagggcgacggggtcggtttcctggtggatgcctcgcggatggacaccgacggctaccgcgaccacagcgccgcgcgccgcgaccagaccttcgccaagctcaacttcaggcccgacgccgacagccgcgtggcgctgatctacagcagcctggaacagaacgacactgaagatccgctggggcagacctgggacgcctacaagcacgacccgcgctccgtcaccgccaacgccgagctgtacgacacgcgcaagagcatcgaccaccagcaggccgggatgaactacgagcgctacttcggcgaggcgaccttgcaggtcaacgcctatgtgggcaagcgcagtgtcgtgcagttcaggcgatacccaagcagatag

SEQ ID NO: 334543 - DNA, 2871 bp, Pseudomonas aeruginosa; identical to SEQ ID NO: 334382

SEQ ID NO: 334544 - DNA, 2760 bp, Pseudomonas aeruginosa
atgccacgtcgttcaatcctgtccgccgccgagcgcgaaagcctgctggcgttgccggacaccaaggatgagttgatccgtcactacacgttcagcgaaaccgacctctccatcatccggcagcggcgcggcccggccaaccggctgggcttcgccgtgcagctctgttacctgcgctttcctggtgtcatcctgggcgtcgatgagccgccgtttccgcccttgttgaaactggtcgccgaccagctcaaggtcagcgtcgaaagctgggacgaatacgggcagcgggagcagacccggcgcgagcacctggtcgaactgcaaacggtgttcggcttccagccctttaccatgggccactaccggcaggccgtccagttgctgaccgagatggccttgcagaccgacaagggcatcgtgctggccagcaccttgatcgagcacctgcggcagcagtcggtcattctgcctgccctcaacgccgtcgagcgggcgagcgccgaagcaatcacccgcgccaaccggcgcatctacgatgccttggccgaaccgctgtcggacgcgcatcgccgccgcctcgacgatctgctcaagcgtcgggacaacggcaaaacgacctggctggcctggctgcgccaatcgcccgtcaaaccgaattcgcggcacatgctggaacacatcgaacgcctcaaagcgtggcaggcgctcgacctgccttctggcatcgagcggtcggtgcaccagaaccgcctgctcaagatcgcccgtgagggtggccagatgacgcccgccgacctggccaagttcgaggcgcagcgacgctatgccaccctggtggcgcttgccatcgagggcatggccaccgtcaccgacgaaatcatcgacctgcacgaccgcatcctgggcaagctgttcaacgccgccaagaacaagcatcagcagcaattccaggcgtccggcaaggcgatcaacgccaaggtgcggttgttcggccgcatcggccaggcgctgatcgaggccaagcaggcgggccgcgatccgttcgccgccatcgaggccgtcatgtcctgggatgccttcgccgagagcgtcaccgaagcgcagaagcttgcgcagcccgaggacttcgatttcctgcaccgcatcggcgaaagctacgccacgctgcgccgctacgcgccggaattccttgccgtgctcaagctgcgggccgctcccgccgcgaaggacgtgctcgacgccatcgaggtgctgcgcggcatgaacagcgacaacgcccgcaaggtgcccgccgacgcgccgaccgagttcatcaagccgcgctggcagaagctggtcatgaccgacaccggcatcgaccggcgctactacgaactgtgcgcgctgtcggagatgaagaacgcgttgcgttccggcgacatctgggtgcaggggtcgcgccagttcaaggacttcgaggactacctggtgccgcccgcgaaattcgccagcctcaagcaggccagcgaattgccgctggccgtggccaccgactgcaaccggtacctgaacgaccggctgacgctgctggaaacacagcttgccaccgtcaaccgtatggcgacggccaacgagctgccggacgccatcatcaccgagtcaggcttgaagatcacgccgctcgacgcggcggtacccgacaccgcccaagcgctgatcgaccagacggcaatgatcctgccgcacgtcaagatcaccgaactgctgctggaggtggacgaatggacgggcttcactcggcatttcgcgcatctgaaatcgggcgacccggccaaagacaagaacctgttgctgaccacgatcctcgccgacgcgatcaacctgggcctgaccaagatggcggagtcttgccccggcacgacctacgccaagctggcttggctgcaagcctggcacatccgcgacgaaacctacggggcggcgctggccgatctggtcaacgcacagttccgccatcccttcgccgagcactggggcgacggcaccacctcatcgtcggacggccagaacttccgcaccggcagcaaggccgagagcaccggccacatcaacccgaaatacgggagcagcccagggcggacgttctacacccacatttctgaccagtacgcgccatttcacaccaaggtcgtgaacgtcggcgtgcgcgattcgacctacgtgctcgacggcctgctgtaccacgagtccgacttgcggatcgaggagcattacaccgacacggcgggcttcaccgatcacgtcttcgccctgatgcacctcctgggcttccgcttcgcgccgcgcatccgcgacctgggcgacaccaagctctacatcccgaagggcgacgccgcctatgacgcgctgaaacccatgatcggcggcacgctcaacatcaagcacgtccgcgcccattgggacgaaatcctgcggctggccacctcgatcaagcagggcacggtgacggcctccctgatgctccgaaagctcggcagctacccacgccagaacggcctggccgtggcgctccgcgagctgggccgcatcgagcgcacgctgttcatcctggactggctgcaaagcgtggaactgcgccgccgcgtgcatgccggcctgaacaagggcgaggcgcgcaatgcgctggccagggcagtgtttttcaaccgcctgggtgaaatccgcgaccgcagtttcgagcagcagcgctaccggggggtctcctcgttttcagtgcaataa

SEQ ID NO: 334545 - DNA, 840 bp, Pseudomonas aeruginosa; identical to SEQ ID NO: 6027

SEQ ID NO: 334546 - DNA, 207 bp, Pseudomonas aeruginosa
atggacagcgaggagcctccgaacgttcgggtcgcctgctcgggtgatatcgacgaggttgtgcggctgatgcacgacgctgcggcgtggatgtccgccaagggaacgcccgcctgggacgtcgcgcggatcgaccggacattcgcggagaccttcgtcctgagatccgagctcctagtcgcgagggctctgttgcaaaaatcgtga

SEQ ID NO: 334547 - DNA, 366 bp, Pseudomonas aeruginosa; identical to SEQ ID NO: 96026

SEQ ID NO: 334548 - DNA, 351 bp, Pseudomonas aeruginosa; identical to SEQ ID NO: 331798

SEQ ID NO: 334549 - DNA, 708 bp, Pseudomonas aeruginosa
atgcatgaaatcatctgccctcactgcgggaaggcattcaagatcgatgaagttgggtacgcggacattctgaagcaggttcgagatagcgatttcgagaagcagttgcatgagcggctagagttggccgagcagggaaagcgcaatgcggtcgaactagctgaagccaagattgccaacgaattgcagaagacctcgtctgccaaggacgccgagatccaggagctgaaggccaggcttgatgctggcgaagttgcgcggcaacttgccgtggccgaggctttgagcgcggtggaaaaagagcgtgacacgcttgcaaatgaattggaacaagcgaagcgtgacaagcaagccgtatccaagttggcagaggtcacgctcatgagcgaagtgcaaaaagccgctgcagcgaaggagtcggagatacaggaactcaaggcgaagcttgacgctgttgtcatcgagaagaagctcgcgattaccgaagcagtcggcgcggtcgagaaagaacgtgacgaattgaagagcggcttgcagcgggtagaacttgaaaagcatctcgccgagaaatctttgaaagaaaagtacgagacgcagatcaaggatcgtgatgacgcaatcgagcgcctacgggacatgaaggcgcgactatcgaccaagatggtgggcgaaactcttgagggggtcgtctcagaaaacggaaaataa

SEQ ID NO: 334550 - DNA, 1881 bp, Pseudomonas aeruginosa
atgaagatccaatccgttcgcatccgaaactttcgcacgttgaaagacgtgacgattccgttcgattccgtcacgaccttcatcgggccgaacggtgccggcaagtcaacggtgcttcgtgcgctcgactggttcttcaacggcaaacccggctcgctgacggagaaggattgctcttttggggcgactgacgaagacatcgaggttcaggtcaccttcgcagacctcaccgaaaaggatcgcgaggcacttggcaagtacgcgccggaaggagttgccacgttcaccgcatggaagcgccgatctcccgatggcaccgatgtgctctccgccaatgcaaagggatttccggctttaaatgccatcaaggcagcaggcggtgcgactgcgaagaaagagctgtatgccactctccggcgcgagcgcccggagcttgaccttcctgcggcgaatactggtccagccgtcgagcaggcgatgacaacttgggaggcggctcacactgatcaactgctcgatgcgcccgaggctttgcaaaccaatttcttcggtttcaacagcggcggcaagatgagcgggctcttcgacttcgtcctggttacggcagaccttcgggcaagtgaagagtccatcgacggcaaggcaagcatcattgggcgaatccttgagcgctcgattgaccgaactgccgctgatgaggcaatcgcggaaatcgttgcggagtcacgggcaaagcagcaacaagtctacgaagagaagttcaaggagcaacttggggccatcacaacgcagctcaacgaggtcgtcacaacctatgcgccaggccgggcaatcacggtttctccggctgaggtggaactcaaggcacctcgcacgacgttcgacgtggccgtgctcgacggcaccaccgagactgcggtggagcggcagggacacggctttcagcgcacgctgctgatctcggctctgcaactcttggcgcagtcgggcgcagcctcggccgagggagtcatctgcctggcgatcgaggagccggaacttttccagcacccgatccaggcgcagacctttgcgaaggtgctcaggtcgctcgccgaagatgctggcaagcgcatccaggtgacctatgcgacgcatagcccctacttcctggaggctcgacatttccatcaagtcagacggctgacgagatccgctgacgaagtcccggtggtgacggtccactttgccacggttgaggatgtgaaggccaggctgaatggaacagtggatggcgatgtggtcgatcgcaggctcgaccataacgtggccgaccagcttgccatagcactcttcgcgaatcgcgcatttcttgtggaggggacaaccgaatctgctgtgttctacggtattggagatagaacttcccccggcgcccttgaggcagcaggaatttctatcgtttctgtgggcagcaagacatcgatacccctcgcgcatgcgattttgaaatctattggtgtgccagtctacgcactgtttgatgcagacggtggatttgaagcgcgagccaaagccaaaaacaaaaagcaagatgacatagatcgggagcgcaacaatcatgcggtagagaactgcagattaatgcggtacttcggcttgcctgaagaagattttccatccgccaccatttccgacgtcgcggccatttttgatgatcatcttgaagcgtttctgtctgcgaactggggtgagtggataactgcctgcaatagtgttgaggctgataccggaataaatctatcgaaaaaccaactcgcataccggactgcaacactccggtcgggaggagtggtgccagaaatgcttaagcagattcttgtcaaggtggagggtaagtaa

SEQ ID NO: 334551 - DNA, 3006 bp, Pseudomonas aeruginosa
atgaaactccacttcgagcccaacctcgactatcagatgcaggccatcgaggccgtgtgcgatcttttccgtggtcaggaggtctgccgcaccgaatttacggtgaccatgaaactgcccgatgaggtgcagatgtcactgggtgtggcgcagtccgaccttggcgttggcaaccgcttgaccctgctggacgatgaactgctcaagaacctcgcggacatccagttgcgcggtggcctgccgccttccggctcgctgacttccggcgacttcacggtggaaatggagaccggcaccggtaagacctatgtatacctgcgctcgatcttcgagctgaacaagcgctacggtttcagcaagttcgtgatcgtggtgccctcggtggcgatcaaggaaggcgtctacaagaccctgcaaatcaccgaggaacacttcaaggggctctacgcgggcgtgcccttcgattacttcctgtacgactcgggcaagcccgggccggtgcgcaatttcgccactagttccaacatccagatcatggtggtgacggtgggcgccatcaacaagaaggatgtgaacaacctctacaaagagaccgagaagacgggcggcgagaagcccatcgacctgatcaaggccacccggccgatcatcatcgtggatgaaccgcaaagtgtggacggcggccttgaaggacgcggcaaggaagcgctggatgccatgaacccgctctgcacgctgcgctattccgctacccatgtggacaagcaccacatggtgttccgcctggatgccgtggatgcttatgagcgcaagctggtcaagcagatcgaggtggcgtcggccacggtggaggatgcgcacaacaagcctttcgtgcgcctggtgaaggtggaaaacaagcgcggccgcatcagcgccaaggtcgagctggataaacagaccgccactggcgtgcaaaggactgaggtgacggtcagcgatggcgacgaccttcagcagagcgccgatggccgtgcgatctacgccgattttcgggtgggcgagatcaatacggccaagggcgaagcgttcatggagctgcgctaccccggcggcgaagtgtttttgcagccgggtcaggcccacggtgatgtggatgcgctggccgtgcaacgcgagatgatccgccgcacgatcaaggagcatctggacaaggaaaagcacctgcgtccattggggatcaaggtgttgagcctgttcttcatcgacgcggtggacaagtaccgtcagtacgatgcggacggccagccggtcaagggcgtgtatgcgcagatgttcgaggaagaatatcgccgtgccgccaagttgccggcctaccagagtttgtttgccgagatcgacctggagtccgccgccgaagaagtgcacaacggctatttctccatcgacaagaagggcggctggcttgataccgccgagaacaatgcgggtaaccgggagaatgccgaacgcgcctacaacctgatcatgaaagagaaggagaagctgctgtccttcagcacgccgctgaagttcatcttctcccactccgccctcaaggaaggctgggacaaccccaacgtgttccagatttgcaccttgcgcgacatccagaccgagcgcgagcgccgccagaccattggtcgcggcctgcgcctgtgcgtcaaccaggatggcgagcgggtacggggcttcgaggtcaacaccctgaccgtggtggccacggaaaactacgaacagtttgccgaaaacctgcagaaggaaatcgagaaagacacaggcatccgctttggcattgtggagcagcatcaatttgccgccattgccgtgactggcgctgatgggcacgccgcaccgctgggcatcgagcaatcaaaggcactgtgggagcacctgaaagccgccggccatatagatgccaaaggcaaggtgcaggattcactgaaaacggcgctgaagaacggcaccttggaactgccggccgagtttgatgcgcagaaagcccagattgctgaagtgctgcgcaaggtgtcgggccggctggacatcaagaatgccgatgagcgcaggcaagtgccgctgcgcaagggtaaggatggcaaggtcgtttatctgagcgacgagttcaaggcactgtgggaccgcatcaagcaccagacaacgtaccgcgtgcagttcgataacgccaagctggtgacggattgcatcgcagcgttgcagaaggccccggtgattgccaaagcacggctgcaatggcgcaaggccgacatctctatcggcaaggcgggtgtcgccgcgacggagaaagcgggcgcggcgaccgtggtgctggacgaggcggatattgagctgccggatttgctgaccgacctgcaggatcgcacccagctcacccgacgcaccatcgtcagcatcctgacgggaagcggccgcctggacgacttcaagcgcaatccgcagcagttcatcgaattgaccgccgaaaccatcaaccgttgcaagcgcttggccctggtcgatggcatcaagtaccagaagctcggcgaccagcatgtctatgcgcaggagctgttcgagaaggaggaactgaccggttatctgaagaacatgctgttggatacccagaagtcgatctacgagcacgtggtgtacgactcgaccccagagcgggattttgccaacgggctggagaagaacgaggccatcaagctctacgccaagctgccgggctggttcaaggtgcccaccccactgggcagctacaaccccgactgggccgtgctggtggaagaagacggtgctcagcgcctgtacttcgtggtggaaaccaagagcagcctgttcaccgacgacctgcgcgacaaggaaagcgccaagatcgaatgcggcaaggcgcatttcactgcgctggcggttggtgagaaccccgcccggtatgtggttgcgcgctccgttgacgatcttttgaccgaggcggcaaaaggatag

SEQ ID NO: 334552 - DNA, 2157 bp, Pseudomonas aeruginosa
atgccaaagaataccgagtttgaggagagtctcaccatgaccattaaaaaaatcgataccaccagcccagaagcccaatccgccgatctggtggcgggaaatatcgaacagctcaaagcgctgttcccggagctgatcaccgagggcgcgggcggcgtggccgtgaatgtggacgtactcaaggcgctggtgggcgatgccaccgtcaccgatgccgacgagaaatacggcctcaactggcatggcaagcgccgcgcccggcaattggcgctcacgcccagcacgggcaccctgcgcccctgcccggaagacagcgtggactgggataccacccagaacctgatgatcgagggcgacaaccttgaagtgctcaagctgctgcaaaaaagctatgccagcaaggtcaagctgatctatatcgacccgccgtacaacaccggcaaggattttgtgtatccggacaattttcaggacaacatcaagaactatctggagctgaccgggcagatcgagggtggagagaagattagcagcaataccgaggccagcgggcgctttcataccgactggttgaacatgatgtatccaaggttgaagctggcgaggaatttactgcgagaggatggggtaatcctgctcagtatcgacgagcatgagatcacgaacctgcgctccgtgatggatgaagccttcggtgaagaaaattttctatcctgccttacatgggaaaaaggcagaaaaaatgatgccaagtttttttccaatggacatgagtacgttcttgtctacgcaaaatcgcagagctaccttcgagagcagaaaacgctgtggcgtgaagaaaagccgggtgcccgagatatctggaataaatacctcgaactgcgcgttcagcatggaatccaagacaacctgatcgaagaggggctgcaagcttggtattccgacttgcccaaagcacaccccgctaaaaagtggagccgctacaagcgagtggatcaaaacgggccgtggcgggatcgtgacatctcctggccgggcggtggtgggccgcgctatgacgtccttcatcccgttacaaatcaaccgtgcgttgtgccggaggccggttggagatactcatcttccgatgaaatgcaacgccagataaaacttgggcttgttgagtttcgccaagaccacacggagccgcccttccgaaaggcacatatccgcccgattcctcaggagcttgattcggacagttcgactgatgttgatgcgcctgaggaaccagccgatatcgaggatgaagaagaattcgcaactcaggttaggggtagctacttctacaagcaatcccaggtttcggtgaaatatctccggaccctattggggaagaaagtcttcaacaatccaaaggatctggacgagattgcgaaactgatccgctacaccacgtctgatgaccctcacgccgttgtgctggatttttttgcgggcagcggcacgacgggcgaggcgacgatgcagttgaacagtcaggataacgggagcagacgttacattcttgtccaacttccagagtcgcttgacgcaagcgacaagcagcaaaagattgctgcaaagtactgtggagaccttggacggccgctgaatatcgctgagctcactaaagaacgcctacgccgttccggaaccaagatcaaagccgataacctcgactggcagggcgacaccggcttccgcgtattcaagctcgacacctctaatatccgagcctggaatcccaaaccacacgatctggaagccacactgttcgaccatcaggatcacctgctcgaaggccgcagcgaggccgatgtgttgtacgaactgctgctcaagctcggccttgatctttgcgtacccatcgaaaagcgcggcattgaagggctagatgtacatgccgtaggcggcggcgtgctgttggcttgcctggccgaaaaaatcacccgtgagcaggtggagccactggcccaaggcatcatcgcctggcacaaggagctggcacccgctggccctgctggaaaagaaagcacctgcgtgttccgcgacagcgcctttgccgacgacgttgccaaaaccaacctcgccgcgattctggagcagcacggcatccagaacgtgcgtagcttgtaa

SEQ ID NO: 334553 - DNA, 375 bp, Pseudomonas aeruginosa
atggcacactttcggggctactcgcaggcgatccgcaccgaccaaggtcccgagttcaccggcaaggcgctcaatcaatgggcctatcagcgcgacatcaaactgaagctgattcagcctggcaagcccacgcagaatgccttcatcaagtcggtcaacggcaagttccgggatgaatgcctcaacgagtactggttctgttcgctggccgaatccagaatccgcgttgcggcctggcgacgggattacaacgagcaccgaccgcacagcgccattggcaatctcaccccggcggaatttgctgcaagttggcgagctcgccagcagcaattgaagcaggaaaaattgatatcaaccccagggcctactaactag

SEQ ID NO: 334554 - DNA, 1242 bp, Pseudomonas aeruginosa
gtgcgaatactaattgccgacgactgcaaaagtcgttacaaaaacctcttaaaaaaacttttgacaatcggtattgatcgtacttccgtggtcctagtaggaagtgctgatgaggcacagacagcgttggagaatcagtattttgatttattcgttcttgacataataatccctctttacgacactgatgaagatggctctcacgaacactcacttgcgattcttcaccgaataaacaatgatgaactcatcatcaaaccaggaaaaataattggtataaccgcagacttggacgcagctggagcagcgaaagatacgttttccgacagcacgtggtctattattaactattcccaaacagataatgaatggcagcagaggattgttaactgcgccaattatattctacgtgagaagcaagcgcgtcctgttgtgacggcgatagctgagcggactgatatcgttctactatgtgcgcttgaaacacctgaatttgaagcactgatggaggtgccctggaactgggctccttcgcgccccatccacgatcacatgtttgttagagatggatggtttatatcaaacggccataaaattaccgtcgctgcagctttcgcaagcagaatgggaatggtagaaacggctgtaaaaacctctatcgccatttcactacttcgcccaagcataatcgctatgacgggaatatgcgcaggagttccaagcaaatctaaaattggcgatgtcatttttgctgaatttgcttgggacttccaaagtggaaagataattcgagatggcgaaacaactaaacgcatgatttcccctcatcaaattccggcgacttatgcgataaaaaccttgatggaggtactgcgctcagataaaaaattccttaacgagttgccctctatttttggcgcagagtgcccgtatactacaagaattaaaataggtccggtggcctcaggctctgcggtccttgccgatgggaaaaccatcaaagaaattcaagaaagccaacaaagagatgtatttggtgtagaaatggagatttacggactgtacgctgcagcgtattcatctagtccaccaatacgtttttttgccttgaaggctgtatgtgatcatgcggatccagataaagatgacgaagcacagcgatatgctgcattcgctagtgcccgcacacttcaaaaactgcttgaagaccatggtaaaacttgtttaggggaaactaaatga

SEQ ID NO: 334555 - DNA, 3465 bp, Pseudomonas aeruginosa
atgctaaatactggtgaccataaagaagtttttgtagcctgccaacataaacttcgaggattggtttcggcctttaaggcaaaaaaatttgagaaaaaccgtagatatgatcactccttcgtttttcgacgtggctaccgagacctaatgcttgaggctagagccgtattacacacatcgagtttctcaaaatacctgcagtggtgtggatttcatatagcgaaccaacttcccgaacttaagagatatccaacagggtacgatgagttacagggggtgtcctggaaggattctaaagtatcgcttgagcgagaaatcctttggattgcagctagaatcaatcaagaccacgctacggtaaatcactttagggtatacgcagaaaaaattgaacagtttgttctctcgggcgaccacgcaaatgcgataagcctactgaaagagcttgagtctatacacggcgcgagcttctggtcagtacagcttcgaattgcacttgaaggtgttgtgggaggtttagaaggacaaaaaagatatacatcagaagtccgatcagtctataaagcaggtttactaaacttcatcgcttacaacactagcgtacgtaacgaagacagggtaagcatacaaaagtacacggaagacattcagagacgaataaccgaccacagcagatacgaagactctgtgaaatcctacatgaggcaccgattgctaaatatttggcccgccaaaatcgaagaaattgcggatgtactccgtgtcgagcaaagccattcgcttatagacatatatgaaacatttgtaagcttggttcaacactcaacaacctccgatagcaacaaggaactaagatccactgtgatagcagcattggatcaaacactgacagtaaacgacttcagactatcaaaagcttgcttatcatttggcctggcagttaattcaagctttcctctcaggcagacaaaaaccgctgacgcgctcgctctcggtaattcatactcagccataaagtccgcgttattgccaaaagacctcctccgacgcaaagcagacgcttgggaatatatttactctggagttgcattgagctttggctccaaaagcattaaaggtgaaaacctttcagacgtaagccacctgatagctagcgtactaagacaagaccacaactcatcggcagcttattcacgcctattgaaagtcaccacaaattttagcggattaccatttgcaagtgcaattcgtagttttgtcggattactatatcgttcgttcccagctcaagaatggcgaccagagactatctccttaaactgcccttctatcggtgcggaggataaggttgattttgatcttaaactagatcaatcaccgtctaatattctttgggggcttctccgaaatccaaatcaagatttcggaaaccttgacggcgatgcagtaaaattatttcggtgctgcgggctgttgaagagcgaggaccttgaaccagtcttgcatgatatcgagtcactaagagaatccaagccacgcttacttccggccctgataattccactatatctgcatgctcttcacgaaagcggccttcgtcaagcgataatagaacttatagctgatgagtgttcacgagaaaaatgtagaatcgatctgctccctatcgctagcacgctggggagttatagcgctgatgaatacaataggtgcagcgcactattggcgccttcgatagcgctacacgtattatgggaaatcaccgagaaaaatacaaccgcctctcaccttagattcaaacttggtcaggttattcgtagaaaggatgtccaagaacccgccaaactgatagacatcatggagacaaccgcactacccatccatcaacttgtatatttcttaaagcatgtctgcacttgcaattgggttgaccaagttagagttgtgaaaacaacatcagaaatattaaatcaacgtcaaaatacttgttcagtactgcgatcccttgatccagagcgagaggatgattatacagatgagataatggaaatatccaatcgacaactgatgagtgacggccagtggattgtggaccgcacaagagttcaagttgatatcggcgcgctgacacgatgggccacccgcgaactttccgaagaattctatagatatagggatctagccaaagtagtaactcctgcagagtacgatgaactcatgagagatatcttgattgaaaatcagatatcaacacagttctccgaattcgacgaagcggatactgttttgtattctcttctcgtcagaattggccacgagttcctaaacaactccctattcggccttgattactatttaagcaagcgcatcaggcatcaatcttttgtaggcctgatccgcgggcctcttgaactacagaacttaatcaccaacaaagaaaaaagcggggccgactacaatatcaacgaagagcttctcgaaaagttttcagactgccctaaagatatcctgtcaaaactcagcaataccatagagcgtttctcagactccttcgacacagcaatcatagaaacaaaaaataagataattcaaattagatcgaaggacaacccgcacggactaatatcatttgagcttggccctcaaatcgtcccaattgccagagtagtgttgagcgatgcggacacggaaaccttcataaaaggcgccgttgggatcatgtgggcgctattagatcgttcactaggagaagttagagagtatatctctggcgaacttaagtcgagagtaaccattatcttcgacgaattccgtgcatctttaaagagtctcgtggaagggcgatctgaatatcctgaagtcgacaggacaattggcgaatgctccgtagctgttcagcttgcattggatgatgcgagcagttggttctgcagaactagtgacaaagactcactcaaacgaacatttgacaccgatcaggcagtaagaatttctattgaagccgcaagaaaatgccttcgcgggttcgagccaaacattagtgtaattacaagttcctctgatgtcgccgtattacctagcacactggttttcatacatgacgtcatatttgtatccctggacaacgcaagagttcattcaggcttaaaaaatccaaatattcatgtatcagttgacccagaccttagcaacgaaagctttgtgataaaaatacgctgctcggcaaaatcaagtacacgaattgaatcagaaaaaaaactttccgaaatcagagagaacatagagcgcggagagtaccactctaaaacgaaaaccgaagggggcagcggactttataagatcgccgcagtggtaaagcaatcaacaaaaggccatttcacatttggcttcaacgatgatgaattcgaaataactgtagcgtaccattttatgggcgaaacgcttcccatcgaggaggtattatga

SEQ ID NO: 334556 - DNA, 1350 bp, Pseudomonas aeruginosa
atgaaaaagtccagttcggagcgtcatggcctgccggttattcatgagcgcgcagccggtatcgacatcggctcgcgcttccatgtcgtggcggtgcccgccgatatcactgaagagccggtgcaaaccttcaaggcgtttaccgccgacgtggagcgcatggctgattggttaggcgaccttggggtcaccactgtggcgatggagtcgaccggggtgtattggattccggtgtacgagattctcgagagccacggtctgcacgttgtgctcgccaatgcgcgcgacgcccgcgccgtgcctgggcgcaagaccgacgtcaacgacgcgcagtggatccagcgcctgcatgcctgtggcttgctgcgtgccagtttccatcctgatcgagagatcgcggcgttacgcagttatctacgtttgcgagaacgccacctcgattacgctgcggcgcatatccagcacatgcagaaggcgctcacccacatgaacctgcaattgcagcatgtggtcgccgacattaccggggccaccggcatgcgaatcatccgggcgattgtcgccggcgagcgcaacgctgcgactctggcaaccctgcgcgatacccgatgcaagtcgagcgttgagactatccagagtgccctggtgggcaattaccagcccgaacatgtgtttgccctggcgcaggcattggccatgtacgacgcctatcaggcacagcttgaggtctgcgaccaccagatagcccagagcctacagcggctctcccggaagcgcccctcacccagcgagccgctaccgaagccacgccaccgagcgcgacagccgaacgcgctcaacttcgatgtccgtgccttgctctatcaactggtcggcgtcgacctcacccagatccatggcatcggcccctacctggcactgcggttagtcgccgagtgcggtaccgatctgagccgctggcgtaccgcccatcacttcacctcctggctgaccctggctcctggttgccggatcagcggcggaaaagtgctctcggcacacacgcgtaagaccaagaatcgggtaacagctcatctccggctagcggcagtaaccattggcagaacgaacacagcgttgggagctttttatcgacgcttgtcagcccgtatcggcaaggccaaggcggtcaccgccactgcgcgtaagatcgccatcctgttctacaacgccatgcgcttcggcatggcttatcaagatcccggtgccgatcactatgagcagcggtatcgcgagcgcgtggtcaaaggcctgcaccgtcgggcagccgaatttggcttcacactacaggcggtcgaaggtgtttcttag

SEQ ID NO: 334557 - DNA, 384 bp, Pseudomonas aeruginosa
atggtggcttcgatctggctgcgcgccgcgcatcgcggcgtgcccacttttctcgtgacggccctcctgctgggtcagtcccagatggccttggccgagtctccggcacagcgccaggagctggtcgccgcactgcgccagctcgacgcgctggagcgcaccgtcgcggacagcgccgcgcatgcccccatccagccgggcgagcgctaccacttcgactacccgcggctgctggctgacctggcgcgcgttcgcgccggcatccagtttcacctgacgccatcgcgcgctcagccgcgcgacccctccgaactggccggcgactaccgcaccgagcgggcggccgagccgctgccggcgacgactgcggggggcaagcaatga

SEQ ID NO: 334558 - DNA, 828 bp, Pseudomonas aeruginosa
atgtctctggtatcccgctttgctccgcaatccccgatcctgcgctctgatcgcccactctcggacgaccgcattcgtgccgtcgttccgtcgatcttcgccgacgctccacatgggagccggtccgatcggtatgcctacataccgacctcgaccgtgctgaccaagctgcgccaggagggcttcgagcccttcatggtgtgtcagacgcgcgtgcgcaacgaagaccggcgcgagtacacgaagcacctcatccgacttcgccatgcaagccagatcaacggcgacgaggcgaacgagatcatcctgctcaacagccatgacggcacgagcagctatcagatgctcgccggcatgttccggttcgtctgccacaacggcctggtttgcggtgacaccaccgcagacatccgcgttccccacaagggcgacgtggccagccaggtgatcgaaggtgcctacggagtcctcgaaggtttcgagcgcgtgcataacgcgcgcgatgcgatgcgcaccatcaccctcgatgagggcgaagcggaggtctttgcgaactctgcgctcgcactcaagtacgacgatccggccaagtccacgcctgtcaccgagagccaactgctggcccctcggcgatgggacgaccgcaagaacgacctgtgggccgtcttcaaccgcgtccaggagaacctagtcaaagggggcctgaacggacgcacggccaacggccgcaatcagcgcacccgtccggtgcaaggcatcgaccagaacctgcgcctgaaccgggcgttgtggctgctggccgaaggcatgcgccagctcaaggcgtga

SEQ ID NO: 334559 - DNA, 750 bp, Pseudomonas aeruginosa; identical to SEQ ID NO: 334372

SEQ ID NO: 334560 - DNA, 360 bp, Pseudomonas aeruginosa
atgcaaaaccgcatcctcacttcccgttttgtccagcgcaccaccgtggctctgggcgccgccgcgctgcccgcgctgtcgttcgcgcaaggtctgccgcagttggagaacccgacccggggcgccggcagcggcatcatggagacgatcaggaactacggctacgacatcatcatgctcgtggccctgctggttgtggcgtcgatgttcattggcgtgtgctaccacgcctacggcacctacgcggaaatccacactggtcgcaaaacctggggccaattcggcctcacggtcgccatcggcgcggtgctgctcgtgatcggcatttggctgctcaccgaagccaccggcatcctgtaa

SEQ ID NO: 334561 - DNA, 213 bp, Pseudomonas aeruginosa
atgtcccagcaagcctctttcggccagttggccttgatccattgcggcaagttcctgccgctcgaaatcctgcatagcgccgccggccactacatcggcacgcgcgatacagaaggtcccgtttcgcgggaatcctgccagtacttccgcagctatgccgcggctcaacgtgccctcgaaagaggcggctggtcccagctcgccattccctga

SEQ ID NO: 334562 - DNA, 1140 bp, Pseudomonas aeruginosa
atgcatccccgtcggttgcttgctgtacttggagtggtggtcttgaccagcatgaccagttgcacttcgttttcttcttctcggagctcttccatggacaagaccggatggattactcattgctttggtcgctttctgattgatctgccacctgacgcggtaatcaatgccggatactacctatggggagacagaattgagtacttagatgataaacctaccgaactggcagccagggttgatcgtcttgaacaagagtggaggactcagagacataaatccaaaggtaacatgtttcttcgtaaaattgactttggcaatgaatcagtaggtttattgtcttggtcttcagaggttgcctctaaaacctatttattggatacctatgttacatctaagcctacgtggcatgcctatcgttggaaagggaaagtttcggtagacagagagcaacatgctgtggagatatctagggctttagctcgaaatctacgttctcgcgcgccaaaagaaatccccagcgagccgggcttttgcatcgaccacgcttatattgcaggggatagttttcaagtggagaggtttggagtgggagtcactttccctgagcaccccggcgcgcgctttgaattccgctcctccacgggagctgagctaaacagccttcttgagcgagtcgacggcttcgtgcaaaacatgctctccacgtttgcaggtatggaaacattaagaaaaggaaagcatcctgtcgggagccttcccggagaggagtatctggttgcgggaagcaacaagggacagcgcgcctacacattcatgtgggaggttcaaggcaaggaggaatcgctaaccgagcccaatcttactgcgggactggcggtactggaacgcagcaatgaaaacggtaaaccaccgccccctgccttcaaatcggataaagaagcattggaactgtgggacaccattgtcgattcgattcgcgtgcgcccgacgtcttcatcgccgcgtggcggaaatgccggtccttcccctgctccgaaacccgctacgcctggcggccaaacgctgggtgatcactatgtctacgaggaattcctctccagcctgaagccaaaagacagctggctggacgacctatag

SEQ ID NO: 334563 - DNA, 306 bp, Pseudomonas aeruginosa
atgcccggcaacttcgtggtcaaggcggcgaagcacagtcatgtcggtcccgctcatgcatcgaccagcttcaacgcctgggattcgacaccgttcgatgaccgatatgtcctgcgcgacgaagccacgctggagccgttacccaatatcgccgttgaagtgatacgaggcgatggtggtgtggtgaaactgatgaccgacagccagggccgtttacccaagcaacaacacctggccatggacccggtgcagatacgcatcctgggcaagggcagtcacaacagcgacacggagtccaacacatga

SEQ ID NO: 334564 - DNA, 354 bp, Pseudomonas aeruginosa
atgcgggaagagcagcatttcgctgccgcgccccaagccttcttcgaggcatggaagcgtggtgccgagatcgctggccccgaatggttcggcgacggcacccgtgaaggtctgaaccaggccaagagcaagtgggatctgcgtcccaacatgctgctgctcaatgatgccctcggcgtcctgagcagcggcgaacgcatgttcctgtccgccatggtcagcttctacaacgcgcgcgagggcggtgccatgctcaagcgctgccacttcgacgggctgtcggacttcgacggcctcgatctgcaacgccgcaaggtcatcgccgacttgatggtgaactacagcggctggtga

SEQ ID NO: 334565 - DNA, 738 bp, Pseudomonas aeruginosa; identical to SEQ ID NO: 334473

SEQ ID NO: 334566 - DNA, 279 bp, Pseudomonas aeruginosa; identical to SEQ ID NO: 334472

SEQ ID NO: 334567 - DNA, 915 bp, Pseudomonas aeruginosa
atgagcaccacgtccaacgagaaatcgtatttcgacctccacacctcgggcatcggttacatccagcgtgtccgtgaagtgcctgttcggggcggccgccgtgcgcagccttttctggcatgcaccatcgccgcgctggtcggttccgcaaaggaccccagctatcgctatttcgatgtcaaggtctcgggtgccgaggccaagaagctggtcgagcgctgcatcggcgttgacgatcccaagcagcgcccgctggtgcgctttcgcctcggcgacctgtggggcgatgcgtacatccgcgacaagggcgagcagaaaggccaagccgccgcgtccctcaaggcgcgactgctcaaggccgagccacttgaccgagccgaactggcttcgatcaggcatcacgagctgatcacccgcggcatcggctacctcagccgtccgaaggacgtcacgcccaaagatggcgacccgttcctctcttgcaccgtcgccgcgctggccgggcctgtcgatgaaccggagtatcggtacttcgacaccatcgttaccacccctgaagccgagcatctggttcgccggtgcgtgcaggccatcgaaggggactgcaaggtgctgatcgccttccgtctcaacgacatgaagatcgatccgtacatccgcaccaagggtgaacgcgctggggaaccggccgcaagcctggaatcgacgctgatccacatcggcctgatcaagatcgacggcaccaaggtctatccgacgagccccgcgcaagccgagacgccgccagcccaggacgcatccgcgtccgaagccgaggacgccggccccgctgccgatcagcctgccgagcccgccgagcgcgagcccgaaggtgaagtcgagaagcaggagccggcattggctgattcgttctga

SEQ ID NO: 334568 - DNA, 1911 bp, Pseudomonas aeruginosa
gtgagccagaccatcgacgcgatggtgcaggcggatccgcaactggcgtggctgaaggaggccgagcagcgcggggatgtggactggcgcatggtgcaggaggtgcacgatagctggaagtacagcaactcggggctgggggctgcgccgtcactggccattgccatcgttgcggctgcttacctcggcccggtgtatggcgcaatggccagcaacctcgccattggcaccatcaacaatggcggtgaccttggcaaggggctgcaacaggccaccagcgctgacagtctgaaagggtacgccatcgcagcggccacggcttatctcgtcagcccgcagttggacaaggcattcggcgtatccagtgacaacatcaacaaagtcaccaaaggattcaagctcagcacagttgagggaatcggtggatttgctgcctacagcattgcccaaggctttgctcaatcggtcatgcagcaggccgcctatggcggcagctacatcgacaacctcggtaatgccatggcaggtcaggcgcgcaacctgggaatggcggtaggtttcaatttcattggcgactcggtcaaataccctgatggcagcccgccgaaaatcatggctcacgccctgatgggaggtctgctggccgaagcctccggcagtgacttcaagactggagcggcggccgctggtgccaacgaggccatgatcaacctccttgggaaaatggtaggtggcgatcaaaacctcgaactgatggcctcgcaactcgttggcgtagccgcggcaagtgcggtcaatggcgatgtgagtctgggcgccgagatcgccaaaagcgggacggcgtacaaccggcagctacacccagatgaaatcaaattcgcatcggatgtggagcgcgtcaaacgttatgcccaggaaaatgggctgagcgaggacaccgcccgcaaagagcttctcagcacggccgccatgatggtggacaatggctggaaccaggccttggccggcacagacatcaacgctgcccgggctgctcagtatctgcgtacggagctgggcacaggcccggacagcaatctcttccaggtgacccaggctgactactacaacgagcgggtggggctgacggcgctattcaagaacaaggaggccctgaccagcgttctggaaaacatagccctagcgaatcccgcgagctatacgagggaccccgcgaaccgtgcggaagtgctgaatgccaaaggtgaaggtagccaagcgggctttgggctggcactggaagggatcgtcagcgcgccttcaaaaactgccttgtggttgatgggtgcgctaacctgttcaagctgtgcggagcgggatatccagaacgcttggaactcggttgcctcgttacctgaagacatccgtatgaaaggctatctggatgccttgcacaccatgcaaggccagggtgccagcgtggtgcgggacaacgccgcgagttcgactgcattgggagttgaggttgggctggccattgatggagggttggcaggggcaggcaagggcgtcgttacggatggtccgaaaggaatacttacactgaaagattttcctgatgtctctaccaagataagccagaagcagcttcgccatattgctggaacacagcagcttgaggcacggggaggcggtggtttcttaaacagtgtctctgatgctcaaaaagtgcttgatgcctaccataccggccaagtgaaaatcctagggagaaatgctcagggattcccagtagtcaagtttgagggcgttactggaactaacgttaatctcggtgttggtataactgatcaggcaaccaatgtatttattatcaagggcacaaagagtccaagtattgtccctacaaatccaaactggagtcccaaatga

SEQ ID NO: 334569 - DNA, 1056 bp, Pseudomonas aeruginosa
atgcccgttgatctcgacaccaccgccagcaatgcagcgcccgtaccgggcgaactgctcgaagcggaatcatcccctctgaccctgagccttcaggattttgtcggcgagttcggcgacgaactgcttgattctctcaaccgcgccaacccgccggtctataccggccaagcgcaagcacagcggcaactcgtcgttgccagcctcaagcgcaagctgttccaggcccaggccgacgttgtccatgctgccgccgagctgctggtcgatcaaggcgaacgcgctgcgatcgtcaatggcgaaatgggctgcggcaaaacgaccgtcggcatcgccacggccgcggtgctcaacgccgaaggctaccgccgcacgctggtactttcgcctccccacctggtctacaagtggcggcgcgagatccaggagacggtggccggcgccaaggtctgggtgctcaatggcccggatacgctggtcaagctcatcaagctgcgcgagcagttgggtgtgcagcccacgggccaggagtttttcgtcctggggcgcgtgcggatgcggatggggttccactggaagccggtcttcacccagcggcgcacccgccacggcgacgtggcagcatgcccgaactgcggcacggtcattacggacctcgacggcgaaccggtcaacccgatctcgctcgaagccgaggagtcccgcaggaagtgcagccactgcgccgcgcccctgtggacgctgatccgcccgcgtagtctgtccggcagtgaccagtcctctgtcgtcctcaaagccttgaagcgcatcccgaccatcggggaagtcaccgcgcagaagttgatgcagaagtttggtgacggcttcctggcctcgatgctgggtgacaacatccacgagttcatcaacctgatggacggcaatggcgagctggtgttttccgaccgtcaggccacgcgcatggaacgtgcgatggccaacatggagtttggctttggcgagggcggctaccaaccgtccgagttcatcaaacgcgtgcgacgtgaagtcgtctga

SEQ ID NO: 334570 - DNA, 261 bp, Pseudomonas aeruginosa; identical to SEQ ID NO: 328386

SEQ ID NO: 334571 - DNA, 408 bp, Pseudomonas aeruginosa; identical to SEQ ID NO: 328387

SEQ ID NO: 334572 - DNA, 570 bp, Pseudomonas aeruginosa; identical to SEQ ID NO: 331265

SEQ ID NO: 334573 - DNA, 213 bp, Pseudomonas aeruginosa
atgtcccacaaagcctctttcggccagttggccttgacctattgcggcaagttcctgccgctcgaagtcctgcaaagcgccgccggccactacatcggcacgcgcgataccgaaggtcccgtttcgcgggaatcgcacgagtacttccgcagccatgcggcggctcaacgtgccctcgaaagaggcggctggtcccagctcgccattccctga

SEQ ID NO: 334574 - DNA, 402 bp, Pseudomonas aeruginosa; identical to SEQ ID NO: 334470

SEQ ID NO: 334575 - DNA, 429 bp, Pseudomonas aeruginosa
gtgttcgtcggcaacgtcgatcgcctggaaaagcgcatcacgcgcgcctaccggcgaacgctgttcggttcgctgtccaacgtgtggctgttcgaccggcgctgcgtcaagcccgacaaggccaacgccagcgcattggcactgctgccacgtgacagcgcccaccggcttgaccgcctgtggatgctggtgcgggacacctgcccgttgccgctgctcgaccactggcgcgagaccgtgctggaactgctgcaaagccgcgagatgctggcccgccttccgttcgccctcgggccgctggaaggccatcggctcgccatcgacgtgccggcgctgagcttggcgctgggctccctgatccgcagtgacgcgctcaccgcctatccctatccggccaagatttggacgccggaagcggtagcggcttga

SEQ ID NO: 334576 - DNA, 315 bp, Pseudomonas aeruginosa
atggctaagccgaatgatacgtccaaccccgaggtaacagaatcgtccccccgcttcgtcccgctgcttcccacctcccaggccgacatgtgtccgcgtagcgccaccctgtacgtggacacccatgcactccccacgcacttgttcgacaacgcgaaagtgcgcttgaggtcggcgatcaacatcctggccatgacccgtttgctcgatgagaaagaagagcccggcggcaccctggcctacatcaacggtgcgttgctgtcgctgctcagcgatgccttgtccgaaatcgaggcgggccacccgagcctgtag

SEQ ID NO: 334577 - DNA, 144 bp, Pseudomonas aeruginosa
atgtccttgagcttgagaaatatggtgaacggcaggatgcaacgcaagacccctttcgggccgaagccgggagccttgaccgtgcgcaccgataccttggtgcccttggccgtcttgtgcgccgtgccggcgctctcggagtag

SEQ ID NO: 334578 - DNA, 177 bp, Pseudomonas aeruginosa
atggcgaccgtcctggtcggcgtcgtgttcgcggtcctgctcgtgtggggcgtctgggccatccgaacggcctacgtggggtggtccgagagccgcctcaaccagcgccagttcctcggcgtctgcatccgcttcgtcgcgatgtacctcgtcctgagtttcttcctcctctcctga

SEQ ID NO: 334579 - DNA, 186 bp, Pseudomonas aeruginosa
atgctcgtggccctgctggtggtggcgtcgatgttcatcggcgtctgctaccacgcctacgggacctacgcggagatccacaccggccgcaagacgtggggccagttcggcctcacggtcgccatcggcgccgtgctgctggtgatcggcatctggctgctcaccgaagctaccggcatcctgtaa

SEQ ID NO: 334580 - DNA, 681 bp, Pseudomonas aeruginosa
atggccgacttcggtacccgccgccgcttctcctatcgggtccacgaggcggtggtgagcggtctgaaggaggactttccgggctgcttcgtcggcaccagcaacgtccacctggcacgcaagctcgacctcaagcccctcggcaccatggcccacgaatggctgatggcccaccagcagctcggtccgcgcctgatcgacagccagagtgccgcgttggactgctgggtccgcgaataccgtgggctgctcggcatcgcgctgaccgactgcatcaccaccgatgccttcctgcgcgacttcgacctctatttcgccaagctcttcgacggcctccgccacgactcgggcgacccgttgctgtgggcggaaaagaccatcgcccactacctcaagctgggcatcgacccgctgaccaagaccctggtgttctccgacggcctcgacctgccgcgggccctgaagatctatcgcgcgttgcagggccggatcaacgtcagcttcggcataggcacgcatttcacctgcgacctgccgggcgtcgagccgatgaacatcgtggtgaagatgagcgcctgcaacggccatccggtggcaaagatctccgatacgcccggcaaggcgcaatgccgggaccctgacttcatccactacctcaagcacgtgttccaggtcgcctag

SEQ ID NO: 334581 - DNA, 1092 bp, Pseudomonas aeruginosa
atggaagcgggcgacgatctcctcggccagcttgatcttgatgtcgcgcgggttggcgcccgcctcgacgtccttgcggaagctatcgatctcatccagggaacggaagctgagcagttcgaagtaacgccacatcagcgtgtcaggaatggagaccagcttgctgtacatgacacccggcgcttcctggataccaatatagttgcccagcgacttggacatcttcttcacgccatccagcccttccagcaacggcatggtcaggatcacctgggcctcctgaccataggcgcgctgcagctcgcgccccatcagcaggttgaacttctggtcggtgccacccaactcgacgtccgccttcagcgcgacggagtcatagccctggaccagcggatagaggaactcatggatagcgatgggctgattgctggcatagcgcttgctaaagtcatcgcgctccagcatgcgcgcaacggtgtactgagaggcaagacgaatgaagtcagccggggtcagctggtccatccaggtggaattgaaggctacttcggtcttggccgggtcgaggatcttgaagacctgggacttgtacgtctccgcattctccagaacctgctcgcgcgtcaggggaggacgggtaacacttttcccactggggtcaccgatcatcccagtgaagtcaccgatgaggaagatcacctgatgccccaggtcctggaactggcgcagcttattaataagcacggtatggccaagatgcagatcgggagcggtcgggtcgaagccggccttgatccgcaagggctggccacgcttcagcttggccaccagttccgcctctaccaggatctcgtctgcaccgcgctggatcagcgccagctgctcttcaaccgacttcatttacaggttctgcccaattgccaaaatcgaaagggaaccaaccatacaagatcgcagactaaaaacaaattttgccgaccgtcagggggacggagccaggccagacgcgacttttggcttgattcaaggagattttggttatattttaggcagttatttattcacaatccaaaaacaccaatcacgccatga

SEQ ID NO: 334582 - DNA, 720 bp, Pseudomonas aeruginosa
atgtccggctgggaactccagttccgtgatccacggcgggcctggctggtccgcctcggggtgggtgcgctgctgctggcggttccgctggcgtttctcggcggtcgctggtcgaccggggcggacgccgctcgcagcgaggccgatgcgcaacgccaggaaaccctgatcggcgagcagaaggccgagctggagcgcctgcgtaccgaaatcgaggtgttgcgcagcggagaacgcctcagccagcaggccaccgaacagagccggcagaccatcaagctgcttgaggaccaggtgttcaagcagcaacaggacatcgcgttctacaagggggtagtcgcgccggccagcaaggcggatgcgctggaaatccgtgcctttgaggtgcagggcacggacgacccgcagcgcttccgctataaggtgatgctcagccgcctgggcagggacgaccgcaagctggatgggcggctgaaagtccgcatcagcggcaagctggcgcgcaaggacgctacctacgacctcgaacagctctcgccggaactgggcaagacagggctgtcgatttccctccggcatttccagtcgatcccagaaggggggcgtttcgccgagctggagctgccgaagaacttcatcccgaagctgatcgacgtacgtgcggagctgaatggccagtccaaaccgctacagcgccgtttcgattggccgaagcagtga

SEQ ID NO: 334583 - DNA, 228 bp, Pseudomonas aeruginosa
atgaacattgactggagccaactgagaacccccgagcagcaggccgccgaacgcttgcaggctgagtacgatgccgcagccgcggcgcgggcaaatgcctaccgcctggagagtgacccgctcaagaccgaggccgagttcgacgctatcaaggccggcaccgagccggactactctgactggatcgccaaggtagaagagatcaaggggcgatatccacttccttga

SEQ ID NO: 334584 - DNA, 312 bp, Pseudomonas aeruginosa
atgaagttcttgctaaaacccgacctgcaagtcggattgcctggcaaagaacgggtaagctcggtttctgtaaacggattgcggttgactatcgacggcgtagagttcgatttttctccacttgcagtgggtgggtacttgcctccggaggcatacatcaacataacccccctgcaagaggtggaggttcgaagcaactttcttctcgtacgctacatccaccaagtgacagcagacattctgactgcttatcgcgccgagattgaaccaattttggtggaagttgacggacctgtggagctaccgaaatga

SEQ ID NO: 334585 - DNA, 1101 bp, Pseudomonas aeruginosa
atggtatggtattcaaccggcaccgtagcggtgaccgcaaatagcccgaccgttaccggtactggcacacagttctcgtccaatgcccgggtcggcgatgcatttcgtggccccgatggttgttggtacgaggtcacaaacgtcgccagttcgacggtcatctcgatcaaacccaactaccagggcagcacggccagcggccagccctatgcagtggcgccgatcctgggctacgacaaggacctatcagatcgtttcaaccagatcgcgatggactggggggcgacccttgcgggcataaagccgtgggccctgtccaataccggcacgcaagcgcaggcggacatgggaatgacggcggtggggcggggactcaacgccgcagcgactgctgagaatgccctgagctttattggtggcatgccgaagtcgatgtccaatctgcgggctgtcagcgacgccaataatgtcccgaacgaatgcgggttctacggtatcggagcgtcgccttgggcgaacttgccgccgggggtcgacggtatcaaccctatcggatccatgctctaccaccatccgtacgatgtgagcaccgccgtgcagatgctcattccgcgaacctctgacctcatgtacttccgccggaagctctccggcaactggggcgcatgggtgcggctactctcggataagcagcttgtaggtacggtatctgttgacgggtcgaatgttccgaacggtgcggtcatgcagcagaacgggaccacggctatcaacgtgggcaccagtctgcgtttcgccgacggcactcagattatctacgcgaagctccgtctggaattcagcgcggtagacatcttgacccgccagtacacgttccccatgagctttttcgaacccccgaatgtcaccgctactttaattcaaggtcagcagtcggatatcaatccattgcagttccagcaactcggtccggtattggtcgctgctactactgttagcgcgtgcaacgtacgagtcatgcgccctacttacgtatcgagtggctgggcttctgggaacttcatcgactgttctgtcaacgcggtagggagatggcgctaa

SEQ ID NO: 334586 - DNA, 321 bp, Pseudomonas aeruginosa; identical to SEQ ID NO: 187401

SEQ ID NO: 334587 - DNA, 1509 bp, Pseudomonas aeruginosa
atggctgcgaacgacctgtcccacgccgatacatcggttcagggccttctcgatctcgttctgcagcagtcgcaccaatggtcaggaaaactgtactactacgccattagactgttctggctgctggccaccatccagttcgtatggacgcttatgcctctggtcatgaagcaagctgatttcggcgagattgtcggcgaactgctgcgcttcgtgatggtgatcggtttcttcctcgcagtcatgacttattccgtggagtggtcgacggccattgtcgatagcttccgcgatgcggcagcatcggcaagcggtcttggccgtgcattagaacccggcgacatgctcgcagttgcgctggatttcggccgcaccatggtggaaggcatttcagtgttttctccggccaagggaattctgatcgctgtatgcgctgtgctggtcttggcgtgcttcgccttcatcgcagcgttcatgtttgtgacgctcgtagagtcctacgtgatcatcaacgcatctgtgctgttctttggctttggtggttctcaatggacgcgggactttgcaattgcgcccatgcgttttaccgtcgcaatcggagccaagctgttcgtcttaacgctgattgtcggcctgatcgtacagtcggctaagcagtggctagcggcctacaccaacgacgaagcgtcattgatgacgatggtcggtctggccttggtgtgctgctatctgacgaagaccatccctgatctgatcggcggcatgataagcggcacatcgacgggcggcggctccgccattggcgggatggcggtagccggtgctgccggggcggccgcggcggcggccaccatcgccacggttggcgccgcggctcctgctgctgccggtgcggcgggtgccggagggattggcggcggcggtctggccgccgcaatcaattccagctttgccagtggtggtgcgcccgcagcggccgcaacaggtgggggcggtgcgacctctggtatcggcgcgagcactggcggccaaacggcggtcaagagcgcggcgtcggtaggtgcccgagtgggcggtagcggcgcaccacaaacgccgggcgccgcgccgcagcatcctagcagcggagtgcagcaggcagccaagcaggccggaaaagcggcgcagggcaacgacaacaacgaccagcaagcgacaccaaaagggggagttgtcagctccggcaacgcactttcccaagcggccaatggtggtgcaaagatgctcggcgtaatggcctcgatggcagtgccgggcatggagaacgcgcactctttgtctcttggcgcaggctctccaccacctgttcccggcgatgccaactcgacagccccggccaacggcgcggaaacgatagtcgaggagtctaatgttatccgaccagcttcggacaccagttctactcccggtcgcctcgcttcgctcgacgtgcagggcaccgcttcgaacaacgatcaactggagaaataa

SEQ ID NO: 334588 - DNA, 795 bp, Pseudomonas aeruginosa; identical to SEQ ID NO: 187403

SEQ ID NO: 334589 - DNA, 225 bp, Pseudomonas aeruginosa; identical to SEQ ID NO: 187404

SEQ ID NO: 334590 - DNA, 240 bp, Pseudomonas aeruginosa; identical to SEQ ID NO: 187405

SEQ ID NO: 334591 - DNA, 1953 bp, Pseudomonas aeruginosa
atgatcgcacatcgcatcaaccgtgaacgcaaggcctcaagcccagcccggttaatcaagtatatggtggcggccaagggcggcattgacccgacgagctgggagcgcacggccgattacattctggattccgccaatggcacgaccgagggcgagaaggtcgccagctaccgcgttaccaactgcggcacggatgatccggcagatgccgcaatcttgatccaagccacgcaagcggctaacaccaggtcgaaggcggaaaagacctaccactttgtctattccttcccgcccggcgagcagccagaccttgagacgctgcacgccatcgaagacgaactatgcgctgccatcggcctcgatgagcaccagcgtgtatcagcggttcatatcgacaccgataacctgcatgtgcatgtggccatcaacaaggttcacccgaccgggttacagaacattgaaccctattacgatcagttccgcctgatggaggcctgtgagcgtcttgaggtagagcatggcttgcaaagaacgtttcatggtctggaggcaaagcagcggcatcagaaccgcgacattgagctgttgccagcgaaagccccagagcagcgcgacagcctattccgtgaacaccttagaaacgcttacgacctcagcatatcgaagcctcctgaagccaaaaccctgaacgggttgcgcaagctgtccgatacccgtctacagagacagtcagcagataaagcggagccagtccgcatcggcgcgaaggtggccagcgtggaggcgcagtccggcatcgagacgctgatcgggtacgcggcccgcgagctggccccggcgatgcgacaggtgacgagctggcaggagctgcacgacgcagcggccgaacacggcctagaggttcgccagcgcggcgctggccttgtcatcggcgagccagattcaggcatttgggcgaaggccagcaacgtcggccgcgacctttccatgaaggccctaactgaccgtcttggcccgttccagccttccgaacggcaggccgaggcgaaggcgaaccgcaagcggtacgagccacgaccccggcggccggataacccgacgacagcgggcctgttcaaccagtaccagcgcgagcgacaggcggccattctggcccgccgtcagggcctcgaccagatcaagcgcgagagtgcggctttcaatgcgcaggttaagcagtggagccagacagagcgaatgcttttgaaggtcgcgggcaaggggccaaccaaacgcctgatgtatggcactatcaaacagcaggccgacgcctcgcgccaaaagaaccggcagagcgcagacgctcgccgtcaggcgctgttcaaacagacgacgatgcccacttgggccgactggctgacgcagcaggccgagcgcggcaacaccgaggcgctggccgtgctgcgcgaccgcgaggaacggacacgccgctggaacggggagctactgaccgccgaccgggccgacaaggccaaggctgttgttctcgacaagctcaagcccaaggcccggaaagacgggacgatggcgtacagcaccatcgacggcggcatggtgatcgaccggaagacgcacgttcaggcgcagaaagccacgaccggcgcggcactggttgcgctcgaactggcgtccaagcggttcgagggccaagcccttatcgtggaaggcacagacgagttccggcttgaagtcgcccagctcgccggtatgcacggccttaaggtcacgttcaccgatccggcgatggagcgtatgcgccgcgagacggccgagtataaggaaatggagaaggcctttcagaccgaggtatacgctccgaaggacaccaaaaagggagaggcgagcgatatgccaggcgtggccccacaacgtaggcagatgcaaccgaaggaccgctctaatggactgatatag

SEQ ID NO: 334592 - DNA, 1008 bp, Pseudomonas aeruginosa; identical to SEQ ID NO: 187408

SEQ ID NO: 334593 - DNA, 570 bp, Pseudomonas aeruginosa; identical to SEQ ID NO: 187409

SEQ ID NO: 334594 - DNA, 1470 bp, Pseudomonas aeruginosa
atgaaccagcagctagacactgcagacagcgtacgccgcgagttagccccccgtaccgcgcagaaacataaagccgaatttgggcagttcatgacgccttcgagcgtggcccgcttcatggcatcattgttcccacctagcacccaacagatctgtcgtctacttgatgcaggagcgggtgtcggcgctctatcctgcgcttttctcgaccgttgggcgacgggtggctttagctttgagtccgtcgaggcgacggcctacgaaatcgacgacaacctgcgcggccaccttacgcaacacttaggtggatacagttgcgtgaggccccgcatcctcgcaggagattacatcgaactcgcaactgctgaggggctgaaggaccgaggctatacccatgtgattctcaatccgccgtacaagaagatcaacagccaatccgctcaccggcttgcattgcgtagtgtcggtatagagactgtgaacctgtattccgcctttctcgcgctggcggtgggcgaggcggcgccgggtgggcagatcgttgctatcatcccgcgcagcttttgcaatggcccgtattaccgaccgtttcgtgatttcatccttgcgcgagcagcgatccgccatatgcacctattcgagtcacgcaacaaggctttcaaggatgacgaggtgctgcaggaaaacatcatcatccgcttggagcgtggtggtcagcagggggcagtaacgatttcgacctccacagatgacagcttttccgacctgaacatccacgaacatccgtttgaccggatcgtgttcccggatgacccggagcggttcattcatgtgccgaccacgactgagaaaagcgccatcgagttatcgcctgtcgtgcgctattcgctggccgacattggcgtgaaggtatcgactgggccggtagttgatttccgcttgaaagaacacttgcgagacatgccagagccgggcaccgtgcccctgatttaccccggccacttgagcatgacgggcaccgtctggcccgtaccgggcttgaagaagtccaacgcgatcatgcgaaataacgagacggaaaaatggctttacccaaacgggttttattgcgtggtgcgccgtttctcatcgaaggaggaaaagcgtcgtgtagtggcaagtctcgttgatcctgctgcctttggcaatcattcggtgctgggcttcgagaaccacatgaacctgtttcacgagaacaaacgcggcttgcccgaggcactggcccgtgggttggccgtgttcctgaatacgaccgcagtagatgagcatttccggcgcttcaacggccatacgcaggtcaatgcaactgacctcaagctgatgaagtacccgagccgtgacaccctgatcgagcttggcgagtgggccatgcagcaaggaacgctcacgcaagacctgatcgatagcaagctggggaccctgaccgcatga

SEQ ID NO: 334595 - DNA, 957 bp, Pseudomonas aeruginosa; identical to SEQ ID NO: 187411

SEQ ID NO: 334596 - DNA, 567 bp, Pseudomonas aeruginosa; identical to SEQ ID NO: 187412

SEQ ID NO: 334597 - DNA, 813 bp, Pseudomonas aeruginosa; identical to SEQ ID NO: 233199

SEQ ID NO: 334598 - DNA, 198 bp, Pseudomonas aeruginosa; identical to SEQ ID NO: 187414

SEQ ID NO: 334599 - DNA, 309 bp, Pseudomonas aeruginosa
gtgctcggcgccctgcgcgaggtcgagcgtgccctggcgctgtatgccggcgagcgccagcggcgtgccgacctccagcgtgccctcgacgagcagcgccacgcctaccggttggcgcgcagcaactatcgcgccggcgccctcgatgccctcgagctgctcgacagccaacgcagcctggtcgccgaccgggcgcgcctggtcgacgccgagatgcgcgtcgccgagcgccaggtcgaactgttccgggctctcggcggcggctggcaagccgctcccagcccctcccaccaggaaaacggacaatga

SEQ ID NO: 334600 - DNA, 702 bp, Pseudomonas aeruginosa
atgaagggtttttggtttttcgtgaggacggcggccgagtcatcccgggaactgccagtcgtccgccgcccaccggctcactcacgcgagcggcaagcgtcgaggcgccttgcccggaaaaaacgttatggaaatacggagtgccgtcgactcaagggcagtcaactgctgccatgcagacttatcgtcaggaaagagagaaaagcgatgagaatggattcacggtcacgcattgcacttccaccttgcgttgggtttccgaagtgtttcgctgtgtgtgtgtttttatatgtttcgtgggtatttaaaataagatacaaatttcccctcacaactatgagaattggtagttggcgaaagggcggtatgaggggcgtcgaagcgcgccggctgatggctttttgccgaggcaggcggccgcggctacgcctgccgggggtagcacggacaggtggtgtcgggggggcctggccgctgcggcgaggcgcggaggtccggctggcgcggcgatcatcacagaagattctgcggcgtcattcatcgcttgaatggttgctgccgcaagcgcgcccggcgccgtcgatgctggtcggcggtgtcgggcgctcgctggcgttgcgttggccagccgtcccggccgggtgcgtaggcaccggccggaggttttcaggaggcgggcagcggcgcgcccttgggccatag

SEQ ID NO: 334601 - DNA, 1020 bp, Pseudomonas aeruginosa
atgagcgccctgctgcaaggcgcctcggcgccggccttcgtcgggcaccctggctatcggcgcatgttcgccgcagacgcgctgaccctgggcctgttcctgccgttgcgtttctaccagggcgacatgcgggtgctgctgggccaggcgcggctggtcgaagacatcgatcgactgggattcgccgccgtctgggtacgcgacgtaccgttgttcgacccacgcttcggcgatgccggacaagtgttcgatccgttcacctatcttggctatctggccgggcggacccgccgtatcgccctggccaccggcagcgcggtgctttccctgcgccaaccggtcgacctggccaaggccgcggcgagcgtcgaccggttgtccggcggacgcctggtgctgggcctcgcctccggcgaccggccggtggagttccccgcctacgggttggagcatgcgcagcgcggcgagcggttcgcccagggcctggactacctgcgccagctgctgcacggctgccggcacgtcgcctcgccgctcggtacgctggacgacgccgaactgttgccgcgtccgccggccggcgccatcccgctggtcgtcaccggctccgcgcggcagccggcggactggctggcacgccaggcggatggctggctgacctatccggagtcgactgtcgatgcgtccgggccacgtcgcctggccgggaagatccgcgcctggaggaggtccatcgcggacggcgggttccgcccgcacatgaccaacgaatggctggacctggtggacgacccggcgtatccgcgtacgccgttgcacggcggctacgtcctgcgcaccgggcgcaacggcctgatcgagctgctcggcgaatggcgcgcggcgggcgtcaaccatgccgccctgggcatccagttctccgccaggccggcagcggaagtcatccaggaactggccgaggaggtgctgccgttgttcccgtcccacccgggcgtgcagccggcgagcatggactggtag

SEQ ID NO: 334602 - DNA, 249 bp, Pseudomonas aeruginosa
atgagtacgaccaagaagctgcggctcgggccgctgcccaagaccgagagcatcaagctgaccttcgcctgtccagccggcctcaaggccgacctcgaccgctatgcggtgctgcacgcgcagacctacggcgaaacggtcgatgcaacgacgctgatcccgcacatgctggaggcattcatcgccggggatcggggattcaggaagggagcggcggtcgccaaggcttcgccgccgaaaccgccctga

SEQ ID NO: 334603 - DNA, 1368 bp, Pseudomonas aeruginosa
atgaacgacgtttcgatcatcgaccacttcctcaacgtcttttccgcctacatcgactccggctttggcttgctgcggggcgaggtcgcgttcctgaccgcaacgctggtggcgatcgacatgacgctcgccggcctctattgggcgctcggccacgctaccggccaaggcgaggacgtgatggcgaagctcattcgcaaggtgctctacgtcggcgccttcgcctacatcatcggcaacttcaacatgctggcgagcatcgtgtttcgctcattcgccggcctgggcctgacggccaccggctcgaccttgagcatggagacgttccttcaaccggggcatctcgccaagaccggcatcgacgccgccgcgccgatccttgaccaaattagtgagatggccggcttccccgaggtgttcatcaatctgacgcccatcgttgtgatgttcctcgcctggctggtggtcatcctctgtttcttcgtgctggcggtgcagcttttcatcacgctgatcgagttcaagttgaccacgctcgccggctttgtgcttgtgccgtttgcgctttggaacaagaccgcgttcctcgccgaaaaggtgcttggcaacgtggtgtcgtccggtatcaaggtgttggtgctggccgtcattgtcggcatcagtacgggcttgttcgccgagttccaggtcacgcccgatgaaccttccatcgatcatgcgctggtcgtgatgctggcctcgctcgccatgctcgcgctcggcatctacgggccgggcatcgccacgggccttgtgtccggctcgccgcagctcggggccggcgcgatggctggtgcggcgctaggcgcggcgggaacagccgtcgctgtcggcgctgccgctaccggcgttggcggtgctgttgctgctggtgctcgcatggcgccggccgccgccagcgccatcggcagcggcgcccgtgccgctgcttcgaccgcgaccggcgcgcggtcggcgttccaagccggttccgccgccgccggcggcggcgcgaaaggcgcaatggctggcctgggcaatgttgctaagaccggcgcgcaagcagtcggccagaaggccaccgcgggggtgcgctcagttgggcagcgcgcagccgccgcgtttcgctcggacggcgcgggcgccgccgcatccggtgccagcgcatccggtcaggccgcgagcgaagcacaagccaacactgccgagcagtcgcagcccgcctgggccaagcggctgcaccgccgtcaacagatcgcccatgcggcgaccactgccgcgcacacactgcgcggcggggacggcggtggctcggcgcaaggcccaagcctgggcaattccgattcttga

SEQ ID NO: 334604 - DNA, 294 bp, Pseudomonas aeruginosa
atgaagcacgcgcccgtcctgtttgccttcgtgtgcctgctggcgggttgcgaccggcggcaggcgctgtcggtcgatgcactggccgccaatccgacacggctgcacgcgctgcgtgcgcagtgccggcatggcgaacatgacggcgcgttctgcgcacaggtcgcccaagccgacctacgccgtctcctctccggccaagccggcccggacgaatatcagacgctcgccgatctgccgccgatcccggccagcttcgacggccccgacgcgccgctggaggaacggccatga

SEQ ID NO: 334605 - DNA, 729 bp, Pseudomonas aeruginosa
atgaagattcgccttctttccctcgccatcgctgcgttgatcggtgtcacgtccaccgcgcaggcgcaatgggtcgtcgtcgatccaaccaacctcgtgcagaacacgctgaccgcggttcgcacgctggagcagatcaacaaccagattcagcaactccagaacgaagcgcagatgctcatcaaccaggggcgtaacctggcgagcctgccgttcaatgtggtcaaccggctgcgctcaacgctggcgaccacccagcaactcatcgcgcaggcgcaagggctggcgttccaggtgcagagcatggaccagcagttcgcgcgcctgtacccggagcagtacgccgcgaccgtgagcggcaaccagatgtaccaagatgcccaccagcgttggcagaacacgctcgaaggcttgcagaccgcgatgcggatgcaggcgcaggtgtcgcagaacgtgaccgaggacgagggcgtgctgaccgatctggtcggccagagccagtcggccacgggcgccttgcaggccatgcaggcgaccaatcagcttttggccttgcaggccaagcagtccattcaggcgcagcagctccagctcacgcaggggcgcgcggtgtcgctggaactggcgcgtcaggccgccgccgtcgaacgtggccgtgaggtgacgcgacgctttctcggcaccggcacggcgtacacgccgcagtcggtcaacttctacggcaactga

SEQ ID NO: 334606 - DNA, 2451 bp, Pseudomonas aeruginosa
gtgctcaacctcgccgaataccgccagcgcccggccttgctcgccgactggctgccgtgggccggcctagtcgcgccgggtgtcgtcttgaacaaggacggcagttttcaacgtacggcgcggttccgtggacctgacttggaaagcgcaacgcaaggcgaactgatcgccaagactgcgcgcctaaacaacgcactgcgccgcctcggtgccggctgggcgctgttcgtcgaagccgagcgccggccggcggcggactatccgcactcggactttcccgaaccgctgtcgtggctggtggacgaggaacggcgcgcgaccttcgaggaatccggcaaccatttcgagagcggctatcacttcacgctgcaatacctgccgccggaggaatcccgcgcccgcgcggccaagctgctctacgagaacacgccgaccgccggcgtggactggcgtgaacacttgaccgcgttcgtcgccgaaaccgaacgcatcttcgaccttctcgatggcgtgatgccggagattgcgtggctggacgacagccagacgctgacctacctgcacgcgaccgtctcgacgcggcgctatcgcatcggtgttcccgaggtgcctttccatctggacgcgctactggccgattcggcactggtcggtggcttggcgcccacgctgggcgaccagcacctgcgcgtggtgtcggtgcgcggctttccgacctcgacctggccgggcttgctggacgacctcaaccgcctgggctttgcctaccgctggagcacgcgcttcctctgcatggacaaagccgaggcggaaaaggaactgggccgcctgcgccgccagtggtttgcgaaaaggaagaacgtcgtcgcgctgctgcgcgagacgatcttccagcaggaaagcccgctggtcgataccgacgccagcaacaaggccgccgatgccgacgcggccttgcaggaattgggcagcgatcaagtcgcgttcggctatctcaccgccacggtgacggtgctcgacgccgacccggccgtggccgacgagaagctgcgcatggtggagcgcgtcatccaagggcgcgggttcgtcaccatccccgaaaccctcaacgccgtggatgcgtggctatcgtccatccctggcaacgcctatgcgaacgtgcgccagcccatcgtctcgacgctgaacctggcgcacatgatgccgctgtcggcagtatgggccgggccggagaagaatgaccatctggacggcccgccgctgatcgtcacccgcaccgatggcgcgacgccgttccggctgtcgctgcacatcggcgacgtggggcacacgctggtcgccggcccgaccggcatgggcaagtcggtcttgctggcgacgctggccttgcagttccgccgctatttcggttcgcggatcttgtcgttcgatatgggccgctcgatgcgcgccaccatcctgggcctgggcggcgagcactacgacctgggcgccgatggtggcatcgcgttccagccgctcgcccgcatcgaccatgagggctaccgctcctgggccgccgaatgggtggaaggtcgcctgctgcatgaaggcgtgaccgtcggcccggacgagaaggtggccatctggtcggcgctgggcagcctcgccggtgcgccgcaggaacagcgcacgatgaccgggctttccgtgctgctgcaatcgaacgcgctgcgccaagcactcgcgccttatgtcctgggcggcgcgcacggaaagctgctggacgccgaccacgataggcttggcatggccggcgtgcagggcttcgagatggaagaactgatgcacagccccgccgccgtgcaagcggtattgcgctacctgttcgcccgcttcgacgagcgtttcgacggtgcaccaacgctgcttattctcgatgaagcgtggctgttcctcgatgaaccgtctttcgcggcccgcatccggcaatggctcaagacgctcagaaaaaagaacgtcagcgtcgtcttcgccacgcaatcgctggccgacatcaaggattcgaccatcgcgccagcgatcatcgaaagctgcgcgagcaggattttcttgcctaacccgcaggccaccgagccgcagattcgctcgatctacgagggcttcggcctcaacagccggcaaatcgagatcgtcgccatcgcgcagcccaagcgcgactactactaccaatcgcgcctcggcaatcgcctgttcgacctcgacctagggccggccgcgctcgcgttcgcgggcgcatccacaccgcaagaccaacgcgacatcgaccgcgtgctgacgcaggccggcgcacccggcttcgccggcgcgtggctgcgccatcgcggcctcgattgggccgccgacctgctgccgtccgcaccatctgccgcgtccttcctcgctccccaaccacaggagatttcgcaatga

SEQ ID NO: 334607 - DNA, 270 bp, Pseudomonas aeruginosa
atgagcacggccaccgacctgcctggcttcgaggtgcctctgcatcgctcgctgaccgagccgatcctgctgggcggtgcgccgcgcaccgtggcgatcgccaacgggacgctggccgcggccgtgggcttgggcctgcagctctggattcccggtgtcgtgctctggatcgtcggccattcgctggcggtgtggggtgcgcgcgtcgatccgcagttcatgcaggtgttcgccaagcacctcaagcacaagccgctgctggacgtgtga

SEQ ID NO: 334608 - DNA, 465 bp, Pseudomonas aeruginosa
atgagccagtaccgcctcaacctgttcattccgcacgagcatgcaaaacgcctcgacgagctggccaccaagaaaggcgtctcgaagtccagcatcgtcgcggcggcgctcgcatcgtggctgtcacccgatgcaggcgaccagcgcgaggcagccatcgccaagcggctcgatcggttgtcgcgccagttcgagcggctggagcgcgaccagaacatcgagatcgagacgctggcgctgttcgttcgctactacctcacagtcagcacgccggttcccgaggcgcatcaggaagccgcacgcgcgcagggcaaggcacgtttcgagcagttcgtcgaacagctcggccgccacctgatgcgcgggcgcagccttgtacgcgacgtggtggaagaactgaaccccgatgccgcccggctcgatgacgcggcggcgctggcggcggccgaggagtgtgggtcatga

SEQ ID NO: 334609 - DNA, 1203 bp, Pseudomonas aeruginosa
atgccacacactaggccggccattagtgctgcaaagacggctctcgtgctgtccggtggcggtgcgcgcgccgcctaccaggtcggtgtgcttcaggctttggtgacgttgcgccgtgaacacctgggcgaaggggcgcccaaccccttcggtatcctatgcggcacctcggcaggcgcaatcaacgccgccgctttagcctgtcgcgcagactcctttgacgctggcgtggaggccatcgccgcagtttggcgcaacttcaatgctggtcaggtgtatcgcaccgacgcgcttggtatcgctcgcagcggcgcacagtggctgagcgcgatctcggtaggctggatgttggcacgctggcgcaaagaaggaccgcattcactactggacaatggaccactagccgaactgctgcgacattgggcgcctttggaactgctgccgcacatgctggcccagcgccatctgcgtgcgctggcgatcggcgcgtccagttacaccagcggcgagcacttcaccttctttgagtccatcggcgatatgacgggctacgaacgctcgcagcggctggccgtgcccatgcggctgggattggcacacctgctcgcttcggcggctatcccattcgtgttcccggcacaacgcatcgaacatatggagcatgccggctggtacggcgacggctcgatgcggcagaccgcgccgatctctccggccatccacctgggcgcgcaacgtatgctcatcgtcggcgttggtcggatgcacgaacctcgcgggcgactcgtgcgtaacggcggctacccgacactggcccaagtcggaggacacgtgctgtcgaacatatttctcgacgcgctcacggtggacatcgagcgtatggagcgcgtcaaccgtacccttggaatgatgacgctgggccagcgcctcgccacctcactacgtccggtgaaggcgctggtgattgcgccgagcgagcgcatcgacgacatcgcggcacgccaccaaaagcacctaccgcgggccgtgcgcgccctgttgcgcggcgtcggctcgtccagcgcgagcggcgacctgagcggcgccgccctggtcagctatctgctgttcgaggctccattcacccaggaggtaatggcgctgggtgagcgcgacacgctggcgcaacggcaggcagtctgcgaatttttcgggtggctctga

SEQ ID NO: 334610 - DNA, 1962 bp, Pseudomonas aeruginosa
atgagccagcgcgacgatgaccgattccgcgtccggcctggcgctccgaaacagcgcggcgatgccttcgtcaacaaggtgctgcggcaggccaacaaagccggcacgaagctcggcaaggtggcaggcaaggtcggccagcgacccggttcccggctaggccgcgggcatgtcgcggcgcgcttcgctggccggggacttggggccaacgcccggcgcgtgacgatcaaggcgcgactggtgaatctggcgcaggctgggccgcgctcgaccgccgcgcacctgcgctacatcgagcgcgaaggcgtcgatcgccagggcgggccgggccacgcctacgggccggcgaccgacgacgccgacctcgaagcgttcaaggagcgcggcgctgacgaccggcaccagttccgtttcatcgtctcgccggaggatgccgaacaactcgacgacctgcgcacttacacccggcacctgatggcgcgcatggaggccgacctcggcacgccgctggaatgggtcgccgtcgatcattggaataccgacaacccgcacacgcacgtcgtcctacgcggcaaggatgacaccggcaaagacctcatcatttcccgcgactacatcgccgaggggatgcgccggcgtgcgtcggaactagcgaccgaatggctggggccgcgcaccgagctggagatgcagcgcgccatgcagcgcgaagtcgatcaggagcggtggacgggcctggatcgcaccttgcagcgcgaggccgccgacgatggcttggtgcgcgtcgaacgcttcgccgaacccgggttgcaacgccagcggcaagtgctgatcggccgcctgcaacacctacaacgcatgggattggcgtccgaaccgcaccccggtacgtgggccgtccatgccgacgccgagccaaccttgcgggcaatgggcgagcgcggcgacatcatccgcacgatgcaacgggcgatgagcggcaagcagcgcgaactggccgtgttccaggccggcgagggtggccgcgccgtcatcggtcgcgtcgtcggcaaggggctggccgacgagctgtacgacaagggctatctgatcgtcgatggcgcggacggcaaggcgcactacgtcacgctgccgccgcgtgccgagctagagcagtacccgaccggggccgtggtggaggtgaaaggcacggccgacgtgcgcgccgccgaccggaacatcgccgcgctggccgccgatggcgtgtaccgcaccgatcatcaccttgcgctcgcccaaggtcaggccatgaacgaacgcgatccgcgcgaggtagtggccgcccatgtacgccggctcgaagccctgcgccgcgctggcatcgtggagcgcgaggctgaaggcgtctggcgcgtgcccgccgacctggccgagcgaggccgccagtacgacgcgcagcgcctcggtggtggtgtggcggtcgagctgaaatcgcacctgcccatcgagcggcaggcccgcgtgatcggcgccacctggctcgaccagcagttgatcggcggcggcaagggcctgggcgacctgggctttggagccgaggtcaaggatgcgctacgtcaacgcgccgacttcctggccgaacagggactggccgagcatcgcgggcagcgcgtcgtcctcgcgcgcaatctgctggggacgctgcgcgggcgtgaattggcgaaggccgcgcaggacatcgccgccgaaaccggcctggagcatcggccggtggccgacgggcggcgcgtgactggtatctaccggcgttccgtcatgctcgccagcgggcgctacgcgatgctcgacgacggcatggggttctcgctggtgccgtggaagccggtgatcgagcaacggctggggcggcaactggccgtgacggtacgaggagcctcaacatcgtgggagctggggcgaccacgcggccccgctattggctga

SEQ ID NO: 334611 - DNA, 282 bp, Pseudomonas aeruginosa; identical to SEQ ID NO: 326268

SEQ ID NO: 334612 - DNA, 771 bp, Pseudomonas aeruginosa; identical to SEQ ID NO: 326269

SEQ ID NO: 334613 - DNA, 297 bp, Pseudomonas aeruginosa; identical to SEQ ID NO: 326271

SEQ ID NO: 334614 - DNA, 315 bp, Pseudomonas aeruginosa; identical to SEQ ID NO: 327612

SEQ ID NO: 334615 - DNA, 210 bp, Pseudomonas aeruginosa; identical to SEQ ID NO: 326229

SEQ ID NO: 334616 - DNA, 297 bp, Pseudomonas aeruginosa
atggccgcatggtggcagccgaccgcagaaggctacttcaagcacgttcccaaggcggcagtcctgcaagccgtgggcgagtacgcacccgagcaggtttcccggctggcgaagttgaagaaggccgacattgccagcgaggccgagcggctggcgaacggcagcggatggatgcccgccatcttcaaggcagaaggcgcgcaggaaaccacgcaggcagaaccgcaggcgcaggacgacgccccggaggaagccgaggcaatggcggatgaacccgccgtggcgctggccgcttga

SEQ ID NO: 334617 - DNA, 639 bp, Pseudomonas aeruginosa
  misc_feature (5)..(14): n is a, c, g, or t
gtgannnnnnnnnncacgccgatctcccgcctgtccttcgaactcgagcaattgaacaagcaggtcgacgccgaagtacgccacgacctgatagaggacatgcgcgccgacctcggcgaactggaggaaatggtctccgaactgctgacctacgcccgcctggagcacggcaacgtcgggagccaccgggaaatcgtcgacgccgcgagctggctggatagcgtcgtcgccgacgtcgccctggaagccgaagccgccggagtcacctgcgagatcagcgcctgccaggtcgaacagatccgcatcgagcctcgcttcatggcgcgcgccgtgatcaacctgttgcgcaacgccatccgccacgcacactcgcgcgtcgaaatcgccctcctcgatcaaggcgacagctgtcagatacgggtcaacgacgacggccccgggataccggcggacgcccggcagaagatcttcgaacccttttcgcgcctggacgacagccgcgatcgcagcaccggcggcttcggcctgggcctggcgatcgtccgccgggtcgcgcaatggcacggcggctatgcggaagcgctggaaacgccgcagggaggcgcctccttccgcctgacctgggagcgaccccgttga

SEQ ID NO: 334618 - DNA, 1788 bp, Pseudomonas aeruginosa
atgagctttcgcaccgccgaacccgcattgaaagatgtcctcgatggaattgcatcggggcaaatccagcttcctgacttccaacgcggttgggtgtgggatgacaaccatattcggtcattgattgcgagcctctcgctgtcctacccgattggcgcagtgatgtttctggaagcaggcggtgtgccgttcaaacctcgcctgtttgccggcgtcaacctgcagcctgcgcctgctccaaaaaccctcgtacttgatggtcagcaacgcttgacctccatgtacctggcgctgcgcagcggccagcccgtgccgacacgcacggagaaaggcgcgaatattcgccgcctgtacttccttgacatgacccaatgcctggatgagtcggcagaccgggaagacgcagttctctcgctgccggagacactgcaagtcacgtcggatttcggccgtaaagtcgatctggatgtccgcacacctgatttgcagtacgaccagcggctcttcccggtggcattactcttcgatattcaaggttttatggcctgggaaagcggcttcagcgcgcaccatcagttcgcagcggaagccatgcagttcatgcagcggtttcgtaacgaaatctggctgcgcttccaacagttcaaggtgcctgccatcgaactgacccaggacacgccgcgcgaagccgtgtgccaggtcttcgagaaggtcaataccggtggcgtgacgctcaccgtcttcgagctaatgacggcaaccttcgcggccgatgaattcaacctgcgcgatgactgggaagctcggcaggagcgactgacggccaagcacgacgtgctcacggcggtggacggcaccagctttctcaccgcagtgaccctgttggccagctaccgtcgacacaaaacgcatggcacatccgtcagttgcaagcgtgccgacgtgctgaagctgccgctggcggacttcaaggcgctggaatctgatttggagaaaggcttcaagcgggcagccgagttgctggcggaggaaaaaatcttcgacgaccgaagcctgccttatgccacgcaactcattccgttgtcggccatctgcgctcatttggcagaccgcaccacgcaacatggcgtcaaacaaaagctgctgcgctggtactggagcggcgttctgggtgaactgtacggtggcgccaacgaaacccgttttggcatggacatccaggatgtggtcgcctgggtcgaaagcggcagcgaaccgcgcacggtgcgcgacgccaacttcgcgccgacgcgcctgctgtccctgcaaagccgcctcgcagccgcctacaaggggctggccgccttgctcatgaaacatggcggccgggatttcgtcagcggtacgccgattgacctcaacacctacttcaacaacgccatcgacatccaccatgtgttcccccgtgcctggtgcgaaaagcagaaattgcccaaggagaaatggaacagcgtggtcaacaaggcccctctggccgctggcaccaaccgtttcatcagcggtgatgcgcccagcatgtacctcgcccgcatccagaaagccaagcaggtggcccccgatagcctggacgagtttctgctctcccacgtgatcccggtgaccgcgctgcgctctgacgacttcgatgcgtttatccgccaacgcgccgccgcactgttgacgctgatcgaacaggccatgggcaaaaccatcgccgggcgcgacagcgaagaaacggtcaaggcatttggggcgacactctcgtcatga

SEQ ID NO: 334619 - DNA, 810 bp, Pseudomonas aeruginosa
atgaacaggtcggatgtcgtcagtgccctgaatctcccggatagcgcacgggtggaccagcgcgtgcccaaaaagctgttgctggagaacggtgcgcccacggcgtccgacaagcgcttgatcaccgatgccattgaagacatccagtggctggccgccctcaagcccaacaccatcggcgtgcccgagtaccgcgatacgcaacgcgagtacctggaaatcgcggtgctggcggtcaccttgcgcggtgccatcaagcccaccagtctttcacgcctggtcgaattggtgcatcgggccgtgccttacccggtgctgttactgctgggtgaaaagcgggctgaagggccaacaatgaccctctcgctggcgcataagcgctgggcgcataacgaggcgggcaagatcgtgctcgacggtgacgtggtgtcggcctcgctgtttcaagcagccgatggctcacctggagctgatgcgaaggcgacgtcccacattgagcagggtttcatgcagtcgcttgcgcttgcgcgtcagccccaggcttcgctacatgccctctatcaaggctgggtcgaatgcgtgcaggccctgcacgcagcgcgaaggacgggaatctatcaaaccgctgcaacacccgaacagaccgcggcgcgacgacaggcattgatcgattgccagcggctggaaggcgaaatcagtcgcctgcgggccgaggcggccaaagaaaaacaactggcgcgccaggtggaactgaacctgacgctcaagcgcatccagtccgaactggccgctgcacaacaacagctttga

SEQ ID NO: 334620 - DNA, 1986 bp, Pseudomonas aeruginosa
atggaaaaactcacggcagccagccccgaagcccagtccgccgacttggtggcggcaaatatcgaacagctcaaggccctgttcccggaattgattaccgaaggcgcggacggcgtggcggtgaatgtggacgtgctcaaggcgttggtgggtgatgccagcgtgaccgacgccgatgagaagtacggcctcaactggcacggcaaacgccgcgcgcggcaactggcgctgacgcccagcaccggcaccttgcgcccctgcccggaagacagcgtggactgggagaccacccagaacctgatgatcgagggcgacaaccttgaagtgctcaagctgctgcaaaagagctatgccggcaaggttaagctgatttatatcgacccgccgtacaacaccggcaaggattttgtgtacccggacaattttcaggacaacatcaagaactatctggaactgaccggacaggtagaaggtgggcagagaattagcagcaataccgaggccagcgggcggtttcataccgactggctgaatatgatgtatccacgacttaagctggcaaaaaatcttcttctcgatagtggattaataattatctccattgactcttctgaagccactaacttgcggctaattatggacgaagtttttggtcaagagaacttcatcggcttactgccgactatcatgaatctgaaaggcaataacgatgccttcgctttcgcggatactcatgaatttacagttgtttatgctcggaataaagaaaaatgtgtggtttttcaacttccagtgtcagaggaatcgctagatgattggctggaagatgagcgtggcctctacaagcgcgctgacactttaaggcggacagggcaggatgcatcgagggagcgccgtcctaacgggtggtttccagtctttattgacgaaaagggtgaagtctacgcgacgcttgatgatgagcctcgctcaggttcagatttaactctatggccagtttcagaggcaggcgaagagctctcttggacgtggagcaaaaagaaaataaacgatgaaaactttaacttgattgttgttgaaggtaggtcaggaaagaatatctacaaaaaacaacgagccactctcggcgacctcccaaccagcaagcccaaatcgattctctacaagcctgagtacagtagtagtaatggaacggccgaaatttcatcgttgctgggaagcaatgtgttcgatagccctccaaaacctcgctcattaattcgtgactttgtaacaattggtacgtctcctcaggacatcattcttgatttctttgctggaactggaacaactggtcatgcagtaatggcacagaatttcttagatgaaggaaaccgtagatttattcttgttcaactcccccagtatctcgatccggaggataaggggcagaaaaatgcagccgaattctgcgaccagatcaccaagcctcgttctatcgcagaactcactaaagagcgcttacgccgcgcaggcaccaagattaaggctgaaagctctggctggcagggcgacaccggcttccgcgtcttcaagctcgacacctccaatatccgcgtctggaatcccaaaccagacgatctggaagccacactattcgaccatcaggatcatctgctcgaaggtcgcagcgaggctgatgtgctttacgaactgctgctcaagttggggctggatctgtgtgtgcccatcgaacagcgcaatatcgaaggccttcacgtccatgccattggcggcggcgtgctgctggcgtgcctggctgagaccatcacccgcgaacaggtagagccgctcgcccagggcatcatcggctggcacaaggcgttggcccctgccggtgacaccacctgcgtgttccgcgacagcgcctttgccgatgacgtggccaaaaccaatctcgcagccattctggagcaacacggcatccagaacgtgcgcagcttgtaa

SEQ ID NO: 334621 - DNA, 198 bp, Pseudomonas aeruginosa
atgaatatcgctggcgctggcaagcggctgatgcagcgctacctgagaaccgaaagtgatgatcgcaacatggatttcagtttcaccgttctcggtgtcgctgaacgtatccaacatatcgcgaacggcatcattcacattgcggattttctctccgctcatgctgccgctgacatcgagaagaagcacgactggtag

SEQ ID NO: 334622 - DNA, 270 bp, Pseudomonas aeruginosa
atggcacaagcaatcggcgatccagaagaacttgagcgcttcgcatattcgttacaacaatttattgattcgctcaacgatgctgtcggcaatcttaacggtgcctttgcttcactcggagacacctggcaagacgaaaagcgggcgcgatttgaggaggattacaacgcgctcgttcagcagttgcaacacttcaacgacaacgcgtctgagcaggttccatatctggcagcgctcgcggcgcggctgcgggattatttgcaaagctaa

SEQ ID NO: 334623 - DNA, 1326 bp, Pseudomonas aeruginosa
  misc_feature (1017)..(1026): n is a, c, g, or t
atggcacaagtttcaattgggcaagtggagaatttggaagacctcgtgcgcgatctgcagtcagtgcgcgaggcgctagaggccgcatgccgcgaacaaattgctgttgcggagcagaaatgcgcagaggctcgtgaagaagcgcagaacagcgcaagcatgttggaaagtgccatccagcaggagcaagccgccacgcaaaatgttgacggcgctgagcaagcgctcgatagcagtcagagctcgctttcttccgccgagtctgcgctatctgcttgccttgctcagccgcacgatgacgatggacgttgcccggactgctccggcgaggactctgccgtggctgaagcagaagccgctgttgagcaggctcagagcatgctggagcaagcaagagcagagcttgaggtggcgaaaggagatcgcatatccatggagcagcgcgtggatcttgcgaatcaggccgaggcgatggcggaacataccctggagcagaccctacaagcatgcaatgcgcacttggcaactgtcgatcaggcgattgaagctggcactgcacgcttgatatccgcgcaacaagcactggatgcttatctcgcgacaaacccgtccgctgcgcaattccatgcttggttgaaatgggaccctgccaaagatggccgccctgtgactccggatatgttgcgagaccgcatgaacctatcgtcagagcagagacgattgcttcaggaatatctttacgaccgtgatccagcgtatcgcaagcaggtcgataaatttcggaaccaatgggtagccgccaagggtgatgcagagcgaaacatcgtcgcacgtaaggcacggatacacctgagcggtgaattcggggagcagatagttcggcacgcacttgcgccacttggcggccggatcgagacgcaagggcgaacctttgtgggcgataacggacgctacacaaaaacagatttgatagtcactgacttgcgggttccggtcattctgggacgtggtgagggnnnnnnnnnngagggcatgggggctcctgtgggaggctcgatggcattcgaagtgaaatgcggcaaggcggaatacctctattcgcagaaagatcacatgatttttcaggccgaagggcacaagcaagcagacgcgcaatgcactctttgctcacgagacatccacgatttgccagaagaaaaacagaaagaactgcgcgatgccctgcgcgaagctggctcaccgatggtgggaatgctgccaaggaaaaatgaaatagatcagtcctgtcttgatttcatccgccaaaacgaggaggagcaaccatga

SEQ ID NO: 334624 - DNA, 345 bp, Pseudomonas aeruginosa
atgaaaatacgtttcgcaattattagccatgaccttctcgcgcaagttcgagctgaggttgatgtcctcctgcatgcagtaaatgtcggaaatatggacggtgtggatgcgtccaccgcacgcctcttggagctgacagttaattgcagatcgattgagttgtccgagcaagagtggcgcgcatttctaagcgaactcagggccaagagcccggagttcgaatcgagctaccttttgcctgggactatttgcgcacccctgtttcccaaagtctcggtagctgaccactatgttctcgaacttccaatcgatggtgatatggaagaggaggaagctgatgtttga

SEQ ID NO: 334625 - DNA, 2670 bp, Pseudomonas aeruginosa
  misc_feature (2344)..(2353): n is a, c, g, or t
atgagtggaagcgcaaaggattttcagagcatcatttccaagctacacaaggcagttgcggactatcaagaaggttgtgcgcgcatcgaccgcgaattcgataccaccaaaaaagcattaagcgaagaccaggaacgcaatcgaaacataaggaggtcgaattggcaggcaggtttttccaaagagtgggaaagaaatgcaactgctatagcgaacgcaagctcgcagctcagacaacaacaacctgccttcgtggatttttgtgtagataagccattgatggcatcagaaattccagcaggtcttgtgcttggcacggagcaagtctcttttgagaagctatcttgtcaggcccctaaattcatctcattccccttatccagtgctcttgttttttcacaaggcgatgcagagcagaaacgcctcgtgcattgtctcttgttacggttgctgcaggctttgccagtaggtcaagtagagttgacactgattgaccccctgcagcaggggcaatcggtcgagccgttccggccattgctgaaggtagagcaattggtgccgcaaggtcatgttcttactcgttcggatgaaatcgaagctgcgctcggaaagctgacggacgaaattgaggagttgatccagcagcggttcaatgacaaggcatccaactggtcggaatacaacgcgatcaaccccggcaattcattacctcacaaggtggtggtgctttttgatgtgccagagcagatgtcggaaaaatctctctggtttcttggccgcatttttgaaaacggtccacgctgcggcgtgctgcccatcgttgcaattgatgagcagcgcatggaagaccggcgatatgaaaagctcaacgccacgctgaaaaactcaaccatgcaactgaatgatctgttgcaacgcgctggggctggcgagctgtcattcacataccagccggagcaatggccgcgacaggatgtgctggatggctttctcgcaaagctcgttgaagattgtgctgctaagacgcgcttcaagaaaacgatgcctgatctctggacgagcttcggcaagggtgagacgactcttgctggctttgatattcccatcggctggacgaccacaggcgacttcgctcccctgagactgggcgcgacggactccgagcatcatgtactgcttgcggggaagacaggctcgggaaaatccaatctgctccatgttttgattcacacgttatgcgagaaatacccgaccgaggagcttgatctttatctactggattacaaggaatcgactgagttcaatatttacgcaactcccccagtcccacaagcccgccttgtcgctacggaaagtgaccctgaatatggcgtcactgtattaaggcatcttgtggatgaactggaaacgcgtgcacgcatattcaagtcaaaaaatgtcaacgatttcagcgaataccgaaaatcaagcgggatacggttgccacgcgtcctgctagtcatagatgagttccaaattctgttctcagaaagtcgccaggtggcagaagctgctgagcagttgctgtcgaagctcttgaaacaggggcgctcgttcggtattcacatcctcctggctactcagactttgaaaggcatcaacgcacagtcaatcggaagcatcatcacccagttgggatgccgtattgcactggcttgtgggcaggaagactccgcaatgatcctcgggggcgggaattgggcagccgcagagctgcgcagcccacctgaaggcatcatcaacaatgctaatggtgccaaatccggcaatgtgaagttcatgattccattcgccggagaaagtgagcatcgacgtgatttgttgacgaagttgatagcgcgtacatctctttctggggtggctgaaaaaaccaaaatcttcagcggtgcattccttccgcagataccgtctccctttgaatatcagacagcttgtgcgcatgaagaagctcttcttttgggcgaaaacctcgcattcgattcaaaaccgttgacggtatcacttactcgtcgatccgcgttcaatgttctattcagcggctacaatgaccacattcacgatggactcctgtccgctacgctttttagtctgactttcgtcgatggctttgatgaaatcgtgtacttcaacgcgcgcgggatccccccaggaggaggattctcagccgcagcgcagatgctcggtgcacgcctcaagatattcgacgatatatccgagctaccacttcaagcgatatcagacgatattgggaatcgccgcgtagcattgattatcgatggcctggattccgagaaagtactacagnnnnnnnnnngatcgcccaagcctggcgaaccacctaccccggctgacttgttaaagcgtctcgccgaggacggcccaagaaaggggacgtttgtatttatttttgttgaccgttggcagcgctgtgccagtgcctgcaaagaccttttctcctttttcgaattgcgcgtggcgtactgcatgaatgaagacgatgccggatcgcttgtgagtggcggtgttggtaagttcaaaggtattgaaaaaccgagccgagctgtattcgtaaacaaaatgacgaatgacatcacatggttccggccatatgttcaggaaagcactcaatga

SEQ ID NO: 334626 - DNA, 1764 bp, Pseudomonas aeruginosa
atgaagagatttctgctcacgtggtatggaatcaccgattttcgcgcgtctctggggtttgagaataccgacggccctattgcgagcgcccttgcgggcgcgtcctactcggacatcattatcctgggttacacccggacggataatgatgccagcgaattgatcgaggcacagaagacgttcacgcttgaattggcgtcaatacgaagcatggggcaagagaaagactggaagcttactaatcagtttgtctccaggttcgccaatacctctgtcgcacatgaacattttgaagcctggctgaaaaagaaagccgccgccctgggctgcaacgcaaggatccgtttaaatagcgagaaactttaccagctcaacgacaccgaaggtatttacgctagcgcaatgcgggcgctggatggggttgaacaggagccaggtgaaaagctcgtcacgctctatctcagcccaggaactccggtgatggcctttgtctgggcgctcgcggcgctgagctaccctgagctcaaaaaaagactcatagcatcgtccatcattggcaaagcacctgaagtcatagcgttgcctgctgagtggcttgagcgacacagctcaaaacaggctgcgatccgaggcatctccaacgggttcgatgtgacattccatctttttggtgagcaacggatgcctgccttgttgagcatccggcaatttgagtcggcgcatcacatttttgtcaactcaaaagacttccctgctgcatgtatgcaaacctttattggctctcgggacctgcatgaacttaccgttgacccctgggatgatcgcgctgttcacgaacaaatcaccgagctggcaaagcaatttccagaaaaaacacgaattggaatcaatttaactggcggcacaaaattgatgtttgctggcgcgctctctgctgcacgtgaactgggcgctgttccgttttattttgacagcaagaatcgtcgcgtcatattcattgacagtgttcggcgcgaaaaaatcaggcagattgattcaatcgagacatttttgcacctgaatagcgatggtttggagattgcaggcagttccttcatgaaggatatatcgccaagtcgccaacttctgaccgagaccctttggctgcatcgtgacaaggtgcgtagattttatagagaactgaccgactataacaatgcattcaggccattcgagatttgtcgtgacggcttcaatttcaagctggatgacatggaggcagtatccgtccagggctacggattagatctgagatttgagaaatggcctgatttcgccaaatacctatctggcggctggttcgaggagtttgtttatttgcagtgcaaaccctacgaggatgctggagtcattcaagacttgcgcatcaatgtcaagctgaacttgaatttagaagagtcaaaaggctattcgagcttcggtgttgaatacaacgagctggacatcacattcaccgacggttattcgctttatatcgtggaatgcaaggcgggcaatgtaacgcaagagcagattatgaagctgcagaaccttgtgcgcttctacggaggaattgaaggtcgcggtatcgttgcctgctgtgttctcccaaatactgagtcggtcaagaaaaaaataaaagatgccaggctgatgctttggagtggtgcatcattttctgagcagataacggcaatgatgaacagcatcactgagcgggctgaagcgagtgaggcaacgccatga

SEQ ID NO: 334627 - DNA, 489 bp, Pseudomonas aeruginosa
atgatgctccatttggtttgcgacatctccggcagcatgagtgaaggaggcaagcccttcatcctgcgaaccttggccacgaccgtggcgcaatgggtgcggcatgggtatggacaggcggaaatccgcctttgtgcttggagcagcgaggcacgcagcatcccgaactggagcgtcacggacgatctcccggtggaaatgctggtttgccatggaagcaccaatggcgaggcgctggttcaactgttgggtagcgagccggatggaaaggttctgattctcacggatggattctggacaagagacggcgtgaagactctgagccgctggcaggaaggcctaccgccggatacgctgcgcgtcatccaaatcggcgcggatgccaacccgcatctttccaaggggctcaaaggcgcaaaggtgtttgccgcagaagaagtgctcgccgtactcgataactggctgcaggcggatgaggaatgggcatga

SEQ ID NO: 334628 - DNA, 717 bp, Pseudomonas aeruginosa
atgacgctttggaaaagttttggggcaagcgttcgcggcccgagccatatcgccgaaggtttgccaaatcaggatgcatgggcgaagtttcaccatgtttggggtgatggcatcgtcgtgtccgacggggttggctccaagcccttctccagcttcggcagccatgctgcctgtctcgccgtcgagttcgcagcccgggcttgttgcaccagtggtgaaatcgaacacaacgcgctgtttagcaacatccaagctaactggctgaggcttgtcgctccgctggaacctcgcgattgcgcggccacctgtcttttcgcactacgcctggatggcgtaatccacctagggatgcttggcgacggacttgccgctattgccaagtccgatggatcagtcgtttcgctgtcggaaaacaagacacaaggcttctccaatatcaccattgcgctgtcctccaaggtctccgccaaagactggcagtatttgtcgctgccgggggagcagtgcatcgcagtattgctctgcactgatggggtggctgacgatttggataacgctgacgggtttgtgagcagtttcgccgaaacgcatcgaaccctcgcgccggtaagtgccaaccggcgcatccacgagatgctcgaaaactggcccacgcccaagcacagcgacgataaaaccctcgcctgcctgtgcagtgaggaggttgcagatgagtaa

SEQ ID NO: 334629 - DNA, 1344 bp, Pseudomonas aeruginosa
atgagtaacgccgaacaccaggctctgaagccacttgtggatgaatacgacaatgttcatcagatggccgatgagcttgcgcgcggtggacaaggcgtggtctatcgcaccaaggatgcggatttggccgtcaagcagccgctggacgcagccggccagccggacaaaaacgccaatctgcgcgagcgcttccagcacgtccgcctgttgcccataccacggcgcatccccgtttccctgccactcgccatcctgcgcgacgagccgggctatgtgatgcgtctgttgagcggcatgaagcccttcgccagtttcgatttggacggcagaagcaaaaagaagctggaagatcaaagccaagccttgccccaatggctgacgaagattcctgacaaggacctggcgctgcgactgctgcattacgcacaaactggctccacccgccgccgttcgctcgcgcttgccaagtgcgctgccatcctcgcccgcctgcacagcgcgggactggtctatggcgacatttccaccaacaacgctttcattggcgaagacgacaccaccgatgtctggctcatagatgccgacaatatgcgcctggagttacccagcggcggcgtgtccgtctatacgccgggctacggtgcaccggaggtagtgctgggccgtgaccaatcccgcccgcgaaccgactgctgggctttcgctgtgatgacattcaagctactggcgctttgccaccctttcattggcaagaaagtactggagcccgaagatgaagaagacggctgggatgccgaccctgcgcccaatggcactgccaccgatctgaacgaacaggcattcgctggtttcttgcctttcgtggatgacgaagatgacgattccaacgaaggagttggaggcctgccccgtgtattagtcgcaacagaaggattacgccgcctgtttcaggaaactttcggtgcaggacgtgaactgccgcaccgccgcccgacaatggcgttctggatattggagcttgcgagggcggcggatcagtcgctggattgcctcgaatgtggcatgagccatttcgccgatgaatacgcgcaatgcccgtattgtggcgcggcgcgcccggctttcattcgcgtcaaaacgccacgttgggaaatcctgattcctggtggtgccacggagttcagattgccgcagcggctttttcacccgttttcattcgagtatttcgataacacagcatacgaagccatgctgaacttcgcggccaaaaccgcagtccccgtgcggggcacgctgcctttcccggacaacctcacctttgagttcgtggaggcctgcaaatga

SEQ ID NO: 334630 - DNA, 3357 bp, Pseudomonas aeruginosa
atgaagtttcaggacattcctgtcaacatcataactgtccgcatcaagcggtctgacaatgtcgaagccctgcaagagcagccagtattctcggtagaggccagcctatcccgcgcagatgaatttgaaatccgcctgagagacgcggttgttttcgttcgccccgtcgcggctgttgacatccgccgcctcaacgctgaacttgccagtgggcgttccctgcttgcacaacttgaaaaccctgccgccgatggcagcatcgagctgaagatcggttttttcactggcgtctgcctggaaatgggcgatgttgaaatcggtgtggatgagtatgtgcaagaaaagatgcggacgaagggcgaggcactttacaagaggctgggcgaactttgctgcttccaactgggaaacgacgcatttttcttcctgactgctggcccggcgattgatgaagaactgaaacctgtcggcgaggacacgccacgcgatgcagctgcggagccgacccgaataaacgctttctgtgttactggcgaaggtatccgcttcattgccaccgaaaaagcaatgccaggcggccaaaccatctacatcgccacacgcataaccaggaccaaaaaagaacccgaccgcgccctgcgcctcgccaaaggccggctgcgttttgccgattggacacaagcagggcaagtgcaaactcttgccaaagcgcaaatgcgcgctcttacccaagacgacaacagctacctgaaaaagtgggatgaatttggtgacatggagggcgaattgctgctcaagcaagcgcgcgaagtgggggctttacaattcacagagatggctcaggagcgggatggaaccgtcacggttcgcatttcacaggcacttgactctgcattgaaagcgctggggaacggtgccgtacctgaagtcgagttggtggatgaactgccggactatttgaaagatgaacgcttgagcttcaaggattttgcaagtggaattgagcaagcggagaagatcaagcagggcgacggaaatcgcgagcaacgtgaaggaaagacctaccttgatgtcgtcgggtttgaccaggaaacccgtgtacttacgctcaaaatcgaggctctgcccaaggaatccggcacgctcatcctgtcgctggccggtgaaaccacccagatcaaacggcgtatggcggcccgtcaagccattctggaaggccgttccgccaatccacagcttgggctattgattgaggaacaggggcaaatcacacaagtccgcccgccgcaaaaagtccagtcactcaccgcattcgttcgcaacaaggtctttcgcaatccgccaaccgtcatgcaggaaagggctattgaggttgcgctgaatacgccagatctcgcgcttattcaggggccgccgggaacgggaaaaaccaccgtcatcgccgccattctggagcggctgaacgagatggccgacaagcgcggcgcgaacatcaaaggccaagtgctgctgaccggctttcagcacgatgcggtggaaaacatgatcgagcggctctcgctcaacagcctgcccgtgccgaaattcggcaaacggtctggcgcgacggaagacgatctcagcaccttcgagcgcaatcttgaagcctggtgcagctcgcttgccaccgaactgcgcgagcgcaatccccagattgcggaagccgagcaggagcgggaaataaaaaacctgtgcctgcaatatgtccaagccccgtcacgcgcgctcgccgccaaccttgctgggaaaatcacagcgctcggcagtgtaattcttggcgaagacggcgctcggcggtcggcgaatttggcgaaaaagctcgcgcacgaggaaaacctcaacgatggctccacccaatggcttgatgcagcgcgccgtctgcgtgttcgccatgaaagcttttctgacgacgggccagaaagggcgatggacgcactggatgacctgcgtgatgtgcttgaagaagacgaacgcaaactgctggacaaagccagtctgtggcgcaatgaagatggcccagcgccatttttggacaacctggtcgcgttgaaaaagaggctcttcgcccggttcaccgctccaccgatttttcgcgtggaaaagcagaacgacgcagtgcttgcattggcagaattcgccatacaacgcatcaaaaacgccgagtattcggctaaggataaaaaatctgctgcgctggccgagtttctggccgaactggaaggcaacccctatggcatggtagatgccctgtccgaatacagttttgcctttgccgccaccagccaacagagcgtcaatcgtgatatgcaaaagcgcaaagggcttgtcgggcgcgacgtcaatgaaaaccagaaaggcatggaatacgaatatgtcatcgtggatgaagccgctcgcgtttcaccccgcgacctgatggttccgatggcgcaaggcaagcgcatcattctggtgggcgaccatcggcagttgccgcatatcattgatgaggaggtagcacgccaaatggaggctggcgaggcagcatcggccgacgaaccggcacagaatgaaactgactggctcaagaaatccatgttccagtatctgttcgccacccgcttgaaaacgctggaagacggcgacggtatctcccgccgtgtcacgctcgacaagcagtatcggatgcacccactgctcggcagctttatcagccgcaatttttatgaacgcttcgatccgacggaacaattcggctctggacggcctgaaagcgatttcgcccacaacctgcccggcataaacggtaaacctgctgtgtggctggacgtgccagcggcgaaaggcagacaccagcgcagcggaaccagttggacgcgcccggcagaggccaccgttattgcccgccaattgcaggcgtggatgagttcagatgcaggcaaagacctctcgttcggcgtgatttcgttctacaaggcgcaggccgaactcatcaagagacaactcggcagcatcgcggacgacgagagaaaactccgcgtcggcacggtggactcattccagggcatggagttcgatgtcgtcttcctctcaatggtgcgaaccttgccgcataactggaaatccaagagcgatgaccgtgaaaagcaggccacagggttgttcggacacctttgcctttacaaccgcctgaatgtctcgatgagtcgtcagaagaagctactggtggtcgttggcgatacgggtttgctgcaaagtgaactcgcggcggactttgtgccgggactggtggatttccttcgactatgccgcgagcaaggagtggtgctgccatgctga

SEQ ID NO: 334631 - DNA, 1941 bp, Pseudomonas aeruginosa
atgctgaagctccttgattacggtaaacctgcccccttcggagggatcatcggcaggcctcgccacctcgcgtggccggtgaacgtataccgcgtgaccttgcccagagttcttgacgatggcgatggcttgaacgcatttgaacgcgtcatcctgaaactgcttgaaactgtcggcttgatgaacgccgatgcgctggcggatgaaacccgcattccagtcgatttggtcaagagcgttctgctccgtttgcaagacaaggacttgattgacgaccaccatgccatcattgagcgggagcgcgaagaagaatgtgccccggcattcgttaccgcgcttttgttccgcgaactcgccactggaaaaattctgcccttcctgcattggctggacgacagaaaccccatgcggaaaaaggaaaacgaggacaaagacttccggataatccgctgggatggtgtccaaagaaaagcgatacccgcgccgcgtgatgtaatcagaactttgcgcgcaatgaaaaagcgctcgtctgcgttcggcaaggacaccaagatgcccgtagtccagcagatcacgatagtcgccgagcccgacctgcttcaccttgactgccctatcgccatccagaaaagcgatggcgaattccgcatcgccgacccattcggcaacggtttttccttgattctcgaaaaatcgttcgaacagttgcttgagcaggaggaaagcctgaccacgtggctgcatggttggaagcagtcattgagcactcctcgtccagaaaagcaggatgccacggtcaaagagccgttcgacaacgatgccaaccggcaacgctacccgaagctcgtcgccaatttgcgccccttgcggaatagcccgttccgctccatcgcccaaatccatgccgcaatcgaatgggcgctgttctatacctgctgccgcagaccggttgattccgttattgcaaggctgaaattcactacgcaagaccaacacgcagccctgcttgagcaggccgcgaaagccctcggtcttgagcagccgccgattggcttcaggccgattcgggaaggtaagctgcgggaatttgaggacggcggcgcgttccaagagacggttcttgccatagctttgcttcaagcgcaagacgacgctttgcatcccttgcgccgtgttgcggccgcgtattcagacctcatcactcgcctgttcgctatcaacgccaaacgcaacgagaagggccacggcaagggcggcgcagacgcaccgcagcaggcactaactgacgattcgttcatgcgcgaagtcgttcatgcgcttgtgccaggcatcgtgtttaccgacacgcctcctaccgcgccagacaaagacgagcagggtgatgcactgctggatgcccgcactagcattcaggaggagttcggccaccagttgttcaaccgcctgggcgcaaacttgcaagaccggctggttcacgcggaacgttttttccagtcttgccatgacggggatgacgctttggcctatgtccgcgacctttatgccgcaatccagtcatcatttgagagagctttgacaggcaggctgccgtccgataccagtgacgcgcagctcaaagacacggctgaacgcaaggctgttgaggctggtttctgcgaaggcttgtcggagagcctgcgaaccgtcaaaacatcggctgtgcgccaggcattgcaaggcggcagccaaacgctcggggcttgcgttcttgcatggctgctggtgagcgatgctgatgaacttgccgcaattcatgacacgcagccgtccttgatcggcgatatggcaaaccttatcgctcggcgtgggcatggcaacgagccgctgccattgcccaaagagaacatcgcacagcttcgcaaagctgctttcacaactatcagaacacttatggaatcttga

SEQ ID NO: 334632 - DNA, 2637 bp, Pseudomonas aeruginosa
atgaacagccccgtccaacccgacaccgaagcccagcggcttgccgatttgaacgcgcgtgagagctggataaacaccaaggaaagcgaaatcgccagccgtgaaaccgccgtggctacacgtgaaagggatgcgactgcagagcgtcaagtcatcgagcaagacaaggccaagctggcgcagcgcgagcaggccgtcacgcaggctgagcaaaagtgtgatgcaggttttgccgatgaacgagccgcgctgaatgatgagctgcgtgaaaagcgcgcccagggcgaaagagcaattgccgagatgcgagagaaaaacctttcagcgttggaggttgaaatttccgagctgaaagcaaagcgactgggtgcggttgcccatgccgaaaacgccgaacgggagcgcattcggacagaaatcgcccaagagcgcgatgcatggacaaaacaacagggtgacgctcgaaagcagttgaatgcagagcgcacggaatttgagaaacaaaaaggcgcactctccgccttgcaaagcgaagtcgaaggaagacaggcagagcttgagacttcagagcggacactcgaacgcaaagaacaacggctggaacagcagaaccagaggcgcagcgagcaactggacgatgaggttgagaggcgtgttgaggatcgccgaaaatcgctagaggctgctctgcaatctgccaaagaggaaaacattcgactgcgcgaggcgtttaaaactcaagacgaacttctcggcgcgttcgaacagttaaagttgcaacttggtggcaaagaccctgctgaaattctgcgtgcgctgaacagccaggctgacgaactcaaacgcctacgagaggagcttgctacccgacctactgaggaaatgcgcgagcggtatcaagcccttgaatcagaagccaaaaatcagaaaacacgggcagaccagttagaacggcaactttccaccaatgaggctgcggtcgctgaaattggcgagctgcgccgtcaaggctcggagctcaacgccgaaaacaaatctctggcgcaaagggcatccatcttcgagggagcagccaacgaagcgcaagccgaactcaagcgtttgcgtgcagcttatgagcgccctgctgaagttaccgctcgctacaaagaaattgagatgccgcacatcagtgtggataaggtcaagcagccggtgcagcacgagatcgatgagctaacttggctcactgggattggtaatgcttgcgatacatacggactacatttcaatccacgtattttgaaagcttttcatacagctctcaaaacagcggaatggtcgccgctcactgtcctggcaggggtttccggaaccggaaaatccgaactgccgcgcctctactcgcactttggcggaatttatttcgagccgctgtctgtccagcctaattgggattcgcaggaatccatgctgggctttttcaattccatagacaataaattcgatgcacagccggtgctgcgttttctcgcgcaaagtcagatatcaggccgcgaacaatatgaacagcgcattagacgttggcagagtatgtcgccagatcagcaaatagcacttgaccctgagaaggacaaagagctgattgaagcgttgaaacaagcagattatccaggattgcaggacgcagtgtgtcttgttctgcttgatgagatgaatctggcacaccctgagctttattttgcagagtttttgagcaagctagaactgcggcgtggcagaaagggtgatgatgttccgttcataccggtgaaaattggcgccggcatggaaccctataagcttcccctcggtcgtaatgtactctggacagggacgatgaaccaggacgaaaccaccaagtccctttcggacaaggtgcttgaccgttccatcatcatcaactttccgcgcccgacggaactcaaacgccgcctgaagcttgctccacttgatgacaaaaatcgaggcccggcgctacacaaaacgtcgtggcagagttggctagcacagggcagcaacttctccgacgatcaagtcagcccgttcaaaaaattcattgaagcaatcaatgcttctttagcggttacaggccgtgccctcggtcaccgcgtttggcaatccattgaatactacatggccaattacccggatgtccgtgctgcacgcgataaagatgcgcttgccagagctatgcatgtcgccttcgaggatcaactcgtgcagaaggtcatgcccaaattgcggggtattgatacacgcggcaagagcaagacagagtgcctggacaggattcgtggacaactcgttacaggaatcggcagtaactcattcaatctgacagaggatttcgaccttgcctgtgatcttggctatggtcagtttatttggcagtcggcaaattacctaaacgtcggtgacacggaaaccaatgatagatccacggccggtcgagactcggacaatgctgaattgccacactccctttttatgaaagatgaaccagattcagacaagcgtcataaaatgtggaacttaaagacaccagagcaacgagatgagctgcgcgtgaaacttgaagaaaatgccagagcaggaaggattcacgccaagcaatga

SEQ ID NO: 334633 - DNA, 3336 bp, Pseudomonas aeruginosa
atgagtattactctagaaaaaatctataccgacttccgtgccaaagaaaaacttgccaaaaaactgcttgagcaaatgaattggtttggttcaatcacggatttcgatcctaagaccggcgcggctctgccgaaatccttgtcagggttcctcgccaaagtcgcacagccagaagcgagtgagataacccgtgaccgcctttggcgcataacggaacactgccgcgcttctgtcgagcgattatttcattctctcaacgaaagtcctcgccgcgaacacgctctactgcctgttcatgctgtgcgtgaactggatgccaacagttttattaagctgagtaatcgtccgggtcgtaccattcgggaaaaactggcaggtaacccctacatacaggctgtgcgtcgttttcaatccgtcgacctgccggaaaatcgcttgctgaaagcctttgccattcgccttgcggaaatgcttgatttacgcggtgattgtctcggtcaagaggatgagcttctatcaaaaatctacttatggttgcgttctgatgaggcgcaagccatcggcaattgggaaaatctgccacctaacaacacgctactagcacaccgagattaccgtcacgtgtgggatgcatggcgctggctgcaaaccctcgatgaggacatcaccagcgacctttctcaactggatgtccgcgagaaaaccatgcgcctttggcagcaatgcgcgcaaatgtggcttgatggaaagcatctttttgctgagataccgttactattcgattatgaaaagtttgagattcttccgtggacttccaagccacctttgttcaaggaagtgaagtacaagatgccccggcatttgcgacaaagcgcgagtgccgaaccaatttgtgttgatatcacagccctgcatccccgctatgccagtggtgacggaaaaggagcgcagtcgctggcggccccctttctttggcagaggtggcagcgcgaaaatgaaaccgttgacatcgaactctttggttccgatgccgtttggctgaatcccgatgcgaccaccatttctgcgccagatctgtttttcgccaaagacaacgccactgagctttttgaccccgccgcccgcgcgttcactactcggctacgcgaagagttcaagaacgatacactcatctggcttgcgcctgactttctcaacgatttcgagcttgaagtcatccgtcgcaacctcaacgcgcgtttcccgaatgccgagccgttgccgcgaagtgtggcggccgtgttcgctcaagctgacccggccaaaatcacgggcgagggttacgccatcatcgtcgttgattccattggcggcaagacgaccgccaccaagctcatcgccaagcgcgacaaagacctggcgaaacgtcttcccatcaccaaaggcttttattgggagcgttgcccgccggttgttatccctggcgaggaagcagaaaggctaggtggcagcggctacgacatcatcacgctggatgccaacgggcggtggcacgatgcgatccgcccggcaaagcccccattcattgaggcagcacacctgaagcgtattccaaacatcgggaatttcgcgttctgcatcaatttgatggaaagccccgttatgggcggaatccatctacatgctttacaacaacaggtggctgatattccactttggcgcgaccagattcctgagctttcagtcaaagtgatgaaggatggacatcagcaacgattccacctggttttgcgcggaacgacagtcaaacccattcggggtaaacccgtcaccatcccggttgatgaattcttcacactgcccgctggcaggccgcattactcgtttccgctctatgtcggcgacaagggtgacgacttcggtttctctgctcgtctcgattcacccgccttcccattggaaaacaaggttgactgcgagttgaacctgacctttgaatacggcgcggatgatccctataaactcgtcttcacaccgcgcgacaaatctttcccacccatccgcgctacctggcgacgcacggaagaaatcaccgatgcccctgcgccggaatatccgcagccaatgacttgggcggagttgcagcggtttccgaagcaagacagtaataaaacctctgatctgttggactgggtggaaagggcaattgaacagcttgaccgtgatttttacatccgccccaaacagaggacgactggcacggtaaacagaaagtggctgaccgacaaaataggcgggcagtttacctttgctacatgtaaatccaccgatgagtctgtattcattcatcagaacagttttgttcatgaactgagctacgccgacttcactgagggggcagaaatttcattcgagctacaggagcgcgatgggaaattctctggctggaaagtggcagggccgagatacaaagatgaagtgcgtctgaaaaactttgacgaagaatcagcaaaaaatctggttgccagtatacgcaagagactttactttcctgtcattcaggtttggcgcgatgggcgctcgactggagaccgtgaatgtccgaaagggtttgccgacgcaatgaaggccagaggagaacacctcgttgccctgctgaacgagagtggcattcctgagcaagtaaagaatgaaattcgatttctaatggcctgtatgcacaaggatgcgcctgaaaattgcgttcagtggataaccgggcaggttgagggtcagaaaattcgtgacctgcgagccgtcggcttcgcgcttggtgatgtttcgcagcaatggcagaaagatttgctatcccagctcgttgcgaatccgtcaaatgacgcgctcagtattttggcctatgccatctggcgagagcagcagtttgttgagaaattcagcctcgccaacttgcagtccattctgaatgctctgaacatcatgctcaacatcaagcaatatccgccccggaaagacgagtggactgctcgcaactggattcgcgccacgacagaaccgcttgaacttctgctcggcctgcttcgcacccgtgcatcatccacccccgaaatcaagattctccttcagccgcatcaaaaaatcaccaaggaattggccaagaaaatcgagcgagtgacagaaattgtcacactgtccaacatcaagctcttctcccgtgtgaaaatcaacatccagaaaccctcaggcgaccgcacccccgatctgctctacgcgctgcgcctgtacctcactggtgacgatggtgcgaacgctattcacatatctagtgtttctgatggaaatactgatgagaccatttaa

SEQ ID NO: 334634 - DNA, 375 bp, Pseudomonas aeruginosa
atgaacacgacgacccgcatcagcaccgcagaacgcctcggccgtagctttggccgtggatggcgcgcctatgcgcgtggcgaacggcgggcgtcgagctggttggtgtacaggggcgtgccggtagttggtgccaccgtgctgttgtgggtggtcaagctggccgtgctcggtgtactgctctattccgcgttctggctggcactgctgttggtttgtgtcgtggctgtgggatgggcagcaaatcagagccattcagacgaagagttccatttgcagtttcctaccaccttggaagaacttcgagagacaccgggttatgacccgaatctctacaacgacacatctcatgagatgtacaaggatgatgactga

SEQ ID NO: 334635 - DNA, 372 bp, Pseudomonas aeruginosa
atgaacccgtcgcgtgccagctggctgcgcccgcgctggctgttcaaccggcgcgcgatgaaggcgctgctgtggacggtgttgctcgttgccgccgctgtgggcgccaacatcgtcggcatttatctcgtcggcagcgttgccaactgggagcggtggctggcggccacggcaggctactttctagtgtggcggatgtgcctgtacggcgcgacagcctacggctgggtctggatgcgccgccggctgctggcgcgtgaggcccaacgcggggctgataggcaggcgcgacggcgcctgctgcgcagcgagatcgccggcgtcgccgccattgtggcgctggaagccagcctgttgatgcaggccgcttga

SEQ ID NO: 334636 - DNA, 939 bp, Pseudomonas aeruginosa
atgaagcccatgaagcatcctgtactcgcgctgctggggctgctggccgtggccgccgcagtggtcgtgtcccccgctgtccaggcggtggagatcctgcgttgggagcgcatgccgctggcggtgccgttgaaggtcggccaggagcgcatcgtgttcatcgaccgaaacgtccgcgtgggcgttcccgcaggcgtcggtgagcgcttgcgcgtgcagagcgcgggcggcgcggtgtacctgcgcgccagcgagccgatcgagcccactcggctgcaattgcaggacgccgacaccggcgcgctgatcctgctcgacattgcggcggagccgcccaaggacggcgaagccgagctggaaccggtgcgaatcgtcgagggcaacaactcaacagcgcgctatggcgatcagcctgacggtgccgatgcgccccatgcacgagctcaggagcaggcgggcacccggacggcgcggcgcgaaacgccaatccccgtcgtgctgacacgttttgctgcgcagaacctctacgcaccgctgcgcaccgtggaagccttgccaggcgtcatgcgggtcaacctgcgccgcgacctcgacctcggcacgctgatgccgaccttgccggcacgcgcggtcgcgctcgcctcgtggcgcctggaagaccagtgggtcactgccgtgcgcctgaccaacagtagcagcgactggatcagcctcgacccgcgcgtgctgcaaggggatttcctcaccgccaccttccagcacgaggcgcttggcccgcgcggaacccccgaggacaccaccgtcctgtacctggtgacgcgcgggcacggcctcgcgcaatcgctgctgccggcgatccatcgcttcgaccccgctgtgcatctcccgcagcccaaagcagcagccagcgacgacagggaggcccgccatgcgcagtaa

SEQ ID NO: 334637 - DNA, 693 bp, Pseudomonas aeruginosa
atgagccgtttcaagaacgagatcacccacctgcaggcgcacatcaagacgctgcgcctcggcgcgggtgcgctggtcatcgtcgccctggtcatgggcggcggctggtggagcgcaccgcgcgatctgaccatccacgtcccgcctgacctacgctccggcagtacccgcaagtggtgggaagtgccgcccgagtcggtctatgcgttcacgttctacgtgttccagaccctcaaccgctggccgacgaatggcgaagaagattacccgcgcaacctccatacgctctcgccgtacctcaccccgtcctgccaggcattcctcaaggcggactacgactaccgccgcagcaccggcgaactgcgccagcgggtgcgcggcatctacgaaatccccggtcgcagctatggcgacaaccccacggcgcgcgtgcgtgtgatctccgaccgcgactgggtggtgacgttggacatcagcgccgacgagtactacggcgccgagcaggtcaaacgcgccctggtgcgctaccccgtaaaggtcgcgcgggtggacgtcgatcccgcacgcaacccgttcggcctggtgatcgactgctacgagggcacgccccagcgcatcagcgcaccggagccgacgcgcccggtgcctggtggcctgacgccgcaagcgcctcaaggaggtaattccccatga

SEQ ID NO: 334638 - DNA, 411 bp, Pseudomonas aeruginosa
atgtccgagcaacagcatgtccgtgccgatgggacagtcacgttccttccacaccggctcaacaggcacccggtggtcgtgcgcggcctcactgccgatgagttgtggatttgctgcggcctgtccggcgctgccggcctggtggttggcgcgccgctgtcctgggtgttacgcaccattgccatcgcgccgaccttcgttgtcctgggcgtggcgctgggcgttttcatcggcggcggcatcctgcgccgtctcaagcgtgggcgtcccgacacctggctgtaccggcagttgcagtggcgcattgccacgcgccatccgctgatggccggttgggtgggcggccatgtgctgatctcgcgctccggcttctggaccatccgcaggggcatgcacgggggcgcgcgatga

SEQ ID NO: 334639 - DNA, 360 bp, Pseudomonas aeruginosa
atgccaaaccgcatcctcactactcgttttgtccaacgcgccgccgtcgccctgggtgccgccgcgctgcccgcgctgtcgtttgcgcaaggtctgccgcagctggaaaacccgacccgcggcgccggcagcggcatcatggaaacaatcaggaactacggctacgacatcatcatgctcgtggccctcctggtggtggcgtcgatgttcattggcgtgtgctaccacgcctacggcacctacgcggaaatccacaccggtcgcaagacttgggggcagttcggtctcacggtcgccatcggcgccgtcctgctcgtgatcggcatctggctgctcaccgaagccaccggcatcctgtaa

SEQ ID NO: 334640 - DNA, 234 bp, Pseudomonas aeruginosa
atgaacggcgcccaggtctcggcatttcaagccaacagcggtatcgcgccgtccgcgatggcgaccgttctggtcggcatcgtgtttgcggttctgctcgtctggggcgtctgggccatccgaacggcctacgtggggtgggccgagaaccgcctcaaccaacgccagttcctcggcgtctgcatccgcttcgtcgcgatgtacctcgtcatgacgttcttcctcctctcctga

SEQ ID NO: 334641 - DNA, 384 bp, Pseudomonas aeruginosa
atgttggctccgatctggctgcgcgccgcgcatcgcggcgtgcccacttttctcgtgacggccctgctgatgggtcagttcccggttgccttggccgaatccccggcacagcgccaggagctggttgccgcgctacgccagctcgacgcgctggagcgcaccatcgcggatggcgctgcacacgcacccatccagccgggcgagcgctaccacttcgattacccacgactgctggctgatctggcgcgtgtgcgcgccggcatccaggcccatctcacaccgtcgcgcgcccagccacgcgacctctccgaactggctggtgagtaccgcaccgagcggaccgccccgccatcgctgccgacgactgcgcagggcagaccatga

SEQ ID NO: 334642 - DNA, 642 bp, Pseudomonas aeruginosa
atgaataccgcgcaggctccccggcgcccgatctccgccgtggtgttgcagagcctaatgtggctctggctgatcagcctcagcgttttcgctgccctgagctaccagaccatgaacgaccaggccgaccagacgctgcttgattcccgcctgcaacgtctcgaagcgcaggcggtgggcctggccgagaccattgaggccatccagcagcgtccagtcgtcgcaacagcggcagacctcaaagatacccgcgaacgcctggaagcacgcgccgcccaggtcgagacaacgctgagcggctatgccgctgccgaagaccttcaggcgcttcgtgcggaagtcgagcagatcaaggcacgcccaagcgccctgcgtgccgcagcgcccgcccagccgcgctcaccgagcaggcccaccgccaaaccagaaccgccgccactgccgttccgcatcgtcggcgccgaacttcgcgccggccagcgcagcctgtccgtcacaccgaataacgggaacttcacgcccgaccagcttcaagtgctgcttcccggcgatgccgtcggcccgtggcgcctgcaggcagtcgagggcaacactgcggtgttccaggccggcgaccagacccgtcgcatggcgattccttga

SEQ ID NO: 334643 - DNA, 1533 bp, Pseudomonas aeruginosa
gtggcacgggtccttgagaaagccaaggaactcatcaccgcggatgatctgagacttctagatgtcaacacctatcacggcttcgcatggagcgttctgcgaagtcatggctatctgctcagcaacggaaagccgctccagctcctaccacctcccgagggctccgcgcgcttggctcactttgccaaggagcagcatcaccaggagaagttgcgccttttccatgaagaggggctgctccacttcgacctcttcgcccagttgacggctgaactgctgcgccgcagccggcggctggcaggtatctacacagcgacctacccgatactcgtcgtggacgagttccaggacacgaacgccgacgaatgggcgatggtccgcgagcttggacgcggctgcaggatcattgccttggccgaccccgaccagcgtatttacgaattccgcggcgccgatcctcagcggctcaaggaattcgtggaccagttcgaccccttgccagtcgagtttgaaggggagaatcatcgcagtgccggaaccgacatcgcaacgtacggttcagacttgctcaccgggaaaaacaagggcgccgtctatgccaatgtgtcggtggtcgagtacggcgtgtactacggaaggggtccgcatttccatgcgaaggcccagctcatccaggcaatcaagcgacttcgcaaggagccggcctggtccatcgcagtgctcgtcccatccaaggccttcatgcttcaagtgtccgactacctctccgcggagtccgatggcatgcccaaccttcgccacgaggtggcgatggacgcggaatccccggcgcttgcggcaaacgtcatcgccacgctaatggaaggaggcccttcggagcttctggctgcgcggctactctccgccttacatacccacatccggggccgcagtggcaccaaacgccctgcgcaggcggaactcgacatggccgacgccatcgaccaatacttggtctccggaaagatccgcggcaagaatcgccaagcgttgatcagcgagtgcgcgcgcctagcagcgcttcgccaggacgtcgtattcaccggccatcctgaagaagactggttgactgcgcgggggcttctcgcgacgtctgccgttggccaactgtcgcgcgttgccgctgatgccaagtatctccgcctgcttcacaagggctcaaacctgcgggcgtctttgtcagagctttggagatcccaaggacagtatgtcggcgctatcgaagctgtccggggcgctttgctgcaggagcacttcacagcagccgccaaggaatggcgtggagttcatctcatgaccattcacaaagcaaagggtaaggagtttgacgaggtactgatttacgaggggcgatatgctggacgaattgtgcctgcgaatgcagatacttctcgtcaaagccaagcccttttggcactgcgggtcgcagtcacaagagctatgaagagagcaacaatcctgacgccatcgggagaccgcagcatttttttgtaa

SEQ ID NO: 334644 - DNA, 1803 bp, Pseudomonas aeruginosa
atgcagattgcaaaagtcaaggtcgaaaagtttcgtgggattgaatccggcatcgtgacgctgtcaggccacagcgtatttctcggtgacaacaacgtcgggaagtcaacgctgctggaggccatagatctcgtcctcggcccggaacggctctcccgaagacccgtcatcgacgagcacgacttccacgccgggcgctacctggatgaagagggagatccggttctcattcggattgaagttatcgtcagtgacctgtccgccgagcagcagcgacactttcgtgaccacatcgagtggtggtccgccacggaaaagacgctactcgtaggcccgcccccggaaggcacggatgcgtcagacgtgtcggccgcgctgcgggtgtttttcgagggtcgctacgacaaggaagaagacgacttcacgggcaatactttcttcgcgaccccagtgctagctgaaggtactcacccaactttcaaaacgaccgacaagcgcaagtgcggcttcctgtacctccggacgctgaggacaggggcgcgggcattgagcctggagcgcgggtcgttgcttgatgtcatcctcaggcttcaagacaagcgcgtgacgatgtgggaagacctgctgaacgagttgcgcaaactccccgtggccgataagccggaactcggcatcgccccgctcttgaaggacgtccaggacgctgttcgccgattcgttccttctgactgggcagaggaacctcacatgcgcgtgtcggatctcactagagaggccctgcgcaaggatttgaccgttttcatgggcaccggcgcgaagcgtccggacggcagcacctattgcgcgccatatcaccatcagggcaccggcacgatcaatacactggtgctggcgctgctatccatcatcgcgggcctgaagcagaacgtcatcttcgcgatggaggagcccgagatcgcccttccgccacatacccagaagcgcatcgttaacagcgtgcgcgagacgtcggcacaggcgcttttcacgtcgcactcgccctatgtgctcgaagaattcgcgccgtccgagatgcatgtgctgcggcgtgacgggggcaagctttctgcgatgctggcgacatacccaccagcggtcaagcccaaggcatacaaggcagagttcagggcccgcttctgtgaagcgctgcttgcccgatatgtacttgttgtcgaaggtcgaacggagttcgatgcgatacctgcagcggcgcgccggcttaacgacttgaaccccacagaatacaagacgcttgaggccctgggggtggccgtcatcgatgcgcaaaccgatgcgcaggttgcgcctctcggcaagttctttagagacttgggcaagacggtctttgctgtgttcgacaagcaggaaccagccgcttccgctgccatcaaggccgccgtgcaccactcatttgaatctgccgagaaaggtttcgagaacgtagtgctgcaccacaccgcggaggcagcccttcgtcgatatgcgctcagcctcgtcgcggagaacgcgtggccgaaccatctgatcgccaaaactcctaacgccgcccagaccgtggagcaaattcgcgacgcattgcggcaattctttggctgggccaagggaagcggcgatgccggcgacttgctcgggtgctgcaccgaggcggagatgccgcagtatgtccgggacacgctgcgggtgatccacatcaccgtcgaacctccgccgctgccacccgtgccgtcagcggcggcagcaccgttcgatgacgaagagttatga

SEQ ID NO: 334645 - DNA, 2280 bp, Pseudomonas aeruginosa
atgtccgttgatctcgacaccaccgctaacgatgcagagcccgtacagggcgaactgctcgaagtggaatccaaccctctcaccctgagccttcaggattttgtcggcgagttcggcgacgaactgctcgactctctcaaccgcgccaacccgccggtctataccggccaagcgcaagcacagcggcaactcgtcgtcgccagcctcaagcgcaagttgttccaggcccaggccgaagttgtccatgccgccgccgagctgttggtcgatcaaggcgagcgcgctgcgatcgtcaatggcgaaatgggttgcggcaagacgaccgtcggcatcgccacggccgccgtgctcaacgccgaaggctaccgccgcaccctggtgctttcgcctccccacttggtctacaagtggcggcgcgagatccaggagacggtggctggtgccaaggtctgggtgctcaatggcccggacacgctagtcaagctcatcaagctgcgcgagcagttgggtgtgcagcccacgggccaggagtttttcatcctgggccgcgtcaggatgcggatggggttccattggaagccggtcttcacccagcggcgcacccgccacggcgacgtggcggcctgcccggactgcggcacgctcatcaccgacctcgacggcgagccggtcaacccgatcgggctcgaagccgaggagtcccgcaggaagtgcagccactgcgccgcgcccctgtggacgctgatccgcccgcgcagcctgtccggcagcgaccagtcctcggtcgtcctcaaagccttgaagcgcatcccgaccatcggggaagtcaccgcgcagaagttgatgcagaagttcggtgacggcttcctggcctcgatgctgggtgacaacatccatgagttcatcaacctcatggatggcaacggcgagctggtgttttccgaccgtcaggccacgcgcatggaacgtgcgatggccaacatggagtttggctttggcgagggcggctaccaaccgtccgaattcatcaaacgctacctgccgcaaggcacgttcgacctgctcatcgccgacgaggcgcacgagtacaagaacggtggcagtgcccagggccaggccatgggcgtgctggcggcgaaggctcgcaagaccttgctgctgaccggcacgctaatgggcggctacggcgatgatctgttctacctgctgttccgggcactgccaggacggatgatcgaagacggctaccgcccgaccacgagcggcagcatgacctcggctgcgatggcgttcatgcgcgatcacggcgtcctcaaggacatctactccgagagcgccggcacggcgcacaagacggccaagggcaccaaggtatcggtgcgcaccgtcaaggctcccggcttcggcccgaaaggcgtcttgcgctgcatcctgccgttcacgatctttctcaagctcaaggacatcggtggcaacgtcctgccgccgtatgacgaggagtttcgtgaagtccagatggacgtggcgcaagctgcggcctaccgcgatttggcgggtcggctgaccgcagagctgaaacaggctctggcgcgacgcgatacgaccttgctgggggtggtgctcaacgtgctgctggcctggccggattgctgcttccggtcggagaccgtggtgcatccgcgcacgcgcaacaccttggcgtttgtcccggctcagttcaatgagttcgagatcagccccaaggagcgcgagctgatcgacatctgcaaagcggagaaggaacaggggagcaaggttctggcctacacggtctataccggaacgcgcgacaccacgtcacgcctgaaggggctgctggagcaggaaggattcaaggtggcggtactgcgcgcaagcgtggatgccagccgccgcgaggactggatcgccgagcaactggaccggggcatcgacgtgctcgtcaccaatcccgagctggtcaagacggggctggacctgctggagttcccgacgattgtgttcatgcaaagtggctacaacgtgtactcgctccaacaggcagcacgccgctcctggcgcattgggcagaaacagcccgtgcgcgtgatctacctcggctacgccggttcctcgcagatgacctgcctggaactgatggccaagaagatcatggtctcgcagtccacctcgggcgatgtgcccgaatcggggctggatgttctgaaccaggacggtgattccgtcgaggtcgcactggctcggcagttggtcgctacctaa

SEQ ID NO: 334646 - DNA, 306 bp, Pseudomonas aeruginosa
atgacatccgaccaacatgacaagcaccgccgcaaacggctgttcgaaatcggtgcactggagttcagcgaaggcgtcgaacgcctgatgaacgaaggccggctcgatcccatgccgcttttcgaacgccacatgcgtggcgactggggcgacgtcgcggactaccaatggcagcagaacaacgctgcgttggagtctggcgaacgcctcgattcgttttacgtcgtcacccgtgacctgagcatccgcatcttcaccgaagcagatcgcagagcgacccgcatcgtgctgccgtccgagtactga

SEQ ID NO: 334647 - DNA, 651 bp, Pseudomonas aeruginosa
atgcccgcaaacacttcttccaccacgctgtaccgcatcgacgaatgcccggaagtgatggccgacgcttgcgtcggcgatgaccagggcaacctgatcttcctgtcgatctgggcgcgggacaccgccgtccagcagttcctggctcgcctgaccctcgggcgcgacgagcaggggctggagcagttccatgtcatcaccgaccagggtggcagcgtcccggtgttcgtcggcaacgtcgatcgcctggaaaagcgcatgacccgcgcctaccggcgaacgctgttcggttcgctgtccaacgtgtggctgttcgatcggcgctgcgtcaagcccgacaaggccaacgccagcgcactggcattgctgccccgcgatagcgaccaccggcttgaccgcttgtggccgttggtgcaggacacctgcccactgccgttgctcgaccactggcgcgaaaccgtgctggaactgctgcaaagccgcgagatgctgacccgcctgccattcgccctcgggcctttggtgggccatcggctcgccatcgacgtgccggcgctgacccaggcgctcggctcgctgatccgcagtgacgtgctcaccgcctatccctatccggccaggatttggacgccggaaacggtaacggcttga

SEQ ID NO: 334648 - DNA, 699 bp, Pseudomonas aeruginosa
atggcagtcacatcggcgcccgagaaatcggtttcgcccatcatcgtccccggccaactcacgctgcgtaccatccgcggcaagaacggccccttcacggtcggacgcctcgccacgcacctcggtacgttcgaggtcaaggacccggagctggagcaataccccgaaggcaagtacgacggggagttcatcatcaggtacatcttcccgaagtcctacccggtcggtggcggcatgcgcttcgagatccgcgccagcctggacggaatgacgctctacgacatcgacaaactgagccgtgacgaggcacgcagcttcgccacccaggacctcgatccacttgatgaagagttgggcgcacagcctgcagtaacaccggcaacaccggccaagcccagcaaaacttccaggcccgccaagccagcacccgtgcaggcatccacggacccgctggtcgataccacgcccttcggcgtggatgcgccgacgcccgctgcggcaactgctcccggcagtaccgaagatggcgacgccgcgctgttcagcttgctctggccgctgggcgagtccgtgaaactggattcgaccatcgaccgccgcaccctgcgcacgcagatcgcccgcctgggcgaactgggctacgcgctggacttcaagacgcaggagtggagccgccaggccgaactgcaacctgcgtag

SEQ ID NO: 334649 - DNA, 441 bp, Pseudomonas aeruginosa
atgagcacgcatttttggggcgaaggcaacattggctccccgcccgagtaccgggagttccccaacggcaacgacgagccgcggcgcttgctgcggctgaacgtgtatttcgacaaccccgttcccaccaaaggcggcgacttcgaggatcgcggcggcttttgggcgccagtggaaatctggcaccgtgacaccgcgcactggaaaaacctctaccagaaaggcatgcgcgtgctggtcgtcggccgcatggagcgcgagccctggacggacaacgaagatcagccacgcgagacctggcagatcaacgcgcgcagcgtcggcatcctgccgttccgcatcgagtccgtgaccctcagcccgaagccgcaggatgcggaggcaaagtcccaggcagtccaggaaccggctgcgccaaaagagccgcggcgtaggaagtga

SEQ ID NO: 334650 - DNA, 744 bp, Pseudomonas aeruginosa
atgacactcatgaactgcgatccggccaccggcagttgccggattcccgacgctgctcccatcctcccccagggggcgaagcaggcccctggcggcgaagtcacgctcaggtacatcggcgaccccatgtgctcctggtgctggggtatttcctccacgctcgaagaactcgcacggtactgcgaacagaagggtatcggcttcaccctcaccatgggcggcctgcgcgcgggcgggggcgacgcatggggaccggagttccgggagtttctacgccgggaatggacccatatcgccaaggtcaccggtcaaccattcggtttttccctgctgtcggcaaagcatttcgactatgacacggagcctgcctgccgagccgttgtggtcgccgagcaaatgctcgaccagaagcggcctgtcgcctccgcgaccctggcatttttctctgccgtgcagtgcaagttctatgtcgaaggcgaggaccccaagaacgtggacttttatagatccatttgcgaagacgcttcgctatcgttcgaagacttccgcgtgcatttcgccactgccgctgcacggcaagccgtctatcggcaattcgcccagtgcggagagtggggcgtacgcgcattccccacccttctgcttgacctggctggtgatctgaagcaactcagttcaggcgccaccacagcggcaagcgtgatcgaacggatcgaacatctgctgggcgcacgcaccgactga

SEQ ID NO: 334651 - DNA, 1323 bp, Pseudomonas aeruginosa
atgattcgcagacactcgtgcaaaggggtggggagcagtgttgcctggagtttgctgggcctggcgatttccgcgcagagcctggccgggaccgtgaccaccgacggtgccgacatcgtgatcaagaccaagggcggcctcgaagtcgccaccaccgacaaggaattcagcttcaagctcggcggccgcctgcaggccgactacggccgcttcgacggctactacacgaacaacggcaataccgccgatgccgcctacttccgccgcgcctacctggaattcggcggcaccgtctaccgtgactggaagtaccagatcaactacgacctgtcgcgcaacgtcggcaacgacagcgccggctacttcgacgaagcctcggtcacctataccggcttcaatccggtcaacctgaagttcggccgcttctacaccgacttcggcctggaaaaggccaccagctccaaatgggtcaccgcgctggagcgcaacctcacctacgacatcgccgactgggtcaacgacaacgtcggtaccggtatccaggccagctcggtggtgggcggcatggccttcctctcgggcagcgtgttcagcgagaacaacaacgataccgacggcgacagcgtcaagcgctacaacctgcgcggcgtgttcgcgccgctgcacgagccgggcaacgtggtgcacctgggcctgcaatacgcctatcgcgacctggaggacagcgcggtggatacccggatccgcccgcgcatgggcatgcgcggcgtctccaccaatggcggcaacgatgccggcagcaatggcaaccgtggcctgttcggcggcagttcggcagtcgaggggctgtggaaggacgactcggtctggggcctggaaggcgcctgggcgctgggtgccttctcggcccaggccgagtacctgcggcgcacggtcaaggccgagcgcgaccgcgaggatctcaaggcctccggctattacgcgcaactggcctacaccctcaccggcgagccgcgcctctacaagctggacggcgccaagttcgacaccatcaagccggagaacaaggaaatcggcgcctgggagctgttctaccgctacgactcgatcaaggtcgaggatgacaacatcgtcgtcgacagcgccacccgcgaggtcggcgacgccaagggcaagacccataccctgggcgtcaactggtacgccaacgaggcggtgaaggtttccgccaactacgtcaaggcgaagaccgacaagatcagcaatgccaacggcgacgatagcggcgatggcctggtgatgcgcctgcagtacgtgttctga

SEQ ID NO: 334652 - DNA, 582 bp, Pseudomonas aeruginosa
atggctggtgtacggcagttcgatgaagaaaagctcctcgcggcggtactcgaggtgttctggaacaaaggctggcaggccacctcgatggccgacctggccgaggccgcggaggtccagcgcggttcgctctaccatgcgtacggcggcaaggaagagctcttcctgctggccttcgatctctacgcccgcggtttcctcgacaaggcggcgcgggccttgcgtggaacggacgcgcgcagcgcgctgctggcattcctcgacgcggcgatcggcaacatgaccagcggcgacccgccgcgcggttgcctgaccaccaagaccgccgccgagtcggtggccaccgggccgcgcatccagcaacgcctgcgcgacctgctggcggagctgcgcgggatcatcgtcgaggccttgtcggcggagccgctgcgcgccggactggcgctgccgccggaagaggccgccgaactgctgctgatcttcacccgcggactggcggtgatcgaacgcatctatcacgatccgcaacgcctgcggcgcagtgccatggccctggtcagcatattgacctcgccggcctga

SEQ ID NO: 334653 - DNA, 1029 bp, Pseudomonas aeruginosa
atggtttcgaacagtcgcatccagtatggctacatcaatgtcgtcgaaccctccgagcaccagggcgtgctcagccgcgacaacgccgaacgcttcaccgagaacttcagcaagcccgccctcctccgcaagctcgcgccgatcagcgaacgcctggcgcaacgcgccttcttcgacgaggtcggcgccgacaagaccctgcaatggcgggtgaaggccggcgaagcgccggtttccatgcgcgccgaggacggcacctccgactacaactacgtcaccggccgcgtcggtaccgggcgggagttcctcgacgacatcttcgagcgcaagctcgacgtctattcccacctgggcactatctcctccagctacaacgacccctacccatggggcaaggacgccttcaaccaggtcaagcgcgaggttttcggctcttcctggttcgatgtcgacggctggcaggtcaccggccacatgttcctcggccacagcacccaggagtacggcgagccggcgcgcggcgcggtgggcagcgactggcacatcttcccgaccctgaacatcttcgtgatgatcgccggcaccaagaaatggagcacccgtccgccgcaactgggcgaccagttccgcgactaccacctgctcttcgagaccagcagcggccgcgaggcccctggcggcgactacgagagcgacgtggtctacgtcgaacccggcgacgtcctgatcaacccgcccttcgaatggcacaaggtgctcaacgcccgtggcctgagcatcggcgcggcgtttcgggtgatcgacacgcactacctggaacgtctcggcacgcggccgaacctcgaccgcgagaaaatcgcccatgaccagggcaacttcgccgaaaccgaggaactggcgcacttcctgaccagcatcaactacgcctcgcgtcacctcaaccgggcgcagatgatcctcaacgacatcgagtacgcctacctgcgcaagcgtggcaagcgcgactcgatcctggtcggccaccgctga

SEQ ID NO: 334654 - DNA, 732 bp, Pseudomonas aeruginosa
atgaacgccccgaacctgactctctacgaactggccggcgccgatcctcgcctgcgtttcagcccgcattgctggaagacccgcatggccctggcgcacaagggcctcgacagccagcgcatcgcctggcgcttcagcgacaagccacggatcgctttttccggccagggcgcggtgccgctgctggtcgacggagagcaaccgatcagcgactcctggcgcatcgccctgcacctggaacgagcctatcccgaacgaccctcgctgttcggcggcgaggcggcactggcgctggccggcttcgtcaaccgctgggccgatggcgccctcctgccggccatcgcgccactgatcctgctggaggtctacggccaactggacagcgccgaccgcgaatacttccgcagcacccgcgaagcgcatttcggggctagcctggagactctggggcagccgcgcgagcgtcacctcgggcagttgcaccaggtactcgcaccgttacgccaggcgctcaaaagccagccgttcctcgccggggagcgcgcggcctacgccgactattgcgtgttcggcatgttcatgtgggcccgctgcatccaccccgaggatctgctggcggcgaacgagccgctgtacgcctggcgcgagcgcctgctcgacgccttcgacggactggcccgcacggcccccctggccactttcccagcgcatggagcagacgatgtccagtga

SEQ ID NO: 334655 - DNA, 432 bp, Pseudomonas aeruginosa
atgtccagtgaacccgaactgaaggatttccccatccattcctcggacaagatccgctacgccgataccgaccgccagggccacgtgaacaacgcggtgttcgcgaccttcctcgagaccgggcgggtggagatcatctacgatccggagatcgccctcgccaggcccggcagcgaatgcgtgatcgctcgcctggaactggacctgcgcggcgagctgcgctggccgggcacggtgcagatcggctcccgggtgctctcggtggggcgcagttcgttccgtctcgaacagggcttgttccaggacggccgctgcgcggcgcgagcggaaacggtgatcgtcctgatcgatagcttcagccgacgcgccaccccgctcgccgaaaccgcggtggaacgcctgcaggccctggccggccccgggcgcgactga

SEQ ID NO: 334656 - DNA, 1197 bp, Pseudomonas aeruginosa
atgggcgagactgaacggagcagggcggaggtcggcgtctggctgctggccggactggccttcgtggtcggcacggtggaactggtggtggccggggtgctcgacgaactggccgccagtttcgccgtcagccagggccgggccgggttgctgatgagcctgtacgcgctggtctatgcgctgctcggcccgctgctggtctacctcagcgccggtatcgagcgccgccgcctgctggccggcgcgctgctggcgttcatcggcgccaacctggccagcgccgccgcgccgagcttcgccctgttgctggcgagccggctgctggtggcggccagcgcctcggtcatcgtggtggtggcgatcaccctggcggtggccattgtcgcgccggaacggcgcggccgggcgatcggtctggtgttcgccggcatcgtcgcctcgctggtgctgggcgtaccgctgggcaccctgatcggcgagttctggggctggcgtagcctgttcctgctgctcgccggggtcgcgttgctcggcctgccgctgctcctgcgcctgctgccggccatccccggcgcgcccggcatcgccccggcggagcaactgcgggcgctggcccggggccgggtgccgttcgcccacctggcatcgctgttgcagatgaccggccagttcaccgtctacacctacatcgtgccgttcctggtcggcagcatggccctcgacaaaccgaccatcagcctggtcctgctggtctacgggggcggcggcatcctcggcgcgctgctcggcggacgtgccgccgaccgctggccggggccggccaccttcgtcgccttcctgctcctgcatgcactggccctggtcctgctgccgttcgccaccggcggcctgccgctgctgctgggcgcggtggtgttctggtgcgtgttcaacatggcgccggggccggcgatccagaaatacctggtggaactcagcccggacaccgcggcgatccagatcagcctcaacaccagcgcgatccagctcggcgtggccctgggcgccttcatcggcgcgatcctggtggaccaggtggcggtgcgcgcgctcccctggtggggcgccgcgctgatcctcggcgccgccgcctgcggctggctgtccgcgcagcggccggcggcgggcacggcggactgccgggagcgcctcgattga

SEQ ID NO: 334657 - DNA, 273 bp, Pseudomonas aeruginosa
atgcaactgaacgtagaacgcggcgcacggatgaccggcaagaccattcgcctgcgccaggccgcacgtaaggccggtcaggaagagcaccagatcatcagcggcagtctctacacaccgttcgacctagagctgttggtgcgccaccgcatcagccacggcgccaaggtgatctgcatcgacgaatgcagtgagcaacagatcaagcacctgcggcacctcaaaggcgatatccccagcgacctcaccatccacgccgttgtagcgaactga

SEQ ID NO: 334658 - DNA, 1326 bp, Pseudomonas aeruginosa
atggctaaagtttatttgtcattgctggatctttatttagataaacagaatcctcgtcatgatctaattaatgatcaagatgaaattatagctcatcttgtaagaacagaagatgtcaaagagttggcgaggcatgttgcagagaagggtaagtttagcccattagactcaatcggcgtaattgaggaagatggtcgctacatctcggtagagggaaatcggcgcacgtgtgctggaattcttttgaatgatccaagccgaagcccgaagggtgaggagaaatactttcgcaaccttgtagcaaatgctaagtctatacctgatcaaattgagtgctatatctttgaaactcgcgaagaggccaaggagtggatggcagtcaggcataacggtccacaaggtggtatcggcaccgtaacgtggaaccctgaccagaaagctagattctttaacaactctggtactgccttggcaatcgcagtgcttgactacgcaactcaaggagggatgttgagtgcagagagtcgagcggagaagcggatattgacgacggctgctcgctatttaaataacccagtcttcaggtcggcgatggggattgtgagtggcaggtcggacactaaagttaaaattaatgctcctgtagatgagtttaatcgagttgtttctagattttgtcgggacctcctcgatcctgcaagtggtgtctcttctcggagcaacaaagaggactgggtggcttatgctcagagattgattgatgagggcgatgctcctaaaacgaaggttgagccgcaagagctagattttaaaaaagcaaatgttgccccctctacacctcagcggccaaggaacaacttcggcagtgataggaggaaaactataattgataattctacttttaaggttgccataaaggataagatacttaaaagggtctatgatgagttgaggttgattgactgtaactctttccctcttgctgctgtcatggtctgccggatatttcttgagaatacctatagggcatatcatgaaaagcacatttcacatgtgaaggatggtgaggaagttcacattaccttgcaaagagttgtcaagcatctcaatgagcttaaaaacagcggccagctagagcgagctcagaaaaaggctttaggggcattgggacgcgtggcctctaacgatatgaatgtgctttcgccaaggactttaggggctttcgcgcatggaggtcattatccagaacctcgctcgataaaaattgaatgggacaatatctctgagattattcttttccttctgcaggatctggcaaaagggtaa

SEQ ID NO: 334659 - DNA, 861 bp, Pseudomonas aeruginosa
atgccttctactccttcacctcttcgctaccctggtggcaagtattcaatacttccaatggtgtcagagcttattaaggcaaacggtcttgagcgtgggcactatgctgagccttatgcgggtggatgtggccttgctcttggtttgctcttcaaagggttcgtccatgaagtgcacctgaatgatctcgataggtctatctgggcattttgggatgcgattataaatgacacggataggtttgtagatgctatctactctactccagttaatatggacgaatgggagcgtcaaaaagaaatacagagctctgaaggctctaatgatttcgagaaggctttttcagcattctttttaaatagaactaacaggtctggcgtcatatgtaaggccggtgtcataggtgggttgaatcaggatggaaagtataaaatagactgccgttttaataagggtggtttggtggataggataagaagggttgaaaagtacaagcataggattcatctttacaatttggatgctgtagattttattcaggctgctgatggctttcttccggagaagtccttcttctgtatcgatcctccatactataagaagggttcgactctttatactaacttctacggtcctgatgatcataagaatctcgcagatgtgattctaaatataagtcgtccttggattctaacttacgatgatgcggtagagattcaacgcttatatcgatcacgtcgacagtttcgttttaacctaaactatagtgcggcggagaaaagagtaggtaccgagttgttggtggcatcaccttggttacggataccgggcgagctaaaggtaactacacttgcggcttag

SEQ ID NO: 334660 - DNA, 231 bp, Pseudomonas aeruginosa
atgtttcccgaacgcctgacattttccatcgccgactgggtcaacgcttgggtcgacgccctggtgaccaactacggcgacctgttccgcaagatctccgacaccctgctgtgggccatcgtcaacctcgaagggctactccgcgccaggtcgctgttcagcagctccgccggcaggttgaccttctccagcaccgccaccagctccggcgcctgctgccgaccctggtga

SEQ ID NO: 334661 - DNA, 999 bp, Pseudomonas aeruginosa
atggcccgcggcggcatcaacaaggcactggttcagaaggcgcggcaggcaattctggcgcggggcgagaaccccagcatcgacgcggtaagggtcgaacttggcaataccggctcgaaaaccaccattcaccgctacctgaaagagctcgaagacgccgagcgcggccgagatacggcctcgatcccgctcagcgaacagctggccaatctggtcggccaactggcagatcagttaaaggaagatgcgcaggcggccgtggcccaggagcgcgaacaactggcacatgaccggcttgatttccagaaccaagcgcggctggccgaaagccgaatccagcaattggaaagtcagtgcagcgggctcacagaacagctccaggttgtcaagcacgcgctacagcaggagcagcagcgacgccaacagggcgaggtcgagaatgcccgcctgttgcaggccaaccgcgacctggaggagcgcctgcaagaccgcgatgggcagattcgctcgctagaggaaaagcatcagcacgcacgtgacgccttggagcactaccgccaagccagcaaggagcagcgtgagcaggaacaacgtcgacacgagtcgcagatgcagcaactgcaactagagctacggcaattgcagcagaccctgatcgtcaaacaggacgagttgacccaactgaaccgcgacaatgcgcgcctgctcgcagaagcgcggcagttgcaaaaagagcagcatgcgcagcaacagctactggcacagaaagctcaggccctggaggccttgcaaaacacgctgaccggcgccgagcgcttgaatgaaaccctggaacagcgttgtcgcacattgcatgaggaggtgtcccggctgggtgaagcctccgcgatccagacgcaacaggcgcaaggcctgcaggagcgcctgatcgaagccactgcacagctgaagctactcggggcgccgcttgcgaacagcgatggcgcacgtagcccatga

SEQ ID NO: 334662 - DNA, 372 bp, Pseudomonas aeruginosa
atgaacggcgagcgccggcacccgttgcatgccgccatcatggcagggcctgggctgctcgtgctctttgcgatgggcactccttctgcactcgtggccacctggttcggcatcctgacggtacatttggccttccagcactcaaatctggactactcgttgggctggctacggcgcgtcatcggcgttgcagaaacacaccgctggcatcacaaacgcgacttcgaggatgcgcaggtcaattttggtgagttcttgctggtgtgggatcaactgcttggaaccttctatgacagcgcaagcaagcccagcaggggtcatgccgagataaggggaaaattcattcatttggaatgtaagccattgctctga

SEQ ID NO: 334663 - DNA, 1002 bp, Pseudomonas aeruginosa
atggcccgcggcggcatcaacaaggcactggttcagaaagcccgccaggccatcctggcgcggggtgagaatcccagcatcgacgcaatacgggtcgagctgggcaataccggctcgaaaaccaccatccatcgctacctgaaagaactcgaagacgccgaccgcggccggaacgcggccgcattgccgctcagcgagcagttggccaacctggtggcccagttggcggatcagctcaaggaggaagcgcaggccgacatggcccaggagcgcgaacaactggcacgggaacgactcgattaccagaaccagattcggcaggccgaaagccgtatccagcagctggaaggtcagcgcgctgggctcacggagcagttccaggctgcccagcaagcactgctgcaggaacaacagctgcgccaacaggccgaggtcgagaatgcccgcctgcagcaagccaaccacgaccaggaagcgcgcctgcaagaccgcgacgggcagattcgctcgctggaggacaagcatcagcatgcccgtgatgccctggagcactatcgccaggccagcaaggagcagcgtgagcaagagcagcgccggcacgagtcgcaggtacaacaactgcaactggaactgcgacagctacagcagaccctgatcgtcaagcaggacgagctgacccacctgaaccgcgacaatgcgcgcctgcttgccgaggcgcggcagcagcagaaggatcagcatgcgcagcagaagctactgacgcagaaggctcaggctctggaggtcgcccagaacacgctgaccagcattgtacgtacgaatgaagccctggagcagcgctgccacgctctgcaggatgaggtgacccggcttggtgaagcctcctcgattcaggcacagcaaacccagagcctgcaggagcgtctggctaaagccaccgcgcaactgaaattgctcgggcaggcaccgcccacgagcagcggtggcgcaagtagctcatga

SEQ ID NO: 334664 - DNA, 351 bp, Pseudomonas aeruginosa
atggccaaggatacccgcgatacccagaccctcgacgccttcccggccaagccgtccaggggccggcctcgcaaggctgacgcgctctccaatgctgagcggcagcgtctctaccgtcagcggcaggcgggcaaggcaccccaggtggacgcggatgccctggtccgtctgcagaacgaattcgaccggcacgttgatgatgcgcgcgccctggtcgcccatcttcgaaagaccattgcgcagatggagcttgaggtggatctgtgccgccaagagcgatccgatgccatgcgcgtcaacagcatttaccgcgagcgcctggagcttgctggtctccctacagactactag

SEQ ID NO: 334665 - DNA, 1593 bp, Pseudomonas aeruginosa
gtggccggcgaacaggctcgccatgtccgcgcccgccgcgtacaggccggggatcggctggccgccgccgtccagcacgcgggcctgggcgtcggtcttcagcccggcgaaggtgccgaagcagccgggctcgacctgcaccgcgtagtacggtccgcgttcgatgggggcgacgcagggattcggccccggatacgccgggtcgccctgcttgcggttgaatgccgtgccgccgcggccgaactctgggtcgcggccctcgcgggcgtggcggttgtattcggcgacggtggcggccaggccggacgggtcgatgccgcagctccttgccaactgatccaggctggccccgcgcttgagatagccgctgcgcaggtgcgcggcgatcggcagcggcgccggacgcacgtagccgaggccgtagcggcgcaggaagcgccggtcgcagaccagccaggagcgtgccggctgcccgggcggggtggcctcgagcagggcggcgacatagtcgtggtaaccgtgcgcctcattgacgaagcgcctgccgttggccagcacgccgatcaccccgggcttgccgcgctcgatgatgtgcgggaagtgcccggtctcgccatcgccgtggggaactcgcgagaccggcgcccaggcgatcggcgagcgcaggtcgtcggccacacggccgccggcgctttcccccaggcgcaagccgtcgccgttgcagcccggcggcggcagcggcaggagggtgtccagggtgggggccagctcggcgcggcgctgcggatcatggggaaagccgccgcaggccaggaccacggcgcctgcctcgatgcgcaggagtccctcggcgctctcgaccagcgcgccgaccaccttgccgtcacgcagcagcagttcgcgggccggcgccgattcgatcagacgcacacccagggcttcggcggacttcgccaggcgcgccaccagcgccacgccattgaccaggtacatggcgcgaccgtagcgcagcaggtgccagaggtggctggaaaggcgccgggcgacatgcaggaaggccggcagcgagcgggtcaggtcgaggaaggcggcgaggtcggcgccggccatgatcggcatgcccatgaacgaggtctcccgcagggtcttgcgcaggcgcggcagcagcgggcccagttgtcgcgcgtcgtagggtgcggcgaccagctggtggccgccatcggcggcgcccggcgtgtcgccatgcatgtccgggatgccgttgccgtcgacgaaccgcaggtgggtgtgacgctcgaagaaggccaccatgtgcgggcaggcttcgaggaaggcgtcgatccgcgcggcgtcgtaacgctcgcccagttcgtggcgcaggtaggtacgcggttgttcgatgtcctcctcgatgccggcgcgacgcgccagcgggttgcgcggcaaccaggcccagccgccggaccaggcgctggcgccgccgaacaccgggtccttctccaccaggactacccggcgcccgtgccaggtcgcggtcaccgccgccgccagcccggcggcgccggagccgacgaccagcaggtcacaggttag

SEQ ID NO: 334666 - DNA, 216 bp, Pseudomonas aeruginosa
atgagcgccaaaggcaactgctacgacgatgcctgtgcagagagcttcttccacagtctgaaggtcgagtgcatccacggcgagcgcttcacgagccgtgcccagatgcgtgaaaccgtgtttgaatacgtcgaaaccgattacaaccgtcagcggcgacacagcacgctggggcacatcagcccggaggccttcgagggacggatgagtgcttaa

SEQ ID NO: 334667 - DNA, 684 bp, Pseudomonas aeruginosa
atgaaatttcttaaacctcttctcttgattgcaacgaccatgatgatagtcagcgcagaaatcgcaacagcggccgggccgattcaagccagcaaaagaatgcttgagtatacttactcaaaaacagacattctattttgcaaggatatccgcaacaacgctcctgagcccagaactcagcaagagtttgaggctcttcataggagggctgatgagggaggcgctgatagcaactatttgctttctgatctgtatatattggaaacggagttcaatgcatattataattccgacctggtctctgaggtcgaaagcaaaaggcgagctagtgaaagtctgcgtttccttcagcgctctctagatataaatcctgcccatccattagcactcaatagagctggaataaactatgaaatgggaagggtagttccaaaggacatgaagaaagcggtccactactttgaccgggctgcacgcagcggaaatggtgttgcagctcatcggctgttcgaaatatatatgattggctatgatgatatctcgaaggatacagcaaaagcgcattattacgctgatctggccaaagagctaggtagcaactttcataaatatactacgacacactgggacgaaacgcttaagtactatgagcgcttcgacaaggtacagactaaaaagccctga

SEQ ID NO: 334668 - DNA, 1215 bp, Pseudomonas aeruginosa
atgggtgagaaaatacactactatcgccttgtgggagaggaaggtgttctgatgcagtccgggcgcgtacctgaccccctgtattacgggggagatagaacgatgaactcgctgaatcagaatgtctcttcttttaccatccatgccgccccggccggcagcagaatagttaacgaccaaggtatagatgctggaaactcttcgaccggtcacgttttcttaagcgttaggcagtttgaccacaatacgggtagttttaagactacaagcatcggcctaagcccaggtgctgactggagtacaagcaaggacaacctgtcattcaacgacaacctacggtatccggacgcctctacaataacagttgaaggtggcggatttccgcatcatcggaatgtgggaaacctgtttgacagcatcatggactacaaatctggaaagaaagaaccgccaaactataatctactactgaataactgcatccagtttgcgcaagatttattggaaagtgctggaataaaaggaattaagttggggctgacacctgatggtgtagagaagaaccttgagcactctgcggatagttatgtaacacctctgattctcgacctcaatggcgatggcgtacacactctggatagtggccatggggtgagcttcgatttcgatggccatgggcaaaaaagtaaaactggctgggcccatcctgacgatggactcctcgtgcttgataagaatgccgatggagtcatcaatgtgggggctgaattgtttggcagtaatagttctggtaaagaaggtggcctggctaaggatggatttgaagcactatctctctacgacgccaacggagacggcttcatcaatgcggcggacagtgtctggcaaagcctccagatctggcaggacaggaactccgatggcgtaagtcagcaggatgagctgacttcgctcgatacattaggtattgcttcgatctcgctaaatgcaacgcgggttggggcgtttgatgatagtggtaatatccaccagctgattgcgtccttccagtgggcagatggcagagagggtgatatggttgatgtactattgcaccaacaatcagaaaaactgtctagtgaccaatccggtatggacgttccgagtattttccccactgttgatctgattgggcaaagccctatgctagacgaaaccatggggatacacatgtga

SEQ ID NO: 334669 - DNA, 174 bp, Pseudomonas aeruginosa
atggcaagaccagcatctctgatgaaacagacccgcccccgccattcccaagcctacaaggacgaagcgctggctttggccgagcgaattggcgtccgcgagcagtcgctggccgacgagaacgtccgactcaagcggctgctggccgagcaagccccagtgatagccacataa

SEQ ID NO: 334670 - DNA, 756 bp, Pseudomonas aeruginosa
atgcctgccgccattcgcatccttctcctggccctggccctggccctggccgtgcttgccggcatcggtgccgctgccatccaggccgaggatacgccctgcgccaccgccgcggaatgcaacacgcgcggcacccaggcttatcgacaggggagttatccacaggcgctggaagccttcgcctggcaattgcgcctggccgagcgccaggaacagggcggagccgactcggaacaggcgctgaacaatctcgcgctgaccagcctcaaggccgggcaaccgggacacgcccgcgcctggatgaacctggcgctggatcgcggctacagcggcaaggccacgcgctacaacctggaacaggttgccctgaaagtcgactatccgtccctccagggcctcgccgggcactacctgcgctacgccgggcaggccgaatgggaaagcctgcagatcgaaccggtgaagggcggctaccaggcgagcttcgccctgatgcgcatcggcaatccggagaaactgatggaatatgggcccgcggcggtcggcgagttgtccggtcggctggaggggcaaggcgccctctaccggctgcgcagcgaaggcctgggcgccggctgcagcctgctggtatggcaggaaggcatcgacctgcgagtggtggagagccttggcggggactgccagggttacggcggcatgggcatcgccgccgccggtaactgggtgaagatatccagtcaggccagggacgactga

SEQ ID NO: 334671 - DNA, 264 bp, Pseudomonas aeruginosa
atgaatctgcaaacctacctggtcagccgcgagcacgtcttcagcatcggtatcgagaccgactccggccagcactacctgtccttcccggtgggcaaccgcctggtggactacgaggagtactaccggatcgatgccgacgacttcgcccgctacctccgcgacatgggttcggcgctggagttcgtcgaacgctgccgacgccggcaaatggaccatctgctgctggtcgcacccggcaacgaccgcggcagcgcgctgtag

SEQ ID NO: 334672 - DNA, 798 bp, Pseudomonas aeruginosa
gtggagtacccggtacggcgtctctgccagaccctccaggtacatcccagcggttactacgcctggctggccgagccgaaatccgcacgcgagaaggaagatcagcgcctgctcggattgatcaagcatgcctggctggaaagcggcggggtctacggctaccgcaagatccacgacgacctgcgtgagctgggcgagtcctgtggccggcaccgcgtggctcgcctgatgcgggtggaggggctgcgttcgcagaccggttatcgtcggcgccccggctattacggcggtaagccgacggtggcttcgcccaaccgcctggagcggcagttcaaggtcagcgagccgaacaaggtctgggtcaccgacatcacctacatccgcacctatgagggctggttgtacttggcggtggtgctggatctgttttcgcgccaggtgatcggctggtcgatgaaaccacggatgtgcagcgacctggccatcgatgcgttgttgatggcggtctggcggcgcaagcccaggcaggaggtgatgatccactccgaccagggcagccagttcagcagctcggactggcagagcttcctaaaggccaacaacctaatcagcagcatgagtcgacgcggtaactgtcacgacaacgcggtcgcggaaagctttttccagttgctgaagcgggagcgcatccgacggaaaacctacggcactcgcgaagaagcccgcagtgatgtgttcgattacatcgagatgttctataaggggtcgtctcagaaaacggaaaataaagcacgctaa

SEQ ID NO: 334673 - DNA, 279 bp, Pseudomonas aeruginosa
atgagcaaccagcgttaccccgaagaattcaagatcgaagcggtcaagcaagtcaccgagcgcggtttgcgcgttgccgatgtggcggagcgtctaggcgtgtccgcgcacagcctgtacgcctgggtaaagcgctacagcaagccccaagcacagcggcagcaggtagatgatcaacaggccgagctgcgtcgcttgcgcgcggaactcaagcgggtgaccgaagagcgagacatcctaaaaaaggccgccgcgtactttgccaaggagtccggctga

SEQ ID NO: 334674 - DNA, 264 bp, Pseudomonas aeruginosa
atgaacaaagacgatctccgaaaaatcctcgatgaccaggtggagcagtacaagaacgagcatggaggggagatcaccgtttacgcggcccagcgcaagcccgacaagctgccctggaagaagaagcccagccttcttgacaaatccttcgagtccttgttgcaaacgaccgaggagcagctgcgcaaggaggcgcgaaccttagacttctccgaagattcggatctacctcatacaggaaaggcgccgagtacaagatcatga

SEQ ID NO: 334675 - DNA, 237 bp, Pseudomonas aeruginosa
atgagcaatttcgtcacctacgttatctgcttgccggaaacgcaagaggccaggagtgcgatcgtcagcggcgtgcgggagttggtagagaagcacggcggagaaatcagcggggcatccaacgaggacgaaatgacagtcctcgacatgatcgagcagcatgaggatttcgcagactacatcgctgacgatgcccgagcgaaggccaaagaggtgcacgcgaaagcggctaactga

SEQ ID NO: 334676 - DNA, 387 bp, Pseudomonas aeruginosa
atggacctggtaaaggcacttgatgtttcggtcgagttccctactctccgaaccctgcgccgcccagggaaaagcgaaacagaccttctgattaccctctccctgggagcccagtggcagagacactttttccgggttaccccgctgccgccgaaggcagtgctgctctggagcgaagatgttggtgtgatcctggatctgggtcgaggccagttccacaccgtctgccgccatttggcacggaaacgggtcatctatgtctatcctgctggcagtagtccggcctcgcttcaagtgctcgacattgcgactctaacaagcctggctagagcatcccgttggctagacatagacaaggcccgtggactcgctagaaatcactcatga

SEQ ID NO: 334677 - DNA, 453 bp, Pseudomonas aeruginosa
atggcctttgccgcagacgtcgattggcagtggaatgatcctggtagcgcgggcttctacaacgggtctcaaacgctcagcaacggggcgagcacctctgccttttcgcgctacgcgccggggctcacgcccaacatttccgccgacaccgtttcgcagccaccggtgcttctggtcgccggcggttcgaacatcgacttcgatgtcgtgcaggccggaacagcgatcaacaagccaacctgttcacctcccaaggtacccgcgatttacgtgactgcagtgaccgtctgcgactacggggttggctcgaacctcggcgggttcaaggcatatgccgacagcacagctacgcaatacatccctcgcctggctatctgggtgcaggggcagggctggagaaacattgataaccacccatgcgggatggttaaaaccgaaaccatgtgcaagtga

SEQ ID NO: 334678 - DNA, 501 bp, Pseudomonas aeruginosa
atgagcaataccaaaaccttcgggcctgccagcccggaccggcgagattttctggtgctaggcttgagtgccgcggccctggctgccgtttccccggcgtccttcgctgcactctcgtccgtccactctccttccatcaaccgcggaatcatgaccatgagcacagtgactacccaagatggcgttgagatcttctacaaggactggggcccgaaggacgcccagccaatcgtgttccaccatggctggccgctcagcggtgacgattgggatagccaggccctgttcttcgttggcctgggctatcgcgtcatcgcgcacgatcggcgcggccacggccggtccgctcaggtgagcgacggccacgacatggaccactacgctgcggacgtcgcggcgttggacggagccgcacactggtttcaccaacggcctgccggcgaaggtgccgaagccggaacccatcaaccactggcaacgagcagcccaggccatcgatga

SEQ ID NO: 334679 - DNA, 792 bp, Pseudomonas aeruginosa
atgaccttcaacaagactcaccccaagacaatgctctcctacgccgccgtgttgggggccatcctgatggcgcctggcatcagcttcgccgccgagaactcctatgccgacccggtcaagcccgcgctcccggcctccacttttgaatgggatctaagtcgaaccgctctggtcgtgatcgacccgcagatcgacttcatgagcccggagggtgcaggctggccggtgttcggtgcgagcgttaccgagcaaaacctggtcccgaatctgcgccggctcttcgcggcgtccaagaaggctggaacgaccgtcgccatctcgccgcactactactatccccacgatcataaatgggagtacgaggcgccggcggagaccgttcagcacaagcttggcctcttcgatcgcaagggcgccttgacgctggatggattccgtaactcgggtgccgacttcatgcaggagttcaagcccttcattgaagacggcaagaccatcgtcgcatcaccgcacaagttgtatggcccccaaagcaacgacctgatgctgcagctgcataagcagcgggttgacaagatcatccttgccggtatggcctccaacctgtgcgtcgaatcgcatcttcgcgagtttctggagcgcggtttcgaggtggtcgtcgtacgtgacgccatcgccggaccgaagcttcctgacggcgacggctacggtagtgcactggtcgacttccgctacattgccaacggtctgctgacgaccgacgaggtagtgaaaaagctggaaggacgctga

SEQ ID NO: 334680 - DNA, 984 bp, Pseudomonas aeruginosa
atgccacgtcacgtttgtttcttggtttattcgggcttcgtattgctggatttgagtggcccgctcgaagccttctccaacgccaatagcgcgcgcccttcgggctatcgattcacggtcgcttcgcttgagggcgggttgatccgcgcctcgagcggactgcaggtcgcgaccgaagcattggaagtcgtcgaccgcctcgacacgctcatcatcgtcggcgcaccggccgctccgatcggtgactggacgatgtcgatggcgaccgcgatccggcacatgtccctgcgctctcgccgcacggccagcgtctgtactggcgccttcgtgctggccgagagcggcctgctcgacggtcgtgtcgctaccacgcattggaactatgctccgcaactgcaggctcgctatccgtcgctgcgcgtggacggagatcgaatctggaccgaagacgggaatgtctggacgtccgcaggcatgtcggctggcatcgacatggccttggccatgatcgagcaggacctgggcaaagaggtggcgcgctccgtcgcacgcatgctggttgtctactatcgacggccaggtggtcagtaccagttctcttcgctgctggatttcgaccctggctcagatcgcatccgcacggtgctgagctatgcgcgcgatcatctgcgtgatgatctgtcagtcgagcgcttggctgacgtcgcgcatatgagcgtgcgtcagtttggccgtgtattcgcggcatccatcggggtgacgccggccaaagcgatcgagcgccttcgcatcgaggcggcaaggccgctggttgaggacgggcatcagactttcgaggagatcgccaggagcgccggattcggcgatgccgatcacatgctgcgctgcttcgtgcgagtcattgggcggacgccacaagaactgcgccggagcgttcgtcaggccaacggagatggcggatccgggagcaaggcagaccaatag

SEQ ID NO: 334681 - DNA, 816 bp, Pseudomonas aeruginosa
ttgccgctgttcctctggttgctgtggctgagccgcggggcgggggaagggcggctctcgctggcggatggggcgcgcatcctgctgctggggatgttcggctattacctgtccagcctcttcgatttctacgggctggaatacatcagcgccggactggagcgcctgatcctgttcacctatccgacgctgatcctgctcttccaggtcgtgatttttcgcgagcggccgagccgacgcacgctgctggccatgggcgtctgctacatggggcttggggtggcgctcctgcacgacatcagcaccgcgggcatgggtgggcaggtcatcctgggggcggcctgggtcttcgcgagtgccgttacctatgcgctgtactatctgggcaccggcgtcatgctgaagcgcctcggttcgatgcggctggccggtctggcgggcagtgcgtcggcgctgatggtgctggttcactacggcgcctcgaccgacatggcccagctgctggtggtgccgcggccggtatggctctatgcggcgctcatggcgctgttctccaccgttctgccaatctactggatggcgctggccattcagcgaatgggcccaacccacaccgccgccgtcggcaacctggggcccgtgctgacgatcctggcctcctgggcgttgttgaacgaggcgatctccctctatcaactggcagggctggcgctggtcctggtgggggtgtcgcagctcaagcctgcagcgcccagtcaggccaatgctgtggacggcggggtgccggaggcaggatcagcgccgggccgccgctga

SEQ ID NO: 334682 - DNA, 450 bp, Pseudomonas aeruginosa
atgcttgctgaggcccttctggatcacggttattctgcttaccgtgctcggctgaaagtgctgctagatatccctgaatctgccggcagctttgagattcacctcaggatcagctgtggtttttccgcagctagactcatgaaactcgctgacgagggagtggtttcgccgcaggctagagagcaaataatcccgctgcgaaccttgaaaaaccggatcacacgtaatcagccgttgaccattgaggaaagcgaccggctcttccgaacagtccacattacggcgatggctgaggcgatttttggtgacgccgacaaggcaaggaggtggctgttcaagcccaagaaacgactttccggcatgatgccaataaatttgctcacaaccctgcaaggcacgagtcaggctgaagagatgttgctgcaaatctcggaaggcttcgttctgtga

SEQ ID NO: 334683 - DNA, 1578 bp, Pseudomonas aeruginosa
atgcgccagaatttaccagtgacgggtcgaaacttagaactcccaaaagataccaatattctttcgactacctcccctcaaagccatatcacgtacattaatcctgacttcattaaaatcagtggtttcactgaggaagaactattaggccagcctcacaacatcgtaagacacccagatatgccgcctgctgcatttgagcatatgtggagtacattaaaatctggccgctcatggatggggctaataaaaaatcgctgtaaaaatggcgaccactattgggtaagtgcttatgtaacgccaatagctaagaatggttcgattgttgaataccagtctgtaaggaccaagcctgaacctgagcaggttttggctgcggaaaaattatatgctcaattgagaagcgggaaggccgcgaggccgaaatgggctgctagcttttccgtgaaaatactcttgctcatatggggtagtattatatcaagcgcaatggctgccggcatgcttactgatacatcaataagcagcttattgttagctactttaatgtcaggaagcttaagctctgttagtgttttggctattctctctcctcttggaagactggttgaaagagccaggaatatttccaataacccattaagtcaatccctctacactgggcgcaccgatgagtttggccaaatagagtttgctttacaaatgatgcatgctgaaacatgcagcgtagtaggtcgcataggtgatgcatcaaatcggcttagcgaacacacccaaagcctactaaaggatattgagtcaagcactgtacttacagttgagcagcaggcagagacagatcaaatagcaacggcagtaaaccaaatggcggcaagcattcaagaggttgcgagcaatgcacagcatgctgcagatgcggccggaagagcagacactgagacggcatctggccagcgtctggtagcccacacaagccagtcaatcattgcccttgaaggtgaaattaggcaagccgctcaggttattcatgagcttgaaggtcaaagtaacgagatatcaaaagttcttgacgttatacgagggatcgccgagcaaacgaatttgttggcactcaacgcagcaattgaggccgcgcgtgctggtgagcaggggcgtggttttgctgttgtcgccgatgaggttcgcagtcttgctgctcgcacccagcaatcgacaacggatattcaaagcatgatcagcgctctacaagagcgagcgcaatccgctgttacagtcatggagcaaagtagtcggcaagcgcacacgagtgtagctcacgcagaggaagcagctacagctcttgatggaattggccaacgcgttaacgaaattaccgacatgaacgcgcaaatagcgactgcggtcgagcagcagggagcagtaagtgaagacataaaccgcagtattatcaatatacgcgatgctgctgataccaatgtacagaccgggcagaataatttgcaaagtgcgaaatctgtcgctcagttaactagcgctctgagcgaactggcaaaacagttttgggaaaaacgaagataa

SEQ ID NO: 334684 - DNA, 981 bp, Pseudomonas aeruginosa
atgaagcagatgaccttcgccgacgccgagtacgccggcaagcgcaaacagacccgcaaagagctgttcctgatcgagatggatcaggtagtgccgtggaaaggtttggtcgctctgatcgacccgcactaccccaaaggcgagggtggtcgtccggcgtacccgttgatggcgatgctgcgcatacatctgatgcagaactggtttggctacagcgaccccgcgatggaggaagcgctgtacgagaccaccatcctgcgccagtttgccggactgagcctggagcgcattccggatgaaaccaccatcctcaacttccgccgcctgctggagaaacacgaactggctgccggcatcctggctgtgatcaatggctatctcggtgaccgcggtctgtcgctgcgccaaggcactatcgtcgatgccacgctgattaatgcgccaagttcgaccaagaacaaggacggcaagcgcgacccggagatgcaccagaccaagaagggcaaccagtactacttcggcatgaaggcgcatatcggcgttgatgacgagtccggcctggtgcacagcgtggtggggacggcagccaacgttgcagacgttacccaggtcgacaaactgctgcacggtgaggaaaacatggtcggtgccgacgcgggctacaccggcgtagagaagcgcccggaacatgaaggccgtgaggtgatctggcagatcgcggcccgtcgtagtacgtacaagaagctgagtaagcgcagcgcgctgtacaaagccaagcgcaagatcgagaaagccaaggcccaggtgcgtgccaaggtcgagcatccgttccgggtgatcaagcgccagttcggttatgtgaagacgcgcttccgggggctggcgaagaacaccgcgcaactggtgacactgttcgcgctgtcgaacctgtggatggtgcgccggcatttgctgacgaatgcgggagaggtgcgcctgtaa

SEQ ID NO: 334685 - DNA, 2967 bp, Pseudomonas aeruginosa
atgccgcgtcgcttgatcctctcggccacggagcgggacaccctgcttgcgctgccggaaagccaggatgatctgatccgctactacaccttcaacgactccgacctgtcgctgatccgccagcgacgcggcgacgccaaccgcctcggcttcgccgtgcagctctgcctgctgcgctaccccggttacgcgctgggcaccgacagcgagctgcccgagccggtcatcctgtgggtggcgaagcaagtccaggccgacccggtgagttgggcaaagtacggcgagcgcgacgtgacccgtcgcgagcatgcccaggaactgcgctcctacctgcaactggtgccgttcggcttgtccgacttccgcatcctggtgcgcgagttgaccgagctggcccagcagaccgacaagggcttgctgctggctggtcaagcactggagagcctacggcagaagcggcgcattctgccggcactgggagtgattgaccgggcctgctcggaggccattgcgcgagccaatcggcgagtctatcgcgccctggtcgatccactcacgcactcgcatcgagccaaactggacgaactgctgaagctcaaagccggcagcaacatcacctggttgacctggctgcggcaggcaccgctgaaacccaattcccggtacatgctccaacacatcgaacggctgaagacctttcaactggtggacttgcccgaaggcctgggccgatacatccaccagaaccgcctgctcaagctggcccgcgagggtggccagatgacgcccaaagacctcggcaagttcgagccgcaacggcgctacgcgaccctaactgccgtggtactggagagcaccgcgactgtgattgatgagctggtcgatctgcacgaccgcatcctggtcaagctgttcggcggcgcgaagcacaagcatcagcagcagttccagaagcagggcaaggcgatcaacgacaaggtgcgcctgtactccaagatcggccaggccctgctggaggccaaggaaagcggcagcgatccctacgccgccatcgaggcggtgattccctgggacgagttcaccgagagcgtcagcgaggccgaactgctggcccggccggagggcttcgaccacctgaacctggtcggtgagaacttcgccaccctgcgccgctacacgccggccctgctggaggtgctggaattgcgcgccgccccggccgcgcaaggcgtgctggcagccgtgcagaccctgcgcgagatgaacgccgacaacctgcgcaaggtgccggccgatgcccccaccgccttcatcaagccgcgctggaagccgctggtgatcaccccggaagggcttgaccggcgtttctacgaaatctgcgcgctgtccgagctgaagaacgccctgcgttccggtgacatctgggtcaagggctcgcggcagttccgcgacttcgacgactatctgctgccggcagagaagttcgccgcgctcaagcgcgcacagaccctgcctctggcgatcaacccgaacagcgaccagtacctggaagagcgtttacagttgctggacgagcagttggccaccgtcacccgcctggccaaggacaacgaactgcccgatgccatcctcaccgagtcggggctgaagatcaccccgctggatgcggcggtgccggatcgggcgcaggcgctgatcgaccagaccagccagttgctgccgcgcatcaagatcactgaactgctgatggacgtggacgactggacgggcttcagtcgccacttcacccacctgaaggacggtgccgaggccaaagaccggacgttgctgctatccgcgatcctgggcgatgcgatcaacctcgggctgaccaagatggccgagtccagccccggcttgacctatgccaagctgtcctggctgcaagcctggcacatccgcgacgaaacctattcggcggccctggccgagttggtcaatcatcagtaccgccatgcttttgccgctcactggggggacggcactacctcatcctccgatggtcagcgcttccgggctggcggccggggcgagagcaccgggcacgtcaacccgaagtacggcagcgagccggggcggctgttttacacccatatctccgaccagtacgcgccgttcagcacccgcgtggtgaatgtcggcgtgcgcgattccacctatgtgctcgacggtctgctgtaccacgagtccgacctgcggatcgaggaacactacaccgacacggccggcttcaccgatcacgtcttcgccctgatgcacctgctgggcttccgcttcgcaccgcgcatccgtgacctcggcgaaaccaagctctatgtgccgcagggcgtacaggcctacccgacgctgcgcccgcttatcggcggcaccctgaacatcaagcacgtgcgcgcccaatgggacgacatcctgcgcctggccagctcgatcaagcagggcaccgtcaccgcctcgctaatgctgcgcaagctcggcagctacccgcgccagaacggcctggccgtggccctgcgtgagctgggccggatcgagcgcacgctgttcatcctcgactggctgcagagcattgagctgcgccgccgcgtgcatgcaggactgaacaagggggaggcgcgcaactccctggccagggcggtgttcttcaaccgccttggcgaaatcagggatcggagcttcgagcagcagcgctaccgggccagcggcctcaatctggtgactgccgccatcgtgttgtggaacacggtgtacctggagcgcgccacccaggcgatgggcgacacgggcaagccggtggacgacgagctgttgcaatacctgtcgccgctgggatgggagcacatcaacctgaccggcgattacgtctggcggcagagccgcaggctggaggacggaaagtttcggccgctacgaatgcccggaaaaccttag

SEQ ID NO: 334686 - DNA, 351 bp, Pseudomonas aeruginosa
atgaacacgcacaccaacaaaggtttcgcctcccggatcggttttggtctgggtacgcttgtgcgtttctgcctgcatgatcgtcggcctgcagtgcgctgggtcaagcgaacctgcctggtcgtggtgctgttcgttatctttgctcagaactttacctggctggccagcgctttcatgactttgatgtcgtttggactgatcggatttgctttagtaaaaggggatgtgaagttaatgtcagctaatcgtgatgaagataaggcaagcttatttgatcacgataatggctaccgtgatggtctatctggctatggtcattatattaatggtatgcgtgtcgatgagtga

SEQ ID NO: 334687 - DNA, 3267 bp, Pseudomonas aeruginosa
atgcccaaaggactgaaacgcgctgtcagcgccctgctgatcaccttcctcgtctattgcctgctgggcttcctgctcatacccggcatcgggctgcgcgtcgccaaccagcaactggcgcaatacgccaccgtccccgcacgtctcgaacgtatcgaattcaaccccttcagcctggaattgaccctctggggtctgcgcctgggcgacgagaagaacccccagctggccttccgccggctgtacgccaacctgcagctggacagcctgtggaaacgccagctgcacctggccgacgtcgagctggaaggtccgcataccgaactgctgttcgacgagaagggccagctcaacctggccagcctgttcaggatcccgccgagcgaatcgcccgagccggaacagccgagcgacccgttcccgctgcgcatcgaccgcatccaactggccgagggcagcctgcacttccaggacctgcgaccgagcgagccggtggacttcagcttcgatccgctgggcttcgagctgcacaacctcagcaccctgcccgacgacggcgcgaagatgaccctggtcgccaccggcccgaacggcggccgcctcgactgggaaggcgacctgaccctggtgccgatcacgtccaggggccacctgagcgtcaaggatatccagctcaaggcctggtggccctatgtccgcgacaatgccccgctggtgctggagaacggcgtggtcagcctctccagcgactatcgcctggacctgtccaaggacacccaactgctgctcgacaaagccgcgctgaaactcgccgacttcagcatcaattcgccccagggcaagccgctggccaagctcgccagcctcgacgtggccgctaccaccctggacctggccaagcaggaagtggtgctcggcgaagtccgcagccagggcctggaggcctgggccgcgcgcgagaaggacggccagctagactggcagaaactgttcgccgacttcactccgccgccacgcaaggcgcctgcgcccaagccggcggaaaacaccgatcccgccgctgccccggccgacgcggcgcagaccacccgcgaaccggcaaccgacggtgccgccaaggcagccgcgatagcctcgggcgacgcgggcaaggacaggcctgcggagaaggacgccagcgtcgccgagacggaaagggcaacggacgacaaagagtccgccaaggtcgcggaaggcactgccgacaaggtagccaagcaagagacgagcaaggctccgaagaccggcaaggcaaccgggcaggaaacggccaagactgcggagatcgacaaggcggccaacgacaagccgcaacagctcgccggcactgcaaagacgcctccgccggaaagtacgaaagccgccgcggagacgcccgccaagccctggcacatcgtcctgcgcgacgcccagctgcgcggctacaaggcgcacctggtggatcgccagccggccaccgaggtcccgctggaagtcggcccgctggacctcgacctgcagaacgtcgacagcctcggcaagacccccttcgacctcaagctcaagaccggcctcggcaaccgcggccaggtccaggccagcggccaggtggtgctcgacccggtcagcgccaggctcaaggtcagtacccgcgacatcgacctgcgcgtggcccaggcctacatctcgccgttcatccgcctggaactgcgcagcggcttccttggcagcgagctggcggtcgacctgaagagcgtcgagccgctggccttcagcgtcgacggcagcgccgaagtcagccagttgcataccttggataccatcaaggaccgcgacttcgtcaaatggaccaagctgaccctcaacggcctcgcctaccgacacgaggacagcctgtcgatccagagcgtgtccttcgaggagccctacgcccgcttcatcatcaacgaagatcgcagcaccaacgtcagcgagctgatcatcccgcaaccggctagttcgtccggcaaggccgccgccgaaagcaagaacgcgccggcgagcaagccgctgggcatccacatcggcggcgtacggatcaacaacggctcggcgaacttcgccgacctgactctgatgccgccgttcggtaccgccatccagcagctcagcggcgaagtcggcaccctcgacacgcgcaactcgcagccggccaaggtggacatcaagggcaaggtcgacaagtacgcaccggtgaccatcgccggcgaactggacccattcgacccgctgaagaagctcgacatcaccaccagcttcaagcgcgtcgagctgaccaccctgacgccctattccggcaagttcgccggctaccgcatccgcaaggggcgactcaacctggacctgcactaccagatcgaacgcagccaactgaaggcggaaaacaaggtcctgctggaaggcctgcaactcggcgagaaggtcgacagcccggatgccgtggacctgccggtgaagctggcggtagccctgctcaaggacaccaagggcaacatcgatatccagttgccggtggccggtgatctgaacaacccggagttcagcgtcatgccgatcgtctggcagaccctgcgcaacctggtcctgcgcgccgtgcaggcgccgttcaagttcatcgccggcctcgccgccggcggtaacgaggatctcggcacggtacccttcgccgcgggcagcgacgagctgacgccggaagcccaggccaacctcgacaagctcgccgatgcgctcaaggagcggccggcgctgcgcctggaagtggaaggcgtggcctccgccgcggctgacggtccctcgatcggcgccaagcgtctcgaactggaataccagaacacctactaccgcatgctccagcgtcgcggcgacaaggtcccgagcgacgccaagcaactcgaggtaccggagaacatgcaggcaccgctgctcgaaggcatctaccggacccgcctgaagcagcagccaccagccgagtggaaagaactggacagcgacgaacgcaccgcgaagatgcgcgaagcggtgatcgcttcctgggccaagagccaggtgctgctgcgccagatcggccaggcccgggccacccggatcaaggattacctggtggagaaaggccagttgccggacgatcgcatctacttgatcgacgtcagtttcgccgaaggcgaagtcaagggtaatgtcgacacccaattgcacctggatagcgagtga

SEQ ID NO: 334688 - DNA, 489 bp, Pseudomonas aeruginosa
atgatccagcgcgtctacgtggcgctgggcagcaacctggccgaaccgcgcgagcagatccaggctgccctcgatgccttcgagcggcttcccgagacccgcctggtcgccgtctcgccgctctatgtcagcgacccgctcggccccgccgaccagccgcgcttcgtcaacggcgtggcggccctcgacaccaccctggcgccgctcgacctgctcgacgccctgcaggccatcgaactggaacaggggcgcgtccgcgacctgcgctggggtccgcgcacgctcgacctggacatcctgctgttcggcgaacaattgctcgacctgccgcgcctgaaggtgccgcactaccacatgcaggcgcgcgctttcgtgctctatcccctcgccgatctcgcccccgacctgcgcctgcccgatggccgccacctgccggagctgctcgcggcctgtccgttcgagggcatcgaacgccttccgggcgcctga

SEQ ID NO: 334689 - DNA, 2499 bp, Pseudomonas aeruginosa
atgcgtcaaagggacctgaaattcaccttcgtcgtcggcgaagggaaactcgcgttcgatgtcgtcgagttcgaactggaagaagcgctctgcgagcctttccgcctgaacctgaagctggccagcgacaagaacgccatcgatttcaagcaggtactcgaccagccgggcaccttcaccctctggcaggacggccgtccggcccgctacgtccatggcatcgtcagccacttcacccagggcagctcgggttttcgccggacccgctacgaactgctgctggagccgcagttggcgcgcctggagctgtgctgcaactggcggatattccaggagaagagtgttccggagattctccaggcgctgctcaaggaacaccgggtgctcgactacgaacagcgcatctaccatgagcacctgccgcgcgaatactgcgtgcaggccggcgacagcgatcactacctgcacgaccggctagccttcgaggaaggcctggtctactacttccgcttcgacgaacaccgccacaccctggtctgcagcgaccggctctacgtccaggagcgtatcgccggcggcccggtactgttcagcgcccagccggagggcgacaacccacagccggtgcttcattctttccgctacagcgaaaatgttcgtacggctcgacagacccagcgggactacagcttcaagcgcccgacctacgaccaggagcatcatctcgctggcgaggcgctcgagcatcagggctcgtcctacgagcgctacgactaccccggtcgctacaagcagagcggcgccggccggcctttcagcgaaagccgcctcagagggcaccggcgcgatgcgcgggtggcatcggtcagcggcgacgacccgcggctgatcccgggccacgcctttgccctggaaggtcatccgcgtgccgacttcaacgcctggtggcggccggtacgggtggtccatcgcggcacccagtatgccggccaggaggaagagtccgccgacgcccctctgggggtgagctacgacctgcgcgccgaactggtgcccgaggacgtcgaatggcgtcccgcaccgctgcctcggccgcgtatcgatggtccgcagatcgcgacggtagtcggcccggtaggggaagagatccattgcgacgagtgggggcgggtgaaagtccagttcccctgggatcgcgagggacgtcacgatgaattcagtacctgctggatacgggtcgcgcagaactgggcaggtgccgactgggggcacatggcgatcccgcggattggccaggaggtgatcgtcgattacctggacggcgactgcgaccagccgatcatcaacgggcgtacctaccgggcgaccaaccggccgccctacgcgctgcccgaccacaagatcctcagcaccatcaagagcaaggagtacaagggcagccgggccaacgagctgcgcatcgacgacaccacggcgcagatcagtgcggcgctgatgagcgaccacggtgccagcgcgctgcacctgggctacctgacccatcctcggcccgaaggcggcaagccacgcggcgagggcttcgaactgcgcaccgacgaacatggcgcggtgcgtgcggccaaggggctgctgctgagcaccgaggagcagctcagggccggcgccggccatctcgaccgaggcgtcgtggtgcaggtgctggaggcggcgctggagctggcccgcgagctgggcgactacgccggggagcaccagggcgtggggcacgacgcggcgccgcagcaaaccctccaggaagccgtgcgcgacctcggccacggtgccaacgacgagtccggcaagagcaacggaggcaagccggcgatcgccttgagcggtccggcagggatcgccgcggcgacgccggcgagcctgaccctggccgccggcgagcacgtcgacagcgtggcccggcagaaccagcaggtgaccgccgggcagaaggtggtgatcaacgccggcagcgacatcggcctgttcgcccagggcggcgagctgcgccagatcacccaccaggggccgatgctgctgcaggcgcagaagaacgacatccgcctggaagccgagcagagcgtggaggtcagcgccagccagcagcacgtgctggtcaccgcgaaggagcacatcaccctgatgtgcggcggcgcctacctgaccctcaagggcggcaacatcgagctgggcatgcccggcaacttcgtggtcaaggcggcgaagcacagtcatgtcggtcctgcctatgcgtctacggccttcaactcttggtccggagcaccgttcgatcagcgcgtacgtgttgtgcgtggaggtagaccgcttcccaactatcgttatgcgcttgtgtatagcgatggggcaagggtagagggcgttaccgacaaggacggctggacagcgctgcagcaaggactgacttcggagggatatgagatcgagttgctagggccggcagaggtctga

SEQ ID NO: 334690 - DNA, 231 bp, Pseudomonas aeruginosa; identical to SEQ ID NO: 85382

SEQ ID NO: 334691 - DNA, 744 bp, Pseudomonas aeruginosa; identical to SEQ ID NO: 187399

SEQ ID NO: 334692 - DNA, 711 bp, Pseudomonas aeruginosa
atgagtgatgatatcgcgagctatgcaggtaaactcgggatgcaaataaaacgtcgcaacgttttagttgagggcacatcagacgtcgctttaatacatctcgttggccagcttgaaaagcagcgctccggattggattttttggaggacctagcatttctagctgctggagaaagagaacagggtggagtggacgggcttcttagagagttgataacttttagaagcctaggtcgaaacgtgatggacgccaatgggaagcagatctatagattcgtagggctatttgataatgatcatgctggtcggagggcaatcgcgacagcaaaaagtgtaggtggtttgttagagtatagagatgtattccggcttatgcctattatgccactacccgggaatctagaccaaaaaacagtcgaagctgcatttaaaaagaataatgaatcttacagggggatggattgggagattgaagatttaatatccgaagagctagcacttgcatttattgaagaatttgggggagcggtaaaaaccaacatagcgaaagcagataaaacacatcgcgaatttaccaaagatggaaaggctaaatttcatcggtacattaaggaaaatgctatacgacaggatttagaagaggttttgaaattgatttctgcgttgcggtactacttcaatttgcctattcctaattcccaccatacctaa

SEQ ID NO: 334693 - DNA, 3261 bp, Pseudomonas aeruginosa
atgagcggcttcaaggttatcgaacaaaagaatatatcagattcgcttgtttcgagtattgagactcgcgatgttgctctctggatcagagagctaggcgatattgaatctactgatccgataattgcctttgcaagcttgccgtggcgcgcgatctttattgagaattacaatgctaatttagttagcgcgctagaaaacgcttccgattttgattctatagaaacaagaaggcgaggatttgtacagataatcgataacgatccaacggcctctcaattgcctcatcgttgcctgccggtatatctgctgaacggcaaaaatgaagctaacgcaaccgatttcaaaagtagactgcgacacctgtccatgctgaacgtcttacaagagtctcaagtaagaagtgtcgtcgtgataggtgacggtgaagatatcatacctccgtcacttacagagctttggaaagctggtttccagtcttacttaactgtttgcagtcagcgccaagacgcaactgatttacttacaaaatgggtggaaagtcactcgcgtgcaaaagtcgtaaacttattatctttagatataactagcgcagccatcgaaaccgtctccaagtatcggcagacgtatcctgagcatgcaacaattgtaagaatgaaagataggaggggggatttcaaaaatatcgacctatcatttgtcgatgatttgcaacgtccaattacagaaaactataaattaattcagcttcaagatctctccccgttgctcccggaagagctagctgaaaaagattttatcgaattttttcaaaatacagactcttcatggagaccgtacagagccggtttaccgtggatcaaggataaaacttcaggaaaaaaacttctttctttagttagccggcttgataccgttggggctgatgaaaactgcatcgcttatataacagcagaatcaggagccggcgggactacatgtgctcacgctctcggctgggagttggctagcaaaggttatcctgtccttgtcgctaagcaatttccgtttattccagatgcacttagtatctcaaattttttaacgagggctcatcaagctttttctgcagatcatggagaagagtctgagccaattgggatagagtcttcaaaagggtcagggtcaaaaaaatatgaaacaccttggatcataatttttgacgttattcattggcaagggcgcgacggagaactattaagattcaatcaagaattgatcaagtctggcagaccagtatgcacgctcatagtaagtagccctgtggttggattggcattctatacctctcctacatttaagcgtatagctgaactgaatcatgcactcgatgaacgaagcacgcttgaacttggtcagcacttaaatcgctatcttaaagtttacgggaaagctagaagtcaaagccagtggaatagtttctaccgagctcacagcattgagaatctggaaggtcttgcatcattctgggtcatactttccttctggattcaaggagaatatgacttaaacgagtcgatccaatcatggatgttcagaaaattctgtgagaatactgaaagtaaaaatatccgcctggcagtgttagaaattgcagcactgagttctgaaagaataccgatgcctgagggcttgctactaaaatccgatagtgaatggccaatgtcacatcttctagaggaccgaagaacagaattggcgtcgctagggctagtaaaggttgcagctaatggagagcgctattgggcattaattcatgacatattgggtcgttatttaattaatgctcttttttttgataacgaaaagcgcaatgatctgggcttttccgaagcccgcgatgcagagcatttaagattcttactactggaaagagtttctaagaagcctcaacttggagagattcgctatcgagccgtgggcgaagatttcgcaaaatcgatatttaaaattgaccctgcacatggccgcgcaaattttatgtttttttggcgatcagttctcaaagccttagacaatatgccagcgggccttaagaatacaagtcgtgtatttcgtcaccatagcgccatctcacgtcggcgtattgcgaagtttgacgaaaaagcaaatcttgtcactccgaacgaacgaaagtcgttgctcaatgcggccatcgtagatatccgctacgcattagaatttattcaatttgaatcaggatctgagcctgacattaatctttataactctttagcaaacgcttacttagattttgccaagattgaagctgcgcaaggtgcatctagagatatagttcttgagtatatgcaagcggcaagccaggcaactcgaaaggcatacgaacaaaatccgagcagtccctttgttatggaaacttatgttaagcacttgctggaggaaacatcattagaagctccagataaagcaatcgctcactgcatcgaagtgttgggggtcatattttccgcgctcacatctaatgcgcacactgctcgaaacatgcaatggcaaggccttgccgatgaagcaataaaaaaattatttaacctcacacctctagactccctttcggctgatcccgtaaacagtacagacttactaataaatgcatggaaactcttggccggcggaagcgaaagcggccaattggacttggcgaatgcgagtaccacccaacaaaatgccgcgcttaaaatgttggaccatcctataggaagaggtaacattcaagttttacgattaaagtacgagcttgtatgcattacatctccgtttgatttcaaaaaacaactagagctagttgaggaggtggtcttatctacatatcaagagcctttgcagataaggctagagtatgccattcttttatttcaagaaaatagacctgtcgaagctgataaaatattccgtggcttacggcaactttggagaactactgagcattatgtccaagtgccatcgagactcaggtggctccgtgtaccaggaactgaaaatcttcaagtggtccatgccgtcgcaggatccgattacgagcgtcgcgggctagctactgttaaggaatttgtcaatataggcgtgccttttagggttgaggagttcggatatcggcagctccgccccgggatgcagtttgttgctcaggtatcgtttggacataatggtccgtttttacgtcctgttttggtagcaaactctcaagaagagctcgggatatga

SEQ ID NO: 334694 - DNA, 2427 bp, Pseudomonas aeruginosa
atgttcaacccggccaaccagacccacttcagcctcagcctcgacggcctccgtcacgacctgcaggttctcgaattcagcggccacgaaggcatcagccggccctaccgcttcgaactcgaactggtcagcgagcgcgccggcctcgacctcgaagcgctcatgcaccgacccgccttcctcgccttcaccccgcagggccagggcgtccacgggctggtctacggcgccgcccaggccgacgcgggcaagcgcctgacccgctatcgcctcaccctcgtgccgcaactggcctacctcgcgcagcgcagcaaccagcggatcttccagcacctcacggtgccgcagatcgtcgccctggtcctcgaggagcacggcatcctcgccgacgcctaccgcttccagctcggcacccggtatcccgagcgcgaatactgcgtgcagtacgacgaaagcgacctgcatttcgtccagcgcctctgtgccgaagagggcatccatttccatttccggcacagcgccgaggcgcacctgctggtgttcggcgacgaccagacggtgttcccccgcctgggccgtcccaccgcctacgtgcacgacagcgggctggtcgccgacgaaccggtgatcaagcgcttcagcctgcgcctggccagccgcaccacgcgcaccactcgccgcgactacgacttcgagaagccgcggctgctgctggaggccggcaatcgccccgctgccgacgccccggccgagccggacctggaggactacgactaccccggtcgcttcgtcgatcgccagcgcggcaagctgctcagccagcgcgccctggagcggcaccgcgccgaccggcgcctgggcgaaggggtcagcgaccagccgctgctggtcagcgggcacttcctggagatcgccgagcacccgcgcgcggagtggaacgacctgtggctgctcagcgaagtcttccacgaaggcaagcagccgcaggtgctggaagagaacgttacctccgacacgtcggccagcacggacgacttccagcagggctaccgcaaccgcttcctcgccacgccctgggaggtgttcttccgcccgccgctggagcacccgaagccgcgcgtgctgggcagccagaccgcggtggtgaccggcccgccaggcgaggaaatccactgcgaccgctacggccgggtcagggtgcagttccactgggaccgcgagggccagggcgacgacaagagcagttgctggctacgcgtagccagcggttgggccggcaacggctatggcggcatcgtcattccgcgggtcggcatggaagtgctggtggacttcctcgaaggcgatcccgaccagccgctggtcagcggctgcgtctaccacgccgcccacccggtgccctacgagttgccggcgaaccagacccgcagcgtcttcaagagcctcagcagccctggcggcggcggctacaacgagctgcgcatcgaggatcgcaagggccaggaacagatcttcgtccatgcccagcgcgactgggacgagaacatcgagcatgaccagaagatccgcgtcggccacgaacgccacgacaccgtggaggcgaacagctacagcgagttcaaggccgaggagcatcacaccgtgcacggagagcgcaaggtcgagctgaaggccgatgaccacctgacggtcggcgacagccagcacgtgaagctcggtcgtgcctacctggccagggccgggcgcgagatccacctgaaggccgggcagaagatggtgatcgaggctgacagcgaactgacggtgaaggccggcggcagcttcatccggctcgacgcaagcggcatcgccatcagcggcccgctggcacggatcaatgcaggcggcgcgccgggaagcggctcggggatcgcgatcaagatgccgttgacgccgggggcggcggacgccgatgtcgcaggacgcccgctacaacccgccaacgccggtctccacgccagcgatccgaagcagaacggcgaataccgcttcgatatccgtttgcaggatattcccggagacgaaggattccccttgattcatacgccctggcgcatcgtccagggtaaggagcacaacctggtattggaaggcgagagcgacgagaagggacggttggtgctggacgacactcaacagcgtcagctatcgaacgcctgcgagcgtgcgcctggcgatgtctggctggtgtatccggggcaacgaataggcatccgtccgcatcgggagcgtgagggttgggacgccacgcgccacgcgctgggcgcgctggacttccatgacaccctgggcggccagcgcgcgcccaccccgctcgaacaccagcgcggcaagctcgacagttgctgcgaaggcgacctttattcccacctactggccaaggactga

SEQ ID NO: 334695 - DNA, 288 bp, Pseudomonas aeruginosa
gtggacgaggagcgcgaagctgaatcgaagcgggtttcggtgggcgtggatggagtggcgctaatcaaggtcgattggctgctacgcggcattgtccgcgatgaaggcggcatcttcgcccttgttgccaaaagcgccgaggagcctctgcggcgttttgcggcgggcgccactctgcctggcggcgagcgtctggagagcatcactgaacaaggaatccgcttctcgttctcgcaggacgggaacacccagggttttgaaaggaaactgtatgcacccttgccatag

SEQ ID NO: 334696 - DNA, 270 bp, Pseudomonas aeruginosa
atggacggcgtaaaagatagagcccttcaattgatcaagaaggtcggcccaagacgattgagcgatatgggcggcaaaaactatgatcggtggaggaacatcagcagcgagaagatacgcatcagcaccgaggaaatcggcatccttgctcaggcgtttccggagtacgccctttggctagtgagcggtcgcgttgagcctcagaacggccacgtgagccctgactacgaggaagccgatgccaaattagccaaacccagcgcggggtag

SEQ ID NO: 334697 - DNA, 201 bp, Pseudomonas aeruginosa
gtgcggatggcctcgacctcgccactcaaccgccctaccttgatcgccgaaatcctcaaaaccagtcctagcgggtcgattttgccaacactgcacgacgtgcaaattcacggtgtgaggaccaatgcactgctcatcaccggcattgagttcatcgacggcgtggcctactcacaattctggcattgccgagtgacgtga

SEQ ID NO: 334698 - DNA, 699 bp, Pseudomonas aeruginosa
atgaaagcagactgggacgatgccccgcagcacctcaagcgcaaacaccaaagcgctggaaagtgggtggtggccgttaccatcggtgtcgctttcaccgccctggccatctacgtggccgatcacaagctccagttttcacctgagccgccaattactcaggcgcccccggcagaaagctatacgccgaaatacgagttcagcgagcccaccggccagcccgccgcgacaccagagcaactgttctgggatgacgtaaacgagcgcaaccaccaacagacccagccaaagcaaaccgtctacaacgacaccaactacgtccccaagggggctacaaatgtcgttgacatggaggccgtgcgccaatccgaggcgtaccgaaatcccaccgccgcttcgagtagatcggcccataacaacatcgagcaatcaggtgcttgggtcgacaaatggagcggcggcgcgcattactacgccgcgtggacggtatttaataattacattgacgacacttcggtatgcgctaatcacaaacgtggatcaattgactaccgcgaatgcagaaagggagcgaagcaattcttcaaagaagaatgccggtcatgggacggtagatggcaaagcgaccgaaagccccgcagtgacgtcctaagacaacgttactgctctgccgctagcagcttcaaccctatgggttga

SEQ ID NO: 334699 - DNA, 828 bp, Pseudomonas aeruginosa
atgcacggaagtataaagataccattcgaactctactatcaaagtggagagagaaattttagcgatctggacttctattacggtaccgactctatgggtggtgccgccgaagcaattgcaattgcaacgcatgcaattatccacgatgaagttgttactcaaacaccatcagttaaaggattcggcttaaacttcaaaaactcttccccaggatcgttccggcaaaaatttgaaattgagtttaccggcgcaatagcaattagcactctcaaagccatgggggtcccagcatacatcgagacactgactctacttctaggaatcccgatgggaggaacaacaaagtcagatcgccgcaaaacaatgaaatggctaaatggcatggacgacctggacaagttgctggaacgcctatatcgccctcttgttcgaattcaccaccctgtgagcgggcaaggctacaaggtcactctaaagaaagcacaaaccaaaatacttacatttgacagcttgagtcataaatacatgactgaagacataaaagacccaaaagaaaagacaattaccgtggcagtgagtcgtttcaacggtcgacgttgcaccgggagattcattgaccgacacgatgcagagtcaattagcttctcgccaaaaatggtcaagggaaagccacagatcagtaaaaaagaaatgaaccttcttgctgaaagcctcaccggggtagtcaacgaccaatttctacctatccaggctgatgtgacagaagtacgctcttatgatgagcgtgtaaaacactacattttgcatcgcgtctatgaaaaagtttag

SEQ ID NO: 334700 - DNA, 735 bp, Pseudomonas aeruginosa
atgaaaaagtttagccctgttattttagctgccgcattcctcgcgttagtgtgggcgatttactacgcaaactttggcggagcaccttcgaaaaaccctggcaactggggggttttcggcgactacacaggaggggttctaaatccgttactcaactttataaccatataccttttaataaagagtttgaactttcaagaaaaacaaatagaaatcgctcgatcagaagcagaagaggcgcgaaatgacttggcagaagcgagaagaaacgaggcacttcggtcatacgagagctcgctcctgacctttgcccaagttgcaattgacgaatataagtcattttctttgcctgggccagacggttcaatactcaagggtggacaggcagtatcccacttacaaaactcattactatccactgaacgcagcaaggaagagtttgacaaactgataaatgaaattgaccagaacaaccacgaatgcatttattcgttgactaggtcgttctgcgccttattcaaactgactatcgacatttgccctgagcaagagcgaggacgatatatcgacatgatcagcttaataattcccacaaaagctcaattcttgctattcatggtggaagcgtatagcgattggagaatactagaacaccctaggaaattaggattctttgagcgagaagccaacagggatgctgtgaacgcaatgaaatccttgattacagtaaaatag

SEQ ID NO: 334701 - DNA, 684 bp, Pseudomonas aeruginosa
atggattttgaaggaagctcaccagatcactttgagtatatttcgcacagagcgagatattttgagtacgaatatagaagaaggaagcaaacttacactatcgttttggtgtctatgttcttgcttactttgattttttcggttctatttttgcttcctcctgttcaagggattttatcaaaaaaggaacaactcctagctgctcaagttgaaggtataaagaaaatacctgacattgaaagcaagttggagaagctgcagagccaaattcagttgctgacaacggaatctatagatactaggcttactaaggttgaaactgcaattgggtctggcagtgtaaaggctgaccaagtaaagtctttttggcagcttgcaaaggaaattgatactctcaaagggtatatgtttaaagaccctaaggaacttgtcgagctcaaagagctgcagaagaattatagttctcttgcttcaacgacagagctttatgcaacgaaggaaagtgtgaattctcaaatttccacgattcaaacgatacttgggatttcccttggtttctttggcttgcttttcactgtcgtcttcggttcttggtggtttatcggaaggaagccccaggttgtggaggttcctactcgatctgttcatcgccctttgagcgccactgaagaacacggggaataa

SEQ ID NO: 334702 - DNA, 1416 bp, Pseudomonas aeruginosa
atgctctgggcttgcattctcctgccgcaactggccatggacagcgcgctgcgtcaacggaacaatcccgacgcaccgctggcgctgctcggcggcccagcgcagcgccggcagttgcaggcggtcaacccagcggcacgcgcgctcggcctgaggcccggtcaatcgctgatcgccgcccaggccctgagccgggacttcgccacggcggaatacgacctcgccgccgtggagcgctggcaggccttcctcgccgcctgggcctacggtttcagctcgcaggtcagcctgcactatccgcgcgcgctgctgctggaagtgcagtccagccttgccctgttcggcccctggccacgcttcgaggcccgcttgcgcaaggaactcacggcgctgggcttccgccatcgcctgtgcctggcgccgaacccggtggcggcgagggtcctggcgaacagccacgacggcctggccatcgaggacgagacagcgctgcaacgccagttgtccgcccttccgctggaccgcctgggactctcgcgggagctggccgtcgccctcggacgcatgggactgcgccatctgcgccaggtcctcgagttgccgcgcgccgccctggcccgtcgcttcccggccgaactgctgttgcacatcgaccgcctctgcggccgcagcccgctggcgctggagcactaccggccgccggacaccttcgacctgcgcatcgaactcaatttcgacgtggaatcgcaccaggccctgctcttccccctgcgacggctgagcgccgatctcgccgcctttctcgccggacgcgacagcggcgtgcagcgcttcaccctgcatctggagcatcacgggcgcgccgacagccaggtcacggtcggcctgctcagcgccgaacgcgaggcggccatgctcttcgaactgacccgcggccgtctcgaacagctgcaactgcccgcccccgtgcatgccgtgcgcctggaggcccgcgagctgcctcctttcacgccgcagcaccgcgaactgttcgacgagcgcccacagcagtatctcggctgggaacagttgcgggaacgcctgcgcgcgcggctgggcgacgaggcggtacagggcctgagcgccgtcgccgaacaccgtccggagcgaagctggcggccgcacagctgcgacagggcgcaatcgccggcagcctgcggcctccgacccggctggctgctggcggagccacgccccctcggcgaggccttgcccaccgtgctggccggcccggagcggatcgagtcgggctggtgggatggcgaagacatccgccgcgactattacctggtggaaacccgcagcggacaacgtgcctgggtctatcgcgaggtgggcagcgaagggccgctgtggctgcatggctggttcgcatga

SEQ ID NO: 334703 - DNA, 270 bp, Pseudomonas aeruginosa
atgactgtttccgaagttgccgccctcaactaccgcgatgcgcgcctgcggcttgaggcgtgcggctaccgctacgtagggcgctactaccctccgcttgatggtgccctccctggcaaggctgagcaggtggacggactcccttgtcgccggctcagcatcgacacgctggtgcttgaagcgcagagcgttctggtgggggggcgctccgcgcagatgccacagctggcttgcttcaaggctgtcgcagccccggcgtccaggcgctga

SEQ ID NO: 334704 - DNA, 249 bp, Pseudomonas aeruginosa
atgacgattaacgataccctccttattgacgaggtgtccgcagatgtgccggtattggatgcctccaataccgggcatcctggtgtagtgcactcccctaattacgaccatgcccaatgggagcgagtacagcgcgttttaagtcaatccgatggtagggacgagcatcacaagagcggccaggcgaacgcatatagcactacgttgtgtgcagacttccgacacattcatagcaagcgagacagataa

SEQ ID NO: 334705 - DNA, 339 bp, Pseudomonas aeruginosa
atgagccaagccaaaacagctgttgcccaggagctgcgagttgatccgaaatgggcaaaaatggacccgacgtggctgattgaatacctccgcgaggagacccggctcgacgcgaaccaggtcgagcagatgctacttttcgcgattgagcagtccaagacagcaacggctggtctggacacccagcgatctgtcgcggagcagcgagacgcactctatttggcgctgaagcatctggtggcggcaacaacaccggatgcgcgcggttctttgggtacacacgacgaacaggcagcagcgcttcacgacgctcgcgctgctttggccttaatgaaatag

SEQ ID NO: 334706 - DNA, 213 bp, Pseudomonas aeruginosa
atgataactgcccccgacaccctgactctcaccttggatgcgcagaccgtagccgcgctgctggaataccggcgggcccaggcggcctttgatgtcctgggccacgcagaccctgacgaggaacgcggcgctgatctgttcttcaaagcggagacggctgccgaacggctgggcaaactggtcgccgccctggccccggccgacttcgcataa

SEQ ID NO: 334707 - DNA, 201 bp, Pseudomonas aeruginosa
atgaccaccaaagtacgcgcgcaagagcggatcaaacgaattgctgatgcgaagtccgagcgagacgcggaccacttcgagtctgaggctatgggctatctggcagccctgctagatgaaggccttctgccccaggacgaccacgctcgtatgatgaacgcgcttcgcacccagcgcctggcttggcgaaagtcggcctga

SEQ ID NO: 334708 - DNA, 210 bp, Pseudomonas aeruginosa
atgcccatgcgagccccgtggagcgacgaagatcaacctgatggcagcatcctcatctgcctagatggcgagccacgcttcaccctcaagcgtgctgataatccgaccatgtattgggaagtgagaagattcggcgaagctgaagtcatcggctgcgatcaatacagagcagacctttacacccgtatctgcctgggccggatcaagtaa

SEQ ID NO: 334709 - DNA, 354 bp, Pseudomonas aeruginosa
atggaagaacttcctgaccgttccaagagtgacaacgagcccatcgccctttcggtaatttccgaccgggaggtccgggcggcaatcaagaaaatccaagaaggcgcggccagctacttgtattttctcaacaatgagggaatcccgaagggaaccgcccaagatatcgcctcgtgcctggagttcgagatgaagaagctcggcgaggcccttgggatttccaccgaggcggctgcggttctggagcaacgccatggtgagatccgccgcgcgaacctacgtatccacgaactggaggcttgctggggactcagcaagatcctaaagcgatacaggctgccttgtgcgcgttga

SEQ ID NO: 334710 - DNA, 147 bp, Pseudomonas aeruginosa
atgaaaattatcataaagcagcatgataaagaaaggatgagtcgtgagtttaaaggggcgggagtggacctttgggaggtgtatcagggggaggtacaagcgataaagtataaggagtccttggaagaaagaacgaaggaaagctga

SEQ ID NO: 334711 - DNA, 828 bp, Pseudomonas aeruginosa
atgagcaatctgcaggggttaggcacagggctatccaaagctgcgcttttgttcgaaccttatgagcgccaagcacgcctatatccagcttttctctgtatcttgccgctcgtggtcatggccatcacgctatacggcaatcaattgctcgatatgaaagggatcttcgcgcttgcgggaggagcgggcttgatgtacctcctagccgacatcgtgcgtagtaagggtaaggaaaaggagaaagctctctggcaggaatggggcggcgcccctagcatccagatcctacgtcaccgagatggtgtcttagattcagtatctaagggacggtaccacgaaatcctagcgtcaaagatcaaagtgaaattcccgactaaggaggcagaggctgcggatccggcagcagcagatgccgtctatgcggcagcaggcaactggcttcgggaggccacgcgcgataagaaaaggttcgacttactgttccgagccaacgtgacctacggctatcgcagaaatggttttggtgtgcgttggctcggccttctgatcagcttgggggtcgtgggctgggttgtagttcggctaggcttcagttcctgggagcagagactgagtgctgctgctaccccagaagcgctcttgggggccggcgaagttgcctcgcttggagcggctctactcatggctctcatctgggtcttctacttttcaaagtcccgcgtacatgaagctgcatactcatacgcttgccgtctcattttggcatgcgaggctcttcctctccgcgtaactacaaaagctgccaaaagagagacggcatctaaatag

SEQ ID NO: 334712 - DNA, 1086 bp, Pseudomonas aeruginosa
atgggcaaaggaatggcagaaggtatagagattgattttttacctgtaggcaacggagagcacagcggagacgcaatcgctattcgttggcgtgagggagatgtgtttcgcgtgctggtttatgacggtggtactcaagagtatggtgccgcattggttgagcacatccagaagcactttgacaccaaccacgtcgactacctagttaactctcacccggacaacgaccatgctggagggttaacgcatatagtggagaccctttctgtaggagaggtgtggatgcatcgcccttgggagtacagtagcgagattcgccactacttccatgatgggcgcattactgacgacagcctagctgaacgcttgaaaagcaaaatgacggctgcttttcgcttggaagaagctgctctgcagagaaagatccctatctttgagcctttcgcgggtagtcgaattggaatttttcaagtgctgtcacccactcgggagcgatatgttcacgaccttattcccgcattcgagaagtcccctgagctaaaggtggagagtgcaatggaggcagtcttggacttcggccgtaaagccattcaactcatcgcaggtgcttgggacattgaatatttgcccgatagcgtcactacgagtgccgagaacgagagtagcgccattttgtttgggatcaatggggggcgcggctatttgctgaccggtgatgccggagttgagtcactcaaggctgcagctgagttcgccactggccagggcatcaatcttccgtctgccgttaatttcgtacagatcccacatcacggaggccgtcacaatgtgtccactgacgcattaaatttgattgttggagaacctgtgccagagagtcactcgccacagcggagagcttatgtctcagcttcgaaaaaagcaccaactcatcccaagcgtgtggtcacaaacgcgttcattcgccgcggcttcaagattggccaaacgaagggtgttgccatccgccaccaccgtaacatgcctgcaagaaatggctacggagtgatgacctatgttcctttccattatgaggttgaagaatga

SEQ ID NO: 334713 - DNA, 2265 bp, Pseudomonas aeruginosa
atgatcgagtacttcgattggggaagtcctctcaacaggacagatgctgagcgatcattgagtccgctagcccagtcattgctgaaggcttgcgagaataacccctacatcgaagtaattgagctgcgtgcaggggaggatttgggccctgtagaggcgatcatcattgatgcctgcgatggaactgttccgcgagcgaatcccggcggcatccatcgcaatgagcgacttgccatcacagtaggacacagtgatggcctccgcatgcccgtgatcgtgcgcccactgcgtaaggactttcccgccctatctcaccagcatccgacacctcctgatgctcctcgtgcattgtgcctctacaacattgcgtggagtgcagtggagcgcacatggacagctgagcggttcctttccaggcttttctggtggctgcgtgaatctgctgcgctgaagcttcatcgtgaagatcagcctttggagcagctcttctatatgagcccttatcaggtactgctccctgccaacttttcagagcttgccggtcgcaatggtagctgcgtcattaagttggtggcgggagatttcagcggttcgacaacactccgtgttacgcctacctcttcagcgaagattgccaaacaggagttgcgtggctacagattgctatcgcttgctgttgatggggttggttcatccgcggtgctggagttccctcagacacttggccagttgcatgagcgtttaggtacttgggggagcaatctagctatcaatttatacgaaaccttagttaacgggatccctaccaatggcctctccgcgttatcggagacgaagcatgagggactgttaatcgtcgtctggattccgcgactccgagatggccaggtggagcgatatgatgctctggggtacctggttatgagctctttctttgagcttgccaaagcatgcggagtgatctcgcatcctgacgcagacgggcgatattttcattcgccattgataggtctaccggcgggtgaaatgccggcatccgattggctctccactgcattaattccggtcgaagtgcgcattgcactagatgcagaaagagcccgaaaaatttccgcactggatccagcaacagcagacttcaaaggcgtgctggctggggctggggcactgggtagtatgctagccgatatttggactcggcaagcatggggagagtgggtatatgtcgatccagatcaatttttaccccataacctagcccgccatgttggcttcgatgatcagcttggatacagcaaggttgactccgtgcaggcattggcacgaagcgtctatccaaacgagcatgtacctgtagctatctcgaaaagcatcgttgatcaggatgaggtggttctggcggcgattgcaaatgcgagccttcttgttgatgtaactactacatttagtgcacctagagagctagcccaacgagacaatgtgccgagaacagccagcctgttccttactccatcgggtggggcgtgcgtcttactgcttgaggatgccgatagagcgatacgaacccctgcattagaggggcagtattacagggccattcttggggaggactggggggcgcaccatcttgacaatcattatggcgatatgtgggttggcggagggtgtcgtgatatttccgtttgcttgcctgtcgagcgtgttcacctgcacgcagggatcctttctcgtcagcttaggcaaagcctcctagcgccctgtgctagggcctgcgtgtggagcatcgacgagcggtctgattcggtaacagcctcagaaattgagcttcaacctgtacatgtggcacaggtcaatgggtggtcgattatctatgacgatggtctgattgctttgctctgccagctccgtgagcgggctcttccttgcgaaactgggggcattttattaggagtgacagaccttaaaagcaaaaccattgttttggtcgacgctcctcctgcgcctattgatagccaatctagtccgagccactttgtacgtggacgagaaggtcaagaagaagttctaaaagaggtccatcgacgtactgcaaatgtggtggattacgtgggggagtggcattcccaccctcagggatgttctgcaaacgccagcaccgatgaccaaaagcttttggcttcgctttccaacttgatgtccggagaggggctacccgcacttatgctgattatggccgataaagaggtcagtctgcacctagcttga

SEQ ID NO: 334714 - DNA, 1179 bp, Pseudomonas aeruginosa
atgactgcgaaagtaaccttctttcctgtagacaacggggacatgactttagtgcgcttggctgatacccgggtcactacattgctgatcgacatccacatacgccagactgccgacgacccagcagatcctactcccgatgtggcaagcgagctgcgaaagcgtctccagtacgacagcaatggccgcccgtttgtagacgcatttcttctgagccatcccgacaaggatcactgctcgggactgcgcaatcatttctggctgggcgcgccagaggactacccggacgatgaactggagatgacaaagaagcgaatcttgattcgtgagctctggtcgtcaccaatggttttccgtcgggcttcgaagagtcatacgctctgcgatgacgcgaaggcattcaatactgaggctaggcgccgcgtggcctactggcggacttatcggtctgccggggatggcaatcgaattcgcattatgggagaggatgagaatggtaaaaccgatgacctgactccaatcctggtgaaagctggagaaattttcgagcagatcaatggccagtcgactgcaggactcttcaccgcacgactgttggccccctaccccaaacaggatgacgcagagctggaggagacactgtcgaaaaaccattccagtgtgatcctcaatattcacctctcaccgtatcaatgggcagccaatcccactcgctttctcactggaggggatgcggaggtagctatctggaaacggctttgggagaagtatgaactcactcctgaagtattggcatacgacctacttcagacgccccaccactgttcatggcactcgctctcttacgacagttggtcaacctatggcgaggaagcggaggtctgccaggaggctcggaatgctttaggacaggcacgtgagggggcaaccatcgtctctagcagcaagaaaattcttgacgatgatatcgatccgccctgcatccgcgctaagcgagagtacaagtttattcttcagtcggttgatggcagttttctgtgcacgggggatctcaaagggccggagccccttgagcttgaatcgcaatcagatggcacgttggctcgggttattgttggattgggaagcgcagcaggtagcgctgttgccgcagctgcacctcgagcaggccgagcatga

SEQ ID NO: 334715 - DNA, 840 bp, Pseudomonas aeruginosa
atgagtgatatctcgccgcgtgcaggccgctgggggcaggagcgccgccttgagttcatcgacttcaggttgctttgggaggggcgcctcaaccgatctgaccttacgaaattttttaaaatctccattcctcaggcctccttggatctgtcgagataccaggagattgctcctcagaacatggtctacgatcgaacccaaaagacctatgtcgccacggaaaatttcgagccagttctgaatagacctgatagcacccaatatctaaatgagttgctgtggagaaactcaggaacggtagcacatagcgatagcttcgtcggttggttcccgcaggtggatacattgccgttccccacccgaaatgctgacatcaacgtgatgcttgccctactgcgggcaatccaacagcaagcagtgatagtgattgggtaccagtcaatggagcatccactcccagaggatcgacagatattcccaagagcatttgcctttgatggatttcgctggcatctcagggccttctgtttaaaatctgagaaacataaggattttgtcttagggagaatttattcggcaggcgaagttcttgctccgatatctgatatccctgaagataatgattggaatacattcgtcactttagtcatcggtccgaacccaggctactcaaagcctcgaagacaagctattgaacgcgactataaaatggtcaatggtcaggccgttataaaaacgcggcgggcgttacttttctatctaaagaagcggctcaatttaggcatgcccgggcaggaggcggcagataatcagcagattgttttgctcagggaagagtaa

SEQ ID NO: 334716 - DNA, 870 bp, Pseudomonas aeruginosa
atgtcgcctcgggatctacagatcgattggctgaagtgcttcgttgcggcggttgatacgggctctctgtccagcgccgccactgaggtgcaccggtcgcaatccgctgtgagcatgcagctcaagaagctggaggcggcgctcggtcgccaggtgctgagccgggggccacggcatcttgaattgactgaggacgggcagacgctgctgggctacgcccgacggatgctagcgttgcacgccgagacccaggctgccttctggggcgaggagcttaccgggaaaattcgcctgggtgtcgcggaggactatgcggcgcactacctcacgccggtcttgaaacgttttgcaccacggcacggtggcgtcgagatcgagttgagctgcgaacaatcgaccgcgcttatcccccgcgtgatgagtggcgacctggatctggcattggtttcgcgcgacaacccacggcggggcgctttccttttccaggagcccatggtctgggtgggttccgcgcagttcgatctgtggcgacgcgatccattgcccattgcggtctacgagtcggccagcctcgcacgtcgatgcgccgtggattctctggcccggcaaggccgtcgatacaaagtcgtttacaacagttcgagtctggcggggcagatcgctgccgttgagagcggcatcgcggtggcagtactgacacgctgcaccgtgccgacccaccttcagattctggggcgggaacacgatctgggaccgctggagtccatggacgttgccgtctatcgcagcaaggcatcgcagggctccaaggcagtggccagtctcaggagcttcctgattagaacgctttcctcatcaccaactggatga

SEQ ID NO: 334717 - DNA, 606 bp, Pseudomonas aeruginosa
atgcacttcgatacctggatgttctatctgctgacgtgctgtggcatctcggtcgtccccggccccaacgcgctgctcgttctcacccacggcgcgcttcatggcaaccgcaagacgcttttcacgattaccggtggcgtcatcggcttcatcgccatgatcgcgctgtgtgtgctcggcctgggcgcactgctgaaggcatcgatgctctggctgaccgttctgaaggttgtcggtgggctctatctcatctggcttggcgtcaacatctggcgttcggagccagtgaccctctccctgggcgatctttccaactcgagccggtgttcgctatttcgtcaggggctgctgtccgccatttccaaccccaaagcgctgctgctgttcaccgcattcatcacgccctttatcgattcgcagcagaatcttctgctccagacgatagtcatggcactgacctatgcagtggtggagttcgcggtggagttcggtgtagccagcgccgccaatcgcgtgcgcccctggttggcacgagcggggcggcgtttcaatcgagtgtgtggtggattctttgtggcctttggtgcgctactgcctattcgctag

SEQ ID NO: 334718 - DNA, 153 bp, Pseudomonas aeruginosa
atgaacatgcaaaccagcaccgacaggaacctcaatttcgactttgtgcgcaggcaagtcgagcaaccgccagcttgggcctctgaggtcctgctgtcatgggaggaagcctacccccaggaaaagcacgccttccttcaaagccactactga

SEQ ID NO: 334719 - DNA, 1920 bp, Pseudomonas aeruginosa
atgcacctcgtaatcattgaagccccgggcaagctgaaaaagctgaggtcccttctaccctcgattcgtcccgacgtgacctggcaggtcgaggcgacagccggccacatcagagacctacccgttcacgggcaggatccgcagatgctcaccgtcggcgtgggccaggatttcaaaccgcactaccagatcctctcgggcaaggaaaaaaccgtcgcacggctgaaggagctgcggcagaaagccgtggaaatctacgtcgcatcggacccggatcgcgaaggcgaaagcatcggctggcacatcctccaggctgccgggatcaagaactacaagcgcgttgccttcaaggaaatcaccaagtcgtgcatcagcgccgagctcagctcgccgcgccgtctggacctcccgaaggtcgcctcgcaggaatgccgtcgcgtcatcgatcgcctggtggggtatctggtcacgccagagctgcggcgcgtgatgggcaggccaaccaccgccgggcgcgtgcagtccgtcgcggtgtacctggtggtcctgcgagagcgggagattcgcgccttcacagcaatcaagcacttcggggtggaactggccttcgtttcgcccagcgacggccgcacctggaaggcggagtgggatccagtgcccacgtttgccagcaaggagttcccgtatgtccaggatcgtcaactcgcagaactggtgggggctacacgtaatgtcatcgtcgagacctgcattgatggcgaagaaaccgatgcgcctccggcaccgttcatctcctcctcgctccagatggccgccgggaatgcgctgaagtggtcacccgacaagacgatgaaggtcgcccagcggctgtatgaacaggggctcatcacctaccaccggacggacaaccccaatatctcgaaggactcgatgccggatatccgtgctgtcgccaaagccttggggctgaagtgtgttgagcaacagcggatgttcaaagcggaccaagacgcccaggaaggccaccccgccatcacccctaccgactggatggccgcttccgccggtgaaactgctgatgagcaggcgctgtaccagctcattcgagtccgcgcgcttgccagccagatcgaagctgccgtgtacgcagtgagaaccatcaccctcctgggcgtcggtcccgacaaaaagccgctgcgcttcggcgccaaagggaagctgttgaacgtgcctggctggcgaaaactgctgcagggcgatgacgccgaggagcagaagaacgaaacgccttcaaaccccattccggcgctggagccaggccagatagtcaaggtctacagcggcgaggtcctggagaagaaaaccacccctcccaagcgattcaccgacgccagtctggtgggcgagatgaagcgccgcgggattggtcggccatcatcctacgcctctatcgtgaagaacatcatcgacaagggccaggtgcagatgaaggggcgaagcctgatccccggcgagctgggagaggccaccatcgcgctcctcgagcacaacttcagcttcctcagcctcgacttcacccgcaacctcgaggtcgccttggaccggatcgccaacagcgaggacacctacatgaacgtggtccagcagttctaccagctactacagacagagctgcagacactccgcgcgctccccagcgcacaggacgaaccacgcgcaagctccaccgccagtatctcctcggcaccgaccagcgacttcctttgcggcaagtgcggtctgcccctggcccaccgcaagaaagccggcaagggcggcttcgacttctggggttgcagcggctttcgcaccacagggtgcaaggtcagctaccccaccaagaacggccaacctgacttcgacaacccgcgcgggctatag

SEQ ID NO: 334720 - DNA, 207 bp, Pseudomonas aeruginosa
gtgccgccggcgagctgggtgattccactggaatcactccaccagggatcaaccacggcgccgccagtgaactgggtgttgccactggcaacagtccaacaggacatcggctttacggagctgcaggaactgagcgagctgctcggcaagctcaaaagttgcgtcgacgtagcgatggacaacgcccctgaggcggccaagagctga

SEQ ID NO: 334721 - DNA, 1143 bp, Pseudomonas aeruginosa
atgaggcgatccaggaagcacaatcccaacatccccccgcacatcgaccaggccgctatcccagcggccgttttctttgaccaccgcggcaaaggtacctggtacaccctgcaccgtgatgaggccggccggcagcgccggcagaacatcgccagcagttcggccacactggccgagctgcacaagatcatggaggtgcgcaacggcatcgaccgcgagagcctgaaccacctgtgcgagcagtaccacggcagcgccaagttcaagcggctcgcgccgaagacccaggacagctacacctggtctcgcgacgtcctagtcaacatccccaccaagctcggcaagcctctcggcgaactggccgtgcgcaagttcacccccgcgctgatccagcggatcattgaccggatcgccgacgaggggacaccgtcgaaggctgcccatgcgctgcggtacctgcgcctggtgatgcagtgggggcgcaaccgcggctacctggacaacaacccggccatgggcatagaggcaccggtagagcgcaagcagcgccgcctgccgtcgcatgacgtgatgcaacgcctgatcgaccgcgctcgcgagctgggccagctgaaacgcgggcagaaggatgcagtgccgccgcacctgagctacgtcatggagctggcctacctctgccggctgcgcggcatcgaggtcgtcaccctgaccgacgccaacgagctggccgagggcgtgctcaccaaccggcgcaagggcagccgcgacaacgtcgtcacctggacgccgcgcctgcgcgctgcctgggacgccgccaaggctcgccgcgcccaggtatggaaagcccggggcacggccgtgccggtcaaccccgagaagcgcttcatcatcaccgccgagcacggcgggccgctgggcaagtctggcctggacactgcctggaaccgtttcatccgcaacgccatcaccgcgggcgtcatcaccgccgagcagcgcttcggcctgcacgacctcaagcgccgtggcatcaccgacacccccggcaccagggccgacaagcaggaagccagcggccaccgcgacgaatccatgctcgacatctacgacctgagcgtcccgaaggtcgccccctccgctctctga

SEQ ID NO: 334722 - DNA, 216 bp, Pseudomonas aeruginosa
atgatcaagcagcccccgggcacaatcctgaccttcgaggatctgcagcagctaaccggttacaccaagcgctctggtgtagagcgggcactacgtaaacagggaatccgttggttctggggccgtcacggcccttggaccactgtagagctgattaaccaggccggcgggctgcggccggcgactcaggagcagtacggcgtcgagattctatga

SEQ ID NO: 334723 - DNA, 279 bp, Pseudomonas aeruginosa
atgtctgagttcgaagcactccccaccctttcccagcattcctctgattccgattccgccgtcctctacctgcgccaggacgctccggcctaccagttgctgcatgccgccgagtaccgttttggcgctctggctgaactcctcgcggtgctcagcctgggtgaggataaagccgaggtgcccgccgccttgcagcgctcggcgcgggctttcctgctgttggcttcggatgcgcgggggctttattgcgccgcctgtcagcggcaaggcgtggtttga

SEQ ID NO: 334724 - DNA, 2409 bp, Pseudomonas aeruginosa
atgaaacacgtcgtttccagtgcgttattgctcggtctctcctcgctttccctggccgcccaggccgctcccatcgcccttgaccttcccgctcagcccctggccgcatccctcgagcaattgcagggcgccagcggcctgcgcatccgtttcgaccgcgcgaccgtggccgaccggcgcgcaccggccctacgcggcacgctggagccgagcgaggcactgcagcgtctgctcgcaggttccggactgagcggggaggtacggggcggcgacgcctgggtcgaggccgcgccgacaggtgccggcatcgcccccggcgacagcgtcgacctcggcgcgctcagcgtggtcgccacccaggacccggccaccgccgccatcaccgaagacagcggctcctacaccacccgggcgatgcgcacctcgaccaagctggcgatgtcgatccgcgagacccctcagtcggtcagcgtggtcacccgccagcgcatggacgaccagggcatgcgcgacctcaacgacgcggtgaagggcgtcaccggcctcaccgtgcaacagtacgggccggcccgggtgaagtacgcggcgcgcggcttcgacgtcgacaacatcatgtacgacggcctgccgacgagcatttccacctatacccaggacgtcatttccgccgccgacctggccatgttcgaccgcgtcgaagtggtgcgcggtgccaccggcctgatgcagggcgcaggcaacccggcggcggcgatcaacatggtgcgcaagcgtccgacccaggacttccgcgcctccctgcaaggcagcgtcggctcctgggaccgctatcgcagcgaggccgacgtttccggtccgctgaacagcgaaggaaccctgcgcggccgcgcggtggtcgcctaccagaaaggcaacagtttccaggaccacgtcagcagcgaacgcggcgtgttctacgggatcgccgaagccgacctgagcccggacaccaccttcgccatcggcgcctcgaaccagaacgacaaccgcaacgacaactgggtaggcctgcccagcccgctgggcggccgccacctggacctcaagcgctcgtcctactacggcgccgactggtcctactgggataccgacaccacccacctgttcagcgacctgacccaccgcttcgccaacggttggcagatgaagctggccgccgacaagctgtgggcgcgaatcaacatgctcgggctgtacaacgactgctactactcgaccaccggctgcgccagcatgacccagaaccccggcgactacagctacaccgacgaccacgacagctatgacgcctatgccaacggtcccttccagttgctcggccgcgagcacgagctggtggtcggcgccagctatcgccaggaacgcttcgacggccacggcggctggggcagcctgttcaacaaggacggcaccccgaccgggccgatggacccgacccagtgggacccgagttcgaccctcaagccgaggctgaacaccagcctgtggggcatgaagctcgaccaggaacagaaaggcgcctacctcaccacccggttgaacctcgccgacccgctgaaagtgatcctcggcgggcgcctggactggtacaaggccgacgccgataccgacagctacaaggtcacccgcaacgtcacccgctatgccggggtgatctacgacctgaaccagacctactcggtctacgccagctataccgacatcttcaagccgcagagcaacttcgacgccggcggcggcctgctcgacccgatcaccggcaagaactacgagatcggcctgaagggcgaacacttcggcggcgcgctcaattcgcagatcgcgctgttccagatcgaccaggaaaaccgcgccaccgaggacgtcggcggcccctcgccatgccccttcagccccacctcgcgctattgctcgcgcgcttcgggcaaggtccgcagccagggcgtcgacctggagctgagcggtgcgctgagcgacgactggcagatgatggccggctatacctacgtcgacgccaagtacaagcacgacagcaacaaggccaacgagggcaagccattcgacgcggccaagccacgccacctgttcaagctcgccaccagctacacgctgcccggcgaactgcacaaatggcgcgtcggcggcgacctggccacccagagcaagaccgaggacagcagcaccggtttccagcagggcggctacaccgtggtcaacgccatgctcggctacaaggtcagcgaacggatcgacacacggctgaacttcaacaacctgttcgacaagtactattacagcggcatcgacttcggcaacctcaactacggcgagccgcgcaacctgatgttcacggtgaagtactcgctctga

SEQ ID NO: 334725 - DNA, 2085 bp, Pseudomonas aeruginosa
ttgaacgcccgcacgcaccgcacgctcaaccggggaatcggcgtcgtcacgctgtccaccctgctcgcctcgccatcggcactggcccgggaaaacccgcccgccgaggacgaacccgccgccctcgaggcgctggtcgtgaccggcgagaaacgtgaacgctcgctgaaggacacggcgtcctcggtatcgctcaccagcgcccgcgacatcgaccgcaagcagaccggcaacgcctcggtcgccgaggtgatcaatggcagtcccaacgtggtctacaccgactcggtgggcgcgccgatcatccgcggccaggacacccagggcccgaacaacgggcagaacgtgttctggggcggcaccgtgccgcgggcgacgatcaacctcgatggccactacctgaactacaacgagatgttcttcggcgcgacctcggtctgggacgtcgacagcatcgaggtgttccgcggcccgcagaccacttcccagggcgccaacgccatcgccggggcgatcatcgtcaacaccaaggacccgaccttcagccccgaggctgcctaccaggcggagatcggcagctaccattcgcggcgcagctcgatcgcagtgtccggcccgctggcgcaggacttcgccgggcgcctggcggtggactacgcgggccgcgacaccttcatcgactacgacaacccgaagttccaggacagcggcaccgaccaggacttccgcgccctcaacgcgcgcgccaagctgctctggctgcccagcggaattccgggcctggagagcaagttcaccttctcccacaacgacagcaaccgcccgacccaggaagcggcgacccgcccgttcgacaagctcgaccatcgctcgaccaccatgcccagctgggagcaggacaccaacaccagcatcctcgacgtcgcctatgacctcgacaacggcatccgcctgttcaaccaggcgcagtactcgctgtcctcggtgcaccgcaccaccggcgcgggcggcgagggcgacgccgacatccgccagaagaacgcctccaacgaatcgcggatcagcttcggcgagcaggaggaccggatcagcggcatgggcggggtctactacgcccgcacccgcaccgacgagacgctgcacctgcgcgggctgtcggccttcgacgacacgaagaagaacctcggtgtgttcggcgagctgaactaccgcctgagcgaccgctggaccctgaccaccggcctgcgctaccaggaggaccgcatcgagcgcagcggcaactcggtgctggcgccgcgtccgctggactaccagaagaccttctcggccttcctgccgaaagtctccctggccttcgccgcaaccccggactggaccgtcggcggcctggtcagccgcggctacaaccccggcggcgtgtcgctcaacctgactacccgcaactgggcctacttcaaggaagaaaccatctcgaactacgaactgttcacccgcgccagcctgctcgacggccgcctgctgctgaacggcaacctgttcttcatggatttcaaggacgcccagtacaacatcccggtggtggtttcgccgggggtggcgcagtcgtacaccatcaacgccgagaaggcccacgcctacggcatggagctggacctcgactaccgcctgcgcgacgacctgcggctgaaggccagcgccggcgtgctacgcacccggatcgacgagatgtccggcaataccggctacgagcacaacgagttcgcccgctcgccgggctataccctcagtttcggaccgagctgggacgtcaccgagcgcctcaacctgaacgcccaggtgcgctacctggacggctactactcggacaccgccaacaccaaggcctactcgatcaaggcctacaccctcaccgacgcccgcgccagctaccgcttcaacgaccaggtgcagctctatggctacgtgaagaacgtgttcgacgaccgctcgcccacctacatgcaggaaaaccgggggatcggcggcatcgaggcgagcatgacgcagccgcggaccctcggcatcggcatcaagggcaccttctag

SEQ ID NO: 334726 - DNA, 600 bp, Pseudomonas aeruginosa
atgctggaggagtaccgggtctcgttgttcgcccagcaactggggacccggctgatgttccaggactcgcgcctgctgccgtggaagcgggtgatcgacaacgtcggcctcggcctgcgcggcgactggcgggcgaaggccctgcaggcgctgcgggcggtcggcctggccgagcgtgccaacgagtggccggcggccctgtccggcgggcagaagcaacgcgtcgcgctggctcgcgcgctgatccacgagccgcgcctgctgttgctcgacgagccgctcggcgcgctcgatgcgctgacccggatcgagatgcagcaactgatcgaaggactctggcgcgaacacggtttcaccgtcctgctggtcacccacgacgtcagcgaggcggtggcggtggccgaccgggtgatccttatcgaggacggcgagatcggcctcgacctgccggtggaactgccccggccgcgctcgcgtggctcggcgcgactggccgcgctggaagccgaagtgctcaaccgggtgctggcgcagccggagctgccgccgcaacccgaacccgtttcacccctgcccacgcaactgcgctgggcgctctaa

SEQ ID NO: 334727 - DNA, 372 bp, Pseudomonas aeruginosa; identical to SEQ ID NO: 319306

SEQ ID NO: 334728 - DNA, 978 bp, Pseudomonas aeruginosa
atgcgcgccgaagactgggtgccgatggacggcccgacgatcaacccgctcaagcgccacccgatcagcgaacctctcgacgtcggcatccgctcgatcaatggcctgctcacggtcggccgcggccagcgcctcggcctgttcgctggtaccggggtgggcaagtcggtgctgctggggatgatgacccgtttcaccagggccgacatcatcgtcgtcggtctgatcggcgagcggggtcgcgaggtgaaggagttcatcgacgagatcctcggcgaggaaggcctcaagcgctccgtggtggtcgcctcgccggccgatgacgcgccgctgatgcgcctgcgcgccgcgcaatactgcacgcggatcgccgagtacttccgcgacaagggcaagaacgtattgctgctgatggactcgctgacccgctacgcccaggcccagcgcgagatcgccctggccatcggcgagccgccggcgaccaaggggtatccgccatcggtgttcgccaagctgccgaagctggtggaacgcgccggcaatgccgaagccggtggcggctcgatcaccgcgttctacaccgtgctctccgagggcgacgaccagcaggacccgatcgccgacgccgctcgcggcgtgctcgacgggcacttcgtattgtcccggcggctggccgaggaaggccactatccggccatcgatatcgaagcttcgatcagccgggtgatgccgcaggtggtcgaggccgagcacctgcgcgacgcccagcgcttcaagcagctctggtcgcgctaccagcagagtcgcgacctgatcagcgtcggtgcctacgtggccggcggcgatcccgagaccgacctggccatcgcgcgcttcccggtcatgcgccagttcctgcgccagggcctcgacgaaagcgaaagcctggcggaaagccgtgcgcggctggcgggcctgctcgccggcgggcaggcctga

SEQ ID NO: 334729 - DNA, 1083 bp, Pseudomonas aeruginosa
atggaattcgtagagcgactgaatgcactctcagccaaggttcgacagcaaggcggggcgatccagacggaggaaggcaccaagactgccttggtgatgcccttcataaactctgtgctcggctacgatgtgttcgacccgtccgaggtgacgcctgaatacatctgcgacatcggtaccaagaaaggcgagaagatcgactacgccattctgaaggatggccagattcagattctgattgagtgcaagaagatcggtgagcctttgcacatcaatcatgccagccagcttttccgctacttccacgtcacgagtgcccgaatctccatcctcactaacgggcaggtctacaagttcttcacggacctagacgctcccaacaagatggacgaaaagccgttcctggagcttgatctgctggatgttgatgagcacgtattgcccgagctccagaagctaaccaaggctgcattcgatgttgattcgatcatcaatgcggctggggagctgaagtacgtgagtcagatcaagcgggaaatggccaatcagttcaatcagcctgacgacgatttcgtgaggtttttcgctgcgcgcgtatacgacggaatcatcacgcagaaggtgcgagagcagtttggtgttctaacccgaaaggctgcgtctcaatttctaggagatcaggtcaacgaccgcttgaagtcggccatgagcggtgcaattcagccggcgatcacgatggcgcccgcagagccttccatggcatctcaggctgaaagcaatactgacgatgaccgagtccacaccacgctggaggagctggaggggtttcatatcgttaaggctattgttcgggctgtcgttgatgcgaagcggattgtgcatcgcgatacgcagagctacttcggcgtgttgctggacgataacaaccggaagccgatttgcaggcttcactttaatcgtagtcagaagtacattggcctgttcgaccaagagaagaacgaaactcgtcatcctatctcctccctggatgacatctacacattcgcagatcagctcaagggctccattgcttactacgaatga

SEQ ID NO: 334730 - DNA, 693 bp, Pseudomonas aeruginosa
atgaaacgaacccggccgcctgcgaccgaaaaaaggggcgtactctgctacagccatccccgcctgtcaaagccgcgcatcggcgaatgtcgcctggctataaaccgttgtgcacggttcttgcgtgcgattcgccgcacgacggcaatccggcgccagcgaacgaaccgtcgtcaagaatgggcgagccctgccgataagccttgggcccccgcagtttcttcgtacaaggacccctcccatgttccttcgccgcctgtccatccaatggaagatcaccctgctggcaggcctctgcctgctcggcgtggtcgccttgctggtcggcctttcggtctaccgcatgcagcacagcagcgtactggtgaaaagcgccagtacgcagatgctcgacgaatcggcgcgcctgcgcctggaagcccgcggggaattgcaggcgttgcgcatccagcgctatttcatggatgccttccagtacggcaagggtttctcccggcagatcctgttcctccgcgaccaggcgcagaagcgcttcctcgacgcctacgacctgcgcgaggacctgacccgccaggtgcgcaccgcgctcgccgccaatcccgaggtgctcggcctgtacgtggtcttcgaacccaacgcactggacggcaaggacgaactgttcgtcgaccaacccgccctgggcagcaatga

SEQ ID NO: 334731 - DNA, 792 bp, Pseudomonas aeruginosa
atgctctgggtggtgcggtcgatcagcgccagaccgtcgcgggtcgcctggtcggcaccgcgcgcggcgtcggcggcctgggcggcgctacgggcgacgtcctgggcagtggcggtcatctcgtgggatgcggtggcgacctggtcgatctcgcggaactgctgctgcatgccggcgctggtctggctggaaatcgccgccgactggtcggcggtactgcgcgcatcgcgcaccgagaccttgacgtcgcggatgatcggctgcagcttgtcgaggaaacggttgaaccatccggccagttcgcccagctcgtcgcgcccggtgtgcggcagacgctgggtcaggtcgccttcgccgctggcgatgtcgcgcagcatgtgggcgacgccgaggatcggccgggtcacgccgcgggcggtcaaccacagcaccagcaggccgagcaccgcggcgccgaggccgaggcccagttcgacccaggtgccttcgcgacgcatgtcgtccagttgccgctccagcgccagggccgggccgagcagggcgctcttcggcacttcgaggagcacgccccagggcttggcgccgggaatcggctgcaacggttgcagcaccttgaggtcgtcgttctcgttgaacaattggctcttgccggcggccagcagttgcaggagttcgccggcgtgctgcggatccgccttggccaggttcttgccgagcaggccggcgtcgcggctgttgccggcgaacagcccggccgggctgaggatgccgacctggccgacgccgtcgtag

SEQ ID NO: 334732 - DNA, 1776 bp, Pseudomonas aeruginosa
atggtaggagccgtcgtacaccgtcgccttcaggccgatcagcgggtagccggcgagcacaccgttctgcatctggtcctcgatgcccttctggatcgccgggatgaactcgcggggaatcaccccgccgaccacctcgttgtggaactccaagccttcctgcccctcgtcggccggagcgaagcggatccagcaatggccgaactggccgcggccgccggactggcggacgaacttgccctcgatctcgcaggtgttgcggatggtctcgcgataggccacctgcggcttgccgatattggcttcgacgccgaactcgcggcgcatgcggtcgacgatgatgtccaggtgcaactcgcccatcccggaaatgatggtttgcgcggtctcctcgtcggtcttcacgcggaacgacgggtcttcctgggccagcttgctcagggcgatgcccatcttctcctggtcggccttggtcttcggttccaccgccaccgagatcaccggatcggggaagtccatgcgttcgaggatgatcggcttgtcgatggcgcacagggtgtcgccggtggtcacgtccttcatgccgatcagcgcggcgatgtcgccggcgcgcacttccttgatctcgtcgcgctggttggcgtgcatctgcaccatccgcccgacccgctccttcttgcctttcaccgagttgagcaccgcatcgccggaagtcagcaccccggaatacacacgggcgaaggtcagggtgccgacgaaggggtcggtggcgatcttgaacgccagcgccgagaacggctcgtcgtcgtccgcatggcgctcgtcgtgcttctcttcgtcgtccgggtcggtgcccctgatcgccgggatttccgacggagccgggagatagtcgatcaccgcgtcgagcaccagaggcacgcccttgttcttgaacgaggagccgagcaccgccggtacgatctggttggccagggtccgctggcgcagcccggccttgatctcctcgatgctcagttcctcgccttccagatacttgttcatcagttcgtcgttggcctcggcggcggcctcgaccatgtgcgcccgccactcctcggccagcgcccgcaactccgccgggatctcctcctcgcggtagctggtgccctggtcgtcatcgttccagtagatggccttcatcttcaccaggtcgatctgcccgctgaagttttcctccgcgccgatcgccagctggatcggcaccgggacatggcccaggcgttgcttgatctgcgcgaccacgcggaggaaatcggcgccctggcggtccatcttgttcacgtaggccaggcgcggcacatggtacttgttggcctggcgccagaccgtctcggactgcggctcgaccccgtcggcgccgctgaacaccaccaccgcgccatcgagcacgcgcagcgagcgctccacctcgatggtgaagtcgacgtggccgggggtgtcgatgatgttgaagcgatagcggtgcgggaactgcttggtcgagccctgccagaaggccgtggtcgccgccgaggtgatggtgatgccgcgctcctgctcctggaccatccagtccatggtcgccgcgccgtcatggacctcgcccatcttgtggttgacgccggtgtagaagaggatccgctcggtcgtcgtggtcttgccggcgtcgacgtgggcgacgatgccgatgttgcgataaagctcgatgggagtggtgcgagccatgatctgccccttgggtgctgccctggatga

SEQ ID NO: 334733 - DNA, 1065 bp, Pseudomonas aeruginosa
atgaccaggcgccggtcatctgtggcatcgcccgcagcgccgtcggcgctgctgggcgacattcgggcactgatcgaggcggcgcgtaagcacgccgcctcgacggtgaatagcgagctgacgatgctctactggcgcatcggccagcgcatccacacgcaggtcttggacgggcgccggggcgcttatggcaaggaagtcttgcctaccctggcggcgcagttggtgaaggagtacggcagcagctttgccgagcaaaacctgcgccgcatggtgcagttcgccaccaccttccccgacgagcagattctcgtatcactgatacgagaattgagctggacgcacttcattgccctgatcccgctgaaagacccgctccagcgggactactacgcgcagatggcgagcgccgagcgctggagcgtgcgcacgctgcgcgagcgcatcgactcgatgctgtacgagcgcacggtactgtcccaaaagccgggcgagacgatcgcgcaggagctggcgacgatgcgcgatgcgcagcgcatgtcgcccgccctggtcatgcgtgacccgtacatcctcgacttcctgggactgcgggacacatggcaggaaggcgacttggaggcggcgatcatccgcgaaatggaatccttcctgttggagctgggcgcaggtttcagcttcgtggctcggcagaagcgcatccaaattgacggcgaagatttccaccttgacttgctgttctacaaccgcaaactgcggcggctggtggcagtggagttgaaggtcggcgagttcaaggcggctttcaagggacagatggagctttaccttcgctggctggacaagcacgaacgggagccggaggaagcctcgccgctgggaatcatcctttgcaccggcaaaaagcgcgagcagatcgaattgctggagctggacaagtcgggcatccacgtcgccgagtacctgaccgccttgccgccgaggggcgtgctggtggagcggctacaacaggcaacgcagcgggcgcagttgcagatcgagcagcgcaagaccgacaacgagtag

SEQ ID NO: 334734 - DNA, 1203 bp, Pseudomonas aeruginosa; identical to SEQ ID NO: 82610

SEQ ID NO: 334735 - DNA, 3363 bp, Pseudomonas aeruginosa
atgttcagtggcaaaaccgacgacaggggcttgtgggcgggcatccaggccggtgtgctgttctttctcgccgccctggcctgcatctacctgtcgcgccagcctgccaccatcgcggcgatctggctgcccaacgcgatcctcaccgccgccctgctgcgcgcgccgctgcgccagtggccggcgatcctgctctgctccgccgtggccaacctggcggccaaccgcctgtatggcgacagcctgtggatgagcacggcgttcctgccggccaacctgagcgaagcgatcttcgccgcgatgctgttacgcatcaaccgggtgcgcgaggacttcgagttcaacctgcattcggcggttcgcgtgctctgggccggcgcgctgatcccgcccttgctcggtgcctcggtgggcgcggtgctggtcagcgtcttcggcatggggcgtttcccggaaatgtgggcgcgctggtatgtgggcgatgcgatgggcatgctcgcgctgctgccgttgtgcatggccagcaacctggcggcctggcgtcacgctctgtcggggcgggcgggagtggacaacgcgatgctcctgctggtgaccctggtgatcagcttcgtggccctgacgcgcctgccctacgccttcatctacgtgctcctgccgctgctggtggccgccgccagcaccagcgtgttcggcaccgcgctgatcggctgcctgaacacctgtttcatcgccgtgctgatcgccctcggcgtgttcgtccccgagtcgtcccagcagcgtttcggcgagccgctgctgtacctgccgatggccttgaccctcattcccgccttcctggtctcggtgatcatggagcgcagccgccgcgagcagcatcaggtggccatcggcgaggcgcagttccgcggcgccatggaattctcggcgatcggcatggccctggtgtcgctggaggggcggctgttcaaggtcaacgaggcgctgtgccggatgctcggctattccgccgaacgcctgggcgagctgtcgttccaggagatcacctatgtggacgacctggaactggacctcgacctggtgcgcgacctgctcgccgggcgtatcaactcctaccagatggagaagcgctacctgcgccaggacggcgaaaccttctgggcgcgcatcagcgtgtcgctggtgcgcgacgaggagggagtcgcccagtacttcgtcacccaggtggaggatatcgacagtcgcaagcgtgccgagctggagcgcgagcgcctcgccgaacggatcaagctggccaccgacgccgggcagatcggcatctgggagtgggacctggcgcgcaaccgcctgcactgggatttccgcatgttcgacctgtacggcatccgcagcggtcccggggagaccacggtggagcagtggaaggcgagcctgcatgccgaggatcacgaccgcgtgctgcgcgagctggagcgcgccgtcagcgggttgcagaaattcgactgcgagttccgtatcgtccgccccaaccgcgaggttcgccacctgcgggcgatcgccacgctgacgcgcgacgaggacaaccgtccggtgcggatgatcggcatcaacagcgacatcaccgagatccgcaccctggcggaaaccctgcacgaggaaaaggaacgcctgcaggtgaccctgtattccatcggcgatgccgtgttgaccaccgacgccggcggccgcgtgaccttcatgaacccggtggccgaggcgatgaccggctggaccttgcaggacgccatcggcgcgccccacgaactggtcttcaacgtgctcgacagcgacaccggcgaggccctggaaagcccggtgcgacgctgcctgcagaacacccgggtgttctacctggaggacggcgccacgctgatcagccgcaagggcgagcagcacgatatccagaattgcgcggcgccggtgcgcacccgcgatggcgagatcatcggcaccgtgctggtgttccagaacgtcaccaaggcccgggcgatgcagcgcgagctgagctatcacgcctcccacgatgccctcaccgggctgttcaaccgcaccaagttcgaggaggagctgcaacgcgccctggccaacgcccaggagcgggcgacccagcatgcgctgtgcttcatcgacctcgaccgcttcaaggtggtcaacgattccgccgggcacgcggcgggcgacatgctgctgcgcgagctgagccggattctcgccgaccgcacccgcgcctccgacaccctggcgcggctgggcggcgacgagttcggcctgctgctgttcgattgcgacctggcggaggcggagcaggtggcgagcaagctcatcgagcagatctgctcggtgcgcttcccctgggaagggcggctctacgacgtgggcgcgagcatcggcatcaccgcccttaccgccacctcgcgcagcaccagcgaactgatgagccaggccgacgtggcctgctacgcggccaagcatgccgggcgcaaccgggtctcggtgtaccagttcggccatgaggaagtggagcgccagcaccgcgacatactcctcgccagcgggctgcgcgaggccctggagaacgaccgcttccagttgcaggcgcaggagatcgtcccggtcggcccccgccgcgacggcgaccggcactacgagctgctgctgcgactgtacgatccggatggccagatgactccgccgggcgccttcatcccggccgccgagcgcttcaacctgatggccagcatcgaccgctgggtgatcaacgaggcgctgatcaacttcggcgcgcggatcgccgcggtggagggcctgagcatcggcatcaacctgtccggcaactcgctcaacgacccgctgttcctgccttacctgctggatcgcatcgaacactcgccgctgaggccggagcgcctgtacttcgagctgaccgagacggcgttgatgaaccagttgtcggtggcttcgcggatcgtcgccaagctgcgcgacctcggctgcaaggtggcgctggacgacttcggctccggcctgagttccttcaattacctgaagaatttcgtcgtcgacgtgatcaagatcgacggcagcttcgtccgcaacctggacaagagcccagtggaccaggccatcgtcgactccatcaaccagatcgcccaccgcctgggcgcggtgaccgtggccgagttcgtcgagagccgggaaatcctcgatcacctggcgcgcctcggggtggatttcgcccagggctacgcggtcgggcggccgcagccgttcgccacggtgctcgaccaactgcgcagcgggcttcgtcgccaggagctgggctga

SEQ ID NO: 334736 - DNA, 213 bp, Pseudomonas aeruginosa
atgagccagaacacccaacaagacagccgccccatcgtcgaggtggtcgaccttccagagttcagcgtggagcactccaccgagtttctgaccggttccgcaccgtgcgccggcgtatcccgcccactgacctccgtctggttcgaccagcgcgcccacgcactgtccaacatcaacaagactgagggggagcaacaatgcgtagagcactga

SEQ ID NO: 334737 - DNA, 1881 bp, Pseudomonas aeruginosa
atgaccgctttccgtcgccacgatctcgcccaggccatctaccaggcccagctccctctcgatcttcgcgaatatctgaacatcgatctcttcgccggcggcggcggggcctctgaggccatggaggaagccactggcgagttcgtcgatatcgccgtgaaccatgacgacgatgccgtgagcatgcacatcgtcaaccatccgcagaccacgcactaccgagaagatatccgcctggtagagcctcgggtggcaactcgcgggcggcccgtaggcagactgcacgccagccccgaatgcacccaccatagccaagccagaggtgggcagccccgcagcaaggaaagtcggtcgctgtcatggatgatgatcaagtgggcaggccaaacacgtcccctgatgctcaccatggagaacgtgatgcagatcctccagtggggtccgctgatcgccaaacgctgcccgcagaccaagcgggtggtcactctcgacatggtgccgcacccaaccaccggcaagcccatgcaccgcgtagccgaaccaggcgagcgcgtacccgtacagcgccagtacctgataccggaccccaagcgcaaaggacgcacctgggcgcgcttccttcgcctgctccgagacatgggctaccagtaccactacgacaagctcgttgccgcggacttcggcgccgccaccaccagggaacgcctgttcttcatcgcgcgccgcgatggcatcccattgaactggccagagccaacccacgccaagaccccaggccctgaccagctcccatgggttcccgtggctacgcacattgactggagcattccgtgcccgtcgatcttcctcgacgcgactgaaggcaagaaattcaaggtacgccgccccctcgtcaggaagacgctcgacaggctccgcaagggcgtaaagaaatacgtcaccgatcacgccgatccattcatcgtcagcgtgaatcacggtggcgccgggttccggggtcagtccgtgcgcgagcccgcagccaccatcaccggaggccacggattcgctgtagctcagcccacgcttgccccattcatcactgagcatgccaacgcaagcaaccaacgcaacatgccagccaacgagcccgcgcgaactatctgtagcgaggtgaaagggggccatttcgccgttgtcgcccccgtacttgtgagcgctggcggcccttcctacggcggtaaaccgaccagttgcggacaaccggccggcacggtccttactgaaaaccaccgtgccgtgggcgtcgcctacctggcgcaacacaatggcgggtacaacgcgacactcggccgccatcctgcggagccagccaccgccctgaccaccagcgggagccaacagaacgtcgtgaccgccagcttagtaacactgcgcaacggctgcaccggccgcgatctccgagaaggagccccagcgataaccgccggcgccgatgacctggcgctcatggaatgcacgctatcgccggagaacgaagccggtgcgctgcgggtggcggccttcctcatggggtactacgggtccgacaacacctacgatccgcgagatccggccgccaccatcaccacccgcgaccgcctcgcactggtgaccgtgacgatcaagggaaatccctacgtgatcgtagatatcggcatgcggatgctcacgccgctggagctgttcctgatccaagggttccccaagacctacaagatcgacgtagggcacgacggccgccgtttcagcaacaaggccaaagtgaagatgtgcggcaactcggtgtcgcccaagccctattacgccctcctcaaagccaaccccctcttccccgaagaaaccatgagggaggcagcatga

SEQ ID NO: 334738 - DNA, 480 bp, Pseudomonas aeruginosa
atgactactatcccggctagccgcgtagcggcacaagaccagggcgccgccctggcacacgccacccacagcacccaagccccggccgcgcaaaagcgcggcggcggcctggcacgtcgcatccaactgatcgccatcgcccaaggccgccaaccgatgcccgagggtggcgctatagaaagccactgctgcgcagcagcaggcatattccaacccaaccttcagcacacgccgaaggcacgcataccccacgaaaggctgcgccggggcgcgaagcacatagccacgcttcgcttaatgactcgctcgcccgcgcagcttgtcgaggggggaaagcgcccaccgaagcccaccgataacgcactgatccgcacgctgtgcgcgcagatccgcgagcagaaccaagagattgccgcgctgcgcatcgcgaacaccgacctcctccagcgcctggagaaagccgaagggggacgggcatga

SEQ ID NO: 334739 - DNA, 240 bp, Pseudomonas aeruginosa
atgaactactccagcctctccacctacgacctgctgaagcaccgcagccaccacgtcgacagcctgacccgcctgcgccgcgcccagccgcagtgggacgaggacgctgctcgacgcggggaaatcacgatggccgatatcagcgaccagatccgcgagatcgattaccaccttcgtccgagcggctgggagtcagtcgacctcgactactccggcgacaccgccccgatgtgcatgtga

SEQ ID NO: 334740 - DNA, 294 bp, Pseudomonas aeruginosa
atgaaagacttgtccctgcaccaggccgcgcagcgcctcggcctgagccgtcccgagctgatcaagcgcatgaaggcggccggcctgctcgacagcagcaaccttccagccgcaccggtccgcgaccgcctctacctgcgcgcaaaggaaacgtcctggcaccaccccgaactcggcatgcagtacagccactcgacgaaagtgcgcccggccggagtggcatggctggccgacaagctcggcatcccccgcgtctgcgccccagcggccccggaccgccgcgaagttggctga

SEQ ID NO: 334741 - DNA, 729 bp, Pseudomonas aeruginosa
atgagccaaccagcagtcgccaaggcggcgggctgctcacaaaccactatcttcaagattctcgaaggccaaacgcgcgagagcagaaagaccggtgccattgcgcgaggaatgggtatatctgttgcatggctggagaacggcgagatgcccgccaccgttactcctctgcacagagcaaacagagatgcagatagagcagcgagagttacccttgaacccatttccccctgggacagcaacacccctctggatgatgatgaggtagaggtccccttatataagcaagttgagattgctgctgggcatggcaggaccgccgtccaggcggagcccggccgagtattgcgcttttcctacgcaacgctacgtgcgtgcggcgtctctccgtcaaacgccttgtgcgccacagttacaggtaagagccaggaacctcttattctgagcggagcaacaataggaattgactgcggaatgacacgaatcctccccggccaactgtatgcaatcgaacaagacggggaactaagggtgaagtttctggaacgcctcgacgggggcggcctcaagctggttagctacaacgacgaagagtatccaagcgagagctatacgttcgatcaatatctggaaagacaaatgaaggtgcttggccgcgttttctggtggtccaccattcgaccgctcaatgctcctcccatcccaagatgctctcgccccaagaactaa

SEQ ID NO: 334742 - DNA, 249 bp, Pseudomonas aeruginosa
atgagaattgctaacaaagaaaaaacattctccttcccattcgaagcgcgcctgaaaactctggaagaagatggcaatgccagcgacagcgagaaactggcggctatcaacacttacgagcgtctgctgactgcaaaagcgatcgtcaaagacttcgaaggtgacaacggcaacgacactgctttactgatcagcgtcttcgaagagctttgtgccgaagcacattctctttcagtggtcgaggactga

SEQ ID NO: 334743 - DNA, 231 bp, Pseudomonas aeruginosa
gtgccggccagcctgattgccggcgccggcgagatcctgcacacgtcggccaacgcggcgaccaccatcgcgcgccatatcgaggacggccgcatcgacgcggccgagctggcggaaacccaaaagctggcgatgagcatcatccgcgcggcggtcggcctctacgagcgtgcccgctacgtccaccagaccaccaagggcgccgaacgcggggaggtggccaatggctga

SEQ ID NO: 334744 - DNA, 210 bp, Pseudomonas aeruginosa
atggctgatatcgcggatcacgccaatgacctggtgttggagcgcatggaggcggcattggctgcccgagcgctggtggcggttggcgaatcggctcatgagtgcgagtgctgcggcgagccgatcccgccgcgccgtcgcgaagctgtgccggggtgccaaacctgcatcgaatgccagtccttcaacgagcggagggggcgccggtga

SEQ ID NO: 334745 - DNA, 1137 bp, Pseudomonas aeruginosa
gtgagtaacgaagccttggacgaagtgctgaatcagcttcgagaccatggaattgaacccttcaccaagcggagcccgagctgggtgttcgggaagttggtgcgctgtaaggtcgagagcgaccggaacggggaggctaccggctggtacgtgctgcacgaatacaccactgccagcggcaagaccctctatttcgggcgcttcggcaactggcggcaggatctcaacgagaaattcaagctcaagggtgttcgcctgactgccgaggagcgcgagctgatgcacgcgcggcaggaggaggccaagcgcaaggcggcagcgaaggccgcctatgccgcccagcgtgctgcccagggcgccgcgcggctgtgggagcggttatcggagaaaggcaaggcgccgtatctcgaccgcaagcaaatcgtcgggattggcggtcgctacggttacggcgggcgtttcatggtgcccatgcggaccctcaaggggctggtgggactgcaaatcatctaccccgaaaagcagcccgataccggccgggacaaggcgtattggccctacggcatgcagaaggaaggagcgttctgcctgatcggtccgcgccccgagcccggcgagccggtgctgattgccgaggggtacgcgaccggcgtcagcctgcacatggcgacgggctgtgcggtctgcatcgccttcgacgccggcaacctgctgccggtcggcaaggcgatgcagaccgagtatccgtctcggccgttgatcttctgtggcgatgacgactggaagaccacccgccaggacgggtcgccttggaatccgggcgctcaggctgcggagaacgccgctacgatcctcggcggccagttcgtactccctcgcttcggcagcgagcgggaggagggctggactgacttcaacgacctgcactgtgccgaggggctggaggtggttcgcgcccaggtcatggcggtggtccggccaccggctgaggggggctggcgtgactgccttctgcggatcaagggcggcggcctggcggcgcacatggtgaacatcagtctgatccttcagaacgatgagcgctggcacggagtgctcggctacgacgagttcagcgccaagaccatgaagcgttga

SEQ ID NO: 334746 - DNA, 972 bp, Pseudomonas aeruginosa
atgcgcaccatcgctttgcgtcgtggactggcggccctgctggtggcggccctgtcctacggcgtccaggccgacgagaagtcggccaacaccctgcggatcggttatcagaaatacggcaccctggtcctgctcaaggcccgcggcaccctggagaaacgtctcgccgaagacggcgtgaaggtgcaatggaccgagtttcccggcggcccgcaattgctcgagggactcaatgtcggcagcatcgacttcggcgtgaccggggaaaccccgccggtattcgcccaggccgccggcgccgacctgctctacgtggcctacgaaccgccggcgccgaccagcgaggcgatcctcctgccgaaggactcgccgattcgttcggtggccgagctgaagggcaggaaagtcgccctgaacaagggctccaacgtgcattacctgttggtccgcgccctcgagcaggccggcctgaagtacagcgacatccaacccgtctacctgccgccggccgacgcccgcgccgccttcgagcgccacagcgtcgacgcctgggtgatctgggacccctaccaggccgccgccgagaagcagttgtccgcgcgggtcctggtggatggtcgcgagctggtcgacaaccaccagttctacctcgccacccggacttacgcgcaacggcatccgcaggtgctcgacaagctggtggacgagatccgccaggtcggcgactggtcgcgggccaacccgcagcaggtgaccgagcaggtcgcgccgctgctcgggttgcccgccgacatcaccctgaccgcggtgaagcgccagggctacggcgcgcagttgatcaccccggcggtggtcgaggcgcagcagaagatcgccgacaccttcacccagctgaagctgattcccaaaccgctgagcatcaaggacgtgatctggacgccatcggccggcaaggtcgccagcgccccctga

SEQ ID NO: 334747 - DNA, 876 bp, Pseudomonas aeruginosa
atgaaacgcaagcaatcaatcgagtccgtgcgctgggatctggccttgcgctatcgcctgatcgagacagtggcctggtgggaaggccgcctgaccaccaatcacctgatgcagagcttcggcatcagccgccaacaggcgtcgaaggacatcaacagctacatcagcgaacacgcgccgaagaacctcgaatatgacaagcatttgaaggggtacgtcccgagccgccgcttccaaccgctattcatcgacgacagcgccagcgcctacctgcacctgctcaaccagaaccatgagcgcgccccgcatatcgagggcctggcactggcctatgcacacacagaggtactggcagtgccggatcgctcggtaaggccggaagtgctgcgcccgctgctcaaagcctgccgggagagtctgcgcctggaatgcgagtacgtgtccttcaccacgcccgatggcgaaacccgcctgatcgccccgcacaccctggtttacaccggcatgcgctggcatgtgcgggcctattgcgagaagaatcgggattatcgtgacttcgttctgagccgcttccggggcataccggagctgatggacgaccctaccgatcacggccgcgagagtgatccgggctggaccacctcactgccggtgatcatcgaacccgactcgcgactgaaaccggaacaacgcgccatcatcgaggccgactacggtatgcaggatggccgactggtaatcgaaacccgcggcgctctggtgcaatacgtgctgcagcgctatcagatcgacccgaccaaggtgcatgccaaggcaacggcgcagcagattgtcgtcgccaacctggatgaactgcagccgtggctgtatcactga

SEQ ID NO: 334748 - DNA, 1911 bp, Pseudomonas aeruginosa
atgagtgatttggcccaggcgttgctggcggcagtaccggaagacggcggcagcatcggcaatcaggccctctatgagcggctcaagagccagttcaccggcctgagtgaagagcagttctgggaatcgcgcgatgcgctgatcggtgagggcgtactggtcaaaggccgcgggcgcggtggttctgtgctgcgcgcccaggccgcaggtgccagtctggcggcgcaggcgctaagcaaggcgcgcgagcgtttcgagccggctgtggccgaaatatctgccagttatgtcgtcgaggccgaagccagcaagggcaaggtggtcaaggtacaggctgccaccagcatcgaggccatggagaaaaccctctgggccaccgccgacaagctgcgcgccaatatggacgccgccgagtacaagcacatcgtgctcgggctgatcttccttaagtacatctccgacagtttcgccgcccgccgcgccgagctggaacgcaagctcaccgacgagaacgacgactactatctgggtgacgacgatcccgaggtgcttaacgccgagctggaagaccgtgactactaccgtgaggtcaacgtgttctgggtgccggaagtggcgcgctgggagtcgatccgcgccgccgccaagcaggtggatatcggcaagcgcatcgacgaggccctggccgccatcgaggcggaaaaccccaagctgaagaacattctcgacaagcgctacgcccgcgcccagctgcccgatggcaagctcggcgagttggtggacctgatctccaccatcggtttcggtgacgatgttggcaaggcgcgtgacctgctcggccaagtctatgaatacttcctcggccagttcgccagcgccgaaggcaaaaagggcgggcagttctacaccccggccagcatcgtgaaaaccctggtggcggtgctcaacccgcaccatggcaaggtttacgacccctgctgcggcagcggtggcatgttcgtgcagtcggagaaattcatcgaagcccacggcggcaagctgggcgatgtgtcgatctacggccaggaatccaaccccaccacctggcgcctggcggcgatgaacctggccattcgcggcatcgacttcaacttaggaaaagagccggcggatacctttatccgcaaccagcactctgatttgcgtgccgatttcatcctggccaacccgccgttcaatatcagcgactggtggcacggcagcctggaaggcgacccgcgctgggtgtatggcactccgccgcaaggcaatgccaactacgcctggctgcaacacatgctctaccacctcaaacccagcggtcgcgccggcattgtgctggccaacggctccatgagctccagccagaacagcgaaggcgatatccgtcgcgccatggtcgaggctgacgtggtggaagtgatggtcgccttgcccagtcagttgttcttcaacactcagattcctgcgtgtctatggttcctcgccaaacagaaaaccgcccgtcccggcgaagtgctgtttatcgacgcgcgcaagctcggcaccagcgtcagccgcgtacagatcgaactgactgacgcggatatcgaacgcatcgcgcaaaccgtcgccaaatggcgcggcgagccgctggatgtgggcggcgagattgccgagtaccgggacatccccggcttctgccgcagcgttaccctggctgaaatcgccgagcatggccatgtgctgacgccgggccgctatgtgggtgccgaagaggttgaagacgacgacgaagcctttgccgacaagatgcagaagcttacggaaaagctcggtgagcagatggctaagggcgcggagctcgatcagttgatccggcagaaactgggggggctgggatatgagttctga

SEQ ID NO: 334749 - DNA, 1350 bp, Pseudomonas aeruginosa
atgagttctgagtggcaagtcgtgcgtattgaagatatcgctgcaaagcgccctagtgctatggcaacaggaccctttggctcgagcatcggcgcgaaatactttcagaatgcaggtgtcccggtaattcggggctcgaatttgagcccagacattcagaccaagttggatgattcgggtttggtattcgtttcggatgaaaaagcgcgcgagtttgaccgatgcttggttggtaaaggggatctggtttttacctgttggggtacgatcaatcaggtagggttgattgacagggatgcagcctatgagggctacattatctcaaataaacagatgaagcttactgtggatgagcaacgtgtagatcctcgcttcatctattatgttttttcagggcctgaaaagcaggcagaaattattgacaatggcattggtagctcagtgcctggattcaatctcgggcagttgcgtaagcacgaggtgcttctgccctccctgcgcgagcaaagggctatagctgatacactcgatctattcactgaccgtatcacccttctacgaaaaaccaatgccaccctggaagacatcgcccaggcgctgttcaaatcctggttcgtcgatttcgatcccgtgcgcgccaaggtcgaaggccgtcagcctgaagatatggacgccgccactgctgccctgttccccaatagcctcgaagagtccgagctggggttggtgccaaaggggtggagtacttccaaactaggtaatgtttgtgactatttaaatcgaggcatctctccaaagtacgttgaagctggtggtgtactagtcatcaatcagaagtgtattcgtgacttttcaatcgatttcaccaaagcccgcaggcatgacccgtttcagcgcaaaatagatggtcgtggtctagctgttggtgacgtgctggtgaactcaaccggggttggtactcttggccgtgtagcgcaagtgctagctctgtccgaacaagcaattgtggattcgcatgtcacagtagttcgtgctggtactggcttgacctggtcattcttagggcaatggatgatgcatcagcaacctcaaattgaagctatgggtgaggggtcaacagggcaaacagagctttctagatcgaaactagccgagttgagacttactgttcctcctgcatcaattttgagtatctttgatggcctagtgtggccactaaaagaacgcattgcattaaacgaaagcagagttcaagtcatcacccaactccgcggcaccctattaccccgtctaatctccggccaactgcgcctgccggaagcggagtcgatgctagatgctgtaagttaa

SEQ ID NO: 334750 - DNA, 2196 bp, Pseudomonas aeruginosa
atggactattcgaagtggttggacctttgggataaggcaacacccgagcagctgattgctcccgtgttcgtatttagtctggtgacggtgctgtgcctttggtatttgctgcgttacttcgtgcgctcatttgcattgagtcggcgcttgaagaagctcacgcggcaggtgcgggcaatcaaggagctgccgccggccaagcgccgtagcgagctggagcagctgttccaggagcatacgctggggcatgcctggcaggagtatgccgagacgctgcatgaccagttcgaggtgcgcgagggtgagcagcgcatgctgtgctcccgtgctacggcgggcgcggggcatttcttcaccgcacaaacggtggtggagacaccgctggggaccgagttttacaagcacttgccgggcatcctgacggggatcgggattgtcggcaccttcttcggcttgatgctgggcctgcagcacttcgaccccagcactcccgagcaggtcagctccagcgtcgatcagttgctcaaggacgtgctatttgccttcctcggctccttcttctcgatcttcgcctctattggcgtgaccctgaccgagaagtggcgtttgggccgctgctacaagcacctggaaaccctgactgagagtatcgatgggttgttcgacagtggcgtgggtgaggagtacctggcggagctggtgaagtcgagcaatgagagctcgatccaaacccgtcagctcaaggacagcctggttaccgacctgcgcgagatgctgcagaacctagtagatacccaggtgcgtgagaacctcaagttggctgataccctttcggcaagttaccgcgactctggtcaggtgctggccgagcggattggcggtgccatcgaaaacagcctcaagtctcccttggaggccatcgccggagctgtgaatactgccagtggcgaccagagcaaccaggtgcagagcctactcaccgatgtgctcacagcctttatgagcaagctggagagtacctttggccagcagttcaacggtttgcacgagatgctggggcagtcggtagcggccatgcagtccatgcagcacggcttcaatgaactggtcggcgacatgcgctcggccagcgaggcttcatcgcagaacagcgccaagatgatcgcgcagctgctggctgatatgcaggccgggcaaaacagcatgcaggccgggatgaacgagatgctggccaatctgcaggcgtccatcgcgcgtatcggcagtgaaggtgagggagctggtgagcggatggccaagcagttggagaagctgttcgccgatagcgaagcgcgtcagcaagccatggcggcaaatctgcaggcctttgtcgaatccatgcagcagagcatgggccagggccagcaggagaccatggccaagatcgccagctcggtggatgtgctgggcgagcagttgggcggcctgttcaagcagcttgagcataaccgtacgcagatggaccaggccagcaaggtcgcccaggtcgaactgcaccgtggtacgcgcgagatggttggcgggctggaagagcaggtgaaaaccctgctggatgccgtcgccgatcagcaaggcgcgatgcaggacagcctcaaactgcttggagcgcaaaccgagcaacacctgcagagcatgcaacaaggcgccgagaagatgcgcctggcagccgagcgcttcgacagcgccgggcagagcgtgagtaaagccggcgaggcgactgcgggcgtgctgggcgcgctgcagggcacgagcagcgatcttgtcggcgcttcccgcgaactgaccagtgtggtggccgactatcgcaataaccgtgaagcactgaatcagacgcttggggtcattcaaggtgtggtcgccactactcagggtgagtccgcggggcgtagtcagtacctgcaggatctgaagcagcaaggtgagcggctgcaggcgctcaatcgtgaagtgaacgactacctggagcagatcagcgcagtgctgggcaagggcttcaacgagtttagcgagggggtagatcgtagcctgcggcagacgctgggtagtctggatgccgagctgcacaaggcgatgaccagcctggccggtggtgtcgagggggtcaaggaaagcctggaagacttcagtgacatcatggagcgcgttcagcgccgctga

SEQ ID NO: 334751 - DNA, 738 bp, Pseudomonas aeruginosa
atgttcggcaaatcagccgctcccgctcgggcgcgtgacgagggcgagaagcctttctggatttcattcgccgacctgatgacggcgatgatgatcttgtttttggtggtgatggtggcctcgctgagctcggtgacgcagcgcattcagcaggctgaacaaggtgagaaacagcgcggcaaggacatcgctaagctctgccatgatctcagactgagggcgggggatcttaactccaccatcgtggtggactgccgggataaccgcattagcttcggtgaggctgggcgcttcggccacaatcaatacttcctcaacagccaggggcagcaggccctgcaggatgttgtgccgttgatcttggatgctgctgacagcgaagagggacgcaagtggctcaagcaggtggtgatcgagggcttcaccgatacggacggttcctacctgtacaacctgcacctctcgctgcagcgctcggagtgggtgatgtgcagtctgctcgatagccgcagcccagtgcagaaagggctttcagctgagcgtcaacagcagattcgctccatgtttctggctggcggtgtgtcgttcaacaatgccaaggagagcaaggaggagagtcggcgggtggagctgcgcatgcagttcttcgggctcaaggaccaggagcatgaaggtcaggaaccggcgcttgagtttgcttacgcggcaaacgagaaatgccagttggagatgcgctag

SEQ ID NO: 334752 - DNA, 1677 bp, Pseudomonas aeruginosa
atgagccgggctctgtcgtttctgtcggcggccatcgcttccggcttgcagcgccagaatgagcgtagcggcgatgtcgggctcagtggcttggtggcgctgaaacgcgccagtactgagctttctcggcgctttgatcaggtcgaaaaagccctggcaccgccccgtgagaaacgcttgctggcacttggcaagttcaagcgcgagcaggcgctgacttcatcagagtggcgcctggttttcgccgggctggccgatgacgatgaagtcagtgttccggtgctggaagacgatcagctgtttgaccgtgttcatcgggaggtggctggccgtatcgagcagcggtcacttagccgccgcgactggctggcgctgtgtttcagctactttgcctacgatgagcacaagcccgacgacaacgcgaactggcgggtgctgcgtgacgatattgatcgcggcttcgatgctgtcaggcagcgtattggtcgcgagaaagagtggatgcgcattgtagccgagcatcgcgaactgttcggcgctcaggctggggcccgtctggcggaggagatatttgagggcagggcgcgtgacctttcctctctgcaggccattgcccaggtgccggatggtagttggttgtggcagcggatatttgcggttctgctttcgcgcattttcctgctggatgacgaaaccttcctaaagcgcctacgggagttggtagctctggggcaactgaatacgcgctatctcaatcaggtgctaagtgcctgccttactcgttatcaccgttcgcgatatcgcgaacagtcgtcctcgctactcaagcaggttgcgttggagcactggggcagcccacagatgcgttccaagcagaacgcctggttgcagtatgtggagcagcctgtctgcgccatggtggtggcctggttcgccaaggaagatctggaacacttcttcaccttgctcaagggcgaggcggaggtcgaccagtcgcgcctgttctactggctgcgattcaccaatcaaatgagctacacgcggattgtgatgggcagcgatgcctggcatgaccggagtagtgatttcgtggccttccgtgagaagaacaaaggacgcttgagtcagctaaccggagggtcaagccacatcaatgcggttgtgatgcagatcggtaactacttctttgttgagttttcaggtacgggccatgcctgctacgtctaccgggcggataggttgccatttaaccctgatcagcaagtgcttggtctgaatacagagctaaagcagaagggccataagcccgcgcctatgcggcactcacctgcgcccaggcgtcctaatgtggtcgaaggatggctggagaagtttgatgacgagctccgggcgctgggaatcgtcgcgcagcgtccagcttcatatacgcaaccccgcggttccgaagacaaacccgccgcccatagtgctgcgtctgcatccgtcgcgggtgattcgctggatgtgcaggttaagtcgatgttgggcagtgtgccctataagacgttcgatcaccgctcgaccagcggggtctaccaggttttgcttgccagggatgatgcggctgccaaaacagcgttgctgcgcctcggcttcaaggctgtgaaaaacaatgcactcatgttctggaggctttga

SEQ ID NO: 334753 - DNA, 3102 bp, Pseudomonas aeruginosa
atgactgaagatcagctggagcaggaaaccctcggctggctcagtgaactggggtacgcgcatctgtatggcccggatatcgcccacgacggcgacaatcccgagcgcgcgagctatcgcgatgtgctgttgaccatgcgcttgcgcacagccattgcccggctcaacccgcagatcccgctggcggcgcgtgaggatgccttgcgccaggtgctggagctgggcgtgccggtgcagctgtcggccaaccgcctgtttcatcgtctgctggtcggcggtgtgccggtgcaataccagaaggacggcgagacccgcggtgacttcgtacgcttgatcgactgggccgatgtgcgggccaacgagtggctggcgatcaaccagttcagcatccaggggcctaagcacacccgtcggccggacatcatcctgttcgtcaacggcctgccgctggtgctgctggagctgaagaacccggcggatgtgcatgccgatttggtaaaggcgttcgaccagctccagacctacaaggagcagattccggacgtctttcactacaacgagattctggtgatcagcgatggcagcgaggcgcgcatgggctcgatgtctgcagatatcgagcgcttcgcccgctggcgcaccatcgatggggtcacggtggatccgctgggtgagttcaacgagctggagaccctggtgcgtggggtgctgcagccagcgatgctgctggattacctacgctacttcgtgctgttcgaggatgacggtcggctggtgaagaagatcgccggctatcaccagttccatgccgtgcgtgcggcgatcgggcaagtggtcagcgcctcgcgccccggcggtacgcacaagggcggggtggtctggcatacccagggctcgggcaagagcatcaccatgacctgcttcgccgcccgggtgatgcaggaggcagcgatggagaatccgaccatcctggtgattaccgaccgcaacgacctggacggtcagttgttcggcgtgttctcgttgtcgcaggacttgctgcgtgaacagccggtgcaggtggccacccgcggtgacctgcgcgagaagctggccaaccgccccagtggcggcattgtcttcgccaccatccagaagttcatgccgggcgaggatgaagacagcttcccggtgttgtctacgcgctcgaatatcgtggtggtggccgacgaggcgcaccgcacccaatatggcttcagtgcttcgctgaaggtgccggacttgaaggtggccgaggccagtgcccgctaccaggtgggttatgcccagcatctacgcgacgctctgcccaacgctaccttcgtggcctttaccggcacgccggtgtccagcgaagaccgtgatacccgtgcggtgttcggcgactacatccatgtctatgacatgcagcaggccaaggaagatggcgccaccgtggccatctactacgagtcgcggctggccaagctgtcgctcaaagactcggagctggcgcatatcgacgacgaggtcgacgagctggccgaggatgaggaggaagatcagcaatcacgcttgaagtcgcgctgggccgcgttggaaaaggtggtgggcgccgagccgcgtatcaagagcgtggcggccgacctggtcgcgcacttcgaggagcgcatccaggcgcaaagcggcaaggccatggtggtggccatgagtcgcgagatctgcgtgcacctgtataacgagatcatcgccctgcgccccgaatggcacgacgaggatccggagaagggcgcggtgaagatcgtcatgaccggcagtgcctcggacaaggcactgctgcgcccgcatatttatcccggccaggtgaagaaacgcctggagaagcgtttcaaggatcctgccgatccgctgcaactggtgatcgtccgcgacatgtggctgactggcttcgatgcgccttgcgtgcataccctgtatgtagacaaaccgatgaagggccacaatctgatgcaggccatcgcccgggtaaaccgggtgttcaaggacaagcagggcggcctggtggtggattacatcggcattgccaacgaactgaaggcggcgctcaaggaatacaccgccagcaagggcagggggcggcccaccgtcgatgcccatgaagcctatgcggttctggaggaaaaactcgacgtgctgcgcagcctgctgcatggcttcgattacggcgacttcctgatcggcgggcacaagctgctggccggtgccgccaaccatgtgctggggctgaaggatggcaagaagcgctttgccgacaatgcgctggccatgagcaaggcttttaccctgtgctgcaccctggacgaggccaaggcggtgcgtgaggaagtggccttccttcaggcgatcaaggtactgctgaccaagcgtgacatcagcgcccaaaagaaaaccgacgaagaacgtgagctggcgatccgccagatcatcggcaatgccgtggtctccggcgaggtggtggatgtgttcgaggcggtcggcctcgacaagcccaacatcggcctgctcgatgacgaattcctcgctgacgtgcgcaacctgccggagaagaacctcgccgtcgagctgctggagcggctgctggagggagagatcaagagcaagttcgccagcaacctggcccaggagaagaagttctctgagttgctcgatagcgtgatcaagcgctaccagaaccgctccatcgaaaccgcccaggttatcgaagagctgatcgagatggccaagaagtttgctgcagcgagcaagcgtggggagcagcttgggctcaatgatgacgagctggccttctacgatgcgctggccaacaacgaggcctcggtgcgcgaactgggcgatgaaatcctggccaagatcgcccatgagctgaccgctagcctgcgtcagaacgtgacggtcgattggagcaatcgcgacagtgtgcgtgccaaactgcggcttctggtcaagcgcatcctgcgcaaatacaaatacccgccggatcggcaggaggaagctgcgcagttggtgctggcgcaggctgagacactttgcgaggcttggatttaa

SEQ ID NO: 334754 - DNA, 1269 bp, Pseudomonas aeruginosa
atgaaaagattgataggaatcatcctagtcgcactggccatcaccggctgcaaatctgaaatcgacaatgcagagaccgttatcaggaatgggctcatctataaatacggagaacccgacccattcaccgggctggtactaaacactccagcaggagtccccggcatatcagcgctctgcaactcccaagtggagaaaggtcgatatagcggaaaaagcgagtgcttctacaattctcaaaaggtgtacgaggttgagtacctggaaggcgtcaaaaacggcaccgagaaagtattcgatgctaaaacaggcgacaaaatttccgtcaagaactggaaaagaggtaaccaggacgggattgctgaagagtaccagaatggcgtactgactcacctgcaagagtttaagaatggcaagccggacgggacggaaaccggctggaccggcgatggtaagaaggtgatcactgagcttacctggagcgccggcaggaagctcagcggctatgagacgaattcaaacgagaaactcaactatctaaacggccaactgcacggcccacagacaaaatacggttacctcaccggaagcctgaagcagtatgtagcctcggaagaaaactacaaagacggcaaattggatggcgtacagaaaacgtacataaatactctgcacaccgaaatcattcaacaggagtccgaagtaatctacgagaatggcactgcagtttccggatggttaaaaacatttaacaagcaagacggaaagccaatccaggaaatcaagctggttcagcccgacaaagtcgaagacgaaaacttccgcactgaatatccaggaaatctcgtaccagacgggctgatcaagacctataactatcagaccgacagctttgatggcgaagaggtctgggtcaatggcgtaaaaacaaaatactcctacatctctctagttgccactgcggatgacggctacgacgcagcggatgacagcgacgacgctggagacatggtatttaacgttctcgacactactgcgccatacgaaaaatacagaaaagtttccaaagcagaatataccgcctatggggcatcaactgccttaaaccctagcgctacaaacgctaaatcatcatcaatcgtaactagtgataactgccttgaggcttggatctccgccttccgcgaagaagtaggtgaggatgcgctgatcgtaagcgagcaactcagtgagtgggaaagctggtgtagcgaaggtaggcttccgtga

SEQ ID NO: 334755 - DNA, 354 bp, Pseudomonas aeruginosa
atgtacgtcatcaccggactgaacgaagcgcagatcgacggcctcgtgcgcagcagggcgtccttcgagatcaatggcctcaggggtaacttcatggctggcatcaaactggtcgagaccaagatcgaaagcttggggatgaagtgtcgcgtcaagagcgatacgaaaagcgcgcttgctcaaggaggcgctattggcgcgattgccagtctggcttcggttccagtcaccctttcagtcgtcacgctaaccgcagcagccagcgccggacacagcctgctgacccgaaacccggactacgaaatcctcaaggactacgtgaatcaacggctcagggtcatctacaagaaataa

SEQ ID NO: 334756 - DNA, 765 bp, Pseudomonas aeruginosa
atgcggaatgccgtcgttgattatgcgattccgcgttcgaagctcgccgacgcaaaggcgcgcgacaacagattcaacagcaccgaggcagtcgccgaactaatcgagcgggccaagcgctcgtttaccgatttggcgaacaccggcgagggtggagagatgctgctgttcctgctggcggagcgctttctcaagctgccacagattctttgcaagatggatctcaagacggacacacgtgtgcactatcacggcgcggatggggtgtatgcgggcgtgacagcggagggcactttaaaactctactggggtgaatcaaaagtctacgcggatgcgagcgctgcgattcgcgactgtctcaattccctctccccgttcctgatcgagcccgaacacgaggaggcagggcgggagcgcgacctgatgctcctgagcgacaaggccgaccttagcaacccagccctcaccgatgcactcaagaagtattttgacaggtcgtcggtcatgtctaagcgggtccaatactgcggcgtggcccttgtaggcttcgacgcaccgttctacccgaaggacaatgcgaaggcggttgctgaggagattgtcgaggcgtcccgcaccgcacttaccggttggagcaatcgtattggcgagcggctcaaattggagaagctcgatcagatggaaatcgagttgttctgcgtccctctgccgtcggccgaaggtttccgcgcagcattcctcaaagcaatggggatcaaggaataa

SEQ ID NO: 334757 - DNA, 2601 bp, Pseudomonas aeruginosa
atgagcctcgccgacctccaatcgtggctacttcaagagggtgttcgagacgatctcgatgcgatcactcgactaacagtacgcaacgaactcgataatctggcaccagatacctcggttcaatccgacgagcctattgactggcccagattgttgctcgccggcagtattcttgcgcgctccgatcaaaggggagatcaagaggccgcgcttcgagtcgcaaccgctgcagtttctttgacggatgatcaagcactcaaagacgctggcgcggttcttatgggcaagctttccaactttcgggccattacgttagccaccgaccgcaaattggtggcagccggccttgatgggcggcttggtatcgcattgcgtctcgaggctcagcggcgtgagatggaccgttctgtcttggtgcagtcgagcggggcttggctacaagtaaacgattttcagcagcgcttctggattaatgcagccggagatagctggctatcggcatccgcgcctaccgcctctggcaagacgtttctcgttcttcaatggcttatagaccaagtggttgcgggcgaagccagagttgcagtctaccttgctccgactcgcgcactggtttcagaaatagagaccaatctcaagagcatcctcggtagctccgaggagatagaggtgtcgtcccttccgctccctgataaatacaaagctgctcgggccggcagtgcacgagtgattctcgtatttactcaggagcgattacatcttctcgccaacgtgcttggtgacatgttcttaatagaccttctcatcgtggacgaggcgcacaagatcggggacaaccaacgcggcgtgattttgcaggatgcaatagagcgagccacccgcgccaaccccaagctgaaagctgtgtttatcagtccagcgacccagaacccggaagagctactcacggacgcgcctctcggtgtgcataccgtcgccgtcgatagcgactcgtccacggttcttcagaatttgatagttgcaacgcaggtgccgcggaaatcgaagctgtgggagcttactctccgacagcagggctcaaccctgccagtaggggttcttcagctcgcgagcacaccggaaggggtcaagaagcgcctcgcgtttatcgcagcagctgtcggcgaaagaggtggaacgctcgtatacgcgaacggagcaggagaggcggaagaggtcgctgacttgatcagtcagctcttgcccaagcttccaaccaccgatcctgagctttcagagctcgctgaacttgctcgtaagggagtgcaccaagacttccgactggcaccgctcgttgaactcggagtggcgtttcattatggcaatatgccgtctctactccgactcgagatagagcggctattccggtcagggaagatacgtttcctagtttgcacctccactctgattgagggcgtgaatttgtcctgccggacaatcgtggtgcgcggaccgcgaaaagggagaggccacccgatggagccgcacgacttctggaatttggctggccgcgcaggtcgatggggtgatgaattccaaggaaatattatctgcattgatccagaagatacgcaggcttggcctgcgggcgttccgggcagggcacgttatcccattaagcgcgaaagcgatgcggttctcgagcttggcgacggtatggcgggttatctagccaatcgtgggctatcggacctatcaagcatcgaggataaggataagttcgagcaggttggggcctatctactcaccacctttatgcggctcggctccatatcagcggcaagcctcgcgaaacgccatgatgccgagtcaattgcgaagctagatcaggccttgggggcgcttgcagaacagatcgaaatcagtgttgacctagctgctcgtcatccaggcgtaagtgcggttggtcttcagcaccttcttgaagcatttcgtgcttatccgggcgatgttgaaaaccttcttcctgctgacgttgcgagtttcgacagttatgaccgattcgtcacaattatgggaagagtcaacgatcacttgtttcttgctttcaaccccccagctcgcatcaggctgtatgcgttaattgtcgtcaaatggctaaagggctactcgctagcccgtatcattcgcgacagcatcgattggcatcaaaaaaacgataagcctttcagtcttcctggactgattcgtggcacaatggagttggtggagcaaatcgcgcggtttagggccccaaagtacctttccgcttatatggatgtgctgtatttgcatcttcgcgaaattggtcgtgaagacttgatcgacgatggtttggatattggcacgcaacttgagttcggtgtttcgtcgacgacacttctctcgctcatggaactgggtctttctcgtatgagcgctgtcgctttgtacgagagaattgcccgcgacgacctcaatagagatgaatgcttagcgtggatctccgagcgcatgagtcaattccgagcaatggacatcccggctatcatcatccgcgaggtgcgtgaacgtcttacgcttcctggcgaatcaaccacatag

SEQ ID NO: 334758 - DNA, 2058 bp, Pseudomonas aeruginosa
atgactacgtacgccaccggtaatccgctgggttctaaaggcccgcgtgatctgtacgataacgccgagaatttcgacgcggcgatgaacgaccgggtaaataccacgtggaatgatcgtttcggcgttacgcgtcctaccctgaaagggtatgaggaacaattcaattcttttctggctggctcaggttttgaaaatccaccattgatatatgttgatggatctcctttgactgttgacagggctactcagattatagataggggtggcaatctttatagtgtaaaacttccatcttcgttccctgtcgttctttctggcaattggcctgaagatgaaggtttacttgttgtgcgtggcgatcagtctcttcgccaagaaataactagcatttctccaagtgaaggttcttccatcattggtaattcgaccgtctctgtttcttctgtcgctgatataaaaaatcagacaaagagagcggatctcaaactatctttgtcctcctatcatcctcttggaaaatcaggaggtgggaccttcatttggagcccatcaactccaaagtctaatcatgatggaggaacaatttttagtccaaccgttccatgggatggttctcagtcaactctttccgactacctagatggagaaggcgaaacagacccttctggatctggctgttggttaaggattttcgatgaagttaagttggaatattttggtgggctaataagtgagactatagattcttcagcatcttttttggccgcaattaaatattgtttgtcaaacaataaagagcttaatcttccagatggtgctgttcgccttaattctcctgctgtaattaatggatctaccactcttttttcttctgttaagattcgaggaaccttcaagacgagtggagtatctgctgggtatgtggtaaaccgagtaggaagccttatctatactgacggtaacagcgctctagatatctcgttcaacgacttcaggaatgaaaattttgatatccgtggagttgcatttgtagatacctcattctatcctccgggaactcctgcaagcccgaatcctgcgataattattagaaagggtaatcctgacggcagcagcaatcgatatataactggtaacgttcttgaggacgttgcttttgttagctatcaagatcctattaagaccataggtgtagctgctggtcttcctgcatataactatgttggccctacttcgcttaatcgtgtgtacttctacaggtgcggaacagttatgcacctgcaagactgcacatataatcatcttttcatgaacgagtgccttttgtttgatatttcttctcaggcaatattcttgagtaagactgatagcggcaccggtggaaacgtagtcgtaaccttcaacaactgcgtattcgaatcaatttggggcatcatgaatactgcaaacggacttacatcctcctcaatgcgaaacacagcagtatttaactcgtgcaatcgtgaattctgcggactttatggtccaactggaggaggaggagattttgcaggcagtccattgggttatgttggccatacagacattatgatcaatggtaactgggaacgcggtcaggctttcggagagacgacgttgccagcgatagatcctggagctgtcatttttgccagccgatatgtagatgtcattatgaatggcggccaagttggatctccagaatacgtcaacgttgttgacgtaagcgggacaattccagcatctggcagcctgactaagactttcaatgtgagcggatcgtttgtgttgaatgctgacgtcgcatatgacgacgggtttggcgggcaccagaatgtagttgcgtatggcaaccctactggctcaaaggcgcgggacgtgacagggacgatcatttctgctggtctatctgcgacctacggggacgggccgtcgggtgcggctttcaccgttacgttcaataacgggactgcatcgccgatcaatgtgaagatccgggtcacgaacaaagcagggttgatcgttactgtttcatga

SEQ ID NO: 334759 - DNA, 2499 bp, Pseudomonas aeruginosa
atggctgagaatgtcggcagcatctactacaccgtcgaggcggatacctccagcctcgtcaacggtgcgaatgccgccgatcgctcgctggacagcatgcagggttccatgcagcggaccgatgcgactgctgggaagttgcagacccgcatgaccagggtggctggggctgtgcggcaggccaaccagcagatcggcgcccaaacctcggcatacagcgggctgacccgggtcgttgccgcttacctttcgctccggacgctccagtcggtcatcgagctttccgaccagtacggccagatggcctcgcgcattcggaacgccaccagcagcgccgaagagtacgccatggtgcaggagcgcctgttgcagaccgccaacggcaccttccgggcgctgagcgaggctcaagaggtctacctggctacggctgacacgctcagggatctcggctacaccacgtccgacgtcctggacatcaccgattcgttctcctacgcgctggttcgcgacgccgcgcgcgccgaccaagccaccaccgccatggatgcgtggtccaaggcgctgatgaagaacaaggtcgaagccgatggctgggcttcgatcatggccgcgacgccgtcgatcgtagagggcatcgccgaggccaccggccggacccaggctgaaatccggcagttgggcgccagcggtaagctgtctgtcgaggcgctaaacgaagggttgcgccgcacccgggacgagaacaaggcattggccgatgagatggaaacatcggtcgcagactcgtttaccaaactgcgcaacagcatgacggtgttcatcggaaaggtgaacgagtcgagcggcgccagccagatcctgaccagcaatatcgcgaagctggccgagatactacaggatcccgaaaccatcaaggctgcgcaggacctggctgctggcgtggttggtgcgctgaacaagatcattgacggggcgaaggaaaccgtccggatagttcagtgggcttctgaagaactggcctaccagcttagcggcgggatggctgcgtctgatgacattgttcgactcaatgagtcgctagccgatcaacgggaagagcttgcgaagctggagaaggctcgggacaacctaagggcgcttggcctaaaggtcgaaaacgaggacccgatcaacaagctcaaggccgacattcgggcaactgaggcgttgattgaaaacttctacaagagccaagagaagaagcccccggtagaggcaccgaagctatctactccatcgcagccaggtaaatcgggcgggaagaccggtaccgtcaacgccgaggccgctgccacggcaggcacgaagaagctcaccgaggcgcagaaggcagccaagaaggccgctcaggaactcgcccaggcgcagaaggaaaacatcgacaccattgctggcctcggccagcaactcgctcttgtcggcctgaagggcaaggacctgatgcagacccaggcagagctgcaactcaacgagtacgccacgccggagcaggtcgcccaggtccgcgcgctcgccgccgctctgtacgaagcgcaacaggtcgaagccaacaagcagttgctggggcagatggacccgatcgccggcgaagaccagcgctaccagaccgaactggagaatctgaaaaagctgaacgaggccaagttgctcgaggaccagcgctacctggaactcaaggcgcaggcagagcaacagcacgatgccacgatgaagcaactggaggaggagcgattccgccgccaggctgccggcaacgagatgatcatggcaacgctggatcaggtgcagcaggccggcacgaacgctctgactgggctgataaccggggcgaacaacggtgctgacgccatgcggcaactggccggcgccatgctgaatcaggtcgtgggcgccctcgtcaaggtcggcatcgaacaggcgaagaacttcatcatggggcagagcatgcaagcgaccgcaaccgcccagggcattgctcaggccggggcgttggctggcgcatatgccccagctgcagctgcggcctctgtggcctcatttggcggcgctgcgacggcaggccttgctgcaatggcagcagcaatcccagcgatgctaggcctcttcggaggacgccaatatggcggaggcgtccaggcaaatggcctgtaccgaatcaacgagaacggcgcgccagaggtattccaggctgcgaatggccggcagtacatgctgccgaacacccgtggagaggtgatcagcaacggcgacgcctccgcccaaggctcgccgcagatcagcctgcagatcatcaacaacggtccgccggtttccgccaccgccgccatggacgggaacaacctacgggtaactctcgatgcggtcgagcaggactttgccaacaaggtttcgtctggccaggggctttacccgaaagcaatcgaaggcgcctatggattcaagagggcagggcgatga

SEQ ID NO: 334760 - DNA, 444 bp, Pseudomonas aeruginosa
atggctgacctccgtccagtgatgttcaccgtgcccggcgagcccgtggggaaggggaggccgcgtatcggccgcgtcggcgcccacgccaggatgttcacgccggcgaagacggcgaactacgaggggctgatcgcgcacgccggccaccaggccatgctgggtcgcgcgctgttcgagggcccggtgctggtcgagctcgacatcgcgctcagcatccctcaatcgatgtcgaaaaagcggaagtcgctggcgctggccggcggcctgtaccccaccaagaagcccgatatggacaacgtgatcaaagcgatctacgacggcctgaacggcgttgtctggaaggacgacgtccaggtcgtgaaggcggtggtggggaagcgctacggcgaaacgccaggcgtgcgagtgaaagtcgtccctctcctcgagggcgagcagtga

SEQ ID NO: 334761 - DNA, 465 bp, Pseudomonas aeruginosa; identical to SEQ ID NO: 334608

SEQ ID NO: 334762 - DNA, 1203 bp, Pseudomonas aeruginosa; identical to SEQ ID NO: 334609

SEQ ID NO: 334763 - DNA, 249 bp, Pseudomonas aeruginosa
atgaacaagattgtgctgattctgcttgctgcgatgctgaccgcctgcggcaaatccgaacccaccgaaacggtagaggcacttgccgccaatccccaacgattgaaggaactgcggcaacagtgcaagacggatcgcgccaagctgggcgacgaactctgcaatcgtgtggctgaggcgacgaatcgacggttctttggcgatgggaaggcgccctataccccaccgaaagagcagccgaagttttga

SEQ ID NO: 334764 - DNA, 945 bp, Pseudomonas aeruginosa
atggaaatacgccatcttcgctgctttattgcagtcgccgaggaattgcattttgctcgcgctgctgagcggctgcacattgagcagtctcccctatcgcgcgcgatcaaagagctggaagaagacttgggtgcacagcttttcgtgcgcaatacacgcagcacccgactgactcgcgcaggccagctatttctggaacacgtgccgcgcgtcttcacggctttgcagcaggcgcgcgacagcgtgaaggcggctgccaacggttttcataaccagttgcgcgttgcgctatcggatggcatcccgccttcacgcttctcaacctttctagcattgtgtcgcgaagaagaaccggaaatcgagatacgtctatccgaagtttcgctggcccagcagatcaaagggctgcacgacgacctttacgacgtggggtttgctcggtcggatgaagttggcgacggcatcgtcgccgaagctgtctggagcgatcccttgatggtggcggtgccctctcggcacccgctgttgacgtacaagcgcatcccactggaggaagtgctacgccatccgctggtgcttggcgatccccatgcgtgcgaaggatatacgcggcagattgaaagggtgctgcgtagggtcgatcaagagccgttgatcgccgaacgggtggcctccgttgatttgatgatggcgatggtggcagcaggtttcgcccttgggctggccggagcctcgcagattgccgccagccgtgaacagggtgtggtcgcgcggcctctggctggccgcacacccatgctcactacttacctgctgcgccggggcaacgagccttcggaagtgttggctcgtttcatcgagagaacaagcacccttgaaccatccgcgacgaagaagccgaccgtactacccgaccttgatgcttcggaggaaatcgagccatga

SEQ ID NO: 334765 - DNA, 1533 bp, Pseudomonas aeruginosa
atgacttccacggaacacaagccgctttccgggatggatctggtcatcgcggcaatcatcctgtctctggcgaatttcatggtggtgctcgatacctccatcgccaacgtggccatgcccacgatctcggggtcgacgggtgtctcgacgagccagggcacttggatcatcacgtcctatgctgttgcggaggccatcaccatccccctgaccggctggctcgttcgccaggtcggcgaagtacggttgttcatgatctgcgtcgtggcattcgtactgttctccgtgtgctgcggcctgtcatggtctctggaaagcctcgtcttctttcgcgtgttgcaggggttggccggtggaccgctgattccgttgtcatcgacgttgatgctggcggtgttccccaagaacaagtcaaacatcgcgctctcgttgtggggaatgatgacggtcgtggccccgatcttcggcccaatcctgggcgggatcatttcggataactggcactggggctggatatttcacatcaacttcgggttcggcatcttggtcatgctgggcgccatgaaagtgcttcggggccgggacgaacccacggagcgttcccgcatcgacggaatcggtctggcgcttctggtggtttttgtcaccagtttccagatcatgatcgacaagggccgcgagctggattggttcgcttcgccgctagtggtcacgtgcgccatcgttgcagccgtttcgctgatctatctgattatttgggaactcaccgactccgatcccgtgatcgacctgagcgtcttccgctcgcgcaactggctggtttcctcaatcacgcagagcctgatgttcggcatctttttcggcaacatcgtgctgacgcctctgtggctccagcaacagatgggctacacggcgacatgggccggcttcgctaccgcgccgatgggcattctcgcggtggcgacttcaccgatcgtcggtcgtctcctgccgaaggttgaccctcgttggatcgtcacctacggcatgggtatcttggccgtctcgttcttcatgcgggcgcatctgacgacccaagccgacttcatgtcggtggccatcgcgatgtttgtcctcggcgcaggcattcccgcatgcatgattacgctgacctcgttgggtgtttccgacctgccgcccgagcgcattgcgaatggagccggcctgcaaaacttcctgcgcgtgctctcgatggcgctcggatcgtccctgacccaaacctattgggagcatatgtcgaaggcaagccggtccgagcttgtctcaatcatcaacccgaatgcagggcatgaaatcgcttccgcggcggttcgcgccggaataccgccatcgagttctacagcatttttctcgcgcctggtcgatggtcaggctgtgatgctggctacgaacgatttttatgcgctggctaccgtgctgatgatcctctcgatcggcgctatctggctggttaagcggccgaaggggccactccagaaagtcacggggcattga

SEQ ID NO: 334766 - DNA, 1179 bp, Pseudomonas aeruginosa
atgagtgctccgatgccccctgaccctcaagattcttccacaacgccggaggcttcacaaaagcgggcgaagcgcaaacgtctcgttttaattgcgacggttggtttggtcgccatcggtgttctctacggtgcgtgggcgcttctgttcgcaggcaaatccgtcaccacggataacgcctacacggcagcggaagtggcccaaatcacaccactcgttgccggccctgtaaaggaagtcaaggtcagtgacacgcaggccgtcaaggctggcgacgtgttggtaattctggacgataccgacgccaagattgctgtcgcgcaggccgaggcggatttggcgcgtactcagcgccaagtacggcaactgctgggaaatgacgagagccttgcgggacaagtggccctgcgtgctgccgaaatcgccaccgctcgcagtgacctgacccgtgtaactgccgcctatgaaaaagcggtcatcgacgagcgccgtaggcagaacctggttgaagaaggcgctgtctcgaaagaggagctgacgaatgcgcagacgcagttgcgcgaggcgcgcgctgcgctggagcaggctcaagccggagttcgcgctgccgaggccgcaaaggaagctgcaagcggcgcccggacggccaactcggcgctgatcgtagatagcacggtcgatgacaaccccgccgtactcgcggcgaaggcgcggcttgaccaggcgcgcgtgaatcttgaacggacggtgctgcgtgcgcccttcgatggcgtcatcgcgcagcgttcggtggagattgggcaacaggttcagactggcgtgcggctgatgaccgtggtgccgatcgaccgcatctatgtcgatgcgaacttcaaggaaggccagttgcagaaggtccgtcccgggcagcacgtggaactgacctcggacctctacggcagcgatgtcgtttatacgggccgtgtcgaaggcttcgctggaggatcagggtctgccttcgcagcgattcccgcgcagaacgccacgggcaactggatcaaggtggtccagcggctgcccgtcaggatttggattgatcccgagcagttgaagcagcatccgctgcgggtcggtctgtcaatggaggctaccgtcgatctgcgcgaccacggtgagtcccagccggttgcgacgaggtag

SEQ ID NO: 334767 - DNA, 1359 bp, Pseudomonas aeruginosa
atggaaaagcccgcatcaatggacgggcttgcggccgacaagagccttggggcgcctgtcggtgaatggccgacgcaggcgtggtggaagtcctttggcgatccacaacttgaccaattgatggacgaagcgctggctagctcgccgtcgatggcgcaagcgcaggctcgcctcaatgccgctattgcgcgatcgaaaggtgcgcgcgcagcgctgtttccctctgtctcactggacgcatccgccagcgagcagaagctgacgtacaacagcatcttcccaaaggatgtcgttcccaagggatggaacgactatggcgcggcttctctgaatttcggatgggaactcgacttttggggaaagaaccggtccgcgctggatgcggccacatccgaggcgctggcggtgcaagccgatgccgccgcagcccgcgtcctgctgacgacggagcttgcaagccgctatgtccaactcaatggcttgcatgtacagcgcgatttggcgagcgacacgctcagaaatcgtgaggactccgagcgcatggcgatgcgccgcgttgaccagggcctcgatacacagacaacactggaacaggcacatgcgagggccaagctggcacgggctgacttggccgacgtggaagagcggatagaactggctcgcaatgggatcgcggctctgctggggcgtggaccggatcgtggtctgaatatccacgagacgcatctttcgccgagcctgtccctggcgcttccggaaacactgaagagcgatctgatcgggcgcaagcccgaaatcgtggcagcgcgatggcgcgtggagtcggccgccaagcgtatcggcgttgcaaaggcaggcttctatcccagcgtcaatctggtcgccctggttggctacgagtcgctgggcctgaaccgcctgttcgattcgggttccgacgcgggccgtgccggagtcgccatccatctgcccattttcgagggtggaaggctccgagcgaactacagccgagcctgggccgaatacgagttcgcagtagccagctacaacgatgcgctggtccaagcattgagagaaaccgcggacgcggtgaggagcttgcaagcgcttccgatccgcctcgaagcaacggagtcggcggtcgtcagcagcgacaaagcctaccaactcgccaagcgccgctacgagggcggcttatccaactatcaaaccgtgctaacgacggaggatgccgcgctcaatgcgcggatggccgtcaatgccctgtgggtgcgcggcctatccctcgacattgcgctgacaaaggcctttggcggcggcttttccgattcctcaatgaatgaacaggtgacccgatga

SEQ ID NO: 334768 - DNA, 1962 bp, Pseudomonas aeruginosa; identical to SEQ ID NO: 334610

SEQ ID NO: 334769 - DNA, 600 bp, Pseudomonas aeruginosa; identical to SEQ ID NO: 82629

SEQ ID NO: 334770 - DNA, 255 bp, Pseudomonas aeruginosa; identical to SEQ ID NO: 327978

SEQ ID NO: 334771 - DNA, 336 bp, Pseudomonas aeruginosa
atgaaaaggatgctgctggccctagccctagccctagccgcaagccctgcactcacagaagaatccaagtccattgccacccaagtgggtgacgccatccggcctgccgccgaagcctatggcaaaggcatgcagaagctagtgaacgaactgttcgccggatcaaaaggccccatgggcgaagccgcccgagccaacctcaaagcccaagatcaacgagaacgcgaagccaatcgcggggttcgtcgcaccatgaaggaatgcatcaagcctgggaacgtcattgatgatgatgtgaaggaatgcattgaggggattagaactaaggagtggtag

SEQ ID NO: 334772 - DNA, 591 bp, Pseudomonas aeruginosa
atggaaaaagcaacattgcttaagatgattgctgagagagggtatgacgcaggatactgtgcaaagcttcatttctctacatttgatattgtagaaaaagtgccgggctgggtggggctgttgactacggttatagggatttttgctcttgtagtcccagattttgaatcgaagataatatctgcatcaatggttgcgataggggtaacgactctatatatcaatttttataatgataaaaaatcagagtattttgaggctggacgtaagttagcattaatttatgataagctaaaaaaacttcatgcgaaagttaaggttgctagtccagaggaattggttgcagctgaggctgagtttgacagattatcaagtgaaattcatgctctttgcatgagtaaacatattttttcagcaggatggcttgctcataagaagtttttttgggaacagcagactgactggatagaagaagatagaccttttagcttttatcgcgacaagatacctatgtctgtttatctttttgtactggcagcatttattggtctgattgcatataaatatatgaaggcaggatgtctgttatga

SEQ ID NO: 334773 - DNA, 1266 bp, Pseudomonas aeruginosa
atgagtgctgatctatttagcgtttttcgctctaacttggcagtaaaaaatgctgacgagatcagcgtgagctacaaaaagattaccaagaagctcaatgagaaatattatgactcggagtcggaatttttacattgtaggcaggtgggatcctatgggagaaggactgcggttgacggtgtaagcgatttggatatggcttttctcttgccatgggatgtttaccatagatttaataattatgctaacaacaaacagtctgcgttgcttggtgagattaggaaagaattgtccgacttgtatccgaataaaactgttcgggcgcagcagcaagtagtttcggttgactttggtacttatgtcgtagaggttttgcccgcgtttgagaatgaggatggaagctatacataccctgatgcaaatgatggggggagctgggaggactgcaatccaattgctgaaattgaagaagttgatgagttgcacaagtctaccaatagcaacttgaagcggctttgtaaaatggtcagagcttggaaaaatgaccatggcgttgcaatgaaggggatgttgattgatacgttgtgtcataactttttcaagcagacagatgattatgatgacgcaacgtataaacattacaagaatttggtaaaagatttctttgcatttcttgttgatcaagatgaagatcaagagtattggctagctcctggaagtaaatcaagagtatataaaactggaaacttccatgccaaagcgaagaaagctctacgcaggtgcactgaggcacttgaagatgaagccgtagcgcatgaacggtggaagacagtgtttggcgttcattttcccgatgttgaaaatgaggaagaacgccagcaggcatataaagaagaatttattaatgagaagttttctctagacataaaatacagtctaaaaatagattattcggtagaaagtgtaggtgaaagcttgagggcgttgatgtcaagggttattgactataggttgcccaaggagaagaaattaactttctatatagttagcgataatgttgagccgccttacaagatatattggaaagttagaaatacaggccgtgaggcagttaaaagaaaaatgcaaagaggtaatatcgtgattgatagtggggctagacaaataaccgaaacctcaaatttcgatggggatcattttgtagagtgttacgcagtaaagaacggtgtttgcgtggcgaggggacgagtttatgtacctatatag

SEQ ID NO: 334774 - DNA, 993 bp, Pseudomonas aeruginosa
atgaatagcgaccttttctttgaatctaactcaggcattgatggctttctgggttacataaaatatgatggtaaaggattagagcgggggatcatggatgcccgtaaacaagcagacgccttgctaggcatggatcatgcgctccgacacttcattatcaaattaaaccccgcgttcaaagggattgattttgaaattcctgtaaaagtcagagaaggctcttgggaagcattgattcctgaaactgtctctggctgggttcaggccagcttaggaatagcagcaactgcatatttgactcaagctgctcaaaagatggcagaacgcgatttcgatgaatttggcgtgagggatatctttagcaaagccctgtcagcaataaaatggttcgctcgccttggaaagcatcttggccgcattgaaaccaaaccatttgaagacgttaaatttgccgacaataacaattcaatcggaataaggaatgatgccggcgaatacctttatatccccaaatacgtccttgatctatacatccaaagcgatccaaaaattcttgaagggttagtttctttggtaatagaaggtagaagtctaaaaatcggggatatcaacggcaccattattgacgaagtaaccatcaccgaagatgacaaatatattttttgtgatgaagaaaatgaggatcccgacgagcctcttttcccagaacttcgtcacggggaaaacgttgttctagagggagaggttaccagagagaacaaaacatcaaactcaatgggctttaagtatcttgaccacatcttaactgcctatccagaaacaggcagcatcgttcgatataagccactgctattccttcgttgcagactctttggcacagtagatcgtacagatgaaaaaggaagaaccacagctaaaagaccaaagctttatttctcacatctggaggctcttgaaactgaagaaagcaacgacttatttagcggaatttaa

SEQ ID NO: 334775 - DNA, 687 bp, Pseudomonas aeruginosa
atgtgtggcaggctttcgcagtacacgggacttcacgagttcgtcgacgcgctgtcgatgcccaacgcgctggtcaacctggtcggcgagcagccacagcgctacaacgtcgcgccatcgacggccgtgacgacgctacggctcgaaggcgatgccctggtcgcccagccgatcagatggggatggaggccattctgggcgcgcgatcgcgtggcgccgatcaacgccagggtcgagaaagtggcgcatgggcgcttcttcagcgccgcgtggcgccatcgtgcgctctgccccgtttcaggctggttcgagtgggtggtcgaggacgggccgcggaaacagccgtatcacatccagcacgctgacggctcgccggtcttgtgcgcggccatcggccagtttcctggcctcgatgacgaaccggcagatcaccatgggttcgtgatcattaccgcggacgccgagggcggcatggtcgacatccacgatcggcgtcctgttgtgctgtcatccgaactggcacgcgagtggcttgaccctgcgacgccgccggaacgcgcggagcagatcgtgctgaaccagggcgagccgagcgagtcgttcacttggtatccggtgagccgcgacgtcggaaacgtgaggaaccagggaccgcagttgatcgagcctcagcgctcggcctcataa

SEQ ID NO: 334776 - DNA, 513 bp, Pseudomonas aeruginosa
atgtcctactccgaccccaggcattgccaccaccagcgcgtcacccaatggctcgccgcgatacggcagcatgccgcctggctgtacgccgcggatgagcagtacctgtacctggtgggcgaggcaaacgaactctaccagtgcggaatcgtgggcctgcaggaccgccacgacatggtcaccgacgccttggggatgtacggatgggcgatcgagcacggcataactcgcgagacgcactactgcgcggactgctgctacgacgtgctcgacggcggccgtgctgtcggtacggtggacagcgaaggcatttaccatgctccggcaccgggacggcagcggctgggctacatcagccaggatccactggacgggcagatctatctgcgcctgggacaggcgctcgagcgcgccggcgttgtgcgcggcctcgtgatcgagctcgacgccggcggcacgctgctgcttgtcgagcagatacccgccgatttccggccatggcggtgggtctga

SEQ ID NO: 334777 - DNA, 2463 bp, Pseudomonas aeruginosa
gtgtcttccagcggcgccccgttcgattcgcaggcggagtcctggctggccacggtcaagggttatcttcccgccgaacgtatcaaggccgcctatccgcacagcaaggtcatctggttcgactcgccgcagcttgccctggaagcgctgagcatgggggacgtcgatggcgtgctgggtgacgccgtctccgcgcactatctcatccagacccattacctgctgaacttgcgtatcgagaacttcgcgcccatcgacagccagggtttccgtttcctgctccggccgggggatgagcctctgctcgcggtcctcgatcgagccctgccgcgtatcaatgggcgctacggcgacgaactgttgcgcagttggagcgccgggcggcgcctgcgtttcgacgagcccagggtgacgcttgcgccggcggaacagcgttggctctccacgcatccggtcgtgccggtggtgatcaaccattcccttggcgcgctcgggcaactggatagcgaggggcggctgagcggtatcgggcgtgactatctggacctgatcggcaagcgcagcggcctgcagttttccttcagcggagcccgaaacttcgtcgaggcgaaacgtcgactggatgcgggcgaggcgttggttacgccgaccatgccctcgacggagcgtctcgattccggcctcgaggtcctgactccctacctgcgtagcaccacggtgctgatgagcgccagccggggcggccggggcgaacggctggagcgtgtccatggcctcgcggatctcgacggcaagcgattggccacgacggttggctatttcctcaacgacaccattcggcgcgatcaccctgagatcaagctccaggtctatccgacctttctcgccgcgatgcaaagcgtcgatgccggacagagcgaggcttccatcagcagcgattacaccggtcgctatctgtccgcccagcatttcgacaaccggatccaggtcgtcggtatcctcgatgatctctccattccgatcagcatcggtgtggcgaggaaccagcccgagctgcagggcatcctggagaaggcgcagctggcgatcgctccggaagaagtggcggaaatcctccaccgctgggagcctcgcttcgccaagggagggacggacttctggcgcgatcaccggagcaagattctgcagatcggcggattgttcggcgtactgatttccatctctctcatctggggtttctacctgatgcgccaggtgcgcaagacccgccaggcagaagagcaagccgacgctgctaaccgtgccaagagcgtgtttctttcgacgatgagtcacgagatccgcacgccattgaacgcggtcatcggcttgcaggagctggtgctgaaaaagggcgagaagggcgtgttggatctcgattcgctgagcatcgcccaggaagctgcccaggggttgctgcttctgctgggcaatattctcgatttgtcgcggatcgaatccggtcggttcgattccgctcccgaaccagtgcttcctggcgagttgatcagagggatcctgccgctggttggcgggctgacgcggcagaagaatctttccctggcactggaactcgacggggatctcgagcagtgggtgctggtggatcccctgcatttcaagcaggtgttgttcaacttgctgggcaacgccatcaagttcaccgagcgcggtggggtaacggtgcgggcggtggggcggcgcgaggcggagaggcttcatttgctgctcgaggtaagcgacaccggcctcggtatttcggaggaggaccaggccaggctgttccggccattctcgcaggtcggctcgcctgcgcttggccaggcgtccggcagcggcctggggttgtacattagccgacgcctggtacacctgatgggcggccagatcagcctgcgcagcgagctgggcaacggctcctgcttctcggtcgagttcgatcttccgctgaccgaacctccgcccagcgagtccgccgaagcgcgttccggagttgccgaggtcgaggagcggaaagaggcaagggcgctctcgatattgcttgcggaagaccatccgttcaatcggctgaccctgaccatgcaattggaaagccttgggcaccgggtgacctccacggaagatggcgaggaagcattcgaacgttggcagggcgaagacttcgacgtcgtgattaccgacggcatgatgccgcggatggatggctacgagctggcgcgacggatccgctcgcaagaagcccttggcggtcggcgtcgctgcttggtgatagcacttaccgccagcgccgagaaggatgcgctggagcgttgcctggctgccggcatggaccgggtcctgttcaagccgactacgctcgatgagctcgctcgggcgctgaacgggggagagccgctcatgcctacgagcgtcgattcgcaatga

SEQ ID NO: 334778 - DNA, 1689 bp, Pseudomonas aeruginosa
atgcaacctgaattctggaacgacaaacgcccggccggcgtacccgacagtctcgacttcgccgcctaccgttccgtggtcgaggtcttcgagcgctcctgcaagaaattcgccgaccgcccggccttcagcaatctcggcgtgacgctcagctacgccgaactcgatcgtctgtccgccgccttcgccgcctacctgcagaaacagaccgatctccagcccggcgaccgcatcgcggtgcagatgcccaatgtcctgcaatatcccatcgcggtgttcggcgccttgcgcgcggggctggtggtggtcaacaccaatccgctgtacaccgcccgcgaaatgcgccaccagttcaaggacgccggcgtgcgtgcgctggtctacctgaacgtgttcggcaagctggtcgaggaagtgctcccggatacgcggatcgagtacctgatcgaggcgcgcatgggcgacctgttgccggcgctgaagggttggctggtgaacagcgtggtgaagtcggtgaagaagatggtccccgattatcgcttgccccaggcgctgccgttcaggcaggccttgaagcaaggccagggccatgccctgcagccggtcagggtcggcctggaggatgtcgccgtgttgcagtacaccggcggcaccaccggggtctcgaagggggcgatgctcacccacggcaacctggtggcgaacatgctgcaggtccacgcccagctttcccagctcggcaaagatggcctgccgctgatgaaggaggcgcaggaggtgatgatcgcgccgctgccgctctaccacatctatgccttcaccgcgaactgcatgtgcatgatggtcagcggcaaccataacgtgctgatcaccaacccgcgcgacatccccggtttcatcaaggaactgaagaagtggcgtttctccgcgctgctcggcctcaacaccctgttcgtcgcgttgatggagcaccccgggttcaaggacgtcgatttctccaacctgaagctcaccaactccggcggcactgcactggtcagcgccaccgccgagcgctggaagggcgtcaccggctgcaccgtggtggaaggctatggcctcaccgaatgctcgccggtggtgaccaccaacccctacggcgagcaggcgcgcctgggcacggtggggattccggtcgtgggcacggcgctcaaggtgatcgacgagcagggcaacgagctgcctgtcggcgaacgtggcgaactctgtgtgaaaggtccgcaagtgatgaaggggtactggcagcgtcccgaggccaccgaggagattctcgatgccgaaggctggctgaagaccggcgacatcgcggtgatcgacgaggacggcttcgtgcgtatcgtcgatcgcaagaaggacctgatcctggtctctggcttcaatgtctaccccaacgagatcgaagacgtggtgatggcccatccgaaggtggccagttgcgcggcggtgggtattcccgacgagaagtccggcgaggcggtgaagctgttcgtggtggcccgcgaccccagcctgtcggtcgaggagctcaaggcctactgcaaggaaaacctcaccggatacaaaattccgcgacagattgtgctcaaggatgcattaccgatgacgcctgtgggtaaaatcctccgtcgtgagctgcgcgaaatcgcctga

SEQ ID NO: 334779 - DNA, 402 bp, Pseudomonas aeruginosa; identical to SEQ ID NO: 329443

SEQ ID NO: 334780 - DNA, 258 bp, Pseudomonas aeruginosa
atggaactggagatcgaggtgctggaggccgccgccacctggtacgtgcgcttcggcgcggaaccgccgaacgatggcgagcgccaggcctggcgcgaatggctggaggccgacccgcgacaccgtcgggcctgggagcgtatcgagcgcttgcagggccaatgggcggcgctgccggcggagacctccctgcacacgctggcaggcgcatcggccgggtcggcgtttgcaacgggcgtagctccactgcatggctga

SEQ ID NO: 334781 - DNA, 2445 bp, Pseudomonas aeruginosa
atgccgctggatagcctccgcccaggcggcggcatcgcgcgcctgttcctgggccggcaggaccaggctggcaccggcgccgaggccgccgaacaggtcgaagaccgacagatcgaagtccagcgcggagaccgccagcaagcggtccgctgcgtccacccgcagcaggtcgagcagcgcgtcgatggtattgatcgccgccgcgtggctgacctcgacgcccttgggcaccccggtggagcccgaggtgtagatcacataggcgctggcctgcggcgccagcggcacggggacggccagcgccgggccgcgcagcaggcgctggacatccaggcgcggcggcaaggcctgcggatcgtcctcctcggtgatcgccaggcataccccggcggcctcttcgatcaggcgccgccgtgcgggcggctggtcgatgtccagcggcacgtagcaggcgcctgcggcgagcacgccgaataccgccgcgacctgctgcggtccgcgcggcaggctgacctcgaccgcgtcgccggggcgcaccccggcttcgcgcaggccgccggcgatgcgcagcgcacgctcggccagttcgccgcgggtgacacgttggtcgcgatagagcagcgcgtcagcatccggcgcctcggcggcgcgaaggaagaagtcgcgatgcagggtgcgcgccgtggcgcatgccggctggccgttgagcagggcccggcgcgcctgctgcgcccagggcaacggcagatcggcgggctgctcccaggcgctgtcgcagagacgctggagcagccccacgtaggcttcgaacatggtttccggcagaccttcggggaacaggccgacgacgctgtcccaagccagcaggataccgtcgcccacccggtagagctggtggtcgagccagacctgcggggtctgcgagagcatgtcgtggagatcgccgaaagcgtcgcggaaggccgccgggacgaagccctcctcgcccaggttgctggcgaacaccaccggcgccgagcgcggctggccccgccggcgcgcctcgcggagcacctccagggcggggaatgcggcgtggtcgatggctccgtggaggttgcgctggaagctcttcaccgcctcggcgaaggacaccccggcctgcatccggcactccagcagcaacagggtggtgaagtcggcgatcacctcgccgatacgcgggtcgtcggcatgccgatcgaacaacggcacgttgaggagaaattccgcgctttcgctccagcgcgccaggaccagcgcgaaggcgcagccgaacacgctggacaaggtcacgccatgctgcgcggcaagacgctccaggcgccggctctcgccggcggaaagctggaatgccaggcgccgggtgcgcggctggcggatgctttccggcgcgcaggccaatggcagggccggcgcgtccggcaagcgcggcaggcgttccagccagtagtcgcgggcccgcgccgcggcctcggcgcgttgcgccgcacggcgcgccaggtagtcggcgaaatgcagcgccggcggctccgccaggcgctccggcgccaggtaggcaacgcccagttcggccagcagcaggcgcaggctttcgacatcggcggcaagcaggtcgagactcagccagaggcgttcctcgccgcccggcatgcgcaccagcccgagcaggaacacctggccacgctccaccgccaggcattcatgggcgcgccagtcgcgcagcgcctgccagtcgcgctcggcctcgtccacctgcaaagtgcgccagtcctgcaggtcgaagcaggacagcggcggcgtcggaaggatctgctggcgaccgtcgaagaagcgcgcccgcagcatcgggtggcgttgacgcacgcactccgccgccgcggccaggcgctgcgggtcgacatcccgcgcgcggaattccaggaaggcatggcagctgacgttgcccagcacctcgccggcgccacgtcccagccagtaggcctgctgcacggaagacagctcgaacggctggtcgcgatcctgcgccgccggcagcgcgaccgttgccggggcggacagccggtccgcgcaggccagcaggtcgagccaggcccccaggcaggggcgctgcgccaactgggcgaagtccagcgtcgagccacgcgcgcgcaggcgttcctgcaggtacatcaggcggatcgagtcgaggccgcagcccagcaggtcgtcgtcgtccgccagggcgcgcacgtcggcaagcggttcgccgagcaggtcggcgagctgctcggtcagccagtcgcgcagggcggtacgggaatcggggggcagatccatgggggctccctagggcaagcatctgaagtcggttgccagttcctggcaacgattatcaaatgcgaccttatctcacttgcctgggaggcctggccggcaatgctttag

SEQ ID NO: 334782 - DNA, 699 bp, Pseudomonas aeruginosa
atgcgtaagtcttggcttaccgcttccctgctggccctcaccgtcgcctccccgttcgccgctgcggatattcaaggacacaaggccggtgacttcatcatccgtggcggcttcgccaccgtcgatcccgacgacagcagttccgacatcaagctggacggcgccaagcagcgcggtaccaaggcgactgtcgacagcgacacccagctcggcctgaccttcacctacatgttcgccgacaagtggggcgtggaactggtcgccgccactccgttcaaccaccaggtcgacgtcaagggcctcggcccgggcctggacggcaagctggccgacatcaagcaactgccgccgaccctgctgctccagtactaccccatgggcggtaccaacagcgccttccagccctacggcggcctgggcgtgaactacaccaccttcttcgacgaagacctcgccagcaaccgcaaggcgcagggtttcagcagcatgaagctgcaggactcctggggcctggccggcgaactgggcttcgactacatgctcaacgagcacgcgctgttcaacatggccgtctggtacatggacatcgataccaaggccagcatcaacggcccgagcgccctgggcgtgaacaagaccaaggtcgacgtggacgtcgatccgtgggtctacatgatcggtttcggctacaagttctga

SEQ ID NO: 334783 - DNA, 885 bp, Pseudomonas aeruginosa
atgcgaatgcgcctgatgcttttgggcggcggtaatgcccttggacaggcgctgatccgcctaggggcggaggaagacatcggtttcctcgcgcccagaccacccgagcagggctgggatgccgccagcctcaccaccctgctggacgaaacgcgccccgacgcggtgatcaacctcgccttctaccacgactggttccaggccgagcaggtcgaggcggagcgcctgggcgcccaggagcgcgccgtcgagcgcctcgcggagctctgccagcactacgagatcctgctggtccagccgtccagctaccgggtcttcgacggcgcccgcgccaccgcctacagcgagaaggacgagacccttccgctgggcctgcgtggccaggcgctctggcgcatggagcagagcgtgcgcgcggcctgcccgcgacatgtgctgatccgcttcggctggctgctggacgaaagcccgaacggcttgctgggacgtttcctcagccgcgccgaacaaccgcagccgctgttcctcgccgacgaccggcgcggcaacccgacgccggtggacgacgccgcgcgggtggtgctctcggtgctcaagcagctcgactgccaggcgccgctgtggggcacctaccactacggcggactggaagcgaccaccaccctggcgctgggacaggtgatcctcaacgaggcgcgtacctatcgctccaacctgatccaggagccttcggcggaggcccatgccgcgcgcccggacgcgctcgacgagccgcagcacgcggtgatggtctgcaagaagatcctccacaccttcggcatcaagccgcgcgcctggcgcgcaggtttgccggctctattggacaggtactacaggcatgtttga

SEQ ID NO: 334784 - DNA, 1917 bp, Pseudomonas aeruginosa
atgcaggtcggcctcgcggctggccagcagctcggcgagcaggtgggcgcccatcagcccgctggcgccggtgagcaggatgtgccgtggcgcgagcaattgggcggtgtccatgggccggctgaaatccacgtcggcgggcaggcgcacgtcccgttgcagctcctgggccggttcgctgtccagcgccggcggcgcttcgccggcgcgccgcgccaggctggccgccagttggcgcacgctcggggtgcggtagatgtcgtggatgtaggcacggttgccgaagcgtcggctcagttcgcgcaccagggcggcggccagcagggaatggccgccgacctcgaagaagctgtcgtccaggccgaagtcggtatgccccagcacttcctgccaggccagagccacttgcagttcgccgggagtgccgaagcgttgctcgtcgagtcgttcctggcattgttcctccaggcgtcgacgcagggcctggcggtcgatcttgccgttgaccgtggtcggcaggctgtccagcgacagatagcggctgggcagcatgtagtcgggcagttcctggcgcagggcggtcttgatggcggcgagcacggccctggcatcgccgccccgctggcgggggaccacgaaggcgctcaattgctggctaccgcagcgtgggtcggcatgcgccagcaccaccgcgccatggatcgccggctggcgcagcagcgcggcttcgacgtcgccgagttcgacgcggtggccgcggatcttcacctgatcgtccagccgaccgaggaactgcaggctgccgtcggccagccagcgggccttgtcgccggtacgatagagccggcgccgcagtgcctgcgagtagtggaagcgcctggcggtcatgtccgggtcgcgcaggtattcgcgcgccaggcagacgcccgccaggttcagctcgccgggccggtcgccatggcaaggccggtcgtcggcgtcgagaatgaatgcctcgcaaccgtcgatgggcgtgccgatcgaggcgggccgccgatgagcttcggcgtcgacgatgcggcaggtggcgaagaccgtggcttcggtcgggccgtagtaatccaccacggtatagggcagcccgccggttgcgaccggcggcagtttttccccggcgcagaacaggtagcgcagcgccagcgacggcggagcgggttgctccaccagcgcagggaccatcacggtaggcgcgaaggcatggctgatccgctgctcggcgaagaatgccagcagcgccgccggggccgggcgcacctcgtcgggcaccaggtggaggcaggcgcctgcgcacagggtggaccagatttcccattggcaaacgtcgaagccgacgccggccatcagggtggtgcggctccgttggtccatctcgaagcgccggttgtgccagtccacgaggttgctcagggagcggctctcgatcaccacgcccttgggttcgccggtggtgcccgaggtgaatatcacatacagcgcttcgctgccgtcgagcgccggcctcggcgcggcacccgccgcgctcgtcgcgagcacctgtgcgatgacctccaccggttgccccggcaggtcctcggcctgggtggcgagggccacgggggcctggcactggcggaggatttcctgcttgcgcctgtcgggttgccgacggtccaccggtacgtaggccgctgcgcacttggcggccgccaggatggcgatgaccagttcggccgagcgttcggccagcaggggcagccgctcgccccgggcgacgccgcgcctggccaggtgggcggccagccggtcgctgagtcggtcgagttcgcggtagctgaacgagcgctcgcgatcgacgagggcggggcgttcgggatgggtatctgcgtgttgcctgaataa

SEQ ID NO: 334785 - DNA, 207 bp, Pseudomonas aeruginosa; identical to SEQ ID NO: 324729

SEQ ID NO: 334786 - DNA, 1401 bp, Pseudomonas aeruginosa
atgcatccgatgctcgaccgaatccacatgttcatccgcttccgctcggagcacgtccagatgattggtcggcccgagtccccgaccctggtcgttgacctggagtcgttgggggtgcgcatgcggtcttcgggcggcgtgctcaggcgtgaggacggggaggggtacgacgtggaggggctttcccatgcctgggagtcgctgccgtcgagctacacgcccatggccttcaaggtgttccatcagtccctgggcaagcgccttgatcctggtgtggagctgaaagcgtctccggccaagctgctccaggggcacaacgtcttcgggccgacctcaatccgcatgggggctgaggtcatgttgaagtggctggctggcacctatccggacctgtattcgaagctcgatgtgctgtcgattgaggtctacgccctggactgcacgttctcggcacgcatgccgaatgaacagaccgccctccaggtcatccagttcatgcgcggggtcagcaatggccagacccgcaaccggggtgacgactacgagaccacggcctactggggttcgaaagaggggcgtctgcgcaagatcaaggcgtatctgaaggggccagagttccggcgtcagttggacgaaattctcaaggctgctcgcggtgccacggtcgatccggaaccgcgccaggacctggataacgctcatgtccgcgcctggaagctgcacaagcgcgagcggcacatgcccatgtcgagcctttctgctgcgcggacgctgcgggtcatgcaggaccctcggctccaggagttcgcgcggcttcttcttcgcctcgaggcgaccgtcatgcatcgctggttggagcggcggaatctgccgacgaacctgtgggagctatgtgactaccaggaggcgcttcgtgaccaggagcgctgtttcattcaggagtgttggagagcggtaactgctgagctgttcgcggcctttgagggtatgaccatgaagcgaatcgacgatgacaaagtgctggccgcactgatcgagaagtacacgaaagtagggaagggcaggtggaccaaggcccgcgccgacaaggcaacgggagcgatcatccctgctgtgttcgtgccgggcaagcccagcgatgcctacgcccggaacctgttccgtacatatcgcagccttaaggactacgggtgggaagagaccatggcgtcgatgaatcgcgccagtttctacaaccacgtgcgtgacctacaggcggccggcatttccaaggcgatgctccagaacctgagtgagtacgacaacacccgcaacgtggtgccgatcctgcggttgctggaggtggatttctcggcgcagtaccccgactggtacgtcgagccgaccgtggaggccgcgtga

SEQ ID NO: 334787 - DNA, 222 bp, Pseudomonas aeruginosa
atgaaacaactgttctccctgggcaagcgtgaagccgttatcggtggctcgttgctgatgacgtccggcctctcgatggccgctgagggcgatatcgacactaccaaggccctggcctatatcgcgggcggtctggctgcggcggcagctgtgaccggcgccatgttcggcttggtggccctgattggcgctgccaagaaagccatgcgcgcagggacctaa

SEQ ID NO: 334788 - DNA, 1443 bp, Pseudomonas aeruginosa
atgaggattaagaaatgtatatcagtcctgaggatatcgctttttatggtgtgcttattgccatcgctattctttgctcggggcgctaatgcagaacagttttattgggttgtggcatcgccttctgctgtcgccggggggagctacggttcaccgtcatcggcgtgcgctgttgtgttcgattattacaagccgacaactaactggatcaaatctgttgagcctgtgcgaagaaatgacacggtatttgattgctttgcgcgcggcacgaatgcgtctggaagtgcgcaatctggaaatattggagtcatttctcgaagaggcgattcgtgccagccaggggctgaatatgattcggctgcgggagtttgcaaggagccgcctaaggagtgcgaagttggtacgcctaacttatttcgtagttcgagctatccgattatcgtgattaatgggaagaacacggttcctagttctccgccgtctggctgtttgagtggctgcgcctatgaggcggatagttctcggccaacatcctgttatcgcactccaggctctacaactgaggggttctgcaactacacgctcaagagcaacggccagaactgttcagcagactccggcaacctgggcggcaccggcccttcgctcagcgaaccgaatcaaccgccggtgaccgacccgccttcggacccgaatgacccgggctgtccgaagggctacagctggtccggcaccacgtgcgtgaagacgccgaccgatcccacggacccgaccgacccgaaagaccctggtggtgatggcggtggtactggtggtggcgatggcggcggcggtacaggcggtggcggtgatggcggaacgggcggcggtgacggtggtaccggcggcggagacggaaacggtggaactggcggtggtgatggcgatggcggcggcacgggtggcggtggcgatggcgggggagacgggcagtgcgatccggccaaggacccgaacaaatgcggcagcggctcctcgatctccggcgacggcgactgcaaggttgcgattcagtgcaacggcgacgcaatccagtgcgccatcgttcgccaggaaaaggccgcccgctgcgcggatgaagagttccgcacggtcgatgacaagaagattcaggacctgaaaaacacgctggccggcgagttttccgggcctgagtacgaacccatcaccgccaccggcgagaacacccatgacctgtcgaagctgctcgacaccagcggtcgcttctccaagtcctgtccggtcattcctgacttctcgttcccctggttcggcagtactcagacggtgtcgctcagtagcgtgtcgtccgatctgtgcgcgttcttccagtggttcgggtatctcctggtcgcgttcgccatgcgcgccgcggctgaaattattgcgagggggttgaactga

SEQ ID NO: 334789 - DNA, 312 bp, Pseudomonas aeruginosa
atgccggcattgatcggggtactactgcgggccatcggctggtcgctgatcccgctgggttggaagctgctgcgcggcttggggttcaccgctgttgccttcgttggcgtcaaggcggtgatggatcaggccaaggactacgtgttcagcagtctcggcggcgtgcctgcgcagtggctccaggtcctggggcttctgcaagtggacgtttgcatcaacatcctgttctccgcgtacatcgcccgcgccgtgctgtggggtatggacaagtctggcggcaagtccggcatgcgctggaccgggccgaagtaa

SEQ ID NO: 334790 - DNA, 1281 bp, Pseudomonas aeruginosa
atgctctatctgcgcaccggcctgccaggggctggcaagaccctgaacgcgattcgggaaatcgacattgaacaccagccggacccggacgacccgaccaagcggctgcacaaggacccggacaatccggacctgccgcccaggacgatctactactacggcatcccggacatgaagctggatcggctcaagtccaagtgggtcgagttcgagacgcccgaagaatggttcaacctgcctgacggctcggtgatcgtgatcgacgaagcgcaacgggtgttcggcaacgatggcaccagggcgcgcccggagaaagtcacgcgcttcgaaacgcaccggcaccagggcctggacattcacctgatcactcagcaccccagcttgctgtgcacgcccgtgcgcaagctggtcggcaagcacatcaacttcattcggccctatggccgggagaaaggcatcttccggcatgagtacgagttctgcatcgacaaccctgagcggcgcagcaacttcaagcaggcgcaggaagagaaagtcacgctggataaggcgtatttcggcgtctacaagtcgtcgacggtgcacacgcacaagccgatcacgcccagctacatgaagaaaatcccgctgatcatcgcgctgatgctggtcccgatcggcgtgatcgtcgggctgatcatgaccgcgatgcagcaagggaacgaagaaaaggaagcggctctggcgaggagtcaagcggcagaggcgtcagcgggggttctgccgggtgctgggaatgctgttcaggcagcccccagggcctccagcggcccgaaatcgaccgatgagttcctgggtgatatgtcgcccagggtgcccgatctggtggcctcggcgccgcgctatgatgatttgaacaagcccagggatttccctcggccggtgtgtgcggccagctcggacccgaacttgatcggcaaggctcctgagcggcggattccgctgggcacgtacaatgggcgggtgatggtctgccagtgctacacgcaacaggtcacgcggatgcacacgacgttcgagttctgcatggacgtggtgaacaacggatatttcgacgacacgcggatgccgccgacttatgcaagcggcaacagcacgcgaggcttgatcaccagtccgtcagttgacccggcgacggcgattgagcgagggcgcgcagcgacatcgccgacgccgggggatgcgttctcgacacgagtaaccatcgtgccggacagcagcaggatgcctaggacgctatga

SEQ ID NO: 334791 - DNA, 207 bp, Pseudomonas aeruginosa; identical to SEQ ID NO: 324729

SEQ ID NO: 334792 - DNA, 1401 bp, Pseudomonas aeruginosa; identical to SEQ ID NO: 334786

SEQ ID NO: 334793 - DNA, 345 bp, Pseudomonas aeruginosa
atgctcgctctcatcggcctgtgccagggctattactccgatactcgcaacgtcaataccgccaacggtccttcgcagattgttgaacactcggtgctcgtccaggttgagcaaaccaataagttcggcatgccggaaaccaaggttattcaagtccgcatttcgaagcggcacatggatggcgggcttaataatgtctggaagatggagaagggcaaaactgtgtccgtcccggtatttatccaggcctgggcgagtaagtccggtaacgctggattcgattattggctatcaggtgacggcatgccgttgaaacttcaagccgcccaggagaaagccgcttaa

SEQ ID NO: 334794 - DNA, 1443 bp, Pseudomonas aeruginosa; identical to SEQ ID NO: 334788

SEQ ID NO: 334795 - DNA, 372 bp, Pseudomonas aeruginosa
atgctgatcttgaccagaagacccggccaaaccctgcatatcggcgacaacatcaccatcacggtcctcggcagccaaggcgaccaggtgcgcctcggcatcaccgccccggacgacgtcgccattcaccgctccgagatctaccagcagatcggcaacgtccgtccggtgccgccggcggagttggtcgaggcctggaaccgagagcacccggcccaggtggccgttgagtaccgtccgctccgcgactccatccccatccgcaccagaacgctcactcaagccaaagtttccgcctccggcatggcggtgatctggctagaaggccaggccacgccggtgctgctgcgcaactgcgtagcgatctcctga

SEQ ID NO: 334796 - DNA, 222 bp, Pseudomonas aeruginosa
atggcctgggcgaatgagcgcgccgagggcgtgatcgaggaagcgatcgtcgctatgcgtcggtcggtgatcccgcgccacgaccagttggtatggcgcggccagatcgagatggcctacacgctggacgccatcggcacccggcaatacgacgacatgcgccgccggctcgacgccgcagcggatgcgagacagcaggaactgaggagcatcgacctatga

SEQ ID NO: 334797 - DNA, 588 bp, Pseudomonas aeruginosa
atgcgcatctgctcgatcgagggctgctcgggcaagcactacggtaacggtttctgccagaagcactatcaccggaatcggaaaagcggctctgctgatattgatcggcgcactgtgcgccgatcactcagcgagcggttctgggagaaggtccagaaaacggatagttgctggttgtggaccggctaccggaacggcaccggctacggcgaaatcagccgtggcggccgggaaggggcaatgcttgctcaccgcgcatcctacgaaatcaactgcgggcctatcgacaatggcctgcacgtccttcaccgctgcgacaacccccggtgcgttcgaccggaccacctgtttcttgggacccatctggaaaacatgcaggacatggttcgaaaggggcgagggaagcagcttggcggcggccgacgtggcgagtccaacggcaattgccggatcagcgatgaccaggttcgagagatcaagaggcgcttggctgctggcgagccgcaggcccagcttgcgcgagcctttaacgtctcgaaaaccctcatctacctcatcaaaatcggtaaaacgcgggagatcacgtaa

SEQ ID NO: 334798 - DNA, 1311 bp, Pseudomonas aeruginosa
atgaacgactcgatcaaggcctgcctggccgccgcctgcctcgccctgccgctgctggcccagggcgccgagaccctgaccatcgccacggtcaacaacaacgacatgatccgcatgcaacgcctgtccaaggtgttcgaggaaagccacccggacatcgcgctgaaatgggtggtgctcgaagagaacgtcctgcgccagcgcctgaccaccgacatcgccacccagggcggacagttcgacctgctcaccatcggcatgtacgaagccgcgctgtggggcgccaagggctggctggagccgatgagcgggctgcccgccgactacgccctggacgacctgttgccctcggtgcgcgacggtctctccgtcaagggcacgctgtacgccctgccgttctacgccgaagcctcgatcacctactaccgcaaggacctgttccagcaggccgggctgcggatgcccgagcaaccgacctggacccagctcggcgagttcgccgccaggctcaaccgcccggaccagggccagtacggcatctgcctgcgcggcaaggccggctggggcgagaacatggcgttgatcggcaccctggccaacgccttcggcgcacgctggttcgacgagcgatggcagcccgaattcagcggcggcgaatggaagaaggctctcgacttctatgtctccaccctcaagcggtacggcccgcccggcgcctccagcaacggtttcaacgagaacctggcgctgttcaacagcggcaagtgcgcgatctgggtggacgccagcgtcgccggttcgttcgtcaccgacaagagccagagcaaggtcgccgacgccaccggcttcgccttcgccccccgggaagtcaccgacaagggcgcctcctggctgtattcctgggccctggcgattcccgccagctcgcgcgccaaggacgcggcgaaggccttcgccacctgggccacctcgcaggcgtacggcaagctggtggcggacagggaaggcgtggccaacgtgccgcccggcacccgcgcctcgacctacagcgaggcctacctggccgccgcgccgttcgcgcgggtcaccctggaatcgctgaagcgcgtcgatcccaaccatccgacgctgaagccggtgccctacgtcggcatccagttggtcaccatccccgagttccaggccatcggcacccaggtcggcaagctgttctccgccgccctcaccgggcagatgagcagcgaccaggcgctcgccgccgcgcagcagagcaccgcccgcgagatgaagcgcgccggctatccgaagtag

SEQ ID NO: 334799 - DNA, 351 bp, Pseudomonas aeruginosa
atgaacaacgcactcatcactgacgagcagcgcatcgtgctgctggccaacggccgcgaatcgctggagaacccggacttcgatccggcgcccgtggtcaagctgttcacgccggatagcggcgcgacctggctgctaaccgagattgatcccgacgaccacgaccacgcctttggtctttgcgacctgggcctggggatgccggaaatcggctgggtcagcctgggcgagctggcgacggtgcgcggcgggctgggcttgccgatcgagcgcgacctgtctttccgcgccgagaagcggttgagcgcctacgcacgcgatgcgcggctggccgggcggatcgctgtctga

SEQ ID NO: 334800 - DNA, 330 bp, Pseudomonas aeruginosa
atgaacgaagatcaagctgtttccgccctcggcgccctggcccacacccaacgcctgcgcgtgttccgcgccctggtcgtcgcaggccccgaggggctgacgcccagcgtcttggccgaccagctcgacgtggcccgcaactctctgtccttccatctgaaggagctggctcacgctggcctcgtcaccatcgaacagcaagggcgcaacctgatctatcgcgctgacttcgcgcagatgaacagtctgcttggctacatgaccgagcactgctgccagggcggcgtatgcgaagtcactgaatctccctccacctgtgcctcctgctga

SEQ ID NO: 334801 - DNA, 447 bp, Pseudomonas aeruginosa
atgaagcgcttccacgtccacctgcacgtcgatgacttgaaccgcagcatcggcttctattcccaactattcgcggcgcagcctgcgcgcgtcgaaggcgactacgcgaagtggatgctcgaagacccgccggtcaacttcgccatctccacgcgcggcagcaagccgggcatcgaccacctgggtatccagaccgacgacgccgaggaactggccgccctgaaactccgcgcacaagccgccgacatggcgttgctcgacgaaggcacgaccacctgctgctacgcacgcagcgagaagcattgggtcaccgacccgcagggtattgcctgggagcacttccacacgttaggcagcatcccggtcttccatgaagcggcttcagtcacgacaccgatcaccgcaccggcttgctgcacagcaagcccccgttcttcctgctgttga

SEQ ID NO: 334802 - DNA, 408 bp, Pseudomonas aeruginosa
  misc_feature (317)..(326): n is a, c, g, or t
atgaccacagaggccgcatacaacgcactgttcatctgcacgggcaattccgcacgttccatcctcgccgaaggcatcctcaacaaactgggccaagggcgctttcgggcgtactcggcaggtagccagcccaagggcgaagtgcatccgctggcgctcgccacgctggagcggctgcacatgccaacgactggctaccgcagcaaaagctgggatgagttcgtagcgccgggggcgccggtgttcgacttcatttttaccgtctgcgacaacgccgccggcgaggcttgcccgttttggccgggcaagccggtatnnnnnnnnnnccggcgaggcttgcccggccaaaacgggcaagccggtatcggctcactggggcgtgcccgatccggcagccgtcgaaggtag

SEQ ID NO: 334803 - DNA, 360 bp, Pseudomonas aeruginosa
atgccaagcatccagattttcgacccggcgctatgttgtagcaccggcgtatgtggcgttgaagtggatcaaaacttggtgaacttcgccgccgatgtggattgggccaagcaacacggtgctcaggtcgaacgcttcaacctggcacagcaacccctcgctttcgccgaaaacccgacagtgaaaggctttttacaacgctcgggccaagaggcgctgcccctggttctggtcgatggtgaggtggccttggccggtcgctaccccagccgaagcgaattgacccgctgggctggcatcgaggcgcccgaagcctcgccagcccaaaacgcctgctgctctggcggccgctgctgctga

SEQ ID NO: 334804 - DNA, 1767 bp, Pseudomonas aeruginosa
atgcacttcctgacccagccgcctcgcttcctgtttttcaccggcaaagggggcgtcggcaagacctccatcgcctgcgcaacggccgtgcaactggcgacccagggcaagcgtgtgctgctcgtcagtaccgacccggcttccaacgtggggcaggttttcggcgaacgcatcggaaaccacatcacgatgattgccgccgtgccgaatctatgggcactggaaatcgacccgcaggcagccgcgcaagcgtaccgtgaccgcatagtcggcccagtgcgaggcgtgttgcccgatgcggtagtggatggcatcgaagaatccctgtcgggtgcctgcaccacggaaatcgccgccttcgatgagttcacggccctgctgaccgatgcggcgctgacgcaggattacgcgcacatcattttcgacacagcccctaccggccacaccatccgcctgctgcaactgccgggcgcatggagtggctttctggaagcaggcaaaggcgatgcgtcgtgcctggggccgctggcgggcctggaaaaacagcgcagtcagtacaaggctgcggtagaggcgttggccgatcccttgcgcactcgtctagtgctggttgcccgtgcgcagcgccccacgctgcgcgaggcggcccgcacccatgaagaactggccgctatcggcctgtcacagcaacacctggtcatcaacggcgtatttcctgccagcgaggccgaaaccgatacgcttgccgctgccatctacgaaaaagagcaggctacgctggccgccattccgtctgtcctccaggcgttgcctcgggatcagatcgcgctcaagccgttcaacctcgtgggcctcgacgctctgcgccatctgctggtcgataccgacgccacatatggcgccgatgccatcgagctgcccgaccagatcaatgcgccggacttatccgccctggtcgatgaagtcgctgccgatgggcacggtctggtcatggtgatgggcaaaggcggcgtgggcaagaccacgctggccgctgccattgccgtggagctggcgggccggggcctgcccgtgcatctgaccacctccgacccggctgcgcatctggccgacacgctggaaggttcgcttcccaatctggctctcagccgcatcgacccccaggaagccacggcacgctatcgccagcatgtgatggacaccaagggcgcgcagctcgatgccgaaggccgcgccttgctggaagaagacctgcgctcgccctgcaccgaggaaatcgcggtgttccaggcattctcccgtgccatccgcgaagggggcagaaagttcgtggtgatggacaccgcgcccacaggccacaccttgctgctgctcgacgccaccggcgcataccaccgcgacatcgcccggcagatgggtgagacgggcgttcatttcacgacgccgatgatgcagttgcaagatccgaagcagaccaaggtgctcattgtcaccctggccgaaaccacgcccgtgctggaagcggccaacctgcaagacgacctgcgccgcgcgggcatcgagccgtgggcctggatcgttaacaacagcgtggcggccgcacatccgcattccccgctgctgcgccagcgtgcacgcaacgagttgcgggaaatcgacgccgtggccacacaacatgcccaacgccatgctgtcgtgccgcttctgaccgaagagccggtgggagtggagcgtctgcgggctttggcaaacaggaaaacctcatga

SEQ ID NO: 334805 - DNA, 1113 bp, Pseudomonas aeruginosa
atgaatcacgacagcccccaaagcgggcattcgatgctgaacacgccatcgcgcctgtccttcctagatcgctatctcaccgtctggattttcgccgcgatggcgctgggtgttgcattgggtacgttcttcgacggtttgcccgatgcgctcaatgcgctctcgatcggcacgaccaacgtcccgatcgccatcggcctgatcctgatgatgtacccgccgctggccaaggtgcgctacgagacgctacacgaggtcttcgccgaccggcgcgtgctgttgctgtcactggtgcaaaactggatcatcgggccggtgctgatgttcgtgctggcggtgattttcctacgcgaccagccggaatacatgaccggcctgatcctgattggactggcacgctgcatcgctatggtgcttgtgtggaaccagttggcgcgtggtgataaccagtatgtcgcgggcctggtcgccttcaattcgatcttccagatcctgttcttctcgacctatgcctggttcttcctgtcggtgctgccgcctgtgttcggcctgcaaggcagcgtcattgacgtgggcttttggacgatcaccgaggcggtactgatttacctgggcatcccgttcctggccggctacctgacccggcgctcgctgattcgacgcaagggccaggactggtacgagcgtgcattcctgccgcggatcagtcccatcacgctggcggcgctactgttcaccatcgtggccatgtttagcctcaaaggtgccgacgtggtgcgcctgccgatggacgcgctaaagattgccgtgccgctgacactctacttcgtgatccagttcctcatcagtttctttatgggccggctgatccaggccgactacccacgcaccaccgccatcgccttcactgccgcaggcaacaacttcgagctggccatcgccgtggctattgcgtcgttcggcctggcttcgcctgtcgccttcaccacggtgatcgggccgctggtggaagtgccggtgctcatcctgctggtgcatgtcgccttgcggttgggccgccggtggcggctcaagggcgccagcatgtattccgccaaccccacgaatccctga

SEQ ID NO: 334806 - DNA, 423 bp, Pseudomonas aeruginosa
atgagccagatcaccatctatcacaaccccgactgcggtacgtcgcgcaacgtgctgggcttgattcgcaacagcggcgaagagccgaccatcatcgaatacttgaaaacaccgcccgaccgcgagacgctgaaaacgctgatcgctgcgatgggtgtgccagtgcgtgcggtgctgcgcgagaaaggcacaccttatgcggaattgggcctggatgattccaaatggagcgacgaacatttaatcgacttcatgctccagcaccccatcctcatcaaccgccccatcgtggtctcgccgctgggcgcactgctgtgcagaccttcggaagcggtgctggacatcctgccccagccgcagcgcggtgcattcagcaaggaagacggcgaagccgtcgtgaatgcggaaggccgccgtgtctga

SEQ ID NO: 334807 - DNA, 738 bp, Pseudomonas aeruginosa
atgcggaaggccgccgtgtctgaatccagaatcgacctacccaatatcgacaccgcgctgttccagcaacccgatgcccagcggttaatggcacccgagcgtgccacccacgcgccgcgcttcctgctgctctatggctcgctgcgcgaacgctcgttcagccgcctggctgctgaagaagcggcacacatcctgagcgcgctcggcggcgagacacggatgttcaacccctcgggcctgccgttggtggatgacgcgcctcacgatcacccaaaggtcagggaactgcacgaactggtgcaatgggccgaaagcatggtgtggagttcgcccgagcgccacggtgccatgaccggcttgatgaagacccaaatagactggattcctctgtcggtcggcgcggtgcgcccgacacagggcaagacgttggcggtgatgcaggtgtcgggtggatcgcagtccttcaacgccgttaaccaaatgcgcgtgttgggccgctggatgcggatgctgaccgtcccaaaccagtcttcggtcgccaaggcataccaggagttcgatgaagcgggacgcatgaagccctcggcctattacgaccgcatcgtggatgtgatggaagagctgatgaagttcacgctgctcacgcgcgacgtggcgccatatctggtagatcgctacagcgaacgcaaggaaagcgccgaagccctgagccggcgcgtcaatcaagcagcgatctga

SEQ ID NO: 334808 - DNA, 510 bp, Pseudomonas aeruginosa
atgtcgcaactgtccttttcctcgttcgatgcctcgctgatggtgcgcgatgcacagggccgctacctgctggcgacggccgaccaaattctggaggccgcgcgccaggccatcgagtacaagatgcagcgcggtgcgtcgttcagttcgccggtggcggtcaaggagtacctgagcgccaagttggctggtttcgagcatgaagtcttcgctgtgctgttcttggatacgcagcatcgcctgatcgaatacagcgagcttttccgaggcaccatcgacagtgcatcggtgtatccacgcgagctggtcaaggaggcgctgcggctcaatgcggcagcggtcatcgtttcgcacaaccatccgagcggcaaccccgaaccgagcggcgccgacaaggtactgacccagcggctcagggaggcgctggcgctggtggatgtccgcacgctggatcacatcatcgtggcgggtggcagcaccatatccttcgccgaacgcggtctgatttga

SEQ ID NO: 334809 - DNA, 540 bp, Pseudomonas aeruginosa
atggcatggtattcaaccggcaccgtcgcggtgacagaaaatagcccgaccgtcaccggcaccggaactcagttttcttctaatgtccgggtaggcgacgcctttattgcccctgacgggcgcctctacgaagtgagcaacgtcgccagttcgacggtcatgtcgataaagcccaactaccggggcagcacggctagcggccagccctatgcggtggcgccaatcctgggttacgacaaggagctgagcgatcgattcaacctgatagcgaaccagtggggagggacgctggccggcattcagccgtgggcaacggcaccgacgccggcccaggcgaggaactcgctcgagttgcgcagcgccgcccaggccgatatcggtacaatgcttggaaacgccatgccggtcggcgcattcgggattggttctgagcgtcctgaccgagcaccatcgattcatcgttatgcgacaagcgtcgagaattcgattcgacaactgttgactccgtggcaactggcattagcaacggatctgtgttga

SEQ ID NO: 334810 - DNA, 789 bp, Pseudomonas aeruginosa
atgcgggcaaaggccctcataggtgcggcagccaatgacctcccccgaggccatacgcgagccttcggagaattgctggacgatggagtggtgatagcgaaactcgatccgccacaccgtttccagggggttataggccgggtcgccatcaccgaacggatccccgttcagggtcgcccacacgctttcccaatagtcgagcttgtcggtggcccgagcctggagggtcttgttatagatcgacagttgcagaccgttggccgagccgaacatgtacgtctcgccacgcccgtagaccgaggcgttgccgtcgaactcgatccgctcgatcccgctgatttgccgcacccgacgcgagcggcaatgcatgcggtcaacgagatcagccggaggcgtccagccctgcacatccagcgcgatatgcacggctgcttggttggtctcgcagtgactcagcaccgctgcggccaggtcatccagcacgccctggagaatacgcggatcggcgccgtcaatggcgtgaggcgacacctcgatcttgaggtgcgagccaatggtgtcgaccttgatgttgtggttcttgatcagcaagatcaggcccatttcggcgttctgcaggcggtactgatagccagagtcgcgaccgatacggcccttggaccattcgtaaccggcgaactcgaccacatccaccgacaggtcaaacagcgccatgacttccggccggagcttgccgttgtacaactgccgcacggtgtccacgccacaccgcaggatgcgcacgcctga

SEQ ID NO: 334811 - DNA, 2967 bp, Pseudomonas aeruginosa
atgccacgtcgttcaatcctgtccgccgccgagcgcgaaagcctgctggcgttgccggacaccaaggatgagttgatccgtcactacacgttcagcgaaaccgacctctccatcatccggcagcggcgcggcccggccaaccggctgggcttcgccgtgcagctctgttacctgcgctttcctggtgtcatcctgggcgtcgatgagccgccgtttccgcccttgttgaaactggtcgccgaccagctcaaggtcagcgtcgaaagctgggacgaatacgggcagcgggagcagacccggcgcgagcacctggtcgaactgcaaacggtgttcggcttccagccctttaccatgggccactaccggcaggccgtccagttgctgaccgagatggccttgcagaccgacaagggcatcgtgctggccagcaccttgatcgagcacctgcggcagcagtcggtcattctgcctgccctcaacgccgtcgagcgggcgagcgccgaagcaatcacccgcgccaaccggcgcatctacgatgccttggccgaaccgctgtcggacgcgcatcgccgccgcctcgacgatctgctcaagcgtcgggacaacggcaaaacgacctggctggcctggctgcgccaatcgcccgtcaaaccgaattcgcggcacatgctggaacacatcgaacgcctcaaagcgtggcaggcgctcgacctgccttctggcatcgagcggtcggtgcaccagaaccgcctgctcaagatcgcccgtgagggtggccagatgacgcccgccgacctggccaagttcgaggcgcagcgacgctatgccaccctggtggcgcttgccatcgagggcatggccaccgtcaccgacgaaatcatcgacctgcacgaccgcatcctgggcaagctgttcaacgccgccaagaacaagcatcagcagcaattccaggcgtccggcaaggcgatcaacgccaaggtgcggctgttcggccgcatcggccaggcgctgatcgaggccaagcaggcgggccgcgatccgttcgccgccatcgaggccgtcatgtcctgggatgccttcgccgagagcgtcaccgaagcgcagaagcttgcgcagcccgaggacttcgatttcctgcaccgcatcggcgaaagctacgccacgctgcgccgctacgcgccggaattccttgccgtgctcaagctgcgggccgctcccgccgcgaaggacgtgctcgacgccatcgaggtgctgcgcggcatgaacagcgacaacgcccgcaaggtgcccgccgacgcgccgaccgagttcatcaagccgcgctggcagaagctggtcatgaccgacaccggcatcgaccggcgctactacgaactgtgcgcgctgtcggagatgaagaacgcgttgcgttccggcgacatctgggtgcaggggtcgcgccagttcaaggacttcgaggactacctggtgccgcccgcgaaattcgccagcctcaagcaggccagcgaattgccgctggccgtggccaccgactgcaaccggtacctgaacgaccggctgacgctgctggaaacacagcttgccaccgtcaaccgtatggcgacggccaacgagctgccggacgccatcatcaccgagtcaggcttgaagatcacgccgctcgacgcggcggtacccgacaccgcccaagcgctgatcgaccagacggcaatgatcctgccgcacgtcaagatcaccgaactgctgctggaggtggacgaatggacgggcttcactcggcatttcgcgcatctgaaatcgggcgacccggccaaagacaagaacctgttgctgaccacgatcctcgccgacgcgatcaacctgggcctgaccaagatggcggagtcttgccccggcacgacctacgccaagctggcttggctgcaagcctggcacatccgcgacgaaacctacggggcggcgctggccgatctggtcaacgcacagttccgccatcccttcgccgagcactggggcgacggcaccacctcatcgtcggacggccagaacttccgcaccggcagcaaggccgagagcaccggccacatcaacccgaaatacgggagcagcccagggcggacgttctacacccacatttctgaccagtacgcgccatttcacaccaaggtcgtgaacgtcggcgtgcgcgattcgacctacgtgctcgacggcctgctgtaccacgagtccgacttgcggatcgaggagcattacaccgacacggcgggcttcaccgatcacgtcttcgccctgatgcacctcctgggcttccgcttcgcgccgcgcatccgcgacctgggcgacaccaagctctacatcccgaagggcgacgccgcctatgacgcgctgaaacccatgatcggcggcacgctcaacatcaagcacgtccgcgcccattgggacgaaatcctgcggctggccacctcgatcaagcagggcacggtgacggcctccctgatgctccgaaagctcggcagctacccacgccagaacggcctggccgtggcgctccgcgagctaggccgcatcgagcgcacgctgttcatcctggactggctgcaaagcgtggaactgcgccgccgcgtgcatgccggcctgaacaagggcgaggcgcgcaatgcgctggccagggcagtgtttttcaaccgcctgggtgaaatccgcgaccgcagtttcgagcagcagcgctaccgggctagcggcctcaatctggtaacggctgccgtcgtgttgtggaacacggtctatctggaacgggctgcgcacgcgctgcgtggcaacggccatgccgttgatgacgcgctgttgcagtacctgtcgccgctcggttgggagcacatcaacctcaccggcgattacctctggcgcagcagcgccaagatcggcgcgggcaagttcaggccgctacgaccgctgcaaccggcttag

SEQ ID NO: 334812 - DNA, 1455 bp, Pseudomonas aeruginosa
atgcgtaggttattgcttgtcgctcttttgcttttgtccggcaatgtgagcgccgaagatttttactggagaattgcttatccggacgggcaggccaagcataagagcgccgaggctgcgtgtcaggcaaataatgattattacaagagtgactatggctctggttattctcgtattgaggttaggaataagccgatagatgaaactcactggagctgttatgtctatgcgtacaagctcgactctaaaggcgtggaatatcttgcgggtcagcgtggaaataacgccactcgttacggcacggaatgcccggctggtactgaatatgattcctctataggtggttgcaaacagaatgaggatgaaaagtgcaaggaaacttttggtaaagagatttatacggactttcaggttggcactgtaaaagacggtcattttactgaccctaaatcgcctccggcttctctctgtgagtcgtcgtgcttatatacgtctcctgcaaccactggctccggtaatggttatcgcatggggcagaactttgaagtctttgttcggtattcgtacttgggcaatggttcgtcttgtgagcagggcgaaacgcctaatcctccatctgatcgctcgcccagtggttcaactgatgaaaactgcaagccggtggaggatgctgagggccgtaagaagatgagctgtcttaagacggatagttatcagaatcctggcaatctgaactgcggcatggctaacggtcagcttgtttgcgtgcctgggaaaccttcgccgaataagaatgagacaaccacaaaaacggatatcacggagacgacgaatcctgatggctccaaggacactacgacaaccactgaaactacagtcacgacgtgttctggcatgaactcttgcaatacgaccagtaccaccagtacgaccaacaataagacgaactctgatggtacggacggtggaagctcgacggagtgcaaggggccaggctgtaagccatcaggggagggcgctggtggcgactctgagggtgaagagaaagaggaggagaaagagtcaaaggtttcgggggatgaatcgtgcgatgcggtgattgcgtgcgagggcgatgcgatccagtgcgcgatgcttaagcaggaaaagaaacagacgtgcgcctgggactatgaaaaggccaaggggacaatcgaatctgagattgccaagcctgagtatcagttaactgagacaaccattaatacaggtgagctattcaatgccggtattagtgcaagccgctggttgccgtccgcttgccctgcgccgaaagttatctcgctgagttccggtcctagccagacgtttagctgggagcctgagtgtcaaatggcctcgtcgttagcgccgattattgttggtctggcgtcgttgttcttcgcggtttatgtcggacgttctataggaggttga

SEQ ID NO: 334813 - DNA, 201 bp, Pseudomonas aeruginosa
atgaacttcatcgcgtgcgacgggacctgggcgcaatccaacggcgcaataacgtgtgttggaactctggttcctgttgcgcgtgaagagttgtcccagtcgggactaagtgctgaagacgcggattatctgatagggcagaccatcgccctgtttgccgtgatctttagcgtcatcatcgtgcgaaaagcactcaagtaa

SEQ ID NO: 334814 - DNA, 366 bp, Pseudomonas aeruginosa
atgaagattctgaaagggtacgtcctgggcgtagttgacaaaggggaaggggacaagcgttgggccatcgttggcatcaaggcgactgacaaggaccgtgacggattcgacgtggatactacgtacaagcttcgtgtcttcggcgatgccgtgaagaacggcctgcataacgcctatcgcaacctcgctggtgtcgaggtctacgcgccctataacgatgagttcgacgagaagtacaagcgcattagctattcgctggcaggcgcgcctttggccctgatggaaaagcccctggggaccgcccagccgaagccggctgctccggctcagccgcaggcggcacagcccgttaagcaggcgtcgtaa

SEQ ID NO: 334815 - DNA, 276 bp, Pseudomonas aeruginosa
atgttgccgctcagttcgagcagcggattcagttgccagcacctcacgcatgacctgactcagcaggtccggcgagtcgataccggcatcgagcaggacaagctctatcgagccccgcaactgaaggtaggcttgccgtccgatatcaatcgccatcacgaccacccgaaggcatcgccgacccagggcgtgcccttttcgctggtgacagtggtccaagggttggaggccttgccgccctcctccttatgcttttcgagcgcctggagcgcttga

SEQ ID NO: 334816 - DNA, 237 bp, Pseudomonas aeruginosa
atgagcgcctacagcctccagggcgtgtccctgtcgtccagcgagcgtcggtcgctccagcttcgtcagcaggcccgcgctgctgtcgatcgcagcgtgttgcagcagaccgtcgctcaagcgctccaggcgctcgaaaagcataaggaggagggcggcaaggcctccaacccttggaccactgtcaccagcgaaaagggcacgccctgggtcggcgatgccttcgggtggtcgtga

SEQ ID NO: 334817 - DNA, 1170 bp, Pseudomonas aeruginosa
atgtcgcctctgatcaatccggccccccggatgttctacgactacctcacggtagagcaggtattcccgtaccagctcccgcaggttggcgacactggcatctgctactacgaccggaagaccggcgagcaactgcgcgacacgtctcctagcttcaaggttgagggcagtcactcgacgtcgattcgggttcgggtcgatgggaacaagctccgcgtcgaagggaacccgagtgcagtcaaccgcttggacaacctgcatggattccagtccatcgctgagtgtgtcgcggtctataacgacatcctccacgagatcagggacgacaagggcaaccgtctgccgccgttcacggcttgcactgattggggtcacctccagaccgaggacggctcgaaaactcggatgatcggcaacggtgcgcgcctgcgccgggttgacttgacgacgaatcggacggtggggaagggcaatgaactggcttacatccgcgccctgagtactcagcgtgtgggctataagaacggccacctctacgaagatggttggacctgcgactggcaggcccgcgaccactactacaaggcctacggcaaggctcaggccatccgcaagttcctgtttccgaagtgcaaacggaactttggcgaagactcccccgaattccgctacctgctcgatctggccgcgtactgcgatcagcagggcgtcgtgcgtatggagcaggaactcaagagtgagtatctggcccgtgagcggctggagtggtggggtctttttgatgaaggccgctttgcggcgatccatggggagtttttgaggggattcgacaagctcgaggtgatggcgatggattacgagacgattgcggaacggctgctttctgaagaggttgtaggcagcactcaggcggcgaatgcgaccgccaatattgcgatgaagtggatgcactgccctggtatcagcttcgacttcacgaagtcgcaaatgaagacctaccgggcgcgcttgaaccggatcggtatcaacatcgcccagccctacgacgtgacccgtcattcggtcgtgatgatccgtcgtgctgaggaaatcgtcaccagcgacgtgctggaactgccggagttttatcggcatgcaccgcgcccgcgtcacctgcggttggtggcctga

SEQ ID NO: 334818 - DNA, 180 bp, Pseudomonas aeruginosa
atgcccaccaagcacatcgacgacgcgacatggcgaaaggttgagaaggaaaccgttaaggcggtgatccacctgcaagcctcggtcaaagacactgaggtactacgctggctgatcctcaaagggcttgaagaaatgaccccggaagaccttgagcgcttccacaaaaaaagggactaa

SEQ ID NO: 334819 - DNA, 828 bp, Pseudomonas aeruginosa
atgcaactcgcatcccgtttcgcttcccattccccagcactgcgcagcgactacccgctgtccgatgaccagattcgcagggtggccccgtccatcttcgcggatgccccgcatgagagccgttccgagcggtacagctacatccccaccgccacggtgctgaccgagcttcgcaaggaggggtttcaaccctttatggtgacgcagacccgcgtgcgcgatgaaggccgccgcgagcacaccaaacacatgattcgcctgcgccacgccagccagatcaacggcgcggaagccaatgaaatcgtgttgctgaactcgcacgacggcaccagcagctatcagatgctggccgggatgttccggttcgtgtgcagcaatggccttgtgtgtggcgacaccgtggcggacgtgcgcgtaccccacaaaggcgacgtggccgggcacgtcatcgaaggcgctttcgaggtgttgagcggcttcgagcgggtgaaggaatcccgtgacctgatgcgcagcatcacgctggacgaaggcgaggccgaagtgttcgcccgcgctgcgctgtcgctcaagtacgacgaccccgacaagcccgcacccatcaccgaatcgcaaatcctgatgccgcgccggttcgacgaccgccgcccggacttgtggagcgtgttcaaccgcacgcaggagaacctgaccaaaggcggattgcatggccgcagcgccaacggacgccgccaacgtacccgccccgtgcagggcattgattccgatgtgcgcctgaaccgcgccctgtggctgctggccgatggcctgcgccagttgaaagcctga

SEQ ID NO: 334820 - DNA, 2058 bp, Pseudomonas aeruginosa
atgaacgccatcacccaaaccgaagcccgcgccgtcaataccgccgcagctatcccgctggaagccgccgacccgaccaagaacctgattctggttccgttgtcacggttggtactgcgccccacgggccgcaacgtgcgcaagaccccgcgcatgtcgattcccgaacttgccgcgagcatccagcgcgtgggcctgctgcaaaacctgattgtgattgcatccgccgatggcgagcattacgaagtcgtggccggtggccgtcgcctcgccgccttgaagctgctggcgaagaagcatcgcatcagcaaggaatgggaagtgccttgcctgctggtggccgatggaaccgcccgcacggccagcctcaccgagaacgtgcagcgggaggccatgcacccggcagaccagtttgaagccttcgcggcgctggtggccgaaggacggcccatcgaggacattgcagcggatttttccgtcacgccgctggtggtgcagcgccgcttgaagctggcgaatgtctccccgcgcctaatggccgactatcgcgccgatgccgtgagccttgaccagttgatggcccttgccatcactgacgaacacactgcgcaggaagcggcgttctacgatgccccgcaatggcagcgccacccctcgcacttgcgcgagcgcctgaccgaacgggaaatcgacgcctaccggcatccgttggtgcgctttgtcgggctggacagctacgaagccgcaggcggcgggattcgccgtgacctgttcgcggaaggtgacgcgggcgtgtatctgaccgatgccgcgttgctggaacggttggtgcaagaccggctggcaggcattgccgccaatgttcgcgccgaaggttgggcatgggtggatgccacgccgggaatgacccattccgacctgcacgccttccagcgtgcgcccagggagcgacgcgagccaatcaagcgcgaggcccaacgtatcgagaagctgcaagccaagctgcacgaactggccgaagcagtggatgccgcgctggacgccgaggacgaggacaaggccgacgcgctgcaagaggaaggcgaagccgtgggcgagcaattgcaggcgctggaagatggcttgcaggactacagtccgaacgtgaaggccgcagccggggctatcgtcaccatcgaccgcaacggcgaaaccgtgattcatcgcggtttgatgcgtgaggccgaagccaaggcgctgcgcacgctggaacgcttgcggcagggtttcggcggcgaaggcgaagccggaaacgacgacgaaggcgaggacgacgaacagcccaagatcgccgccatgtctgaccggctggcgcagcggttgagcgcccaccgcaccgccgcgctgcaaatcgaagtcgcccggcacccgcaagccgcgctggctgccgtggtgcatggcatggtgcagaccatcttgcagggcagccactacggccacgacctgccgctgggcatgagcttgaaagtgcaagaccggctggaaggcatggccccggactggccggaatcgcccgccgccgtggcactgcgcgaactgcaacaggtggcgggcgaagccttgccggaggacagcgccgaactgttcgccgcgctgctggcgaagccgcaagacgaactggtgcggctgctggccgtatgcgtggcttccacggtggacgtggtgacgccccgcaccacggtgcagcaacccggcgaggaattggcgcaggccgtgggcctcgacatggccgcatggtggcagccgaccgcagaaggctatttcaagcacgttccgaaggccgtgattctggatgccgtgggcgagtacgcgccgcagcacgtcacccggctggcgaagttgaagaaggccgacattgccagcgaggccgaacggctggccgatggcaccggctggatgcccgccatcttcaaggccgcaggcccgcaggatgccgcgcaggaggcaggcccggagcaggacgccccggaggatgccgaggcaatagcggatgaacctgccgaggcgctggccgcttga

SEQ ID NO: 334821 - DNA, 825 bp, Pseudomonas aeruginosa
atgcgtgtttatatgatcgacagaaatatcgtatccaaaatttcatcaggcttcaaaaattgcagcatcgaagataaaaatttcattaaatcactggatacaaaaggaagtgccataagccttcttctttcaaacatcgaaggccgacttgggattcctcaagacatgagtcaagcatcctccggcatgttcgctgaaggtgacatagctaaggggttcttcaagaaggctcgcgttgattcaggtttttttgaagccttcaacaatcttgcctcctggggtatcacaactcatcagagagactcttttctgaaaaattcagaaatcgtcgcatacctacaagatacgttgcatcagccgcgcagcccggcccaagctaaagaggttagggaggatattttaaatttcgcatctaagcgagatatggaaattggccacccaatcatgctgtgtggcttgtcgactttatatggaaacaagaatgcgcatggagtgctaaaacctaagaaacccaaacagaatgatcctaagagaaatgcgaggatttataacgcattggccgacctgatggtgattgtcaatctttcagagttggcgggcataagcagaggaatgaaaatgcgaattcatttcgcaacaatcgacaaacctctccatggatttgttcaggaattcggactgcttggtgttacaaagagccgtttagccctagtcaatgacagcacaatcacccttggattcaatatgtcgcttttcccaaagctaaccggcaacgaggcagaagagttcaaggaatggttcaacaccaagaagcaaaaaacatga

SEQ ID NO: 334822 - DNA, 237 bp, Pseudomonas aeruginosa
atgagcagcgaaccgctcgagccgaatcaggatgtgatcatccctcgctctcgcgacagtctgggacggcctgtctacaaggcgcagttgacccgtaccgacaaccagagcgaaaaggtggcactgattcggcagaccgctcccctgccggtgatcttcattccggggatcatgggaaccaacctgcgcaacaaggcagataaaagcgaggtctggaggccgccgaatggtctgtag

SEQ ID NO: 334823 - DNA, 315 bp, Pseudomonas aeruginosa
atggccaacatcggcaccttcaccgcagacaaagacggcttcaccggcacgcttcgcaccctgacgctcaacgtcaaggtcaagctggttcccaacgacaagggcaacagcgagaacgcccccgacttccgcctccaggccgccagccacgacatcggcgcggcgtggaagaagaccagcgaggccgggcgggagtacctgtccgtgaccctcgacgatccttcgttcccggcgccggtgtatgcccgcctgatcgaaggcgaggacggcacgcacgacctgatctggtcgcgcagcaggccgcaagcggcctga

SEQ ID NO: 334824 - DNA, 333 bp, Pseudomonas aeruginosa
atggactgtcatcttggtttttatggggaaaccaagttggtgacagcgaaacactcattggcgacggcgatacggacagtcaggaaggcgcggggcttgagccaggaagcgttttcggacgtgtctagccgcacctacatgagttcgctggagcgcgacttgaaaagcccgaccctgcacaagctgaccgagctgtgcgaggtcatggaggtgcatccgctcacgctgctgacgctggcctatgccggcgacagcacggataagaccgatgagctgctggcgcgggtacgccaggagcttgaggcggtgttgaaagagcgcagcacgccgtag

SEQ ID NO: 334825 - DNA, 351 bp, Pseudomonas aeruginosa
atgacccaaccgctcatcactgccgaacagcacgcacaactgctcgccgttggcgaggcgcgcgccaacggccagagcatcgacccgatgcccgtggtgcggctattcaccccggacgcgcacgcgacctggttgctggccgcgctcgatcctaccgatggcgatacggcctacggcctgatcgacctcgggatcgggatgcccgccttgggaacggtgaagctgtccgatctggctgccatcgtcgggccgtgcaagtggcccgtgatgcgcgacagttactttcaacctgcgcggcgactatcggaatacgtgcggctggcgcaggaaaacggctcgatcatggattga

SEQ ID NO: 334826 - DNA, 771 bp, Pseudomonas aeruginosa
atgactaatcgcagcgtcgaacactggtatccgacagcggcttatctctacgttctgcaccagggcggccccgcgctggcctgggagtacctgcgccgaaaccctgactaccggcgcgactggctgcaccgccgccgccgaccagatacggcgcatcgttggggcttgcgcctgctggaagatcccgccctggatgcgcgcgacgcacatccggcgtggttccccgatcacgatggcgtgatccagctctacccggacgacgacccgccgccggatgccgatgccttcgagttctggaacgtcccaggacgcaagcacctgatccatgatggcaagcgcctgatgctgacggcgcaatggcccggctgctgcgtgcggctcacgctcacgccgagcatggccgacggaatggcctacctctacgccatccgaggctgcactacgccttgcgcacgctatcgcgcactggcggctgggctggatgcgttgtccactgcaaccggggccgcgcctgcggcggcgacccgctcgcggcccacgcacgccgcagtgctggaactgcacaccttgcaggcactcgacgcgaccctggcgggcgcgtccttgcgcgaggttgccgaggggctgttcggcgttgatgccgtcgcggccgattggcacaaagacagcgccttgcgtgcccgcgtgcggcgcttggtgcgccggggcgatgcgctgatgcgcggcggctaccgccgcctggcacagcttccgccgttcccgtcgcattag

SEQ ID NO: 334827 - DNA, 318 bp, Pseudomonas aeruginosa
atgcaccagtgcggccagcgccacttgcggatgccgtgccacttcgatttgcagcgccgccgtgcggtgtgcgctcaaccgctgcgccagccggtcggacaggctcgcggccttgggcgcgtcgtcggcgtcgtggccttcgtcgttgtcggcttcgccttcggcgttgccgaaaccgcgccgcagcttttccagcgtgcgcagcgccttggcctcggcctcgcgcagcaggccgcgatggatgacggcctcgccgttgcggtcgatggtgacgatggcaccggccacctcgcgcacctcgggcgcatagccttgtaa

SEQ ID NO: 334828 - DNA, 909 bp, Pseudomonas aeruginosa
atgcggcacggcctccacccatgcccaaccctcggcgcgcacgtcctcggccagcgttgccagcttctcgcgcaccagagtttccagcaccccggcgtcggtgaggtaggttccggcatcgccttcggcgaacaggtcgcggcggatgccaccgcctgcctgccggtaggtgtccagcccgacgaagcgcaccagcgcgtgcgtggcgtcgatttcccgctcggtcaggcgtgcgcgcagcgcggacgggctgcgctgccattccggcgcaccatagaacgcggcttcctgtgcggcgtggtcgtcggtgatggtcagggccatcaactgttccagcgtgacggctccggcgcggtagtcggccatcaggcgcggcgcgatgtgggccagcttcaagcggcgctgcaccaccagcggggacacgccgaagtcggcggcaatgtcctcgacgggccggccttccttgaccagcgcggcgaacgcctcgaactggtcggcggggtgcatctgctcgcgcatcaggttttcggcgaggctgacggtgcgggcactgccatcggccacaagcaggcaaggtacctcgtagtcggcggggatgcggcgcttcttcgccagcagcttcaaggcggtcaagcggcgatcaccggccaccacctcgtaatgctcgccatcggcggatgcgatcacgatcaggttttgcagcaggccgatgcgggcgatgctcgcggccagttcggggatggacaggcgcggcatcttgcgggcgttgcgcttggagcggcgcggcagcaactgcgaaagggcaaccaagatcaggttcttggaagggtcggccatttccagcggtgcggcgttttcgatggcgcgggcttcggtttgggttacggcgttcatggtgacaactcctaa

SEQ ID NO: 334829 - DNA, 825 bp, Pseudomonas aeruginosa; identical to SEQ ID NO: 327611

SEQ ID NO: 334830 - DNA, 264 bp, Pseudomonas aeruginosa; identical to SEQ ID NO: 270698

SEQ ID NO: 334831 - DNA, 639 bp, Pseudomonas aeruginosa
atgatcttcgcgcttctcaatcagaaaggcggcgtcggcaagaccacgctcgccacgcacatcgcgggcgaactggcgatgcgcggtctgcacgtcatcctgctggatgccgacccgcagggttcctcactggactggacgcagcgcagaagccagcagggcttgccccggctgttcagcaccgtgggcctcgcccgcgagacgctgcatcaggaagcgccggagctggcccgccgcgccgatcacgtcatcatcgacggcccgccgcgcatcgccgcattggcgcgttccgcgctgctggcggccgagcgcgtgctgattcccgtgcagcccagtccgtatgacctgtgggccagcgccgagatggtggcgctgatccgcgaagcgcaggtgttccggcctgcgctgcacgcggccttcgtcatcaaccggcgcgtcagcaccaccatcatcggcagggaagcgcggcaatcgctggccgaacagccgctgccggcgctgcgcagcgaagtgcgccagcgcatcgtcttcgccgacagcgtggccgctggccggctcgcccgcgagacggcgcccgacagcgccgccgcccgcgagatcgccgtgctcaccgatgaactgctgcggtggccgacatga

SEQ ID NO: 334832 - DNA, 822 bp, Pseudomonas aeruginosa
ttgccgcagtgcgaacagctcgacctgttccgcgcgctgccgggcgacatggcgccacgcgacagccaggacttgatggcctttccattcttctcgctggcgaagtcgcggcgcatcgcgccgatcgacttccgcagcgggaacatcaccatccgcgtggaaggcacggccgagcacggcatcgccacgatatgggatgccgacgttttgatttgggcggcctcgcagatcgtggaggcacgcgacgcgggcattcgcccgtcgcgctggatacacgccacgccctacgagatcctgcgcttcatcgggcgcggcacatccctcaacgactacctgcgcctgaaagcggcgctcgaccggctgcaatcgaccagtgtggccacgtccatccgagaaaccacgggcaggcgcttgcatcgcttttcgtggatcaacgaatggcgcgaactggccgatgccagcggcacgccgctgggcatcgagctgatcctgccggactggttctatgccggcgtgctcgacgccgccctggtgctgaccatcgacccggcttatttccgcttgaagggcggcatcgaacgctggctgtaccgcttggtacgcaagcacggcgggcggcaggaacacggctggcaattcgacttccggcatctgcatcgcaaatccggcagcgcggctcgcttctcggacttcgcctacgacctgcgcgtgctggtggcacggcagtcgttacccggctacgtcctcggcatcgagcgcatgccggacgacaacaccgaactgctgaccttccggcccgtgctgcatacggcacggggataa

SEQ ID NO: 334833 - DNA, 285 bp, Pseudomonas aeruginosa
atgcgaccctctcccttgcggcctgccgccgctactgtcgctgcgccctcgcagccccaacgctacctgaccaacgacgaagccgccgagtatctgcgcctcagtcctcgcacgctggagaagcagcgcgtgatcggcggtggcccgaagttccgcaagttcggtcgccgcgtcatgtacgcagtaagcgacctcgatgcctgggccgaccagcgcagctacgaggctacatccgacccggaatacgccgaacgccacgcgggtgactaccgtgatggccgctga

SEQ ID NO: 334834 - DNA, 276 bp, Pseudomonas aeruginosa; identical to SEQ ID NO: 121653

SEQ ID NO: 334835 - DNA, 927 bp, Pseudomonas aeruginosa
atgaccaccttctggagtctgtacatcacagctcttaccgtcggtaccttgatcgccctgctctggctggtcttcgccacccgcaagggcgaggccaagggtactaccgaaaagaccatgggccactcctacgacggcatcgaggagtatgacaacccgctgccgaagtggtggttcatgctgtacatcggcaccatcgtcttctccgtcggctacctggtcctgtacccgggcctgggtaactggaaaggcgtgctgccgggctacgagggcggctggacccaggacaagcagtgggaacgcgagatgaacatcgcccaggagaagtacgggccgatcttcgccaagtacgccgccatgcccatcgaggaagtggccaaggacgagcacgccatgaagatgggcagccgcatgttcgccacctactgctcgatctgccacggttccgacgccaagggcgccctcggcttccccaacctggccgacaacgagtggcgctggggcggtgacccgcagagcatcgagaccaccatcctcggcggtcgccacgcgatcatggcggcctggggcgacatcctcggcgaagacggggtgaagaacgtcgccgcctacgtccgcaccgaactcgccgggctgaagctgccggaaggcaccaaggccgacgtcgaggccggcaagcagatcttctcggtcaactgcgtcgcctgccacggcccggaaggcaagggtaccgccctggtcggcgcgccgaacctgaccaaccccggcgcgttcatctacggctccagctacgcccagctccaacaaaccatccgccatggccgccagggccagatgccggcccaggagccctacctgggcaaggaaaaggtgcacatcctggccgcctacatctacaacctgtcgcacaaccagggcagcaactga

SEQ ID NO: 334836 - DNA, 276 bp, Pseudomonas aeruginosa; identical to SEQ ID NO: 325094

SEQ ID NO: 334837 - DNA, 261 bp, Pseudomonas aeruginosa
atgcttgtcaaactccccgatgaatcccccgacttcgtagagaaactcaaggaacagaccggtgcgaccacggctgccggtgcctatcggttcgccgctgagcggtacgggtcgctgacctatcagctcaagcgggccatggacgaactggcgaggttgcagacccggtgcaacgtccagcagcagatcatcgacaatgcccgcgcctctgcatcttcgctgcttgaccacgtcgctcagggcgatcttctccagggctga

SEQ ID NO: 334838 - DNA, 366 bp, Pseudomonas aeruginosa
atgagcgcctacaccgtgtcccggctggcccttgatgccggggtgagcgtgcatatcgtgcgcgactacctgctgcgcggattgctgcgtccggtggcgtgcaccccgggcggctatggcctgttcgatgatgccgccttgcaacggctgtgcttcgtgcgggcggccttcgaggcgggcatcggcctggacgcgctggcgcggctgtgccgggcgctggatgcggcggacggcgacgaagcggccgcgcagcttgccgttctgcgccagttcgtcgagcgtcggcgcgaagcgttggccgatctggaggtgcagttggccaccatgccgaccgagccggcacagcacgcggagagtctgccatga

SEQ ID NO: 334839 - DNA, 369 bp, Pseudomonas aeruginosa
gtgatctccgcccgtcctttatcggtcgcgctggcctgcctgctactgctcggcctcggcgccgccggcggtgtctggctcggcgcgcggcactaccggccgcagcttgatgctgcgctggcggatctggtcgcctgccgcgccgccaggggaggcctggaggacgcagtggcggagcaggtccggcaggttgccgcgctgcgtcaggctggcgagcagcgcgcccgggatgccgcgcaggctgtggatcggggacggcaccaggccgcggagcagtatgccgaagcccagcgcctggtacgtgagcgaaccgccggcgggcagtgtgcggccgccgaggcggtcattgatcaggagttgggtctatga

SEQ ID NO: 334840 - DNA, 126 bp, Pseudomonas aeruginosa; identical to SEQ ID NO: 319740

SEQ ID NO: 334841 - DNA, 1029 bp, Pseudomonas aeruginosa
atgccaatggaattccctccaactacagtaattggtcgcccacctttcgccacaccgttccctttgagcttttccggcctgagttctacaggctgggggcataatggcgaattggccgggcatggtccagccccggtcgatgaaagtgatgtttactgggatcttgtagctccagaaggtccatatcatctttggtacaaccagactcttcttaaaagcctggaaaactacataaagagtcgaacaggatatactccgagcctttataatgcctatttccttgaccttgcggtgaataagcaaaacccattactcgccctgtataacacatcagaattgatcatcgattggagcaagattcatcaaccacaaaaagagtggtacaccttaaaagaggtcacacagaatgcattcttccagagcaaggctattggtctcgcaatggcccatgatttcctgctttggaaggaagagagcaacgtaaatgactctcaatatcgagtacaagaagtattcgacaatggcgggcgcgacattctaatagatgaaaaacttgcagccaatccttactcttacgggaaagcgttatttcattatatttacgggaaaggtgcccccttgcacatgaacgtgccagatatcgggattaagcttactccccaagatattcaacctcttagggatatgatcaaaatgagtcatacccctaccacccgacctgtccacgttgagcggctctcatactggactggtagaatcagcaatgatgtgaagtacacgctgggaaatatcaccctgaaagtaacaggccagttccaacgcttcaccgatagccgctggaagttcacgggtacggttaaggtctgggatgacgtgtacgatgccaatctggatttccagcgccccatggatgagcaaacagcaaccagattcttggcagagttgaaaaattacggagccactaattttgacatcaagatgtacggcgaggctcccattgagctatcaggcactggagataagttgtaa

SEQ ID NO: 334842 - DNA, 720 bp, Pseudomonas aeruginosa
atgagcttaagggaggtctttatgccaatatatctattgctctatcgttttcgtattttagctgcggttgtgatagcgataatatcgatttgtctattctcagcttcgctgaccatggatgttttgaagagttctgatgtgttggtaagtatttatcctgaggacataaatgactatgcttcaaggctggctgctgaggagttatttcaggatgagttgcttgggcagcttaccgataaaatttatttggagcggtattcgatttgctcgcttattttggcacttgctatatatttcttgccatcgccagtgatcgtgaggcgaaatcgtgtacttttggtcttcctgtattttgcgattccagtttccatagtgatctcagaggttttagtaacatctataaatttggatagaatgctataccctacttgggcggataatatattaatttcctggcttgtttcttgcgtttttgcctttactgtctgtttgatactcctgccattgctgatcttaggttgtcggaaaactggcggcttgatatttcgtagcaggcccatacaggttttgagtggaactcttcttgcgatttggatggtagggtttgcctgctcttttttcagtggagagtataaggcgatgcttcccctatggctggggttcgtatttttttactacgtgctttcctccagtgatgagaaagcacctatcaagagatag

SEQ ID NO: 334843 - DNA, 981 bp, Pseudomonas aeruginosa
atgtctgacgagtggaagtcggaaacgccgaaggcgaatgacgacaagagctggaagctgctggaaaaggcggtcctcgccggggtccaggagcagcggcgggcgcggcgctgggggatattcttcaagtcgctgaccttcatctatctctttgtcgtgctgctggccttcagtccgttcggcagcctggagaaatcggcctcgcgcagcggtagccacacggcgctgatcgaggtgaagggcatgatcgccgacgatgagccggccagtgccgacaatatcgtcacggccttgcgcgcggcgttcaaggatgagggtaccaaggggatcgtcctgcggatcaacagtccgggcggcagtccggtgcagtcgggctatatctatgacgagattcgtcgcctgcgcggcgagcacccgaacgtcaaggtctatgcggtgatcagcgacctgggtgcctccggcgcctactacatcgccagcgccgccgaccagatctacgccgacaaggccagtctggtcggttccattggcgtgacggcggccagcttcggtttcgtcggcaccatggagaagctcggtgtcgagcggcgcgtctatacctccggcgagcacaagtcgttcctcgatcctttccagccgcaaaagcccgaggagacccagttctggcagcaggtgctggataccacccacaagcagttcatcgacagcgtgaaaaaagggcgcggcgaccggctcaaggtcgaggggcatccggagctgttctcgggtctggtctggtccggcgaacaggcattgcagctgggtttgatcgacggcctgggcaatgccagctatgtggcgcgcgaagtggtgaaggagaagaagatcgaggactacaccgtgcaggagtcgcctttcgatcgcttcgccaagaagttcggtgccagtgtggcggagcgcctcgcgctgtggatgggctggcaggggccggtactgcgctga

SEQ ID NO: 334844 - DNA, 339 bp, Pseudomonas aeruginosa
  misc_feature (269)..(278): n is a, c, g, or t
atgtccacattggccaacctgaccgaggttctgttccgcctcgatttcgatcccgataccgccgtttatcactatcggggccagactctcagccggctgcaatgccggacctacattctctcccaggccagccaactggcccgcctgctcaagcccggcgatcgcgtggtgctggcgttgaacgactcgccttcgctggcctgtctgttcctggcctgcatcgcggtcggcgccattcccgccgtgatcaaccccaagtcccgcgagcnnnnnnnnnncccgcgagcaggccttggccgatatcgctgccgactgccaggccagcctggtggtgcgtga

SEQ ID NO: 334845 - DNA, 1962 bp, Pseudomonas aeruginosa
atgcacccagaacactttgatttatctagctctccattcctaccggttgcggctgaaacctgcttaagtttgttaggtactaatggcgcaagatctcttaccgatctgacggatccagagctggctgcgatcttggtgatccagaacttggcgagtgaggcagaggagcagctcacctctcattgggtagaaagtgttctggccaagctcattgcttgggcagttgacgctcggaaaacagaggtctcaggattattgtcggaggcacaacgactttttgagccgggtaagttctactctggttgcaaggttgctaaacgtttgaatctgcgatttctcctccctgatgaagtttcagcacgggattacttgttgccaaatggaaaatgggatgtcacatttaaggcccgccactgcagaaataaaaacccgtttagcgagcaggtagttacgccctggcaccgtgagcgatggttgacccctgcgcaggacaaattgatcaggaccttccgcgccaatctggatgaacacctgcatattcaaggttatgcagggataggcaagagccatctgttaggtgccctgagagagtgcctgcgccccgaaaacacgttggtgctggcacacacagagggaaagctggaagctcttcgcagacgcatgggcggaacgcacgccaaggaaacgagctttaccttcatgaggttcgcacagagtcttctgcccgtatacagacctcaatctgggagcgcgccggccaggaacccaagcaagttagcattgtcgcaggagctgagtatcctcggtcttgctggatacgataagcttgcgacgctgaatatctgtttgaaggtgatcgagcgctattgccagtctagagacgtcttgctatcagccaagcatctacctaagcttcagttccccctgtctaacttggataccaaggtgcttctgcaatattcaagtcgtctatggatgtacatcgaggcgaatccaaccttggacaaactggttgggctcgagacgttactgccgataaagcgcgcaagtctagcgggctgtgtggttccggcgcgttattcccacgtcctcatcgacgaaagccaggacctccctgaatcgctgcttcaaatcattgagcgtggccgccaggtgctaattactcttggtgatgaatatcaacaagccggtggcgcaatggttaatagaaaacgtgaagttaggcgaagcgatattagctattccgttcgctcaggtcgtaacgtcgagagcctggtcaatccactaatctaccggcactcgaagaaaggcaagatccccttcgaaggcgctagcgaagatgacgtcgttatcaagtattacccccagaactttcttccctcagacggttgcgtagtactgactgcatcatactgggacacgatgagatggatcatccagatgaacgccgttgagcgaccgctaagtctatggaatgcaaacgcgctgatggattttaagcagtttatggccaccgccatagcactgttcaaaccggacttctacagagtcgatcaaattagtggtggaccgcatctgtattttagtgagacgtctaactggctgcaggtgcgtgaggcgaacaagtatgacggagcgtttctttgggtcgaggctgaactggaaaaaggcttcaatattgccgatatgaaccagctaaaatggatactcggccagcaagacaaaagctgtactgtaatgatggcgagagaggccggtggaatggagttcgaccgagtctttctgacccctgagctactcacaaacgaaaagttcaaaaattcggatgagttcgatgaacaaatctgtactgtatacattgcgatatctcgtgcaaaacggaaactctaccttccttgcgacgtgatcgagtgggtcgaacttcacaaccgccagcaattccgcgagctgagtggctactaa

SEQ ID NO: 334846 - DNA, 354 bp, Pseudomonas aeruginosa
atgaatgcacacgccaacaaaggtttcgccgcacgggctggtttcgctctgggcacgtttgtgcgcttcttcctgcatgatcgtcggcctgtcgtgcgctgggtcaaacgagttagcctcttggtggtgctgttcgttatctttgttcagaactttacctggctggcaagcaccttcatgaccttgttgtcgtttgggctgattcgtgttgtgttggttaagggagacttctctatttttcgccagttggacgaggatgaagcccaagcagctccctatggccgagatgttttcggtaatgaactggactggatggggcgaagagatgatggagtcctctctcgtgaagattaa

SEQ ID NO: 334847 - DNA, 186 bp, Pseudomonas aeruginosa
atggcagaatgcttcgtgaagaccatgaagcgcgactacatcggccacatgcccaaaccgaatcgagcgacggcactgcacaatctggccatcgccttcgagcattacaacgaacaacatccgcacagcgtcctgaactaccgctcacctcgggagttcagacgcttgaccgaggcatcaacttaa

SEQ ID NO: 334848 - DNA, 669 bp, Pseudomonas aeruginosa
gtgaaggtggtcagtgaaagtctcggtgtaacgcgctcgcaattgacggctcgactcaagcaaccgtcgggagaacagagaattcgccgacgaacgttcaacgatgcggcactggtcgaacggattcagcaggcgatcaacgcattgcccagctacggttatcggtgggtctggggtctgttgcgtcggcagcatgagcagcaggccctgccaccggtcaacgtgaaacgggggtaccgcgtcatgcgtgaccacgatctgttgctggaacggcggcgcaaacagccgggggcggcgcgtcgtcacgaaggtcgtttggccgtggacacgagcaacacccgctggtgctcggatggcttcgagttccactgcgaggatggcgacaagctgcgcgtgaccttcgccctggactgctgcgaccgcgagaccatcagttgggtggacagcccacacggctatagtggcgatgatgtccgcgacgtgatgctggaggccgtcgagcagagcttcggtggcgaactgccggcgtcgccggtgcaatggttgagcgataacggctcggcctataccgccgaacagacccgcgcctttgcccggcagatcagcctgcagccgctgcccccccggtgtgcagtccgcagagcaatggcatggcagaatgcttcgtga

SEQ ID NO: 334849 - DNA, 306 bp, Pseudomonas aeruginosa
atggtgcgcgagagcctggagccggaacaaagcgtctcggtggtggcccagcgcaacggcatcaatgccaaccagctgtttcactggcgcaagctttaccaggacggcagcctgtcggcggtcagtgccggtgaggcggtggtgccagcctccgagctggccgatgcgctgaagcagattcgtgagctgcaatggatgctgggcaagaaaaccatggaggccgagatcctcaaggaagcgttggagatcgcccgttcgcgaaaatggcttgcgcactcacctttgttgccgggggacgaccagtga

SEQ ID NO: 334850 - DNA, 1548 bp, Pseudomonas aeruginosa
gtggtggttgccaccgtggcgaccgtggcggccccctatctgttttcgcggctgatcgatcgactgccacaagaaggcgcagcggcgctggcctgggcattcgtagcctatggtgtgttactcgggctaggctcggctctgcagcagatggtgcagtacttatcattcatgagttcagagaatcttggtttcatcacgagcactcgctactttgcgactatcctgaagaagactgcgacattcttcattgaacataatccggcagagatccaggcagcaggcgagaaggggcgcagtgggttgaaagtcttagtgcagctagcccttgttgcttttattccaggcatcttgcagatcctgcttagcctgttcacccttggcgcgttgataaatattcagttggtgatggtcgtagtgatctatggcgtagcggctatcggtctttcgacgatcgctacccggcgtgcgcgagcctacctggaagctgccagcaatgccgggcaggagaatgcccggtttgtcggtaatgccatgaatgcgatggagaccctgcgccagttcgggagtcacgcctggatgacccagcgttttgcgcagagggcgcaagtgacacgcgacaattggcgtgcctatgtgcagcagcgcctgtgctatatagggttgctcgggttcggactggcgatccagttcaccactaccttcatgctgcttctcccgcgttatgaagctggcgcgctcagtatcggtgatctcgtcctgttcaatacactgctactgcaactcaatattccatttgaagcgatcgcacgcgccattgatgatgtcgcgcgtgcgcgggcgatgctggtgccgttggtaaggctatggcgcgcccccgaggagccgcgtctgcatgttgccaccccatttgttcctggccaagggaggctcgtattcgacaaggtcgattaccgttacgccaatggccgtggcgtgtcaggcgtgaccttcgatataggacggggcggtatcacctttttgatgggtgaaagcggggctggaaaatccacgatcttcaaactggcgctgaagagtatagagccggatgctggccgtattcttgtcgatggtattgatcttacgggcatcgaccgtgtcaattggcatgccatggtcgccgtggtgccacaggatgtggttctgctcaatgaaaccttggcggacaatattctgcttggccgctcgcttgatgctgcccgtcttcgggaggtcacggcaaaagcggccatagatacgcttatcaataccctgcctcaaggcctggataccatcgttggcgagcgtggcctgaagctctcgggaggcgagcgccagcgtatcgccatcgcgcgtgcgctttacggagatcctgcaatcttgctgctggatgaggcgagttccgctctggatgagtcgactcagcaggaggtgatggtgcacatccgttcgcttgcagccgaggtgacggtaattgctatcacccatcggcagaccagcattgcgtccaccgaccgggtgatctggctgtaa

SEQ ID NO: 334851 - DNA, 930 bp, Pseudomonas aeruginosa
atgagtgcagagagaaacgacgacggattcgacccaacgctggttttacgtggtctgtttcccttatcaaggttgattcgtttcgtccgagagcgctgtccacctgggcaggtggacgaatcggtgcaactggatcaatggcgccaagcaaaagcagttgctcttgagctcattgatgaagaagcgggatatgccgataacgttggcatacaagcactaccggacgacttgcagccattaggggaagctgcgttgcgccatccatcgatgcatcggatcaccagccgggtgccacgctcctggtacatggtcgaagtggatcgcctagtcgtcttccaggactccctcaacctgcgctaccttgatgagctcaggagctctttccccattaatccaagcgaaaaagagatcatggagtttgctgccagccagggagccgccagtgcgcaaccggcggtgcattactcgccagcagacggcgactatgctttttcctcgaaatccaatgacctgcgctttctcgatgtgactgtcgtcgacccttcagtgattgcgcactacgagccgtttggggcggccagctacgccatcgtggtctatctcggcttcagcgacaatgtcgtcagtgctactcgcgttggtaagcgcctcattttgaccaacggctcccatcgcgcctacctattacgctcgcttggcattcgttatataccgtgcctggtgacagatgccagtgccagcgatatctccgacatattgttaccttccgctatcaagcaagatcaagagctttatttacgctcggccaggccaccactgttcaaggattacaacgatgcccgtctgacccaaatcgttccggttatcaggagaaactacgtcctccgcgccaagctagacctgaaaaggacaacagttcctgctacatag

SEQ ID NO: 334852 - DNA, 708 bp, Pseudomonas aeruginosa
atgggcgagctggagccgacgcgtccttatctgctgagtagtcatgcgcatgtgtgcgttgcgagcggggtagtcgtgttgcttgatgtggattcgggaaagtatctgtccatcggcaagcagcaagcggtgaggctggggaaccatatcctgggatggcccatgcaggcagatagccaggggggggcaacgattctccagtcgttgattgatcgccgtctggtaaccagaaatccagctcagggcaggcctgccacacccgccacgatcacgctgccaacgcgctggatacgtgaaggtgagccacgtgggcaaccagacttcagattacgcgacatgcgccggttcgccgttgccgtagcgtttgccgtctgctacaaaaaactcgttccattcaagtccatcgtggctagagcccagcggagggtttctcgcaagcctcaagaactgaatcaactggattacttggcgttgcttgtgcgcctgtttgattggttgcgtcctctggcctttaaaaaaacggacgagtgctttctgtattgttttgccctaagcgagtttttggcgcagtacggctttttcccttcttgggtgttcgccgtcagtactgatcctttcacggcccactgctggttacagcataacgactacgtgctgaccgacgttccctttaacctgcgccggatggctcccatcttggtgctatga

SEQ ID NO: 334853 - DNA, 1851 bp, Pseudomonas aeruginosa
atgtatcgctatcttgctgtcttctggaatagcctgtcatgctcttcggtggagcaggcagagaaggttaccaaccagattgaggtcactctcccgggtattgcatgtgcgctgcgcggggagggggctgcgatttattaccagacagaaacccccggcttctttgactgtacccaaacgggcaagctcgttatccttggaaagatcttccccaagacctttgctgacggtgaggtgcctaggtctgccagcttcgatgagagggttgcgcaggctgtgtgcgaaaagcaaggttatagccttgtacagcactactgggggcgttacgtggccttcggctataactcctccacgcgctgttggttcgtcgtccgtgacccaactgcggagcttccatgcttcatcacggttgtaggttccctgaccattgtattttccaacatggaggactgtctgaggctgcgcttgaggcacttttccatccgctggtcctatcttgcctactcgctgctctttccattccgagaaacgggccagactgcttttgaaggggtggacgctctggagggcggcgagggcatcacgatccaaggcggcaaacccgttgctcggcagtgccactgggatgtggtcaaggaggccgcagagcagccgataacgagtttgaacgatgccgtccaactggcacgatcgacgttactgggctgcattggcgccttggccagccagcatgaccaggtgcagttgcaactttccggcggtctggactcgtcaatcatccttgccggcttgctccatgccccctccggcccacgggtgcaatgcgttcatcactatgattccggcatcggcgcaaacgaaagagactttgcacgcctggcggtagcgggagcctgcgcctcatccgggcgcagttgcgagttcatcgagtacgagcgggcgccgcattgtgcattggaagacctcatggcctttccggtgaccgcgcggccagcccattgctcaggctatctacttcatcgacgcagcgacttgcataaggacctgagccaggagctggttcagttcaacggggttggcggcgatgcggtctttctacgtttcaaggggaatgcgccggcaatcgactacgcctggcagcatggccttgatcggaccttcctgcgcgtggccttcgagacagcgcagtcgggagattcgttttatggcgtggtcaaggatgctctgcgctacggcatcttcaagaagcctccacgtatcaacgagaactggggcaacccgtgcgagtgggttcagttggagccaagcgcccatttcaccccccggccggcgtggatgcgccacgctatctcccatgggcatcgcgtctcgccgcacaagatggcgcacatcagcaggatggttttcccggtcagtgtgttggacccgttcgagggggcagggcgctggcacggggtttcgccgattagcgcgcagccggtcgtcgagttgttcgcccgcattcccctgcacctgctaatggccgatgccgaggatcgaacggttgcccgccgagccttcgaaggtctgctgccgcacgccgtcctgtcacgcaaggtgaagagctacctggacgatcattccgttgctgttatccgccaccaccgggacttcatcagaagcctgctggtcgacgggcagttggcaggacgcggatggatcgacagcaaattggccgatgctggcatctgtcgcgtcagcctggatcactccaaacaagcactgggcatctttggcccgcagctcaatatcgaagcctggctgcggcgttactcggcgcaccttggcagcacggaaattcccgcgctctag

SEQ ID NO: 334854 - DNA, 711 bp, Pseudomonas aeruginosa
atgctgtgcgcgaagaatttgaccaagcaccacggcacgcaccaggcgctggacgatgtgagtttcaccgtagcgccaggagagatttactgtctcctcggtgccaacggcgctggtaagtcgacgacgatcaagctattcctgggtttcatggcgccgacctcaggctcggctgaagtggacggtctcaacgctgagttggagccgcaggcggtgcgacagcggctgctttacattcccgagatggtcgccctgtatgaggagctgaccggctacgagaacctggactattttgcgcgtctggcgaaagtgcctgatcgctcacctgagcgcttgcacgaggccttgaaggcggcaggattgaaagcggaggtgctagaccgtcgggtcggacagtattcgaaaggaatgcgccagaaggtcggtattgccctggccatcgtcaaggaagccaaggccttgctgttggacgagcccacctctggtctggatcccgaagcgtccgccgaatttcacgacctgctcgtgcgccagcgtgaccgcggagcggcaatcctgatggcaacccacgatctgttccgtgcacgggaagtcgctaccaccataggtctcatgcaggcggggcgtctgcgacggacgttgaaggccgacaccatcaccgccaacgacctggaaagcctttatctggaggaaatgagccggcatcgctag

SEQ ID NO: 334855 - DNA, 1359 bp, Pseudomonas aeruginosa
atgagctacatcgctgtcgccgggtatgagattcgccgcctcctgcgtgaccgctcggtggcaggcctgctactcctactcgtagccctcagcgcctatgccgcgtggaatggcagcgaatgggtcggccagcgcatggcggctatcggcctgctcgctagcgaagaacagcagatgctcgcgcgcgcgcgcacctttgtcgggcaggctccgtcggtgcttccgcgtgtgcagccaacactgcctcccggggcgatggcggcagtatcgagcgggcaggccgatgcctatcctttcaccgctgacgtcgttgcgctgggggataccaccctgttgttcaagcgtgtctgggcggatatcagtagcccaacagcgcgttcagccggtcgattcgatctggctttcgtcatcgttttcctactgcccttgatcgtactcgccgtcagctacgacctgtggtcgcgcgagcgagaacagggtgtcgcggctctggtgctgtcacagccggtctcggtgggttggttgattgccgtcaaagcgctcgcacgcggtctggttgtgctgctgccctctaccgtgatcctcactgccgccgccgcgtgtgccggcgcacacgatccaatggggctggcttgcctggccctggtcgtgctggcctacggtggtttctggctggcattggctgtgatgatcggcctgcgcgcacgacgctctacagaggctgcaatcgctgccggcgcggtctggctgctgctcgtggtcatggcaccatcgctcacgctggctagcatcgatctgtttgccccaccaccgtcggaaatgcgcttcgcctccgacaccaaggcgctgatggcccagattaccgaacgtcagcgcctggatcgtgcagccaatcccacgccagctcggacaccagcccctaccattcccgactcaatgcgcgacagctataccgacctggttgccgccgaccggcaactggcgtctatgctcttcgaacacaagcgaagtcgggatgagcgccgtcacctgatggacaatgtgcgcttcctgctaccctcggtcgccgcacaggacgcactagaccgcctcgctggtacagacgccgaccgcgcactcgccttccaggaccaagtcactaccttctggcagcaacggcggttactgcaccaagcctatctagaacgcgatgcgatccagacgcttgccgagtacgacagcctgccgcgcttcgcgtttcaggacagcggcgctgtctttcaaccggggttgctagccgacttggcagcgctgatcgttgccgccggactcatcctggtcgccgcctgggccaggcgcggccaagcggcaaggccataa

SEQ ID NO: 334856 - DNA, 1467 bp, Pseudomonas aeruginosa
atggccgatcagattacagctgagcgcgtgactatactcgagcgctcgccaatcctcagtgtcgctgcggtgcaactcaccctgatgtggcgtgagcggcgtgtgctttggctggcgttggcgctactgcttctcgctgctgcgtcgctcgaaagcaacaccgtacgcttagcggctcaggcaaaagagcggcaggcattggccgcagaggaagctcggcggtggaatgcccagggctcgattgatccccacgctgcggcgcacgtcggccgtgcaatccccgcagcggtaaagccactggcggctttcgacccagggttgtctgatgtgctcggtacctcagtattcatcgaggggcacgcgcagaacccggcgcgtcaccggtcgatcgaggctggcgcggccctgagccgcttcgggggcttttcggcagcctgggcgctgcaggtcgttgcgcccctgttgctcatccttgccggtttttccagcatgtccggtgcagtggcacggcaacgactgcgccaggagcttgccgctggcgccgccgccacagccctgctcggtggccgcttgctcgccttggcgagcctggctgggcggttcgccctcgccctgtttggcgtcagccttccggtgattctcctgcaaggcgcaggtggcaccgagataggagcgctgctgctcatcggcgctgcctatctgctctatctgctagtgttctgcgccctgaccgtcgccacttccgcgctttgtctttcggcgcgtacatccctggccacactgctgtgtttttgggtcgtggcgactctgcttgtgccgcggttagcaccggcggttgctgaaagcctggtgcccaccccttccgcaccggtgttcagggccgcggttagcgcggaagcggagagcggtgtcgatggtcatgatccggctgacaagcggcttgatgccgtcaaagccgagcttctggctcactataacgtcgatgatgtcgcggacctgccgatcaacttcagaggggttgccctggagttcggcgaaagaaactccacacagacctatacgcggcacttcgaaagcctctacaaggcctatcagcagcaggaatgcctacagagtgctttcgccagtatatcgccgacactcgccttgcaatcctggtcgcgcgctttctctggaaccgacttcgcggctcacctttcctacctgcgtgacgttgaggactatcgctatcggctcattcaagcgctgaaccacgaggtgaaaaaccacaagcctctaccgggcgaacgctatcaccttgcggatatcgcaacactatcgcgctcgatcatctatgcgccgcaagagcagaatctggcagccacggctgcggcgcagactccgaacttggcgattttgctgggctgggtgctcttgagcctctgcctggcgtttgtcgctgccacacgtttgggacgggtggaatga

SEQ ID NO: 334857 - DNA, 2229 bp, Pseudomonas aeruginosa
atgatcgtcaccggcagccatatccgagaaactgcggcagacggctcgtctccggtcatcatcttcgaaaaagaagatattgagcgtaccggcgtggccacgctgccacagttcttcgagaagctcccacaaaatttcggcggtggagccaatggcgcaaacgttgccaacttggggttggatcgtgataccgctaacaatttcggccaaggcacatcgatcaacctgcgagggctgggcaccggtacgacactgacgttgatcaacggtcaccgtgtggcctcatccaaccgataccaatatgtagacgtatcgctgattccaatgagcgcggtagagcgtgtggagatactgaccgatggggcctccgccatttatggcgctgacgcgatcggtggtgtcgtcaacatcatcctgcgtcaggacttcatcggatatgaaacctctgcacgctacggaacgactaccagtggaggcatgaacgaataccaagcctcccaggctggcggctgggcgtgggacgggggccacctcctggccacctatgaatatatgaagcagggctctctgtcggcgactgacagaagcttttcggaaaacgtaaccgtcaaaccctacgacctgtacccagcttcagagcgaaacagtttatacgtcgatggctcccagcaactgagcgacatactaacgctcaccctgacgggcacctatgccaagcgcgatgtagaaaccacgatttccggaacggccgatgaaacccgtctattcccgcaaacacggcaatacgatctctttgctgggctgacgctggaccttccgcgtgagtggcaagctcggttaaatgctggatatggcaagaataccgtgcgctacgaacgaaccactatcactggcacctctgcggctactgctcggccgaccgatatgcgctcggagacccgttatttggagctgatcgccgatggtgagctgatctccctgcccgccgggcccttgcgggcggcctttggcagcagtatccggcgcgatggctatgacttcgtcgattaccgcggattggaaaggccatacgatgtgcaccgcaatattacttccgtgtttggcgagttgaacgtcccgctgctgagagatcttccaggcatacgcaaactgtcgttgactgccgctggtcgctacgacgattacagcgacttcggttccacggcgaaccccaagttcggcctgcaatgggaggtcaacgaggatctcacgttgcgcagtacctatggacgttcgtaccgtgcgccagtttatcaggacatgcaaccgaacaatacggtcgtggtgtcccgtattcctaacccgaattcgcccagtggcaacacggtgctgatgatgcttggcaatggcaatcccgatctgggccccgagcgcgcgaagacctggaccgctggcttttcgttcaccccacgggtactgccggggttgaaggtcgacgcgaactactaccacatcacctataaaaaccgcatcgataacggctatccaggtagcttcacctccttgttccagggggctaccgcagcctactcggatatcctgaccttcaatccgacgcccgaacaaatccaaaacgctcgacagctcggaacatccggacttggaatgttcgtttctcgggtcggcccctacgcccttccccttggaatggacgaaaacagtaccgaggtcatcctcgacaaccgcttccgcaacaacgcctccaccacccagcgcggggtggacctggatacgtcttatgccttcggtgtcggccagaccgacgtcgcgctcagtctcgcggggcaatacatcatcgaatccaaacgccgagtgaccagcagtgctccggaggtcaatgcactgaatgacgtgtacctgccggtggatctcaagctgcgtggtggcattgcattgaaccgacagcagttggccatggggctcttcgtcaactatgccgataattatcacgactcctcgaacccgaatgatccacacgtctcgtcttggaccacggtggatctgaacatcggatatcgtttcgcgccctcgttatggccgaagggagagacactcctggccttcaacgtgcaaaacatctttgaccgggacccgcccttcgtcgtcaacagcatcaacaccggctacgatccaaccaatgccaccgccttggggcgctttgtctccatgagcctgacacaccaatggtaa

SEQ ID NO: 334858 - DNA, 270 bp, Pseudomonas aeruginosa
atgactactcatctgatcaccctagtcatcaagcagccgagcgacgctcaggcacgccaactcatgtaccaggagttgctcggactgatctcacgctacggcggtgaggtgacgtccaaggccttggaggacgagtcgaccctctgcgagctgctggtgcagatgctgcctgatgatgaggtagagcaagccaggaaacaggtgctcgaacttcatgccaagcgccgccgcccgggccgcctgcagtcgccggcaagcctgaaggtgtaa

SEQ ID NO: 334859 - DNA, 657 bp, Pseudomonas aeruginosa
atgcacacgaatacctcaatgactatctctaaaaaggcccatacgtccaccatgaagaagactgagcttattctcgatgccgccactttagtatttttagagcatggttttagcaccgccactacagacatgatccaacgaactgctggcgtttctaagtccaccctctacacacgttataaaagcaaagaggctttatttcgcgcagttataaaaagacagtgcaaagaatttgcagacaacctaagggccataaccccgagcagtacggatactcacaatattcttactgaaatcggatatgcctatctagacatcgttctatcagagaaagctcttgccctatatagagtggttactgctgatgcccctcgatttccagagctggcgcagacattcttcctggctggcccccaaactgtagcaacactaatcacaaagtacttggacgatgcctgctcaaacggccaactaaacctaggtgacttgccatctagttccgcagcgtccttattcaccagtttgcttcgcggggaaggccagatgcaatgcttaatgcatccccaccaacgtcctaccagcctccaagtcgaccgctgggtctcccaagcagtagaaatttttctccgcgccctggactcatccccaatacgatag

SEQ ID NO: 334860 - DNA, 1158 bp, Pseudomonas aeruginosa
atgcccccacaaccgcttgtgttgtttccctgtgccgccttggatgccgggctctgtctcattagattcgctcaggaggctgaggaaagtgataggcggatcagtgtcgccatagtcgactcgtcaagtgggctgattttatgccagagagatgatggtgcgatcggtcttcgtcctcctgtggcgcttggaaaagagtctacggccgcctttctaaaggctcccgccgagttctttggtcgcttcatcaatgaaggaatgaccgagctttctttctacttctgggtgacaaatcttgaggccaatttgcccattggtttgtttgggagagcggattgggtcatgggtgtaaatggcactaatgcgcgaatgacagtcagcgtagctgagagagctacgtctgccttgcagacttttgagtggaaaaagatgagtggattaaaagacaaagtagttgtagtcattggtggaagttcggggattggtttgagggtggcagagttagctgcgcaacaggaagctaaagttgttataaccgggcgagacccaaagcgattggcgaatgcttgtgagagtttaaccaagcatggtgcgagactggatgcaatgagattagacgctcataaggctcgagagttggagtattttttttcctctttgcctgagtttgatcatttggtctcaatggttggggacgtgatggggggaggttttcttcaggcagatatggatgtgtttcgacatgttatcgagtcgaagttctttacgaatgttcgtatcggaagacttgccgcaagaaaagtgcgggcaggtggtagccttatttttacttctggcagcggcgggcgtgctcaggatgcctgtgctagctatgtcggaaatctaggtattcaggctttagtcgaggggcttgcagttgaaatggccccgagggtacgtgttaacactgtagctccgacctggacgctgacgccgttttggcgtgatgtacatgtagagcaactagctgctactagagaacacttcgagaacgtcattcctcttcggcgtttggctaatgttgacgagatagcaggagcctatatttttttgatgaataatggctttttaaccgggcagcgtttggctgtggatggcggcattatgcttggagcatag

SEQ ID NO: 334861 - DNA, 3288 bp, Pseudomonas aeruginosa
atgaaagctagaactttttcatttggatttaactctaaatttaaatatgcggcatttctattttttatacctcaggtttcattttcgcagagttattcggcaggagataattctacggctggcccagggggtaatacaaatataaattgggtttttacgaatccaaagtttgtgaggggttctaatatctacgcggtggctataggagactctgctagctcaaacggagaaggaggaacctcattgggcgataatgcagaagcatcagctagaataactaccgcacttggagcttactcgcttgctagcgccgacggagccacatctttaggggtaagtgcacttagcacaggcctaagtgcggtatccgtcggtcgcaacacaacagcatctggaaatagatcactggcacttggaacggatgctagtgcactaggtgactggagtagtgctgtcggtcctcgcgcgagtgcaatttcgaatttttctacaacagttggtagttttgcaagagctggaactgccaacagtagtagcggagggcaagtagcgattggttatcaagcagcagctaccgggaccgacactctgaccattggacgcggagcaaatagtgctggaagcctatctacggctattggggcctattcatcagcctcctataaaaatagtgtcgctctcggttctaatgcaatagcagatgggaaaaccatcaatgatactgcctatgacccaggatttactgctgtttctggacttactcctattggggaagtaagtttcggtagctctggcaatgagcggcggctgacaaatctggccgctggcgctaatgatactgacgctgtcaatataagccaattgaaaagcctgtcctccactgtagagagtgtaagctctaaatctgtgaattacggaaccaatgcagatggctctgttaactacagcgaggttatactaaaccctggcggggaggcgactagaataagcaatgctgcccaaggtgagttatcaagtaatagcagcgacgtagtcaacggaagtcagctttttgccaccaacaacgctgttgccgatgtcagcacgtcggtgaacaatattataaataatggtgctgggataaaatattttcacaccaactcaactttgtctgacagtgttgccaccggtgcagacagcgttgctattggccctcaatcgatagcgacggggggccaatctctagctgccggagcagatgcaacaacgacggcgagcggcagtatagcgttaggcaatcagagcagagcacaagtgctgggtggagtggcactaggtcaaggttcgatttcggatcgtgaagtcatttcagcttctggtttgataccggtgggcaatggtgtaatacgctatgatacttccgacgcggcactggtgggtgccgtctccgtcggcaaaaacggcgaatatcggcaaatcactaacgtagcggacgcaacggacgatcatgatgctgtgacgttgcgccaactggcaggtgccatggggtccctcagcagcaccggcaccatgtacttccacgccaattcggtcaacccacaagactcattagcagcaggtgaggagacgattgctgtagggccgggaaccgtagttaatggtgacaatggaattggtatcggcaatcaagccacaatcagccaaagcgctcttggcggtattgctattggtcgtaatgcgcaagtgcaactagcctctggtattgccatcggcactgaagctcaagctcaagaggagcaggctctggcccttggtgcaggatctgttgcgaaccaggctatgagcattgccctgggtgccagttcgattactacggtaggtatccagagcggttacgccgcttatggactctctaccccgcagacctcagtcggagaattggggatcggtacatccctgggaaatcgcaagattaccggtgtcgcggccggttcagcccccaacgatgctgtcaatgttgagcaactgacagcgatcggtgatcaagtgacgcagaacacctctaacatcactatgctcggtaggagcgtcaccaatatcgagggcagcatcagtaacattaacaatggaagcggtgtgaaatacttccacgccaactccacccagatggactcggtggctagcggtgcaggctctgtagcgattggcggaagcgcccaagcttcaggctatgggtcgttcgcttcgggtaacgaagcacaagcatccggaacgggctccgtagcaataggaaataacgccatcgcaagtgctgatggcagtgtggtcgttgggcagggggccagcgacagcggacgcggcgcggaaagctacactggcaaatactccaatgtcagcaatgccagtgtgggcaccttttcagtaggaaattccgccaccggagcaacccgcacagtcagcaacattgccgatgggcgggaagatactgacgcggtaaacgtacgccaactcgatggggcggtggcagaatccaaaaaatatacggatgactctctgcaaaatgtcaacaattccattagtaatatcggtagtgccatcaccaacgtagacaaccgagttacccgaatagaaggcgatgtgactaagatacaaaacggtaccgacggtatgttccaggtgaataaaacttctactgctgccaaaccgtcagctacgggtagcaatgcagtggctggtggcgctggtgcggtggcttccggcaacaacagcgctgccattggaaacaatgctaaagctacaggagagggctcgctcgccataggtaacggcgctagcgctaggggagagaacagcaccgcattgggaagtaattcggtggctgatcgcgataacagcgtttcggtaggttctgccggcagtgagcggcagataatcaacgtggccgaggcaacccaaggtactgatgcggtgaacttcgatcaactcaacagaagtgtgtcgaacatcaccagcaacgctaacgcctataccgaccagcgttattctgaactcaagcacgaccttaagaaacaggatgataccttgagtgcgggaatagccggtgcaatggccatggcaagtctgccgcagccgtacttgccaggcgctagtatgacatcaattggtgccgccaactatcgtggacaatcagcgctctcgttaggcgtttcaagaatatccgataacgggcgctgggtcagtaagctgcaagcctcaacaaatacccaaggagacacgggagtcggtgtaggggttggctatcagtggtag

SEQ ID NO: 334862 - DNA, 861 bp, Pseudomonas aeruginosa
atggttttgttcagactcataatttttttaattcccctagcttttcttgtcggatgcgatgcaccatctcaaaactcctcaagtacgacgccgcataaaggtttagtggctctaccagctctactgatcattcaggaggccatatccgagctggttcctgttgttgacggtcagcgaaacgatatgatgatgagccaagtttgcgctctagctcgcggcgagagcacgcaggaacaagttgagcagaagttgttgaaacatggcataaacttggagaatgttccccgccaaggacatccgttctcactgttagtcagctctgaccctctctctcgcacaactgcttgcgccgcttatgtcgcaacatcggtcatgactttcccggaggttagggagttcatgagcgaggataaaagcggagtttctgatagcaaaacaggcgggaagttgacggtcgatccaaaaaaacttcatcggtttttgggtgtgcaactggcagtagccagagccgatgcagacttctttgcgctactcgcgacgaaactggaatctactcctgggctcactctggagcagtataaaaagagtgcacaaggtctcttcgcaaaagttgccctgagttatcttcggcggattaagagtctctacgcagatgggcagagcaggcaatatagtctactagaatattctggtaattatttcaggttcgctagtaatgacgggtttctatttgcatacggccatgatgggttgtatctaaaatttaaccaagtctcttggtatggtgctggaaaaattcttgggaaaaagtacatgttagatgtggcgtattttgatagggaactggcaggttcactttga

SEQ ID NO: 334863 - DNA, 273 bp, Pseudomonas aeruginosa
gtgagtaacctgctagagcgagacttcaccactctggagccggagcacaaatgggttaggaacgccacggagaataccaccttggaagacaagctgttcctgtgcgtggtgctcgacctgtacagtaagttggtggtcggttggtcgatgcctcatcgtcagaatcggcagattgtgatccgagcgatggagatggcgatctggcagcgccagggcgactggtcggtaattctgcattccgataaaggccgtcagttcacccgtgcggattag

SEQ ID NO: 334864 - DNA, 471 bp, Pseudomonas aeruginosa
atggctggcggcacggccgatcatctgccgctcgctgggcctgatcatcgacgctggcaccgctctggaggcgctctggaggcgctaagcgccgagctggacgcgacttggcaggcggtggccgcacacctgcccgacaaccctgcggtccaattgaacgggaatgccgagggcaaaaccgagccgtcgctcggcgccctagaaaaacttgaggaaccaagctctctgctgcaactgcgggcggccgtggccgacctaatgccacgtgtcgatctgccggaaatcctgcttgagatcgctgcccggaccggtttcgccgaggcgttcacccatgtgtccgagcgcaacgcgcgggccgacaatctggtcaccagcctctgcgccgtgctgctgggcggggcctgcaacaacgggctggagccgctaacccgcagcgacaatccagcgctgcggcgcgaccggctgtcctga

SEQ ID NO: 334865 - DNA, 1278 bp, Pseudomonas aeruginosa
atgaaaaacattgtttatctgattttcctactgtttggctcttccgttgccggacttacattagctgatgactttctctatagagcggacttcaggacaccagagcaaataatagaggcacaagcaatacttacaagagggcagtctgattcttatgagaggggaacaagaataaatataaatctatatgatcatgctggaggagtggttacaggaaatacgcgctatgatagcggatatgctggaaccacagtatccttaagcggggcccatgcgatagggcaaactctttttggaggtgtctctgagtattacatatatgtcataagaagggccccaaatctaattgacgtaaatggtgtactgggacgctacagtccccaccctgaagaaaatgaatacgcggctattggaggcatcgctctcagtcaaatacgaggctggtatagagtgaattttggtcggatcgaaggaggtatggttaccaactcccgttaccgggcagacctatatcagaatttagatgttgctccggttgaaaattcgtaccagttggctggttttccccaagggcaccctgcctggagagaacagccttgggtgagtcacgctccctcttcgagttgctcacagaggcgcgaactaagagatgtagacagcgaagatgaatgttcggcgttcggaaaagaactggctcttactaaattaatgaccgacaacccattagtctactctatactcaagctccaggatcagcagcaagacagcaattatcaccggtacggttatccagttagacttaagctatggggaggatctccagcaaactactggggtgggcaggtttgtttatatgacaacccattcactacgcactacgcctggatatataactgtgataacgaaagagcacatcaacaagggtatagcgatgtgctttatttgaacagaatcaaaactgaagatggatttctcgtacagatattctcaagagatctaacctattgtttggatagcacggatgcaatagattcacaactgaactggacgactgattgcggaattaatgttactaaaactttgttcaaggaagatggacacggtcgtttttcgccggcttataaaacagttaatccgagagtaccacactatataaagggtgcgaatgacgatctgcatgtatactatggtcttccatatggcctactacatgatacaatggatgtttcggatgactggactgtttggagcgtagagcctgtccctctgaaaaactag

SEQ ID NO: 334866 - DNA, 861 bp, Pseudomonas aeruginosa
atgaaaatagctaacgcatttggagtattattaatttccctctattcggtatccttttcggtgttatctgtagcggcgatcgaagatcataggtcggctacatggaatatgcagggttccagcgcgtcatcagagagcaagtggcgggtcaatgtcagacagttaatgacagggttggatgtacttgctatccaagaggcaggatctcctcccgagtcagctcagccaacctcacgagttataccatctccggcaggtacgagcattcctattcatgagttaacttggaatattgggacaagtacacgacctgagatttattatatatattttgttgagtgggatctgggagctggtcgagtaaatcctgccattgttacccgaactcgggctgatcatattgtagcaatccctaatcccatctcatccacaggcgatcctaacagaccggttataggtgttggttttaataggttaaataacgttggtgcagattactattttactctccatgcctttgcaactggaggtggtgatgctgccttgtttatcgacgctatataccagtacttctctggtgaccctgactcgcagtggcttgtcatgggggactataaccaatcgccaacagtcctggatgggaggctgcgtaatagactttcagcaagcgcctaccagaatgtttctataataactcaaaactctccgactcaggcaagtggaaatactcttgactatgcggtcgtaggtcaatatggatctactgcttcaggaattgctttagttgccgcaatgtttgttgcaagacttgctggtcagttagtctctgaccatactccagttaaattttataagaaataa

SEQ ID NO: 334867 - DNA, 276 bp, Pseudomonas aeruginosa
atggagttgaagtggacgaacaaggggctgtccgatctgactcgactatatgagttcctggcggctgtgaaccgttccgctgcggcacgtaccgtgcaacagctaacgagcgcaccgactaagctgctggccaacccgcgcatcggtgagcgcctggaagagttcgatccgcgtgacgtgcggcggattctggtcgggcattacgagatgcgctacgaaattgccggctctaccatctatctgctgcgtctgtggcacacccgtgaagatcgctga

SEQ ID NO: 334868 - DNA, 273 bp, Pseudomonas aeruginosa
atgcccgctaacgccaaaaccagatctgtcaccgcccatgtccccattgagctggccgaacgtgtcgatgacatcgcagagcgcctggagcgctccaagaactggatcgtcaagcaggctcttacagcctggctcgaccaggaagacgagcgtagccgcctgacccgcgaggctctggtggatgtggatgccggctgcgtgattgaccatcaggcagtccaggcctgggccgatagccttagtaccgacactccgctgccggtgccgcgctga

SEQ ID NO: 334869 - DNA, 726 bp, Pseudomonas aeruginosa
gtgcccagatcaatctgctcgttcatttttttgtccataatttcgcccacaatggccttggctgcaaaaattccagcaaatgagtactcgctgggggatggaaggggttacattaatatctggccggcacgggatggatctcaggaatttcttatccataacgatgggcctaatggggctacatgcagcctcaaaggcactcttagagataataaaggagtggtaaaatcgccgtattccactacctcatgcctactaagcattacccagacaggactgttgtcagtaagcgtcaagcgtgaggccaattcgccaagttgctctggctggtgtggtcctagagtttggtttgaaggagcctacaacgtcccgcccaagggttgctattacatgcaaataaggaaaaagactcgacgtgtttcagacttgattgaaaaaaaggaattcgatgctgcattctcactatccaaggaccttttatcaaaatgtcggactgagttacccgataccaccaagatatatcaaacgaacttgctcgccatgatcagcgctgaaaagggagatagtgctcgctgtttggagtatgcccattgggtgcaacaacaaattcccgtaagagatgacggtcagccggctgaagacttgcttccggcagagcatgctttcgcactggagcaacgcgccaaggctgatgctctgtctgagcgatgcagcggcgagaagtaa

SEQ ID NO: 334870 - DNA, 672 bp, Pseudomonas aeruginosa
atggacgtgaacgacccagtgaaccaagcgcaacagatcaatctttaccagaatcctggacaatctatctccggtctctacaagggcttggccaaccagtgctctcccggtcagccttttccagaggcacagctggtggaggcttgggatatccctctcgtactccatccggagtttgtgcctaacggagatgtctcgaaaatcgataaggagtacggaacgatccttgctgccgagtcagctcaggttatcctgcttcagctccaaatggctcaagacaaggctaaggcgtgcggagagattacagccttgatcagttctgtttcctccaacctaaataccatcaagagtcgtcatggtgctaactatctgaacctgctgaaacaatccccgaaccgatacccgactagcgtcggagttgaaattatgtcaggtggcagcccaaaccaggattctggaatcgaggtctcttatggtgccaatctcgcccgactaacgcagttacaacttcagtcgatgaacctgcctgccagcctcaaacagcttctcactcagggaatcggtgtgaagctttctcagcctgagtattggcctgcttacaacaatatagccgctggaattcgttatacaacgggaatggcgataacgcttgcctattgggcaacggtttag

SEQ ID NO: 334871 - DNA, 1002 bp, Pseudomonas aeruginosa
atgacaaaactctactttgatcttctgagctcacctgccgaggctcattcgtcgatacagaagtctctctctgtgcaggcactctccacaactattccaatactggagtttccatcggaaaccgtatacgcatatgcttcgtacataaacgcattaagtatcggtcaacgtatagatcccgcattcacccagagcttaacgagtgccatatccaacctggcaggtcgcccagttgcagtaagcgacatttaccaaaaaattcatgaaaccacactgagaacacctgtcgagatgggtgttcgtcctaatagcattaccctcgaagagtatcaaatcgccataaatcagcaagccatcagcatggttcaagatatgcaggatggagacaaaggtgagaaggttgaggcccttcaggccaacatgcagttcctgtatgggcaggagataaatactgatttcgtcgctcgcaacgaactcgctgccgggcagagagcgaaaaccgtagcaatagttcagggacacatcactatcgggtacggcttcgataccttcgtgcatgaagcgtccgagctaaactctttgaatctggttggttctacgcgacagaaggtgttacctgcattgcagctatcaacgtccgacccaagcttctggagcgtctatgcttcgctgggacaacgccttacggatgatgatgggctattacttttcagtgccaaagcgcgagcggttgttcaacatctagcaggcgaccagttctcgggtagctgggagggtttaccagcagcggtcaagacggtcgtccttgacctctattatcagtatggtcaatggcaaaaattcccaaaattccaacaagcaatcatcagtcatgattggccaaaagccatccatgagctccgtaactggaacggtatgccgaatgatccgaacttatctgttaccaaacgtttagaagagcgcgctaaatacctggcaatatccttcaactatgagcaatga

SEQ ID NO: 334872 - DNA, 2355 bp, Pseudomonas aeruginosa
atgtctcagtcatttgatgcatttgaggataatgcaattcaagtttaccaaaaactcagggagcatctggataatcaatacaagagcgccaaaggcaatatagataaagatattgatgagaaaattgaagcggcaataaaagctgctggtggtgactctgttctcagtccactcagcaggattgatatcgctatctccacaatacaaacacttatagctcagcgaagtgaacaacttcagtctgagcgccaacggctagcctcccttccagagtcaagctattccgcgaggaatgacttggactttgttaagatgctctatgacgcggagcctgataatcgtcagctcttcaaaatgagtcttgagccattcgtgatttctgaaagtgatggtttggcggtggaatacaatgctgatgtatccagccaatatatcgctaaccttcaagggcgccttcctgagttagaaaaagcccgggctccattggtggctgaggaaaaggctcggcaagaagcagaggcggaggcacagcgcaaagcggaggaagacgcgcagcgagctgccgacgaagttgctgcgcgccaggaagcacagcaggtcactcagcagcttggtgccaatttcaacgcgatcactgcgccgatgggtgataaggttcagcagcgcgtacaagcagtggatgcgacgcaggctcaaatctccactcagatcggaagcgcagtcacaactgctactcagtcagtacaggctaaagcttctgaagcacagcagcacgcgagcagttcccttacttccggcgagagcttgattagttctgcgtttcgaggtcagatcgcttccgccgctcaggccagtggtgagtcccgtgtatctgctttcaatacccgcatcgatcaaatagtctccgaagccacttcattttcggaggcgagaaagcaggcgttgacccagttcactgcaaatgcggctgccgaagtcgaagctgagactgccaggttggcggaacaagttcgagccacccccacccaagcatcctctgagtcagcgcaggcagctcttcgtcagttcacggaaagtacctatgccaatgtgaacacttttgcccaacaaaccgaagcggcactacaagctaaggcgcaagaagttacggcagccattgccgaggcacagcgggtagcaaacgaaggtttgcaacaggcagctgatggtgtactgggagagatcacgcaggccgctaacaccttggcgatgccggcgattgcagcgccgttggtctccgtcgctggatttggcaccgcagcacttgaactggcccaattgggcgcttcgctagctaacgcggtaaaccgcgtaactcaggttgttactgctggccccggtgcatatgttgccaccttcgcagtgttgacgctgtactctgaccaagcaggaaaagacagtgataaggtgcctgatggtgtccgcaccgctttagcgctggaggcatccactctgggtctttctcctgatgcggatctgcaaagtgctgccgaggccggcggaactgttgatatgcctgtgcggctaactagtcgtaccgaggaagatcaagacaacaagtcgcagatagctgttgttgtcactaatgcagttcctacccctcaaggtgtgcccgttcgtgcagccaccttcaaccccgcgaccgggcgctacgaagttacggtgccagcgaaatccaccgtgcctgatgcgccaccgttgaccctcacctggacaccagccaatccgcccggaagccagaacccttcgagtaccaccccggtggtgccgcagccggttccggtgtatgaaggagcaacgattaccccagtgcaggccgagccggagtcctatccgggagtgccgttagatctggacgatctgatcgtgatcttcccggcagacgcgggtattccgccgctctatctggttttctctaagcctccagttagcgcactggaagtagacatctatggtaactttacgggaaggcctcgtaatggaaatcatcttgatcatatgccggctcaaggggctttggcgacgagtttgagatcaaattttccgggaattcaagataagagagtccgggagttgatgaggaaaggtgctagcatcgctattcctgcgcggatacatcagaagtacagcgaaacttatggtgggcgcaataccaaggaaaagcagcgtaaggatgccgaaaatttaagaagggccgtggatagtaattttgacgcaattaaaaatgcgttgatagaagaagggttctctgaggaagatgttgaagaggctcgtgctaaattgcatcggatcaatgaagaacaggggtggtactaa

SEQ ID NO: 334873 - DNA, 906 bp, Pseudomonas aeruginosa
atgtataatcgcattgcagaatggaagcgcatctttgacaccgaagaaaacgccattagcaaggccctgtcacgcatggcatgggaccttgcagcctattcatgtgtggttgagatggtgcgagaagccccagaaatcagcggaaaaaaaagacttaatggtcttgtcatggacatgttagcgtctggtttctgggcaggcacgatgcagggaattcgccgtctagttgaaagagagccaattcgcggccccaagagcgtgtgctctctgggaggtctcataagcgacatccgtgctacgcggggaaaacttactcgtgagatctacgtcaaaaccatttctggtcttgaatataattataatagaacccacgctgcaaaaagtgctttctcggatgagcaagccaagctgggaaagaatagctactgggttccagttgaatatcattatgagcgcgcagttgatagacacaaagagttcgactggctcagcggagtcaatgccggagcctcacggccagacgatctgatacgtatcgaggtattcgacatgcttgattcccgtttatctcagctttccaacgtaatcgagcatgtcaatgttgagatagcccatgctgccacagaagctagccgggaagggagggttctagagcattggggactcgctgatgctaagcaggctctgcgcgaaatagcagaggttgctcaattggtgggctcttggttctgctacagcggtattggctgtgtactaccaatacctcagttcgatcagttcgagaatctagataaacctcttttttctggcgaacatgcgaggcttcagaaagtatggatgcagcttgatcgcgagatccagcagtggcaccgcgttgatccatcaaagtggatgaacgcacaataa

SEQ ID NO: 334874 - DNA, 3132 bp, Pseudomonas aeruginosa
gtgttgcctgtttccgactcgccccacaaggaccaactgcacctgcaactgggtgtgggcctgagcgcggagcagatggcggcgctgacccacgacatcgtgtggctggaagaggtcgaggtgaacggcgagaaggtcctcgcgccggtggtctacctggcccaggcggagggtcggctggcacccaacggtgcgctgatccagggccgcgacgtgaagctggtgagcggcggcgacctgcataacgtcggcaccctgcgcgcgcggaacgacctctcggcgacggccgacaacctcgacaacagcggcctgatcgaggccggcaagcgcctcgacctgctccccggcgactcgatccgcaaccgccagggcggggtcatcgccgggcgcgacgtgagcctcaccgcgctgaccggcgacgtgatcaacgaacgcagcgtgacccgctacgacagcgcgctcgacggccgcacctgggagcgcagcttcgccgacagcgccgcgcgggtggaggcggcgaacagcctgaacgtccaggccggacgcgacatcgccaacctcggcggggtgctgcagagccgcggcgacctcagcctcgacgccggacgcgacgtcaccgtcgccgccgtcgaggaccgccagggccagacccgctggagcacgtcgcggctacagagcgtgacccagcttggcgccgaagtcagcgccgggcgggacctgaacgtcagcgccgggcgcgacctggcgatcaatgccggacaggacctgcgcctgatcgcgagccaggccagcgccggcgacgaggcctacctggtggccggcgacaagctggaactgctggccgccaacgacagcaactactacctgtacgacaagaagaagaaaggcgacttcggccgcaaggaaacccggcgcgacgaagtcaccgacgtcaaggcggtgggcagccagatcagcagcggcggcgacctcaccctgctcagcggcggcgaccagacctaccagggcgcgaagctggaatcgggcaacgacctggccatcgtcagcggcggcgcggtgaccttcgaggcggtgaaggacctgcaccaggaaagccacgagaagagcaagggcgacctggcgtggcagtcgtcgaagggcaagggccagaccgacgaaaccgtgcgccagagccagatcgtggcccaggggaatctggcgatcaaggccgtggaagggctgaagatcgacctcaagcatatcgaccagaagaccgtgagccagaccatcgacgcgatggtgcaggcggatccgcaactggcgtggctgaaggaggccgagcagcgcggggatgtggactggcgcatggtgcaggaggtgcacgatagctggaagtacagtaactcgggcatggggccggcgacgcagatagctgtcgccatcgcggcggcagccatcggtggcatggcggcagcgggagcgctcagtggagcaggagtgggtgccagtagcttcgccatgggcgcaggagttggtgcggcaggaagcctgtcgggcacggcagcggtcagcctgatcaacaacaagggcgatctcgggaaggtgctgaaagacagcttcagtagcgacagtctgaagcagattgctattgcgagcctgaccggggggctgacggctgagtacttcgacgggattcttcagaccaagactgatccgcttactggaaaggtcacggtagacctcagcagcctatctggtgttggtcgcttcgctgccaatcaggcgatgcagaacgctacatccactgtactgagccaggccttgggccagggcgggagcctgaacgaggcgctgaagagcgcgctctacaacagtttcgcggcggcaggtttcaacttcgtcggcgatatcggccaggaatacagcctgaagccaggcgatccttcgatggtgaccatgcacgccctgatgggtggcctggcggcgcaggtcagcggtggcgatttcgccacgggcgccgcggcggctggcgccaatgaagcgctggtggccaagctagaccaggccttcaagagcttgagccctgagaaccgtgaagccatggtcaccatggggtcgcaattggttggtgttctggctgcggcggtacgcgatcccgatgcgacaggcaaagctctggaaagcgctgcttgggtagcgaagaactcgacgcaatacaacttcctcaaccatcaggatgtggccgatctggataatgccttgcagaaatgcaagtcccagggaaattgccgtcaggtagaggaagagttcaaggcgcgtagcgacgagaaccggcggaggttgaatggctgcgtggctgtgggtaattgcgcggagattcgtgcggagatcgatgcggggtctacggctctcaacgagctggtggcccggcaggaaacagctaatccgggaggaagtgacagcgatatagcctacggtttcctgatgggccgaaacgtcgtcgactggacgacggctggtcagttgcacctggagcagaccgccaacctctggtggaacggcaatccacagtggcagaaggaagtcggtgcatacctggaccagacggggttcaatccgttcggaatcggcgttccggcaatgggcggtgccgctggcaaggtatcggccaaggcgctcatgaatgcgctgaaggcgggagagttgcccaaaggagaggtggccccaggaaaggctaatctgcctaccattggggcgttggcggatgctgaggcggggatgccttatacgcatccggtgaaagaagcaactaaaacaaaaataccaaatcctcctcgtgcagaagggaactttactggtggccccttagaaaatgctattaagactagcggtaggtttaagctagatggtgggccagccaatggagtgctatatagatctgataataaggggaatgttacaagttatgctgtatatgactcgactggcatgattattaaaagggtcgatgtaagcggggcttcgcatgcaaacatacccacgcctcatgtaatagaatatggtagaaatatattgccagacggaagtgttagagtacaatctccatcaactaaattagctccgcgccctgctaattcggatgagataccatga

SEQ ID NO: 334875 - DNA, 1239 bp, Pseudomonas aeruginosa
atgatcgggtcggccggcttgtccggccgccttcggcccggtcagcgagcgcatctgcaagcgctcccgggcgtagcgcacggcgccctggtagctggtctcgccaaggcacaggccctgcatgccggtgcccaggcgggcgtggttcatcatggtgaacatgcagtgcaggcccttgttcggctcgccgatcaggtagccggtggcgccgtcgaagttcatcacacaggtggccgaggccttgatccccatcttgtgctcgatggagccacaggagaccgcattgcgcgcgcccacgttaccttcggcgtcgggaaggaacttcggcacgatgaacagcgagatacccttggtcccggccggcgcatcgggaagcttggccagcaccaggtggacgatgttctcgctcaggtcgtgctcgccggcggagatgaagatcttcgtcccgctgatcgcatggctgccgtcggcgttcggcaccgcgcgggtcttgatgatgcccaggtcggtgccgcagtgcggctcggtcaggcacatggtgccggtccaggtgccggcggtcatccgcgccaggtagaggtccttctgcgcctggctgccgtgggcgtggatcgccgacatggcgccgcgggtcaggcccgggtacatgccccaggagacattgctggcgccgatcatctcgctgagcagcagacccagcgagtgcggcaggccctggccgccgtacgcgggatcgctggcgacaccgttccagccaccctcgacgtactgtgcataggcttccttgaaacccttgggcgtggtcaccacgccgttgtcgaagtggcagccctcttcgtcgccggagcggttcagcggcgccagaacctgttcgcagaatttcgacccttcatcgaggatcgccgccaccatgtccggggtcgcgtcgctggcgccgagcgcctggtagcgcccatggaagtcgaatacctcatcgatcaggaagcgcatgtcgcgcagcggagccttgtattccggcatctctgttctcctcggcaggggcgccccacaggcgcgaatccctcgaagctactgcgccgggcgggtgcctacaatcacgctgcggacgctgaatgcaacgccataaccccgaggtcggaaggccaggatgcagcggatcgcaggcatgaaaaagcccgccgaagggcgggctctttctcacctggggaacgggccgccagcggcccgtgccatcagtaa

SEQ ID NO: 334876 - DNA, 990 bp, Pseudomonas aeruginosa
atggcgggatacctcaaaccctggatgagcttcgaagaccagttgaaccagttgattcagcgaggcatgaccatcaccgaccgggcgctggcactggaatgccttagccgaataggctactaccggctgagcgggtactggtatgccttcagagagcgaaacgacgtgatcatgctcgatggcgggaagaaaccgagcaagctgaaggtaacgaaagtccccacggacgatttcaagccgggcgctaccttccaaaatgccgtggacctttacgtcttcgataaacagctgcgcctcctagcaatggatgccctggagcgaatcgaaatcggcttgagggtagatattacccacggcctcggcgtcctggatccgttcgcctacatgcaacctggtctgctccataaggacttttgcgggaggatccttgcgagtacaggaatcagccggcatcaagattggctgacccgccataaccagctgatctcccgctccaaagaggacttcattcagcactgcaaggcaaagtacggacttccgctaccgctctggattgttgcggaggtctgggactttggcacgatgtccactctgttcagcgggatgcgagaagccgaccaagatgcaatctcggcaaagtacggcatctcaaacgggcgaacctttgcgtcctggctgcgaagccttaactaccttcgcaacgtctgtgctcaccacagtcggctatggaatagaaacattatcgaccagccgaagctgccgccggtgggagaggttccctgggtcgctccctttgtagggaacgcccatgccctggcacggtgctacctgctactttgcataacgcgccatctgttgcgaacggtaaatcctcgttccacttggccgcagcggatgaagcagcacctgcagcagttcccacagttgtcccacttggggctcaacgatgctggtatggggacgcacccaggctgggacaccgcctggtga

SEQ ID NO: 334877 - DNA, 1476 bp, Pseudomonas aeruginosa
atgcctgatctgcaaatgctgaataccattaacgcagccatatcgagcgtgttgagcgtcttccgaggagtttgtgatcctcatgacagcgtagagtttgctatggcaatgctcatgctcaagtacctcaccgacacgggtctagaggactctcccgagaacaagaaacttgctagtggagtgcactatttcgtacccgaaaaggcgaacttctacagcttgcatgcagctaggagtcagcctggcaatggggcacgtattgataaagctctcgaactgatcgacgcctccaacagcgggttggacaagatgtctctgtttgtatcattcgactcgcccaggctcggcagcgcagatcagaaagaccgcatcctttgtcggttgcttgaggcgttcagaaccccagcactcgactttcgcgtggttcctagtggcgacatacagggcgccgctgcagctgcgtctgaagccattctgagatacaccggagaagctagcggcaaacgtggcggggagtatttgacgccacctgagctttcgcaattgatcgcccgtctaatgcagccctctgagggggagaaaatctacgatcccttctgtggcgctgcctggaccctgaccgcctgcaataaatttgcacgccagaattcgagtggcaaaggctgcctgttgtacggccaggacgcgaacggcaacacattgggcctagccaagatgaacttgctccttcatggcgaaacagactgcttgctcgcatggggagataccctacgcaatcctagttttctcgacgcggatggccagttgagtcggttcgacgtcgttgtgtctcatccgcctttctcgctacgcgaatgggggcatgaatgggcagagaatgatccatttggccgctactggcgcggcattccccctcgggcatcaggcgacttcgcgtgcattagtcacatgattgcgagccttgcgcctgagcgcggtcgcatggctgtgattgtctctctcggcgtgttgttccgaggcggcgcagagcgccaaattcgggagcacctcgttaaggaaaacctaattgatgcggtaattgccctaccgcccaagatgctcgccaacacaggcattcagacggcgattctggtactgcgtaggaaaaaggcagatgacgggatcttgtttattgatgccggccgtagctaccagcaagggaagattctgaacgtcttgcgcgagcctgatctggaccagatcgaaacgacctaccaggctcggataaatgtcgaccaatattcgaagctggcgtctcagactgaggtagctggcaacgactacaacctctcagtcgcgcgctacgtagagattcttgaggaagaagaagaacttgatcttgcgagtttgagggctgagcgcgccgtactcagatctgagttggagcgcctggaagaaaagcttgcgatcctgctgaaggagatcggccatgcctag

SEQ ID NO: 334878 - DNA, 582 bp, Pseudomonas aeruginosa
atgaatctttccaagcttgcccatgtccgtacagccgttgtgttccgcagccagccgccccaagaggagcagaatggcaatgtgcgtgcattggcgatcagggatttggtcgcaagcaaaccgctccaatggaatgaactaccgcggatcctcctagatgaggggcacctctcccattgcctgcaaccaggtgacgtcgtaatcccttcgcggggcgactattacaaagcgtggctttttgagggcgctagcgagcccgtatttcccctagggcaattgaacgtgatcacgcccgggccgcaactggatgctcgctacctcgtttggtacctcaaccagaaatcaacgcagactaggattggcttgatgctgaccggtactagcatcaaggcacttacaaaggcggcgctgcttactctggaagtggagacgcctcccctgctcaagcagaagcagatctcagagttggatcacaccaagcagcaaattgtcgccatccgacatcgcttgagcgagctggatcaagcagagatcgcccacgtgacaaagcagcttctgcaggacggaggtcgtcatgcctga

SEQ ID NO: 334879 - DNA, 126 bp, Pseudomonas aeruginosa
atgtttgatccaaaaaacggcgatcctggctggaagctgatcgaaggggaggccggcgatcagtaccaagcctgggcccagaatcgcgagccggatggcatcgagtatgaaatagcttgccaatga

SEQ ID NO: 334880 - DNA, 1719 bp, Pseudomonas aeruginosa
gtggcgtttcagccaactcagttcgctattcccattcttgattgcccaatcagggaagcagccgaagctctcgcgactggcggaggagtagaggctcgcggagctgtcttcacgcgtgcagaggtcgtcgacttcatactagatttggctggttacaccagcgatcaaccacttcataaaatgcgcttgctagagccttcctcaggggccggtgacttcctgctaccaatcattcgccgactaattcaggcgtggcgtgcagctaaaaccaacggggccatcctagaggagttgagtaacgccatcagagcggttgagctccaccgagaaacgttcaatgccacatgccaagcagccttaaccttgctcgaaagcgaagggatagcgcctgaggtggctgcatgcttagtagatcgctggctggtacaaggcgactttctcctcacaccgctagagggtgaatttgactttgtcgtcggcaacccgccatacgttcgccaggagttgatccctgcaccgttgctagcagaataccgccgtcggtatcagactctctatgaccgtgccgacctttatgtacccttcatcgaacggtcattgtcgttgctcgccactggcggacagttaggctttatttgcgctgaccggtggatgaagaaccgctatggcggtcctcttcgtaatttggtagctcaacagttccatttaaaaagctacatcgacatgaccggcacacgtgcatttcacaccgatgtggttgcttatccggccattaccatcatcacgcgggaaaaaccggggccaactcgcattgcgcacagcccagaagttgagcgaagttacctaactacccttagggacctcctctgctctccctccttgccgagcgacgcagctctggtcagggaactcgctcgcgtccccaatcgcgacgagccttggttacttgagtcctctgaccaaatggctttgatccgccggatcgaagaggattttcctctcctcgaggacaccggctgcaaagttggaattggagtagcgactggtgctgacaaagccttcatcggtgacttctataaactcgatgtcgagtcagatcgcaagctaccgctcgtaacaacgaaagacatcatgtctgggaaagtcgaatggcgagggcaaggcgtcatcaatcccttcaaagacaccggtggcctagttgatctggatgaatatccgcgcctgcggcgttatttaggggcacggtacgatataattgctggacgtcactgcgcacagaaaacacctgataggtggtatcgcacaattgaccgcataacaccaagtttggctagaaagcccaaacttctaataccagatatcaagggcgaggctcacgtagttttcgagaagggtgaactctatccacaccataacctttatttcatcacatcagacagctgggaccttcacgctcttcaagcggttatgctctccgccatttcaaaactattcgtagcaacctattcaactaagatgcgcggtggcttcttgcgtttccaggcccaatatttgcggcgcataaggattccaaactgggatcaagtccctgagctactccgagccgagctagctgctgcagccaaaaacctagatctagatgcctgcaatcaagccgtttttaagctctacgagctttctccggaagaaatatctgccataggaggcaatggaaagtag

SEQ ID NO: 334881 - DNA, 741 bp, Pseudomonas aeruginosa
atgactctaaacctcgttgattatgagaaaaaagcttgcatagcagtcaaagacttttggggaaatagggacgccgcacgtcaacggcagatcgccagtggaagtctcgaccaaggagaacgagccggcgtgaccgcaggcaagaacatggatggctttattgagcttatcatcgaaatagtaagagccaatggattagcgcacgcccaaatccacctaaacaaaagagccttaactctaccaggctactttcgccccacaaagctctgggaccttctcgtaattcacgaggaacgattgattgcagcaatagagttaaaaagccaagtgggtccttcatttggaaacaacttcaacaatcgtaccgaagaagcgataggcaccgctcatgatttctggaccgcatatcgcgaagatgcttttggcaagcaccctcgcccgttcgttggatggttaatgcttgtcgaagatgcagacagatccagaacaccggtaagagatgcgtctcctcacttcagggtctttccagaatttcaaggtgcatcctaccttaagcggtacgacatactttgccaaaagctagttcaagagcagctttacacgacagcagcattgatcacatcaccacgtagtgcagttctatccggggagttcggtcagatgtccgatatgacatccctaaaaactttcgcaactgctttggcgggtcatgtcgctacagaggcagcacgcctctcctaa

SEQ ID NO: 334882 - DNA, 435 bp, Pseudomonas aeruginosa
atgaacatgtttgcaacccaaggcggcgtcgtcgaactgtgggtcaccaagaccgacacctacacctcgaccaagaccggggaaatctacgcctcggtccagtccatcgccccgatcccggaaggtgcccgtggcaacgccaagggcttcgagatcagcgaatacaacatcgagccgaccctgctggacgccatcgtcttcgaaggccagccggtgctctgcaagttcgccagcgtggtccgtccgacccaagaccgtttcggccggatcaccaatacccaagtccttgtggatctgctggctgtgggcggcaagccgatggcgccgaccgcccaagccccggcccgcccgcaagcacaggcccaagcctcgcgtccgacccagcagccgcagggccaggacaaacaagacaagtccccggacaccaaggcgtaa

SEQ ID NO: 334883 - DNA, 207 bp, Pseudomonas aeruginosa
atgtccctcgaggaacagctcatttcccgcttcggtccgcttctgtccatggagcagctggccgaactgttgcaccgccccaccaaaagcctgtctgttgcccttagccgtcccggccccctatctgaccaactcaacattgctcgagtgaagattggccggaaagtctacttccgggcaaccgatttggctgcggcgctttcgtaa

SEQ ID NO: 334884 - DNA, 1011 bp, Pseudomonas aeruginosa
ttggccggaaagtctacttccgggcaaccgatttggctgcggcgctttcgtaacgtgcctgtgcaagtagatcaggcgctagcacgcctggaagaaagccgcctacgacgtggaaaagtcgttccgcgcgttaaggatcggctcaccacccaagcgccaatcgaagctcctttgggggcgattgagaagaactgtgagaatcgcgaatttttcctcgcagatatgttcgaccttccactcaaatgtgacggtcacagccttcaggcgccgatcttctcgctttcaaccaagccggatagaaacgtttgggaatggcggagcaaggacgaaaaatcgtacataaaagtggttccatcagttctaggacgcgctacacagcacgataaagacatcttgatttttgtgatcagccagctcgtagaagggcgcaatcgaggtagggcggacgcaagaaatcgtactgtcagattcagagcatatgacctccttgtggccaccaaccgccaaactagtggggatggctatagacgcttgagagaggcgctggagcggcttagctgcacgaaaatcatgaccaatattcaatcaggtggtcagcgattcagagaggggttcgggctcatagaccgatggcgaattgtggagcaatccgctcatgacacccgcatggtcgcaattgaaatcactttatccgaatggctgttcagcgcagttcgctcgctagaggtgttaacccttgatccagcctatttcgagcttcgatcccccctggcccgaaggctctacgagattgcacgtaaacactgcggatacaagggacaatggagcattggccttgagttgctaaggggaagggtcggcagccactctcaattacgagatttccggcgccaggtacgtgccatccaagcagaaaatggccttcctggataccgattggagctgggcggaaaggacagggtgaccttcttcaacctcagcaaaatcaagctaggtcatgaggcttcctag

SEQ ID NO: 334885 - DNA, 2067 bp, Pseudomonas aeruginosa
atgtacatccagcaagccgagataaagaattttcgtctgctatccgatgtagagcttgcgcttgaagcacagactacagtcatcgtaggacgaaataacagcggcaaaacgtccttatcagaagtcattcgcaggcttctcgctgacggtagcgtcgcgttccagctagaagacttttcgagcgtctgctatgacgacttctgcaaagcactggtagctttcaacgaagggcaggacgaggctgagcttcgaaagctcattccagccatagagctgcgcctatcgattcaatacgatccagcccaaccgcagttggggccacttagcccattcattatcgacttgaaccccgcgtgcactgaggctcgggtagtcattcgctatgaactgaaggatggccaagttgcacatcttttagatggactgccgaaggagcctctcacccccgagactcgggtaacgttcttccgaacactcagagagcgaatccctgccgagttcgccacaaaaatttgggcagaagaccctaacgatgtagaaaatcgtcgacagttacaacccggcgtgcttcgcagcctaattaagactggcttcattaatgcacaacgagggctggatgatgtcacatcacgcgagtcggatgtattagcaaagattgttgaaagcctattcgccactgcctcttcctccacggcggactccgccgacaaacaaattgcggcagctctggaaggagctgtacatgacatccaaaatcagatagatgaaaattttggcggacaacttaaaagtctgatcccggcactaaagacctttggctaccccggacttggaagccaggaactgcacacagaaacactgcttgatgttcgaaagcttctttcaaacttcacaaaggttcgttatacaggatttagcggcatcaccttaccagagtcctataatgggctaggagccagaaaccttatctttatacttcttcagcttgcaggcttctacaaagcctaccgagctgaaaccactcaacctgggatacatttgattttcattgaggagccggaggcacatcttcaccctcaaatgcaggaggttttcattaagaaactctccgagatcgcccagaagcttgttgatggcactgaagacaaacgaccatggccagtccagttcgttgtttccacgcactcctctcatatagccaacgcagcaggcttcgagagcattcgctattttctcagcactgcagcagtcgatgcccaagatggtatgcggattaccaaaatcaaggatctgcgaaaaggcttaaaacagaccaacagtgacgacaagaagtttcttcaccagtatatgaccttgactcgttgcgatctttttttcgccgacaaagcaatccttgtagaagggctcagcgaacgactactgctccccgtcatggtagaaaaacttgaaaaagaatctcccgaggcaccaaaactatccagccaatacatcaccattttggaagtcggcggagcttacgcacagttatttttcgagctacttaaattcctcgagcttcaaagcttaatcattacggatatcgacgctgttgaaaaacctggcggcgaagcatgtgcagttcatcttggccagcactccagcaatgcatgtattaaagcatggttctccaacgacaacccctacacgttgaatggcctgctggcaaaaaaagagcccgacaaaataaaagatggcaatcggattgcataccagtgccctgaattagaaaacggtccatgtgggcgtacatttgaagatgcattcatacttgccaactcaaaaacatttggtctaacaagcatctctcccaatgaactggaaattgaagctcgcacccaagcttcaaagtggaagaaatcagaattcgcattgaagtatgcgatttcagagaaaaactggtcggttcctacctacattgcagatgggctccgctggctagcaccagaagttatccgccctgatctagccttagcgttagccgtcgaagcagccatcgacctgcccgaaaaaggtaccgaccatgactga

SEQ ID NO: 334886 - DNA, 1734 bp, Pseudomonas aeruginosa
atgactgaagttgaatctccagcagaagccgcaagccgccgcgctttggaggctatgtatgcctgccttgaaaacgggcaaagcttcagactagaggccggggcaggagccggcaagacatactcgctgatcaaggcacttagatatttaatcaatcgccacaaggatacctttccaaggttcgaccaaaaaatcgcttgcataaccttcacgaacgttgcaaaaagcgagattgaagcacgtacagacaaaagcccccttatcttctgcgaaacaaaccatgcattctgttggtcgctaataagcggctttcaaaagccgctacgcgcattagttgaagcaatgccagcttggcaagagaaaatcgcagaggtcggtgggaacttaggcgatcgtacaattgaatacagcctcggttatcgctccttaaaggacgatcgggcgtcgattcatcatgacgacgtgctaccgctcaccatatcgctcatggagcatgaaaagtttcggcgcatgatcactagtcgatatccagttatcttggtagacgagtatcaagatacagatagcgactgggttgaagcgatcaaaacccgcttcttaggacaacctggtacaccaatgtttggtttttttggtgatcactggcagaaaatctacggcaacggctgcggaaaactcgaccatccagcagtaactgagattgggaaagaggcaaacttccgatcgtctaagcccctggtggactgtctcaatcgaatgcgtccagggctccagcaatgcgtagaagaccctcaagctttcggtcaagtctgggtgtttcacactaacaattggcagggacaacgacaaactggcgggcactggggaggagatctacccactgatgaagcccaagctgcgttagagcgcgtcaaagccaccttggaacaggagggttggaatttctctcctaagcacacaaagatcctcatgttgacgcatcggctacttgcaagccagcaaggctaccaaagcttgccgaccaccttccgctacaacgagtcttttacaaaaaaagaagacgcccatatagctttttttgtcgaccagcttgagcctgcatgcgatgcgtttattgcgcaaaaatacggtgcgatgttcgatgcgctaggcggtaatgtgccgctgctgcgcagccatgcagataaagtcgcttggcacgaagctatgacgcagcttgtggctcttcgagaaactggaacagttggccaagtgaccgattttatgcttgctcggcgacgtcctaggctgccagacacgctggaaaaacgtgaacgagcgctgcgagacttcgataagacagccggcgctgagatacctcgagttctggcagagctggagcagttacgtaatgtttcctactcggagatcaaagcactacgaaaataccttgatggccattctccctttgagactaagcatggcgtaaaaggagcggagttcgagaatgtcctcgttgtggtcggtcgaggatggaatcaatataacttcggtgagatgcttactttggcaggcgcccaacgcgtaccggctgcaagggaagctgctttcgaacgtaaccgaaatctattctacgtggcttgctcaaggccacagaggcgccttgccatcctgttcacacaggagctcacccctgaagcgatcggcacacttgaagcttggtttggcggtgaatctgtagcaaccgccccataa

SEQ ID NO: 334887 - DNA, 948 bp, Pseudomonas aeruginosa
atggacaaactcgaatgggattgggtgcagacacaaaaacacaatcgcgacggttctttctccacgcaatcagcacgacgggccaccctcagcctatcggcacgacagctccgtgaacttggctatcggaacctacgtgctgatcgtgtcgcccaaaagcacctgcgagccttggtaggtaaatggaaaggtgacggcctaagccccgccacgataaaaaaccggatggcgcacctgcgctgggcctgcgagaaggccggccgacccggcgttgccggcttgagaaatgatgacctcggtatcgaacgtcgccagtacattgctcgcgaatcccgtgctacctcgttgactgtaggggctctacagcaggtacatgaccgccatatccagttcagcctccgtctacaggccgagttcggtctgcgtcgcgaggagtcgattaaatttcgggtcgcggaagcagacagagggaccgatcgcattgctctggcggcttcctggtgcaaagggggcagggctcgagaaatcctgattcggactccagagcagaaagcactgctccgcgagctgcacgacttctgcggagcctcgagcctaatccctgctcacctctcgtacgcgcagcagctcaaacggtacgaataccaaaccaatgcagccgggctccataaaaaccatggattgcgccatctctacgcacagactcgataccttcaactgacagggagacagtgcccagccgtacaacgaaccctatcgacccaggctcatcttgttggcggagaaaacgggtggtttggccaagtgatacggccaataccccagcttccagaagggcttactcccgcagggcttgatgatcgagatgcccgccaaatcatcacggaggaactcggccatggccgtatttcaatcacgaattcttatctgggatctacccgcggataa

SEQ ID NO: 334888 - DNA, 225 bp, Pseudomonas aeruginosa
gtgaatgaaactcaggttgagaaaatcgccacgcaatatgggatcaaccagcccgatgcaggtcgtctcctttcggaggcgagtaagctctgcgccatcgtggacaagcaaggtgaggtcgatctgaatgatgcctggttggtcaaccaggtaggcatgcaggaaacccagaaatcctgggaggagctgacctgccccccgatttcagtaccatgtcaaacttag

SEQ ID NO: 334889 - DNA, 555 bp, Pseudomonas aeruginosa
atgatcgacccagcagacaagcaaacccaagccctccccctggagcagccgaagcgcgggcgcggtcggccagcaaccggcaaagccctgtccgacgcagagcgggcgcggcgctatcgggcgaacaagaaaaagcgtgacgatcaaccgtcacgaaaagataacgaggacgggaaagaggcgctgtaccggagaacagtgatccagcaagctgagcaaatacgggcgcttgaacagcaactggtgcagcagcgcgaggaatacaacgacctggtgcacaagctcatggctgaacgcgaccagctcaagcgcgacctggctaccaagccaaggcgtcaccgcgatcaacctgccgccgaactgccagagagcgcctacgaggacgaacccgaggcgaagacctggacgctccagggacgcagcggaagcggcaagtggcagaacctggccgcaggcctggaccgcaaagaagccagccggcaactggatcgagtgatcgacaacaagctgctgggatccacgaagggccgccaataccgactggttgaagaataa

SEQ ID NO: 334890 - DNA, 432 bp, Pseudomonas aeruginosa
atgacgtcaaggacggatagacggatttctgccgataattggtgtccaagcgacgaacaaccgcaggtgcacaagcaaatgggcgtaggaaaccgaatacgacaggagcgcgagaagcagggtctggagctgcgcgagctggccaggctaagcggcgttcccgagcggacgctcgccgacattgagcgcgaggtgtccaacccaagggcggacaacctgaagcgcctgatcatcaccctggggtgctcagcggatcaggtgctattcgacgatgacgagctacaggaggatggcgatatagcgatcctgatgcgcgagctcagcaaggtgcacgggcaaacaagagaaaccgcgaaagaggtcatcaaggccctgctgatacaagccagaatgagagagcttgaagagcagccgaagagtgccgcgaagtga

SEQ ID NO: 334891 - DNA, 1137 bp, Pseudomonas aeruginosa
atgttcatcgactggcttagcgtttcacaagagcaccctcacgaccttccggtcgtgtgcgacgtgttcacgctcacggtcgatgccagtactcatgaggttctgagcacccgtcaaccgtggttcaagcatgagggtagctactccacttcgatcaagatcagcgtccagggtcgcaaggttcgtgttgaggggaatcccagccgaattgaccgtcaggacaacctttttggctacgtcaccatcgagcagtgcatcgccgtctacaaccagcttctggctgagtacggccttcccgctttcacccggtgtactgaaatccatctccgtgacggagcctccggcgctcgccctggtgattgggttgctgatggatgcgttatcgaccgcatcgacctgacgacgaatgtttccgtaggggagggcaacgtgctcgcctacctgcgcggcctgtctacccagcgtattggccattccgttggctacctgtatccgaatggccggactgtcgattggactgctgccggcaaaaggaaaggtggtgtccgcctccagtatcgaaaggcgtacgacaaagcctttgaaatgggcgagcaccttcgcccgcgcgttctgcgcatgttcggcgatgaatcgccagagttggcctacgtggaccagctgatttcgtactgcaaccagcatggcgttgtgcggcaagaacaggagctgaaacaggagttcctgagccgcgagggtcttcgctactggggccttttcaacgaaaaacgtctccgcgatatacacgatgaatttctggcggtggacaagaaactgaaggtaacggccatggaccttgcgaccatttcccagcaactgattgccgaaggtgttgttaccagcacctacgcggccaacatgaccgcgatggtcgctatcaattggagcaacgggcagcctttcgacaagaacaaccggtccctccaaaagcatcgtgcacgtcttcgccagatcggtatcgacatcgctaacccttgcgataccagccgcttcacgcccgttatcgtgcgccaggctcgcgaggtcaccaagacttacgaccttccgattccggactggtatcgccgtcctgtcggtcacctgcggttggtggcctga

SEQ ID NO: 334892 - DNA, 249 bp, Pseudomonas aeruginosa
atgggcgcgctcatgagaacggtcagtttccagggcgcgaccctctcggccagtgaacgccgctcgcttgagcttcgcaagcgtgccatggcggcggtaagtcaaaccgttctgcaacagcaggtcgcggccacgctccaggccctggagcagcacaaagagcagggcggcaagcccgaaaaggtctggtcgacgatctccaacgaaaagggcacgccgtgggtcggcgatgtgttcgggtggccgtga

SEQ ID NO: 334893 - DNA, 264 bp, Pseudomonas aeruginosa
atggctatcgagatcaaccgccagtcgtacctgtcgctccggtcctccatggagctggaactgctcgatgctggcatcgactcgcctgagctgctgagccggcttatgcgccatgtgcttgccgctgagtcggtgacccgtaccgactcgcaacgcgtgcgccgtgcgttcgtcacggcccgtagaaacccgctgctgggcgcaatccctcagcacagtccagggcgcacaaatcgcccgtatatccgtaagaggaaactctaa

SEQ ID NO: 334894 - DNA, 309 bp, Pseudomonas aeruginosa
atgcccttcgtctatctcggcctgacccgtgacgccggaacttcgaaaaagaccggcaacgcctacgacatttcggtcgttcacttcgctgtcgatgccacgcaatcgacccggcccgatcgcaagtttgccctcggcctggagccgcaaaatctgccgatcgcgcctgaagctgtgagccagtttcagcgtgttgagccgctgtcgtcggtgaacttcgagttcgagccggaccctcggaacatgcagcgcaaccgcatttgcggcgtgaagccgctgccgaagactactggccaagcggcctcctga

SEQ ID NO: 334895 - DNA, 270 bp, Pseudomonas aeruginosa
atgctgccgctctgcatcgtcgtcgacgagtctggacggctcgtctcgcaaggtgagttcaccggcgattgcaccggctacgtactcatgaccccggctgatttcgcggggtccatgaccgttgctcagttgttcggctggcctgatccagtcgccttcggggcagcgttcacgaccgcattcggcgtcgtcctgggctgtgcggtcgtggcccataccatcggctctttagccggtttcttcgataccaatcgtgaggaagaattatga

SEQ ID NO: 334896 - DNA, 225 bp, Pseudomonas aeruginosa
atgaaagccaacctgaaacaaaccgccctggtcttgggcgctgtcgctgcatccgccgcggtgccggccttcgccgccgagggcgatctcgacttctcgtcgatgatcagctcggtcaacggctcggccgttatcgctgcgttcatggccatgggcgtggtcaagctcggcccgaacttcgcccgttgggcggtcaacaaggtggccggcttcttcggtcgctga

SEQ ID NO: 334897 - DNA, 1422 bp, Pseudomonas aeruginosa
atggctcgttattgcagtgttcggcggcttagtgtgtggtggtgtctctgcttatgcgttttatgcgcgacagtaactgaggctgctactcgaaagaatgtcaatgttccccctgctcgcgatcaagttaggggagggaaggcgtccggtgtttcgggtggagttttgactatcgtcgggcctgccttggaaggcgagtatattcctcgcggtggtactggcggtgcaaatattccagtgcgcggcattcatggcggagtaacggcgggtgcgcggactattgcgggcggggcggtttctgcactacgcggcggcatagttggcgttgctgcaactgcggctatgtcaatggctcttgatagtattgggggctttattgacgagaatggcaagccggttaagaaggtaagtgacgcgccttcgggtgcggtggcaggtgtttattacgttaggccgccacaaaatgttggcggtgtttatcttgatcttaagtatgggttaactcgtcaacaggcttgcgaatatgaggttactcagagtggcaactgtgtaattaggattaatggcattgtgggctcttctgttatttatgctaatagttgcgatcctggcgtgtggtttaatgtctcaaccggtaagtgcgatagtttgtggaaacctgacgaacatatagagcctttgaccggccctgactatgacggcattgctgacacgttgtcgggggtgacgaatccagattggctcaaaagcttgcttgaggcttcttgtgaaggatcgctgagccctggccggtgctacgacgagctgactagccttgccgaccagttgaaagggcctagctcggtcaaaggcccgtcaagctcgaccacaagcacttacacgcgccctgatggcactaccggaacaacgaacactactacggaaactaattacacgattaactacggtccgaactattttgactattcgaagacaactaccacgacaactagcaaggatggcgagaaacccacgacgacgacggaaactgaatcgccggaggtgacgggggaggatcctgcgactgagcctgagtctcagacgccttcgccatgtacgacaaactgcgagggacccgcatatgaggatcagtacaagccgaccgaggaaacgaaagaaagcgttattgacagctatctgtcgcgtgtagagcaagcgccgatagtgaatgcggcgacgggatttttcgatgtttcggtttctgcgtcgtgcccaacttggcaagcgcctgtcgatatgtcgattatgggtgcaagctttcactctgaacttgtatttgatcatcactgtcagccctggtttaccggatataggacggcggccatggccgttgtgatgattctttgtgcgttcggcgcgttctatatcgccatgcttgattga

SEQ ID NO: 334898 - DNA, 1188 bp, Pseudomonas aeruginosa
atgattttcggtcatgagggccttcctggctctggtaagagccttgaggccatggttcatgtggtcaactcgctgctcagcggccgcactgttgtgaccaacatcagcggcattgaccatcgggcaatctccgagcatctggccatcccgttgcccacggtccagcagttgctgatctgcctggaagcaccggatgaactcgacgaagatgcgaaggtggcgtgggtaaagggccagttcttcgcgaaccggcatcatgactgcctctggatatgggacgagatcaaccagttctggccgcctgaccggcagccgctgtcggcggattgggccaagttcgtgaccgagcaccggcacctgggcatcgacattctgatcatgggccaggacctgaccgaactgcatcagacgtggcgcaagcggctccagcgctatacgcgattcaccaagctggacatgatgggcaaggacgatcagtaccactgggccagttactccagtgccgggcggctccggttcaagcagacggcatcggggaagaagccgtacaacaaggacttcttcgggttctacaagagccacgatgacggtactgccaacgtcgcgaactatcaggacaagcgtttttctgtgttccaggcgaagcacaaggctctgggctgggggctgtcgatcgcgattgcggtgtcggttgcgtacctctggaacttcttccagccgggcgaccaggacctgaaggcagctgttcaggatgcgcccaaggctgagcacgcggtgacgccggtagtctcagtgccggttcagcctcaagtcgtcgtagctgcggcgccggccaaggcggaagaaccgaaggagccgccgcccatcgactacctggacaagctcgcgcagcagtacgatctgcggctgtcggcgatccttgatcgcaagaatccccaacccgaacaggccgcgttcgagttcgtcatggacgttctggaccctgggtatcgtgtgaaggaacggttccgtcggatcgacgtggtgtcgctgggctggacggtcgagcgcagggattacggggtgttgatcagcaagggcggcaagtcgtacgtggtcaggccctggccgctggacaacttcgggaaagcgccggagcgtcagttgagtcagctcgggcagatgcctgtggccacaggcaagccctga

SEQ ID NO: 334899 - DNA, 432 bp, Pseudomonas aeruginosa; identical to SEQ ID NO: 334890

SEQ ID NO: 334900 - DNA, 462 bp, Pseudomonas aeruginosa
atgacccgtctccgcttcattcccactcaactgacacgctatccacacacgaacgaagcgctgttcgccattgctctctggcccgttttgttcgggctcggctgctggcgaacgccacaaatcgcccagtttccccccgcccagggtgttggaatcagcatgctgcaggtctttctggcgggctttggcgcctacctgtttctgctgggtcagcaccgcgtgctcaaccgccgctatttcgagcgccacgcagtcgatattgcctggcaccgccgactgtgcaaggttgaccgggacatggttgcagcaggcctggctggcgccgaagcgcatagggccgtgacgagcgagatggctcagctgcgcaagcaactgggtttcctggttgatgcggatagcttctatcgcaggctgaaagtcttgatccaggtaatgagctggctgcggggcaagctcaaataa

SEQ ID NO: 334901 - DNA, 1965 bp, Pseudomonas aeruginosa
atgaaaatcagctccatccatgtatacagccacgatggccaacgccgcgatgtcaatttcgaggtcgacggactcaacatcattacgggccgctcgtcgacaggtaaatccgcactttcggacatcatcgaatactgcatgggccaatccaacttcaacgtttcggatggtgttatccaggacaaggtgtcctggtttgcagtgatctaccaatttccggacgtgcaggtcatggtggcgaagccggccccgcgatcaggcggcgcgagctgcagcctcgccatgacgcgtaccggggagttcgtgcagccccctgagttttccgagcttgtggtcaacacggatgacatcgccgtcacctcgttgctgtcacgtcaacttggcattccggaaaaccgcacagaggttgcggaggagcacacgcgtaatagctacgaagcttccatcaagcattcgtactactacctcttccaaaggcagggcctggtcaccaacaaggatcagcttttctatcgccagaacgagccgttccaaccccaggcgatcaaagatacgctccccatcctgctgggcgcttcaaccaatgagcgctacgagctgcagaccaggctccggacagctcagcgagacctgagagcccaggcaaagctgctggagcaggcaaagcaagcggtgggcaacaaccgaaaccaggccatcacactgctgactgaagccaaggcggtaggaatactccctcaagagtcccccactggggaggtcgaggagatcattgctgcgctcaaaacagcagcgcagtggactcccgccaagccgcacgcccaacctgaggacaaggtacccaagttggaggctgagctggccacgctgaggaaaaccaagcgcgagatcaaatccaaaattgaggccggccagatattcgaacggcgtaccggcggcttccagagcgaggcatcggaacacatcgaccgcctcttatccatcaagtcgcttccgaagaatgcaacaacaggtgaatggcagtggcctttcgccgaaaagaacctggccatggaaactcccatagcccaagcgctcatcggcgaactggagtccctggaagcagaaatgcagacggtgatggggcagcgtccgcagattcagggctacctggcggaggaaaatcaacgccttcaggacaccaccaaatcgattgtcgagaaagaagcggagctgacagccgccatcgccgccaatacggtgctggccaacgcccagaagcaaagtgacgcagccaagtatgtggtggggcgcatcagctttttccttgaaggcttcgtccctgacaattcgctgaaacagcaagaggctgactatcgccgtagggaaatgcgcgtacaggagcttgagaaagcactggcagatgtcgatgtggacgatcgcctggcgtcgatcctgaatagcatctcagcacagttcaatctgtacaataaacgcttcgagtctgaattcagtgcctacctggcccggttcgacctgaagaagctaaccatcattttcgatcgccctgagcgctccgtgcccatggctcggacgggcggtggcgaaaactatctggcgtatcatctctctgcgctgctcgccctgcattggtactgcgtcaagagcaatcgccccatgccgcgcttcttggtgatcgatcagccgacccaagtgtatttcccctcagaggagtcctacaaagcggtcgacggtacggtattgaacactgagcaatccgatgccgacatggactcggtacgcaagctgttcaacctgctttaccagttcacggtcgaagacgtgccaggcttccagatcatcatcaccgagcacgcaaatctacgggatgactggttccagaaatccctggtcgaggcaccctggagcaaacctccggcactggtgcctgagggctggcctctcaagggtgaggtgtcgctctga

SEQ ID NO: 334902 - DNA, 489 bp, Pseudomonas aeruginosa
atgattcgctgggatgagcgtccttttgagaccaagaatctcttcaaccctgccttctgcgcggtagtcctgatgcgtgcgctcaaggcctatgcagtggtagatcccaaaggcatgcccttttcgatgtcactgcttgtattgccgctgagtctccaccacgaatctcgaagcgcgctgctcaagcactacaagggctacttgctcaagacggtagaaacgtacccccagatgcaaatcgggctggccgagcgggtcacagaaatgctgccgttcacgttcgaggcatttgcgttggcgcactacaccgactgctttgaggtcaccccacagggacgactccttctgaaagccaggagggttaaagcagacatcaagggcaccgaggaatcagtggcgtgccaacgcgcagcggctctgctggggagagagttcgccaagattgcagacagggttacggtgtacaccgcttttggaattcgaccatga

SEQ ID NO: 334903 - DNA, 1263 bp, Pseudomonas aeruginosa
atgagttctgtagcaagcaacggttccgaagaccaaaagaaagatagcgatccctacagcgccggagagcaggggctgggctacatcttccaaccccgctttgcgctgtaccaggcattagagcttccagaggacaccgcaatcctcatcgagaaggaagatgacctcgatttcctggagtcctccggaaagaagacactggcctctctcaaacacaaggctgttggtgaacgcctgactgacctgtctgtcgacttctggaagtcggtcaatatctggctaacccgttaccatgccaatggacgggttgagtctgactatcagtttttcctgttcaccacctcgtccgtcgcgcccggttcattcttgaacttcttcctgttcgacgccgatacaaccacggctcaacccagcctctggcaactaacagagagtacgctcgccatcagcaaggcaaaatcgttcgccaagatcaaggacttgctctcgcagctgacatcgctggagaaagaggacttcgtatcgagaatcacgattattgacagcacgcctcggattggcgatctcccagcactcatcaaggctcagaaaatgcggccaatccgggccgagcacagggatgcagtctttgagcggctggaaggatggtggaatgacctgatcatccagatgctctgcgaccctcagagcgagcccgtatatgcccgggacgtttcggagaagctgttcagcttcagtgaggagtacaaggatgacaatctcccaatcacctttgaagacgcgacgcctacagcccccatagatgcgagtaccgatgaccggctgttcgtgagccaactccgtgatctgaaactaagccccagccgtatccgcaatgcgatcctggactactacagggcatttgagcagcgctctgcctgggcaagacagcgactggtgggctccgaagaaatcatccgctacgaacggcggctgacggaggagtgggagcgcaccaaggacgttcttttcgatgatgcgctagacgcgccgatcgaggattgctctgacccggaactgattgccgttggcaagaagctctacacctgggctgagacagaagcacagaagcttgctcacctgaaaatccgggcacgcgtgacagagccttacgtacttcgcggcagctttcagattctcgccaacaaacgcccctatcccaccgtttactggcatccacagcttctggatcgcctatccaaggctgctggagagaccgaatga

SEQ ID NO: 334904 - DNA, 972 bp, Pseudomonas aeruginosa
atgtccaagcccacggtgcgcgtgctcgccctgctcgaactgctgcagagccacggccagctcagcggtagcgagctggccaggcgcctggaggtggatggacggacgctgcgtcgctatatcgtcgccctcgaggagctgggcatacccatctcggcggagcgcggacgccatggcggttaccgcctggtggccggtttcaagctcccgccgctgatgttcagcgcggaggaaaccctggccgtgtccctcggcctgctggcggtgcgcagtctcggcctgggcgaaagcgagctggccctggaaagcgcgcaggccaagctgagcagggtgatgcccgttgcgctgcggcggcgcctcgtggcgctccgcgagaccgccagcctggacctggcccgcgcccgggcgggaaccagtgtggcggcgctggcgaccctcgccgaagccgcccaggtccgtgcgcgggtcgagttccgctatcgcgacccgcagggcgccgaaaccctccgccaactcgatccctacggcctggtctatcgcaacggctgctggtacgtcagcggtttctgccacctgcgccaggcgttgcgctcgttccgtctcgatcgcctggacgcgccgcgcatgctggcggagcgcttcgagcgaccggcggatttcgataccctccgccacctgcgggagagcttcgcccggatgccgcgcgcctacccggtggaaatcctgatgcgggctgcgagggagcaggtggtcgcggtgctcggcgagcccctcggtctgctcgccgaggtcgatggcggtacgctgttgcgcgccagcaccgacgacctggactggttcgcccggcgcctgtgcggcctgccgttcgacttcgaggtcaggcagccgctggagttgcgcgagccgttgaggcgccaggccgagcgtgtcctgcgtaacctgggccaggaggaagcttcggatcacaggtag

SEQ ID NO: 334905 - DNA, 537 bp, Pseudomonas aeruginosa
gtgccgagcgccccggcgagcgccagcgagccggcgctgctcgacctgccgctgctcgacgacggtcgtccggcctgggcggcggagcccttcgagtgcctgctgttcgacgtcgccgggctgaccctggcggtgccgctggtgtgcctcggctcgatctatccgctggagaaccaggaactgaccccgttgttcggccagcccgactggttcctcggcatcctgccgtcgcaggcgggcaacctgaaggtgctggacaccgcacgctgggtgatgcccgaacgctaccgcgacgactatcgcgacggcctcaagtacgtaatctcggtccagggctacgagtgggggctggcggtgcaccaggtgagccgctcgatccgcctcgacccggccgaggtgaaatggcgcagccagcgtagccagcggccctggttggccggcacggtcatcgaacacatgtgtgcgctgctggatgtggcggcgctcgccgaactgatcgccagcggcgccgtcaagcgcctgcacggcgaccattga

SEQ ID NO: 334906 - DNA, 1485 bp, Pseudomonas aeruginosa
atgcccaagtcatccgccgccgaacagtccggcgagagttcgacccagaccctgtccctgctcgacgagatcatcgccaagggccgcatggcccacgacgacagccagcaggactatgcccgcgacatgctcgcggaattcgccacccaggtcctcgacgagggcatggccgtcgacaaggacaccgtggcgatgatcaacgaccgcatcagccagatcgatgcgctgatcagcgaccagctcaaccagatcatccaccaccccgagttgcagaagctggaagcctcctggcgcggcctgcaccaactggtgagcaacaccgagaccagcgcgcggctcaagctgcgcctgctgaacgtcggcaagaacgaactgcagaacgacctggagaaggcggtcgagttcgaccagagcgcactgttcaagaagatctacgaagaggaatacggcaccttcggcggacaccccttcagcctgctgatcggcgacttcaccttcggtcgccatccgcaggacatcggcctgctggagaagctgtcgaacgtcgccgcggctgcccacgcgccgttcatcgccgccgccagcccacgcctgttcgacatgaacagcttcaccgaactggccgtgccgcgcgacctgaccaagatcttcgagagcctggagctgatcaagtggcgcgccttccgcgagagcgaggactcgcgctacgtgtcgctggtgctgccgaacttcctcctgcgcctgccctacggcccggagacgcgaccggtggaaggcatgaactatgtcgaggacgtcaacggcaccgaccactccaagtacctctggggcaacgccgcctgggtcctggcgcagcgcatcaccgaggccttcgccaagtacggctggtgcgcggcgatccgcggcgcggaaggcggcggcgcggtcgagggcctaccggcgcacacgttccgcaccagctccggcgacctgtcgctgaagtgcccgaccgaggtggcgatcaccgaccgccgcgagaaggaactcaacgatctcggcttcatttccctgtgccacaagaagaacagcgacgtggcggtgttcttcggcggccagaccaccaacaaggccaggctctacaacaccaacgaggccaacgccaacgcgcgcctgtcggcgatgctgccgtacgtgctggcggcatcgcgcttcgcccactacctgaaggtgatcatgcgcgacaaggtcggcagcttcatgacccgcgacaacgtgcagacctacctgaacaactggatcgccgactacgtgctgatcaacgacaacgcaccgcaggaaatcaaggcgcagtacccgctgcgcgaggcgcgggtagatgtcagcgaggtggccggcaaaccgggggcctaccgcgccacggtgttcctccggccgcacttccagctcgaggaactcagcgcgtcgatccgcctggtcgccaacctgccgccgccggtagcggcgtga

SEQ ID NO: 334907 - DNA, 1923 bp, Pseudomonas aeruginosa
atgaccctgctcaagttcaccgatgtatcccttgcctttggcaccactcccttgctggacaaggtgtcgtggcagatcggccgtggcgagcgggtctgcgtgatcggacgcaacggtaccggcaagtccagcctgttcaaggtggtcaagggcgaacagcaggccgacgacggcgaagtctggcgcgcaccggcgctgaagatcggcgaattgccccaggaactgccgcgtgccgacgaacggacagtgttcgacgtggtggccgagggtctggcggaagtcggcaagctgctcgccgagtaccaccacctgagcctgaacatccataccgacgatgacctggcgcgcctctcgcgggtccagcaggaactcgaggcgcgcgatggctggcgcctgcagcaactggtggacagcaccctcagccgcctgcagttgccggccgacaagaccctcgccgaactctccggcggctggcgtcggcgcgtgctgctggcccaggcgctggtcgccgagccggacctgctgctgctcgacgaaccgaccaaccacctggacatcggcgccatcgcctggctcgaggaagcgctgctgggcttcaacggcgcggtgctgttcattacccacgaccgcgccttcctgcaatccctggcgacccgcatcctcgagctggatcgtggccacctgatcgactggaacggcgactacgccagtttcctggtgcacaaggaacagcaactggccgccgaagaagctgccaacgcattgttcgacaagcgcctggcccaggaagaagtgtggatccgccagggcatcaaggcccgccgcacgcgcaacgaagggcgggttcgggcactgaaggaaatgcgtcgcgaacgcgccgagcggcgcgagcgccagggcaaggccagcttccagctggaaagcgcggacaagtccggcaagcaggtgatcgtggtggagcacgtcagcttcgcccatcccggcggccagccgctggtacgcgacttctccatggtcctgcagcgcggcgaccgtatcggcctgctcggcgccaacggtaccggcaagaccaccttgctcaagctgctgcttggcgacctgctgccgacctcgggcaagatcgaggtgggcaccaagctggaagtggcctacttcgaccagttgcgccatcagctcgaacccgagcagacggtgatcgacaatatctccgaaggccgcgagttcatcaccatcgacggccagaaccggcatgtgctcagctatctcggcgacttcctgttcagtccgcagcgcgcccgcaccccggtgaaggcgttgtccggcggcgagcgcgcgcgcctgttgctggccaagctgttcagcaagccggccaacctgctggtgctcgacgaaccgaccaacgacctcgacgtggaaaccctggaactgctggaggaagtcctgctcggcttccagggcaccgtgctgatggtcagccacgatcgggccttcctcgacaacgtggtgaccagcaccctggtcttcgagggcgagggcaaggttcgcgaattcgtcggtggctaccaggactggctgcgccaagggggcacgccgcgcctgctcggcgtgagcgagtcgaagagcggcaaggccgagctgaataccgcgctggcgcccgccgccgaacccgcgccggctgctgcggcgccgagcgaggcgccggcgaagaaaaagctcagctacaagttgcagcgcgagctggaggctttgcccgggcagatcgacgcggtcgaggcggagctggcgggtgtccaggaaaccatcgcgcagcaggatttctatctgcgcccgcaggacgagcagcgcgaaaccctggcgcggctggacgcgttgcagcaggaactcgatgccttgctcgagcgctgggccgaactggaagactga

SEQ ID NO: 334908 - DNA, 762 bp, Pseudomonas aeruginosa
atgtatcacgttagaaaatctccagatgaaggagttaggagtatattgaaagcttccggccctaatgccgcgagatttgatgaagagagaaatctcttcctgaagcatgtcaaggatatggggcactggaagcgcgctagtttcatcatggcggctacaggtgcgatggagagctactttcagcgggccgttctagtggctctcaaatctgatcctgcactgctgcacggtaaatccaaggccattgatggcgtccaatggttgaaagtcggaattgatccggactattcagaaatactggctggcgtcactaaaggtacatgggcgtctcggtactcgaaattaaagtccttgtttggcgagcttcccgatattagggataacgtgaatgacctagacaaaattcgaatctttaggaatggtgttggtcacgcgttcgggcgagagttcgatgtaaaaccacgcctacttcgacgagggacagacgatattaccccgctttcagaagagaagttcaagaaatggctaggtcaaatttcaggaatcacacgcgaatttgatagacacgtagtgcagcaccatattggagagttcgaatctcttatgtatcttcacgaatacatgggaaagattgatcgttcgaaactcactcttcgcggcttttcgaagaaattcaaatccgagctaggcaaagagcttggccattcgaaaggaattaaatattacgaagacatggtttcttattacgactccgtagtttga

SEQ ID NO: 334909 - DNA, 1245 bp, Pseudomonas aeruginosa
atggaacagtcatcccacttctcctggcgctaccccctcgcactcgcggccgtactggtcctgagcgcctgcggcaaggccccggaaaccacccaaggcatggcggcgcccaaggtcagcgtcgccgaagtcatcgaacaaccgctgaacgagtgggacgaattcaccggccgcctggaagccccggaatcggtggagctgcgcccgcgggtgtcgggctacatcgaccgcgtggccttccatgaaggcgcactggtgaagaaaggcgacctgctgttccagatcgacccgcgcccgttcgaggctgaggtcaagcgcctcgaagcccagctgcaacaggcccgcgcggcccaggcgcggagcgtcaacgaagcccagcgcggcgaacgcctgcgcgccagcaacgcgatctccgcggaactcgccgacgcccgcaccaccgccgcccaggaagccaaggcggcggtcgccgcgacccaggcgcaactggacgcggcacgcctgaacctgagcttcacccggatcaccgcgccgatcgacggtcgcgtcagccgcgccgaggtcaccgccggcaacctggtcaactccggggaaaccctgctcaccaccctggtcagcaccgacaaggtctacgcctacttcgacgccgacgaacgcgtgttcctcaagtacgtcgagctggcccgccaggccggtcgcgacacgcgcagcgagagcccggtctacctcggcctgagcagcgaggacggcaacccgcacctgggccggctggacttcctcgacaaccaggtcaacccgcgtaccggcaccatccgcggccgcgccgtgttcgacaacgccaagggcgagttcaccccgggcctctacgtgcgcctgaagctggtcggcagcaagacctacgccgccaccctgatcaaggacgaagcggtcggcaccgacctgggcaagaagttcgtgctggtcctggatggcgacaacaagaccgtctaccgcaccgtcgaaatgggaccgaagctggagggcctgcgcatcgtccgcagcggcctgagcaagggcgaccggatcgtcgtgaatggcctgcagcgggtccgcccgggcatgcaggtggatccgcagaaggtcgagatggccagcgccgacaccctggccaccctcgcgcgcctgcggcagtcggtcggcgacagcgaaccaccgaaggtggcggcgtccaaggacaacgccactcgcaacgagccgcgcggctga

SEQ ID NO: 334910 - DNA, 1020 bp, Pseudomonas aeruginosa
atgtcccgagtgatccgttttcatcagtttggcccgccagaggtcctcaaatgcgaagagctgccgaccccggcgccggccgcaggggaagtcctggtgcgtgtccaggcgatcggcgtgagctggaaggatgtgctctggcgtcagaacctggccccggagcaggctgcgctgccgtccggtctcggcttcgaactggccggcgaggtgctggcggtcggcgccggcgtcggcgacctgccgctgggttcccgcgtggccagtttccccgcccatacccccgatcattatccggcctatggcgacgtggtgctgatgccgcgcgcggccctggcggtctaccccgaggtactcaccccggtggaggccagcgtctactacaccggcctgctggtggcctatttcggcctggtcgacctggccgggttgaaggccgggcagaccgtgctgatcaccgaggcggcgcgcatgtacgggccggtctcgatccagttggccaaggctctcggcgcgcgggtgatcgcttccaccaagtccgccgaggagcgcgagttcctccgcgagcagggcgccgacaaggtggtggtgaccgacgagcaggacctggtcctggaagtcgagcgcttcaccgagggcaagggcgtcaatgtcatcctcgacgaattgggcggcccgcagatgaccctgctcggcgatgtctccgccacccgcggcaagctggtgctgtatggctgcaacggcggcaacgagtcggcgttcccggcctgcgccgcgttcaagaagcacctgcagttctaccgccactgcctgatggatttcaccggtcatccggagatgggcctggaacgcaacgacgagtcggtgagcaaggccctcgcgcacatcgagcaactgacccgcgatcgcctgctcaagccggtggtcgaccgggtattcgagttcgaccaggtggtcgaggcgcaccgctacatggaaacctgtccgaagcgcggccgggtggtgatccacgtcgccgattga

SEQ ID NO: 334911 - DNA, 816 bp, Pseudomonas aeruginosa
atgagccacgccaatacgccccgcgactgggttcgacgcgccccgcaacacggtgcggtggaacgcatcgaggcttacttcgccggccacggctacgatccgcatcgccacgacacctatgccatcggccagaccctggccggggtgcagagcttccgctatcgccgcagccagcgccacagcctgccgggcggctgcctggtgctgcatcccgacgagctgcacgacggcgaggccggcagccaggaagggttccgctaccggatgctctacgtcgagccggcgctgatccagcaggccctcggcggccggccgctgccgttcgtgcgcgggggcttgtccgacgacccgcgcctgatcgccgccagccgggccctgctacaggccatggataccccgctggagccgctggaagaacaggacgccctgttcgaactggcccacgccctcgacgccgtggccggcaaccgggcgcgcggcaggcgccacttcgacttcgtcgccgccgagcgcgcccggcagtacatccacgcgcacctggagcgcccgctgggcctcgacgaactggcgcaggtcgcccagcgcgaacgctggagcctgtcgcgcgatttccgcgcgctgttcggcaccagcccctaccgctacctgatccagcgccggctggacatcgcccgccggctgatgctcggcggccagacgctggccgaagccgcgcttgccgccggtttcgccgaccagagccacatgacccgccatttcggccagagctacggcctgccgccggcacgctggctgcgtatgctcggccgcgcctag

SEQ ID NO: 334912 - DNA, 195 bp, Pseudomonas aeruginosa
atgagcttcgcgcaatggcggcaactggcgcgactgcacgcggccgtcgaacggctggcagcgggccaggcggtcggcgaggtcgcctggtcgctcggctacgaaagcccgagcagcttcgccagtgccttccgcacagtattcggcgagacgccgtccggctattccagtcgcgccaacgaagcgctagcctga

SEQ ID NO: 334913 - DNA, 1002 bp, Pseudomonas aeruginosa
atgacaacgcttgctgatattcccctgtccatgctcgacctggtgccggtgcgcaccggcggcagcgtggccgaagccctgcacaactccctggacctggcgcgccatgtggagcgcctgggcttcaaccgtttctggctggccgagcaccacaacatggatggcatcgccagctccgccaccgcgctgctgatcggccatatcgccggcggcacctcgcggatccgcgtcggctcgggtggggtgatgctgccgaaccatgcgccgctggtggtggcggaaaacttcggcaccctggagacgctctacccgcgccgcatcgacctcggccttggccgcgcccccggcgccgaccaggcgaccatgcgcgccttgcgtcgcgaccgcctgggcaacggcgacgacttccccgagcaggtcgccgagctggaaatgctgctcggcccgcgccgttcccagcagagcctgctggcggtgccgggcgagggtacccaggtgccgatctggctactcggttcgagcctgttcagcgctcacctggcggcgcagaaaggcttgccctatgccttcgcttcgcatttcgcaccgcgttacctgcacgaggcgctgcgcatctaccgcagcaacttccagccctcggcggtactcgacaaaccctacgcgatgatcggcgtgccgctgatcgccgcacctaccgacgaagaggccgagttcctcgccactaccgccttccagcgcgtgctggcgctgatccgcggcgagagcctgaaacagaagccgccggtggaaagcatggcgccgttgtggctgccccacgagcaggatgcggtcggcagcttcttcggcctggcggtgatcggcggtccggagaaggttcgcgcgcgcctggagatcctcctggagcagaccggcgccgacgagcttatcttcaccagcgacttctacgagcacgcccatcggctgcgctcttgcgaaatcgtcgcggggctgaaaggggcgtga

SEQ ID NO: 334914 - DNA, 408 bp, Pseudomonas aeruginosa
gtggcggagccagccgagtaccgccaccgcctcgcggcgcaccgccgcctgcggatcgccgagggcggccagggccggcacggcgctctcctccaggcgcagttcgcgcaacgcacgcaatacgctggcgcggacgaaggcatcggcatgcccgagccacggcagcaggcgccgcccggcggccggttccttgagttcgccaaggctctgcgcggcggcatcggccaccgccggcaccggatcggccagggccgcacagagcgcatcgaccactgcgtcttcctcccaggcctccagcaggcgcgcggcctcgccgcgcacgccggggtcgggatcgccgcgcagggccgcaaccagcaacggcagcgcctccggcagctccaggtcggccagttcgatcagcgctag

SEQ ID NO: 334915 - DNA, 10872 bp, Pseudomonas aeruginosa
gtgcaccggttgttcgaggagcaggtcgagcgcacgccgacggcgccggcgctggccttcggcgaggagcgcctggactacgtcgagctgaaccgccgtgccaaccgcctggcgcatgccctgatcgagcgcgggatcggcgcggaccgcctggtgggcgtggccatagagcgttccatcgagatggtcgtggccctgatggcgatcctcaaggccggcggcgcctacgtgccggtggacccggagtatcccgaggagcgccaggcctacatgctggaggacagcggcgtgcaactgctgctcagccagtcgcacctgaagctgccgctggcgcaaggtgtgcagcggatcgacctggaccaggccgatgcctggctggaaaaccatgccgagaacaatccggggatcgagctgaacggcgagaatcttgcctatgtcatctacacctccggttccaccggcaagcccaagggcgccggcaaccgccattcggcgctgagcaaccgcttgtgctggatgcagcaggcctatgggctgggcgtcggcgacacggtgttgcagaagaccccgttcagcttcgacgtgtcggtctgggagttcttctggccgctgatgagcggggcgcgtttggtggtggccgcgccgggcgaccatcgcgatccggcgaagctggtggcgctgatcaaccgcgaaggggtcgatacgctgcacttcgtgccgtcgatgctgcaggccttcctgcaggatgaagacgtcgcctcctgcaccagcctgaaacgcatcgtttgcagcggcgaggcgctgccggcggacgcccagcagcaggtgttcgccaagctgccgcaggccggcctctataacctctatggcccgaccgaggcggccatcgacgtcacccactggagctgcgtggaggagggcaaggacgcggtgccgatcggccggccgatcgccaacctggcctgctacatcctcgatggcaacctggagccggtaccggtgggcgtgctcggcgagctgtacctggccggtcggggcctggcccgtggctaccaccagcgtccggggctgactgccgagcgtttcgtcgccagcccgttcgtggccggggagcggatgtaccgcaccggcgacctggcgcgctaccgcgccgacggggtgatcgagtacgccgggcggatcgaccaccaggtgaagctgcgcggcttgcgcatcgagctgggcgagatcgaggcgcgcctgctggagcatccgtgggtgcgcgaggcggcggtgctggcggtggacggcaggcagttggtcggctacgtggtgctggagagcgagggcggcgactggcgcgaagcgctggccgcgcacctggcgacaagcctgccggaatacatggtgccggcgcagtggctggcgctggagcggatgccgctgagtccgaacggcaagctggatcgcaaggcgctaccggcgcctgaagtaagcgtggcgcaggcaggctacagcgcaccgcgcaacgcagtggagcgaaccctggcggaaatctggcaggacctgctgggcgtcgagcgggtcggcctggacgacaacttcttcagcctcggcggcgactcgatcgtctcgatccaggtagtcagccgtgcgcgccaggccggattgcaactgagcccgcgcgacctgttccagcaccagaacatccgcagcctggccctggcggccaaggcgggtgcggcgacggcggaacaggggccggcaagcggcgaggtggcgctggcgccggtacagcgctggttcttcgagcagtcgattcccaaccgccagcactggaaccagtctctcttgttgcaggcgcgccagccgctcgacggcgaccggctggggcgtgccctggaacgcctgcaggcgcagcacgatgccctgcgcctgcgttttcgcgaagagcgcggcgcctggcaccaggcctacgccgagcaggccggcgagccgctgtggcgccggcaggcggggtccgaggaggcgttgctggcgctttgcgaagaagcccagcgcagcctcgacctcgaacaggggccgctgctgcgtgcgctgctggtggacatggccgacggcagccagcgcctgctgctggtcatccaccacctggcggtggacggggtgtcctggcgtatcctgctggaagacctgcagcgtctctatgccgacctcgacgccgatctcgggccgcgtagcagttcctaccaggcctggagccggcacctgcacgaacaggccggcgcgcgcctggacgaactcgactactggcaggcgcaactgcacgacgctccgcatgcgctgccatgcgaaaacccgcacggcgccctggaaaaccgccatgagcgcaagctcgtcctgaccctggacgccgagcgtacccggcagttgctgcaggaagccccggcggcctaccggacccaggtcaacgacctgctgctgaccgccctggcccgtgcgacctgccgctggagcggcgacgccagcgtgctggtgcagctcgaagggcacggccgcgaggacctcggcgaggccatcgacctgagccgcacggtgggctggttcaccagcctgttcccgctgcgcctgaccccggccgcggacctcggcgagtcgctgaaggcgatcaaggagcaactacgctgcgtgccggacaagggcgtcggctacggcctgctgcgctacctggctggagaggaggctgcggcccgcctggccgcgctgccgcagccgcggatcaccttcaattacctgggccggttcgaccgtcagttcgatggggcggcgctgctggtaccggccacggaaagcgccggcgccgcccaggatccgtgcgccccgctggccaactggttgagcatcgaaggccaggtctacggtggcgagctgagcctgcactggagcttcagccgggaaatgttcgccgaggcgaccgtccagcgcctggtcgatgactacgcgcgggagctgcacgcgctgatcgagcattgctgccaggagggcaacgtcggtgccacgccgtcggacttccccctcgcgacgttgcgccaggagcagttggatcgcctgcctctggcgcggatcgaggacatctacccactgtcgccgatgcagcacggcatgctgttccactcgctctacgagcaggcttccggcgattacctgaaccagctccgggtcgacgtccatggactcgatcccgcgcgcttccgcgccgcctggcaggcggcgctggacagtcatgacatcctgcgcgccggtttcctctggcagggcgacctggagcagccgctccaggtgatccacaaacaccttgaactgccgttcgccgagcatgactggcgtggtcgcgaagcgctcgccgaggctctcgacgagctggccgcgagcgaacgccggcggggtttcgagctggagcaggcgcctttgctgcggctggtcctggtgcgtatggacgaagagcgctaccacctggtctacacccaccaccacatcctgctggatggctggagcagcgcgcagctgctcggcgaggtgctcgctcgctacaccggcgaacaggccgagcgcacgggtgggcgctaccgcgactacatcacctggctgcaggcacaggacaagcgcgtcagcgaagcattctggaaagaacaactggcggaactgctggagccgacacgcctggcccaggcggtcgccgccgagcgcgagcaggtcggcagcggccagttccagcgcagcctgccgccggcacgcaccgcgcgcctgaagacgttcgcccagcggcacgcggtgaccctcaataccctggtgcaggccgcctggtcgctactgctgcaacgctacaccgggcaggatacggtggtcttcggcgccaccgtcgccggccgtcccgccgaactggccgggatcgaaaggcagatcggcctgttcatcaataccctgccggtggtcgccacgccgcaaccgggcatgcgcctcaccgactggttgcaggaggtgcaggcgcgcagcctggcgctgcgcgagcaggagcacacgccgctgttcgagatccagcgttgggccgggctcggcgaggcgctgttcgacagcctgctggtattcgagaactaccctgtggccgaagccctggaaaagggggcgccaggcggcgtgcgcttcggcccggtgagcaatcatgaacagaccaactacccgctgaccgtcgccctgggcgtcggcgacagtctgtcgctgcaatacagctatgaccgccaggcgttttccgatgccgcggtcgagcagttggaccggcacctgctgaacttgctcgaaggcttcgtcgacaacgccgaacggactctggtcgagctgagcctgctggatgccgaggagcgcgcgctgatcgattcgctgtggaaccgcagcgagtcgggcttccccgcttcgccgctgatccaccagcgggtggcggagcgcgcacgcctggccccggacgcgccggcggtgctgttcgacgaccaggtgctgagcttcgccgagctggacagccgggccaatcgcctggcacatgcgctgatcgcccgcggcgtcggtcccgaggtgcgggtggcgatcgccatgcagcgcagtgcggaaatcatgattgccttcctcgccgtgctgaagtccggcggcgcctacgtgcccctggacatcgagtacccgcgcgaacgcctgctgtacatgatgcaggacagccgcgcgcacctgctgctgacccagagccacctgctcgaccgactgccgattcccgacgggctgtcctgcctgtgtctggaccgcgaacaggagtgggccggtttccccgcccatgatccagaggtggcgctgcatggcgacaacctggcctatgtgatctacacctccggctccaccggcatgcccaagggcgtggcagtgtcccacggcccgctggcggcgcacatcgtggctaccggcgagcgctacgagatgaccccggcggactgcgagctgcacttcatgtcgttcgccttcgacggctcccatgaaggctggatgcacccgttgatcaacggtgcgcgggtgctgatccgcgacgacagcctgtggctgccggagcagacctacgcgcagatgcatcgccacggcgtcaccgtcgcggtgttcccgccggtctatctgcagcaactggccgagcacgccgagcgcgacggcaacccgccggcggcccgggtctactgcttcggcggcgacgcggtggcgcaggccagctacgacctggcctggcgcgcgctacgcccgcaatacctgttcaacggctacggaccgaccgaaacggtggtcaccccgctgctctggaaagcccgcccggacgacccctgtggcgccgcctacatgccgataggtacgctgctgggcaatcgcagtggctacatcctcgatgcccagttgaacctgctgccggtcggtgtggccggtgagctgtaccttggcggagaaggcgtggcgcgcggttacctggagcgtccggcactgaccgccgaacgtttcgtgccggatcccttcggcgcgcccggcagccgcctgtatcgcagcggtgacctgacccgtgggcgggcggatggcgtggtggactacctgggacgggtagaccaccaggtgaagatccgcggtttccgtatcgagctgggcgagatcgaggcacgcctgcgcgagcaggcggcggtgcgcgaggcggtggtggtcgcccaggcgggtgccagcggccagcaactggtcggctacgtggtcccgcaggatccggcgctggtcgaggatgccggtgcccaggcggcctgccgcgacgccttgcgcaaggcgctgaaggaacgcttgcccgagtatatgttgccggcgcatctgctgttcctggcgtgcatgccgctgacccccaacggcaagctggatcgaaaggccctgcccaagcccagtgccgaccagcagcaacgcgactaccaggcaccgcgcagcgaagtggaaagacaactggcgacgatctgggcggaggtgctgaagctggagcaggtcggcctggccgacaacttcttcgagatcggcggcgattccatcatttccctgcaggtggtcagccgtgcgcgccagctctgcatccatttcactccgaagatgctcttcgaggcgcagaccatcggtgccctggctccgctggccgagagcggtacgcaggtgctggcgatcgaccagggaccggtgaccggcgtcacgccgttgctgccgatccagcagggtttcttcgccgaagaggtcgccgagcgccactggtggaaccagtcggtactcctggaagcccgcgagccgctcgatgcccggcaccttgagcaggccctgcggggcgtgctggcgcaccacgatgcgttgcgcctgtccttcacccgcgaggcggccggctggacggcgcgccaccggggtgtggaagagggcgctgcggcgctgctccgcgtcgctcgggtcgccgacctggcggcgctgcgggcgcttgccgacgaagtccagcgcagtctcgacctggccgatgggccgttgttgcgcgccctgctggcgactttcgacgacggcagccagcgcctgctgctggttatccaccatctggtagtggatggcgtgtcctggcgtattctcttcgaagacctgcagaccgcctaccggcagttgctggcgggtcaggccgtcgagctaccggccaagaccagcgccttcagggattgggccgagcgcctgcgggcgtttgccggtgacggcggcctggatggcgaactggcgtactggcaagggcaattgcagggcgcctccagcgacctgccgtgcctcgacccgctgggcgaccagagcaaccgccatgcccgttcggtcagttgcggactggacgccgaggcgacccggcaattgctgcaggaagcgccggccgcctaccgcacccaggtcaacgacctgctgttgaccgcgctggcgcgggtgatctgccgctggaccgggcaggtcgatgcgttgatccagttggaagggcatggccgcgaagaactcttcgccgagatcgacctgacgcgcacggtgggctggttcaccagcctgttcccgctacgcctgacgccggccgagggcatcgccgcatcgatcaagggcatcaaggagcaactgcgcgcggtgccgaacaagggcatcggcttcggcgccctgcgctacctgggcagcgcggcgagccaggcagccctggccgggttgccggtgccgcgcatcaccttcaactacctcggccagttcgacggcagcttcgccatggacgagggcgcactgttcgttccggccggcgagcgcgccggcgacgaccagagcccggacgcgccgctggccaactggctggcgctgaacggacgcatctatggcggcgaactgcgcatcgactggagcttcagtggcgagcgcttcgaaaccaccagcatccagcgcctggccgacgcctatcgcgacgaactgctggcgctgattgcccactgtcgagtggccgagggccagggtctgacgccctcggacttcccgctggcgcgccttgaccaggcgcgtctcgaccaattgccgctggcgccctgcgaagtcgaggacctctacccgctatcgccgatgcagcagggcatgctgttccacagtctgtaccaggaggccggcgattacatcaatcaactgcgggtcgacatcgacggtctgcatccggagagcttccgcgcggcctggcaggcggcgttggacgagcacgatgtgttgcgcagcgggttcctctggcagggcgccttcgagacgccgctgcaggtggtgcgcaagcgtgtcgaagtgccgttcagcgtacttgactggcgcggtcgcgaggacctggcggcggccctcgacgagctggccgccggcgaaggccgactgggcttcgacctgagcgaggcgccgctgctgcgcctggtgctggtgcgcacggacgaagagcgctaccacctgatctacaccaatcaccatatcctgatggacggctggagcaactcgcagctgctcggcgaggtactgcagcgctaccgtggcgaaacgccgccgcgctccggcggccgctatcgcgactacatcgcctggttgcagcgccaggacgccgcgctcgccgaggccttctggctgccgcgcctgcgccaactggacgagccgacccgcctggggcagtcgatcgcccaggccaagcagcgcggcaagggctacgcggaacggttgcgcgagctcgatggcgagcagacccggcgcctggccgagctggcccgcgagcagaagatcaccgtcaataccctggtccaggccgcctggctgatgttgctgcaacgctataccggacaggacagcgtggccttcggcgctactgtcgccggtcgcccggctgaactgaacggtatcgaggagcagatcggcctgttcatcaataccctgccggtcatcgctaccccgcttccgcagcagagcctggcgtcgtggctgcaggcggtgcagggcgagaacctggccctgcgcgaattcgaacacacgccgctgtacgacatccagcgctgggccgggcagggcggcgaggcgctgttcgacaatatcctggtgttcgagaactaccccgtttcgcagatgctccagcagcaggcctcgcaaggcctggctttcggtgccgtgggcaaccacgagcagaccaactacccgttgaccctcagcgtaagcctggggcagcgcctggaactgcagttcgcctatgaccgcgagcatttcgacgacgccagcgtggcgcgcctggatcgtcacctgacgcacctgctggcgcagatggtcgagcgtccggccagcacctgcctggccgagttccagctgctggaagcagcggagcggcgccaggcgatcttcgactgggggcgcaacccgggacgctatccggacgagcgcagcgtcgagcagctgttcgccagccgcgcggcgatggagcccgggcgggtggcattgctcttcgaggagcgccagctgagctacggcgagctcaacgcccaggccaaccgcctggcccaccgcctgatcgagctgggcgtggggcctgacgtgctggttgggatcgccgtcgagcgcgggctggaaatgatcgtcagcctgctggcggtgctcaaggccggcggcgcctacgtaccgctggacccggaatatccgcaggagcgcctcggctacatgatcgaggacagcggcatcgccctgttgctcagccagagccacctgctgcaacgcctgccagcggcctccgggatcgcctgcctggcgctcgaccaggcgtgggactggcaggaccgtccggcgagcgacccgcagttgcgggcgcatccgcagaacctcgcctacgtgatgttcacctccggttccaccggccgtcccaagggcgtcggcatcagccgagagagcctgtcgcggcatacccacgtttcgctggagttcttcggcatcgggccggacgaccgggtgctgcaattctccaccttcaatttcgacggcttcgtcgagcagctctacccaccgctcgcctgtggcgcctcggtggtgctgcgcggcaccgagatctgggacagcgagacgctgtaccgggagatcgtcgagcgacgcatcaccacggtggacctgactaccgcctactggaacatgctggccaaggacttcgccaaccagggcgtgcgcgactacggcgcgctccgtcaggtccacgccgggggcgaggcgatgccgccggaaagcctggtggcatggaaggccgccgggctggagcatgtgcgcctgctcaacacctacggccccaccgaggcgaccgtcacggtcaccaccctggattgcgcgccctacgtcgacggcagcaaggcgatcccggcgaccatgccgatcggcaaggtgctgccgggccgcgccatctatctgctggacgatgccgggcaaccggcgccggtcggggcggtcggcgagctggtgatcggcgccgagctgctggcgcgtggctatttcaagcgtcccgacctgacggccgcacgcttcattcccgatccgttcgacgagcagggcggcggccgcctgtaccgcaccggcgatctggcacgctacggcgccgacggggtgatcgagtacgtcggccgggtcgaccatcaagtcaaggtccgtggcttccgcatcgaactgggcgagatcgaggcctgcctcggcgagcacccggcggtgcgcgaggccctggtcatcgccgtcgagggtgctgccggggcgcagctggtggcctatctggtgccgcaagcggaagcgctggctagcgccacgctggaggtacaggccgcgctgcgcaacgagctgaaggccctgctgcgcgacagcctccccgaatacatggtgccggcgcacctgctgttcctcgaacgcctgccgctgagccccaacggcaaggtcgaccgcaaggctctgccggcgcctgacgccagtctcctccaggaggcctacgtggcgccgcgcagcgagctggaatgccaggtcgcggcgatctggcaggaggtgctgaaactccagcgggttggcctcgacgaccatttcttcgaactcggcgggcactcgctgctggccatcaacgtgatttcgcgcattcaactggagctgggcatgaagctcaccccccaactgttgttccaattcccgaccctggggcttttcgtcagcaatctggaaaaggccggtgggcaggtcgacacatcgaaactgaacaagctggaagccctgcttgatgaaatggaggaagtttga

SEQ ID NO: 334916 - DNA, 234 bp, Pseudomonas aeruginosa
atggccttcactcccgagctgatcgacgaactggaactgctggcgctcttcaacctgaacaacacccaggaaggactcaaggtccatcacaccgccgacggcaaggccgtcgccgccgcccgacgcctgcacgacaaggggctgatcgaccagcccgacggcggctacctgaccagtctggggctggacgccgcggagcaggcacagggcctgctgaccatcctcaagggttga

SEQ ID NO: 334917 - DNA, 378 bp, Pseudomonas aeruginosa
atgacaatagtcaatccgtacggcagaaaaacaacatataactttcaatttatccaagatataaaatacataacgtctatcgaaggcgaaccctctcccaactgccccagcagcaattccaccttcacctacgatgaccagggcctgctcaccagcaaacgcgacaacaacggcaacctgaccacctaccagtacagcgcccgtggcctggaaacctcgcgcaccgaggccgccggcactgcacaagcgcgcaccatcacaaccgactggcacccgaccctgttcctcccggtgcaggtcagcgagcccggccggatcacccgctaccagtacgacgccgagggacgcaagaccggcgagaccgtcaccacccgctga

SEQ ID NO: 334918 - DNA, 675 bp, Pseudomonas aeruginosa
atggtgccggcgatgtcttccaggcgggcgcccatctccagcgactgggcgaaggccgtggacagttccgagaccgccttgcccaccgcctgccagccgacgaccaggtggttgtcgcgacgcgccaccacgcggacgaagccttcgttggcctccagggtcatggcgcggccgttggcggcgaacgggaaactcgccaccaggcagtccaggccggcatccttcgcctgctccggggacaacccggcgaccaccacttccggatcggtgaagcacaccgcggggatcgccaccggggcgaactggcgacgcttgccggcgatcagctcggcgaccatctcgccctgggccatggcccggtgcgcgagcatcggctcgccggcgagatcgcctatggcccagacattgcgcatcgaggtgcggcactggtcgtcgaccttcaccgcccggccgttcatgtccaggcccaggctttccaggttccagccttcgctgcgcggcttgcggccgaccgccaccagtacctggtcggcggcgatctcgcgctcctcgccggcgccgtcgcggacccgcacgccgttctcgctcgggcccagcaggctgtgcccgaggtacagctcgacgcccagcctgcgcaaggcctgggccaccggcttggtcagttcttcgtcgtag

SEQ ID NO: 334919 - DNA, 156 bp, Pseudomonas aeruginosa
atgatctggcaacagccgacgtttaggtttgttgactggggctttctgtgcagctgcattggttttatctgcattcagtcgttccagttccagatcaaccgctgcaatatcttcttcaaccgcttcatcccagagatggatttgttttgcggttag

SEQ ID NO: 334920 - DNA, 699 bp, Pseudomonas aeruginosa
atgtacgcggtcttcggcctcaaaaacctagtcctaggcttgctcgcgctgattgccctgatctttttcggattcatctggtggctatcacctcaggacgccataggcctaatatccttgctgtggaaggtcgccagcattacggttacagcaacattcatcctgggtaacatacgcccagtcttcaagcatctctggaagcttggagaactttgctccagtagcttgttccctgatctatcgggctcatggaagggctacctgcgctcaaatgtctcagtacatgatgcgatccaagccgcagcgctctcacccgatctgaaactcaatctgaatgaaccccaggatgttgatcgcattgagcttgagcgcttcgaggccgagctagagatcaaggcgacgctcagtcggatcaccctaacgatggtggttcaaggacggaagggagagtcccgatcctatagcctagtgtgcaagcccagggtttctatctatgacgagccacaccgcctgacgtatgtctatcgctcgcaattgaccgaaccctcagcagatgatgaatcgaatcacataggggctgcagagctcgaggttctccgccaaggcaatcaaatcatcctctccgggttctattggactgctcgaaattggagaaacggacggaacaccgcgggcttgatgcgtttcgaacgcgcctag

SEQ ID NO: 334921 - DNA, 1173 bp, Pseudomonas aeruginosa
atgccagtcttcaacctgcacagcctgttggatagcactgtctacgcggacacatttcttgccgggctgacgctcgcgagcgacgagcgtgaacacatgcagagcgctcgtactgaaatccgtgatcggcttagaactaggctacccgccctgcttcagcgggcgttggggagtgaccagcaggtgcgtaaaccgcgcttctttactcaaggctcttgggcgtacaagacgcttaatgcgccatgtaaagatccgcagcaggcggatctcgatgacggaacctatctaccatttagctatctcgaagccaccccaccatctgtcatgagcaatgtgctcttcacgtgtgttgaagaggtattgcaagacctggcggatgaaaaaggctggaagctgattgatgacaatcccaattgcacgcgtctcgagatcgcaagcgacaagcatattgacgtccccgcttacagtattccggatgaagagttcgaggaactcagggaaagcagagctctagccatctgtaatgcttttgacagcgtattggctaaggcgcagctagaggaggacgataattgggatctgatgcctactcatggcgtgcttatggccaccaaagatcggggttggcgcgataatgatcctcggccgataaaggattgggttgagtctgaggtggcgttgaaaaccgagcagcttcggcgcctcatgcggtacatcaagggctggcgcgattatcaggtctgggaaagcgaagaccctaagtcgattcttctgatggttgccgttgcgaaggcgctcgatgtggcagttcctaggcgggatgaccttgctttgctaaaggtagtaaaggcactacccaagattcttcagggcaaagtctttaacccagcgacggccatgaagcccgtcgaggagcaggaggatcttgctgcgcgcctggataaagatggcatacgcgctgatgtagtggctcggcttactcgcttaggccaacaactggatgaggctatttaccgctcaagctcccccgagcaggcctgtagattattgcgcgatgccttcggtaatcgtgttccctatgatccagggcgagtagtgattgatacggttcaaagtactccagctgacaagtcgaaggcggtgtcccctgttggaatcatgacggcagggtga

SEQ ID NO: 334922 - DNA, 1665 bp, Pseudomonas aeruginosa
gtggagttgagcaaagtccatgccgcgctggttggtaacgggtttgaactactgcaaagctccccttatccaatatacagcggttttctccatcccaagggaagtgctatccctatccgcttgcatctgtcggatgtggcactcgtttctatcccatcaatcgaacttcttgaacgtccagttgggctgccaaaagtatgtgctcatatcagtccaaatggttttctctgctacttggggagagatcaagcttacctctctaggaataatatcggaggagcagtcttagggtgtttggagctggcccggcagcttctggaacgactggttgatggtgattccctctctgatactcgcgatgaatttttgatctactggggtggggctgatctgctactggatatcccaaagtcaaaatctgaaggcgtttatgagcacttcgcaatagttagtcttccaagtattgaaggtcgtgacgagttatgggtcttgggggatgacgctaaggctctagctgcacggtataaattttggggtggaaaagagttcttttcagatctaaccttgcgcgtcgtaaattcagatacccctctggggatttcggaagagtggccgcctaaagatctcaagcagctctcccagtggcttcaggttgcggactatagagcccatggtggtttaatgtctgttttgaaagacgcttacaggcttcgtcagagtcttgtgcttcttttgattcgtgcaccaaattgttcctgtgcagttctgcttgatctttctatcgctaggaaagtcattaaagctaagtcagctgatcaatttatgcgctctgctctaaaaagttacccaaaaaatgttaaggttactaggttggggtgcgttccggttgatgctgaatcttggttaacccgtaacttggcaggcggggttacaggactggctgggaaaaacattgctttggttggctgtggtgcgattggtgggtacttagctgatttgcttgtaaagtcgggtgcagggtttctaggtgggtcgctggtgctcattgatgatgatgagttgtctgtggggaacttgggacggcattttctcggttttgaatatattggtcaaaataaagccgctgctctttgtgcggagctgcgggctaagtatccagaagtacaggtgagtttcatacctaagagagttaggggcttaagttctctttcgcaagtcagtttggtcgtggatgctactggtaacgaggctttctcccaatatttaggtgaaagctttctatcaggaaagctgccccctattgtattttcatgggttatcggggccggttgtggggcgcaagcttatttattacacgaccccaagcaggcatgtataggttgtttggaacatacaaaacctggtggccagctgtccgtcatggggcgagactataagatggaggttaagaatgtaggggggtgtggcgattggctagtcccatttcctgcttctgcggctctgcatgctgcctcactcgctgctgaaatctctcttgattgggcgaatggggtgtccaagcctactttgaggagtattactctggataatgcgcaaggtaaacttgtgaagcccatttctcctcagcaacgtgcgaactgcgaaatatgcaacccctcgcactaa

SEQ ID NO: 334923 - DNA, 603 bp, Pseudomonas aeruginosa
atgctcagcattgatcaagcccagtcggtatccgcccggattgcgcaacgagtcaagcgcctacctaaagggcagccgttcagcattagccgtttcacagggtttggaacgaaaaacgccgtatccaaagcaatagctcgactggtcaaccgaggcgagctcgaacgggtgtatcgcgggatttacatgcgcccgaaacccggacgttacgttgccagggttcgtcccaatctctggcaattgcttagcctaattaccaggcagaagcgcttgtctctgcagatccatggggccaatgcagtcaggagatttggcctcagtacccagatgccgctcattacgatctattacaccaacggtgccagccgttcagtattcatagggaaggcggaggtccggctggtacatgcggcaccaatggtcatgcagcatgccgggactgaggtggggatggccatcagcgcactattttatctcgggaaagaaggcgctacttcagaatgtattgctgcaataaagaaagggctcaagcctgaagaccttgcaaaattaatgacctgcagaatgccaaagtggatgcgcatgacgctggaattcagctga

SEQ ID NO: 334924 - DNA, 660 bp, Pseudomonas aeruginosa
gtgcgtttgcggacgtataggccacggattataatccgcattttcgcgctatttcttctggtgccctcaatgaaatcggcctcgtttatcttcgacaggcgtctgtatgagctgcttcaggagccagggcgtacatcgtttacgacccgcgaactgcgcgatgcctatgccgctcgcttgagtggcacacaatttcgtatcgccgatgtgcgccgctatgtgtatgagcagattcgccgattagtgcgcgcgggctgggtttcaccggacgaggaccgccgtgttcgagggcaggtttaccacctgcagccgattccgacgcatctgcaacttgagctgatcgacaacgcttttgagaacagcctgatggccgccggaatgcccgagccaggcacagcggtacgcgatgcggaagctttgccgcttgagtcgtcagccaatacggatttgcagttggaagcgctccacaaggaaatccgcttggactttctcacttcaatgggcgaggcagagcgattcaaactgcttctggaagaaatgccgcatttacgggacaagcttgaaggcgattacctggaagccagggatcgcagttctcgcctcttggggcatctgcgcgccattgaaaagaccctcaaaacgctagctgcgccacgatga

SEQ ID NO: 334925 - DNA, 222 bp, Pseudomonas aeruginosa
atggataagttggcgaaggcgttaggggaacgcatccgaatgcagaggaaggcctgccggatttcccaggatgcactggcgctggcgtgcagtctcgaccgcagctatgtaggtcgcatcgagcgtggcgaggtcaacatcaccgtcgagaagctctaccgcatcgcaggcgaactcgcctgcgaaccttcaagccttctgccaaagccatctgaaatctaa

SEQ ID NO: 334926 - DNA, 1368 bp, Pseudomonas aeruginosa
atgagttttcccgcgtatccggactacaaacactccggtattgaactgctgcctgagtacccaagtcactgggcactgaagcgcttcaagaatgtttttgaagagagagctgagcggagctcagatggatctgaggagctgttgtcagtttctgcttactttggtgtgaaaccccgatcagaaaccctggatgagggggatcatctatcgcgcgctgagtctcttgaaggttacaaggtgtgcagggctggagatctcgtcattaacatcatgcttgcctggaaccgaggtcttggtttttcttggcagcacggaattgttagccccgcttacagcgtttttcacgtaacggatgggtcgtacccgaagtttctcgattacttggtgcgctcagatgagtacatcaggtatttcaaaacgcactccgcagggattatggactctcggttaaggctttacccagagtcttttgggcgcctcttcagcgtaattccacctgcttgcgagcaaacccaaatcgcccgcttcctcgaccacgaaaccgcccgcatcgacgcgctgatcgaagagcagcagcgcctgatcgaactgctcaaggaaaagcgtcaggccgtgatctcccacgccgtcaccaaaggcctcgacccgacggtgccgatgaaagactccggcgtggagtggctgggcgaggtgccggcgcattgggtggtgtctcgtgtaaagaacgttgtgtcttttattacatctggctcgcgcggatggtcggattatatagatgagtcaggcgaggacattttcttgcaaagtggtgacatggataaccgcttgaatgtgctcttcgacaaagccaagcggattaccactccggaaggtgcggaaggtgttagaacacgggtgcgtgaaggtgatgtatttgtttgcattactggcgcaaacactggtcgcgttgcagtagtgaaggagttgcctgggatttcatatgtgaatcagcatctcgggcttctacggcctcaagtgttctcgtgtgattcgcgatatctcggatacgcactatcttcgactaactgccaaacatatttcagtgttgaacaatatgggttgaaggaggggctcagtctaacggacttggctgaggcgccaataatggttcctacgattgctgagcaggttgcgttggttaatagcattgaggagcaactgagcaaccttgaccggctttcagttgacgctgaacgggctgttgaactgcttacagagcgccgctccgccctgatctccgccgccgtcaccggcaaaatcgacgtgcgcgactggcggcccccggtcagcacccaaccccccgaatcagccgtagcagaggccaactaa

SEQ ID NO: 334927 - DNA, 615 bp, Pseudomonas aeruginosa
atgttcaggcttataagatttgagtcgctttttagatggttggcagtcgggactacgggggttagcctgctgatttatcttgctatgcaggcgtacttgggaactgagttctctatatctttgcttgttaaggttgcaggttgggtatcatttgctcttattgtatgccttacaaccgatatacctgcgcgcatgatttggggttttctcaggtatttcaataaagggcttttccctgatttgaatgggacttgggagggggagattattgtttcggactctcttaggatacccgcgcgcgccattattcggcactctttgctgaaggtccaaatagacatccatacagaaacctctaagtccgtgacaatcgagactacgcctacacttgagtttaatcagtataagatttattacgtctatagatctattcccaaaaatccagagtggagcgaatataaaggtactactacctttgatattaggtccgttaaatttggagcttacgatgccctcgaaatgtctggcgagtatttcactagtcgaatgactgtggggcgtgtacggtttcggcaggtcagtagtgacacatcttgcgatgtctcttattactag

SEQ ID NO: 334928 - DNA, 411 bp, Pseudomonas aeruginosa
atgggtgctcctaaactaactgacaaagatattgagaaggctgtcctactgctcgatggctgggcgggcaaactcacctgggatcgctatctagcggtgctggcagtggagataggacacacctataccaaggtggcgatgcttcgtcagccgaggatcaaagcagcctgggatctggccaaggacagggtgcatcagagcgcccctcgcggcggctatggcaatgttgcaatgtccctctcagcagagcggatacgcgagctggagaggcgcgtagagcgcctcacgcttgaaaataatcagctgctagagcagttcgtccgctgggctcacaacgcaacacgtcgcggcctatctctagccgacctcgacaaaccacttccaatcgtggaaaaaaaagccactaagtag

SEQ ID NO: 334929 - DNA, 894 bp, Pseudomonas aeruginosa
atgtggcatgaagcactgtttctggttcccgagcatgcgctgagaccgaatgtagatacctacatgaacgtgccctcaacccttaccaccaatatgctgaacaaccaattgggctccaacccgaacggggtgacggtgttctcgcgcaacggcatgacgcacaaagatggcagccctatcgccatcacgacgcaccagttcaggcacctgctgaacaccctagctcagtccaagcatctatcggagtccctgatcgccttctggtcaggcaggaagcacattacccagaacgcgtggtacgaccatctgccgcaagaagcgttcatcgaggcgtacaccaagcttggcgaacacgccccggaattgagcgtgcaagggcctatagctgacaaggctagggccatcgccgagaacaacggcctaacgcagagccaagccctcaagatcgagctgggagccatccatagcacccggtacggcatctgccggcatgactatgcgctgacgccttgcccgaaggacaaagactgcaccatgtgcggagagcatgccgttgtgaagggggagccgaaacatctggccgaggcgagatatcagacggagatacatgagaaggccctccagaaggcccagcaagccctggagaacggggagcctggggcatcccgttggatcaaacacaacgaaggtcgcctgcaacgctggaggcttgttcttgagcttctgacagaccccaagaccccggatggcacgctcatcacgctaccgccgcccgagcactcccagtccaagaccgggctcgcccaggcggtacgcatcgtcaacgtcgtcgaccaatcagaagatgaatctgctgacgacttgaacaccctactcgaactggagttcttctaa

SEQ ID NO: 334930 - DNA, 1461 bp, Pseudomonas aeruginosa
atgaataacgaaatgctagctcgacgaatcaaagccgcctccctcacagaaaccaccctggttctgctggacggcagagtaatcaccgtcaagattggtgaatcattccagatttacagcagcgacggcgagtcagttcgactgcatttcgatatattggatgaaggcaatgtctttcaccaagcgcttttcaaagtcatatgcggaacgctttcaacacatagcctcaactataacgccaccatcacgcttgctctgcgaaattggtttgacgtggaaaattgcaggcaagaaaatactattcagatcaaacatattggtctgatttcgagaatctcgtcaaactacatcccgttcatcatcccaactctaagacgggtcaaagaccaacaattggacggaatgtcagccgaggcaattgacttcctaagcgacaactacaaatgggaagaaaggggaaacggggcctactacaccctaataaccaacgacccagcaagcggcgccctaaccgaccaagagcttagcagcattcatggtgaactcaattacgcctactcaaatggatcaataagccaagaagaatttacccttgcatggttctttatcggcactggagttcgccctgtacaagccgctcgcatgttgaactcagacgttcaaataactaacggagccgaaggaaaagaagtaattctaagaatccccctcgctaagggtgagggaggcggaacacctgagtattggctaagacgagcgccaactgttcttgctgagtgcttgatcgaatacctagataaacgagacgagaaatccaacgacgctaaactcttcagagggacgccgcacactattgcagatcgcctaacagaaaccctgcgccctcttaacacgtattcagatcgccttgagcaacgaatacccattacgccatatcgcttccgctacaccctagcgacgcgagccctagcccatggcgcctctgacttcgaagtggcaagactcttgacgcaccggagcactagctgtatccagttctaccgtgcctccatgcctcagcttcagaaccccatccgcaaggctattgggaaggagatggagttctttgccaaagcctttcaggggcgccttatcacgtccctggaggagtccacccgggctggtgacgatgcctcggtcattgctgacttcctacgcttgacgggccagacagtgggcgcttgcggcacccgtgctgagtgccatcaaaacgcgcctattgcgtgcctgtactgccatcattttgaacccctgatcgacgccccctgggagactctgatggcttcactgaaagccgatcaggacatggagaaggatgatcggattcgccagatcaaccacaacgccatgtccgcaattaacgaaatcattatcgcccgcgactcattgcacaccaggacggacaacattatcaatgggtga

SEQ ID NO: 334931 - DNA, 1206 bp, Pseudomonas aeruginosa
atggctgtcttggttgatgaccagggcagcccactcttcctccccaacgtctacgcgacgctccattaccgcgatgtcggttcctcttcagcaacgatcaagaaagcgctcagagcgctaggcatggcctatctgtgggcctccgccagaaagcttgatctgcatgcagctatcagttcagaagccttcctctccatcgagcaatgtgaggatctggccttcttccttcgcttggacagggcctcgcaagaccgtgagctggccgtgagcctggaagaattgccatcgagggttgttcggcttgagcaggtgcgtggtgggttccatcagaaagcctcagaacgcaccgcttgctctgctgaggaaggcgcctatcgaatccgtatcgttgcagccttcctggagttccaactgacgaagatagagcaaggcatgccgcgcccggccccaggcatagcgaatgagaagtccacacgcccctccatacgacgactgaaggccctgattcctaaggtaggtaacgcagacgagagcgattcgttggagggcatggatgaggtcacaattgcgttcgcagacgagatcttcgacccaacctcaaagatcaacccgttcagtacagacttcatcaagcaccggaaccacctcgtgtacaggatgctgtctgacagcggcatgcgtcggagtgaactgcgcttcgtgcgggtagaagacgtcaactacgccagcaatcgcgtgcgtattcgagtctccaagacccaagctcgcaccgtccctatctccagcacgactgcactcgcctttcaccatttcgtccttgagaactggtcaaaaatccctcccagacaacgagcccatggctaccttctcaccaccgcagagggccgccacatctgcgcggatacaatcaatctcatcttcaggacggccaggaagaaggcccacgatctgcctgaggactttgcgcctcacgcgctgaggcggacgtggaatgacaagttcagcgcaaaggttgataaggccccacctgacaagcgcatccctaagagcgaagaggagcagattaggaatcgcttgatgggatggcggaaagactcccagatgagtgctcgctactcacgcagaaccatcagggtgaaatctgaccaaattgcagaagaactagctaacgaaatcgcggcgggcaagaagaaagatgatgaataa

SEQ ID NO: 334932 - DNA, 525 bp, Pseudomonas aeruginosa
atggaatacatcttcacactgaaataccaactggccgacgatgaccgtgacccggaagcgttggtcgagcgcctcggcgaggccggctgcgacgatgccctgatcggcattggccagccaggccggctggcgctggagttcacccgcgaagcggagaacgctgaagcggctgtgagcagcgcactggccgacgtgcgcaatgccgtaccgtcggccaggctgatcgaggtggcgccagatctggtcggtctcaccgatgtggcggagatcgtcggcgtgtcgcgccagaacatgcgcaagctgatgttggcttatccgagcagcttccctacaccggtacatgagggcagtacatggatctggcacctggcggacgtgctgacctggctacacgccaaaggcagctatctgctgcctggcggtgtcttggacgtggctcaggtggccctgcaggtcaatctagccaaggaagaacggcgactgactcgcccgacctccaaggaactgcaggcccttgtcggatga

SEQ ID NO: 334933 - DNA, 384 bp, Pseudomonas aeruginosa
atggagatagagatggatacttcttcgcgtacgaccgagattctcgataccgcctctgagcagtccctccccttaccgggcacggaagcctacgagtcgcttccgcagttcccgaagggcagccccttgcccttccggcgcacaattcgcaagcatgagctgagacagatcgtccccctggctgaatcaacgatctacgaaatggagcgccgtggcgagttccccaggcgcttcaacctgacaccacgttgcgtggtctgggatcttgccgaggtagaggcttggatcgaggagcgcaagcaggcgccgcgggtcaatatcagcaagccggatgtttacctgaggaaaacccgccctgtccgggcgggctcaaaccaggtatga

SEQ ID NO: 334934 - DNA, 1314 bp, Pseudomonas aeruginosa
atgcttggtttaaaaattaaagagctagagatttccgtagttacttcaagcggtacattttcaaccttaattccctttaaggatggcctgaacattattcgcgccaacaactcatcagggaagtcgacctgtgtaaacgcaatagcctacgctctaggcttagaggcaattctgggcccaagtaggaaaaggcctttcccaaaatcgctttacgaagtaatttacaaaagcaaggaagatgaaactccgtatttcgtaaaaagctcgaacgtacgactggtagtaacaaacagcaatgcaaaagaggccactctcataagggacgtagaaggcgatagcaaaaaaataactgttatctccgaaaccaataaacaggattacttcttaggctcagcaggcgaagtaggctcagccaaaagcgagcgtggttttcatcattggcttgttgaatttattggctggatcctccccgacgtagttacatttgaggggaaggaaacaaaactctatctagaatgtatatttcctttattttttattgagcaaaagcgtggatggtcggaaatacaagcaaatatacctactaattatggaatcaggaacgtcaagaaaaacgcagccgagttctgtttgggctttgatagcttcgagcaagaaaagaaaatatttctcttaaaggccaaagtcgacgcagcggagattgagtgggacaagacacgatcctccgctgagagtatcgcagactttaataccgtgcgagtaaacaagctgcccgagattgaaaaaataaaagaaagagcgcacgttaatttttcatacttagaaaatggtatatttgtaggccttcacgagcaagagatctctttaaaaaaactcatagccagcctaaataaagaaatcaccgaaaaacaaccaaacagcgagcaaatagaagcacaaaacagcataattagagcactccagagagaatccgaaagaacctcaataaacattgagaactctctgctttccatgtctgaaaacgataaaaaaatctcaacacttaaacatgaccttgaccaatatcagcaactacgaagacttaagtccgtaggtagtgacattgagcagcatctggacacgtcgaaatgtccaatttgcgacaccgcgatgcatgatacgttaggaaacaactcaactcaaagaagtccgatgacccttgaggaaaacattgagttcctaaaaaaccagattgattttttgggtatccggaatttctggttgataaaatgccaaagatgtaaagaagaaaatctttctcagcggattatctga

SEQ ID NO: 334935 - DNA, 915 bp, Pseudomonas aeruginosa
atgagcagcttcatagaaaacctttcaccaaaggaatgggaaaatttttgtgaagttatgcttagacagcattatggtgccaaaaacttctaccccgttcctgatcaagacggaggggaccttagaatagagttctacaccgctgacggaacaatatttcaatgctattacccagaaaaaggcattgaaatgagcatttacaagaaacgaattcagaagaaaataaatgacgatctaaacaagcttaaagataacgagcaagaaattctaaaaatccttgacgacgtaagaataaaccaatgggttcttttgacacctgaaaacaagtccaaggacttgatcgcatactgcaacaaaaagaaaaaagaagtaacttcaaaagacatttgttacatcgacaacacctcgttcaaagtaaaaatagaaacagcctcaagctaccccgacggaaaactctatgctcaaggcgtttacaactcgtcaataaatatacctctattaacaattagtgaagatctaaaaattaactggctatcaagccactcggaattctcatcaaatataacaagaaaatcatccaaactaatgggcgaacgaagcgataactttcaaaacacagtagtgacaaaatatatacagattgataaatttcttgagcagttacgagatgatcaccccgaccttcacgctcttattgaagacagtgcgagagcacaattggaaagcataaaagagaactcactattccaatcaaacctagattcagaattcgtcaaaacaattgtagaaaacaataaattagcattttctaagcactccaaatttatgtccgacacaaacgtgcaatctttaactttcggatatctttcaaaatggatcgcagagtgctacatggacttccaagaatatgaatag

SEQ ID NO: 334936 - DNA, 420 bp, Pseudomonas aeruginosa
atggattacagcccgatagtctcccaggtctggggcatgctggcctggttcatcccagcagccttgctgatcggcctgctcaaatcgccctgggccaaggggcagatcggtgaactgctggtgcgcctgttcgcccattggcagctggataagcagacctaccgacgctcgcacaaagtaacgctgaatacgccagacggcaccacgcagatcgaccgccgcgcgccgagcttcgccacccaacgcgagcatttgcaaaacctcaagcggcgtagcaacccaacagccgagcggcaatgcccaaaatgcggcaacgcgctgctgatccgcacgatgaagacagggccgaaggctgggcagcagtttcgggggggcgaggtacccaaaatatcgggtgacacagaacacttaaggctttaa

SEQ ID NO: 334937 - DNA, 2262 bp, Pseudomonas aeruginosa
atgccaacgaacaacgacaaagacacgacgccttccgcgccgaccatgtcccgctcccgtggtcaaatcgcgggcgcttatgcccccggtgcgttcttcactttcgaaggcgggctgggcgcctgcatctcaattccggatcgtgagtcggaacaccaggaaccgaaaatttctcacgctacgcagaatcagatcctgctgcgcctcaacgaggcggtcagcgcatggttccagcgcgcgtccacctgtcgaacaggcgatgatgcagcgaattacccgatatcgcccgacctttgtgtggataaaacgctgctcaatgaccagcacaacggtgtacgcccgattgaccgcggccgcttcatcttcgtcgacccggtcaagatgggttacgccccggcgccgctcacctttgtgtgcaacgcatgcgggcgctaccgtggcttcaagaacgttgcagagttcgagcgtaaaaaatcgcaactgagctgcaactgcctggctcaaccgaaccgcgtttgtcagtggcgccagctcgacgtgatcttcgtgcactggtccggcaactgggagcccgtggcccccggcaagtacaactgggacagtcagaagaaggatctcatggagcccattcggcgctgcgcgcactgccattcggaagagttcctactcgatacaaactcgccgagcatcggcaactggttcttcaagtgcgccaacctaacatgtgggcatgtagatccgaatgactggtacaaaaacgatccggagactatccgcgcgctgggtgacagttttggcgctcgtgtcaccgaaggtcgtatggagccgatttcctaccgagcatcggcgacgcactacacactctcggagcagttcgtagacttcggcgcgcaatgcagcgagctgctggaaatcatggatcctagtcagcacgccgaattcgaatctttcatcgccgagcgcttcggctttggcaagatgcgcccgtcactcgacgaaatggaaaagcagctaaaggaacgtggctatggtgagaaatggacgcaatatcttgagagcaagacgaactacgaaaaatttaagatgatgatggacggcatggccaagatcccgaacgggatgcccgacatgcttgacgaaattgccaggaatctgcgtgcacaagtcgacagttggttcgaaggtgaccacccgatcctgcaaccaaagaccgctctacctccggaattgagcgcgctattggccgcccgtgatcgtttcacaacccgttatgacccgttcaggctggccgtcgaacatgaggcactgcggcgcacgcggctaaccgcgccacgcagtgatggcaaccggctacctttcgtgcgctttaccgagctcgactacgacctcgccccgaaggagccagacaagcaggctgcgcaacaggaaagcacttcggcgctgctcagccgcatgggcgttgccacgatgggacttattcgggaattcgacctgtgccgcttctcgtacggcttcactcgcatgaaggcgcagccggtcatcgagaagcgaaaccggatgatgccggtcaaactcaacctctttccgacgcttcactcggaagacgggatcaaacatccgatctacgtgatcaagcaggcaaacgaggccatctatgtgcagctagaccaaacacaggtctatcgctggctgcaagcgctcaagacgagtgatgccttcgattggacgccagccgacggcccactgggcgccaggctccttgagcgcgccattcccttcggtccgttcctgagtggcgtgccgagaagaggcgcctcatcgagctacctctatacttacacgctcctgcacacgttctcgcaccacctgatgaagtcgattgcagaacattcgggtctcgacttgggctcgctcggcgaatacctcttcccagcggacctcgccttcgtggtctatagaagtggtacgacgatggacctcggaaatctctcagcgctctggcgaaacgagcacacggatttcttgcggcacctgctgcaccagaagacactcacatgcaactcaggctccctatgcgatgcgaacgcaaagaaccctggcgcctgcccggactgcatcttggtgccagagacttcgtgcatcgcgatgaaccagcttctgagtcgctcggtactgcgcggcggtgctgcgccacgcgaggatggagaccacgaaggacagcggatcccaggcttcttcgagcttatcaacgcatatgactga

SEQ ID NO: 334938 - DNA, 4215 bp, Pseudomonas aeruginosa
atggctgaactacgcgcaaatccgaaaaaaatcgcgacctcagtgaaggagggcgtggccgaggccatcctgaacatcgtatacgcccgcatccgcggcggagggaagttcggtcgcatcatctatggtgccaagccaagcgcgctgctctccgctggctttctgctgccacgtcggaacgtcgatgacggcgacgaagtcaccagtccgatctggatctccggccacggcctagacctgttagtggcccaagatgacaaaggcatcgtcaagatcaagcccaaggcgagtctctatcttcgcgtgctaccaaccgaagaagatctgaagacaaggccggattgcaagctgcgcctccaaatgcgcactgaaacggccaggcgactgcgaaccctactgcgcgacgcagagaaagcggcctgggagcccttagctcagcagtacaagagccggcgcgagtgtcccaactggaagcagattcaggacgcggctcgaaagaaggtttatgacgacctcggcctaccgcccggcttgaaccttgaagcgggctggactcaggaaccaactcctgaggatgaggcgtcaccgcaaccgcaaggcgaggcaaagagtgtcgagacgcaagacggtgaagacggtgccccactagttgccgagccggatgaaacgattatccccatgctttgtgacgaacacttcgagcgaattaagatcccgcacaagtggcagtgtctggatctcgccttgcctgaactagaactggacacgagcctgaatgcagcagcgctcggcgcaaaaattgcggaacacgaggcgcaaatgcatgaagcgatccagctgcgtttggcagcctggctcgaagacacagatccggacactggaggcaaaggccgggcatttccgcgcgacgcgggtataccgcccagccagtacaagggatgggccgcctatctgaaacatgttcaggaaagttcagggcgtgttgcggtaccacttatcgagttgcgctgggacatcagcctcgcacccgactgggccgagcccggcaggtctagcctgcatatcgcactggagaatcactcgaacatcccgggtcagcatcgggacgagaccgaggagtcggtcttccaggtcgcgctcgacgtgcatctaccagaagctctacttcgtcggatgaaactcgagcgggtcgaggcaagctaccgctacaaccaatacctcacctatccggccattggctacaacggcgcggttatcgaagcgtcgccagtcggcgaagaaagtggtggcggcgcggtgcgccttactaccacttggatgcccctttacaggcagccccgtattgagccggtttcatacccaggcgttgagcgcaatatgcgcgcgctggccaacggtaaggacatcggaggactcgaagtcatctacgagacctatatggactggatggcagagttaccctctcacgttaagctggatcgcggcattgaggatgacccacaagcgatcagacgtgaggaggaagcgttcaatgatcacctccatttgtggagacttgaagctgaggcaattcactcgggggtaaagctactacgcgaatcacgccagtactggagtgaacgcggacctcaggccgatgcccgagcaatccccttcgaggcctggctcgcgatgaacgagtcgatggcgaacctcatgaagaagcgcaccggcgacgactcagcggagtggcggctctttcagctcgctttcattctcgcgagtctatgctcaagcgcctcgcgcatgcccgagttcaagaatttctactatccggcgcgcgacgatgcggtcacgctgctctacttctcgacgggtggcggtaaatcggaagcctttttcgggttcctactcttcacgctcttcctcgaccggatgcgaggcaaaacgctaggcgtcacagccatgatccgatacccgctgcggctgctaacgatccagcaggcccagcgcgcggctgcggtgctcgcccaagctgaactcgtgcgctgcaagcacggttatgccggcgaacgcttctccataggcttctgggtcggcagtggtggttcgcctaaccggcacgattcgaaaggcgtatccgatatccctatgctcgatgaagtcgccaagaacgaggaggcgcttcgtacggatgatgcaaactacgatgctgcctgcaaggcgtggatcaagctaccacgctgcccattctgcgacagcccgaccggcctgcggcgctttagcgtacagggtggcactctcgcccacgtgtgtactaacccgaagtgccactgcaaccaaggcggcacaaagccactacccttctacatctgcgatgacgacatctacgatctagcaccctcggtgctgttgggcacggtcgataagcttgcactgatcggacactcgaccttcacgattcagcgcatcatgggcatgctcggcgccgcaccatggttcaaccctacaacgcgacggcttcgggtgccgcgcgacgaccaacgcacgcaaggacccgagcgacacagctgcgagagggtcttcccagcatatgaaaacggaaagaagctcttccacgatcccttcccggcgatcctaatccaagacgaggcgcacctgctcgatgagtcgctgggtacctttgcaggattgttcgagtcgacgcttgatacgatgctcggaacgctcgggggctggatgcgaaacgtcgttgcagtcgctcctgacggcaaacggcggcgggcaaaagtagtcgcagcaagcgcgacggtgtcggagcccgagcggcaacttgagcacctctaccaacgccatgcgcctgctctacagttccctcgcccagggccagatcttcatcgttccttctatgccgtgccggatgagcccgagagcgacgaagccgaacgcctcgcactgcccgcggacatggtggaatttcggtcgaagcttgcccgtatctactgcggcttcatgacgaacgggcgtccgcacacaaccacgacggtctcggtgctggcggccttccacctcacaattacggaactctacgatgcgctcgccggagacgacgcagcagcgcaaacggccgcgcgggaacaattgatcgcctatcttgcagattcgcccattcgggcaacacttgaaaccaatcttgcctccgccagcgcctcacagcttgccaccatcgtggacctgcatcgaatcagcctcacctatgtcaccaacaaaaagggtggggatcaggtgatgtcggcagagaccgaagaagtgcgcaaagctcacctagcgcgcggtaaggtgctcgacatgctggtcactcgacttatcactgggtcggtcgaacagggccagatccaggcgaccgtagctgaagcgcaagatcgcgtcgccccggacgagccactgccgccgatcgcaaatgcgttgcgctcagtgatcgccacctcagcgatttcgcacggtgtcgacgtcgaggagttcaactcgatgttcttcgctggtatgccttcagacatcgctgagtacatccaggcctcgtctcgcgtgggacgtacgcatgtgggcttctgcgtgctaatccccacgccgcagcggcgccgcgaccgctacatcatcgaagttttcgataccttccaccggttcctggaacgtatggttcagcctgcagctatcgaccgctgggccacccaggcgatccagcgcgtgatcccgagtctttttcaatcatatatctgcggagtactggcactgcgagagatgatgcaagccgatgatgccggcaagctcacgaaggcaagcaacagcaggattccgcacttcctgccagagtaccggaacgacgaggtggggttcaccaatcgagccgtcgaattcatctgtactgctatcggccttaacgaaaacttcgcaccagctggcggagatttctaccgggaggcaatccacaaacgcgtgcgagcgcttctcgaagacatggcgcgccaggaaaacgagagcgccgcgctgcgggactacttcaaccagttcacaaacagcctacaaaagcccatgacttcgcttcgcgacgtggatcaggctggtcagattcgtcttgcgaaaaagggcgaacggggcggcactctcgaccgcgctcacgtccgtaatgtcatggcttttattcgcaggggatatgccgaatccggggataacgaataa

SEQ ID NO: 334939 - DNA, 2661 bp, Pseudomonas aeruginosa
atggggaaaaccagctggacggtgaagtctgctgcggctgaggccggccaagaagagaaactagaagaaagggaagggtcaccggcaggcaaactgttgcgttacttcgccgacagggacgacgtgcacgcgaagacgctggctccggccatgcggggactcgtctcgctttacttagagacagccgcacacaagagcgcgaacgtcgcgctcgtgtggcctgggcgcctggaagccgtcacgctgatccatgcgcttgcctgcttcgcccgctgggaagccggctacaagcgaggcgtgcgcgccttgcattacccaggcaagcgcaacagcttctaccccctcaaccacgtattcgtaagccgctcgcggctcgtgaaactagccaaccagatcgtcgagtgcgggggccacgatcataacgagactgtaaaggaaagcttccccgcgaaggatgccttcctcttcacggtcaatagcgtaaaagacggtctgcgcgaagacgccatccgcccgaccgtaaatgagttgcttccgcacttctaccaggaagtcggcgatcaaccctggccggactattccccgcgcttctattcacgcatccgctcgaaactacctggacgcaagcacagcaacgcgctcaagaatgacgtattccccgagatgggtgcgcccgagacggcgcccgatgcgatcttctccctgggttaccagctatcagaggacgacatcgtcgatacgctccgaaagctcaagcgcaacggccctccacccgaggtcgtgctgattgatgccagttggaagacaaccaggcctatcaggcactggcgcgagtatgttgtgacgatcctacggctggtgcgcgagatattctgctcagcctgccctggtattctggtgctgaccgacgaacctcgtaacatgacccggttattggcggcactgcgtcacgaattccccgatgctcctccggagcgatggtttaaacctcaaggtttcgtacacccccgtctcgactcaggtctcgcccgagaggacgagccggtcgaggtgcgcgtgcccgaatgcaaccttagagtgcacataacggatttcgaagccgaagagctaatcgaggatttttatcactgcgtcagacggctcgaagagggtggcgctgacgccacgccggtcagaaacgcgcttgccttcatcgcgagggcttcgcggctaccgggtagcctgcacgcgttgatggtggagctacaccgatcaggtaagtcggttggcgtgatcaccgcgaacgattggtcccactttaaggctggcctgatccaattcatcaatgacggtcaggcgcagggggagcagaccaagctgaagggcctgctcagcaagaccgatcggctagtcgaaacctaccgcaaggcgacgccactgggacacgcactggagagcgaacttctcgatgcggctaccaacggacggaagtcagttgtcgcagtaaacggtgcgctccaccaggccgcacttgagcgcttcctcgcgcggcctcggtctgaaagagagacgaccctagcggatataacggtgctcacaaccgatgttcccctcgaaacccgggagattgatgcagatcggatcgtgcataccgacgccagcgcggaagtcatccgaagcctggtttgtggttatccaccttgcaaggaggttgtgctcttgctcacagccccggttgcccgtcaactcaagttcacgcttgcgccattgatgagtatgcccgcattcggggtttttcatgatcgtgtgggcgagattctcggggcaattgaagagcaattcgcagtggccggtcgttcgctgctcgaagacatggatctctggcagccgcgattcaggatctcctcgttcgaggaggacgatcctgaactcaaaggccaaccctcggtactggtagagctcgaagacgatcatttacttttgcgcggtgccaatgcgcttgtctacgtctacgacccggaaagagcctcagacgggcactcgggatttcgtgccataccaatcaccgagctgacgtcgggtcagcaaatcttcgtgatgtcggccgatctacgcgcgctcatcgaagcaacactgcaggaaaaaggcattggcttcggacatctcactgactacgaggcgagcctgcgcaattaccacaaaaccgtcatcgagcggttcaaccgttatttcgacccgacacacggcgccaccccgcagaagcgactgctgctcgaaaagattcagagcatcgacagcgaagtaaccaccgaggtcactaacctgagttattgggtcaaacttgatcactcaccggatactccgttcgaggatcttgtaccgcaggccccgcgcgattatcgagtgtttcgtgcattcagcaaggcgctcgaattcagcgaaccagagatccagatgtactgggactttttgataaggccgcttcgcaccgcccggcgcatgggcggacgctggcttagcgacatctactcacgaatcctgttcgagcccgactccgtcatcgcccacaccgaccttacccgcgataccgtagatgcactaaggtgcaaggcgatggagaacgtgctcactgtctgcagcgtgcacctgcctgcagcgacctccgaggacaaccatggctga

SEQ ID NO: 334940 - DNA, 1812 bp, Pseudomonas aeruginosa
atgcagctgagcctgactgaacgagttcgctttcagcgtttctgccggaccctgtccgcatgcgtagccgaagggcacgcgccggatgaactcgcccgggcgctgctggcgcaatggatgaatcaagctacaccgcagttagcttctccaacctgcgacggggcaatgctgcggataaaggctgtcattcgattcgtggaagagtggctcttgccgcgagacacgcttacaggcgccttctggctgagctcagcctatgcggtgatggtcggcaaggcccagcgcaagcagcaagcgatgtactttacctcgccccacctcgcactacgcctaattgatgctgctgcggaaagcctcctcgagggcccgatcgtcgacccagcctgcggtggggcagcctttcttgccccagcagcggatcgcatcgcacgccggctgcaggagagggggggcaccagcgaagagatcctcgcctacatcgaagcaaatgtgcatggcaccgacatcgacccgctactgtgtgaactctcgacaggcttcttgcgtatggtgctcgccgagcacatcacggccgccggacgcgagccaaatttcatcgtggcggtcgatgacggactcagctcaccccgtctgccggttagtagctatcgcctggtgctctgcaacccgccctaccgcaagatgactgccgccgaagcacagccctaccgggcggagcttggccagttgatgctcggccagcctaacctgtacacgcttttcattgggcgcgcgatgaaacttctgcaggaaggcggttcggcagtttttctgacaccaatgagttttgtgtccggccgctcgttctctgcactgcgccaggccctgagttcaaccggacatgtccggcaggtggatctcattcacgacaaatatggcatcttcctgtcagcagaacaggatgcggcaatcaccgtctggcagaaggatgctggggcggatgctgccacgcaggtaaatctgttggcgactgacggcacttggcagccaaccggggaggtgcgcctacctgcgggagatgcgccatggctccttccgcgcagcacagccgatgcccagctcctgcccttgttcacgtcccgcaaccaagatctgatacctgaacatacgctcactacctacggctatgtgccgaggaccgggcagatcgtcattcatcgcgacaagcgacagcgctatgcgaagcgcctgcatatccgtaaaggtgcttgtgtggtgccgatgatctggcaaagcgacatttccaaagcaggtgtgctgacactcgccgagggcagcaagacgcaggcgcgctacatcgaagtcggctccgactccactgcgcatgtagtgcgccgccccaccgtcgccgtccagcgcgtgacatcggacgatcaggcgcaccggctggtgtgtgcccccgtcccccaggccgcatatgatgaattcggcggagtggttggagaaaaccacgtttgcctcatcgagcaaaacgccgagggcggccgagtcgatgccgaaacactgtgtgcgatcctgcgcacgcggactgtcgaccgcctttttcggatcatgtcgggcgttactaacgtctcggcctatgaacttcagcttctgcccctgcctgacccggatgtggttttggcacaccttgccgcgggcagtgacatcgaatctgcagtacgcgccggcttcggcctagcgcctgtcattgtgagttgcagcaaatggcatgatcagagggaaggaaaccatggggaaaaccagctggacggtgaagtctgctgcggctga

SEQ ID NO: 334941 - DNA, 1509 bp, Pseudomonas aeruginosa
atggcaagagagaacaagtttgcaagcttgggcggtgcaaaagagacgcgccttgggaagctcatggagaccatcgtcgaggacgtgatcacggcgcagacgatgacctttgcaaagtggcatgccctcagcgagaaccccttggttccgcttgccattccggtgtcgcaaggcggtcattatcgggtcacgcaagccggggtggacgcagctcacttgctgtcacagcaaagctggaaatcacgcgaagccctgcgccagacgattgatcgggaggccttcatgaagctctcgttccaggccattggggatacgcttcgcgactgccaatcgcgccttccgacagtatcggacggccagaatgagcatgacgtgctcctcggtgacgatttttatgcggtgctcgtcgacgactaccaggcgcgcttgcagcagctggccgccaacgcgagtcccgacgtcgaccgacatatcccttgccatctgtttcactcggatcaagccgtgccggcattcgccgtggggccggtgcgattcctgccgagaggagaatggctcgattgcttcgtcaaggactcggaggtccgcgagctcatccgccaggtcgaagcccgtgaactggatatggaggagttgaccgctcgatcggctgcggccgaggatggccgctgtgcgtcgcatgcgttagacgttctgcgtacgctgcgccattactgctgggtagcgacgatccggatggaagggcatgagcacgcgcggtctcatttcaaagcgtcggtggtggtgggacttgcgattgacgcaattggactgaggttccaggttgaggatgcgcgacgatttacaaaagccgggcggcagcatctttttgcagaggaccggttcgcgactacgctggacggtcggatattgcgtggggcgagcttacagatgccaggccttggcggacgccccggtgagctggctgccaagatggcgggcgagcaatccttcctagatgccgccgggtgcatcttgcagcattacgtcgatgggcgacgaagcggacatgcgctgcatctagtcgaacgctgggccaatgcgctgtactgggtcggtgaagctcgtcgcgaagcttccgacttcatggccgttgtggactacggttgcgccgccgatggactttccggcgcaggagggggcgccaaggacatgatcgctttcgccgagactgcgctcaagcctgggggggaggccgtgcccgagggcgcgctcacggtggatgccgctgtccacaaggtctatcgagaaggccgcaacaagctcgcccacggcgaaatgtcgggactactggaggatctggcagagccgcgcgcagtcggcgaagcgctgctgtcggcactgttcgatgttgtgacgccggtgctggctgacctcttgcagaacgagccgaactttccgaatcttgatgagaagagggcgtatcgtctgcttgaagcaaaactggcttcgcgcaaagcaagcgcttga

SEQ ID NO: 334942 - DNA, 471 bp, Pseudomonas aeruginosa
atgcagatccgatttcaaggtgaggaagacctggagcaggcgctccacgaaattcatcgacgagcctgcgagtatgaggggcccttgatgcaccaattcatggagttggccagactcagtgcaccggtcgagccggatgaaccccttagagaggccccctgggatggtgcgccacgtgatggtgtcgcggcagatgccaagcgtcgggagatcaaagagcgatttgaagaagccctgtcgttgttgatggtcctcgctttcccggtgaacagcggaaccgaacaagccgtccgtcatgaactcaatcaggcactggggcgcgagcagcagatcgattccctacagatacgcgcagggaaccgaaaaatcagcctacgacgtaatctggggcgacgtccgacaaagcagcaagtcgcactgcgaaatgcattgctcgagtttctcccccaacaaaccctggaagacctatga

SEQ ID NO: 334943 - DNA, 756 bp, Pseudomonas aeruginosa
atgagtacgacatctgccgcagcgacaggcgccaagaaaaagaagaggcagccagcgtcaccggacctggttaaagccgtaggtgcgctcttcgacattgcggcaaaggctccgtcgccccttcaattgcaagcaatgacccgagacaagctgtacgaaatgctggtcctggctcgactgctgcgagcctttcggcgcgcgcatcccaaagggtcaatcatccaccagccaccgtctaagggaggtaagccgtccgaggtaatcgtggcaagcaagcccgccctggccgatcgcaagcggttctcgcattttgatctgcgcgatgccgctggtaaccacctgggtgaagcatggacctcggtcgagtttgagtcattgagctgggattgttgcggcgggactcccggcaaggcccctcgcgaggctcgacacgaactcgacgtctgcgtccttgagcccagttcgggtgagcggcccgcacactcgcaggtctacgcaggcatcagttgcaaggacgtgcgtatgtcatcgaaggagaatgtgcgcgaagcactggggctacggcgcgagactgcgctgcttcggcacacaatcccaagccgtaccccgtggctggtagagctggttcccgcagcccccagttcaccgatcctcttggtgagctccgacgtagggatcaggaaatacgcttcaccagttgacgaaatgggggtctacatccgattcgtgcgccgcccttgggaagccgaagtatga

SEQ ID NO: 334944 - DNA, 987 bp, Pseudomonas aeruginosa
atgcagagtgaggcagaaacattcaacttccggatctcgttcaaactttccggcagcaacattaatgtggatcaagagagggttcgaatttttgagggcaaggaaattttcctcaccgcctcgaccaagggggctttgatctcccactccaaccagttagccatagagggcgaaggattcgagacctaccgtgccgctggtatcgagatgctcaagctcgagcaggcgatgaagctggcggcgcttgagcagcatttcggcatttgtactgccaacagtgggtatggcgagtatccctgcaatgttgtgctgagagagatggaacacaactatattctgaaaggtattatttttaagcaactcgcttctcgccgggcctaccctgcgagcatggtagtgtgggacccagaaccttctcaggaattcgagagcattgattattcaaagctttctgcagggatctcgaaatactacgcaggctactatgtggcattcccgatgtcatcggtcatcgacatactgggcgcaattcactttgaatactcaagcatggtgcggttaattctttcgatgacagtgattgaaatgctggctggatcgggaggacgcagaagtgatgaagagcaagcggttatcgatgaactcgtgcagaaaattcaggaatcttcgctgagtaaggaccagaaagggtccttggcacaggccgtgggtgggtgtaaaaaatactccattggaaagtcatgcagaaaatttgtcagtcagaaactcggcaaggaccaggcgaaggctttcaatgacctatataactaccgttcaaggctggtccattcgggcgaaatcgatgagccactcatgagcgaagaagagcgtgagacgcagatctacaaggctgctggtgaggcatatgttatggcgtccaagttggttgatgttgttatggagtcgcataggaacaccggagagccggagtttgccgaggatgactaa

SEQ ID NO: 334945 - DNA, 1179 bp, Pseudomonas aeruginosa
gtgctattgccgatcctcctgctggccgccgccggcttcaccatcctgaccaccgagttcgtcatcgtcggcctgctcccggcacttgccgcagacctccaggtcagcgtcgcccaggccggcctgctggtcagcctgttcgccttcagcgtcgccgccttcggtccgttcctcaccgccgcgctggcgggcgtcgaacgcaagcggctgttcgtcgcctgcctgctgctgttcgccgcggccaatgcgctggccgccgtggccggcgatatctggacgatggccgtggcgcgcttcgtcccggccctggcgctcccggtgttctgggccatggccagcgaaaccgccgcgcacctggccggcccctcgcgcgaagggcgcgccgtggcgctggtgttcttcggcatcgtcgccgccaccgtgcttggcattcccatcggcacgctgatcgccgacgcctggggttggcgcctggcattcgccgcactcgccgcgctggccctggccaaggcgctgctgctggccgcctggctgccgcgcattcccggacggccgggcatctcgctgcgcagccaggcgagcgtgttgcgccaaccgctggtgctcggccacctgttgctgtcgctgctggtcttcaccggcatgttcaccccctacacctacctggccgacatcctccagcgcctggccggcttcagcggttcgctggtcggctggacgctgatgggcttcggcgcggtaggcctgctcggcaactggctcggcgggcgcctggtggatcgcagcccgctgggcgcaaccctgctgttcgtcctgctgatggcgctgggcatgctcgccctggtgccgaccctcggcaacgcctggctgctcgccgccaccctggcgacctggggcgtggcccaggcagcactgttcatcgtcggccaggtgcgggtgatgaagtccgcgccgcgggccccggcgttcgccgcctcgctgaacatctccgcctgcaacgccgggatcggcatcggcgccctcgccggcagccgggtgatcgacggcagcggcctggcgccgctcggcgaggtcggcgcgctggtctgcctggcggcgatggccgtggccctgctgctgatgctggcgccacgccaagctgccaccgagccgtccctcggcggccaaatccctcactga

SEQ ID NO: 334946 - DNA, 384 bp, Pseudomonas aeruginosa
atgcacgacgacgagccggaagcgatgaccctttacctcgccgaagccctgcagcgacgcggcatcgcctacctgcacctggccgagtgggaatggagcggcggcccggcctacccgcaaggcttccgcgagcgcctgcgcgaacgcttccgcgcgccgctgatcgtctgcggcaactacgacgccgagcgcgccgaagcgatactccaggccggactggccgacgcggtggcgatcggccggccgttcatcgccaaccccgacctggtcgagcggatccgtctcggcgcgccgctggccgaggccaaccaggcgcggttctacggtggcgacgctgccggctacaccgattacccgaccctcggccagtccgctacggcctga

SEQ ID NO: 334947 - DNA, 855 bp, Pseudomonas aeruginosa
atgagctaccagcccggcatcgatacggaattgctccgcaccttcgtcgccatcgccgagcacggtggtttcacccgcgccgcggaggcggtgaatcgcacccagtcggcggtcagcatgcagatgaagcggctcgaggaggacgtcctgcagcgctcgctgttcgagcgcgacggaaggcagacccgcctcaccgccgaaggccaggtgctgctcggctatgcccggcggatcctcaagctgcacggcgaggtgttcaacaccctgcgccgcccgcacatggtcggctcggtgcgcatcggcaccccggacgactacgtgatgcgcttcctcccggcgatcctgtcgcgcttcgccgaagcctatccgctggtgcaggtcgaggtgcattgcgacacctcgctcaacctgctggcgcgcaacgacctcgacctgtccatcgtcacccgcgagccgggcaccgagatcggccagttgctgcgccaggagcccttcgtctggatggccgccgagggcttctgcccccacgaccagcggccgatcccgctggccatgttcaacaccacctgcttttgccgggcctgggcctgcaacgccctggaggcggcggaactggactaccgcatcgcctacagcagccccagcctgtcggcgctgttcgcggtggtcagcgccggcctcgccgtgaccgtgcaactgcgcagcctgctcaccggcaacctgcgcatcctcgacgagagcgagggcctgcccgccctgccctcggccagcatcatgctgatgcgcaacccgcacagccagtcaccggtcaccgagaagctcgccgaatacatcggcgagggcttccgtctctga

SEQ ID NO: 334948 - DNA, 1209 bp, Pseudomonas aeruginosa
atgagtctttcgctttccctcgccgaagcccgccgcctggccctggccgcgcagggcttcgacggccggcggacgcgccgcagcgtgcagcggcggcatctgcgcgaaatgctcgcgcgccttggcctgttgcagatcgattcggtgaatgcgctggtgcgctcgcactacctgccgctgttttcccgtctcggtccctactccatgacgctgctcgacgaggcggcctggagtgtcggccgtcaccgccagttgttcgaatactgggggcacgaggcctcgctgctgccgctggaacactacccgttgatgcgctggcggatgcgccaggccgccgacggccagggcatctaccagcaactggcacgtttcggccgggaacagcagccactgatccgccaggtgttgcaggcggtgcgcgagcaaggtgcgctaggtgccggcagcctgagcacgcggcaggagcgggccggtccctggtgggactggagcgcggaaaagcatgcgctggaatggctgttcgccgccggcgagctgacggtggccggacggcgcggcttcgagcggctctatgacctgccggagcgggtgtttcccgcggaattgctggcgcgccccgagctttcggaggcacaggcccagcgcgagctgttgcggatggcggcgagcgccctgggcgtggccaccgaaaaggacctgcgcgactactatcggctgagcccggcgcagagccgcgcgcgcctcgccgaactggtggaggctggcgagctgctgccggtccgggtcgagggctggagccagccggcctactgccccggcgaaccgcaggtgccgcggcggctaggcgccagtgccttgctctcgcccttcgactcgttggtctgggagcgggcgcgggccgagcgcctgttcgatttccgctatcgcctggagatctacacgccgaaggaaaaacgcgtgtacggctactacgtgctgccattcctgcacaacggccgtctggtcggccgcgtcgacctccgcgccgagcgggcgcgggagcgcctggcggtgcatgcgctgcatgccgaggtgaacggcatggacgatgccgccctgcacgagctggccgagcaactgcgcagcatggccgcctggctgggcctggcgacggtggtgatcgaggggcgcggggagttggcggtacgcttgcgcggggtgctgctctag

SEQ ID NO: 334949 - DNA, 747 bp, Pseudomonas aeruginosa
gtgagcgaagaacgtctgctggtcgaggagcgcgacgaatacggggtcatccgggtcatcgagtccggcgactatcgcttcctcgagttcggcgacggtgtcgagcagagctgcgtgttcatgcccgatccggcctggctggaatacgactacacccgcgccatgctgctcggcgggctctgccattcgcaaccgcgtcgcgcgttgttcctcggtttcggtgccggcagcctgacccaggcctgcctgcgccacctgccgctggaggaggccgaggccatcgagctgcgcccggcgattccgcgcctggcccgcgagcatctggggctgcgcgacgacccgcgcctgcgattgcgcatcggcgacgcactggagagcctgggcgaatgcgcggaggccgacctgatcttcctcgacctctataccgataccggcccgtcggccgcgcacctggcctggaatttcctcggtgcctgccaggagcgcctcgccgaggatggctggctggtgatcaaccagtggagcggcaccgatggcaagccgctgggcgcgccgctgctgcgcgggcgctatcaccatcattactgggagtgtccggtggccgagggcaacgtggtgatgctggtgccggcgaacctggccctcgaactcgaccaggaagccctgcggacgcgtgccgcggcgctggagccgcaactcggctattcgttgcagggctatatcgacagcctgcgcccggcccagtag

SEQ ID NO: 334950 - DNA, 855 bp, Pseudomonas aeruginosa
atggacatcccgattccagacgtctataccgacgttgcccgccccccgccaggaaaccgccgcatgaacgacaccctcccaggacgcatcagccgcgaacggcgcggccacctgctgctgctcggcctcgaccgcgtggccaagcgcaacgccttcgacctgccgatgctcgacgacctggtcgccgcgctcggcgaatacgaggccgacgaccagttgcgctgtgccctgctcttcgcccacggcgagcatttcaccgccgggctggacctggccaatgtcggcgagaccttccgccagggctggaaactccccgaaggcgccgtcgatccctggggcaccttcggcggccggcgtccaagcaagccgctggtggtggccgtgcaaggctactgctacaccatcggcatcgaactgatgctggcggccgacatgaacctctgcgccagcaacgcgcgcttcgcccagctcgaagtgcagcgcggaatcctcccgttcggtggcgcgacactgcgcatgcaccaggtcgccggctggggcaacgccatgcgctggctgctcaccggcgacgaattcgacgcccacgaagcctatcgtctcggcctggtgcaggaagtcaccgccccggaggacctcctcgaccacgccatcgccctcgccgaacgggtcgcggcccaggcgccgctgggcgtgcgcgccaccctcggctcggcgcgccaggccctgctggaaggcgaagcggtcgccgccgctgcgttgccggaagccgccaggcgcctgctcgacagcgaggacgccaaggaaggcctgcgcgctctccaggaacgccgcccgggacgcttcgaaggacgctag

SEQ ID NO: 334951 - DNA, 972 bp, Pseudomonas aeruginosa
atggacctgctgcaaggtatccggaccttcgtccgcgtggtggagcacggcagcttcacccaggccgcccaagcgctggggacctctccggcgaccgtttcgcgccaggtcgccgggctcgaacaggcgctctcggcgcgcctgctgcaacgcaatacgcgcagcgtcgtggtgacggaaagcggtctgcgctattacgagcattgcaagcagatcctgcgcacggtcgccgccgccgcggcggacgtcgaagacagccagtcccacgccagcggtcgcctgcgcctccacgcggtgaccgaactgggcctcgagcacctgatgccgctactggtggactacctggacggccatccggacgtctccgtcgacctcacgctggcccagggcaccccggccctgctcgaggaaggcctggacgtgctgatcaccctcggccgaaccttgccggactcgaccctggtcgcccgcgatctcggccaggtgttcagcgtggtctgtgccgcgccggaatacctggcacggcatggcgtgccacgcacgccggaggacctgctgcggcatcgctgcctgaacgtggccgcgccgtcctgcccgcagggctgggccttcgtcggcgaacgcggcgaaacgctgctcgatctcgacgaggcgctcaaggtcaaccttcccgaggccgcctgcgccgccgccgcggccgggctcggcgtctgcctgctgcccggcttcgtcgccgcccgcgcgctgcaggaaggcagcctgttgcggctactgccgggccatcgactgcatgtccgcgaggtgttcgtgctgtactcctcgaggcgctacctggacgccaagatccgcacctgggtggacttcctcagggaacgcctgcccctggcgttcgagcatgaccgggcgatcctcgacgatcggcgctactgggcggaaagcccaaccggcgtagcgcgcgagaccgcgacctaa

SEQ ID NO: 334952 - DNA, 447 bp, Pseudomonas aeruginosa
atgttccatacgctcctggtcgccatcgacggcggcccgcagacccgtcgcattgccgagctggcgcggcaggccgccgcgccgggcgcgcgggtccacctgctgtgcgcggtggacgccggctatgcgttgccgggccggccgacgctgctcgactatccgcccgccgcgcacgagtgcgaagaggcccggcaggtgctcgacgaggcttgtgcgctgctagccgggtgcgagctggaggtacgggccgagctgcgtgccggcgacccggtgcaggtgatcctgggcgaggcgcggcgcctgggctgcgagctgatcgtcatcggccatcggcacctgggacggctggagcgcctgctcgatccttcggtcggcgaccgggtgatccgcgaggcgccgtgtccggtgctggtggaagtgcgcgagggagatgcgcaggggagttga

SEQ ID NO: 334953 - DNA, 306 bp, Pseudomonas aeruginosa
gtgattcggtactactgcatccaggcccgcgacaagacaacattcccctacggcaaggccggtccgatccgcaccctggttgaggcaagccgggccctgcgcatgctgcggcgcgagcaccccggccaggcgctggaaatctacgagtgcgtctggttcctcggcgtgggcgagttggagtgggatgagcgattcgcccccaagcgaggtaagcgcaaagccccggcgcccaggcgcgcatccagagcggcggttcagactcccgccctctcccccggcctgaccagcaccgcccaggaggcctaa

SEQ ID NO: 334954 - DNA, 438 bp, Pseudomonas aeruginosa
atgaccaatgtccaacagcgccgcgaggcgctgacgggatcggcttgcccggagaacgccgcacagccggtcgaactgctctacgtccatcaccccgaggtcagccgtgcgctgctcggccccttcctctcccgtgccgatgccgagtgcggtcggaaactgctgcgcagcgctggcgccgttatcagatccgccctggtcgatgaggtcagccagtccactcgctggcatgcctggaacaacggtgaggtctgccgcaccttctgccagaggcaagaaagggtgcctgcggcatccccatcgccgagacagggtcgggatgctgtgacggcgaaagcgcctgaatcgccagccccgaagaggcggcgaagcaacggcaggttcctgaaaagcggaggaaccaattgccgcccggatgaacacgggaacgcgcaatga

SEQ ID NO: 334955 - DNA, 495 bp, Pseudomonas aeruginosa
atgccaccccggcaccgtaaacaatgctttggcgcgctcctggagacagtcacccagcagcgccctagccaggttgcgtccggagctctcgtggaactggccaagcagctatggtacgaggagcgcgatctggtacccgtgctgcagcgcgaagtggcggccaagctgcacgagccggagcaaaggctgcgcgccctttatctggtggacctgctacgtcgcttcccctgcgttcccgcagagaaagcggctcgcctgaaaggtttcgtcagccgttggtcgaacctgaagccagttgagcgttcgtcgcgagcgactcaactcgtcgctcgctacgaactcgacaagctggcctatgagtggggcctggaggaggacgttagcaagcagatgcaggatgtgctggctttccaaacccgccattacgccgccacccagggtgtaagaacgggctactccgagtctgcaggcaccacgccagcctctgctcactaa

SEQ ID NO: 334956 - DNA, 618 bp, Pseudomonas aeruginosa
atgaaggcgaatcctatccagttgaccacgccgctgggccaggccatcggcaagctgttcgcgcgggcgctgccgctgctgaagggcaatccgccaggctcgctcaagatctacatcttcggtgggtgtgcggtgcatttgctcacccacgcgcgtggcagtgcggatatcgatgccgagatcgaagcagcccgcgtgctgcgcaaagacgagatcatgaccgtctacatgccacctgaaggctatgaggacaccgatgggcgtgacctccaagtctacctggatcagaactacaccaatgccctggggccgctgcatgaggactaccgcgagcgcgccatccctctggagggtttcgagggcgagcaacccctgcacatctttgtcgcggccggcgtggatctggccatctccaagctcggccgctttacggaaaacgatcaagctgatatcgaacagctgatcgaatgcggccgtgtcgatgtcggccagtttgttacactggcaacagatgccatcaattacgcggtaggcaaccaacgcgccatgcgaggctgtctgcacatggtcaccgcgaaatacttggaggatcggcgagatgccaccccggcaccgtaa

SEQ ID NO: 334957 - DNA, 1005 bp, Pseudomonas aeruginosa
atggcccgcggtggcatcaacaaggcactggttcagaaggcgaggcaggcgatcctggcgcgcggcgagcgcccgagcatcgatgccgtccgtattgagctgggcaataccggctcgaaaaccaccatccaccgctacctgaaagagctggaagcagccgaacatggccgggtggccgctccggcactgctcagtgagcaactggcgaatctcgtcgctcagctggcggctcagttgcaggatgaagcccgcgcggccgtggcccaggaacgcgagcaattggtccgggagcgccgcggttaccacgaccagattcaccagttggaaagccgcagccagcagcttgaaacgtcctgcgccggtctcaccgagcagttgcaggtcgcccatcaggggttgcagaaggagcagcagctacgccagctagcagaagtcgaggtggcgcggctacagcaggcggagcgcgaccaggcagtccgcctgcaggaccgcgaggggcagatccgttcgctggaggagaagcatcagcatgcccgtgatgctctggaacactatcgccaggccagcaaggaacagcgcgagcaggaacagcgccggcacgaaacccaggtacaacaactgcaactagagctgcggcagttgcagcagaccctgatcgtcaagcaggacgaactgacccaattgaaccgcgacaacgcccggctgctcgccgaggcgcggcaggtgcagaaagagcagcatgcgcagcaacagttcctggcgcagaagacccaggcgttggaaaccgcccggagcgcgctgaccgatgttgagcgcacaaatgaagccctggaacagcgttgccgcatcttgcagggcgaactcgcccaactgggcgaggccgccacattccaagcccaacagacgcaaagcctgcaggagcggttgatcgaagccaccgcgcaactgaaactgctcggacatgcgccactcagggatggcggtggtggtacgccagatgcctga

SEQ ID NO: 334958 - DNA, 972 bp, Pseudomonas aeruginosa
atgaaggacgttgagcgatacctacaggctggtacgcgggagaacacccggcgcagctaccagtccgccgtcgagcacttcgaggtgaactggggcggctttctgccggccaccagcgacagcatcgtccgctacctggtggactacgccgacagcctcagcctcaacacgctcaaacaacgcctcgccgccctggcgcagtggcacgtcagtcagggctttcccgacccgaccaagacacccatggtgcgccaggtcctcaaaggcgtccgcacgttgcatccggtccaggtcaagcaggcggcgccgctgcaattgctgcacctagaacaggccatcctttggctggagcaggaagcggcgcgcacttaccaagctggagagttggcgggctacctgcgctgccgacgcgatgttgcgctgctgctgatcggcttctggcgtggttttcgtagcgatgagctgtgccgcctgcaggtcgaacacatccaagcagaagtcggtgccggcatgacgctgttcctgccctggagcaaaggtgatcgggacaaccacggcaccacccactacgcgccggcgttgaaacgcctctgccccgtgcaggcctacctagattggatcagtgcggcgggaattgttcggggggcagtgttccgccgactggatcgctggggccacttgaatgacgaagccttgaatcctggcagcctgatcaacctgctgcgccagattctgcagcgggccggcgtgccggccgaggcgtacaccagccattcactgcggcgcgggttcgccacttgggccacggccaacggctgggatatcaaggcgctgatgacctatgtgggctggaaggacatcaagtccgcgatgcgctacatcgacccggccatctcctttggcggtctcgcggcgaggcccgcgctcgaatcttctgctggcactttggcgaagctgccagcccctatttaa

SEQ ID NO: 334959 - DNA, 774 bp, Pseudomonas aeruginosa
atgagccagcccccagccctgagtatccaggacctcagcgtgcactatggcgagcatggtgcgctgcttggcgcttccctcgacgtggcccctggtgagctgatggccgtggtcggccccagcggctgtggtaagagcagcctactgtcggcggtcaaccgcatgagcgacctggtacctgaagcccgggtcagcggccgggtgctgatcgacggccaggatgtgttgggccacaaggtggatgtgcaacggctgcgccgacaggtcggcatggtgttccagcaacccaacccatttcctctgagcattgccgaaaatgtcctgttcgccctgcgcgaacacggcgtgcgcgacaaagccgagttgcacgggcgcatggagcaggcgctgcacgccaccggattgtggagcgaggtatgtgatcggctggacaagcctgccttgggcttgtctgggggccagcagcagcgcctgtgctttgcccgcgccctggctctggagcccaacgttctgctattggacgagccgtgcagcgccctcgaccccatcgccagcgccacggttgaagggctcattgacagcctaaagggccgctacaccctgttgatggtgacccacaatctggcgcaggcgcgacgcctggccgatcatgttgcggtgtgctgggtgcgtgacggctgtggctgcgtgctggacagcggtcctgtctgcgaactcttcgaaggagcccgggaccctctcgctcaccgttacctgaacggcatgttgtgttga

SEQ ID NO: 334960 - DNA, 831 bp, Pseudomonas aeruginosa
atgaatcgtcaggagctatggcgcgggcgcgcgctgagcatgttggcactggtgctgatgctggctcccatgagcatactcctgacgatcttcggcgacggcctgagcgttctggactgggccttcttggtaagcgagcccgagcaggcaggacgtagcggcggtattgggccgatcgtattgtcgacggcttgggtactgctgatctgcatggggctggtggtgccgttgggtctgggtacggccttgtccctggtggaacaggtgtgtccggaaagtcgtcttaacttgacgcttcagtgggcactggatggcctgggcgccgtgccgtcggtggtgttcggtctgttcggccatcgcctgttcgtggtggaactgggctggggctactccttgctagccggtggctgcaccctggcctgtatggtgttaccgctgttcattcgcggctgtgagcaggccttgcgcgattgtccacacagctaccggcaggccgccgcggggctggcgatttcaagggtcggctacctgcgccgcatcctgttgccgtttgccgcaccgggtattgccgcagccctcgtgctgagcgccggtcgcgccttggcggaaaccgccgtgttgctgtttaccgccggctacgtgatgcgctggccggaaagtctgttcgattccggtcgcaccttggccgtgcatatctacgacctggccatgaacgtctccggcggcagcccggcctcggcggctaccgccttggtgttgctcggcgtcgctctgatcatccaactggccgcctggtggatcgccaagcggccctcagccttcgcgaggtaa

SEQ ID NO: 334961 - DNA, 813 bp, Pseudomonas aeruginosa
gtgttgcaggcgagtagtctcgcctgcgcactcagtgcagccgccgtgctgctgttggtgctggcgttcctcacccaagccagttggccgatgttgcagcatgcgggcgatctgctggacagcacctggcggccggcacgcggccaatttgggttgcagacaatgctgggggcctccctgctcagcagcttgttggcgctgctgctggcggtgccgacaggcctgctggtgaatgtctggttgattttctatgccccgactgtcgtggcgaaaggatatgcggccatgctcggattgatggccagcatcccctcggttgtctatgggctctgggggttggtggtactggtgcctttgctcaacgactgggtgccaccaggtgccagccttctggcggcgggcattgttctggggctgatgatcctgccgttgctgatggtgcaggcagatgttgcgttgcgcgaaagcgcccatcgccatctttctgcggcgttgtgtttgggcgtgtcccgttgggcggcgattcgcggggtggtgctgcgggctgcctggccacgcttgtggccctccattctgctgcaactggggcgtgcgctgggtgaaaccatggcggtgctgatggtcgcagggaatgtcgtgcagtggcccggatcgatcttcgatcccgtacgaaccctgacggccaatatcgccctggaaatgagctatgccacggggccgcacctgcaggcgctctatgtcagtggctggctgctcctggtcatggcattgctattgatgggcctcgcgcgcatctatgggagacgctcatga

SEQ ID NO: 334962 - DNA, 816 bp, Pseudomonas aeruginosa
atgagtattcgaggactgatcgccctgacgtgttccgcgatgcttttggtcgggtgtgcacaagacgagaagcaaaccatcacggtttcgggctccagcacgatcgcaccgttgatggccgagatcggcaagcgctttgaggtgcagcatcctggggtgcatgtcgacgtgcaatccggaggaagttcgcgaggcatccaggatgtccgcagtgggctggcttccattggcatggtctcgcgcgccctcaatcccgatgagggagatcttaaacctttcatcattgcccgagacggcatcgccctgatcgtgcatgcgagtaacccactgacatcgatcaagagcgagcaagtcgtcggcctttacaccggtcagttgagcaattggcaagcggtgggaggaaaccccggccaggtggtgaaggtgcataaagccgaaggccgctcaaccttggagctgttcctcaagcacttccacctcgataacgcagcggtacaagcggacctggtcatcggtgagaaccagcagggcatcaaatctgttgcaggcaatcccctggccattggttacgtatcgattggcacggcggagtatgaagccaggcaaggcgccccaatcaagctgctcgccttggatggacaagcggcctcaacggaggcgctattggccggaagctacccactgagccgtgatttgaacctggtggtgcggggccagccggacgccaatgtgcgtgcgctgttggcctttgcccagtcccgcgaggtggcagaccttgttgagcaatacgcctttgtccctgcgccaaggagctga

SEQ ID NO: 334963 - DNA, 1041 bp, Pseudomonas aeruginosa
atgcgtgaatcggtacagaactattacggcaagatcctgcagaacaccggggatctcaaaacgagcgcctgctgtgacgtatccagcacgcccacctggctcaagtcgctgctggccaaagtccatccggaagtgagtgcgcgttactacggttgcggcctggttgcaccggcatcactggagggctgccgcatccttgacctgggcagtggctcggggcgtgactgctacgtgttggctcaactggccggaccgcacggctccgtgctgggcgtggacatgacggccgagcagttggcggtggccaacgcccacctggcctatcacgccgaacgctttggcttcgccaacgtggccttccgtcagggctatatcgaagacctcgccgccttggagctggccgatggcagtttcgatgtgattgtctccaactgcgtgatcaacctgtcgccggataaggacagcgtcctccgcgaagcccatcgtctgctcaagcccggcggtgagctgtacttctccgatgtctacgccgaccgccgcctcgccgatgcactgcgccaagacgaggtgctctatggcgaatgcctggggggcgccctgtattggaacgatttcgagcacctggcgcggcgccatggtttcagcgatccgcggttggtggaggatcgtccgatcagcatcgacgatccagcgctggcggagaaactgggtgaggcgcgcttcttctcggcgacctaccgcctgttcaagctggacggcctggagccggcctgcgaggactacggtcaggcggtgatctaccggggcactattcccggtgcggcttatgccttcactctggacaagcatcaccggattgagaccggccgcgtcttcccggtgtgtggcaacacctggcgcatgctcagggacacccgatttgcgccgcactttcagttcattggcgacttcagccggcatttcggcctgttcgagggctgtggtggcgggcttccattcgatcaacctatcgccgcagtcacggcttccagttgctgctga

SEQ ID NO: 334964 - DNA, 408 bp, Pseudomonas aeruginosa
atgaaaacctggaccctcgttctactgcgcatctcgctgggctggctcctggtcatctggggagccgacaaggtgttcaatgtcgagcacggcatggccgtagccaatacgttttacttcgggtttctcgctgtcgaaagcgcccttcgagtcgccggtgccctgcagatactggtgggtctggcgatcgttgtggggtttgcccgtcgctgggtgtacccaatccagatactcctcaatggcacttccctgctggcggtaatgccgtcggtaatcgatccctggagctggctgttcgaggggagcaatccgctgttctacccatcgttgatcatctttgctggcagtctgctgctgattgcgtatcgagatgaagaccgcttcgtgctcgacaggacgcgggtgtaa

SEQ ID NO: 334965 - DNA, 1080 bp, Pseudomonas aeruginosa
gtgagccgcgagttcgacctgttactggcgggcgccgggcatgcccatctgggcgtgttgcgccggtggttgtccgagccgcggccaccagggcgcattgccctgatcagtgacggcccctatgcctggtactccggcatgctgccggggttactggccgggcgttacctggccaaccaatgtcgaatcccgctacagccgctgtctgccggcgcggacgtcgagttgctgcagggtcgcctggtcggcctcgctcccgacagcaacacgctgacactgagcgacgggcgacagctatcggcggcttggctgtccatcaacctcggttcgcagccgaaaccgcccactgtgcgggactgccaactggacctgctgccggtcaaacccttcgaggcgtttctcaccggttggcaagagtggtgcaagtcccctcaaccgcttgcgattctgggcgggggagctgccggcgtcgagctggctttggcacttgcaccccaggtgcccgcgctgacgttgatcagcgcggccacgatccttgccgggcatcctccggccttgagggagcgggccgttcgacgcttggcccaggcgggcgtcacggtacgggagggcgcggtggtggaaagcatccacggccatgacctgatgatcggcaggcgctccatctggcacggccgacgcgtcatcgtggccactggagccagtcccttgccctggttatgcgcggccggtctcgcctgcgacgagcaaggcttcatccgtgtcagcgatacgctgcagagtctgtcccatccgcacattctcgtggccggcgattgtgccagcctggtgaatactccccgcagcggggtgtatgcggtgcgccagggccctattctcgccgcgaacctggctgccgcgctgaatggtctgcccctgagtagtttcgtgccgcaacgccgtgctcttgccctgctggccgacgggcacggcggcgcattgatgagctgggcgggtatgacggccgagggaggcttgttgggctggtggaaggaccgccttgaccgtcgattcatccgtcggcacctcgccaagccctga

SEQ ID NO: 334966 - DNA, 2193 bp, Pseudomonas aeruginosa
atggacaaacgcaaagcgatcttgctggccttcatcctgctgctcgtcgcgagctttttcgtgttcgatctggggcagtacctgaatctggccaacctcaaggcgcagcaggcagcactccatgcccaggtcatggccagcccctggctggcaagtgggctgttcttcctgctttatgtggtggttactgcgctgtccctgccgggcgctgcgttgatgacgctggtcggcggcgccttgttcggcctggtggggggcaccttactggtgtccttcgcttcgaccctcggcgccactctggccatgctgagcagtcgctttttgctacgagactgggtgcagacgcgtttcggcagccgcttagccgggatcgatcagggcatcgcgcgcgagggggcgtcctatttgttcgccctgcgcctggtgccggtctttcccttcttcctgatcaacctggccatggggctgaccaaattgccgacgcgcatgttctggtgggtcagccagctgggcatgctgcccggcaccctggtctacgtgaatgccggccgcgagttggggcagctggaatccttgcgtggcattctctcgcccggattactgggtgcctttgtgctgctgggcctgctgccgatcctatcgcgcaaggggctggactgggtcaaggcgcgcaaggtctacgccggctgggtcaagcccaagcgcttcgaccgcaacctggtggttatcggggccggctcgggtggcctggtcagcgcctatattgccgcagcggtgaaggccaaggtcaccctggtcgagaagcacaagatgggcggcgactgtctgaataccggctgtgtgccgtccaaggcattgatccgttctgccaagctggccaatgagctgaaaaaggctgagcagttgggcttcaaacaggtccgtggcgaagtggacttcgccgcggtgatgcaacgggtacaacgggtcgtggcggatgtcgagccgcatgattcggtcgagcgctatatcggactgggtgtcgacgtaatcgagggagaggcctgtattacgtcgccctggtcggtcgaagtaaacggaaagaggctcacgacccgttccatcgtcatcgccaccggcgcgcagccgcaggtgcccgatattcccgggattgagtgggtggcgccgttgacctcggatacggtctgggcgctgcgtgagcaacccaggcgcctcctggtgcttggcggtggtcccgtgggctgcgaactggcccaggcgttccaccggctgggcagcgccgtcgtgctagtacaaaggaatcagcgtctgctgccccgcgaggatgtcgaggccagtgaggcggtagcggccagtctgcgcgcggagggcgtcgatctgaggttgcagcacaaggccctgcgtttcgaggtggtggacgggcaacgccagctggtgtgcgtcaatctggcggacaactgcgaggtgaccgtcgcctttgaccaggtgctgctggccttgggacgggtggcgaacgtcaagggcttcggtgccgaggatctggggctggaggtccgcgcagatgggaccttggcgagcaatgagttcctcgccacgcgctaccccaatatcttcgcagtcggagatgtcaccggcccctaccagttcactcacgtttcggcgcatcaagcctggtatgccgcggtcaatggcctgttcggcggcttgaagcgcttcaaggtggattaccgggtgattccgtgggccaccttcaccgatcccgaggtggcccgggtgggcctcaacgaactggaggccaaggcccagggcattgcctatgaggttacccgcttcggcctcgacgaccttgaccgagccatcgccgacgaggccgctcatggttacatcaaggttctgaccgaaccgggcaaggatcgcattctcggcgtgaccatcgttggtgtgcatgccggcgacctgatcgccgagtatgtcgcggccatgaagcacggttttggcctgaacaagatccttggcaccatccacatctatccgaccttggccgaagcgaacaagtatgccgccggcgagtggaaacgcgcgcatgcccccgctagggtgctgcgctggctggcccgtttccatcaatggcgcttgggcggcggcgagatcgactcggcaccggcgcttaaggcccgcgagaggctgtcgtga

SEQ ID NO: 334967 - DNA, 981 bp, Pseudomonas aeruginosa
atgcatgccaccttacctctgctcaatgccctgagcttcccgatgatccgccgcggccatctcgaggcgctgcaggtcaaccttacctaccggtgcaaccagcgctgtctgcattgccatgtcaatgccggacccacacgcaaagaagccatgaccgacgagagtctggccttgctgcaccaggtgatcgatgctcatccagtgcaaacgcttgacctgacgggcggcgcgccggaaatgcatccacggttccgcgagatcgtcgctcatgcgcggcgcgagggcctgcgcgtcatcgatcgttgcaacctgacgatccttggagaacctggctatgaggacctggccgactttctggccgagcaaagcgtggaagtcacggcgtcgctgccttgctactcccgtgagaacgtcgacaagcagcgcggcaatggcgtgttcgacgccagcatcgagggcctgaagaagttgaaccagtccggctacggcattgacgatagcgggctgatcctgaacctggtgtacaacccgcaaggccccagtctgcccccccctcaagccaagctggaggccgactacaaagcgcatctggccgaggacttcggcattcacttcaaccatctgctgaccatcaccaaccagcctattgcccgatttggcagcaccttggtgagcaaggggcagttcaacagttacatgcaactgctgcgcgacagctatcgaccggagaacctcgctgccgtgatgtgccgcagcctggtcagtgtggactggcaaggctatctctacgactgtgacttcaaccagatgctcgacctgccgatgaccttgccggagttgattggccgcgatcgaccgcacctgcgcgacctgctcaagtccaccagcctggaaggcaatcccatcgtcacccgcgaccactgctatgcctgcactgccgggcagggttccagctgcggcggcgcgctggataaccgctaa

SEQ ID NO: 334968 - DNA, 531 bp, Pseudomonas aeruginosa
atggagcttttctggagcaagggttatgaggccaccagcctgcaagacctgctaaatgcaacaggcttgtccaagagcagcctgtacgagagcttcggcaataagcagagcctgttcgaagcagcgttcacgcgctacttcgaaggccgcgccaagcagatgagcgagcggctcgaacaggccgtgtcgccgttggcttttctccgtgattgcctacgttcggtactcgaagaaaccgagcgggctacgccgcgcggttgcatgctggtcaacgtggccaatgagttctccaccagcgatccagcaattcaacgactggtcgcgctggccacccagcgtttttgtaaggtgttcgagcaggcttttcagcaggcccggtcgcaaggcgagatcccggcaagcaaggagccggcagcactggcgctccttatgcattgcgcaatgagcggtctgcgcacgcaggtgaaatcaggcgtcgcgcggcgcgatctgctcaccgtcattgaattggtcatggcgaacttccgctga

SEQ ID NO: 334969 - DNA, 573 bp, Pseudomonas aeruginosa
atgctcagcgaatatcaactgaccctacccgcgcagaccctgggaaatgccgacaatcgcggacaggctgtcctggagaaagccaaggcccaggtcggttttatccctaacatgtacgcccgcatggtcaactccccgggcctgttggaaacctatctggacggttatgcagcgtttcgccaggagtcggggttcaccccagccgagcaggaagtcgttttcctggtcatcagccgcgagaacggttgcgagtactgcgtatcagcacacagcatggtggccgacgtgcaatccggcctggcgccacaggtaaccgatgcaatccgtaacggcacgccgatcgatgacacccggttggcagtgctggccgatttcacccgaacgctgtttcacactcgcggcctgccttcgcgagctgcagtggaagcattccttggcgccggttacagcgagcggcaagtgctcgaagtcgtgctggcattggcggtcaaaacgctgagcaactacgccaatcatctgttccacacccccttggacgagatgttcgcgggacgggcctggcagcagaagtaa

SEQ ID NO: 334970 - DNA, 264 bp, Pseudomonas aeruginosa
atgagccagatcatcatgtataccagccagcattgcccttactgccgcatggccgagcagttgttggtacgccgggcggcgggcccgttgaccaaagtccgcgtcgatctggactcattggccctgatttcgatgattgccaagacgggacgccggacggtgccgcagattttcatcggggatcgccatgtcggtggatacgatgacctggcccggctcgacgctgctggcgagctctcctcgctgctggcggcttgtcagtaa

SEQ ID NO: 334971 - DNA, 1044 bp, Pseudomonas aeruginosa
atgggcggagaactttcacgacgggcgcgacttctcgctgcgcctttctgcctgttggtcacgctcccggtactggccttgccaccgccgggcattcctcatgtccggccggcggattatgaggcatacgcggactcgatgttgtccggagggccgggcaaggatggcattccggccatcgacaacccacgcttctcggacgctgccagtgcggagtcttttctcgctcctgcggatatcgtgtttggcgtctaccaccaaggccaggcccgcgcctacccgcagcgcatcctggtctggcatgagatcgtcaacgacagcctggggggcgacgggctgagcatcacctattgcccgctcacggcaaccgccgtcggttttaggcgcggcgacacaaccttcggcgtctccggcaagctgctgaacagcaacgtggtgatgtatgaccgggccagcgatagtcactggtcgcagatcaccggcatagccatcgacggagccgccaaagggcgcagcctggaggaagtcagggtagtctggaccacttggtcgaagtggaaatcacgttacccccacacccaggtgctcactcgtgccaccggggtgctgcgcaactacaaccgcgatccctatggcagctatggtccagtgggaggctactatgccagcccggcggccctgttcccggtcatgcacagtgataaccgccttccagccaaacagatggtgttgggtttccgtaccggacaaatcgccgtcgccgtcgaaaaggcctatctaaggctgcaaggctctgtgccattcaagcacggtaacgagcatttcctgatcatctgggacgagcagctggacaccggttgggtttaccgcgccagtgctcccatcactgtggatctgaccagcctgcgcttcacagaggcggggccgcaggcagccgaactggcgcctctggatcaagtcaacgtcttcgatgccatgtggttcgcctggtatgcgttctatccgcagacggtactgctcaatggatcggaaccgacccgctag

SEQ ID NO: 334972 - DNA, 462 bp, Pseudomonas aeruginosa
atggatcggaaccgacccgctaggctgttcatcggtgggctgaccctgctctatgggctgctctacctgtatgcgattggcgacctcgatctcggcgcctccggctggggcgcacaggtgttggattggcaatgggagcgcctgctggcccgccgcagcgcctggcacttcgaagccgtggctatgttccagctcggctacctggtgctgttggtcagtccgctcaacctgctgatcacgggattgctggcggtcctgctggcgctcaatctgcatgggacgctggccctgcacgctcaagccaagtgctcgcgcaaacagaaggtggcatccagtgcaggggcgtggcccgcgttgctcgccggcggagcctgctgtgcccccagcttgctgctggtattggggattcccgggttgggggcctttgtcggcctgttcgcctggctgctccactgtcgttga

SEQ ID NO: 334973 - DNA, 492 bp, Pseudomonas aeruginosa
atgacgatagacacaggtgtgccacgacactggcatgaagattcccacgtctggcgtttcgtctgcgtgcgctacttgattgtcttggcctcgttcaacctgctgtgggagatcggccagctgccgctgtacaccctgtgggcggaggcgccgccctctgcgattgcctatgctgtcctccactgcacgctgggggacatcctcatcggcgtgctggccctgctcgctgcgctgatcgccactcgcgccggtgcgctggagcaatggcgctggtggcggatcgggaccaccgcggtcggcctcggcctcgcctatacggccttcagcgaatggctcaatacgacggtgctgatgagttgggcctattcggaacggatgccgttgacccccatccttccgctgggcctctcgccgctcctgcaatggttggtcgtgccggtcgccgcgctggtctgggctcgcggtacgacgcgcaggcagagtcaggcttga

SEQ ID NO: 334974 - DNA, 504 bp, Pseudomonas aeruginosa
atgaaagtcctctttctctgcaccgctaacagttgccgcagcattctggcggaagcgatcttcaatcacttggcgccggtggacatgcgagcgttcagtgctggcagcaagcccaagggcatagtgcatccgttgagtatcagcgccttgcacagggccggcatcgattccaccggactgcacagcaaatcgcacgttgtgcaccaaaacttgcaccctgatctggttattacgctttgcgatagtgcggcggcagagccgtgcccctcctacttcggcgacgccgtcaagattcattggggtttacccgacccggacgggcaaggcggctcgcaagcggaggtagatgcagtgtttgaccagacggtcgcaaacatcaggcggcggatcaatgcgtttctgtcccttccattgactcgggtagctatgcaagagctaagggtagagttattggcgatcggtaggacaccgacgcagttaagcaaaaccggaccggaccactga

SEQ ID NO: 334975 - DNA, 807 bp, Pseudomonas aeruginosa
atgagtgaccagcctcctgcattcgaaactgccatcgctgagtgcgccatccagctgccccaagccgcgcggttaagcgcggccgaacgttttgatctgctggcggctgcccaagaagtccatcgttgccaactcgcattggctaaagctggcttgaatgtggtgggtgagttgcttaaggggcacgagggcttctatgagatgaatcactacccggacaacgatgtgtacgaccgggatagccatgcgcagtactactaccatgcccaccgcgaaggcgcggttgagcacggtcacttccataccttcatccgcggcaaagggattcccaccagcctgcaaccgctacctgcgccacctggtagcgagtcctggccgagcggtgatgacgccatctcccacttgatcgccgtttccatggacgcctggggacagccgattggcttgttcgcctgcaatcgctgggttaccggggaaacctggtaccccgccgaggcagtcaaacagctcttgccaaggttttccatcgatcacgcgttcccatcctggccaaccaacctgtggctaacggccctgctgcgcctgttccggccgcagatcgacgccctgctcgatcatcgtgacctggtcgttgaggcctggcagaaggcccatcccgacctcgatgtgttcgaagagcgggcgcttgagattacgggctacctctccatctccatcgacgactgggttcagcagctgcgacacgctcaggatggctcaggcctcatgtaccagtctcaacgcccatctgaagtgagcaagccatga

SEQ ID NO: 334976 - DNA, 726 bp, Pseudomonas aeruginosa
atgcactatccatgtcccgaccatcccgatgtacccggccatcgcccgatcgctgccatggtttcggcgacagtgctcgccatggctcttggcgggccggcgctggcggcgagtccctgtagtccctgcgcagcaggcaagtgtgcgccggccagtctgaatccctgcgcagccagaaatccttgtgcagcaaagaatccgtgcgcagccaagaacccctgcgccgcgaacccgtgcgccggcaaaatgaacccctgcgccatcaaatcggtaaaacgcccggccaactacaagccttaccgggggggaccggctgaacttcgggcctatggcgagaagctctacaaagaccccaagctgagcagtaatggcctgtcgtgcgaaagttgccaccagggtggcaatctattccaggccagctttgccaaggcttatccccacgaagtcgccatggccaagaaccagtttggcatgtcccaggtgttcctcgatgaaatggtgcagatctgcatggtcgcccccatggcgaccaaagcactaggctggcagtcgaaggagctggctgcgctcaccgcgtatgtggctaccttgcaaaccagcttcaagcccaatccctgcgcagccaaaaatccctgtgccgcccggaatccctgtgcagcgaaaaatccttgtgctggcaagaaaccctgtgcagcgaaatgcgctgccggaaccgtaagccagtaa

SEQ ID NO: 334977 - DNA, 603 bp, Pseudomonas aeruginosa
gtgctgtcctgcctcaactgctgcaaccaaggctttgagcacattttgctattgttgagcgagccactcttgaccgcgagcggctaccgcaaacccagtggatctgtcaggcacctcctgatctactgctgcttggctgcgcagggtttcttcgccgcgcaggggtttttcgctgcacaagggttcttggctgcacaggggctcttggccgcgcagggatttttccccgtacaagggttcttcgccgcgcaggggttggccgcgcagggattcattgccgcaggagcactttgggccgcgcagggtgaacagggcgtagcggccaggaccggcccggccagtgccacgctcaaggcgcccgcacacaacattgcggctagggggcgacgagcggcggcgttcggcttacctttcggatggctagtcatttcaactcctcaagtctttgtgatggtccaatcgttgctgggcgggtactgctctacaaccgcccttcctggagcactcacagcccatgcgctgaacacatgtcgcggatcatgctcacctttctccgatgcaacgcccgcagttttgttacaccgtgaggatatgttgtcttga

SEQ ID NO: 334978 - DNA, 606 bp, Pseudomonas aeruginosa
atggactatgaacaggatctggtcagccggctgcgcaagggcgagagcaacgcgcgcgaggaagtgatcaagctgcaccatgccttcttggtcgccatgacgaccccgctggtcggcccctcatcggccgatgacgttgcacaggaaacctggctgaaagcctttgccgccatcggccagttcgaaggacgcgccaaactcaggacctggctagcccggatcgccatcaacgaggcacgatccatgcgtcgcaagcactggcgggaagtttccttggacggttggggcaccgacaccggctcccccattagctcgcgtttcaatgagggaggcgcttgggatgctccgccgacccaatggcatcacgacacgcctgaagaactgctgaccgaagccgaattgcatgagtgcatccgcaaacatctgcacaagctgcccggcgaccagcaaagcgtggtgatgatgcgtgaactgggtggcctcgattacggtgaaatagctctggccctgggtctggccgagggcaacatccgggtactgctgcaccggggacggcagcgcatgcatgccatgctcaatcacttcgaggaggtaggaacatgctga

SEQ ID NO: 334979 - DNA, 228 bp, Pseudomonas aeruginosa
atgctgacctgccgcgaaatgtcggaactgggctccgagatcatcgatggtcatctcaaactgcgcacccgctgggccgtgatgatgcatctgcgaatgtgtccccgctgcaagatgtacatcaagcagctgaaactcacgtcagaggtgctgcaaaacatgccgttcaacgatgacgccaccgacccccaggcaatcatcaagaagctgcagggccctgagcaatga

SEQ ID NO: 334980 - DNA, 696 bp, Pseudomonas aeruginosa
ttgagcaagcgtaccgtgcaaacgattgattcgccttcatgcctagtgctgctgtgcaagcgtccggcattgggttattcgaagcagcgcctggccgaacagctgggcccggagtgtgccctcagaattgctcagctacttctcgattgcgcgctggaagatctcgatgactggtctggtcccaaggtgctggcccccgatcatgccttgcaccaggcatggggatgggcgctctgcgagcaggcgctgtgcctgccgcaaggcgaaggcaatctcggcgaacgcctgaacgacctggatcatcggctgcgctcactgggccatcgccggctcatcttcatcgggagcgactgcccgtccctgcaaaacgccgactattgcagagtcgccgcgcttctcgaaaccgatgacaccgtcttgctcatggcgcaggacggcggcgtcgtgttgatggcctcgaatcgcccctggccggacctgagcggcctgccatggagtacggaacggctgggcgacgcgctaattgactgctgccatgcggctggccacacagtgaagctggcgggtgagttgttcgatatcgattatcagaaagacctgcaacggctatccggtgtactcgccacggagtcgcggccagcccggctgcggcttcgcgcggccctggacgatctcgtggagcactcgaatggctga

SEQ ID NO: 334981 - DNA, 729 bp, Pseudomonas aeruginosa
atggctgactgtgttccgatcagcgtgatcattccctgttggcgcgatgaagctgtcctgggcgcattgcttgctcaactgactcagttggcccggtcttctcaacagaagctgcaactgattgtggtcgacgcgagtagtagccctgaatgccgcgaactttgcctgcagcacggtgcgcagtggctaccagcaaagccctgccggggtgagcaactccgactgggggcaagtcaggcgcgctatccgatcctgtggttcttgcacgccgacgccaggctgcagggcaatcctctgccaaacatcagcgccgcctacagtgccggagcggtcggtggctacttcacctttcgctttgccggtgccggttgctggcagagccgcatgctggaaaggctaatcgccctgcgcaaccactttggtgtgccctacggcgatcaaggtttgttcgttgaggccgcagcctaccgcgccagtggacagcacaagccctggccgctgttcgaggaagtcgaactggtcaagcgcttgcgtaggctggggcgtttcgtccgtctcgccgaaggcgtgcgcgtcgacacccggcgctggcaacgcgatggctggtggcgacgctccattcgcaaccgcctgctcgcgctggcttatgcctgcggagtaccgacctcccgcctggcaactctctacagtccccgcaactcggccgttggtggcacgagcaaaccctag

SEQ ID NO: 334982 - DNA, 792 bp, Pseudomonas aeruginosa
atggaaatgcgcagtctattcctcaccctgttgcttagccttcccggactcgtgcaggccggcaccttcgaccattcgcatgcgcagtggtcggcactgttggccgagcacgtggcctgggtgagccagggcgtcgccagtgaagtcgattaccaaggcttcaagcagaatgaagcgccgctagacggctatctggccagtttgtccaacgtcacccgtgaccagtacgacggttggagccgagcgcagcggttggcgttcctgatcaacagttacaacgccttcaccgtcaagctggtcgtcgatcactacccggtcggctcgatcaaagacattggcgggctattcagcagcccgtggaagcaggcattcatcccactgctcggacagacactgaccctcgatctgctggaacactcgatgattcgggcgcctggggcgttcgacgaaccgcgcattcacttcgcggtcaactgtgcctcgttgggctgcccggcgctgcgccccgaagcttttgtggcagagcggctcgacgcccagctggaagacagtcagcgtcgattcttgagcgaccgccgccgcaatcgtttcgacgcagatcggcgaactttccaagtctcaaaaatctttgattggtacggcgaggacttcgtgcggcagtgggggtcactggaaacctacctcgaccagcactccgcgctgttgtcgggacagcagagccaccagcaaagcgcccgtcgatcagagattgagtttctcgactacgactggtcgttgaaccaggccaggtaa

SEQ ID NO: 334983 - DNA, 873 bp, Pseudomonas aeruginosa
atgagtgacaagacagcattggtccttgccggtggcggcagcctgggagccgtgcaagtcgggatgttacaggcgctgaccgaggaacacgtaaccatcgacctagtggtgggcgcatcggtgggtgccatcaacggcgcctttttcgcgagtcagcccaacgccgtgggtgccgccgaactcgcagaaatctggtgcggccttggcccgcaggacatctttccgttttccctgctgagcgcgaccaaagccttgctgcaaggcagagggcatctgctcaccaacgaaggcctgagccggttgatccagaccgttttgccggtgaaatccctggaggagtgcctgctccccttgcacgtggtgaccaccgatttgctcagcggtgcggaagtcttgcagtcgcaaggcaacatcctggacgccttgctcgccagcgcggccattccgttggtttacccaccgatagaaattgccgggcgcctgctggtggacggcggcgtggccagcaatacgccgatcgccagcgccgtcgcgctgggcgccacgcgcatagtggtcctgcccaccggttttggttgcgcctgcaaggcgccgcccaagggcttcgtcgccttggcgctgcacaccctcaacctgatgagcatgcgccagctgatacgcgacattgagctgcacgaccggcgagtgcggattcatgtggcagcccccttgtgtccgcttggggtttcagtgttcgacttcacccagacccgtgacctgatcgaacgcgcgcgtgtgcaaacccaggcctggctgagggcgggcgggcttgaccaaacaggtgtaccggactcgttgcgcgcgcattcgcatcccgagatgaccgacgagtga

SEQ ID NO: 334984 - DNA, 351 bp, Pseudomonas aeruginosa
atgaccagcatattgttcatcatcaacgactctccatacggcagcgagcgcccctataacgccttgcgcctggccgcagctctgtcggcccgcgaggggcagcaggtacgggtgttcctgctcgcagatgctgtggcctgtgctcgcgccggccagaaggtgccggagggctactacaacctcgaactgatgctcggcaaggtgctgcgccgaggcgaggtgggcctgtgtggcacctgcatggatgcccggggtatgaccgaggccgacatgatagagggtacgcgtcgttcgacgttggcccagttggccgactggaccgccgaggctgacaaggtgctggtgttctga

SEQ ID NO: 334985 - DNA, 276 bp, Pseudomonas aeruginosa
atgcgcagactgctattggccgcgctcgccgcattacccctcgcgtccctggcggctcccccgaacactgtcacgcttgacgtgcagcacatgacttgtccggtctgtccgatcacggtcaagaagtcgctggagaaggtatccggcgtgaccgatgttcggatcgattttgaccagaaaacggccaccgtcacctatgacccggataaagccacactgcagtcgctgaccacggcaacgactgacgcgggctatccctctagtgtgcataagtga

SEQ ID NO: 334986 - DNA, 345 bp, Pseudomonas aeruginosa
atggaaatcgcggggaaaggctcgctgatcgcgagcgtactggcggctatgggggcgtcggtgtgttgtgtcgggccgctcgtgttgttgtcgctgggcgtcggcggtacatgggtaggcgctctaacagcgatggagccatttcggccgttcttcatcggcctgacgctactgttccttgggctggctttccgcacactttatctggtgccttcacgctgcacgccgggcacaccttgcgccgatccgcgcacgcgctcccggcagcggctcgtgttttggatcgttggcgtcctgctgctcggcctgctggccgtgccgtggctggctccgttgttctactaa

SEQ ID NO: 334987 - DNA, 399 bp, Pseudomonas aeruginosa
atggccgctgtccttaccattggcaaactggcaagcgccgcgggggtgagcgttgagaccatccgctattaccagcggcgcggcctgttggacgagccggccaaacccttgggaggccatcggcgctatccgcaagggatagtgaaacgcttgcgcttcatcaagcgcgcacaggcgctgggctttacgctcacggaaatcggcggactgctgacgctggatgagtcgcgtgcgtgtaccgaaacacgcgcgctggccgcgcacaagctcgtgctgatcacgcagaagatggcggacctggccgccatgcagcaggcattgggtggattgctgcagcaatgcgatgcggaagacggtggggcgagttgtccgataatcgaggccctggcgcgggcgtga

SEQ ID NO: 334988 - DNA, 939 bp, Pseudomonas aeruginosa
atgttgtctctgctttcaacctggctgggtggaaccccaactgcttcgcgtaccagtaaccactcacccgaagcactcttcagcagcctgctgacaatggcgtggtttgtcgaagcccgagatccctacacaggcggccacctctggcgcgtatcacgctatgccaggttattggccgaggaagcgggattgccagcagcagacgtggctcgcgtcagcctcggaggctttctccacgatctgggcaagattgccatacccgacacgattcttcggaagaccagtggcttgaccgacgcggagtacgaggtcgtgcgcacccacccggaattgggcatgcggatgctagccggacacccgctggcaggtttggtcagggacgccatctatagccatcacgagcgtcctgacgggacgggctatccacgggggttggctcaggaagagatccatctcgacgctcgaatcgtcgggctatgcgatgcattcgatgccatgaccagtagtcgtccttatcgatcggggatgagccgagggcaagcactggcgattattcaaattcaaagtggtagtcaattcgaccctggcctgtgcaagcactttctggacctcggcagacgtggcgcactcgaccatgtgatcggtcactcggacgtgggcattcctcttcaatcctgtcccatgtgcggccctacgctagtcatccggcgcgatcagcagcccggagaattgatcttttgtcgaaactgcggtggagagttcgcgcttgaggcgggaaaagagggcgttaccgccagtcccacagggcgagtcggaacggccaggcagttggtacctgacgtcgatcacgaattgattcgccgtgtggtcaccgagacggtgcgccggatgcctctggaacagatgctgtcaggctgtgagcaaggggcttgccgatga

SEQ ID NO: 334989 - DNA, 297 bp, Pseudomonas aeruginosa
atgaaagcaattctgaacagagtggcagtgatcatgctggtcgctggcggtaccgtcagcacggtgtgggccgagggaggcagtgactacctgatgaacttccatctcaggcagcaagccttggctagtcaacgagccgagcaggataccggtcagcgcttcgcgcagatactcgtagaacagccgactgcggcaggcccgatgaccgagctccagtcgcagtcgattcaagagcccgcccccacctaccggtcaccgatttatcaggacagagcgctgtacggtagtgggaagtga

SEQ ID NO: 334990 - DNA, 669 bp, Pseudomonas aeruginosa
atgagtggcggcctgatactgggaaccgccaaggtagccgcccatccggaaagtgcccaccgcaatgaagcatcatcccggcagcagcgcgccctgcaggaactgatcggccgcgccatgagcctggacgattcggcgaagcttgacgccgtaaaccagttcttcaatcaccaggttctctatcgggaggacatggtcttgtgggggcagttcgattactgggcgtcgccgctggagacccttgagcgcggagctggcgattgcgaagactttgctctggccaagtacttcacccttcgcctgctgggtattcctgagcgcaatctccgcctgctgtacacgctggtgggctcgactcagcaagcccacatggtcttgggttactggggggatgtcggggatgggccgctgatactggataacctccaccccgatatccagccgatcgcccaacggccggatctacacctgcaattcgccttcgatacagatcacatctatcgatttgaccaccaccgcttaatcgttgctggcgacgctcagctactgccatgttggatgacgctgaaggacagggtgaggcgggagcagttcccgtcctcccccaacatccagcttgcggcggttaatggttcagcctcaaacgaagccacgaccatttcgaactga

SEQ ID NO: 334991 - DNA, 852 bp, Pseudomonas aeruginosa
atgccccacgtcatcgcctgcattgacggttccgcttcggctccggccgtctgcgactatgcggcctgggccagcctgagcctgggagcgccgctgaccttcctgcacgtgctcgaccagcgccagtacccggtagcggcggacctgagcggcaacatcggcctgggcagtcgggagcatctgctcgacgagctcacctccctggatgaacagcgcggcaaactggccctggagcagggacgcatcatgctcgcggcggccaaggagcgggctatcgccgatggcgtaaccgcccctgagggccggcagcggcatggtgatctgctcgagagcctgcgggaactggaaagcgagactcgcctgctggtcatcggtcgccagggcaaatccagtggcggcgccgagcagcatgtgggcagccagctggagagcgtgattcgtctcatgcagcggcccgtcctcgtcaccccagtcaatttcaagcggcccgggcgcgcgatgctcgccttcgacggcagcgccaccacgcgcaagggtgtggagatgttggcgtccagcccgttgctgaaagggatgccagtccatctggtcatggtcggcgcgcagagcaaagagtcttgggctcagctggatgccgcctgtgatgcgctgggtaccgtgggtatccaggtctatacggccatccgaaccggagaagtagagccgacgctgcatgcttaccaggccgagcacggcattgatctcctggtgatgggggcctatggccactcgcgtatccgccagttcctgatcggcagcaccacgaccactatgctgaggaccactgatactccactgttgctactgcgctag

SEQ ID NO: 334992 - DNA, 2970 bp, Pseudomonas aeruginosa
atgagtcggcaggaagaaaccgcctacccgcgccttaaaaccgaattcagcccgcaggagctcggtgcaatctatacacccagccctcaagagaaagctttggtcttcggttggtatcggcaggccccaacacgcgcctgcctcctggtccagttgaagctccttcagcgcctcggctacttcccgtcactcacggcaaccccgtcggcaattattgaacacgtctgccgtcgtgcaggcttacgggttcctgccaaggtagccctaaaacgttacgaccagtccggcagcaaacctcgtcatcagcagcgacttcgcgagcatttgggcattcaagtattggatgccgaaggtgagcagtggctggatcaagtggcgcatcgagccgccagctcgaagcaggaactgccggacatcatcaacatcctcattgaggaactcatccgccgtcgttatgaactgcctggctttacacgactcagccgcttggcacaacaggcccgcgccagcgtcaatgagtcgatttatcaaagtgtcaccagcgcactatcggctgccactatggcacgcttggatcggttattggaacctcagcagcggagttcctgggatagcctcaagcgcgagcccaagcgcccaagcactcgtgagattgctagcttcctcaagcatattaacggactgatcgaactagccgatggactgcccacgctggcgaatgttgcgatcagcaagcgcacccagctggtcctggaagcgcgagcgctcgatattgccgaaatgcgcgccatgaaggccactaagcgctacaccttggtagtgctcttgctgcagtcgcaactgcagaaggccatggatgatgtggccgaaattttcatcaagaccctacgtggcctacatcgaattgccgaggagcgcttgcagcaatatcacctgacccatacccagcaggtggatcggctcatcggtcagttccgggaagtgcttactgtattgcaggcaccgttgcctcccgatgagcggctagagcaggttgatgactctcttgagcgtgatcctgccgcctggatcgcccgctgcgacgaacacatggcctttgccggcaacaattactttccgttcatgttgcagccataccgcagcaagcgttcgctgctgtttcaatgtctggacgtgctcgccctcaagtccagctcgcaggacgacacgctgctgcaggcagtcgactggctgcagcggcaccgcaacagccaccgggaaaccctcacgctcagcgcggacgacatcgatgacctggcgttggaagggctgcccgagaagtggcgaaaactgatctttgccaagcgcgatactgctcgcagtgaaacgacgattcaccgcaagtattttgaactctgcatcctctctgaggtgatgcaggatctgcaatctggcgacctctacgttgagcacagcgatcaatacgatgattatcgtgaacatctggtgagctggtccgaataccaggaggaagtcgaacagtatggcgaactggtgggcctgagcgtcgacccggtcagatttacgcaagcactgcgcgagcagttaactgagctggcgcagaaggtcgacgaccgttttccggataacgagcacgtggatctgaccgaatccggcctggtgctccatcgaaccgagcgccgggagccaccccctcagctgcccctcattgatcaagccatcacggcaaacgcggaacccaaaagcatcctcgacgtcctgaccgaaacagaacgatggctggacctacatcgattattcggcccgctgtctggcttcgaggccaagatagatgagccacgcaagcggttcatcacgacgctgttctgccatggctgcaacctcggcccctcccagacggcacgctcagtcaaaggcttcagccgaaaacaggtggcatggttgaatctcaggcacgttaccgaagagcgcctagacaaagccatcgtcaccaccattaacgcctacaaccgtttcgccttgccgcgctattggggaactgggaagtccgcttccgcagacggcaccaagtgggatgtttacgagcagaatctgctttccgagtatcacattcggtatgggggatacggcggcattggctactaccatgtgtctgacatgtatatcgcactgttcagtcgctttattccctgtggggtctacgaggcggtgtacatcctcgatggactggtcaagaacgactcggatattcagccggataccgtgcatggcgatacgcaggcccaaaatgccccagtgtttggcttggcgcatttgctgggaatccaattgatgccacggattcgcaatgtcaaagggctcgttttcttcaagccggagaagggcagccgctatcgtcacatcaacagtcttttcagagcctccatcgattgggagttgattgagcgccatgtgcccgacatgctgcgggtagccatctcaatcaaggccggcaagatcactccctcgatgatcctgcgccgactgggtacctacagccgaaagaacaaactgtactttgccttccgcgagctcggccgagtagtgcgcacgatgttcctcctcaattacatcaacgatgtcgaattgcgccggaacatccatgcagccaccaacaagagcgaggaattcaataacttcgccaaatggttgttcttcggcggcgagggcgtcattgcggagaatgtgcggcatgagcagcgtaaaatcatcaagtacaaccacctggtggcgaacttggtgatcctgcacaatgtgcaggagatgtcgcggacgctcaaggatctacagaaaggggggcaacccgtggatgaggccgtgctcaaggcgctgtcaccctacaggacgagccatatcaatcggtttggtgactacacgctggaccttgagcgaaagatcaagccgattgattacaagattaattttgactga

SEQ ID NO: 334993 - DNA, 1704 bp, Pseudomonas aeruginosa
atgttagaacatagccaattggccgtgtctgcgccttccggcgctccgcaacaatggcatgacatcgattggtggcgtgttcagcggaatgtccgggcgatgcagatacggattgcgaaggcttgtcgggaaggcaactggcgcagggtgaaagccttgcagcggatgctgacccgctcacgctcggccagatacttggccgtacggcgagtcactgaaaaccagggtaagcgcacggcgggagtcgaccgcgtgctctgggatacacccgacgcaaaatggaaagcggcaaatgggttgaagcgtcacggatataaaccacgacctttacggcgtgtgttcattccgaagtcgaatgggaaggaacgccctttgggcatcccgaccatgactgacagggctatgcaggcgctgtatttgctagctctggcacccattgcagaaaccaccggcgatccaaacagctacggctttaggatcgagcgatctacggcggatgcaatggggcagttgttcgtatgcctatccaagaaggtttcggcccaatgggttttggaggcggacatcaaaggctgctttgaccatatcaatcatgactggcttatcaccaacgtcccaacggataaggtggttctccgaaaatggttgaaagctggcgtgattcataaaggccagctacaggcaacggatgccggtacgccacagggcgggattgtctcgcccagcttggcgaatctggtgctggatgggctggagtcacaacttaagcaacatctgggtgtgaccaaggccaagaagctgaaaatcaatgtggtgcgttacgcggatgactttgtgataaccggaacctcgcgagaggtgctggaaactgaagtcagaccttgggtagagcagttcctagcagtgcgggggctgcagttgtcactcgagaagacgcgtgtcgtccatataaaggaaggctttgactttctaggttggaatttccgcaagtacgatgggaagcttctgatcaagccaagcaagaaaaacgtgaaagcgttctatagcaaggtaagggaggtcatcagtaccagcaaaacggtaaggcaggaggatctgatccgacagctgaatccgatactgcgtggctgggcgttctatcaccagcctgtggtagccaagaaagcgtatagccgcatggattacatgatctttctggctctatggcgttgggcaaaacggcgacaccctaagaaaacactccagtggatcggagcgaaatattttaaacccatgaaggggcgcaaaggggtgtttgccaccgcgacgatgaatgacaagggagagatgcgaacgatcgagttgtactcgctagcgagcactccgatcgaaagacacaagaaggtgagtggggagtacaaccccttcgatccttctatggaggaaatgggtgagaaaaggcgtatggaacagatgctcaaaaggctggcgtaccgtaagcaaatcttgagccttttccagagtcagaaaggattgtgtccaatatgtaagttaccgattacgaaggagacggggtggcatgatcaccacattctgtaccgcacaaaaggcggtggagactccctaaataaccgggtactattgcaccccctttgtcaccagcggctacacgctcgcggattgacagtgaacaaaccggctccccttaccgggggttttgattag

SEQ ID NO: 334994 - DNA, 750 bp, Pseudomonas aeruginosa
atggcggggatcttcgatcgcattgcaggcgcccctggcgccgacaaaacggagctgacagcagagcccatggcgttggatgacggcatggatgacgaacaacctgtcaggagcgccgctgtacaggtcgatgagcgccggacgccgcaacgagtacgggaggccgtacaggaaatgctcaagtacggtctgctggaagagagtcacaagcccaacctgtatcgctcagcgctttccaatatcgaggcagtcgacagaatcctggagccgctcgaccttgccatgggggtcgacgaggttcgggggctggtgtttgttaccgttcgccagggcgaggtggccgagcaggatgactggtcgcaccccctagtgcgtcggcaaaggctgaatctggagcagtctctgctgatagccatcctgcgccagcagttcatcgcctacgaacaggaaagcggtacgggcgccagtcaggcatcggtagtggtcgatgagctgattccccaattgcaggtttacctaggcgagctgggcagtgaggcaaaggagcgcaatcgcatcatcacgctgctggatcagctaaaggggcatggcctggtgtcggctttagacgcccatgatcgcgtcatcatccgtcccatcattacgcacttggctaacccggagaacctgcaggcactcgtggcatggctgcgagagcaggtggagggcgcggcgacgccggctgccgatggcgaggagggtatggcatga

SEQ ID NO: 334995 - DNA, 1146 bp, Pseudomonas aeruginosa
atgaagtcacccactgacatcggtcgcagcttggccaggcaatggcagcgttctagtgttcggttggaccgcttactcaattccgctagctggccgcaaagcctcaatattggtaagccttcggcgcgactattcactgacaacatccaggcggtgctccggcatgtggaaaactggcggagcgtgaaagtgggtaaggtcgactgggaacccgtcagctaccgagcagggttggctccaatttccttgccaatgcgctggcacttgcgcggtccctccgaatggattgccgcaaccgacgatcctgcggtcagccaggaatacgctcaactcgagtatctggtcgagcaggtagatagttcctttcatgctctgctggtggcgcaacggagcctgtggttgacgaagccctctgaagaagtcatcgctacagcgcaacttgcccttcaattatctcctggcagtgctcaaggccgcccactacgcctgcttgcagagcacggagtggataccaaatttttcgagcgaaacgctaccttgctgacgaagctcctcgatgagcgcttcgacggtgccgcgtccgagcaaggactgacgacttttctggatgcctttgaagaaagcagtcattgggttctggtcgttccgcttcagcctggactgctgcccttcaaacggctcaggctgacaacttcggaactggccgaaactccacttcccggttcgcgattgctcgtagtggaaaatgagcaatgtgttcacctgctacccgaaccgttgccggacaccttagctgtgctgggcgcaggtctcgatttgcagtggttggcgtctgcgcatctggtcgggaaacagatcggttactggggcgacatggatacctggggcttgctgatgctggcgcgagcgagactccatcaacctgcagtcgaagcactcctaatggagcaggaggtgtttgaacagcactcacaggggaacacagtcgtcgagccggctaaagctctggaatcggctccccctggtttgctggctgacgaggctgatttctatcggtatctgttggtgcaagcgcgggggcgtcttgagcaggagtatcttccgaaggctcaggtcgagttggccataagaaagtgggccagatga

SEQ ID NO: 334996 - DNA, 609 bp, Pseudomonas aeruginosa
atgtccgtcgcagcagtcatcgcgaagcgaatcaaatatatgcagaaaggcaggcccttttcccgcacggctttcgcggagcttggctctcgcgcatcggtcgacaaagcactctccagactggtgcagtcaggccggctggaacgcgttgttcgcggcgtctacatgcgtccgatgttcaaccagtacgtcggcaagaacgtccgccccagtccaaccaccgtgatgcgcgtcatcgcgaagtcgaacggggaaacgatccagattcacggctctgaggctgtccgtaggctcggtctcagcacccagatgcagatgcggccaaccttctacaccagcggctcgactcaagaactcaaggttggcaacgccgtggttcgccttcaacatgtctcctgggatcgcttgcagcatgccgggacgagtgtgggactggcactttccgctctccactacattggaaaggagggactatccgcccaagtggtctggaaggtcaccaactccctgagcggtggagaactcctcaaactcaaagcctgtcgaatgccggactggatgcggtcagcactggttgctaccgagcgaacagcaacacctgagcgatga

SEQ ID NO: 334997 - DNA, 6201 bp, Pseudomonas aeruginosa
atgctctatcaaaacaattatttctccgctctgaccaccaacttgagtacccgcagtgaacgtgctgctcagggcctgctcagtctcggcagcccccatttgcgtcagttcctgcatgatcagctgaccgcctctcccggcactccgggtgcctggcttgcagatccggttttcgaaccgaccttcggttgggaagaaagcaatgaaaccataggctctctgtccagcggcaatctattgcacccgcgtcttgccgaagccatggcctccccgcccaaggatcttgcccaggaatacaccttccccggcacccggcatccattcacccaccagttggcggcctggaaaacattaaatagcccggagccgcaatcactggtagttaccagcggcactggttcgggaaagaccgaatgtttcctggtaccggtcctcaaccatctggcgaaggagatcgatgcaggggaagacctggaaggggttcgtgccctgttcatctatccgctgaatgccctgatcaactcacagcaaaaccgtctagacgcctggaccgatggctttggcgggcagattcgccactgtctgtacaccggcgcgctggagaatgagcgaaaggcttccgatcagcagtacaagggccaggtgatcgaccgcaagagtatgcgcgagcggccgccacagctactcgtaaccaatgcgaccatgctggagtacatgctcattcgtaaagacgatgagcctatcctgcgaaagtcggccagaaaactgcgctggatcattctcgacgaggctcatacccatatcggttctcaagcagctgagatggctctgttgctgcgccgcgtcatgctggcgtttcaagtcaaacctcaggatgtccgcttcgttgcgacttcagctactttcggctcggatatgcaaactatcgagagcctgcgcaaattcctcgccgatatcggcggagtagctccggagcaggtgcatgtcgtgcagggccaccgggatattccagctttgctggatgctaagccagaggccgcgcaggacacgcccgaatccatcggggctatcgagggagagcaagagcaatctgcactgcgctaccagcgcctggaagccagtccgactgctcggaggctgcgctccctgttcattcctgacggacaagtgaaaccgcaaagcctacagggtctgacgaggacatccggtcttacggcagcacaaactctcgcctggctggacctgatgtccggcaccaagaatgccaatggtctctccttcctgccgttacgagcgcacttgttccataacgtgattccggcaatccgcgcctgcgtggatcggaactgcgcttacaaggctggcacagcgctggaccacgcggattggcccttcggcatggtgtatctggaggagcggacccattgccgctgtaatgcccccctcatgccgctggtctcctgcgaggagtgcaatgagagcttcttgcaggcaaaacctaccagcaacggaaaattgatcgatcagtcgcaacaacaggtcgacgaattctctttagatgaagactctgcggatgcagaagaccaagccgataacaacagtgaatcactgagccagattctgattaccaaccgccccgtgacgcacggccgccctgagtttcttgatcgcactagccagaaactgatgttcgatggccccaaggaaggctacatcgaactgcaggttttccagagccacaaaaatgagtgcccatgctgtggtgccactatccaaggtcgcagcctgctgcgcccggcccgcatcggcacgcccttcaccttaagcacggtgattagcaccttgctggagttctgcccgccagacccgatgccggccggcaagccattccaaggccgcaagctgatttccttcaccgacagccgccagggtacggcgcgcattgcggtcaagctgcagcaggactccgaacgcaaccggattcgaggtctgatataccaacacttgttgcgcgcaaaaccagtcaacctactctctcctgagcagcaagagcacctgaaacttcttgaggagcaagaagctagcaacagtcttgatgcaacaggaaaaatgctgcttggaatgctgcgacagcagcagaaaccagcaagatcaggtacagaaatcagctggaccgagatggttaaccatctggcgggcaccccggagctacagatgggcatgctggactattatcacagtcttgctcccaaactcttcagcaaacaagacagtatcgccttggccggcatgttacttgcgcgggaattctatcgccgtccgaagcgctccaacagcttggaaaccatggggctggtacaagtgtgttatcccaagctggccagcatcaccagcaaacccatggcctggcctgctcatcaaactgtcgagtcctggcgtacctatctgaaggtgctactggacttcttcatccgcgagaacaccatcctgaacatcgacaggcgatggcaatcactgatcggcgcgcgcatcagtcccaaatgggtggtagccccggtttttgatggaaaggctgaaaagctgcctggccgctacgctcgctggccggcggtcaataccgtaaatggtgtccagtcgcgagccatcctgatgctctgcaaagcattcaactggtcaaccgcggtacaccatgaccagatcgactcgattctgcgtgaagcctggcaggtccttacccagcaggcaaagctgctaattttgtccggtgacggctatcagctcaatcttaaggacctaagcttccgactccccaatgaagtctatctctgcccggtatcgcggcgcttcatcgacaccccgttcgagcagcttagtccctacacgccacgtaccgaccgtgagatagtcgtcaaggtgacgccttactccctgccgcatccgccggaggcactcctccatgtgccgggtgatgacggcctactggcgatccgcgattggctcaacaaccaacctcacatccagcagttacgcaaagatgccctctggtcggacgttatggatctggttaccgagggcggcaactacttccgagcggccgagcactcggcccagcaaccgaagaacaaactggacacctacgaaggcatgttcaaggcaggcaagctgaacctgctgagctgttcgaccaccatggaaatgggggtggatatcggcggcatcagcgtagtggccatgaacaacgtccccccgcacccggccaactacctccaacgcgcgggacgagctggtcgtcgtcgcgaaggacgttccctagcgctagccgtttgtaagaacaccccgcacgatcagagtgtgttcaataacccgctctggcccttcaccacgcccatgcgcatgcccaaggtttccctgcaaagccctgagctggtacagcgtcatatcaacgcctggctgctctcgcactggctgaaacacgttgtcgccgcccaggaaatcaagtcgatgacggcaggcgcattcttcctcgacggcgaaatgcctatgtcgctggccaagcgtttctgcctgtggtgcaacaatcaggcaagcgaagccgagccgctggtagtacaagccatcagggacattactagacgcagcattctcgactccacgccgcagtctgaactgctgaagcgcgccagcagcagtcttgccgagatcatgcaggcatggcggcaagagcatgaggtgagccattctcaactgttgcaaattgccgacaagaaagccgccgcgtcccgtgccatggaggcccaactcagccgtatcgagaaggagtatctgctcagcgagctagctgaccggcgattcctgcctggctatggcttcccaaccgatatcgtcagtttcgataaccgctgcatgcagaccttgaagctggaggaagtcgataagcgcgaggacaaccgtgcacgctatcgctcgctggcttcccgtgatcgcgtcaccggcctgcgcgagtatgcaccaggcgccgaactggtcatggacggactggtgtacaagtcctccggcattacactgaactggcatgcacccgcctccgccgaaggcatcaaggaactacaactcttcaagaaggcctggcgctgcgggcagtgcggcgccagcgacacggccatcaaccccggactggagatcaactgccaggactgcggcgctccgatcgagcgggacgagattcgcgaatacctggtaccagcaggctttgctgtggacttcttcgatgaaccgcataacgatatcagccacctgcagtacgtaccggtcaaagctccttggctgaatgtgcccgccagctgggtctgcctggccaacccggcactcggccagttccgttccagccagcaggcccacctgttccactacacctcgggtgccaatcagcagggcttcgccatctgcctagagtgcggcaaggctgagcccatgctcagccatcccgatacatccgcccctgccaatgagcagtatctaccggccattttccgccagaaggcacagcacagacgtctgcgcggcggcaagaacgacgacggggaaaacatctgccccggcggccagaacagctggaagatcaagcagggcatccacctcggccatgacagcctgaccgatgcgttggagttggtactgcgtaccccctccaacggcgaactgctgaacgatgacatcaccggctattcgattgccgtggcgctgcgggaagcaatagccgccgaactgggcgttcagaccgaagagcttggctgcgattgccacccgattagggtcgatggctctccaacccgagccatccggattttcgacctgcgcagtggcggctatacctctcaggcggcagaacggctgaatgactccagcctgtggcagcgggtcatcacgcgcctggacagctgcaactgttcgcatgcctgccagcgctgcctgctcagctttgatacccgctttgaggctgatcgtctcaatcgccacgctgcactggagtggatcaaccagacctggcttaccagcttagagttgcccgctgaactcgcagtctttggttcacaaagtcaggcggaaattaccagcctgcaggaagcggtcgaacgggcgattacccaggatgacagcgcgaagaccgttacggtctacctcgcggctcccgccgaagactgggatcttgccgtcgcccgccgcctgcggcatcaactgcagaactgggaagacgccggacaccaggtgcaattgaatctgctggaaagcaccttcgccgctctgcctgccgaccagagggaatggctcgcaaaactgtccttcaacgggattgagatctgcctacacaaggccatgccagatctcggagtgctggcgctgaacatcagcgtacatgggccgcgcagcggcttcgcctgggccagcgacaatgcaaacctggccgcacctggccgtacctgggatctggcggcagccggggtgcggatcattcggggcgtatctcccaccctgaaagctgagcgcgtactggataccagcgatttgatgccgcctgcaccccagggcttggttaaggtcgagatcggtaatcatctggatggttcgctcgacggctttgctcgtcggctctgggagcacctcaggcaggaggccagaagccttctggctgatgcagtcacaggccaggaccccatcaccgagctggtctacagcgaccgctatgtatgcagcccgctggtcgtgaatctgcttgtcaatgtgatccatgagatcggagcgcatagtgatgaaggctttgctattaggattcaggggcgtcagtaccagaaggatgacaaccgctcaccttggcagtgccggcacgattggcgcacatctcaagagcgcgatcacgcggtccgtcaggcgttggagtactgcggcctagaagccgatgtcctcagccttccggctttaccacactaccgccagttgcaactgcagttgcgctctggcaagcaactgactatccagtttgatcaggggttttcttactgggaggccgagcgtagtggaaagccttatctgctcaggttcgatttctcatcaccgcagcttggagaggaaatcatgacgcgcatccagtgcagagtcttggcggccagtgatgaaaacacccaagtattcatttcatcctcatga

SEQ ID NO: 334998 - DNA, 606 bp, Pseudomonas aeruginosa
atggacaaaaacctggaatccatcctgtgctcacagtaccccaagcttctccctgcgcaggggcacggatgccttcagttattcggcttcgaatgccaggacggatggttcggtctgatctacgcggcatgcgatttgatacaacagcacatcgatcacacaggttcggaacaggccattgcctcacagataaaggaaaaatttggtgggcttcgtttttattaccacggaggcgatgactacgtcgcaactatggtggatctggtggaaaggctgtcggagtccatctgcgagctatgcggagccccaggctgcatccacgaacgcgatggctggcttagcgctcgttgccagcaccatgagaaatacagtgaaacgtcaccgccagactcgagcgcctggctcaggcaaggggaatcactgactgaggtactggaagcagcactcgcgctcttcgccctcaactcaacccaaacatcgcgctggttggtatcgccagccagagcctttggtatgaaatctcctgtcgaacaactgcaagagcacaacggctttcatgatgtgatgaccctgatcgggcggattgaatatggagtgctccggtaa

SEQ ID NO: 334999 - DNA, 306 bp, Pseudomonas aeruginosa
atggatagaaaaacagcgaggctatgcctccgaataactcctcacgacaagaaaatcatcaccgccaaagcacgtggtctccatctcagcgttgccgattggctggtccgggccgcgctggatcgcgaaatcattgcgccgatcccagtctgggacgctgagtcgatcaatcacttgtctcgcatcggcaacaatctcaatcagttggctcactcggccaatgctggactgcttgtggatgacgcagcactgcgtgaaatcgcagccgaactgcgtgccctgcgggggctgctggatgatttttaa

SEQ ID NO: 335000 - DNA, 309 bp, Pseudomonas aeruginosa
atggccgaggagatggctcggcaggaggtccaactccggacggaggagatgtctctggccctgtccgtaaagttggatgccatgcggagggcgaaagtgtcgaccagcgaggaactggcggaggagatgtacccattgcttcagggcatgacatcactggcactggagaaccaggtgctgctcaaggaaatgcgtgtgttgatgcgcaacgaagttcaggaaatgagggcggaaatgagcgagcttcgagcgattttgatggagttcaaaaccgtgttgaggtcctcgtatccgcaggtgcaggactga

SEQ ID NO: 335001 - DNA, 1308 bp, Pseudomonas aeruginosa
atgtcatgcactaataccctgacctttaccgtcccgcagcacaatacgctcgacccactcacgctggccgccacgattcaagcgctgctcaacaacccccagcacttgagcaccttccccgggcagtctcaacgagacaccgccgtcccgcacagcacacccgctccgtcgcaacaagtgacgctgcaatatgccgccaacgccatggtccatgagtacgcagcccttgggcactgggagtacggatccacatacaaataccggtcacaactgcagcagatcattaacttgctgggccccgatcgcctgacgagctctttgtgtacgaatgatctcaccagcctgaaagactcccttaagttcaagaacaagaactccctgagtcttccagtgatcgattcctcacggactcacgatgcaaacatcgaaggctatatcagcggcgaaaccatccaccgctacttcaacctgctgaagcgcttcatcgttttttgccaggaatccaagtatcagctcggccagctcgatatgagcgtgaagcttgctgggcaatatcccagtacggctcattacgctacgttcgacacgaccgaactcaatgcgatcttcaccagtcgcgtctacaccaccgagccgacttatcgcttccgctggacgccatacagctattgcttctggctcccattgcttggcgtactcacgggtgcacgccccggcgaactgtgccaactgaatgcgggcgatgtcttcgaggagtccggtatccccgtcgtacgaatcaccgacagaggtccactgcagcgcttgaagaccgacgccagcgcccggtatataccgctgcatcctcaactgatcgccgttggtttcctcgacttcgtcgccatacggcgacaacagggcggtcgattccagccgctattccccgagttgccctatgaccggaggcatggtcatgcgcgcgcagcctcccgttggttcagtggccaaggcagcactgacttgggttacctcaacgcctgcggcctcagtaaggggatgggctactgcctctacagctttcgccacacttttattgatctactgcgtaaagccggggtgcaggagatgatgatcaagacactcgtcggccatgcaatggacgacgacacgaccatcaactatggccagaatttctccctggcccaacgatacgagaagcttgctcaacttcatctggatatcgatctctcgcacatcgcctgggaaaactaccaacgtctccagcggctcaaaccacattgccagaagaataggagagctgcgtcttag

SEQ ID NO: 335002 - DNA, 2460 bp, Pseudomonas aeruginosa
atgatccatctctctcattacctgtaccgcgaccacgcagatcgcctgacctttcggctgatcctgcccagcctcctgcaacaacgctttccctccgtgggccgtgaaattcgctggtcgctcgacggcgtcccactggacgacgctcgggaactggccctgaatctcgctcggcgcattcgcgatttgcgcttccgtctgggcgacatcaagaccgccgaaggcctgcagcaggagctccagcggattcaaggctcgattccgccactgagtcgccagagtgcccccagtccgtcggcgcgcccccagagttcgcaggtcgcctgcccggtccaggacctgagcctcagtgtcggccgtcaacgcctcgaacaactgcgcctgacgccgacctttctgttgcgtgacgagcaccagctcacagtgcaggcccccttgccggagctgctcggagccgcctacccgctgatgctgaaaacccaggtgttcgacctgcacaccctgaatccccaggaaggcgagcagcgtgccgctttcatcctgcaaggcctggcggagctgaacgagcggcttcaacattgcctggatcgcggtgaatggcttcccctctaccaggccagcttccatctcgaggccctgcgtcgctacctgcttccggaacacggcctgcactttcaccatgacccgcgctggctgccactgcgcccacaggatttgcgcgagcgcgaccacgagcacctacgccgtctagacacccaggccggttccgacacaccgagccatcggttgcatccagcgaccggcggcgcacatcggctggacatcagcacgcctcaactgctgcgcgagcactacccccaactgccggatcagttgaccctcgacctgcacacacaggatctgcacgaggctgtgctgaaggcgggctttgtgctggagcgcttcgactggctgaccgacctagtgaggcagggccagcactttggcggaggcattcccagcctgcacgaattgcgtctgcacgtggaggcaattcggggccgcttgcgccccgatgacgaccatccccagcctccgcgccccatgcaacccgacgctgccgcctcaacgcgagacgctagttggaccttgcccagcgcgcacgccgatacggtgccagccaatcccctcggcgcattgttcgccaacggcttccagccccgcagcgaacagcgcactgagggccagatgagtgtccatcaactgatggagcgctaccggcgcgagcaggagctgaccggccagtggtcccatcaaggcacgcgctttctcaactgcgcacgcctggaagtggtctgcgagctgttggggcctacgcgccccattgcgtcgatcaccaccgaagactttcgcaatctgcgcaccgtgctgctgatgtacccccgcaaccgccgacagatcagcgagctgaacgacacaccgatccacgtcctgatcgcacaagggggctatgaagccattcacgccaaaacggcgaagaagtacttcgacctggccaagggcatgtttcgcttcgcctacgacaatgagtggatcgcccgcgacatcgcgggcccggttcggctcaaggaaatcgcccgcaagaagagcagccgcgttcgtcgcgcctatacgcagcaggaactgcagatgctgttcaatggcccggtatacactgcccacgatgttccccgttggcggatggacagccacaaattctggctccccctactcgggttgttcaccggctcccggctcaacgaactctgtcaactcaccctggaggatatttgccagagccccggaggaatctgggtcatgcgccacaacctcaaccatccacacaagctgctgaaaaacgccagcagtgaacgggacattccgctgcactcggtgctcatcgagaaaggttttctggagttcctcgcgcaacgcggtgccgaagcctcatcgcgcaaggaactgctgtttcccgaaatgcgcgcggacattcgccgtgctcacagtcacctcgcctcgcgctggttctgtggcgacccgcaacgggtcggctacttacagcaatgtggcttcccacgtcgcaatggcctcagtttccattcgctgcgccataccttcgtcaaccagttgcgccagaccggcgtggatcagccacgtattcaagcgctgacggggcatatcaatgactcaacaacaggggactacggcaacggctacagcatggagctcaagcaaaaaaccgtggagatgctgcgtttcaaccttgacctcagccatatcagctatgagcgctacctggcgctgcagaagcgcagctttcgccctggtcgccccacctcggcacgacacccttcgagcgctattcggaacactctgtcgaccgagaagcccgataaccaggcactggtggattggctgaagcaacaacacgactcgcagtaa

SEQ ID NO: 335003 - DNA, 1275 bp, Pseudomonas aeruginosa
atggagctccgtttcgagcagcccgaggaagggctggagggtgcttgtgcttatggctaccaacagggctatctggttgactccttggagtctgtaggcactcggctgaatgcggctgtcagtgcagcttaccctctcggatgggattcttggcgagataagaaggcgcctgcgtttctcttcgacatcctgccatcaggtgcagcaagacgctttctactgaagcgtttgggcggcgagcggcccgagggtctcaatcttgatctctaccttcttgggcgatgcacacctgcgccaattggcaatctgcgtatcaaggagtctgtcgaggcaattgcgggcagtccagtgttgggtttcacacgcgatgaggttattagccgggactcgcgattccttgagtacgcgtatgagcagggcgcagccattggcggggcgacaggagctggtggtgaggcccccaaactgttgcttactgaagatcggcacggcgccttacatccagatgccgtgctgccagatgcagatgccgtccagcactggtttgtgaagttcgcgcgtaacaaagccagtcagaccgatcaggacatcctgcgcagcgagtattgcttctatcgtgccgtccagcagctcggaatggatacggttgcagctgaagggctggcattggaggagggcaataagcccagtctctggatgcatcgctttgatcgggagattagctccacaggggtttgccgaactgccgttgagtccatgtactcgctatgtggcgtaaccgaggcgggtagttacatgctgcacacgcaagtactggggaagctggtcgagctatggcgagctgttgggcaggaacagcaggtcggtgatctggtgtttgaatacatgcggcgtgatctgctgaaccagatcctcggaaattcagacaaccacggacgtaacaccgcgattctccgctccgagcagggggttcggttggcgccaatctacgacctggctcctatggtcatggacgaggagggtgttacgcgtacgacgaagtggccaaagcacatcgagcttgcaggagacgtcaactggagagcggcctgtgatgaggtcgcagagtggattgatgccgatgaactgttccagcgattgcggttggcagcacaggacttcctcgcgctacctgacttgctgagtgcacaaaggcttcccgattcaacgatgagtcacccgcgtatagccctgagaaatctccagcagcggatgcttcagtgggggttggtctaa

SEQ ID NO: 335004 - DNA, 267 bp, Pseudomonas aeruginosa
atggacattcttgagcgcaatcgcattttgaatgagctgcagcagcagttggctagcggcgagatcacgattggaggagcagtgcgacgcctgcgcaaggaagtgactggcttgcagcaggccagatttgcacagatgtgcaaactgtcattgcgtgccttgcgacagcttgaactggatgagagcaacccgacggttcagacgttgaacagtgtgtttaatccctttggcatgcaggtcggcattgtgccgaagactccgcgttga

SEQ ID NO: 335005 - DNA, 804 bp, Pseudomonas aeruginosa
atggattattcatcggtgctctccggggtcatccaggcggtcactagggctggcgagcttctagtcgcagagtggcagcgtcctgagggacctcgtggtgcaggtgataaagcggatgttgatgtagaaatcgaggctctattgcggccttgcctgcttgacctattggatggggatttctggggcgaggaaacaggatattcgctgaccgatgccccgttctgctgggtggtcgatcctaacgatgggactgctgactttttgaaggggttcaagggctctgccatttcggtaggactacttgaaaatgctcagcctgttctcggtgtggtgtatgcgcctgtgctagaagggtgcccagctgactgcatcgcctgggctaaaggcatgccatcggtgctgcgtaatggcgaaccggttgacgggcatctgtcaaaactggagtggagttcagacagtcaagtaatggtcagtactgctgccaggatgaagccagagctaaattctgaattgtgtgctccgggtagatttgccgcgatgccaagcattgcctaccggttagctcgtgtagctgcaggtgatggggttgctggtgtgtcacttgtccaggtttccgcacatgatgtggtagcaggacacgcattgctaaaaggtgctggaggcgtacttctcaatcaggacggagaagagatttcatacgtggcagaggcacaaatgaagactgtctcgcatcggtgcttcggaggttcaccagttatctgtcgatcactggtgaaccgagagtggagtcgactgtttgagtag

SEQ ID NO: 335006 - DNA, 609 bp, Pseudomonas aeruginosa
atgccgaaatggctcatattgccaagctgctggaggagaactgaaatggctggatttgttgctattgagggcctcgacggcgtgggaaagtctacgactctgaacaggctggctgagcgcttctcaggtcacgcaatgagtacccctggacccgcattgcgtagcagccgcccagtcattctagaggcttttgcccatgatgaacttgccaaggcgctgttctatgcagccagcgtttccagcgaaggcaggcaggcacgcagcctggttgaacgtggcgagtgggtgtttatggatcgctactgggcctcgacactggcctatgcaaaagctcgcggtgtatccgccgagctggagcttttgggccaaagcctggtcaagccggacataacgatattacttctgcttgacgagcctgaccgccaacaacgtctccttgctcgtggcgctaccgcagaggacatggaaacgcttgatcccggctttcgtgagtgcgtacttgatgagctaatggcgcatgcagacattgcagtgaataccactcacttgactgcggaagccttggcaatcgaattggaacagaggattaggcaactgccacccggctga

SEQ ID NO: 335007 - DNA, 240 bp, Pseudomonas aeruginosa
atgtacttcagtaagaacaaggacatcaacaaactcgcattgaaactgcttcaacttggctggagctatgcaaaaggaaggcactacaagctctttccacccaatggctgcggcatggttatcgtgcctggtacaccgggagattgccgtgcattccagaacttccgccgtgatgtaaggcaacgcttacgtggccacgctgaacgataccggcacgccagccaggagctgatgccatga

SEQ ID NO: 335008 - DNA, 2205 bp, Pseudomonas aeruginosa
atgaatgatttggtggttttgcctactcccagcaatctctttaggaaactgctaaccgctactggttaccgcccctgcctagaaggtaacggattgggtcgggatatcgatcacctagccctcgaagaacgtccggctggcaacttcgacttattggagaactgccaagctcaatggctacgggccattcgggacgatgctgggccggactggagcaatctgatcgaatcagcctggaagaggcacagcaacctgatgcgctcactggcgcgaaaggtagataccaccgggatgattcaggatcgtgcgcagtcggccatccttaagatgctggtgatacctgaaatctcgggctttgtaagtcgcgcacatcaggaattaccgttgccggatatgcggcactggtgggactccccctttgcctcctggctaatcgttgcacagcaaaaaacctcacttccgacaccccaattgttagagcggcttgccaatcacgtggatctggacgagcgcacgctggagcgctggcagcagggtaacgctatcggtaaaagcctgtggccgtaccgcgatacggttatggcactcgtcggcgactgccaattgccgcgccagcagatagagcgactatccggttggttgatcatggtggtcgcaatacagtcattgcccgccgatctgcgcgacaccgtaaaacgcgacttttttatgcacggccagctgcctctgaggacagaggagcagttcattgcattactgaagcgggaggcagcagaccggcttagcctgcctgtacgcgaccagattgctcctgtactcaacgagatccaaagcttgtttgccaatccagagggcaaccaaaaggctattcgtgatcgccttgtctggcttcgctcgctgtgtgagcgcacctcacctgaggtctatgcggcccatgagtatctttggcgctggttctcggcaaggttggccgcaaatcttggcgagaaggataatgcgctaaagctttacgcaagcgcatgccattcggcttggtggcgcgccgggtcgcaccagcatccacttatccatgaagctttgtgctacgccgttggcgtgggtgatcaggttcaggcaaaccattactgggacaaatgttttttgctgggtttgaacaacctgcccaaacgagaactggatgaacaggcaatgcgcctgatctcctttgagtttgaacgactgtttgcgccacaaaaggctacgcaacgaattccacctgcagtgcgttatttagtgggaccgttcgccctatcacccaaggatctggcaaacccaaaccgaaagcgcgcccaggccgatggacgcgtccgctatacgccgttgatggatgcagtcctgatggggacgcttgacgatgtcaaaaagcttgttctggcaggcggggatccaaatattttaattccggaatctggcgaaaacgccctgatcatagcgctgcgtcgagcacatgaccgaaaagaccccgaaattcttcagtatctgctgagcctggatatcgctccagaaacagccaaccggccagcgtccagcaaacgggagacgccattacagatcgccatgaatatggctgatgcgaaggttgttgagcggctgatagagttcggcgctgatatcgagcagccttgcttcaactccccaagcgctctggtttatgccatggcgctgcttcatgacagcatccatgtgaatgatcctgcgcagttgagagcctacttggaagggcgtgttccggccgattctttcgatgccaagaacggtgccattctggattgtgagctatcggctcaacgccttgatgtgcaggcgatgctcgctgacccgcaaaagaagctgaatttcgaggctgtaaagcagtattactaccggaccaccgatgagcgtcgtgatgtggtcatggcattgctgaacaagagagcagatccaaatcgacgctatccagattttaacggccatcgcgacctctggacgcctacgttgttcgccgcgcagttgggtgatcttgatgtactcaaagccatgatcgcggctggtgggaacccttggctttcactggacgaggaccgccccagggatgagaagaatgcgctttgggtcgcagtcagctacaagcggcacagcgtggtcgagtacctgctgacgctgctgcctgagcgcgccacaaactga

SEQ ID NO: 335009 - DNA, 648 bp, Pseudomonas aeruginosa
atgcaccaccaggccttgaaggaacgccaccgccaagaacgcgaccagcaacatcccaatctcagcctgcgcctgcatcgagccctgagctggctgaaccgtgctgaacagtccgaggacactgacggccgcttcatttttctgtggattgcattcaacgcagcctatgccaccgatatcgacgagcagcagcggttatccgaacaggaaaccttcaaagcctttttagaaaagctgtgctcgctcgatgcatccaactacatcgagaagctcgtttggtccgagttctccggcagcatccgggtgctgctggacaacccgtatgtcttccaaagcttctgggatcatcaaagcggaaagatcagcgaagaacagtggaaagagcgcttcgccagtgggaaaaaggcagctgctttagcgctggccaaccgaaatacgcccgcggtacttggcgtgatgttcaaccgcatctacaccctgcgaaaccagctcattcatggcggagcaacctggaatggccgggtgaacagggatcagctacgagactgctgcaacctgctaggcaaacttgtgcccttgatcatccagatcatgctggacagcccagacaccttatggggcgatgccaactacccagtggttggctga

SEQ ID NO: 335010 - DNA, 351 bp, Pseudomonas aeruginosa
atgtacgacttgacctatgccggtctcattgaaggaactcccaatgagcgcctcaacacctggatcatggagcgtgcgctgactcgccaccaggagttatggggcgagcgccagatccacatgattcagcctgcaatagatgtcagtgatccggcacacccttccctaccgcgactcaacctgcatgtatggctgacctgctcagagtcgataaacccgatgtgcgatggctcccagctagtggtcacctggtttgagaacgagtgccatatgcagccactggccgaggttattttaagcgccattcgacatctgccatggaagcagctggcgcgtgacttcgactattaa

SEQ ID NO: 335011 - DNA, 843 bp, Pseudomonas aeruginosa
atgcgccaacgcccctgtgcaggtgcgctgaaggtgcccaagccacccttcggcaaatcgggacttcgagactatttctactacctgctcaaccagggagaaagtctcgaaagccccaatagcgccctaggacagtcagtagctcaagagagtccgcgtttagacgtgcacgaagttgggctcattgccgctacgcaagcggaggctgatcggctcgttgagcgtatcgcagggacgatgcgcgcgcacctacccagcccggcaaggcaccgctttacggcttacgggctggatcaagcatggcgaccacaacagctttttgatgaggtccattggtttaatggcagcctcacctgtccaccgccgcaagagattctggcgaacctgtgcagcatcgtgcacatccatctgtttgaacacagtgacacgaaactacgacacgggtttcgcacgtatcactggagatcggcaggtgacctgacagagtttttggcaagcctctacctatcccgtgaagtgtgcggtctcttggagttggactgggagagctattgcatatggcagccacgcattggttgcattgccacagtggactctggctggggttcgacacctagggcagctacagaggttctactggcgtcagcaggcgcaacaagtccaagcagttcagacggtgagatcctgatcattgagggcggtatcgacacacgcatcggagattacgtcgacattgtgagtgcgctggaacgaagcttcgaattcgacttcgtcaccaccggctgggtaagccgcaactattcgggttatggcctgaagctcctgaggtttcacgactcatag

SEQ ID NO: 335012 - DNA, 165 bp, Pseudomonas aeruginosa
atgaaaacctattccgctttcctgcagcgtgttaccccaaatgcagggcctcgcgccaacttcacgatcacggtcaaagccgtgaactccgaaatggctcgcgtcacagccgaagcccaatacccaggctacagatgcgccaacgcccctgtgcaggtgcgctga

SEQ ID NO: 335013 - DNA, 1032 bp, Pseudomonas aeruginosa
atgcgacagcctatgtcgcacacaagtagggatggaagtgtggaacagctactccgccatgagctcatccttggccttctccctagcaaggacagcgctctagatagcaatgccattcaccaacgagtagccaaccaaggcgtccaggttgataaacgcaccattcaacgtgacctcagcgaactcgaacagaaattcccccatgtgcacagcaggcccaagggcaaagcaaaactgtggtgggcagagaaatcgctatcgcgactgagcatgctgccaacagatgcgatgaacctcgtcatgatcatggagcacgctgctagattcggaatggcggcgcaggtagaaaatctggcgccccttcgggattacgcgacttcactgttgaaaggaaaccggcctagccaagactgctcaggcaagatcatcagcaacacccgcttcgttgtcctggaaccaggtcaggtgaagccagaggtactagaggttgttcagcaagcactactggatgatgcatgcattgaggctctctacctcaagcgcggcgcttgcgcccccaaaacacttcacatcaagcccttggggttgtcctaccaggactccaatatctacctctcgtgtcttgtcaaaggattacccaaaggcaaattggccgcactccccctgcatcgttttcaaacggccaggactacgtgggaaaacctagaggcccccgacgatttcgatatcaactcgttcgaagccaaacgaagcctgatcagccagaaatctgagcacccagttcagctgaagctacgcattacacagacgctctatgagcgcctagacgagaacgcactcactaccgatcaagagctacggccagcagctaatggctggtggctgatgaccggcagcgtgcatctcagccaaggtctggagttatggttattgagccaaggtgaacacttggaggttatggagccggttgaactgaggcagcaaatagcactatcagcgaagcggatggcggcactgtacgaacaaggttaa

SEQ ID NO: 335014 - DNA, 762 bp, Pseudomonas aeruginosa
atgccgtcgctgagagcgatggaactgagcgggctggcgggtgttacctatcacgagatcagggcagccaatccgcttcttggattggttgatccgatcaggattcgaaatcgctatgtggagctgcgtgagcaggctctgttgggcgatgcggatgcgctcaatgatctagggtggttttggctcaatggtttgcggctgaagccgaaccctgcgctagccagacggttattcaagattgcggcagtgatgggagcctccgaggctctattcaacctcgccgagctggccttttacggcaaggggcttgcggtcaatctggacttggctatcgactattacgagcaggcttttgaagcagggattccctgtgctgcgcaagcattagggagcttgtatgaacatggggacgagggtgtcatcgtcgatcatggcaaggccatcagttggtacaagcgtggagcggccgagcaggatttgatggcgtgcttctcacttggcaggttggctctggatgagacatcacccgagtatgatcccgcacttggcttgtattggctgcagtgggcggccatgaaggggcaggtattggctactgagcgtcttgccgatttctacctgtcgactttcgacgttccaccggacccgggcggcttgctgtattgcttctggcgggatctggccattgcccagggaagatcgcaggcaagggcgatggagaccctggacggggagcttcaacgcgagtgccggggctcataa

SEQ ID NO: 335015 - DNA, 567 bp, Pseudomonas aeruginosa
gtgcaggatatttaccagattgaggcaggcacccggattgaccaggcgcaatcctatattcgcgcctatccccacttgttggccgtgttgagtgccaggcaggtattggccgaacaggatctaattgctggcgcccatatggtgtatggctggatgccaacgatcttggagattcaccccggcgaatctaccggtatcgaggaaggggttgtgctgctgaacagggcacgcgtcgaggggcagcttagtgtggatgatattggccggctcgcaagcttgatcaatcgctcggtggtcggagcgtccaagctgttgcacttcgtgaatccggcggcctttgcgatctgggattccaggatctatcgcttcatccatcgcaagaccccgcatcaataccgcgtcaacaacgcagccgagtatgtgcgctacctgatcttgctacggcagctgcagcaggacgcgcgcttccaggatttccatgcatcaatcaaccgtaagatgggctatcaggtctccgccctgcgagcgcttgaggtggtgatgtttttgaatacgccagtggactag

SEQ ID NO: 335016 - DNA, 2628 bp, Pseudomonas aeruginosa
atgcagggacaacgcattaccttcggtttgcacctggacggccaacggcccaggccggcggccaatgcactcggtgtatcgctggtcggccccttaggcctgttgaatattctcgaaacccagttgggtctgctggcgctgcgaccctcgcaggccgagcgcattgtccagtatcaggattgcctgcatcggctcgattccgagcagcgtttctatcatcgcagcttcgccaccgaccccttgggcacctcggcatgcctgctcgactggcgggatcagtgggccctgcatggttgggatggcgccatgcccagcagcgcgccaatgcgtctgcgagacctggcggaggttgaagcactggccgcaacggctgtggcgccgagtattggtcagcggcttgaggcggtgaaggctgcattgcagaagcgccagcccagcatcgagcagatcctgcttgtggatccgctggaaaccctgccttatcgctggcaagcggtgcttgccgagctgccaatcgtggcggccggcgaattcgctgggcagggcatgggcttccttggcgcgctgcagaagcagctccacggcgctgccaacggccaggagggggcgaagctggcgtggcaggaggatggctccgtgctcgtcgtccaggccgaaacgtcaatattggcgaaccactggtcggcgacccagttcggcgcggattgcccgacgcttctgctctgtacccgtgacggcatgcgcctggatgcccagctttacgctgccggactgccccggcaagggctccggcatgccagtaccttccgcccggcgctccaggtcctgcccctggccctggagctgctgtgggaaccgctcgacttccaggccctggtgcaattcctcactcacccgatctgccctgtccccggctatgccgggcgccgtctcgcggaaaaagtcgccgatgctccgggtatcggcggggcgtattggcaacggaccctggcccggatcgacgagtactacggcgaggagcgcgctggctcggttcgtgaaaagattgccctctgggtcgagcatgcgcgtttccctgccgagtccggcgcgccgatagaggcagtcatcgagcgggttgctcacttggcggcattctttcgccagcgccttggcgaagacgatactgccaagcgcctcgccttcctggccagcaatggccagtgccagtcctgtctggattcactggtgcggctgcaggctcagggaactgtagttatccgccccaggcagctgcaaaaactcgtcgctcaagccaccgccagcggtacggaaaactctctctggccagccgaggtcggcgcagttcaggtggtgaatcacccgggcgcgattaccgaaccggttgcgcgggttatctggtcgcccttggcgttaccgccgctgcccggcagcgatccctggtcgactgccgaactccgcgtcttgaaggaggccggggtggagctgccgtcggctgcggacaggctggagcaggtcacggccagttggttacggccggtcatggccgctcgtgagcaactggtactggtacttccacctgctgaagaggaggttcatcccctctggctaatgatcgaagcactcgtcgagaagccccggatacataccctggagacgcttcttggcgcaggcggcgccatgctggctccgatcactgcccagccactccctgctccaaagcgctggtggcagttgcctgacgatgtctcggtggctttgcgccctaaagagtccttttccagtctcgaaaagctgctgttcaatccctatcagtggttgctgcaatacccagccagactgcaagcgtcgcgcatcgttagcctcgatggcggtttccggctgctcggcaatctggcccatgggctggtcgagcagtatttcctacgtcaggacgcgctgacgatgcccgcagcggagtttgacgcctggtttgcttgctccttcacggcgctgattgatgaggaaggggctaccttgaaagctccgggacggggcgccgatcttgagggttttcgcctgcgcctgcagcaggccatgcgtagtctgcgcgagcaggtggccaaggccgggatgcggcaggtggtgccggagcggacggttggtgggcagttctccggaggcgagctggtgggctcggtggacctgatgctggagaacgcattgggcgagcttgccatcgtcgacatgaagtggtcaggggtcaggaagtacccggaaaagctgcgccagaatcgccatctccagctcgccctctatgccgagctgttgcgccaggaaacggggcgctggccttcggtcgcctattacattcttgaccgtgcccgttttttcgcccccgacgaccgtgccttcccggacgctgagacagtgccgcccgtggatggcgaaaacaccccacagctttggcagcgcttcctggctacctggcgctggcgcgtggcgcagatgcagtccgggcgatttgaggtggtgctggagggcatcacctccgacgaggcggggcaaccgccggaggacgccatgaccatggaaacgctcaacgaggcctacaacgattatcggacgcttgccggatgggagcgctaa

SEQ ID NO: 335017 - DNA, 3177 bp, Pseudomonas aeruginosa
atggcgagcagaatgaaaggccagatcacctttatcagtgccggtgccggcagcggcaagacccaccgactgaccgagcttttgcaccacgagctgacgtcgggcagtgtccggccagcgggcgtcatggcgaccacctttaccaagagggcggctgctgaactgcgcgagcgcgtgcgtgggcatttgctcaagcagggcaactttgccctggccaattcaatgggccaggcacgcatcggtacggttaacagcgtttgcggccaactgattgcccgcttcgcgtttgaggccggcatcgccaccgagcagcaggtgctggaggaagcacagagcgggattctgctgggccgtgctatcgacgcggtactggatggaccgagcatgcagaggctcctgggcctggttcgccgcctggggctggaagatgactggaaagacgctttgcagttgctggtcaaccagattcgcagcaacgatatcccgcttggccgggtccccggcttcgcccagttgaatgccgacgacttgctaagccatttcccaacgccgtcccggcaggatctgagtcttgatttgctcaaagcaatccgcgtggcgctaccaaccatcgaagcgaccgccctgtctggtagcaaaaagaacaccaatgactacctggcgctgctcaagggctttgctcgtggccttgaggggcaggccgcaccttggagcgaatgggtcaaggttgctaaggcggctcccgaggcgagcctgcgccgggtcatcgagcccattgcggacctggccgggcaggtcgacgcgcatcccagcttgcatagggacctgcgcgattacctcgaccatatgttcgacctggcgaccaaggctctggccagctaccaggccctaaagcaggagctgggcgttctcgattttaccgatcaggaacaccagctgcttggcttgctcgaccaccccgaagtggcggctgtgcttgacgacgaactcgatctgctgatggtcgatgagtttcaggataccagcccgatccagcttgccctcttcctgaaactcgcccgctttgccaagcgagtctactgggtcggcgatatcaagcaggcgatctacggcttccgtggcagcgacacggctcttatgcaggccattctcacggccttgccggacctagggggcagcaaggaggttttgccatcgtcgtggcgctcgcgcccggagctggtgaaggttgtgaatgcgctctttactcacgccttcgcgggctccctgaccagggaggagatcgagctcagggccgagcgcaccgaacccttgccagggcctggcttggccaactggatactcgcgggcaaaaacgctggccaagaggccagcgcgttggcatccggggttcgccaactgatcaatagcggttatgtagtctatgacaagcaggtccagtcgctgcgtcctgctcgcttcggggatattgccattctgtcgcgttcccatgacggagtggaggcgttggctgcggccctttccgcgcaaggcattcccgtcgccactgcccaggcgggcctgctggccacgcccgaggctacgcttgccctggcctgcctgcgccgcctcaatgaccctgcggataccctggccacggctgagatagtgtcactggccgacagcctggagcctgaagtgtggctggcggaccggctgcggtacctggcgcaaggcggtaatgtcgatctctggtgtgagcaggctgtcgaaggtcatcctgcgcatcccctgctggaagccattgcagctttgcggcccgctatgccggtactggccccacaggaggctttggcgacgctgatcgcaacctgttccctcgcggaaaaggttgcacgctggacgccagatagcgtccgagtacgtcagcgactggctaatttggaggccctggttgcacttgccgagcactatgaaagtctttgtcgaagtggtcagcaggcggcctcagtttccggccttattctctggctcgatgaaatggtcgagcagaagcaggacatgctggccgaaccggccgtcgatgcggttagggtgatgacccatcacgccgccaaggggcttgaatggccggtggtcatcctcacggacctggccaaggacatcaaggaccggctctggtcgatctgcgcggagtccggtgcccgttttgatgtccacaatctgctggccgaccgatctatccgctactggccctggccattcggcccgcagaagaaggtcgcgattgctgacaagatcgcggacacgaccgtggctgctggatttagacaggccgccgtggaagaggctaagcggcttctgtatgtcagcatgacccgggctcgggatctgctagtgttggcgcgctccagccgcagaccgagtggcgaatggctcgactcacttggggcgccgtggttactaccggcggagggatgtgatgccgtggagttgcccaatggcgagcgcatctctgctgatcactggatgcttgagccgctggaggagccgggcaacggcgaagcagcggcggcgcagccagtccattggttccaggggcagggcgacagcggcttgcgcctgccactaagctttagcccatcttcggcagggctggtcccgggtactgttttggaaaagtgctgtatcggtgaacggattcctgtggccgccggtgctgatgtgcgtgcgcttggcgaggccattcatgcctgtattgggatgaccttcgctgatccggatactcctctgtctgagaccgatgtaatcaacatcctgtccggatttagtgtgtcggagtacctgtcggcaaccgcagtgttgcaacagctcaaggctttccaaagctggttgtctagccgttggcctgacgcgaggcctcatgccgaaataccactgcagagcattttgccaaatggtcaggtgttgaatggtcggattgatttgctgttggaaaccgctaacggatgggttctgtttgaccacaagtccagtcagttagctatggatcagtggggtaagttggctaacgagtactgcgcacagttggagctatatgctcaaggcgtagaactggtttccgggagaaaagtcatcgaacagtggttgcttctgccggtggcaggtggcgctttgagcattgagaggttcggatga

SEQ ID NO: 335018 - DNA, 123 bp, Pseudomonas aeruginosa
atggtcaaaaatattcttgccaccataggtctagcggtagtggtcaaagccgcttttgaacactatcgcgaattccaggagttgaagcgcgaaaagcagggcagcagggagccaaccacctga

SEQ ID NO: 335019 - DNA, 555 bp, Pseudomonas aeruginosa
atgtccgatgctcaaagcagtacgaatcagtggttctatgaggaaaaaggtgaacgcaagggaggcgtgagcgaacaggatatgatcgagctgattcgcgcaggacgtctcggctatggtagttccgtgtgggcacatggctttaccgagtggtcgaagctggaaaacaccccgctgcggcaacacctacagcacaccccgccaccgctggttggcagtcaggtgaacaacactctagtctgggtgctcgctttcgcgcccatcattggatacttgatggaatggttcgtcgcaggcgccatcaacggcagcgaggcagaagcggcgcgagcgatggaaaacgccagctactggtacatcacgctagcgctcaatctgctgctttccttcttcgacgagaagcgcctgcaaaaggccgggcacaatacaagccgcttcaggggctgggtctggctggtaccggtgtacctgtatcaacgcgccaaaaatctgcagcagaacctagcctacttcattgtctggctagtgagtttcgcgctagttcttatggcctaa

SEQ ID NO: 335020 - DNA, 468 bp, Pseudomonas aeruginosa
atgaaaggaaaatccaccatgcacacaaccaagatattgctgctctgcggcctactcacctgtgccaacgcccatgccggctcctatgaatggacgtccggttggggcatgggcgtcagtgaacatctggtggacgacggtaacggcaacgagttgaacatctcctgcccggactacgaggaagacggctatgtccgcgcccacgccagcatcggcggccggcagtacagctccgaagaaggcagcggcttcgacgtgatcgttgacggagagacctacagcaaccccttctttaccgactgccgagtgtgcggggccaatttctccggcttctgggaagccctgcgccaggccaaccacctgaagctcatggcaggcggcaaaaccatcaacctgcccaccaaaaacatctccagcgtactccagcccctagacagcccggagaacagctgccgctcggcctggtag

SEQ ID NO: 335021 - DNA, 201 bp, Pseudomonas aeruginosa
atgccaataccgctccctccgcttaccaccatctgcccacactgtggctggaagcgcaccagcattccaaccagcgacgccctcaggctgaatgtcgacttgttctgccgctgccccgcctgccagcacaccgaactggagatccgcccggccagccgcgcggaaatcatgcgggaacggctgagccaattccttcgctaa

SEQ ID NO: 335022 - DNA, 510 bp, Pseudomonas aeruginosa
atgcccagcagccaatctgcgcctgcggtgcactacgccttgagctggctcgaccgtgccgagcagccggacgatctcatcttcctgaggatcgccttcaacaaggcctatgccacagagattgacgagcgccaacgcttctcggagcaggagaccttgaaggcttttctggaaaagctcagctctctggacgagagtaagcgtatcgacacattagtgtggcagaagttatccagcagcatccgcatgctgctggataacccgcacgtgttccagcgcttctgggatcaccagagtggcaagatcgacggggccacctggaaaacccgcttcgccagcggtaagcgcgccgcccagcaggttttggcctgcgctgttcggcgtgctgttcaagcgcctgtacacacttcgcaaccagcttatccacggtggcgctacctagaacggcagtcaaccgcaagcagatacgagattgcgccagcctgcctggcaagcagctggcgccgttga

SEQ ID NO: 335023 - DNA, 342 bp, Pseudomonas aeruginosa
gtgatttacgaccccaaattctttgagaacgaagatgcggcgtgggagttgctcgtgcccatatttggaatcaatgccggaagccagctatttaggcaagcgggcattcgcggaggcatgggattgacaagggcaggaatcaagaaatacctgacgaaggaaaccctcaagcaattccagaagatcatgctcaaatattttgggataaaggttacacaaaaaggcgtaataaccaaaaccatcccaattgtcggaggcctcatcggcgggacttggaattacattgaagcgagcggagtaaagaaacgcaccatcaactattttgaagggaagtcaatataa

SEQ ID NO: 335024 - DNA, 1020 bp, Pseudomonas aeruginosa
atgtccgaagctaaggacacgctcctgagacttatcgcggtgctgcgccttatcccacgagccccaggccgcattgcgaccacaaccttgctggagaaactcaaagatgatggtttctccgtaagcctgcgcacagtgcagcgcgaccttgaccgactgtcgatcccatttgcactacagcgtgacgagagcgccccatcatttcgctggagcctttcggaaaatgcgcctatcgatttgtcggccctggacactcctacggcactggcactgtacctcgcggaaagccacctaaagacactactgccacagagcgttctggatcagctcggcccccagttccgtatggcccgcgattacctcgacaacctggaaaacaatggcctggcgcactgggctcgcagggttcgagcccacccaaatggcaagtccttgcaacctgcacagatcatctcgcaggtctgggagcaaacctccaccgccctgctggaacacaaacagctgcagatcagctacctgagccgcagcaaaactgagctcaagcagctattgatccaccccgctggactagtgtcgcgccacgccatcagctatctgataggcagcgtcgacggctataacgacttgcgacagttcgccctgcaccgcatccgccaggccgaatgtctggacgcagcggcccgcacccacaacgacttcgagatcgacagctacatccgccaagacctcaacaccaccgcccccattgagcaggtagaactagtcgccgacgtatcaccgcagattgcctggctgcttagcgagacgccgttgagcaacgaacaaagcctgaaaccgctgccagacagcgactggcaacgcctacgagccacagtaccggatgatcaggagacgcagtggtgggtgtttggacttggtgagaatgtgagggtgtgggagccgcaaagctgggtacagagcattaaggaaaaagtagcccgtctgaaagctcaatatgaacaagtaacgcaatctgtctga

SEQ ID NO: 335025 - DNA, 534 bp, Pseudomonas aeruginosa; identical to SEQ ID NO: 334328

SEQ ID NO: 335026 - DNA, 267 bp, Pseudomonas aeruginosa
atgaacctatccaacctggacggcatcaccatcggcttcgactacgatgatgcgcttgcctctgtcgacttgggttacgagtcaacgattgcgaaacaatataccaagcaggaaaacctcctcggcgtaggtaaagcgctgagggttcgtcgaaacggcgagatcaaaatgcacgtcgtgctgaacggacatgtcctgctcgatctggttgaacatgaaccgacgagtgacgagttctgggggggcagccaacattcttgcccatga

SEQ ID NO: 335027 - DNA, 690 bp, Pseudomonas aeruginosa
atggaccaggaccgcatcctcgacaagataaaaaagtgtctggaaatggctaaaggccggggttccaacccgaacgaggccgagatcgcgctgcgtcacgcccacaagctgatggaggcctacaacctggagatgggcgacgtgctagccagcatggctggcgaagccagggttcccgccggttcggatggcaagccgccggcctggcgggtgcgcctcgcacaggtgtgctgccatgccttcggcacacacctgatcatctgcacctcctggcgcgaaagcgcgtcgttcctgttcgttggctgcgcggcggcgccggagctgacgggttatgcctaccaggttctggagcgccagttacagaaggcgcgcaaggactatctgagcacgcagaagcgctgcaagcgttccaccaaggtggctcgtggagatgccttcgcgcacggatggatcgaggccgtgtacgccaaggtcgaccaattcgcgggcgtcgacgacaacatcgccgacgcgatccaggcgtacatggcgaagcaccacgctgacgttggcaagttcgagatgaagcggcgcaagctcaaggctcgtgacgaggtggccagcgaagcggggtatgccgcaggcagacgtgcgcggctgcatcagggtatcgggcatcaggccgtagctcggcttactcagggggggtga

SEQ ID NO: 335028 - DNA, 204 bp, Pseudomonas aeruginosa
atggggttgctcaccagaatgacctggcctgaaagcaccttgttgcaggtgttggaggatgccgagcaggacaaagccgataccttcgacatcgtctgcctggagctgaatgatggccgcactctcaccgtggcggtgatctgtggtgacggcgcagatgacgcgaacaatatgctctcggaattgcaggaggcagtgcgctga

SEQ ID NO: 335029 - DNA, 315 bp, Pseudomonas aeruginosa
atgagcgccgacaaataccgctccgagcaggtgcagcgcgtgttgcgcgtgctgctggccctggccggcaacgagttccgcggaatgctgctgaaagaggtggccgccgccgccgactgcactaccgacaacgccttgcgagccctggaaaacctgcgcaccgcaggcctggcagatcgcagcccacatgaccatcaccgctggcttctcggcccgcgtctggtgcaggtggccttcgccttcgacgaagccctgcgcaaggcgcagcacgaactcgacgagcgccgccagcgttacacccgtaccccgaactaa

SEQ ID NO: 335030 - DNA, 525 bp, Pseudomonas aeruginosa
atggcaggcttcgtagctcaccgcatcaccaacggctctgtgtatctggacggcaacagcttcttcggcaaggtcgaggagatcgagctgggaacggtcaagaccgtgatgtccgacttccagggcctgggcatgatcggcctgatcgagttgccggacggcctggacaaactggagggcaagatcacctggaacagcctctacaaggaagccggcatcaagctggccagcccattcaaggccgtccagttgcaggcgcgttccaacgtccaggtgttcaacaacggcggcctggtcgacgagataccgctcgtcaccactctgaccatcatggccaaggaatacggcctggggacctacaaaccgcgcgaggcgatgaagcaggagacgccgttctcggcgacctacgtgcgccaggtgctcaacggtgaggaggtgttattgctggactacctggccaacatcttcaaggtcaatggcgaagatcagttggccaggtaccggcgcaatatcgggcaggcgtaa

SEQ ID NO: 335031 - DNA, 444 bp, Pseudomonas aeruginosa
atgacagcctccaatatcgaacgattcgacgaaatcaccggcctagtgcttggcaagctctatgaaaactttcccgtccccatctatttgctggtgaagaattttgtggatgacggctacaaaatgaatgaggcgttgggggttgaaacaatcaccaaggatggagagtttctccttgccagcatcagttggctcgccagttccggctatcttctctatgaggaacgcattcaccaccaaggcttccgtggcgcagtgctgacagccaaaggactggaggtactcaaggcaatgccagccagtctgcaggttggctcatccttgggcgagaagctggtagtagcatccaaaggggggaccaaggaagtacttcgtggtgtggtctccgaagtcctaagcatcggcgcccggtatgcttccgttcagcttggtcttccgacctag

SEQ ID NO: 335032 - DNA, 732 bp, Pseudomonas aeruginosa
atggtggccttccatgttttttcttcgaaaggagcctcctccaatatgagtacgccctataccccaccaaagtttttgctaggtagcttcaactgcccatatgccaattgtggagcattcgcccacatggattggaacctgttgaacaacggtactgctgatgccttttgccctgcttgtaagcaaagaagtatctggagctattgggcgcggggtaatgatctgctctcggtagaaaaccgtttcgaaggggaaatgctatatccccatgtgaccctcgcaccgcctccacatgccgatatgccagaggatgtgaaaaaagactatgaagaggctcgcctggttgtaacgcactccccacgtgcagcggctgctctcctccgcctctgcgtccaaaaaatctgtgaggagttgttgaagactccaggtgacatcaatcagcagatcaagacgctagtggagaacggccttcccacgaaggtccagaaggcattggatagcgttcgcgtaatcggcaatgaggctgtccaccctggcactatggacttgaatgacacacctgagctcgccctcgttctattccggctattgaacctcatcgttcaggactgcatcactgcaccgcaagaagcggatgacatttacgacatgctgcctgagaagaaattgagaggtatagaacaaagggatgcggcagccaaggccagacagtctaatgggtgtgatggttag

SEQ ID NO: 335033 - DNA, 1335 bp, Pseudomonas aeruginosa
atgatccgtatccccaagtcggagtacgcccgtcggcgcaaggcgctgatggcgcagatggaacccaacagcatcgccatcctgccggcggcgccgatgtacatccgcaatcgcgacgtcgagcatgtctaccgccaggacagcgacttccagtacctcaccggcttcccagagccggaggcggtgatggcgctgattcccggccgtgcccacggcgaatacgtgcttttctgccgcgagcgggatccggagcgtgaactgtgggacggcctgcgcgccggccaggacggtgcgatcggccagtacggcgccgacgacgcctttcccatcggcgatatcgacgacatcctgcccggcctgatcgaaggccgcgaccgggtctactacgcccttggcgccaatcccgacttcgaccgccggctgatggactggatcaacgtgatccgctccaaggcccgccagggcgcgcagccgccgaacgagttcgttgccctcgaccacctgctgcacgaccagcggctgtacaagagcgccaacgaagtgaaggtcatgcgctacgccgccgaggtctccgcccgggcgcacatccgggcgatggaggtgtgccggccggggctgttcgagtaccacctggaagccgaactggaatacgagttccgcaagggcggggcgaagatgccggcctacggctcgatcgtcgccgccggacgcaacgcctgcatcctgcactaccgcgagaacgatgcggcgatcaaggacggcgacctgatcctgatcgatgccggctgcgagatcgactgctacgccagcgacatcacccgtaccttccccgccaatggccgcttcagtcccgagcagaaggcgatctacgaactcgtgctggaagccaacatggcggcgttcgactacatcgcccccggtcgccactggaacgaggcccatgaggccaccgtacgggtcatcaccgccgggctggtgcgcctgggcctgctggagggcgacgtcgacgagctgatcgcccacgaggcctacaaggctttctacatgcaccgcgccggccactggctggggatggacgtgcacgacgtcggcgagtaccgcgtcggcggcgaatggcgggtgctcgaaccgggcatggcgatgaccgtcgagccgggcatctacatcgccccggacaatacctcggtggcgaagaagtggcgcggtatcggcgtacgcatcgaggacgacgtggtggtcacccgcaatggttgcgaagtgctgaccaacggcgtgccgaagaccgtcgccgagatcgaggcgctgatggccgcggccaagagcgaggcagcctga

SEQ ID NO: 335034 - DNA, 162 bp, Pseudomonas aeruginosa
atggcgggcacggcggaaaaggggatgctgcgccagttgtcgatagagggcgcgggcggcgaggcgttgctgcaggggggagagcgcgcggcgcgcctggcggagcttgcggcgcagggccgggcggctgaggtcttgcgattcgatcatgtggaaaggtag

SEQ ID NO: 335035 - DNA, 381 bp, Pseudomonas aeruginosa
gtgcggcgcagaagcgcggcaaggccacctacctgccggtgctggcgccctggccgcggacgcgcatggtattccagcaaccgcttccgcatcagcgaaccgctggccgacgccggccgccagcgcaaggcctgggcgctggacctggtactgctgccgctggtggggttcgacgaacagggcgggcgcctgggcatgggcggcggcttctacgaccgcagcctggcctacctggcgaggcgcaaaaatggtcacaaaccgacgctgatcggcctggcccatgaatgtcagaaggtggatcgactggcgctggccagctgggacattcccctggcgggaacggtgaccgatgcgggctggtacgtggcagggaaacgctag

SEQ ID NO: 335036 - DNA, 1125 bp, Pseudomonas aeruginosa
atgcgcagcctggccaacatcttcaacttgggcatcaaggagttccgcagtctcggccgcgactacgcgatgctggcactgatcgtctgggccttcaccctgggcgtctacagttccgccaccggtattccggaaaccttgcatcacgcgccgatcgcggtggtcgacgaggaccgctcgcagctctcgtcgcgtatcgtcaatgccttccagcccccatacttccggccgccggaaatgatcggacatgccgagatggatcgcggcatggacgtcggcctgtataccttcaccctcgatatcccgccggacttccagcgcgacgtgctcgccgggcgcaagccctcgatccaggtcaacgtcgacgcgacccagaccgggcaggccttctctggcgcgggctacatccagaacatcgtcgccaccgaggtgcgcgaattcgtcagccgctaccgcgcggagccgagcatgccggcgcagatcgaggtgcgcatggaattcaacccgaacctgacccaggcctggttcggtggggtgatggaagtgatcaaccagatcactatgctgtcgatcatcctcaccggcgccgcgctgatccgcgagcgcgagcacggcaccgtcgagcacctgctggtgatgccgctgtcggccttcgagatcatgatggccaaggtctggtcgatggggttggtggtgctggtggcggcggggctctcgttgcagtgggtggtgcgtggctggctggacgtgccgatcagcggctcggtgggactgttcctgctcggcgccggattgcatctgttcgccaccacctccatgggcatattcctcggcacggtggcgcgttcgatgccgcagctcggactgttgaccatcctcgtgctgctgccgctgaacattctttcgggcggcaccacgccacgggaaagcatgccggaactggtgcagaacatcatgctggcggcgccgaccacgcatttcgtcagcctggcccaggcgatcctgttccgcggcgccggtttcgacatcgtctggccgcagttcgccggtatcgtggtgatcggttcggcgttcttcttcggcgcgctctggcgtttccgccggaccatctcgcagatggcctga

SEQ ID NO: 335037 - DNA, 765 bp, Pseudomonas aeruginosa
atgagcggattccaggaccagagtatcgacgaaggcgtgcgcaagcgcaccgcctaccagaacgatcggagtgcacgactggcattgaacgtcgagcgacaggacggcggtatcctgcagattccggtggccagcgatatgctcggccatgaggagcacgagcgtatccagcagaacaccttcctggctgtgatgccgctggtccgcctgccaacgctgggcaaggccggttatggcgaccagctgcccgccggcgcgctaccgcgggcgggacggatctacctgttccaggacggcaagttgtggcgcgaactggaatgtgatggcaagggcaacctgttcgaagtcgatctcctgcaggggcgcagccagcgtgcggacaagcgtccggccgtaggcaagacacaagcgctgatcctggtgccggtgctggtcaaggggcagttcgtgatcccacgctacaccatggcctatagcgaaactccctggccttggtcgtacatcgactggctggaggaggacccgcagcgggtcaaccggcgctgccagcagatggcgtccgcttggaacgcctcggtggccaaccagcactggaaagcctccatccatcaacccgcgctggtcattgatcatcacgcccagggtttgcgacctcgcgacttcaacgtcgagagcgcgctggaagacccggcggaattcacacctgagttcgccgcctttcgcgaagagtcgctggtgtgccagttgcagcgacgccagcagtaa

SEQ ID NO: 335038 - DNA, 477 bp, Pseudomonas aeruginosa
atgaaattcgacgatatccgggacgggtttctgtatgtcatccaacagaagacagccaaagtatcggatgccgcctggatccgcttccgcgttacccgcgaactgcaggatgtattggatcgctgtaatgatggcgtcccctcccccttcctgattcatcggcgaccggaccggaagctgggccttgctgaccgaaagaagcactggacgaagatcgatgagcgctacctgtccagggcattcaaggaagcgcgggacgctgcagcctgctattcaggatggaaagacgaagagatgccgggtttccatgagatcaaggccctctcgctgcatttgtataagaaggccgggaaagatggccagaagatcgctgggcatgccagcgcagagatgacgaagaactatcagcgagaccacgccgaagtggtctggtcagatgcgattccggacctggatatcagcgaatttgcccgctag

SEQ ID NO: 335039 - DNA, 1398 bp, Pseudomonas aeruginosa
atggggcgacctgcagggtggatgcaggagttgacgtggcgaggggcaatgcgctcgccaggtgccccgtcacttcgccgagagatcgagcggctattttgggaacagatcgcaaccgggatcacaagcgaaagggcggcagaggctattagcgtatcgtcagcggtaggcacacgctggttccgtcatcgcggcggaatgccattattcatgtcgaaccacatatcaggaaggtacttgtcgttcgctgagcgagaagagatcgggctgctccgggcgcaaagtgttggtgtgcgtgagattgctcgccgtcttggacgaagtccgtcgaccatttcacgggagctgactcgtaacgcagcaactcgtagcggccggctcgagtatcgcgcttcagtcgcgcagtggaaggctgaattggttgccaagagaccgaagccggcgagattggtgaccaacccgcaactgcgccattacgtgcaagagcgcttggaaggcaaggttcataacgctaatggccgtgagattgccggtcctctacaggcaccattcaagggacgaaataaaccacatcgtggtgaccgtaaatgggtcaatggttggtcacccgaacagattgccaaccggctgcaaatcgacttcccggatgacaagtccatgcgtatttctcacgaagccatatatcaggctctctacattcaagggcgaggcgctctcaagcatgaactggtgagttgcctgcgtactgggcgggcgttgcgcgtaccaagagccagggcgcaggccaaagcatgggcacatgtcagcgaggatgtcatgatttccagccgtcctgctgaggtggaggatcgtgccttaccaaggcattgggagggtgatctgatcattggcctgaaccgatccgccatcgggacgctggtcgagcgctcaagccgatttaccatgctcgttcatctgcctcgcgaggaaggttacgggctgactccccggacgaagaacggccccgctcttgctggctacggtgctgtcaccatgaccaatgcattgaagagggccgtgactggcttacccgttcagctgtggcgatcattgacttgggatcgtggaaaggagttatcggatcacgtccgctttaccattgagtctggagtaaaagtcttctttgccgaccctcacagtccatggcagcgcggtacgaacgagaatacaaacggtcttctacggcaatatttcccgaaaggcaccgacctgtctcgttggagttaccaagagatccaagccgtagcccatacgctgaacactagacccaggaaaacgctcggctggaaaacacctgccgaggtactgaacgactatctaacatctattcagcaacccagtgttgcgacggccgattga

SEQ ID NO: 335040 - DNA, 195 bp, Pseudomonas aeruginosa
atggagcgcctgttccgcagtctgaagtcggagtgggtcccgtcaacgggttacctgacggcgcaggaggcccaacgggacatcagtcattacctgatgcaccgctacaactggatcaggccgcatcaattcaacgacgggctaccgcctgcggtggccgaagaaaaactcaacccactgtccgggatgggttga

SEQ ID NO: 335041 - DNA, 1317 bp, Pseudomonas aeruginosa
atgcgctcccccacccgtcccccggcggccgccgatccggccagccgccgcagcgtctttgccgtggtcctcggcaacgccgtggaattcttcgacttcggggtctatgccaccttcgcggtgatgatcggacggactttcttcccctccgacagcgccttcgtcagcctgctcctgtcggtcaccgcgttcggcgtcggcttcgtcatccgccccctcggcgcgatccttatcggcgcctacgccgaccgcgccgggcgcaagccggcgatgctccttaccctgttcctgatggcgctgggcaccggcggcatcgcggtgctccccggctacgacagcatcggcccggccgcgccgctgctgctggtgttgacccgcctgctgcaaggcctggcctggggcggcgaggccgggccggcgaccacctacatcctcgaggcggcaccgccgcacaagcgcggcacctacgcctgctggcaggtcgtggcgcaaggcatcgcggcggtcgccgccgggctgatgggctacctgctcaccctctggctcgacgagcgccaactgcaggaatggggctggcggattcccttcgcggccggcctgctggtcctgccgatcggcctgtacatccgcctcaacctggccgagaccttttccggacgcggccgccaggccagcacccggaacctgctcggcgagttgttcggcaatcatcggcgggccctgctgctcggcctgctgatcctctccggaagcaccatcacccagtacttcctcaactacatgaccaccttcgcccttaccgagctacacctgccggcgggcatcgcgatgctctcgacgctggtcgccggcgccgcactggcgctctcggcgttgctcggcggcgtgctctgcgaccgctacgggcgccgcgccgtgctgatcctgccgcgcctggcgctgctcgcggtgctgttcccggcactgcaggcaatgacccgtcaccccgagccggcagtcttcctcgccgtcctcgccctgctctcggccctgcatggcatgagcggcgcggcgctgatcgtgctgctggtagaaagcttcccccgggcgctgcgctccaccggtttttccctggtctatgcgaccggcgtcgccgcgttcggcggcaccgcgcagatcgtggtgacctggctgatcggcgtcaccggcaatccgctgtcgccgctggactacctgctgctggccaacctggtctgcctgggtggggcctggctggcccgcgagacctggccgggtcgcggggacatgggaggcgcgccgctggtgctgcgcgactga

SEQ ID NO: 335042 - DNA, 1275 bp, Pseudomonas aeruginosa
atgaccccacttcaactgaccgaggaatatctcttcgcacatgacctcagagaggccagccagaagacctatcgagcagccacccgtgctctgatgaggcacttcggacctgccatcaccgtgcaggagatcaaccatcggagagtcctggaatggcgacgcgaagccttggggcgagggctatccaaacgcagttggaatacctactcgaatcacctgcgaaccatctgggggtatgccatcgagtgtgaactgctgccccatgcccaggtcaaccctttcaagaagaccagtgtgatccctccgaagcgcccgagcaaaaccgtggcaatcgatgccatacaaagcgcccgttcctggctgaaaatactggagagttctgaacgctgcacgggcgagcgcgcgcggatcacaccgacttggttctggcggtgcgttttcgagaccttctacgaaaccggcatccgcctcaatgcgctgctgtgtattcgcaaacgcgacgtggactgggacgggaaaatgattctggtgcgcggtgaaacggaaaagacccaccgggagttttcggtgcccatcaccgacgggatggcccctcacattcatcgactccttcaggaagccgaaacggcgggcatcagtgacaatggccagttgttcaacgtcaatcgcttctcgcaccactacacgcggcaggagatgaacgccgaccaggtcgaagccatgtaccgaaagctgaccgaaaaaaccggcgtgcgaatgacgccccaccggtttaggcacaccctggctaccgatctgatgaaacagcatgaacgaaacattcatgtcgccagggatctactcaaccattccaacatccagacaacgatgggctacatcgaggcggaccatgatcagatgcgggccgtgctcaatgaacgaagcctggcacagggcgccttgcagcgcaggcataagattgactacagcggctcgccacaagctaccgccccaactctaccttctcgcctccaaccatcgcctgcccagcctaattcgccggaccccactcaaccggcgacacaagtgcctcttccccctcctcccgtcgtcgaaatgccaggcatttgggccgtggacagcactgcgccgccgccaaatcgttttgaacagaatgtgttgatggccttgatagcgcagcacatggcacgctctgcctcatgggtaatggggctggaacaaggacaaggacaagctcaccgctgggggactgcagtccgcagcggcacagcctag

SEQ ID NO: 335043 - DNA, 879 bp, Pseudomonas aeruginosa
atgaactccatcactatcgttctccgctcgggcatgggcatgcagatcgactcggtacgcccatacctgcggaatggaatgcccatagcaatcgggcgcgcaggtgcggttatctcgcactttgctgacggggacgcacacctggcgctccgcaccatcgccgagttcccctgtcccgaacaagacaacctgccggcggcgaacatgcgacagatcgcactggcggcgctgagcggggctggagcgagttcggagccgggcaatcctggcggcgaacctgtatccggaccgggtaatgccggcgagcgaccccaccccgcgccgggatcgggcgacagcaaactggccgaaagcctccaaactctggtgcgctggcttgatcgcgtggcaatcgaggacggctacgtcggcgtgccggtgatcgaggccgtcgaggtggtggtcaccgagatgaagcgccagcaacaaccagtcgatccggccttctgccgctgcaaccactggttcgccggggacagcgtcgaagcggccttcattcgccagcatggccagtgccaggactgcgtcgagatggaccagatgctggagcgggaagtgcaggccgagaacgccaagcgctacctgtggctgcgcaacacggctctctacgcatcggacctggcccgcgaggtcaatcgcatggacaagagcgtcgtcaaccttctcccgcgggacaaggacggcaacctcctggtagaggctgatctggacgaggccatcgatgctgccatggcgaaatggtcggccgaggttctgtgcgcaggcgttgacgtcgctaccgaccgtgtggaactggccattcacaattggaccgcgccggcggaaggcggtgacgcatga

SEQ ID NO: 335044 - DNA, 231 bp, Pseudomonas aeruginosa; identical to SEQ ID NO: 330063

SEQ ID NO: 335045 - DNA, 390 bp, Pseudomonas aeruginosa
atggattgcgccaccaccatcagcactgatacctggcaaggccgtctcggcatgggtctcgctccgcgcgaactggaggccaccctgcatgcggcgagcgacctgaccgcaaaggagatcgccaagctgatgggcatcgcgcctggaaccgtatccaagcggttggatgatgcgcggttcaagctcggcgccaagaccatccgcggcctggtgctggaggcgtacaagcgccagattatcagccccctgtgcgttggcatcctcgccatcctggcggcagcacaacccctcctcgatgaagacccggccatgcgggcgcgccgtggcggcgaaaggaagatcgaaactcgtctgactgctcgccgcgatggcgtggcctgggtggcgtga

SEQ ID NO: 335046 - DNA, 282 bp, Pseudomonas aeruginosa
atggccgtcctccagacccacaaggtcgtcgcgcaactgcctgccgcgctggagccgaacgcgatctacttcgtccggcggagcgccggatacgaccagttcgtcaccaacggcgccggggtggtggtggcctatccgatgaacgtccgcatccccgcggctgttcctgggtatctcgccgatggctccatgcttcggctcacgatgaaccctgacggccaactgccggcctataccgccggcggcgcaactctcaacctacaggtgcttttcaatggctga

SEQ ID NO: 335047 - DNA, 861 bp, Pseudomonas aeruginosa
gtgaaaaaggtcctgggaatctacggcaacgccaaccgccactgggtgggcgacggattccccgttcgttcgctcttttcctacaacacactgggccagcatatcagcccgttcctcttgctggactacgccgggcctgctgatttcccccccgcacagcagcgccgcggcgtaggccagcatcctcatcgcggcttcgagacggtgaccatcgtctaccagggcgaggtcgagcaccacgactccaccggcgccggcggacgcatagggccgggggatgtgcagtggatgacggcggcctccgggatcctccacgaggagtaccactcggaacgcttccgtagcacaggtggaacgctggaaatggtccagctatgggtcaacctgccctccagcgacaagatgaacccgccgcgctaccagaccctgctggatgccgacattccccgcgtcggcctgcccgacagggccggcgaactgcgggtgatcgccggacgctacggccgccaccaggggccggcgctgacccactcgccgctggcggtctgggacgtgcagctgaaggccggcaagcacctcgccctcgacttgcccaagggacatacctgcgccgtggtggtcctgcgcggcaccctcgcggtcggcgacgagatcgttcgcgaagcccaggtcgccctgctcgaccgcgacgacccgcggctggaactggaagccaacaacgacgtgcagttgctggtactcagcggcgagccgctggacgagccgatcatcggctacggccccttcgtgatgagcagccgcgaggaaatcgaccaggccatcgaggacttcgagaacgggcgcttcatccgcgcccactga

SEQ ID NO: 335048 - DNA, 3231 bp, Pseudomonas aeruginosa
atgaacatcctgctggtgtcgcaatgcgaaaagcgcgccctgagcgaaacccgccgcattctcgaccagttcgccgagcgccgcggcgaacggacctggcaaacgcccatcactcaagccggactggataccctgcgacgcctgctgaagaaaagcgcacggcgcaacaccgccgtagcctgtcactggatccgcggccgcgaccacagcgaactgctgtggatcgtcggcgatgccagccgcttcaacgcccagggtgcggtgccgaccaacaggacccgccgcgacatcctgcgcaaggaagacgagaacgactggcacagcgccgaggacatccgcctgctgacggtgatggcagcgctgttccacgatatcggcaaggccagccaggccttccaggccaaactgcggaaccgcggcaaaccgatggccgatgcctatcgccacgaatgggtatcactgcgcctgttcgaagccttcgttggcccaggcagcagcgacgaggactggctgaggcgcctggcggacaagcgagagacgggcgatgcctggctgtcgcaactggccagggacgaccggcatcccgcgccacccggcccgttccagaaaagccggctaccgccgctcgcccaggcggtcggctggttgatcgtcagccatcatcgcctgcccaacggggaccatcgcggcagcgcctcgctggcacgcttgccggcccccatccagagccaatggtgcggcgcacgcgacgcagacgcaaaagaaaaggccgcctgctggcagttcccccacggcctgcccttcgccagcccccattggcgcgccaggacagcgctatgcgcgcagagcatgctcgagcgtcccggcctgctggctcgggggccggccttgttgcacgacgcctacgtcatgcatgtgtcccgactgatcctgatgctcgcggatcaccactattccagtctccctgccgactcccggctgggcgacccgaacttccccttgcacgccaacaccgaccgggacagcggccaactcaagcagcgcctggacgaacacctgctcggcgtcgccctgcacagtcgcaagctcgccggcaccctgccacgcctggagcgacaactaccgcgccttgcccggcacaagggcttcacccgccgggtcgagcagccgcgcttccgctggcaggacaaggcctacgactgcgcgatggcctgccgcgagcaggctatggagcatggattcttcggcctcaacctggcgtcgaccggttgcggtaagaccctcgccaacggccgtatcctgtatgcgctggccgatccgcaacgcggcgcgcgtttcagcatcgctctcggcctgcgcagcttgaccctgcaaaccgggcaggcctaccgcgagcggctcggcctgggcgacgacgacctcgctatcctggtcggcggcagcgccgcccgcgaactgttcgaaaagcagcaggagcgcctggagcgcagcggtagcgagtcagcccaggaactgctggcggaaaacagccatgtacacttcgccggcacgctcgaggacggccctctacgcgagtggctcggcaggaacagcgcgggaaaccgcctactccaggcgcccatcctggcctgcaccatcgaccacctgatgcccgccagcgaaagcctgcgcggcggacaccagatagcgccactgctccgcctgatgacttccgacctggtgctcgacgaggtcgacgacttcgatatcgacgacctgcccgccctgtcgcggctggtgcactgggccggcctgttcggcagccgcgtgctgctctcctccgcgaccctgccgccggccttggtgcagggcctgttcgaggcctatcgcagcggccgggaaatcttccagcgccatcgtggcgctcccggacgcgctacggaaatctgctgcgcctggttcgacgagttttccagtcaatccagcgcccacggcgccgtaacctccttcagcgaagcgcacgcgaccttcgtcgcccagcgtctggcgaagctcgagcaactgccgccacgtcgccaggcgcagctatgcaccgtgcatgccgctggcgaggcccgtcccgcgctgtgccgcgagttggccgggcagatgaatacctggatggctgacctgcatcgctgccatcacaccgaacaccaaggacgtcgcatcagtttcggcctgttacggctggccaacatcgaacccctgatcgaactggcccaggccatcctcgcccagggtgcgcccgaggggttgcatgtccatctgtgtgtctaccattcgcggcatccccttctggtccgctcggccatcgagcgacaactcgatgaactgctgaagcgttcggacgacgacgccgccgcgctgttcgctcgtccgacgctggccaaggcgctccaggccagcacggagcgggatcatctgttcgtcgtactcgcctcgccggtggcggaggtcggtcgcgaccacgattacgactgggccatcgtcgaaccctcctccatgcgctcgatcatccagttggccgggcgaatccgccgccatcgctccggcttcagcggcgaggccaacctgtacctgctatcgcgcaatatccgctcgctggaagggcagaatccggcgttccagcggcccggcttcgagacccccgacttccctcttgacagccacgacctgcacgacctgctcgaccccgccctactcgcccgcatcgacgccagcccacgaatcgtcgaaccgttcccactgttcccacgcagccggttggtcgacctggaacaccgacgcctgcgcgcgctgatgcttgccgacgacccaccgtcgtccctgctcggcgtaccgctctggtggcaaaccccggcatcgctcagcggcgccctgcaaaccagccaaccatttcgcgcaggcgccaaggagcgatgctacgccctgctgccggacgaggacgacgaggagcgcttgcatttcagccgctacgaagaagggacctggagcaaccaggacaacctgttgcgcaacctcgacctcacctatggcccgcgcatccagacatggggcacggtcaactatcgggaggagctagtcgcaatggccggccgcgaggacctcgacctgcgtcaatgcgccatgcgctacggcgagatgagattgcgagaaaacacccagggatggagctaccacccttatttggggttcaagaaatacaactga

SEQ ID NO: 335049 - DNA, 216 bp, Pseudomonas aeruginosa
atgcaccagaacattctggtcatccaaaccctgctcagcggccagacccagataagcgagctacgcctccgcacgatcattgggctggaacatgaaaacgcagagcttaaagccatgcttcgagcccatgaggcgcagttgatacagctttcaagacgcattgaagtgagtgaatccggcaacgagcgagcactggccgtgcagacaagaatttaa

SEQ ID NO: 335050 - DNA, 207 bp, Pseudomonas aeruginosa
atgagtcaacacgacgccagcctgcacgacctgatccttcaattactcccgaaggacggcagcagcatcggcaatatcaagcttcagcagcagttgagcgaagcagcagcgttcagcttcagcgaagagtgtagtggtcaacccatcccggacagtgggttgagtttttcttcggccaccgcaggcggtaacccgtcgttgaattga

SEQ ID NO: 335051 - DNA, 336 bp, Pseudomonas aeruginosa
atgcacgctgtcgccgccacgggtggtgacgaacagcgcggtgtcgcgcggcagccggtagccctcggcgaggctgccctgggtcgggtccggttcgaactggacgatcgcgcaggacggcagcgggcgcagcgccagggggtagagctgttcgaggagggcgtcgctgaactctgcgtagtcgtcgtcgaggcgccgttgcaggcgcgcggtgagcagcgagaaaccttccagcagacgctcgacgtgcgggtcggggcattcgccgggagccagttgcaggcgccgggcgaccttcggatagcgctcggcgaaggcgccgccggcgtgccgtag

SEQ ID NO: 335052 - DNA, 924 bp, Pseudomonas aeruginosa
atggaccgtttcgatgcgatgcaggcctttgcccgtgtggtggataccggcagcttcaccaaggcggcggagacgctgcacatgagccgcaccagcgtcacccagttggtccagcaactggaagcgcggctgcgggtacgcctgctcaaccgcaccacgcgcaagctcaacctgaccgccgacggcgccgcctactacgagcgggtggtacgtctgctggcggaactggacgatgccgagaccagcctctccagcgccgccctggcgccccgcgggcgtctccggatcgacgtaccgagcccgctggcgcggctgctgctgatcccggcgttgcccgagttccatgcgcgctatccggagatccagatcgacctgggcgtgagcgatcggctcgtcgacctgatcgacgagaacgtcgattgcgtcatccgcggcggcgaactgcgcgaccagtcgctgatggcgcggcgggtcggcgacctgcaactgggggtctacgcggcaccggcctacttgcagcgcgccggcgtgccgagccacccgcgcgaactggaggacagccaccagcgtatcgtcggcttcctctgggcgcgcaccggcaaggccctgccctacgccatgcgcaggggcgaggaatgcctgcgggtggcgggccgtcatgtgctggcggtggacgacggcaacgcctacctggcggccgggctggccggcctgggcatcctctggctgccgcactacatggcgcgcgagcccctcgcccgcggcgagctgctgccgctgttcgaggactggagcctggagccgatgccgctgtacctggcgttcccgccgaaccgccacgtcagcggcaagctgcgggtgttcatcgagtgggtcgccgaactgatcgcgcggcatgcgccgccgttgcatccgccgctctga

SEQ ID NO: 335053 - DNA, 801 bp, Pseudomonas aeruginosa; identical to SEQ ID NO: 322755

SEQ ID NO: 335054 - DNA, 564 bp, Pseudomonas aeruginosa
atgagcgcgaagctgcaaggcaagaacgtcctggtcatcaccgccaacaccggcatcgagcgcgacgagctgctcgaaccgctgaagaccctgaagcaacagggcgccacggtcacccacgcgaccatcgagggcggcgaagcgcagacctgggtgcacgacagcgagaaggacctgatcgtcaattccgacgccaggctgcaaggcctgcgcgccgaggactacgacttgctgctggtccccggcggcacggtgaatgccgacaccctgcgccaggacagcgaggcccggcgcctggtcagggaattcagcgacgcaggcaagacggtcgccgccatctgccacggcccctggctgctgatcgacgcgggtgtcgcccgcggcaagaccctgacctcctattccagcgtgcgtatcgacctgaccaacgccggcgcggactgggtcgacacgcgggtgaaagtctgcccggcgaacggctggaccctgatcacctcgcgcaacccgggtgacttgcaggcgttcaacgaagccatcggcgaagccctgcaggcggccgcctga

SEQ ID NO: 335055 - DNA, 243 bp, Pseudomonas aeruginosa
atgtgtgaagtctacgagctgcgcatttttaacttacagggatctgcagaaattgcgctgcagaaggagtcccagatggtgcgagtagagcgactcattggcaaggtcagcggaggtccgggttatcgccgtttagtttgcggcgagcccggcctcacggcagttctgaagtcaggacagtgctccttcggcttctcgttggtagagccgaaggaggctcggattaatctgtcggaggggtga

SEQ ID NO: 335056 - DNA, 270 bp, Pseudomonas aeruginosa
atggtcaagcatctattcattcctcataacctgagcgaagactttgacaaggaaaaagctgccgcaattcgtcgatcgtttgatgcagacgatgcggagatgctgctttctgcgcccaccactaacacggtttccagcatcgaaggcaataagtactcgggcatagtgaagcatcactttgaacgtaatgacagcccggtccattacgaataccggccagatgctgaacagggctcgaaattcataatcaccaaagacaaccgtgactga

SEQ ID NO: 335057 - DNA, 645 bp, Pseudomonas aeruginosa
atgtcgaactcagaagatgagctccgttatgctcgtgcgatggtctggattaacaatgtttttggcggtggagtagttcctcacagagagttttcacctgaagagttgatatctgaggaattttcttcgtcagctctggaatcatttaactcagttagtaacagtcttgcttcggaagatattaaggttgatgataaatttgctaatatcgtcaactttaagtctagcgcttttaggtctgtaaaaataacgcttgttaatagaagtccatatagtttggtattattcaagcacagcttggagcatagtaattggatgggtgggtctctaccgccagagtctatcgctccaggccaagccgttgcctggggggctgagtcaaacggtttagcggttggcactgaaggatgggttgagtatctgatatgtggtgattataagaatgccggtccccagaatatgaaaatgtcgttcaaagtatattgggataatccggcagctggttccaattcttgtcgtcactcatggccattaggagacgcaagccatcctatctggaacaaagtctcgttgaaggatccggatcctgacagcattagcgggaatgattgcaagatgcaatggatcttccagtacgaaggctaa

SEQ ID NO: 335058 - DNA, 900 bp, Pseudomonas aeruginosa
atgctgaaacggattcttcgattcttcgacaaagcctctggacccttcgagcggatggtgtcgccgaatgatgagcagggagttaaaaagcttttcagtttatttgtatgtgcgctgatagttgttgttggtgttttagtcgttgatgtcgttttttctcttttgggtgttaagacgcatggtacctttggagatttcttcggtggtgtggcaaatccacttctcacattcttaactttctttggcttgctaattacaatagttctccagaaggaggagcttaaagagacaaggaaagagcttgcgaggtcggcgggggcgttagacgaacaagttgatcagtttaagcggcaggctaatgtttcgacattttacaagcttctagataatcacatgatgttggtttcatcaattgatttggtgagtaaggaacacggtagaactgtaggaaaggactgtttgagggtgttcagagacagattggatgcaatgtttcaagcgaaagtcagaaaggaaggggagaccgggtttcgaggagccataaggctttctgctaatgatcccaagactgctgagcagatatttaatatgttttgggaagataatggggaggagttgcagccctatattgcgtacgttcggctgatactctcttatctggaggagcaacttgattttgatgcgaatctagtgagaatgtaccgctcgcttttcacggattcggaaagggcgatagtattttattatgctcttgcggtaggcgatgagaattttagtcggcagctcagtgttacggctttttgtgtgggtctgcactcctcgtttctaatgcatgaagatcatgagagttggctggtagattgttgccttccacaaaatttagaagataagcccgcttaa

SEQ ID NO: 335059 - DNA, 3663 bp, Pseudomonas aeruginosa
atgggcgcagttcaccagcacctgaccggccgcaagggcggcagtagcaagccgaaacagccggtcgaggcacccgacagtctgcgctcggtcgcgatggccaagatcctgcttgccgtgggcgaaggcgagttcgccggcgttccgagcgagcgcgatatctacctcgacaacaccccgctgatggacccgagcggtaacctgaacttcccgaacgttaagtgggagtggcgcgcggggtcggtggaccaggactacatccctggcattcctgcggttgagaacgagacgtctgtcaacgtcgagttgcgcagcgatacgccctgggtgcgctcgctgagcaatacccagctttccgcagtgcgcctgcgcttcgcctggccagcgctccagcagcaggacaccaacggcaacatcggcgggtaccggatcgaatatgccgtagatctggccaccgacggcggtgcctatcaggaggtgctgcgcgaggccgtcgatggcaagaccaccacccgctacgagcgttcccgccggatcgacctgccggcggccaccaatggctggcaggtgcgcgtccgccgcctgacgccgaaccagaacaacaaccgcatcgccgacaccatgctgatcgccggctacaccgaggtgatcgacgcgaagctgcgctacccgaacacggccctgctgtacgtcgagttcagcgcagagcagttcagcaacattccggctgtcacagtcgactgccgcgggcggaaggtccaagtgccgagcaattacgatccggagacccgggcctacctcggcatctgggacggcacgatgaaacaggcctggaccgacaacccggtctggcacacctacgacatcgtgaccaacgatcgcttcggtgtgggtaaacgcatcaaggcttggatggtcgatcgctgggagatgtaccggatttcccagtactgcgaccagttggtgccggatgggaagggtggccaggagccgcgacacacctgcaacctgaacctgcaaagccgcgccggggcctgggagctgctgcgcgacctcaccgctatctaccgtggtatggcgtactgggcccagggccaactgaagatccaggcggatatcccgcgcgccaccgacgtcgatttcgcctacaccagggccaatgtcatcgacggccgcttcagctacggctcggccagtgagcgcactcgctacagccgtgccttggtcagctacgacaatccggcgaacaactacgacaccgacgtggctgtggccaccgataagcgcctgcagcggcgttacggcgacaacccggtcgaggtggcagccattggctgcacccgcgagagtgaggcccagcggcgcggaaaatgggcgatcctaaccaacagccaggatcgcacggtaacgttccgtaccggtatggacggggcgattccgctgccgggatgggtgattccggtggctgacgcgctgctggctggacgggagattggggggcgggtttctgcggttgctggccgagtgatcaccttggatcgcgatacccaggcaaaggctggcgaccggctgctcctgaacctgcccagcggtaaggctgaggcgcgaaccgtgcagtcggttgccgggcgcgcggtgaccgtgacgacagcctacagcgagaccccgctaccggaactggtctggaccctcgatgccgacgacctggcggtgccgctctaccgtgtgatgaaagtcagccagccggagcggggtgtcttcgagatcactgcgctgcagtacgagcccgggaagttctcagcgatcgacactggcgccaagttggagagccggccgatcagcgttatcccgatcaccaccgtggcgccgccggcgagcgtcacgctgacctcgcactaccagttcgatcaggggttggcggtcagcacgatgaccatcgcctggccccccgtggaaggggctgtcgcctacgacgtcgagtggaagaaggacagcggcaactggatccgcctgccgcgtgccggcaccaccagcgtcgatgtgaccggcatctacgcaggaggctatctggcgcgggtgcgcgcggtgtcggcgttcgacatcacgtcggtctggaagagctcgatcctgacccagctcagcggtaagaccggcgcgccaccggcgctggcgttcctgcgtaccaccagcggaccgtggaagatcggcctggagtgggcattcccggccagtggcgcggcggacaccgcctacaccgagatccaacagtcggttaccccgggcggcagcgaacagaacgcaactgccctgggcttgttcgcatacccgaccgacacccacacgctgacctcgctggcggccggcgctcgcctggccttccgcgggcggctgatcgaccggaccggcaacgtcggcccctggtcggcctgggtcgacggtataagctcgacggatgcgagcgagtacaacgagctgatcaccaaggagtacgtcgagtccgcgctgggcgagcagttcttcgccgacatcgatcagatgcaggtcgatatcactggcctgcaggaccagatcgacaatctgaccgatgtgctggcctacgacccgacgaagacctacgcgaagaacgatatcgtgcgggtcggcagccggctgtatcaagcgaagcaggcggtgccgctcaacgcctcgccgccgaacgcgacctactgggccgacatcggacagtcgatcgagacggccaacggcctggcccagcaggtggccaccaacaccgcggatatcaccgagctcgacggtaaggtcgaagcggcggcttcgagcctggatgttctgcaggctgtcgcccgccgggagccggcgaccggagagaaggccgatgcgctgaagggctgggacaccattgctcgagccgccaccgaagtcaccgtgcgggcgaacgaggatgaagcgcaggcgaagcggacgagcttgcttgaagcgcgtaccgggaccgcggagggcaggatcgccaccgtggagtcggtcgttgcgtcgaacaatgccgtgaccgtccagcggctggaccagctatccggccaggttgcgagcaacgcctcggccatcagcaccgaacagaccgtccgcgccaacgcggacagcgccctggggcagcgggtggataccgtcagtgcgcgcaccgataccaacgaggcgaacatccagaccacatctcaagcggttacctcgctggatggaagcgtcaaggcgctctacagcgtgaagctccaggcgcatgccaatggccagaagtacgccgctggctggcaactgggcttcgacagcggtacgagcgtgacgaccatggcgttccaggctgatcggttcctctggttcaacagttccagcgggcagaccgtggcgccggtctcgatcgtcggcggccagatgttcatcaacaacgcgatgatccaggacggctcgatcaccaacgcgaagatcggcaacgtgattcagtcgaccgccctcggtgccaacggcgagccgctgtggaagttggataagggcggcgcgttcacaatgaacagcgcaacgtcgggagggtttatgcgtcagacggcagaggcaataaaagtgtatgacggaaacttggtgcttcgagtccagatcgggaatcttgatgtatga

SEQ ID NO: 335060 - DNA, 360 bp, Pseudomonas aeruginosa
atgatgcgccccgacagcaaagtcgaaaaagtctacctctaccccaagcctgtggactttcgaaagtccatcgacggccttactgccttggtagaactggatatcaaagtcgccgtgttcgaccccgtgctcttcgtcttcctcaacaaggcgcgtaatcggatcaaagtgttgtactgggagcgcaacggcttctgcctctggctcaagcgcctggaagccgagcgcttcaaaatgtcgcctgagcccagcgacgaagcgattgtcctgaccgtccaagaactcaattggctgctcgacggtttcgacctttggcgcaaccgtccccatcaggttttgactcctcgctacgtcgcctga

SEQ ID NO: 335061 - DNA, 1557 bp, Pseudomonas aeruginosa
atgatttccgtgcccgacaatctcccagacgatcctgccctgctcaagcaattattgcttgagagctatgctgcccgtttgcgcgagcaggaagtcaatcaggcccacatcgtccaaattgacgatctgaaagagcaaatcaagttatggcgtgaccgtttctttggccgcaagtccgagcaaaccgtcgatcccaaaacgccgcaactggccatgttcgatgaagcggaaaatgaccctctgctggctgtagtcgatgatgccgatgaagaagtcgttgtcccggtcaagcgccgtggcaagcgcaagccactggcggctaatctgccacgtatcgaagttatccatgagttgcccgaacacgaactgacctgcgcctgcggttgccgcaagcatgtcatcggcgaagaaaccagcgagcagctcgatatcgtgccgatgcagatccgcgtactcaaacacgtgcgcaagatctatggctgccgtggttgcgagactgctcctgtcactgctgacaagcccgcccagctaatcgaaaaaagcatggccagcccaagcgtgctggccatgctgctgacgaccaagtacgtcgatggcttgccgctacacaggtttgaaagtgtgctgtcccgccacggcatcgaggttccacgacaaaccctggcgcgttgggtgatccagtgcagtaaatacttccagccgctgttgaacctgatgcgtgatcagctgctggaaagtccggtgattcattgcgatgagactcgcgtccaggtgttgaaagaaccggatcgagacccgaccagccaatcctggatgtgggtgcaagccagtggcccgcctgatcgacaagttgtgctgttcgactacaccaccagccgtgcgcaggaagtaccattgcgtctgctgcaaggctatcgcggctatgtgatgaccgacgattatgcgggttacaacgctttggcgttgcagcccggtatcgagcgactggcatgcatggttcacgcgcgccgcaagttcgtcgaagcacaaaaggtgcagcccaagggtaagaccggacgagccgatgtggcgctgacgatgatcaataagctgtatgacatcgagcgcgacctcaaggaggtcagcgacgaacagcggttcatcggtcgccaggaaagaagcttaccgatcctcggtcagctgaaaagctggctggacaagacgtacgcccaggtgacgccgcaaagcgtattgggcaaggcggtgcattacctggcaaacaactggagccgcctggaacggtatgtcgaagcgggccatttgccaatcgacaacaacctggcagagcgtgcgataaaaccgtttgtcattgggcgcaaggcttggctgttcagtgacacgcccaagggcgccacggcaagtgcgcagatatacagcttggtcgagaccgccaaggtcaacggccaggagccctatacgtggctgcgccacgtacttgagcgcctgccgtatgcgtcgtcggtctcagactacgaagccttgctgccatggaactgctcgccagagataccacggtaa

SEQ ID NO: 335062 - DNA, 150 bp, Pseudomonas aeruginosa
gtggccggcgcaatggtggatttcatcgaagaccacaagcacccggtagtcatcaagaagctgccagaatccctcatcacggtattccatggcctgataggtataggccgcccccacggcacccatctggccatcgagacgtctgcctag

SEQ ID NO: 335063 - DNA, 267 bp, Pseudomonas aeruginosa
atgagcaagctcattggctggaggacggagaactacctttgggaaaccagcgatccgtcggtggcgaggaactgggagccgaacattggcgttctgccgatatttgaaggagatcccaatacgaagcttcaaggcgtcgggcctgagtggatgcaatcggctgacgcgttcattgaacggctcaactctgccggctggcgtgctcacgcagattcacagcatgacggcgctagagccatgttcaacgaactcaaggcaaccgcctaa

SEQ ID NO: 335064 - DNA, 273 bp, Pseudomonas aeruginosa
atgagcaagcacacgccggggccttggcatgttggcggccccaacaaatgcacgatctacgacaagcacggtcagcgccttgccaactcctttgaaggggtgatggcaacgcagcgtacggatagcgagtgtgaagccaacgcccgcctgatagctgcggcgccggagcttctggatgcgctggtaaatcttctgccgctgattagtccgctgaaagcggaaatccagcaggttgcgaatgcatccgccgcaatcgcaaaggccaccgcctaa

SEQ ID NO: 335065 - DNA, 747 bp, Pseudomonas aeruginosa
atgcatacccaaaatatgcggctatgggatcaggttcaagcaactgacccatcggccaccaagagcgcaaaagtcgatggtcagcagatcacgtcgatcagcggccagcacatgatcatgaaggctacccagatgttcggccctgtcgggatcgggtggggctggacggtcatcgaggagcgctttgaccagggtggcccgatcttccgtgaaatcaacgatgctgaaggcaagaaggtcagcgaactaattggtcacgaagtcgggcacaccgtgcgcatcaaactgtggttcgaattagacggcaagcgcggagaggtagagcaatacggttgcacgccgttctcctaccggtccaagtggggaatcaccaccgacaccgaggcgccgaaaaaatcactcacggacgccgtgaaaaaatctcttgcgatgctcgggttcagtgcggacatcttccttggcttgttcgatgaccgtgactatgtggaagcacgtcgtgaagaggagcagatcgccaaggccgaggaccagcaggccgcagaagagcaggcgaaggaagagcgcctcgcatacatcaaatcgattatcgagacgatgcaaggcgcccagtcccagtacgaactgaagaagatccacgacgttgccgtgcgcaagctcactgcgcgcaaagacgatagtggagtgaagcgcattgctcgagaattctccgagcaggtcaagcgtttcaccgaggagaaggcagcatga

SEQ ID NO: 335066 - DNA, 498 bp, Pseudomonas aeruginosa
atgacccaactctacaagctcaccgagcagtttcttgaacttgcagccctggcagaaacggctgatgaaggcatggctgtggctgtccgggacaccatgcaagcaatcgggggagagttcgaagaaaaaggaaaggccctggcaacggtcgtcctgaacatggataccgacgtcgaagcgctcgaccgtgaaatagagcgactgaacgaccggaagagggcaatcaaggctcgccaggactcgatgaaggaatacctgcgggaaaacatggaagcagccggcatcaagaagatcagttgccccctcttttccatcacctgcgttgaggggcgagagatcgccgtgatcgacgacgaaaagaagctgcccgacgaactggtcaaggtgaaggtcgaaaccagtcctgacaagaatgcaatcgcgcgggctctgaaagacggcaaggacgtacccggcgctcatttggagcgggcgaagtcttcaatcaggatcaagtga

SEQ ID NO: 335067 - DNA, 312 bp, Pseudomonas aeruginosa
atgagcgtgaaatacgatgttgtggcaaccgttggccagtacgagaaagacggccagaccaaatacctgagccgaaaagtaggcgtgatcgtcaataccaagcatggattccgcttaaagatggacgcctgcttcaatccagccggatgtcctcgcaccgatgatggcggcgtatggctcgcgctgttcgagtcgaaggagaaggaacaacagcaacgccaacaacagagccagcaagcggcaccgcctgccagtaacgacttcgacgacgacatcccattcagcccgctgccctatctagccggctcctga

SEQ ID NO: 335068 - DNA, 159 bp, Pseudomonas aeruginosa
atgtacatcaagaaagatgtcatcgaggtcatcaagtacgcggcgatgatggcggcctgctctcgccagtcctggggaatctaccccatgaaccagggctacaaggccatgcccttccgtggcgactatcaccgcgtcgtcgaagtctgccatccctga

SEQ ID NO: 335069 - DNA, 213 bp, Pseudomonas aeruginosa
atgaggctgaccagcattccacgcatcaagagcatcaacctgagtcaaaaacgtttcgagcgccgccgtcgcctgtatgcacgaaagattcactgggagctattcggcgggcctctagggggggcatggctatgtacgcctggaaccctgaagttcagcattccaggctggagcggctactacgacggcgaaaacaagtgggtggaagcatga

SEQ ID NO: 335070 - DNA, 207 bp, Pseudomonas aeruginosa
atgaacactcacgaattcatcaagaagcaggtagaccagcagttgcagcgcgacgggttcccttcgggaatctgcatggtcatcgccgacgaggcgcttgattactacaagcgcaagcagaccttccccaaaggcgccttcaacgagtgcatggtcttcgcccgaaaacgagcgaaagagatgaccggcaagaagaagtccgcctga

SEQ ID NO: 335071 - DNA, 213 bp, Pseudomonas aeruginosa
atgcaccagctaacagcgaatcaccgccctggcggtgtgacggtcaccggctggcccgaagaaagccagctcatgaccccagacgacattctgctattcgcgagagcggttaagcagatggcgatcaaccagtcccagggcgccgatggcgttcgggtctacccggaggatgagccatgccattcgacgaaagccccgcagtccgccgcataa

SEQ ID NO: 335072 - DNA, 783 bp, Pseudomonas aeruginosa
atgcaaggcgttcagttaatacagggggactgcctttcagtcatgcctacgctccctgacgcctcggttgatctgatcctcgctgatcttccatacggaacaacgcagtgcgcgtgggattcggtcattcctttggagcccctgtgggagcagtacctgcgaatagcgaagccaaacgctgcgattgttctttgcgcagcccagccattcacatccacgttggtagcgagccagcctagcctgttccgatatgagtggatatgggagaaggggcatgctactgggcatcttaatgcgaagaagcagcctctgagggcacatgagagcgcagtggtcttctaccgaaagcagcccacatacaatcctcagatgacctccggccatgacagaaagaccgctacaaaacgacgagacagaacgcaggtgtatggcgctcagacttttgacgcaattgcatacgactcaacagagagatacccgcgctctgtccaatttttctcaagcgacaaacagcggagcgcatttcacccaacgcagaaaccggtggcatggatggagttcctggtacgcacatacaccaatccagggatggtcgttcttgacaacacctgtggaagtggaagctctggcgtagcggcggttaggtcgggctgcagctacataggcatcgagaaggatcgtggagaaaacggtgagagtcttgggtatctcgacactgcgcgccggcggatcgacgaggaactgatgcgactgaatgatcatgtgtgtgtagcaaggaggtag

SEQ ID NO: 335073 - DNA, 582 bp, Pseudomonas aeruginosa
atgagtgaggtgaagcggttcgaccacgtgaaccatgctcacgttgatgactgtgcgcacattgagaaccccggaggagcgtgggtgaaggcctccgactacgacgccctcgccgccgaggcccaggcgctcagggaggaagtcgcgcgaggaaaccggattactttggccatggcgctggatatcgctgcggtaggtgtagcacttgggattccaggagagcaacaggaaggcggtactggcgaattcatcgaggccatccaaaaccttcagaaggagctggaagccctgcgcgcaagggtagtcgttgtgccggagcggaagcttctaaatgccggcgtcccagggctgaatcgtaatagcggctggaacgcctgcctcgacgaactggcgcgcctcaacggcaagacggtcagcgaggggctgttgcgcgaagtcgcgcgccacttgggaaactggcttgaactccacgaatgcgagtgcgacggcggattccactactgcggccgcgaccaggtggcaaagaccaaccgcgaactccgcgccctgctcaaccaggacaaggagaacggcaatggctga

SEQ ID NO: 335074 - DNA, 381 bp, Pseudomonas aeruginosa
atgaacgaccgcacactactcgaactggcggcgcgggcggcggggatcaaggcgcgctggttcaaagtgaaccaatggcgccggctcgatggatgcaggttgcacaccggccagaaggatgtttttggaacgcatcatcgtaagccatggaacccgcttaatgaagacggcgatgcgctacgcctggcgcaccggctcggccttgcggtagatatgagcgcttgcgtcataaacttcgcgatccctgaccaggacgacagcgaaatggaaatcgaggttgcgctggagtacgaacccttcgatggcgacattgcgcacacccgccgcgccatcgtccgcgccgccgccgagatcggcaagtctatgggaggtagggaatga

SEQ ID NO: 335075 - DNA, 162 bp, Pseudomonas aeruginosa
atgagcgaagaaaaggagccaatcgcatggctcgtcgaattcgagagcggggatactgagctttggcttgccagcgagttcgatgggcatcccgcgttcggtcgctggatcaccccactctacgctggcgagacagtagatcaagaaccggaagatcaataa

SEQ ID NO: 335076 - DNA, 1017 bp, Pseudomonas aeruginosa
atggcaaccccaggccggctcgccgctctccctctgagtcagcggctgcgccgcacgccgcagcgcttcgaactgttgcaggcgctgctgctgctcgaacgcgagcgtccccaggcgttgccgctgggcaccggcaacgcgccgcgggcggaggccctgcgcctgcgcgggccgctgctgccgctgttcgcctcgagcgaggtggaaagcctgctcgacgacccgcagcaaccggtgctgtccaccccggtgttcggcctcggcggacccgacggcccgctgccctatgcctaccaggaatggctgcaacaacgcgcccggcagaaggaccatgcccccgccgagttcctcgacctgttccagcaccgcctgctcagcctgctctaccgggtgctgcgcaagcatcgcgtggcgctcggtttcgcggtgccggcggcgaccccggtgcaggcgcagctacgcgccctcagcggcctgttgccgaaagccctgcaagagcgcctggcgctgccggacagcgcggtactggcacgcaccgcgctgttcgccggcgggcgtcgctccctggccggcttcgccggcctggtgcgccagcatttcggcgtggaggcacggctggacgcctaccagggcgcctggaaggaaatccccgcggccagccgcagccggctgcaacgcggcggacgcaacctgcgcctgggtcgcgacgccatagccggcacgcgcacctgggacgagcacgccggcatcgccctcagtctcggtccgctggatgcccgcgaagccgcccgcttcttccccgacggcgacgcccatggccagttggccagcctcgccgcgctgtacttcggccccgacctggattgtcgcctgagcctgctggtgagcggcggcgcgccgctgcgcctggagcgcggtgcaccgcccaggctgagctggaacaccggcctgcggcgcgtcgaagacggccagcggcagcgcatcgatctcgacctgcggcagccggaggtagcctga

SEQ ID NO: 335077 - DNA, 903 bp, Pseudomonas aeruginosa
ttgcaggcggaagacttccagctcggctgcgcgccggcgatcaacctctttccgcggacctcggagccgctgcgcccggacggcacccgcagcgagtaccgcctggtcgccgacagtcaccgcgagaacagcgtggaaatccatagcatccgcgccgtgcgctcggttgccgggagcaccgtgcagccagtcccggcctactatggctgccgccacgacagccacctcggcacgctctactggcacgcccggcgcatcgccgggctgaccccgaaccggctgggcagcgatctgctgctgagcctggtggataccggcttcgacccgttgcgcgagaccccggccttcagcctgaccgccgagctgctatgcaccaatcgctatctggccgagcgcctgggtgccggcaccgcgctgggcttcgaacggcccgggccggtcgccgccgcacgcctgcgcaacgcgcccagcgcgcagagccagccgcgcctggacggccagtcgcgctggagactggtctcgcagctgaccctcaaccacctctcgctggtggaaggtccgcgcgccctcgaagccctgcgggaaatcctcgccctgcacaacctgcgcgacgacgccagcgcccgccggcagatagaaggcctgcggcaactcgactgccagcgggtggtggcgcacgtcggcgaggatgcctggcgcggctggcgcaatggcctggaaatccgcctgcgactcgatccgcaacacttcgtcggcgccagcggcgtgctgttctccgccgtgctggcgcagttcttctcgctgtatgccaccgccaaccgcttcgtgcgcacggtcctggtggaagccgacaaggaggtgaagacatggcaaccccaggccggctcgccgctctccctctga

SEQ ID NO: 335078 - DNA, 1017 bp, Pseudomonas aeruginosa; identical to SEQ ID NO: 335076

SEQ ID NO: 335079 - DNA, 2550 bp, Pseudomonas aeruginosa
atggaactcgccgccctgatcggccgcctcaacccggactgtcgccgcgccctggagcgcgccgcgcaacgctgcctgcaacgcacccatcattacgtagagatcgagcacctgctgctggagctgctggacatcgacggcggcgacttcgcctgcctgctgccgcgcttcggcctggagcgcgacgccctggtcgccgagatcaacctgtcgctggagctgttcaaggccggcaatacccgcactccggcgctgtccgcgcacaccatcggcctgctcgaagacgccgtggtccacgccagcgtgctcggccaggcgcagatccgttccggcctgctgctgctcgccctgctcgaccgcgaggagcgccgcgccctgttgctgaacagcgcgtcgtcgctgctgcggattccccacgaggccttgcaggccaacctgctggagtggatccaggcctcccgcgaacagccgcccgcgccgaaccgcccggcggcaggcggcgacaagccggaaagcgcccaggacccgctgctcgaccagtacacccaggacctcaccgccgaagcccgcgccgggcgcatcgaccccatagtcgggcgcgacggggagatccgccagtgcgtcgacatcctcctgcgccggcggcagaacaacccgatcctggtcggcgcgccgggcgtcggcaagaccgctgtggtcgagggcctggccctgcgcatcgccgccggcgaggtgccgccgtcgttgcaggaggtgatcctgcgggtgctcgacctcggcctgttgcaggccggcgccagcatgaagggcgagttcgagcagcgcctcaagggcgtgatcgacgccgtgcgcaacagcgcgcagccgatcatcctgttcatcgacgaggcgcacacgctgatcggcgccggcggcgcggaaggcggcagcgacgccgccaacctgctcaagccggccctggcgcgcggcgagttgcgcaccctggcggccaccacctggctggaatacaagaaatacttcgagaaggacccggcgctgacccggcgcttccagttggtccaggtcgaggagccggacgaggccaccgccgtggagatgctgcgcggcgtcgccggcaagctggaactgcatcacggcgtgcagatcatggacgcggccatcgtcgatgcggtgaagctgtcgcatcgctacatctccggccgccagttgccggacaaggcgatcagcgtgctcgacaccgcctgcgcgcgggtcgccctcggccagcacgacgtgccgccgccgctggaaagcctgcgccatcgcgagcaggcgctggaagaggaattgcagcggctgcgccgggaacaggccaccggcctcgaccacagcgcgcgtatcaccgccctggaaagcgagtcgggcgataaccgccggaccatccgcgagctggagacccgctgggacgaggaacgcgaagcggtgcgcgaactgctcgacacccgccgcgaactgctggccctcagcgaaagcgccgacgcggccaagcccgacgaggaactggacggtcgcatcgaccacctggccgccgaactggcgcgcctggcggccggcctcgaagccatccgccaggacgacccgctggttcccgagcaggtggactcgcgtaccgtggccgcggtgatcgccggctggaccggcatcccggtgggcaagatgctcgccgacgaagcccacgccatccgttccctggcgcaacgaatgggccagcgggtgatgggccaggaggccgccctgggcgccatcgcccagcgcatccaggcctatcgcgccggactcagcgacccggccaagccggtcggcgtattcctcctgcccggccccaccggcgtgggcaagaccgagaccgcctacgccctggccgacgccctctacggcggcgaacgcaacctgatcagcatcaacctctccgagtaccaggaggcccacaccgtcagccagctcaagggcgccccgcccggctacgtcggctacggcagcggcggcgtgctcaccgaagcggtgcgccgcaagccctattcggtggtgctgctggacgagatcgagaaagcccatccggacgtgctggaagccttctacaacgtgttcgacaagggcgtgatggaagacggcaccggcctggtggtggacttcaggaacaccgtgatcctcgccaccagcaacgtcggcgccgaactgctgctggacagcccggccgaacaggtcgccaccccggccttcgacgagcgcctgcgcaaagtcctgctgcaaaccttccgcccggcgttcctcgcgcgcatgaccgtggtgccttaccggccgctggaggaagccaccctggaaggcatcgtcgtggccaagctggaaaaactgcgggaacgctacaaggccgctaccggcaaacagttcgacttcgacccggccatcgtcaaggccgtgctcgccaagtgcagcgcggcgggcgcgcgggatatcgagaacgtgctgatggcgcaggtgacggggaagttggcggagtgggtactcgaatga

SEQ ID NO: 335080 - DNA, 426 bp, Pseudomonas aeruginosa
atgcccaacggcgcgacgctgaccgccatgatgaacgctgccgacgccctacgtctgaccgaggccccgaggaccaggcgcggtggtgtgtccgacggtatttccttccacatcgcccaatacgtgcccggtggcgcgtctctgaccatcaccagccagttcgtcggtcagaaagccggctccgccgtgtgctacgagaacacactgttcaacgatgccctggtcggtcgcatcaacgccatcgttggcaacatcatcgtgcgccagagcgtcgcaccctgtacgcgctgccgcgccggctaccgccagctcgcccagaacggaccacgtactatcgtcgtctccagcgatgacggctacgacggcgcccccgacaacaccatcttcctcttcgcacccaccgggctggtgttctaccgacgctga

SEQ ID NO: 335081 - DNA, 1068 bp, Pseudomonas aeruginosa
atgccccgaaccatcgaatactggcgccccacgaacggcctgtatcatgcgaccccgcccggaatcgccgtgctgacccaggacagcgattgggaggtgctcaacgaagccaccggcttctacgaggaaagcccgtatccctccgccttcaagggacaggtgtatcgcgcgctgaactacataaacgctacgccgacgggcgcatcgctgctctggaacctctacacgacgaacaatttcgtcgacatcaccccctcgtcgctgggcaacaatgtccagtccaccaatcagcccatggcgctcaatcaggtcgccagagaaatcatcgtaggaaccggtcccggcccccagacccagatcgcgctcaatcagacaggcatcgccccgcaggcgcagacccagtggctgacctatgtcatcaacagttcgccgcattgggccctggacggcgtgccgggcaacggtggtggcctttacggctatctagagcgcgcccgccagtatgccaaccgctggatgctgctgttcgaccaccgctacttccgctggagcgacagcaatgaaggctatttcaatgagcagagctacagcggacatttcggtatctccgcccacaacatcgccatcaccaaccacgaagtggcggcctggcttgccggacagccgctaccccaccgcctcagcgatgcccagcagaaccatgcgcggcttgcgaccatagttgcccttaaggacgtttcgccgccttcggctggctgttccgcccatgtgagatggaaccccacagcgaccaacccgctgaaccggatacgtcctccggcaatcggcctggctcatgagctgctgcatgcctactacagttgccgaggcgcacaacccggctacgacgacaaccactactccacggtactgttcgaataccgctgcgtcggcctcggcccctgggacgaagcaccattatcggaaaatgccctacgcaaagaatggtggagctatgcctgccagcaggtgcccggaagcgacccagagaacaggaaggccatcggcaaacgcatcagttacatgtag

SEQ ID NO: 335082 - DNA, 2007 bp, Pseudomonas aeruginosa
atgccccgtcccaccgatagcactaccagcctctccctgaccgcctcggcgctggcagccctgttcccggagcgtctggccggggaagaacgcctgaacgcactgcccggttgggaactgctgggctacagcgccagccccttagccctggacggcgcaatcgccacccatctcaccgccaccctgcacaacgacgccgaccagcgtccgctcgacggcctggtcgcggagatccgccaactccccggcgatgccagcgccgagcgctaccaggtgctgttgcgcccctggctctggtggctgacgctggccagcaacaaccgggtgtttcagaacctggccaccagcgacatcgtcacccaggtcttcgaccagcacggcttcagcgactaccagttgcagctcagcggcagctaccagccccgcgaatactgcgtgcagtacggcgagagcgacctcgccttcgtctcgcggctgctggaggaagacggcatcttctggttcttcacccatgccgccggcaagcacaccctggtgctggccgacagcaacgacgccttcccgccgattcccaacggcccgcaagtggcctacctgggccaaggaatcggcgtgcgcgagttgcagggcgtgcgttcggcgcagtacagcctccaggcggtatccgggacctacagcgccaccgactacgagttcaccaccccgggcacctcgctgtactcccaggccgaggcggtctccggcgccgccggcgtctaccagcaccccggcggctacaccgccaaggcccagggcgacagcctgaccaagcaacgcatcgacggcctgcgcagccaggagacgcgcctgatcggcgagagcgactgccgctggctggtgcccggccactggttcaccctcagcgggcatgacgacgattcgctgaatatcgactgggtgctgacctcggtcacccatgacgccagtcacgcgcactaccgcaaccgcttcgaggcgatccccaaggccaccgcctaccgccccgcgcgggtcacgcccaagccacgcatgcacacccagaccgccctggtggtgggcaaggccggcgaggagatctggaccgaccagtacggccggatcaagatccagttcccctgggaccgcgacggcaagaacgacgagacctcgtcctgctgggtgcgcgtggtgctgccctggagcggcaagggcttcggcatgcagttcgtgccgcgcatcggccaggaagtgatcgtcaccttcatcgacggcgacccggaccgcccgctggtcaccggctgcgtctacaacggcgacaacgccctgccctacgcgctgccggacaaccagacgcagtccgggatcaagaccaactcgtcgaagggcggcggcggtttcaacgagctgcgcttcgaggacaagaaggacgccgaggaagtcttcctccaggcgcagaaggacctcaacgtcaacgtgctcaacgacagcaccgccagcatcggccacgacgagaccctgacggtgcagaacgcccgcacccgcacggtgaaggaaggcgacgagaccgtcaccctggagaaaggcaagcgcagcgtgaccatccagaccggcagcgacagtctggatgtgaaggacacgcgcacggtgacggtgggcgccgaccagacccacagcaccggcggcaactacagccacaaggtcagcggcaacttcgagctgacggtggacggcaacctgaccatcaaggtcagcggcaccctcgccctgcagagcggcggcagcctgaccctgaagagcgacgccgacctcgccgcccaggccggcacctcgctgaccagcaaggccgggacgtcgctgaccaaccaggccggcacctccctcaccaacaaggccggcaccagcctgaccaacgatgccggcgtcagcctgaccaacaaggccggcgccgaacagacggtggacggcggcggcatgctgaccatcaagggcggcctggtaaaggtcaactga

SEQ ID NO: 335083 - DNA, 396 bp, Pseudomonas aeruginosa
atgggctgcccgcaggtctgcgccggcgccaccctgcaatgcagcttcggggcggcgccgacggtgctcaacgtgttgccgcagaaccgcaccctgaccagcgggatgccggcggcgaacatcatggaccacatcccgctgctgaacattcccaccttcggtctctgccagagtccggccaaccccgtggtggccgccgccaccgccgccgccctcggcgtactgacgccgatgccgtgcattcccgccaccgccagcccgtggatccccggcggcccgccgaccctgctgctgggcgggatgcccgcgctggacgccaatggcacgctgatctgcacctggggcggggtgatcaagatcagcgtgccgggacaggtgcagatgctgattccctga

SEQ ID NO: 335084 - DNA, 642 bp, Pseudomonas aeruginosa
atgcctagcacaagaagcctccccgcacgggtcatcgtcgccgatgactatcccctgttccgcgatggcctgagacgggtcgtccgcagctacctcccgcaagccgccgtaagcgaagcgggcagcttcgacgaggtgctgcgcctggcctcgagcgtctcgccggaacctcccgtcctcttcgtcctcgacctgctgcttcccggcttcgccgcctcccagtccatcgagcgcttgcgtcgcgcctatcggcacagcgcaatcgtcatcgtctcgatgctcgacgacccgcgtctggtggacgaggtgctggccgccggcgccgacggctacctcggcaaatccctggaggccggggagatcggcacggcgttgcagacgctcggcagcggcgaaccggtggtgcgcctgcgcggcgggtcgagcgccggcagtcggcaacgcgccctcctggacgccctgaccccacggcagcaagcggtactgcggctgatcgccgatggcctgtcgaacaaggaaatcggccgcgcgctgtcgatctctccgttcaccgtgcgcgtgcacgtttcctcgctgctgcgcgccctggaagtgaacacgcggacggccgccgcggcgctggcggtgaaggtcggtttctag

SEQ ID NO: 335085 - DNA, 1206 bp, Pseudomonas aeruginosa
atgatcgacagggtgaagccgctgatggcggcatgggttctggtcttcgcatcttcttcgttcgccggcgaaacggcgggaaaattgccacgaaagccagctctagggccggaaaccgcgggggcgaccctggtcattcccggcgagaccgacaggctcgcttcgctctacgcccgcgcacggggcgaaggcggcaaggtggtgctctgggccggcggcgacgcgccgaaccagatggactggttgaagacggccttcgagagccgctttcccggcgtgaccctggacgtcacggtggacctctccaagttccacgacctgcgcatcgaccaggaactcgccgccggcaccctgacgccggacgtggcgatgctgcaaaccaccttcgatttcgacagatggaaggcccgcgacgtgctgctgcgctacaagccggtcggcttcgcccggcagaagaaaggctacgccgatcccgacggcgcctatgtcacggcctacaacaacgccttcgtgccgacctacgcttccgtccggctgccagcggagcgctatccgacgcgcttcgccgattacctgaagccggccttcaagggcaagctggtgctgacctatccccatgacgacgatgcggtgctgtacgtctacgacaagctggaacggcgctacggcagcggtttcctgcgcgccctggcggcgcagaagccgaacttcctgcgcggcacggcggcgccggcggcctcggtgggcaccgactccatcggttcgctgggcaacctgaccggctatgcgaccgacagcgatacgccggccggctacttcatcccgaccgacgagccgttcatcgtctggaaccagcgcgcggcgatcttcaaggccgcccgtcatccggccacggccaagctgctgctgtcctacctgggctcggccgagttccagtccagctacggcggctggcgcgcccgcgctgacgtcggcgaagcgcctgggctgccgccactggagtcgctgaagaacgtcgacgtgcacgatttcacccgctggatggccgatcgccaacgggtggccagtctgcgcaggcacatggcggaaatcttcggcccggtacgcggcgagtcgccgttgcgcgacccggcgctgatgagcctgctggggctgacggcgaacgacatcgtcgccttgcccgaaccggacctgccgatctactga

SEQ ID NO: 335086 - DNA, 2316 bp, Pseudomonas aeruginosa
atgaagcgctcgtaccccgacgatctggtcatcggcaatctcagccgccgcggtttcctcaagggcgtcggcgccaccggcgtgctgctggtggctgccaactggggctggcgcgacgccctggccgccgagaagaaggccttcggcgccgacgccatgccccacggctgggtggacaacccgaagatctacgtgagcatcgaccgggacggcacggtcggcatcgtctgcaaccgctcggaaatgggacagggcgtgcgcaccagcctggcgatggtggtggccgacgagctggaggccgactggagccgggtcaaggtgatccaggcgcccggcgacgaagcgcgctacggcaaccaggacaccgatggctcgcgcagcatgcgccattggttcgaacccatgcgccgctgcggtgcggcggcgcgacagatgctcgaacaggccgcggccaaccagtggaaggtcccgctgggcgagtgccgcgccgaacagaacaaggtgctgcatgcgcccagcggccgttcgctgtccttcggcgaactggccgaggccgccgcgggtctcgaagtgccggcgcgcgacaagctgttgctgaagaagcccgagcagttccgctacatcggcaaggacgtggcgcgcgccatcgacggcgccgatatcgtcaatggccgcgccggcttcggcttcgacgcgcgcttcgacgacatgctctacgccgtggtcgcccggccgccggtctacggcggcaagctcaagcgctacgacgccgccgcggcgctgaaggtgccgggggtggtcaaggtgatcgagatcgagggccggccgatcccgtccgagttccagccgctgggcggggtcgccgtggtggcgcagaacacctgggcggcgatcaaggggcgcgaggcgctggtggtcgagtgggacgccgggggcaacggcggctacgactcggtggcctaccgcaagcaactggaagaggccgcgcgcaagccgggcaaggtggtgcgcgacagcggcgatgccgcggcgctgttcgccaagggtggggatatcgtcgaggccgagtactacctgccgcacctggcccaggcgccgatggaaccgccggtctccaccgcctggtacaaagacggcgcctgcgaggtctgggccccgacccaggcgccgcaagtgacccgcgagcgcatcgccgagcgcctgaaactgccgttcgacaaggtcacggtcaacgtgaccctgctcggcggcggtttcggccgcaagtccaagcccgacttcgtgctggaagcggcgatcctggccaaggcgttccccggtcgccacctgcgcgtgcagtggacccgcgaggacgacctgcatttctcctatttccacacggtctcggtggagcgcctgcaggccgtgcttggcgccgacgggctgccgcaggcctggctgcatcgctcggtggcgccgagcatcaccgcactgttcggcccggacagcaagcaccagggcgccttcgaactgggcatgggcctgaccaacctgccgttcgccatccccaacgtgcgcctggagaaccccgaggccccggcgcacacccgggtcggctggttccgttcggtctccaacatcccccacgccttcgccatccagagcttcgtcggcgaactggcggcgaaggccggccaggacccgaaggactacctgctcaagctgctcggcccggcgcggcggatcgacaccgccgaactcggcgacagctggaactacggcgagtcgccggagcgctacccgctggatgtcggccgcctgcgcggggtgatcgaggaggcggcgcgccagtccggctggggcggcgagctgcccagaggcagggcgcggggaatcgccgcgcactacagcttcgtcacctacgtggcggtggtgatcgaggtggaggtgaaggacgacggcgcgctgctggtgcacaaggccaccatcgccgccgactgcggtccgcagatcaaccccgagcgcatccgctcgcagctcgaaggcgcctgcgtgatgggcctgggcctggcggcgctgggcgagatcagcttcaaggatggcaaggtccagcaggacaatttccaccagtacgagctggcgcgcatgccgctggcgcccaaggcggtgtcggtgcatctgctcaagccggatggcgacctgccgttgggcggggtcggcgagcccggcgtgccgccgatagcgccggcgctgtgcaacgcgatcttcgccgccaccggcaagcgcatccgcgagttgccgatccgcaatcagttgcaggggtggcggaaggcctag

SEQ ID NO: 335087 - DNA, 471 bp, Pseudomonas aeruginosa
atgattaccctgaacctcaatggcaaggatcatcagctcgatgtcaccgaggatatgcccttgctctgggctatccgcgacgtcgtcggctataccgggaccaagttcggctgcggcatgggcctgtgcggctcctgcaccatccatatcgacggccaggccacccgttcctgcatcacgccggtgagcctggcgcagggcaggaaggtcaccaccatcgaccacctgcacaccgacaaggtcggcgaagtcgtccagcaggcctggctggacatcggcgtggcgcagtgcggctactgccagggcgggcagatcatgtcggccacggcgttgctgaagagcaaccccgcgcccagcgacgagcagatcgaggcggccatggccggcaacatctgccgctgcggcacctacaaccggatcaagacggcgatccacaacgcctccgccaagttgcaggaggccaaggcatga

SEQ ID NO: 335088 - DNA, 237 bp, Pseudomonas aeruginosa; identical to SEQ ID NO: 321205

SEQ ID NO: 335089 - DNA, 243 bp, Pseudomonas aeruginosa
atgaaccacactgcatcgatccccgccctgcccacggcctatgacctcctgaacacccgcatccagcgcatcatccacgccccggccgcgcaacaggcctgccaggcctgcatttcccgattgcccggcgaagacgagggcgactgggcccacctgctggaaagcttcgaccgttccaaccagtggctgctcgacccgcagcgcgacggcagcatcgtcctgcgctggagttccgccgcctga

SEQ ID NO: 335090 - DNA, 1152 bp, Pseudomonas aeruginosa
atgagcgtcatcaccgatatcgaagacctgcgccgcctggcgcgcaagcgcgtgccgcggatgttctacgactacgccgactccggttcctggagcgaaggcacctaccgcgccaaccaggacgacttcgccgcgatcaagctgcgccagcgggtcgcgcggaatatcgagaaccgctcgctgcgcacccgcatgctcggccaggagatggccatgccggtggccatcgcgcccaccgggctggccggcatgcagcatgccgacggcgagatcctcgccgcccgcgccgccgccgagttcggcgtgcgctacaccctgtcgaccatgagcatctgttccctggaggacatcgccacggaagtcggccagccgttctggttccagctctacgtgatgcgcgaccgcgatttcatcgaacgcctgatcgaccgtgccaaggccgccggctgcgacgcgctggtgctgaccctcgacctgcagatcatcggccagcgccacaaggacctgaagaacggtctctcggcgccgccgcggccgaccctggccaacctgctgaacatcgccaccaagccgcgctgggcgctgggcatgctcggcacccggcgtcgcggtttcggcaacatcgtcgggcacgtcaagggcgtcgacgacatgggctcactgtccgagtggaccgcccgccagttcgacccgcggctgaactggggcgacgtcgaatggatcaagcggcgctggggcggcaagctggtactcaagggcattctcgatgccgaggatgcgcggttggccgccgactccggcgccgatgcgctggtcgtcagcaaccatggcggacgccaactggacggcgcgccctcgaccatcagcgcgctgccggcgatcgtcgaggcggtgggcgagcgcatcgaggtctggctcgacagcggcatccgttccgggcaggacgtgctcaaggccatcgccctcggtgcgcgcggaaccatgatcggccgtccctatctctacgggctgggcgcgctggggcaggccggagtgacgcgggcgctggagatcatagcccgcgagctggacctgaccatggccttctgcggccataccgacatccgcgaggtcggccgggacatcctgttgccgggaagctatccgcgatag

SEQ ID NO: 335091 - DNA, 498 bp, Pseudomonas aeruginosa
atgccgctggccgatgtcgaggtgcgcggcgacagccatggcgtggcggccggcgagcggctgctggaggagcgcgtgctaccgatggccgcgccggggctgctgctcggcctgccgcggccctggacgccagccatgctcgccggcctgccgttgctgcgctcgccgctggagccctggcagccgtggttccgcgtggccgggctggactggccggagccctgcgccgggccgcgcctgctcgatttgggcatgaccctggaagccgccgccaacggccagggcgtggccctcgcgcgaccctcgctggcgcgcgcctggcttgccgaggggcggctggtggtgctgttcccgctgcgttcggcgcccacccaccattaccacctgcgcagccaccaggcctcgccggccagtcagcgtttcgccgcctggctggcggcgatctgccgcgaggcggtggtccagggcagggaattccttccggcggcggacgactga

SEQ ID NO: 335092 - DNA, 2181 bp, Pseudomonas aeruginosa
atgaccacatatcgcaccctgaaccctcttggctcgaaagacccgcgggatctgtacgacaacgccgaaaactacgatacggcgatgaatgatagaaccaatgagcagtgggcagaccgatttggagtaagccgaccaacctggtttggcgtggagcagcgggtcaacgactacctcactgcccaaggcttcgagcctggagtcctggagtacgtcgacggctcaccgctgaccgtagaccgtccgacccaactgatccagcgtgacgggaatctatacagcgtcaagcgcccggcatcgttccccgtcaatctgaccgggaactgggcgacggaccagaaccttctcgttgcgcaagttgatcaatctctgagacagcaattggccgaacctggtggcatgcagatgattggcgcgctcgacgggaaggtaggtgactatttgccgaaccgcatccacgtccgtaaattcggtgttgtgggtgacggagttaccgacgactccaatgcgttggaagctgccattatggcaggcgtgccaattgactttggcaatctgcagatcaggatcacacgctcaattggaaatcaagcaaccattcctgccagcatcgactggaaagccagcggtgcaaagatttttatggactctactgtcatcaccgaatcggtgatgtacttcgccgttctaccgcttgatcatcttattcaggggccactgttcattgatggcgcatctaaggcattctgcggcctgtatctgcgcaacaactcaacggtgtcttaccctctaggctacgggactatgtatgccgaggatttgcgagtagagaacatccgccgtgcgaacgatacctatgccaacggcgatgggatacttattcgcggcggcttcactcgtgtaacgttgatccgtccaaccgtgcgcaacgtcatcctagccccgggcgctggcactccaggagtggttggtgtatccggaattgtgattttcggcaacagcgacggtataggttatccgcgcacagtttccatcgttgacccaaccatagaaatggtaggcagcgaggatcccgcacaggtagatgacatggatggtattcgcctgtttgggcctgcggcatttacaggcggtacgcaggctatcgacagcactttcaccgttacgagaggaacattccgcgattgcttcgggcgtagcatcaagtcacaaatgacatccggagaagtggtcggcactaagttcattcgaaccactgggccatcctccggcttcggtaacgaagaaatcgctttccagcagggcgctggatatgtcgagaatattacctgtctgtattatggcggcaacgttccaactgtcgtaatcaacggcgggcgcggcacaattgaacgcaagcggccttcgcttaaggtcagcggggcatatatagcaaaccattcggccccagccatcccgcaggtcgtacagacgttctcaccaggaataaacaccggcattgttgtaattgagaatgtagagatacagggtccggttgatcgcctggctgagtatctggtcaacggtaaccaaaacacccttcgtgtttccgggatatctgtagacggacttacagccgaactggtcaggattaaaactagcggaacgtccagcccgtttgctgcgaaagtctacgcggagaattgcgtaaatactggcgccgtccgcccattggttacacatcgagtcgcgggtaactctgtcaccgctgagcttagcgaatatgcatgtagcggctttactcgcaacggttctgcggatacgttcctgcctaatccaggcagcgtcatgcgtccttacgcagtagcaggagaggaccaagccgttggcgggagcatgcgcgttcaggcggtatctatccctgcgggtggtgtagcgcagatccccggccacggcatcaacgggggagtttgcttcgctatcatctcaataaacagaaatgcagcatcgcagggatctgtagcaatttcgggaactggagtaacagctctagcagtaggatcagacatcgccgttggcgcaacgacagagccggctagtggtctttttagaatatgggcccaagcctctggtggaggcaccatcaatatcagaaacaatgacacatctgcgagggtagcgacgttgttcagttttgggtga

SEQ ID NO: 335093 - DNA, 228 bp, Pseudomonas aeruginosa
atgaccagggcagcagacgaaaacgaaatcctggacagcctcggccggatcatcagcatgcatgccgattggctggatggctgcactttccagcgtctctgccagcaggcagcccacgcgtacttcgaagagcaagatctggacgatgtaggcacattcgatgacctacaaaaaagctctgccctactcgaccaagccatgaacctctggcccaaagccaagcggtga

SEQ ID NO: 335094 - DNA, 489 bp, Pseudomonas aeruginosa
atgagcaccaatcaccagtgcaacgcagtcatcgatgccataggcgagatcatcggcaagaacgccgattggctcgatggtcgtcttttccagaagctcgccatgatcgccgctcgggcgaactacgaagatgaagaactggaagactatggcacgttcgatgacttcctaaaggctttcgaaacgtcttcaaccgccatccaggcagagacagccgacggcagcaacgaccagcataagcccgaggaacttccccctttagacctcataggactcgtgaaatctcttcctcaaagctactgggaccgaatcgcgcagcagccaatgaaccccgttttagctcagcgtctctccgcactgcggaacgaaatgggagatgtgcgcgtgctaagaaacgagccggacaggctgctcatcctcgtggaaaacggcaaaccagaacctttcctcatggcacttcttgcgaaaaatctggagaccaaacaatga

SEQ ID NO: 335095 - DNA, 711 bp, Pseudomonas aeruginosa
atgaacgaacggcaaaaagcctatgccgtggtcacgctcaaggacctgcagcaggatgagcgcacgttcaagggcatcgccagcaccccagagaccgaccgtcacggcgatatcgtggtgagcgctggcgcccggttcaagaaccctgtaccgctgctttggatgcatgaggcggacaaggccattggcacggtcgagttcggcaaaccgactgtcgacggcatcccgtttaccgcgaggattcccaaggtcgatgagccgggcgtgctgaaggaccttgtcgacctagcctggcattcggtcaaggcgaaggtcgtgcgaggggtatctattgggttcagggtcttggaggggggctgtgagtctctcgcccagggggggaagcggttcacctccttcgagctcatggagctgagtctggtcagcgtgccggccaacccaagcgcaacgatcactgaaatcaaatccatcggaaaccgcatccaggatcccaccaaactggcattcgcagaccgcgcgcaggcgctgattaagcagatcaccgaggccgctcgcgaggccgcgaaaggcggcgtgaaggaagcatatggagtggccggtgtcgggatactcgccgcccacctgatcaaggccctggagcgcatcgagcgtctggagggcgatatcaaggtcctgaccgaattattggccaatgtggagtccagccgatga

SEQ ID NO: 335096 - DNA, 1026 bp, Pseudomonas aeruginosa
atgacccaagtatccatcgccccgaaagggcaaacctacgtgcgatctttgatccttcgcgccatcgccccctatgcggatttcgaaggaatcaaggaaagcgcaattgctcgctggggtagctaccagggcgaacaagtagcaaaggcggccatcgcccctatcatgcagtctgacgtcggtgactatgccgcggttgagttctttaacttggtgatggagcgttctctgctcggtcgcctggctgggttacgtcgcatccccttcaaccgcaaaatgctgaagatcactgccggctctcatggctattgggtagcagaagggaagccaatgccgctgagcaagccggctctggttggctcctcgatctcgccactgaaggtatgctcggtgatcgttgtcaccgacgaagcagtccaaactggcggtgcaattgctgaggcaggcttgcagaaagatcttgagcgagcagtagtagacaccaccgacattgccctgctcgatgctaacaatgctggtgtagttgacgaacgtcctgcatcccttacttacggtgccccctcttctgctgccacctcagatgccgctgccgacattgccacgctggtagggatgtttggcggggatttgggcgcctcctatttcgtcaccgactccaccaccgcaaccaatatggcactccatcgcaacgcatcaggcgatctggtgtttccggatgttggtgcccgtggcggatcaattttgggcatccccctgctgatctcgcgcgcctctccgcgcgactccaatggtgggcagctcgcactgatcgacccgacaggtatcgcctatggtgcagacggcctgactttcgaaaacgcggaacacgccaccctcgccatgagcgacaccccggagtctgagcaggagcttatcagcctgtggcaatacaacctggtctgctacaagtcggtgatgtctgctaattgggaagtccagagggagggtagcgtggccctgctaaccgacgtggcgtggggtgcgtga

SEQ ID NO: 335097 - DNA, 282 bp, Pseudomonas aeruginosa
atgaagcgtgcaaccactaagaaaacggacttcgatgcgttgactggtcttaaagatacgcccctgttctctgtaaatagcggcgcgcctattccagaagtgatcgaaaacgtgtcctgcatgctggacatcgcccgttccctaactcgcaaagccgagggcatgccgcttgaggccaactgcgtgtacgccattgagatgatcattacccaggcgaaagctgctgtagatgccgtctgggcaggtctccaggcagagcaagccgaacccggcaaggagtaa

SEQ ID NO: 335098 - DNA, 234 bp, Pseudomonas aeruginosa
atgcgtaatctcacttttgttgccgataaggtcggaaataacctgagtaccgccagcattgcactggagacaatcgcaaacctgctgggcgccgatggctgcgagcaccatcttcatgatcgcgaagtaagcggcctgcttaacgctgtagcggccttgtctgcctacatctcgggagctagttatgacctgtgctccgccgtggaagaagagcggaatgggggtgcccaatga

SEQ ID NO: 335099 - DNA, 177 bp, Pseudomonas aeruginosa
atgaccaagcgtcgcatcctcaccctcaatccgtctaaagctcgcgcacgcttccatcgcgcctgcgcaattgccgccctccatagcaattcatctctcgccgttcgcctacgccgttacaacgcagccatgaagcaggctcgcgcactggaaacgcaggaggcgagccatgcgtaa

SEQ ID NO: 335100 - DNA, 348 bp, Pseudomonas aeruginosa
atgaacaaaaaaaaggccgaccaacaggccagcccacaacgttctgaacgtaatactatcacagtcgccaatgctcccaccaagaccagcaggatcctcgcttacctggtcgctggcggctctctaaaccgcttcgaagccgagcgactgggcgatcactgtctgaactccaccatcagcgccttgaaacacaactggggggtcgatttcgatatcgtccccgagcgtgttccgacccgctggggcaaaggctgcgacgtgaaccgctacagcatccccgagtcgcagcggaagcgggcccagcgggccctctcgataatgaccctcaatcggagggttgcagcatga

SEQ ID NO: 335101 - DNA, 216 bp, Pseudomonas aeruginosa
atggcagacaaaactacccggccccaacgcttcatccgcattaaagaagttctttccatcacgtcactcagcaagtccgacctgtatcgccggatcgcagctggaaccttccctgctcaaatcaatctcggtccgatgaccgtcgtatgggccgaagacgaggttcatgcctggatgggttcgcgcattgccgaagctcgcggggtggccgcctaa

SEQ ID NO: 335102 - DNA, 1272 bp, Pseudomonas aeruginosa
atgaatttctactcacacccggcaccagcccggcgcctggcgtggcttacggggaaaaccgtgcctctcacagactccgccgcccgcaccgccaagcccagggagaagctctaccgcctctcagacaccttgggcctgagcctcgaaatcacccccaccagcagcaagctctggcgcttccgctatcgttttgctggcaagcccaaaatgatcagcctcggggcctaccccaccgtcaccctctcaaaagcgcgagaactgcgcgacgttgcacgatcacaggttgccgctgggatagacccttctcaacacaaacaagctgagaagcgcgccagagaggccgaggcgtataccttcgagaaactggctaacgagtggtatgcctacagcgcgccacgctgggcagaggcgacggcctacaaagctcgcctctatctggacaacgacatcattccaagcattggcaagcgctccgtaacggagatcacccgtccagatctggtagatctggtacgcaccgtagaagcacgcggaaccctgaatgccgccggcaagatccggcagtggctcaaccagatattccgctttggcctggccaagggggtggccgtcaccaaccctgccacagacttagacgtggtagccgcgcacgcgccacgagcgaagcatcatccccatatcccactgagtgaaattcccgaattgctggaaaagttggctggagccaggtgcgaccagaccaccaagattgccattcgccttttactgctgaccggtgtacgccccggggaactacgtcaggctccctggtctgaattcgatcttgatgccgctacctggaccatcccagcagccagaatgaaggccaggcgcccgcacatcgtccccctgccaacccaggccgtggaactgctccgtaacctacaagaaatcaccggacgctatggcctcgctttcgctggcaaggcaaaccctgggcgccccatgtccgagaacactgtcaacaaggcccttcgcatcatgggatacgaaggtcgacagactggacacggcttccgccacctgctcagtaccgaattgaacagccgaggctataaccgagactggatcgagagacagctcgcccatggtgacgacaacgagattcgcgacacctacaaccacgcccattacctcgatcagcgccggcagatgatgcaagcctgggcggacgagatcgatgcgcaatccagtggtggcaaagtaattcctattcggaaagctttttcatga

SEQ ID NO: 335103 - DNA, 1083 bp, Pseudomonas aeruginosa
atgaccccatccctctctggcctgcctccgatccgcaccgcgctgatcggctacggcttcgccggcaagaccttccacgccccgctgatccgcgcggtaccggcgttgtgcctggagcacgtggtctcccgcgaccctgggcgggtgcacgccgacctgcccgaagcccgggtcagcgccgatccggatgaggccatcgaggccgccgacatcgacctggtggtcatcgcctcgcccaatgccacccacgccagcctcgccgaacgggccttgcgcgccggcaagcacgtggtggtggacaagccgttcaccgtcaccctggccgaagcccggcgcctcgccgacctcgcccgtgaacggcctgggcaggtcctctcggtgttccagaaccggcgcttcgacagcgacttcctcgccgtggaggccgccctgcaggccggcagcatcggcccggtgcgctacttcgagtcggccatcgagcgcttccgtccgcaggtccgcgaccgctggcgcgaacacgacctgcccggctccgggctgtggttcgacctcggcccgcacctgctcgaccaggcactgtgcctgttcggcgtaccgcagcgtgtgcacggacacctgcgccggctgcgcgagggggcgcagaccgacgactggttcgaggtcctgctcgattatccgcactgccaggtggcgctgcgcgccagcatgctcgccgccaatccggcgccacgcttcaatgtgcacggcgaccacggcagcctgctcaaggccggcgccgacatccaggaagcacaactgctccagggactgcaccccggttccgccggctggggccgcgatcccgacctgttgcagcatatcgacggccagggcctgcgccagtcgctggtcaccccggccggcgaccagagccgctactaccaggcgctggccgccgccatccgcggccagtcgcgcaacccggtgtcggcgcaacaggcctgcgcgctgatggccctgctggagttggcacgacgctccgccgaggaaggccggagcctgccggtggagctgcgcgacgaggaacgccaggcctggaactga

SEQ ID NO: 335104 - DNA, 273 bp, Pseudomonas aeruginosa
atggcaaaacaagcaaaaccgatgaagcaaccccgtacccgccactcccaggcctacaaagacgaagcgctggctctggccgagcgaatcggcgtcagtaaggctgccgaacagctcggcctccatgcctcccagctctatggctggcggagcaaaaagcagcagagccagaccagcaacgagcgcgagcagtctctggccgatgagaacgcacggctcaagcggttcgagaagccgttgcacagcagtatcaggggaagaaagtacgtttga

SEQ ID NO: 335105 - DNA, 636 bp, Pseudomonas aeruginosa
atggaacgatccgatttggatgccgaaatcgcagctgctgatcaagagctgtcagcgctgctggagaagcacatcaatgtaccggtgaagcggagcattgaagaggtgagcggcggcctgtcgctcacgctcaaaggagacttcgagtccagcgtgctcagcctgcggtcggagctgaagaagctgcacagcgcgttcgaggacttgagcgacgaccttggcagcgtccgccaggtgtccaagcgcatcgagacattggttctgcaggctgagtctgcacaggatggccggttggagaaagctggcgcgcagattgtcgaaagcgctcgcctggttaccgaaggggtcgccggtgtcgaggagcgcctgagcaagcttggcgccgcccagctgcatcacctgaacgccgctttgaaagcgttggctgcagacattcaagcccagcgtgctgaacgccgcgatgaccagcaacaatcgttggccaaactgggtgaaatcgcgtctgaggtcgcagcgctgcaggctcagtcgcagacgatgcaactgttgtccaaacggcgcttcatctgggtctatatggcgctcggtgtaaaccttggtactctcgccgccctgatgatcaaagcattcctgtag

SEQ ID NO: 335106 - DNA, 1854 bp, Pseudomonas aeruginosa
atgtggtttgagaagtacagcaaccgctatcgctgggcctatgacgcgtatcagcgcttcatcgacgaggtagaccctagtctggctggagacttcaagcgctccagccatgtgacggtcgccgtctatggtgcgacccaggtcggcaaaaccacgttgattctggacttgctgggcgtgaccggcgaggcgttggaacgcgcttccagcgtattgcggggcgaccagcgtatgggcaagtcttcgacggcctgtgcgattcgttacggccgctcgaaggatgattactggtacatcggcggcgacagtggtgcgctggatgatgacgccgcgagggttcagttttccgcgatacgcactgagctggaggaaggtagagcacagtccgtggacgtgttatccgtgcggctgccatcgaaattcttcgagcaaggaggagggggtgcgttgagcctggatctgcgcattctcgatatcccgggcatcaatgcggtcaatgaggctgagcaggctcaggtcgcgcgcgtagctgagaggtatgtcgccacggccgatctgatcttgctggtcgggcgcgcagatgacctgggcttccttcatcccaacaagctcaagttggctgcgttgggagactggatgctgcagcccaaccgctatcgggtggtgctctcctatacgttctcgcctgccagcttcaagacctggttcggccaggacgagcgaacgcttcagcaggttagggccaagctctatcaggagctgggcacccatgactacaaaccgccgaagtcggtcgaggggatgttgtacccactggagttcggcgactcactgcgaagcctgggcgcaacgtctgagtattatcaagcggccgttacattgatccagcaattacgacgcgagctattggcaagcatcaccgagtcggccagcccctacggtcggctcgcgtccgcgttcaagataaaaaccttgatcgatgccaggcttgagcgagagcaggtgcattacgaggcgcacagtaaggacctgaaagacgacctccagcatgcactgaatgcgctggagcaggctgaggggttattgaatggctgtcaggaagaacgcggcacgctcgatcatcacaggcgtcgcctgcaccgttacctgaaactgtacaagggtagtgatgttcgtggcttcttcgctcagcctctgccgagtactaccgaatcagtcagtgccctaaagttggttgccatgcagttcgaaaacggtatccaggcgaaatggaaggcaatgtgcgaacgtcacgcccatcgtcaggcccatgttcggctggctgagctttcgccgcccgcaaccagtgcgctgatcaacttttatcaaaaaatgaatgggtatctcaccgatggttactggtggtccagcgagaactttcgttctgaccggagcatgcttcatggggcagccgtgaaggtggtggatacctatgccgaagccgcaaccttggaaattcagaggtactttgagcatcaggtgagtggcctgaagcgtaagtattcggactacgaacggcggcttgacgtcatgaaaagagccgttgcagagcgccagcaagcggtggaagacatacaaggcaagcgctatcaccttgaacaggcccacgcgcaattcaaagcccgcatgcagttcagcatggaccactcgcacaagttcgaacaatacattctcgaagctttcaaggccgaactcgatcgtgtccgggaagccatccggcgtccgctcagtgcgctggaacagatctacgacatgttctacttgcatgtactgctgggcgaactagacaaaatgctggaagggaagaagttctga

SEQ ID NO: 335107 - DNA, 2118 bp, Pseudomonas aeruginosa
atgacagccccgctgataaaagacatggaaaccgccgtagccggtgtgctcaaaatctcagccgagctgaagacccgcagcaacccccgcccagccttggtctcgatcctccgcaagctgcgcatcgctcgtgagctctcctctgtctactacatctgcgtagccggcagccaaagcgccggaaaaacccgcctgatccgcgaactctacgacctcggcgaaggctggctggcagacaaccagggccgtggcgagcgcatcccagtgttcatcctcgaaaaagagtgcgacgccccctacgccgtaatcgtcaaatacgatgcacaaggcaacgagcaagaggaaaaaatctcgcaggacgtcttccgagcactgatcagcggctacgacaactccggcgatctcgactgcatgttccccaagctctacgtcccacgccgctacttcgacggtcagcgctgcggcttcgtgctgctccctggctatgaaatgctgaacccggacaacgtcgagtggcagggcctcatgcgccacaccctggtgcactctctcggcagtattctggtcaccgaccgcacccgcgtggccgacaacagtcagaagcagatcctcaatgatttggtcgctcgctacttccccgatcgcaaacctgccatcgccgtgaccaagaccgaaacgcttacttcagggcagatggatgaactggccggaaccgtggccgaagtcttccagatccgctccgacgagcaagaccgtgtgatcttcaccggcgtcggtgacgaaacctaccgttctgcctggaccagcaagctcattcaggtcatcaacaagtatgcgttgtccgcaggtggctcggacgcaggccgtctgcgtgaactggaaaagctgcttgacacggaactggcaacggtcaaggcagcgctggaaaatgaactggacgcacagagcatcagcgaacacttgaccgagcgtcaggccgatcggatgcgagaagtgttcaccaaggcgtcggagcgctaccggaaccgttatgccaaaaggctgcgcgagcacactaatagctacctgggccaggtcaaggacatcgcagagaagaagtacaacgccgaagaagagggcattaccaacaagctcaggcatgcggcgaacttcctcacgctgcggtccggcgaaaatgagacccgcttcaggtcgcgaattatcgactgctggtgcaacggcaccaacactctgcaatccccgctggaatccgattacctggccatctcggacatgtccgcgaaagagctcggcattcaagaaatcaaatctacggagctcgctacgatcaagcacgagggcctgaacaaattgctgggttacgaaggtgcctctctcgaagttcctgcggtgggtactcaggagcttcagcatgatctgcgcctgctgctttccaagggtatcgctaccaccaatgacgtctcgcgattcaaagcggagcatgtcgaagaggtgcttaaggcgctgcccgcgttgaccatggagtacttccgcctcaaccaggcagttgccatccgtatgcctgagttggcccgcaccgaactggaagcgttcgacttcggcaagctctcctcgtccattcaggaagacctcccaaaggtcacggcatcggccaaaccgctgctcagtactctggcggcaatcctagcagtggacgtggttgtcgacggatctatcgacaccatcccggccatcgcgggcacgctaacgggcggccagaccgctgctgcttcgctgggcgcttcgttgtccatggctgccgccggcgcgatcactctgggctttatcgcctaccgaggggccaccgaaatccagcgctacgacgctgcgcgcaaaggcttcatcgccgaaagcctcaaccagttcgccgaggcccatatcaagaagggcttagagctctacgacgacctgatggaaaccctcgaagagcgcctggtacgcaacctgcggatggcctatggcctgggcgccgacctcacggtaaaagacgcactagctcgtgggttgacgcgcctggagcacgctcgggtgaacctggtcaaagccattgatgacgcgcaaagtcgccatgtggtttga

SEQ ID NO: 335108 - DNA, 675 bp, Pseudomonas aeruginosa
atgcacgaggatctgctcgaggagggcgaaactgtcagcctgaaccgcgttgctcgcctgatggcaactgagcgaattcaaggctggccacgccggaagaggcgtggctttggaagagtcgccagcggccgtccagcaggcgtgaaaaatctgctggagcgcgatttcaccgcgcaggaaccggagcgcaagtgggtcacggacatcacggaaatagtcacactagaaggcaagctcttcctatgcgtggtgctcgacttgtacagcaagctggtgatcggttggtcgatgcatcaccgtcaggatcggcagatggtgattcgagcggtggaaatggcgatctggcagcgccagggtgactggtcagtgatcctgcattcggatcgcggcagccaattcaccagtgcggactaccagcgctttctgaatctcaacacgctggtctgcagcatgagtgccgtcggacattgtggcgacaacgctgcctgtgaaggcttcttcggtcagctcaaacgggagcgcgttgcccatcagtcgtatcgcactcgtgatgaagcacgggcggatttattcgactacatcgagcggtttcacaacccacgaatgcgtcgtagagtcgcccggcaagatctgaagttttcagcccttttcaaactgtccatggaaatggggtag

SEQ ID NO: 335109 - DNA, 3093 bp, Pseudomonas aeruginosa
atggtcactttgggtagtgactacgagtcaactcatcttcacctgctggactaccctgatttctcgccgactggtgaacgcccctataacaacaggtacagccctatagttgaagacagcactccagctgaaagggacaatttcgcagttatgcggatggtcctcgaactgcttgggatggactgggacacctcccgtgaaggagacaaccaagcccttagggacgctatcgacctagagaagaggagcggttcaggttacctctccctcgaacggttcaacgatgctctggaagttgctttccagtccaagccgaccatcgaaacgatcaatgtacccatcagaggcagtgccaccttcgacatccttccagacaacgaaaaaatttacgtcgttgtccgacctgacccgaataccccaaccaaagcgctcgaagtccttttcgccggaattggtggtcagttcttggcgtgcttcgacccagaaacaaaggtattcacaagagctttcagaccgcatcaggagcagagagtcagcctattctttgtccgaaatgccaaccaccatctgaacgtgcgcttcaccgtgtcgtctgggggggcgagcaatctggcgtccctaggaagcaccggcaacctcgcggccctgtcgagatacctcggacaggacgaagggtttatagcgttagctgcaaaaatccttgaagcagaagtccgaaagcaagccgcattagcggaaagcgatgccgcggaggaatcgatcaccggcgaagacgccgagaatggactagctgtcgatgaccccaaacttgaaggcgttcctgtccaaagcttcccggtaggacagatttggaaaaccatcacatcaacggagcttgaggcgcaaccgtcgttcagggttgcagcagagccgcggttccatcgagacaatctgggacttctcattccttacatgatggagtcgaaggcgcttgaaggcttcgaggctgacgacagcattcgtctgatcctaagggatggggagaaggacatcgatgttggcgaaatcgacttggccaaaagcctccgcgatgcggtctacatcccggcctcgagcaagtcacgacgcgtaaaagctgactcggtgctgtatcttcagagtcagcagaacaaaacgtctatggcccgccgcaaaagtgcaatggatcggatcatcaaccgacaatctgtccagccagatctattggactacttcgacgaaaagtgcaagctagtccccaaacagtactcagatgccccaacagaagaagacttcgcagtttatgagcggatcacgtctgacggcactgtcattggcttgaatggcgcacaaaaggaagccttcacgaatctggttactactggacctgtaggcttgctccagggccctccaggtacagggaaaactgagttcatcgccgcgtttgcgcactacctgatcgataaggtcggagtgagaaacatccttctggtgagccagtcgcatgaggcggtaaacactgccgctgagcggatcagagcacactgtcgtcgcttgggtactgctctcgatgtagttcgcttcagcaaccggggccaggtggtctccgaggagctcctcgatgcctactcccgaaacatcgttgaccgccagaggaatagcttcagtgccgaactcaaggaaagggtaggtgccttggcgtcgtcactcggattgggtacggagtttgcccagaccatggtggacgtcaaccaacggatcactcgccagataaagtccctggagagcctcgagaaagacatcatgcgagccacggacgacgaggatcgagccgccctggaagctctccgaaaagctgtgcagaacgatgtaagtctttccgctaaggcttaccttggcgattccgatttgagcgaagttcctccgcaaacgatccttgagcgagtctatgcacgcattcagtcggaccatggggtccgaccgccggagttcaagcactgtcaggatctgatccaactctcgcaggatttcagtgagcgcttgtcgagcaatcgcgctaactacgacgagtttttaatgagatcccgtagtctcgtatgtggaacctgcgtagggattggcctgcagcacctgaatcttgctgcaacccactttgactgggtgatcatcgatgaaggtgcacgatcctcgcccagcgagctagcaatcgccatgcaagtcgggtcccgaatcctcctggtcggtgaccattcacagctgcggccgacgtatgaggatgagcacaagaaagctattgctcaatctcttggcattcctgcgaactcagctgaattccagcgagtcatgcgaagcgattttgagagagtgttcgaatccccttacggtcgtgcagcacgagcaaccctcaaaacgcaataccgcatgcttccgccgatcggtgaccttgtcagcgaaatcttctacgacaacgaactcaagaacggtgagcggccgagccctgaatacttcgcccaaaagaccccaagctgcctgtctcacattgtcacttggctggacaccggaacgcttggcagtaaggcctttgatagcggtggtcaaagcatctcaaacggcgctgaggccgacgcaatcatccagcttttgcaggagatcgaagctgatgaagacttctgcgcgggaatggttagagaaatggcagagtcccaagaacctcctattggcgtcatctgcatgtaccgtgagcaacgcaagctggtccgcaaaagattcgcagagaaatcatggtctgaggacttccgcagacttgtcaaaatagaaacagtggacagttaccaaggtaaagagaaccacatcattatcgtgtctttaacacgagccaagtctgaccagcacccaggtttcctatcaattccgaaccgtatcaacgtagcgatttcacgcgctatggagcgccttattattgttgggagtatgaaaatgtggagcggccggaacgcaaaactcccacttggcaaggtggcaggctacattggggccagacaggatgataggaactatcaaattgtgcctgctacaccctcgaagaggattgtctga

SEQ ID NO: 335110 - DNA, 2163 bp, Pseudomonas aeruginosa
atgaatgctccctccgttcccctttatgttccgtttgacgccggccagtacgaacgtccgagcgatctgtcgagtctggaactgaccatactttcgaatcgccttctccgatcaaactggcgctatcttcaatcagagctacctgggctcatgaggccgctggttgacatagcggctcacagcggcgtttctgagcgattggcaatttcttcagtggccgccattctctggaatgtcactaagactggtaaaccctactggtgttggtctgagctgcagtggctgaccttgctcagtggtcgagcaggctcacggccctacctcgcatccgttgcctaccacctcggcgggtttcaagccccgcagcgtatcgccaaattccggcaaccggcgatatacgcctctttcatctttggccacgagatattcaagcgtgagcacgctcgcttgagccgagcgttgagatcgctgggctacgcggcgcgccatcttgagcagtttctttccgctgtgctgggtaccttaatgctcgaaaacggcgatccgcgattggagacgtttactgaggagctgttgctgaagggccaacagcaccgaagcgaaggtatcgcgagatcagtcggcaaggtgtcgcacggtttggctgccatggggattttggcgaaacccctgcgcatgcgaggctataccggatggcgggagaaaagcatcgatggtatcgatccacactgggcgatgtggtgccgtcgctggcgagacacctccaccttacgtccccgtacacgtgaaagtaattacagttttatcttgaggaccggcatctggttagcacgagagcaaccaggaattacgacgcccaccgattggggcatgtctacttgcgctgcgctaattgccgctgttgaccggatgaaggtcggtgagtggtcgctggagtccgcgaaaggaacacaattcaaagggcttggccagcctatcgctgccaactcaaagcgcagctttctgcatgccttgcgccgcttttttacagactttgaactctggggctgggggcgtttgaagttcagcccccgacatcacctggccacgccacggaccgtggcgtttagctcgggtatcaacccgcgagtgattgacgactcgacttggctcaagctgatttgggcgagccttaaccttgggcgcgacgaccttctatcggagatccactatcccctgtcgatggtccaagccatcgccgtggtatggacacatgtgggtctgcgcagcaacgaaattatgcgtttggaaaaagcttgtgcacatccacagacccatgatgtcgtacacgaggatggaaccatcgttcccgcaggaaccttatgctacctcgatgttcccgccagtaagacattcaaggcattcgtcaaacctgtagcagtcgtcgtgaaggagcgcattgacgcctggttggatgaaaggcctgccaaccaggctgcactgctcgatgaacgaacaggggaaaaagtcagctacctgttccagtttcgcggcaagcgcataggttccagtgtcatcaatgacaccatcattccaatgctatgcgccaaggcgggtatgccgctggaagacagtcgcgggcgaatcaccagtcacagaggacgagcttccgcggtgacggcgcttgccagcgtccctcaaggcatgtcgctgatcgagttgatgcagtggtcggggcatagctccccgaattcgacgttgcattacattagaattcggccgaccaagctggccgcgtcttttgtcaaagccgatcaaatggcccatatggtctcggtcttgatcgatcatgacgtcattgctcgccattccggagagccctacaccttctatgacttgggtgactcatattgttcgaatccgttctggagtagttgcccacatcgcatggcctgtgcggggtgtgacttcaacttgccgaaagccagcgcaagggcgcaagcattggaaagcagattgtctatcggacggtacttggaggccgtgcctttgactcccgatgagcgagccattgccgagggcgacttggaaaagctggatagcctgattcacaagctagataacgtacccaccctggacggcaggacaccaagcgaaattgggcttaagaaccagaatggttga

SEQ ID NO: 335111 - DNA, 1020 bp, Pseudomonas aeruginosa
atgaccactaccccaccgcacgagcaagtgttgagccgctatcccagtgttcaagcgtggctggagctactgggtaatctggggcgtgcgccggccacgcttgacgcctatggccgtggccttgctcattacttactgcattgcgaagggagtggattgcaacccgaatccgcgacattcgaacaagtcacgctctacatccgcaagctgctgcctggtgaaaagaaagcggtagaaaattcaaccttgcaccaacggcttaccgccatccggttgtggtacgaccatctagtttttcagggtctttgcaagcaaaaccctgtccctcgtggacaacatggtcggctgctccaggcgcctggacatgcaggctttatcaggggcttggtcccgaggctgattaagctgccagacattctcaacgatgagcagtggcgacactttctcagtatcgcggccaggtcgtccatccgtgatcggctcatgctgtcgttggcatacttcggggctcttcgccgtgccgagttggtggccttgcggattgaagatttagacgttgcacatcggctcatctcggtgcgagcggaaacgaccaagagcaaacgcagccgcgtcgtgtgctacagcccagaaattgcgcccgtattaatcgagcatctacatgttcttcgccgcgccggttggtcacgaggttcgttgtttcgatcagaatcggatcgcaatcgtggctcgtcactgagccgttggacgtggagcaaaacggttaaagggtgggccacggaagctaatctacctcgcctgagcacccacagctttcgccaccttcgacttacccatctggcccgcgccggctggaagctccatgaattgaccacctatgctggccatcgcgaccccaaaaccacgttagtgtacttgcatctatcgggcgcggatctaacagcgaagatggcgcactccgtcggcagtctcgatgcccggatgttttgtgagctctttggagctggagcatcgcaatga

SEQ ID NO: 335112 - DNA, 954 bp, Pseudomonas aeruginosa
atggacaccctgcaaaacatgcgagccttcgtctgcgtggcggaaaccggaagcttcaccgcggcgtcccagcagctcaacaccaccaccgcctatgtttcgcgggcggtggccaacctcgagacgcacctgcgcacccgcctgctcaaccgtaccactcgtcgcatcgccctcaccgaggccggccagcgctacctgctgcgctgcgagcagatcctcgcctacgtcgaggaagccgaggccgaagccagcgacgcccatgcccgacccgccggcaagctgaagctgcattcgatgaccggcatcggccagcactacgtgatccgcgccatcgccggctaccgccagcagtaccgcgacgtgaccttcgacctgaccatggccaaccgcgtgccggacctgctcgacgagggcttcgacgtggccatcgtggtggcctccgagctgcccgattccggcttcatttcccagcgcatcggcgagacctacagcattctttgcgcctcgccggagtacctgcgcctgaacggcacgccgagcgagccttcggagctggccagccacgactgcctgcgcctggtcagcccggtggtgccgctggatcgctggctgttcgacggtcccaacggccaggaaatggtctccatcggcgcctcgccgttccaggtcaatgtcggcgacgccatgaccgaggcaatccgctccgggctgggcatcggcatcctgccggtgtattcggccatcgaggacctgggcaagggcaccctggtgcgggtcctgccgcaacaccgcctgcaacagctcaacgtctatgcgctgtacccttcgcggcagtatctcgacgcgaagatcaagacctgggtggaatacctcaaggaaagcctgcccggcctgctccagcgcgacgaagcggcgctggtggagctgggcctggaactcggaagaccctcctga

SEQ ID NO: 335113 - DNA, 216 bp, Pseudomonas aeruginosa
atgcagatcgaaatcgaactggcgcctaagccagtcccgcacccagcgattgctggatggctacaggcagcggatgaggctgagcgcgccggcctgaccttcgccgcgaacacttaccggagcaccgcacgcagcatcgagttggaacaggaaactggcgttcctgtatgcgcatgctgcttcaagccgttcgggcgcggcgtcctccatcagtag

SEQ ID NO: 335114 - DNA, 711 bp, Pseudomonas aeruginosa
atgaacataaccgaccgtatagagctgctccttgctagcagtggcgtgcccaaacgacagatcaagacgaccctgaaggacgtctgcggaatctcgtatcccgctgttagccaatggttcagcgggaagacgaagagcatccgaaacgaacacctcatggcgatcgccaaggcctacgggtcttcggtcgactggctgatctctggaaagggagagatgttcgaccccggagcagatcgtggaggagaaaaaaccacacagaataaaagtgaaatatctgagatcaacgtctaccctcagagcttcacggctatccctgtaatcagttgggtttctgccggaaattggagtgaggccatagacttgtacgcgataggcgacgcagaggaatggatgccctgcccggacaggatcggtccgcggggctttgctttgcgggtagatggtgattccatgacgagcccttacccaggctcggagagctaccccaaagggacagtgattttcgtagatcccgacgtcgaggcgcagagtggtgatcctgtgattgccaagctacaccccgacaacgaggcgactttcaagatgttcgttagggagtctggccgcctttacctgaagccactcaaccctcagtacccgctgaccgagatatctgaagatgtccagataatcggggtgatcatcggttcgtacataaccagaaggtaa

SEQ ID NO: 335115 - DNA, 180 bp, Pseudomonas aeruginosa
atgaccaagaccgaagcgatcaaccacttcggcggcaaatccaagctcgccgccgcgctggggatctcttacgcagcggttcaacagtgggacgaagagatccctctgctccgccagtacgagatcgagaaactgacccgtggcgccctgaaggtgccgaaaaaaccaaaggccgcataa

SEQ ID NO: 335116 - DNA, 195 bp, Pseudomonas aeruginosa
atggctcgacggcgtaaggggaaagcgcggagcgctcccttggatgggaagaaaaggaagctggacccgaacggctactacgactggctcatcgggaagggttatgcgcccgccaacgcgatgcggatggttgaggcgaagttcggcggggaggcgaaacgcgagccttcccttggttgggcctggaaaggctga

SEQ ID NO: 335117 - DNA, 273 bp, Pseudomonas aeruginosa
atgatcatgtcgattctggcggcgctggatgcgctgctgtgtgtgcttgtcgttgtagctgctctggagttcctgcgcaccgtccagttgtctgggcagccgctattgggtatctccttctacctggtggctggtggtgcattcggaatcctgtacggaatcatgaagggcgcaccggttaatccattttcggtgattctccatgctgggctcgtactctacgcctggtctcggcgccggcagatattcggtggagacctctcatggcgctga

SEQ ID NO: 335118 - DNA, 585 bp, Pseudomonas aeruginosa
atggcgctgacacccaaacaggaagccttttgcctggcatacctgaagacggggaatgccagtgaggcgtacaggctcagctacgacgccaagaacatgaagcctgagaccgtaaatcgtacggcaaaagagttgatcgataaccccaagattgccgcaagaatggcagaactgaatgccagcgccgttaccgatgcggtgatgacccgtcaggaggccctggagcgtctttccagattcgcccgtaccgatctggctgacctggtggagttcggcagctatgagataggcgaacaagatggacagccggtaatccaggcggcatggaagatcaaggactcagccctgcaagacccgcagaagatggccgcaatctctgaactggctgccacgaaagatggcattcggatcaagacccatagccctctgcaggccatccagcaactggcaaagatgcagggatgggagtctgcgacgaagcatgaagtgtccggtcctgatggtggtcctctggcagttgccacattgaccaaggaggactacatgcaggctcgccgagagatgctcgcggaagatgattgctga

SEQ ID NO: 335119 - DNA, 2241 bp, Pseudomonas aeruginosa
atgacgacctacgccaccggtaacccgctgggctccaaagacccgcgtgatctgtacgacaacgccgagaactttgacgcggcgatgaacgaccgggtgaacaccacgtggaatgatcgtttcggcgttagtcgcccaacgatgaaagggtatgaggaacagttcaacgactggctggacgcccaaggcttcgagccaggcttccttgaatatgtcgacggctccccgctgaccgtagatcgcccgacccaactgatccagcgcggggacaacatctacagcgtcaagcgtcctgcatcgttccccgtgaccctttccggcaactgggctgccgacgagccgctgctcgttgcgcaagttgaccgcgcgctccagggcctgctcgcgaccgacgccggcgccgggatgattggctatcgcgagcgcaccgtagccgaccgcctgaacgacaccgccaatgtcaaggactatggtgcgatcgctgacggaacctatcatccgctgtccgagcgcttcggcgcctcgctagccgctgctcaggccgtgtacccgcatgccacggcgctgactgattccattgactgggcagcctttcaatccgccctaaatgcaggaacggctagagttcatgcgcctgctggccactatgtgtttaacaaacaaaacacgcgcagcacacacattacgttgactggtgacgggtacggtacatatctcgactatagccagttcaatggggcttatgggctgctgatccagggcgcgctcacgcaaattaacaatctcggaggctatatagccaagggtgcgcggcaactagttttttcgggcacgcctatcttggttaacggtgacgttgttattgtgtacaaccccactgatggatcgtggctctcagatagaacagtctatcgggcgggggaatacttccgcgtacacagtatggccgcgaacattgcaaccatatacggggagtcaactgaccagtacctcgtagcggacgtgcaggtttggaagctggggggcattcatgtaacgatcgaaggcgtacgtgcgaacccggcaaccacggcacaatacgcacccattaaggtactgtttggtaatggggtccgcattcgtaactgctggacgaatgccaacggcacatacaccggcatcgccgtcgaacgatcctttgatgttgagattgacggctgcactgcgctgaacgcatctgagccagtcaataacgaatatggcatcacgattgtgaactgccagaacgtcgtttatcgcgggggaagctccgcagcaacccgtcacgcgattgcattaggcggcaccgacgcgccgtgctgcgtgcctaacaggaatgtcctcatctatggggcaatctttgaaaacgtggacattccgaacgatatcggtgctggtgacatgcatggtggtgcagactgcatcacttatgacaattgtgtgttccgcaacggcgtgataatgcaaggccgaaacgctacggtccgtaatagtctgatatatggcgtaagcagcgccgacgggtcttgcatttacggtacggaaatcaaaggaggtgtatacacgatagagaataatcgtatgattagtcgcggcgtaggtgcctcctttgggatagtccacctatcccctggaccatctatgacagagaggctcacaatcgttgcgcgaaataataccatagagctgccaagcgcggcattcaacacgaagcctttcatgtgcagagcgcgcggtgcaactcagccgatgaatatcgtggttgacgggctggaagtgcttgcgggcaccgtgactctattctgtttcgtgtacgcagatgataacgtgctgtcggcgcttaactccgagaagatcatcgtagataatgtctccggcccctccggaacaccactcctgtaccctcacgcgaagatcgcatctgtaccaaccaagcagatgcgccagtccggcgccgtcaacgtaactaccacggccgccgccaccgtagcagcccctgcgcagaccatccgctacccgtactccaagatgccgaacgtaagcgttcaggtgtccagccagtcgggcggggatcaaagcgctatcgggtcaatcacccctgtggcgattgcgtacaatgtgcagccgaacagcatcaggcctgcaatcatggcgcccagcggatcgttcgcggcaggaggctccgcccgtcttcactggtctgcgagcctagatgatatttag

SEQ ID NO: 335120 - DNA, 1683 bp, Pseudomonas aeruginosa
atgcgagcactttctatatcactttctataatttctatgctggcgtctcactccgtcattgcggcatgtcctgatattaatccggcgccgagaactataaacgacacggcagaaaattattcaaagtctcctgggtttagtctaaatgaagaagggattcttcaatttgactatggcgcacatcatggcggtctaggtaagtgggctaatccatttttcgattcgaattatgcgctggctttgtatcgtgactggctaaaaagtgagtgcaaagacgatgccttgaaagaaaattttcttcatcaggcaaaatggctggcaagtaccgctaaggttgatggtgatatcgcatcttggccattgccattcagggataagaacttcgatctagatccaggctggatctcgggtatcgggcagtctcgcattgctggcgtgttgttgagagcggaagcaatcactgacgaccctgagcttcatgagattgcaagaaaggccctccatgcgtatgacgtggacatcaaggatgggggggtagttactgttgatgaccaggtaacatggattgaagagatggctgaccccaagggtcgatcatacaaagttctgaatggtcacatcacaggactgtcgggaatcttagatttctatgagattacccatgagcagaaatggaaagatctattcgaccgtggcgtggctgcggtgaagcgggatattccgaaattcgatgctggcttcagcagctactatagtctgctcatgccttcgcaaaaaaggcctatagcgcctctcggcgactacaatccgcttcacgtttctcagcttctttggctgtatgagaagtcgaatgatccggtctttctcgactacgctatgcgtttccaggcctacgaaacgaacgaggactcctttagcgcatcctcgtccatagacccagttaggcatggtcctgatagcgtgcgtgcgaagtatggtagctcatactggtctgtcgggaagttcccggcatggttcgacatcactgcgccgcagcctgaactgatcagggggctgtcctttgatgtgagcgaggttgagcaggcaccggccaagttcacggtgttggctgaggtcgacgggaaaatggttcaggtggcggcgtcgcccgatgtgctttccaagaatacggacatcatctttgacaagcccgtgcttactgggcgggtcagaatcgatatgcctgtgcctggccccaagaagatggttgctctgagaatggcgatgctgctacgccagaacacgctgcgtgcacctgtggcaaacgagtgcaatcacacctatgacagccgcaagaaggtgaatcctaacaacatagactccgcttttgacggtgacgacgaaaccgcaatgacagttatctgtgacggctggatcgtatctgaggtaggtaaggactctctggtatcagtcaggtcctcggcttcagaggataaagccattaaattctatggctctgacgatttggcagcatggactgaaattgaaaatgaagatgcgcgtagcgctcacataccattcaagttcgtcaagttcgacatcgatacttcaatgaagggtatcgtcgaggtcacagagacgaaggttgaagacatggggattcttaagagaatcaagcttttcttcatgagactcttctcttaa

SEQ ID NO: 335121 - DNA, 534 bp, Pseudomonas aeruginosa
atgaccgaaccgacgattcgccgcctggctggcgaggagatcctggcgcgcctggacgaactggccgaggtactgctggactgcgtggaaggcggggcttcggtcagcttcatgtggccgttgccgcgggagcgggcgctggccttctggcgcggcgtcggcgagagcgtggcgggcgacgaacgcctgctgctggtggcggaagcggaggggcggatcgtcggtaccgtgcaactgctcctcgaccaaccgccgaaccagccgcaccgcgccgacgtggcgaagatgctggtgcaccggcgtgcgcgtcggcgcggcatcggcgaggcgctgatgggcgagctggaccggctcgcccgggcctgcggcaagtccctgctggtgctggacacggtcagcggcagcgccgccgaacggctgtacctgaagaccggctggacacgggtcggggaaattccggactacgccctgatgccggacggcacgccctgtcccaccacctatttctacaagcgcctggctgctgccggctga

SEQ ID NO: 335122 - DNA, 1170 bp, Pseudomonas aeruginosa
atgaagccaatgaaaagtgaactgctgagcacctttgatgtgctcgctcctcactgcgaagtaagcgcctcgctgtgtgaagcagccgggcaaggctcccttgatgttcctttagatctgcgcaccatctgcactcgtgccggtctgccgcaggcgcgagcagccgacgtcgaacgttcgttgattgctgggcaaatgaaagggctgttcacgcagtcgacgccgttgacgtggcaggtgcgcgaccgagccctcgcagcccagttggcgcctttactacaaggtgcgcgcctgtatcgtgcacgcgctacgacgcacgctcgcgaccacctcttacacaccaagcagcacatcgttactgatgaaaccctcgaaacacacgatccagaaatgtattcggccagcgccaggtcggatgagcaggtgaaccttacgcctcgcaatctcatgaacccacggcgcgctgtagctgccgcagttgaagccaggcgacgcacagttgtgcaagttcgccaggatcttccggctttggccaccgagcagcctcatgccttgatggagctgcatgccgagatcgagcgggtctcccttcagcaaatgatcgataagttcagcgagatgcttggcaagaaccttactgagagggcttggcagcaattcttcgaccagaatatctttatcctaaccatgctgttctgtgggccagtacacctagtgtgcagccagtttcatgctcagcccagtggaatcaaaggtgcgggggcccaaataggtgattacttgtttcggggtgccgggcaggttctggtaatagtcgagatcaagaagccaagcacttctctggtgcagaagactgagtaccgccgcggcggcggtgttcatgccccggactcagagttaagcggtgcagtaagtcaggtgttgtaccagcgccactcgctgcagacgacatggggaatacatcgcgaagacgaggtgctcgcgggcactaggccagacaacacccgctgtgtggttatcgctggtaaactgcccactgagtcaagtctgctgcgttctttcgaaacttttaggtgcgctcaaaaggatgttgaaataatcaccttcgacgaactccagcagaagcttgagcttctgctaaaacatctctctccggagccgtcactctaa

SEQ ID NO: 335123 - DNA, 1155 bp, Pseudomonas aeruginosa
atgcgcgacctagccgtcgggatggaagatactgcaagtcaaatgatgatggaaaacgagctaaagaagctcgtgacgagatggaccaccagcgagccacctctcgtgcgatcgtgtgtcgacctcccgccgaaagtcagtgcgcaacttgcgcaacgcagtgagtacactagccgtttcgaccccttcgttcttgcaactgagcacgaggcatttcacaggggcaagctttcggccccgcctgatggtggccgcgccaagttcgtgcgtttcaaccatctggataacgatcttgcgccgaaggatgcgagcgccaaggctgcccaggaggccgaaacccagcgtctgatggctaaactcggtattgccgatttagggctcgttcgcgaatttgacctgtgtcgtttcacccacggatatacgcgtgtctccgcgaccccgactctgaacaagcgtaaccaggacatgcctgttcgtttgaggctgttcgagccgttgagcagcggcaagcggcctatctacgtcatgacgcaggctaacgaggcgctttatgttcgactcgacccgagcgctgtctacaagtggcttcaggcagtcggagtactcgacctgccgaaatgggacgatagcagttccgtcaagttgggcggtaggttactggaggtcgcgcagccgttcgggcgctacttctccctcttgaaagagggtgatgcgtctacctaccgctacgtgtacacgttgctgcacacctacgcacatacactcatgaaaaacgtggctgagctgtcgggcctggatctaggctctatgggtgagtacatctttccactggatctggcattcgtggtgtatcgaaacggcacgaccatggatctgggtaacctatcttcgctctggcgcaacgagaacaatcgattcctttcgcgtttgctagaggcctcaacacaccgctgcaactcgggtcgactttgcgacacggctggcggagcctgtccagactgcatcatgattcccgagacctcctgtctcgctcagaaccagctactgtctcgtgccgtattgaaaggcggtccgccgccccgcgaagactcaactcacaaggggcagcgtatccgcggtttccttgaggtggtcaatgaagccaatgaaaagtga

SEQ ID NO: 335124 - DNA, 4203 bp, Pseudomonas aeruginosa
atgagtcagcccacgaatcgtatcgaccctgttgagataccctccacccttaaagaggcggttgtcgatagcctcctgaacctgacttactcacaaatcagtgggcaagggcccacgggtcagtaccttttcggtgcccgacccagggcacttttgagttccggtttcttgttgcctcagcacagcgcgtccggagacgacgaggtgacgtctcccatctgggtctcgtcgcacggtttgcagatgcagcttaacgccggcttgggctcggtgatgacggtatttccaaggctgtgcatgtacgtccgagtattgccccgcgaggaagacctgaggagagcgaactgccgccccgtcttcatgctgcgccagtcggtggtcgacgagattaaagtcgaacgcaaccgtcgattagatgaagcatgggagaaagtcaaaggagagtatccctcgaagtggaagcatcctggttgggccgcgattcgctccaaggtcgtggatgaggtctatgcagccaaaagtatcccaaggcaactactgacctcggatttcccgcaagatgcggccgaaaccgaagatgcaccgctaggcgacgctgacgcttctggcgaaagtacgagagaaggagttcccgtcaacgcaggggaagcgccgcctatcaaggacgagcatttcgagccgttaactgtaccgcacaagtggatgcggctggatgtcgagctccctccgctggagcttgacacctcgaagtcaaacgaagctcttcagctcgacatcgcagatcacgtcgtccggatgaatgagacggtggctaagcgactgcaggactgggctcaaagcgatgaaccaaacacgggtggcaaggcttggggatatcgacaccaactgaccattcccgccagccaatacaccaggtgggccgattttctcgatatggtgcgcaagtctcagctgcgcgtcgctttgccgcagattcaactgggctgggatctagagcttcacaatgactgggtcgacccatctaagcgtagcttgttccttgcgcttgagaatatcagcgacatgcctggccagcatgccgacgagactgaagagtctgtcttcctcgtgtctctccgggtacagcttccaacttcgcttcatcacccactgaagttggagcgcatcgacccgtcctaccgctacaacaagtacctggcctatccggctatgggccacaactgtggcgtcgtgcaagtgcactccgacccggcagttcgggtactcgagacaacgtggacgccccgttacacacagcctcgtatcgttcctacgagcgctaatggggttcaacgtcgagtacgctcgctcgcgcagcccgatggactggaccatttagcacctctggtgtcagctatgcaggagtggctcgacggccttccggcacaagtgaaccccgctgaagggctagcaccctccgactcggctggcattgctcgcgaagaggagtgtttccggctagacctgcagaaatgggcctccgagatgaaggcagtagctgcgggcttggaatgcttggatgagtcacgctcagcctggcgtgaacgtggcccacaggccaatccaaaggccattgtctatgaggcatggctcgccatgaacgagacgatggctaacttcatgaaggcccgttttggaggcgatgacaacgagtggcgcctatttcagctggccttcatcatcgccaacatccccgcactagcttcgcgcatcccagagttctcacacttctacgacgagtgtagagatgacgctgtcacgctattgtattttgccaccggcggtggcaagtctgaggcgttcttcggcctcctggtgtttaatctcatgctcgaccggctgaggggaaaacaccgtggtgtgaccgccctgattcgctacccactgcggttgctgacgattcagcaagcccagcggtgcgcgcgcgtgttggcgcacggagagcgagtccgccgtgataaaggatatggcggcgactcgctgtccatcggcttttgggtcggcagcggcggttccccgaaccgccacagtgacaagggtgttaggagcatcccgactgtgtcggcagcgccgcccgtcttggctgatgagaaagcccttcgcgagaacgacgccaagtactctgcggccatgcgtgcatggcgcaaacttcccaagtgcccgttctgcaacagcgaaactgctttgcggctattcgtcgaccacggagaccagacgctgggtcacgtatgcaccgacattcactgcgattccaatgaggggctgtggaggccattgccgttctacatagttgacgacgacatctacgatttggcaccgtccgtcctcttgggcacagtcgacaaactggcccttatcggccactcgagtcggactatccgacgcatatatgcaatgttcggtgctgcgccgtgggtcaatccggccaatgggcggttgcatgtaccgactgagagccgggagttggccgcggggcctgcagcgaagggcatggttggagtctacccggcctatgcttccggcagacgcatctttcacgatcctttcccgagcctcattatccaggatgaggcacatctcctcgacgagtctctgggtacttttgccggcctgttcgagtccacgctggatgcggtctttgagtacctggccaagccgctcagtaagttggtagcagtagacaaacaaggccacaggcgtagagccaaggttatcgccgcctctgctacggtatccgagcccgagaggcagttggaacacctgtatcagcgctcgattccagcaacccaatttccggagcccggcccgtccctttatgagtccttttatgcgacgcctgcgctggcccaagaagaacagcgccaggcccatcctgacatcgaagtggcaagccggcaggcccgtgtgtacaccgccttcatgaccaatggtaagccgcacacgtcgaccagcgtagcggtgctatcaggctttcacctggtcatcacacgtctgtttgacaagctggtaagcgacgcagacaagtcgtttcaatcggcgcgccaaatgctgatggatcatgtttctccgggggcgcttgaggcgctacacaggcaggctctatcctcggcaagtgcttcgtcgctgatcacacttatcgatcttcaccgcattgcgctgacctacgtcaccaacaagaagggcggcgaccagatcatggcagcagaggcggaggaaacccgcaagcggcatctcaatgaaggcattgacctggggggattggacacccggcttataaccggctcggtggagcaaggcgaaatccaaggcgttgtggatactgcgcaaagccgtgttgctcctggacagcctatacctccgttgcgagagcagttgcgttcggtaatcgcaacttcggcgatctcgcacggcgttgacgtcgacgagttcaattcaatgttcttcgccggtatgccttcagatattgccgagtacatccaagcttcttcgcgcgtcgggcgtacacatatcggtttcgtcgtgctagtgccaacgcctcaacgtcgtcgtgaccggcatatcgttcatgtgttcgacatttttcatcgttttctggagcgtatggttcagccggcagctatagaccgctgggcggagcgcgccgtagagcgggtgttccccagcctgctccaggcatacctgctaggtgtggttcccagctgcgagctgattcggctgccagaggacgagaaaagcaagatgccagacttcagtgttattcccaatgtccgcaaggaactcaagtctcgaggcgacgccttcatcgatgaaattgacaaattcgtcgagctcgccgtggggttgcgtggggcattctcgcctgaaggagaagagcactaccgcgcacgcatcgatcagaagacccgcaaccttattgtgaacacctggagcagcccggtctggggcagtggcaccatggacgggtacttcaaagcccagacggacttgatgctcaagccgatgacatcgctgcgcgacgtcgatcaaggcggagtaatacaggcatcgactcgtgacatggccggcaataaccagtcgcatggcgaagttcaactggtgatggatctcgttcgccacggtgtggctaacaacgatagcgtggacaacgcgcagacaggtgactga

SEQ ID NO: 335125 - DNA, 2787 bp, Pseudomonas aeruginosa
atggcatcaaggaagaagctcaacgagctgttggaagccgagaaacgaaggcgcgaagagcgggtgaagctgctcacttcccgtaagcctacctcacaggacaagcctgcgccgccatcccatgtgcgtcatcctccgcctgcaccatgtgaaacggtgcctccccctcctatcgtatctcgtaccgatgaggcacttattgcgctgttccaggacgacaatacgcagcctagcgaaccctcaagagcgttggtggcgttggccgacctgtatctgcacgcggcccagcatcgctcgcgccatattgcaatggtctggccagcatcgctcaaaacgttgcccctcgtacatgcgcttgccacgttgagccgttggcaccaaggtgacaaacaaggtgttcgcggcctgctttttcccgtcaaaaccaatgccttccatagtctcaaccacatccattttgaccgggccagcatccttcgcattgttaaggatctggtggaggttgacgtcaacgcacgcgtcatccggtcgatgcctgacaaggatccgttttacttctggctgaatgctcacggccttccacaaatccagggagaacggttcaatccaacgattggagagctactgcctcactaccttgctacacctgatttcactgggtggaagccctgcgactctcagcttcttgcgctcattcgggcgaagctctcaaggcgagggaaagccaaggaggctttgcagatgaacagcgccattattggcgatccccgtactgcgccggatgctctcttcgcgctggatgggaggatgcaagagaacgaacttcgccaggctctcaaggcattagctaagctcggttccccagaggtggtgctcgtacaagccacccgagctgtgcgccttgaagctccaggctggaagaagcgactggcgcgtttctgtttaatgttggaggacgttttttgcgacgcccccccaggggtcatcattgtcacagacgagccacacaccgcttacaggctcaaggaagaactttgggaacagaatcagaagcgtgactcagctagccgatggcacacgcctcacgagttcaaaatttttggtataccgagcactgtaggtggtgcggggctatttgcagcgggcgttcaggaggctcaacacccggtcccgcgcgagttcaacgtccacatcgtagatgcggatgcggccaaagctgctaataagctcgtgcggatcgccagcgctgccccagggggtaaggaagccgctcgaccgctcgttgaagcagcctcgtttctctctcgcttggcagcgctcccctgcggcgttcggcacatgtcggagtatctggctggactcgatgtatcgggccgaacacgggctgcattcgactggcccgggcatatgggggccgttcatgagttcgagcaaagcgtcggcgtgggaggagagcgacccgctcttatggattgtctcgagcgcggctcgcagctattcggcaactattacgaggctacgccttttgcccacaagctagccgggctcgtcgcgaacattgcaacgagcaagaagcgtagcgtggccatcgtgtttaccagcagtctgtacctgcgcctagctgagcgcttccttgttatgtatgaccagtatccggaaggtgcgacttacggctccttccaagggcgcgtgcacctgctgtccgctaccaatctcgaagagcaccttgatggcctgttaggttccacacttgtgtttgccgggctcaacgaggactgcctacggctattgttaacggacaatcgtgtccccgcgcactcggtgcttctgctgacccaacgagctggtcagttcctacgtgccacgctcaagcccattgtcgagcacatgccggaattcaagacctacaagcccaggatggagtccatcctgcgacagctgaagaacttgccggaggacgcctcagtcctttccaccggcgattacgtgctccccactttccgtgttgagttgtcatcggatggcacgccgtccagccatgaggtagagcaaggctgttggtttattaagttcgacaccggagttccccagttccgccatgacacatcggagatgtatgtttacgaccctgcttcccagcatgcgtcagatgctggattcaggacgtgtcaggtttgctcactggaggtcggagacagggtttttatcatgtcgaccgagctacgcgagatggtagagcaggtgctgcgtgacgcaggcgtaccgattcaatcagacaaaacgttcgagtcggccctacgtagctatcacgaacaggtgcaaaagcgccttgcgcagcggttcatgcaggcaacactttctgacaaggtacgagcgattcgcgaagagatgcttgcgctagacccgcacctggaaagtaggctgccaagtcttcaggcgatgcgtcactggattgacctcggacactcgccagatacaccgttcgagcagcttcgcccgcaagcaccattgcgtgaggaggttttcaagtcgtttgcacaggtacttggattctctgcgctggaggccgcctaccagtggcagcgcgtgatcatggcggtgcgtaactcgcgtcgaatggacggtcgccatgtctctgatatttatgcatacatgctcttgcagcctgagtccgccatggccaattcaagcatcaagcggcaaacattgtctcagctgttcgagaaggcgcgcgagaacgtcgccatagtcgagtatgtcggccccctcaaggaatcgcaacaatga

SEQ ID NO: 335126 - DNA, 1737 bp, Pseudomonas aeruginosa
atggctctaccatataagacccgcttcaatcgccttgtccgtagcctgcgaatagtcatgcaggaggcgcagcacgggcctgatttgatcatcggcagtgcactggcgaagtggtgcgaatattccttccccggtctgccgggatccggcctgcccgtgttagctgcgttgaaggacgagccagcggtgtgcgcgtttgtagacttcgtgaagggccaagatctgctcgagtctacctactggttctcctcggcatacgcccaacttctaggagaagagcaccgcaagcggctggcgatgttctttacgccaccctctctgacaagacgtctgctcgacgacttgtcaacaagcggcgtggactttgccactcgaaacttctgcgatcccgcatgcggcggtgctgcgttcttagcgcctattgcgatgcgtatgcgcgataggcttcttcaccagggagcaagcgcggcgcagatactcgaacacgtgcaaaagcacttgctggggtttgacaaggatgctgcgctatgcgaactgtcgaagcacttcctgctaatggcgttgcatgatgaggttatcgcgacgtgtaaacgtccgaatttccagatacacaatggtgactctctcctgcaggcaaagcacctgttgggaacccttgatgtggtgctctgtaaccccccgtataggaagatgcctgcggcggaagtaaaggagtacttcgacgagttcactcatgtcattgaggcgcagccgaacctgtacgcactctttattgccttgtgcgtcaagctcttggcccccggaggcgtctgtgcagtggtgaccccgacgagcttcctatctggtcaaaacttctcgaagctgcggacgttcttgatgacacagaccacggtgcttagcattggcatggtgagcgaccgtctaggtgtgttcattgatgtcgagcaggagacggcgctgaccctcgcacgccgtgaagaagccgggcacgcaccgacgatcgaggcagaagtttcggttgtctcacgagatggtaattacgtcgacgtagggcggtgtgtcctccccagctcgggggccgcgtggcccatccctcgcaccgaaagtgacgtcgctttgctaaggggcgctgccaggtcgcaagcgagtctcgcagactacggatatacgacgcgtatcggtgccttcgtctggaaccgcgatacgcgcacgacgtacgcgtcggcgaaaagcgccgcgcgtgctcgtgacggcgcggcagtcccgctgctctggtccagcgacattgcgccggacggcaccctgcgattctccggtgcgcccaaggctaacaaggagcggtgcttcgtgaacatgggagcgaaggatcatcgctcgatcatacgcggccccagcgtcttgctgcagcgcgtgacctccaatgaccaaccgcgacgcctggttgccgcagcagttccgactcaacttatcgatacctatggcggattcgttggcgagaaccatacggtcatccttgagcaggtgatacctaatcctgcgctcgcacctgagaagctggcgcagttactcgggacacctacggtggaccgttacttccgatgtatctcgggggcaacaaatgtatcggttttcgaactcagtcagctgcggcttcctgatccggatcagctaaggagctacctcgagcagggctacgatatggccagtgcagcacataaggtgttggtcggggagtag

SEQ ID NO: 335127 - DNA, 273 bp, Pseudomonas aeruginosa
atggcaactcgaaacgtcgtccttcccgatccgctggagcaggatatcaacgagctggtggagaccggccgctatcagaaccgcagcgaagtcatccgggcaggcttgcgcctgctgctgcagcaggaagcccagaatagcgccaagctcgaagccctccgcaacgcaacatccagtgggctgatgcaactggagcgcggcgaatacgacgagatcactagcgacgacctagcccaatacctcgacgagctcggcaaccaggcgagccactga

SEQ ID NO: 335128 - DNA, 681 bp, Pseudomonas aeruginosa
atgaccagcttcctcaaatgggcgaaatggctggaccaggacgaggtgaccgaggcagtcatccgccaggtgatttcaccgtccagccaggtcaaaggcaacgtctataccgactatggtgggcaggtgggcggtacggtctggaacggcatcgcgagaaccgctggaaccttcggtgtggccctgggcagtctggcctacttcccggcgatggacatggtccgccaggcactgccgatggtgatgtcgttcctgaagatggccatggtcatctgcattccgatggtcctggtcatcggcacctatcaactgaaggttgccatgacgatgacggtcgtcttctttgcgatgatgttcgtcgacttctggtttcagttagctagatatatagacagcacgatacttgatgccttctatggttcgggatcaccgcatctttcgttcgacccggtcatgggactgaatacggcgactcaagatgcaatattgaactttgtgatgggggcgatgttcgttattttacccatgctgtggataactgctataggctgggcaggcgtccaagttggagctctcctcagcgatctcagtaacggggtcaaaggggtccaacaggcaggagtacagggtggtagcgtagctaagcaggcaatatcgtcgttctcccccaaaggggattga

SEQ ID NO: 335129 - DNA, 555 bp, Pseudomonas aeruginosa
atgagccagatgagcttttccgactttgagtacgccagcaaacgcaagcacacgcgccgggagcgttttctggccgaaatggaccaggtcgtaccttgggcaggcttggtcgcgctgatcgaaccgtactatccgaaggcgggcatgggccgcaggccgtatccgttggaaaccatgttgcgtatccacctgttgcagaactggttctcgctgagcgatccagccatggaggaggcgctgtatgaaatcacgcccatgcgccagttcgccgggctaacgctcagcgcaccgatcccggaggacaccacggtcatgaatttccgccatctgctggagaagcatcagctcgctgtgggtatccttgaggtaatcaacggttatctccaggacaagggcctgtcactgcgccagggcacgattgtcgacgccacgatcatccatgcacccagctcgacgaagaacaaggagggcaagcgcgcccctgagatgcatcagaccaagaagggcaatcagtactacttcgggatgaaggcgcacattggggccgatgtgtaa

SEQ ID NO: 335130 - DNA, 1314 bp, Pseudomonas aeruginosa
atgggtttgttaagagaaacacgtgttggtaatgtgttggcgggatggaatcacttgtcagtggttggaccggtaaatataaaaaatgctgcgggtgcgcgtattcaactgtcgtctggtgagtggtgcgatgattatattatggggtggggttcttgtttgttggggcacgatagcgatgtcatcaaaggttcaattgtcaaagcattggggcgaggttttttgccacaatatgaaactgatgaacatcgtctgttgagcgagatgttttgtgcggctgtaccctgcgccgagaagttgcggctagtgaactctggcctagaagccaccatgtatgcaacacgtattgctcgtgccattactggcagacgtatcatcataaagtttgaaggccattttcatgggctcaacgactctttgacctggaatgtagattcttcaccgcgttcgggaaaagtattggcaggaggagaactggagcgactgtcaggtacagtgggaattccggacgaattcggaagtttgacggtggcggtttcatggaacgatttggaggcgctagagaacgcgtttgaaaaacataaggacaatgtagcaggtgttattctggaacctgttgctttgaacatcggttgcatcaaaccggatgagagttttctacaaaatctacgggctctgtcgagccatcatggtgcactattaattttcgatgaagtgctgacggggttccgtgcaaatatcggtggtgcgcaaaaagattttggtgtcattcctgacatagccacgttcggcaaggcattcggctgtggaatgccgatcggtggaattgccgggaaagccgagtatatggatgttatctccccgcgcggtccggtacagatcagcgggaccaatactggcagatatctttccgtatccgccgcgcttgccgccattgaccacctgcaggatgggacagtttataagtatatctcggtgttggagtctcgattgaaagcggggctaagggatgtttttgataaacacataataccatgtcacattgatggctatggcggtaggatcggtgtccatattgggacttctgaacgtccacggacaatgaaagacatagaagggttttacccggttgagtttgctaagaagttattctacctattgtcccgtgaataccatctatatggttttctgatgccccttgattattgtccagagcccgtgaccctgagcgcgtcgcatacgccagaaatgatagatagtgtctgtgaacggctggattcggctcttaataaggttgaattccatgagaaataa

SEQ ID NO: 335131 - DNA, 252 bp, Pseudomonas aeruginosa
atgattaacaattacgtaatcacaataacgaatggaagcaagaagctctgcgcgcttctgatcgggaaatatcggtcgatctgcccccttgttgacgtattcgtcggcagtgacggatacgaacagtcgatcaaccatcgcgctggcgcgctgcagatgataaatatgcccaggatgaactatgtcaaaacagccatgacaaagacctattatcaagcctttttcgtgacaataagtagcttcatcctgtaa

SEQ ID NO: 335132 - DNA, 675 bp, Pseudomonas aeruginosa
atgtcgaaactactgattgatctcgacggaacaatgatcaatacaccacattttgaagcttggtgtaatgctgcctatgagttttcaggaaaaaggcttacgcaaaacgaatatattgaacatattgctggccgcccacgcatggaaggtgcctcacggctgcttgcgctcaccaccgatgatgccagcggtgtgaggagaaaaacgttcagtgcagaagaactggccgagtataaacagagagagtttcttcggctctcacccgctaccaaactgttcgatgatgcattgcgattgctgaagcgcattgaggagtcagagcaatcggtgatgttttacacggcctctatgaatgcaccacaattgtttgaggtggctctaaattgctcgaatgtgttgcgcaaagcgagggtacccattacccggcaggagccggatcagacgcgttacgaactgtttcaacaactcattggcggccacgatcctcaggactttaatcttattgacgatagcccctatgcgactgatctggcatgtggcttgggacttcatggttggcaaatccgccgtcatcatcttgagccaatggcttcccattctcgggcttcaattctgtcatcgcttgatcagtttatattggtgaaagaaatatgggaaaggagcaactatgaataa

SEQ ID NO: 335133 - DNA, 1047 bp, Pseudomonas aeruginosa
atgaataaagattctgctgttcttgtaacaggtggagctggctacattggctcgcgtttggtgccaaaactgttggccgctggttacaaggtccgggtgttggatgcgttgtatttcgtgaacggactcgagagtctgttgagtcatccttctctggaattcatcaaaggcgatatccgtgatccgttacttgtggagcagtccctccaggggatagacaccgttgtgcatcttgccgctgtggcaaatgacccaagttttaattcggcccctgaaatcgggcaatcaataaatattgattgtcttcctcatctcatgaatagtgcaaaacgtctgggttgccggcgctttatctacgcatcgtcagctagtgtctatggcatcaatgcagaaccttttgtcgatgaacagcaaccttgtgtgccaatcaccgattacaaccgcttcaaggctgatggagagaaattacttttcgaactcaccgattcatccttcgagaccgttgctgttcgagccgcaacggtatgcgggtggtccccccgccagcgcttggatctgaccgtgaacatcctcaccgctagtgcgctggcccgcagtgcaatcacggtgttcggtggttctcagtatcgtcccaatgttcatataggcgatctgactcggctttatacggtactcgtcgagcgtgaatccttgggtgaggtttgtggggctgcaatcaacgtcggttacgagaaccatacggtgagtgatcttgctgagcaggtacaagagatcgttgatcgctatttccttgtcaaggtgccgatcaccacgacctgcagtgatgatgttcgctcctatcgtctggactcccggagggtgcagcaggctctaggtttcgagttcatctattcgatcagggacgctatcgtggagctctgcgagcaatggcagtcagggagctttagcgacagcactgatgtgttatcggatattcgctatcacaatgttcgtaacatgacatacaacgactggtcgtatcagccgtcgggaggtttggcgtgctga

SEQ ID NO: 335134 - DNA, 2265 bp, Pseudomonas aeruginosa
gtgctgaccatttcttacggagaatattgtgaggatattgttggaattgaaccgaggtcgtcgtctttcgcagcatgcgtggcgacattggtcaatcccttgatgggtgtgcgccctcatatgccaaaagcatcgccacggacccagcgtacacagttgctattatcgcaagtttacgcttccggcgtcggcgtttcgcgggaaattatttccttgccagcgccggcaatcctgcggctttacgacgtcgatactggcgcacctcttgagcctactggtgatgaaccaatagtagtgttagcactggatcaggcgacagtcagcagttgcgagcagtttcagttggagggggtgaggtacgagctgaagataaaacagttcattgatagccctgacgattgcatggtatcgacgctggttagtttgaaacgtgtcggcgctgccaccggctcacaccggttgcgacttgactatggtatgcatggcaatgccttgaatgaatacctgggggcttgtgactggctgacagcccgacattatgaaatcgggcaaggtagtatcgatcaagctttcttcagtgtaatcgtcgttacggcagagcagcgattacgctatgacgtacgcatcgaacaaacccattcacctgaaaattccgtcatctcatggctgcacggacaagaggggtatgttgcgtcagtgaccttagactttagctctctctgtcagcatcagttcgctgtgcattggcgggttggagctgatggcgagtgtaatacatccaatgtttttccctacgattacgatgttgctgggattcagagtagtcacacagatcagtggtacagggtttggagcgagcatgacgtcaccgtccagacggggcaggcgcgaactgatctgggtatgaagtacgcggttttccaattactacaacatggtattggggcagtgtatgaggccaatggcgcaatctctccggcgcgaggtctaaccagtacttaccattctggcgcgacctttttcgacaccgagttgcataagtgcatattctggatttggaacgagccggacgtcgcaaaagcgctcatcgactatcgttacaacaacatggaaagagcactggagtatgcccgagccaccggtttttgcggagcacgttttccggaggcgtccaatgatcagggacgggaaaatggaccgcattatgtgctgacctatcctgctagggaaattcgacgagagtggagtgtcgatgaggttctccacatttcggcagatgtttcctatgccgtgaacaaatactgggaggtgaccggtgacgacacattcatggagtctcgcggctacgagatgcttattgaaagcgctcgattcgccgcatcggtgttcaagtggtctgagagcaggcaggcgtatgtagtgacttcggtcatggggccggatgagtatcactaccatgtggacaacagcttctttaccaacttcatgctgcggtggtgtatccggttagcgctttcattgtgcggtcggtcgaagtttcccggactgcctgaaacgcaacgtagggagtggcagtcgctagccgataatgtctatctcccttggatgacggttaacggggtgtctattcctgaagagttcgaaggttattctacattgccggacaccctgctgcgtaccgataagaagcgggggccgcaattcgtcgatgaggacgagcggaaaaacgctgaaagactgcagaacttcgactcccagttggtaaaacaggctgacatcatattgttgatgtcgatgtttcccgacgatttttcagagactgcgaagcgtgtagcgtttgattactatgaaccgcgtacggtgcatgagtcgtctctgagttacggaccgcatgctgtcgttgcagcgcatctgggtagaacgcaaatcagtgccgattttatagcgcgtgccagccgttacaacttggatttcactccggtcgacgactacagcaatggattgcatctttctgcctatgctggagcatggcagggattggtggagggactatcagggcttgatatccgatcggggcaactagccttccgtccgaggttgcccgctcactgggatgcttaccatttcaccatccagttccgaggtcggcgattaagggtttccgtattgggtgataatgaactggagatccaccagggcgatcagcagttagcgaccgaacgcgggcaggatggaaaaatatacctcaaggagaggcacccatga

SEQ ID NO: 335135 - DNA, 1242 bp, Pseudomonas aeruginosa
atgatctctatcagagatcgcttgtcaccttatagtgaagcgctgggtgtcaagccttttcgcaagttgcttatcggccagggcttgtcgatggccggtgatgcgatttgtttggcggcgttgccgatagcgcttatccgggacggtttcggtggggatgtgtttggcttcatcatggccgcagttggtgtcggaactgtcgttggggccctggtcggggggatgttggcggatcgcaagtcgcctcgacaggtgcttatctacaccgatacggccagaggtttagcgcaacttgccgcagttgcgttgctcatgacaggggcgccatggggcttgctggttcttgcttatttgatcttcggtattggcataggcgtttcacggccatgtgctcaggttctgctagtcaacctgctttccccaaaagcgctggttgccggcaatggagcgatgaactttattgataaccttgtcgccattctgttcccggcaaccttgggcgtgttcattattctgtgggacccagtttggggaatactgattgatgggttgacctttttcggcgccgcgatttataccgctcagttaccaaatatcggccagtatgagtcggaagaagagttctcgctgcgtgaggtgctcaatggcgtcacagtggtcataaataacgcgacgctgcggatggggtttgccgcgacactggttgtgaacgtcatgtgttttccaatttttctagtggctgcaccttatgcaattactctccggttcagcgaagatatgtggggttactgtttggcagcatcggggttcggtgcttgtattggttcgataatcaccgtgctggcttcggggcatgaacgactggtggggcttgcggccatttgcggattgttcttggccggggccatggcgttgctcgggttgggtacatcggcatggatggttattctgggggcgacattcgtcggtatcgtcgaagcgtcctggctcacaggctgggcaacctccatgcagattctttcccccgagagggacctgggcaaagtcgtggctgttgataccttcgttaccagtggcttacacccattcatttatttggggagcggtgtcgtcggtggagttattggctactccaaagctctgacgcttacagccgttgttagtttggtaggaatgctgctgatcatactgacttccatcatattcataccaaggggtgtgcgtaatgatcaagtacaataa

SEQ ID NO: 335136 - DNA, 1101 bp, Pseudomonas aeruginosa
atgatcaagtacaataacgtacgggaacaggctcaggatctctctgtccagatatttgagcgctggcaggagttgctgcaatcgggtgactttattctaggagacgaggttgtcgcctttgaatcatggatgtcgaatcgctgcggcggggcgcacaccgttgccgtgaattcagggacggatgctttgtttcttgcgttgtgcgcgttcgggattggacccggtgatgaggtgatcacctgtggcaacacctttgttgctacggttggagcaattgtttctaccggtgcccgacctgtcctggcggatgtgggtgacgatgaactgatgaatatcgacacaattgccccacttctgagtgaccgaacaaaagctgtaattcctgtctacctgcgcggacgtccgttggatatcgatgcaatcgtccaattgtgccactcttactctgttgtcgttattgaggattgcgcgcaggcgatcggtaccacagttaacggtcaacaagtcggagcgcacgctgatgcgtcagccttttctatgcatcccctgaagacgctcggaggtttgggggatggtggaattctggtctcccgtgatattaaggttgccgaatacgcgcgtattgcgcgcaatcacggtttggaaacacgcaacgaatcgatccggtttggctttaattcacgactcgattcgttgcaggcggcagcactcaatgtcaaaactcagtatgtggatcggtggctgaagagacgtttggaaattgctggtttctatgatgacgccctgtccacaactcgcactggaacagacttgggagggggcaaactgggaaattcctactatcactatgtcgtgcagtcgactaatcgcgatgggctacaggcgtttctaacgcaacacgatattcaaacggccattcattatccgatccccattcatcggcaaaaagcctggtcgaacagtcagccacacattgtgttacccactaccgaacgtctctcccaacaaattcttacacttccttgccatcatcatttgtcagatggggatgttgaaaaggtcgcctcgctgatcaagcaatttgaacgcatggagggatag

SEQ ID NO: 335137 - DNA, 438 bp, Pseudomonas aeruginosa
atggtttgcgatgccaatggcgtgccattgcgcttcacgctttctccgggacaagccaacgatatcgcccatgcccagccgttgctggatcgggtacgaattcccggtaagccggggcggccgcgcaaacgcaatcgctggttactggccgataagggctatgacgcagaacacctgcgtcactactgcgaccgctaccgaatgcagccggtgatcccgctgcgcgcgatgccacgcaaaccccggcttggcttgccccgactctttgatcgtcctaagtatcgccagcgcaatatcattgagcgcatgtttggctggctaaaggagaaccgcagaatcggcactcgctacgacaagctggcgagaagcttttcggccatggttacgctggcctgcagcctactctgtatgcggcaatacttttcgtacaaaacctag

SEQ ID NO: 335138 - DNA, 660 bp, Pseudomonas aeruginosa
atgagtttcagaaaacacaccgcgcaacagcaggctcacatcaacacgttccggttcatcaccggcttcttgtgcatggtcatcgtggtgctggcctactgcgtctgggaagcccgcaaggacctctggatccacattccgcccgacttgcgttcagggagtacccggttgtggtgggacattccgccggagagtgtctatgcgttcggcctctacatcttccagcaggtacagcgttggcccaaggacggcgaggtggactacaagagcaacctgttccgctacgccgcctacctgacgccttcctgcaaagtcttcctggagaaggacttcgagtttcgtcgtaacgccggcgagctcagggggcgagagcgcaccacctcggaaatccccggtcggggcattggcgagagcgatggccgcgtgatccaacactcgatcaatgactggaccgtcaacctggacatggacagcacggagtattacgccggcgaaaagatcaagcgcgcgctggcccgctacccgttgcacgtcatccgcgccgacgtcgacccggagaccaatcccttcggcctgcagtgggactgctactccgatacgcctcaacgtatcgaactcgaggagccggtcgcccccatcaagcgggagggaggtctatga

SEQ ID NO: 335139 - DNA, 849 bp, Pseudomonas aeruginosa
gtgcctcgcgagtgggagtcgcacgcccaggaactgctccagctctgcaggcaaacgctggaggagctgcaggatcctgagttcgccatcgtcgtcgacggcgttctgcttcgcgtcaccctcctcgaggacgcgttcagtggcagcgtattcgtgctgcgccggtcgacggcccaagtcagaagcttcgaagacatcggctatccgagcgaagtggtttccgcgctgatggatccgcagctgcagggcctggtcctgttctgcggcgagatggcgacaggcaagaccagctccgccgcctctctgctcctggcccgcctgcaggagctgggcggggtgggctgcgccgtcgaggacccgcaggaaaccaacctcagcgggcaacatggactcggccgctgtatccaggttaggacctcgcgacgctcgggaggctacagcgaagccctgttgcgcaccctacgtaccggagccgacctgatattgatcggcgagatccgcgacgaagacaccgcctatcaggcttgcaaagcttcgctgaacggcaacctagtcatatcgaccatccacgccaagaactgcccgcaagccatcgaacggcttatcaccctggccaaacccctcgcgtccaatgcctacgacgtcgtggctgaaggcattcaggccgtgatctgccaggaactggtaagcgatggcgcagctcgacgactgcatgcggaaccgttgctattcaccggggtggactccgtcgccatgcgcgacaagattcgccggcagcagattcacctgcttgaggacgacgtgaatcgccaggctcgcagaagcctgtgggagccaacctatgaataa

SEQ ID NO: 335140 - DNA, 1380 bp, Pseudomonas aeruginosa
atgaataacaccaagctcaaccgcggctttatctcgattgaattaatgatcgccctgatcgtcatcgccatcgcgactaccggcgggatttcagtcttgatgagctatctagacggcctgaatgaacagcacgcggcccagcagcaacagcaggtggccaaggcagcggagaagtacctgaaggacaacttcagcacggttctggccagcgccggcgccacggccccggcggtgatcaccgtcccgatgctgcgcaacacccgttacctgcccgcaggcttccgcgacaccaacatctacggccagcaataccaggtcctggcccgcaagccggcgaccaaccagctcgaaacgctgatcgtgacctcgggtgggcaggcggcttccgaactctcgatccgccggattgcgcagctcatgggagccaccgggggctacatctcgaaaaccaacactagtatcgcccagggcgcggcctggcaggtggccttaagcaatttcggtagcgctcccggtgctggacacctggcgacggcgctgtttttccaggacggtgccatcgccaacgagtacctctaccgcaatgccgtcccgggtcatcccgaactcaaccggatgaataccacgctggacatgggaggcaacaatatcgccacggccggggcgatcacggccagcggcaacatcaccaccagcgcggacatcagcgcgcgcaacgtgacagccaccggcacggtgaaagccggcactgctgacgtcgccggcgagacgtacaccggaggctggttcaggacccgcggtaactcaggttggtacaacgaacggtgggacggtggctggtatatgagtgacagcacatgggtcaggtcgtggatgaacaagagcgtttataccggcggagaattgagagggggaaagctcagctccgaaggtagaacgaccgtcggcgagtaccttcagatcaatggtttggcggcagaaaatgcaggatgctcccccaatggcctggtaggcagagacaacagcggccccctattctgcaccgatgggctgtggaaacggcccagtggcgtgaatatcgccacccctgtggtgctggcacagtatcccgccgataaccgaccccgcacccactgccaagcggtctccagggacgcgctgatcaatggctccggccccggcgttctgcgcttggaagtcgatggcgtgatcgtcggtcaagcgcgctccaccgctgggcgaaacgctgacgtagttgaagacgcctcgatctccgccatggtgaaagccggacaccggttctgcctttacagcaccgttgtgctcgcaggattcggcaactccgccggcatgcgtgtgacagccacctacctcaactag

SEQ ID NO: 335141 - DNA, 1389 bp, Pseudomonas aeruginosa
atgcgaatgaacatcacctcagtcgcgctgacgtggctgctcgcagcgcaacttgcccaggccgacgacccgatcaacgtgtccaagaccggcacggtgctcagcgacgaggtcctatacagcattggcggcggcagtgcggtgagcatgggcagcgccggccagatggactcgatcggcgtcggtttcggctggaacaacgacatgatgtgcggaaacatgaacctgagcaccaccctggagaaccagctcaacggtgccacacagggtttccagaacatcatgggctcagtcatccagaacgcgaccggcgcggtcatgtcgctaccggcgttgatcatccagcgcgcgaaccctcagctctacaacctgatcaccaatggcatcctgcaggcgcggatcgactacgaccgctcgaaagggacttgcagagcgatcgccgagaagatggctgacatcgctggggagcagaccggctgggggaaaatcgccgaaggccaggccctgggtgccacactggcctctggcgggaaagacgccgtatccgccctcgaagcagtggagaagaagggcggcaacgatggcgtaacctgggtcggtggagacaaggccggcggctccggccagaagcccattcgcatcgtcaacgacgtgacccgggcgggctacaacctgttgaccagccgctcggtgaaagactcatcgagcgtgccttccgccagttgtaacaacggcctggtctgcaacacctggtcctccccccaagaagccgctgcattcgccacccgggtactgggggaacaacagcaacagacctgtgaaggctgccagaagacggtgacggctgcaggcgtcggcctgaccccgctgatccaagagacctacgacaagaagctccagtcgctgcaggagctgctatcgaaaagtaagccactgaccgccgagaacctggctgcggccggcaccgatgccttgccaatcacccgcggcgtcatcgaggcgctgcgcgacgagcgtgaccaggacgtcctggcgcgccgcctggcgtccgatgtctccctgatggacgtgctcagcaaggccctgttgttacagcgcctgatgttcgccggcgccaaggagcccaacgtcgccgccaacggcctggccacccaagccgtcgatcagcagaccagcctcctgcagcaggagatctcgaacctcaagaccgaactggaactccgtcgcgagttggccagcaattcgcccatgcgggtcatcgagcgcgggcaacagcgcgcctcagggtccagcggcgtgttcgagtcggcgcccgatgctgatcgccttgatcgcctgcaggccccctctgccgccggcggcaagtcggggtcgggagggagaccgtga

SEQ ID NO: 335142 - DNA, 939 bp, Pseudomonas aeruginosa
atgaccagcctcaacctccgccgcctggcagcggcggccgccaccttcagcctctcgttcacggccgcggccgcgatcaacagcgccgccatcgtctcctccaccctttcccctcagtgcctcgaatacaaggtcgtcgggatctgctactggctgctctgcggcccgcatggctgcaaggtgaagacgtcggtcaaggtccgccactacgtgcctgacgcagtcgtctccagctatgcgaataccgggagcaacccctggaccgaggtgtcggcgctgggcacaccgaatccactcgcccaggccggcaatgacgcgaccaccaactacaaggccgagaacagcatcggccgcttcaaggaagcggatgtgatcggccatcctggcggggccacgttcagccggttcgccagcgcctctgggtacgtttgccctggcgccaccttcccgctggtgccgtacttcctcagcacactggacgccattggctggcggcatggcattcccgagcaggtgtaccccgaagcgttggtcccagggctgcgcgaggtgggtggaatcttctccggcgacatgtgggggaacctctatccgcgcagcggattcctgcaccagaccgacgactacaagacggcagccgtcatcgcccagcgcgccggcgatatcaccacgcgaatcggccaactccacgtctacctccccatgcgcgcagcacccaaggacggctactggccggcgggcgagctgaaagagggcgatgcctcgaccgggaaatggcaggagctgaccccgtccctgagcctcaactgcgcggtgtttcccaactcagggccgaagacgcaagccgtcgacggcgattacgcctgggcgctctggcgtccctactcctgctgccagcgcaaggggcagatcttcctcggcagtaccgacttccaataa

SEQ ID NO: 335143 - DNA, 1710 bp, Pseudomonas aeruginosa
atgcgtgcccccctgaagaacctcttgccttgcctcctgatccccgcgctggccagttgctcggtcacgcgggtgaacgagtcggcggatcgtgtcgaagctacggcagattccgcgtcgacgatcgcagcacagatgcgcaacacccgaccggatcgccgcgatacggtggtgttctccgacaaaccctgggtcagcacgaagcccctgagcgtttcgcacaccttgtccagtgactgcatcgtgacgtggcgccctgcaggcgcagcgtcgctgcaggaggccgcccaggaagtcatcaaccaatgccacctggcggtcagtatcacgcccgacgcgctgaacccggccgccttcgccctgcaacctcagcagcgcgcgagcaacgccccgccgcccatccaaggcggccaggacatggccaccatgctgtttcctgcctccgtcgccaacggcatgtccctaggtgccggcggcagcatgggatcgagcttcgggtcctacggcccgcggtcgctgtacaacatcaaatggaacggcaaggtcagcgggttcctcgatctcatcgccgcccgcgccggcgtgtcctggcgctacaacccaaccgagaaacgggtcgagttctactacctggacactcggaccttccgcatctacgccttcgacgacgtcaacacggtggactccaccgtgcgttccggtatgacgacggccgccggcatcagcggggatggctccggatccactggacagaatggcagctccggcatcagcggcgactccggcagcaagcagaccaccagctccgagctgaagacctcgatcctcagcgacatagagaacagcatcaactcgatgctgacgccgagcatgggacgcatgtcgctgtcgcgtgccacgggcaccctgaccgtcaccgaccgaccagaggtcctcaaccgcgtccagcagttggtcaaccgggagaacgagagcatcaccaagcaggtgctgctgaacgtcaacgtgctctcggtcgccctgaccgacaaggatcaactggggatcgactggaacctggtctacaagtcgctcaacaacaagtggggcatcggcctgaagaacaccatgccaggcatcgatcaaagcgcgatctccggctccgtgagcatcctggataccgccaacagcgcctgggcaggatccaaggccatggtccaggcgctggcccagcagggccgcgtctcgaccgtccgctccccgtccgtgaccacgctcaacctccagtcggcgccgatccagatcggccgctacgacagctacctggcctccagccagatctccaacgtcgcccaggtcggcagtaccacctcgctgatcccgggcgcagtgaccagcggctacaacatgagcctgctgccgttcgtgatggaaagcggcgagatgctgctgaagatcaacatcaacatgacctcccggccgacgttcgaaatgcagaccagcggagactccaaagcccagttcccgagctacgacatccagctgttcgaccagaaggtacgcctgcgcagcggcgagaccttggtgctctccggcttcgaccagaccaccgaggataccaacaaggtcggcaccggcgacgccggattcttcggccttggcggcgggctgacccgcaataccaaacgcgaggtcatcgtggtgctgatcacccccgtcgtgctgggctga

SEQ ID NO: 335144 - DNA, 1326 bp, Pseudomonas aeruginosa
atggagaaacctgacatcggtagccgtggaccagacgtctcgatcctgagctaccacggcaacaagttcgtcagcggcctgttctggcggccgctatccagccagcggcagtacatgaaggaagcgcgcaagctgggcaaggaagagcatctggacatcgttgccatccgccattcgccgacagtgatccaggccggcttcgtttcgaagtcgcaaggcgcagtcaagggcatgtactccctggcctcggcgctttcaggccagttcgaaggcgacttcctggcctgctggaaggtcgacgaggaccgctacgcactggtcgccacgctcgatggcgcgatcgtccccggccaggacctggtcaccaccttcgacgaagccagggaccgggtcaggaagctctctacgcgcggcgtgcttcgaaacgcacaggtcttcgttcccgaaggattcgatttccccgtcaaggacttcgacatcgaggaactgctcgcgccgaagcgcctgcggcgcgactaccgcctccggcaactcaccttcggcttgtccgccagggagtggacggcagtggccctgctcggttgcctggtaggcgggtcgctaaccgcctactacctatggaatgcccaccagcaagagctcgccagacaagccgcgctcctcgaggagcagaggcgcctcgccgagctggccgagaagaacgcccaggccaagcagccgctggacctggcgtcattgcagaagccttggacgctcatgcctgaccttgaggacatgctacgcgcctgtagcaaggcaacgggggtactgtcgctgtcgatccagggctggctcttcgaatccagcaagtgcgacggcagggtcctggtcgccacctaccaccgtaccggcaacagcacggcagccgacctcacagcggccagccagcacctgttcgccgaccgccccgccttcgtcatcgacaacggcaacaccgcggccctgaaggtcgacctgaaagtcgccatcggtagcgatgagccgctgcagccagccgacgacgcgctgcaggcgctcaccagccatctgtaccgtcagggtgtcgagcccaagctgtcgatcagccaggagacaactccgccccttcctggcgcggaagcagcgacggagcagcaagtggtgttgccttcctggaagaaattcaccttcagcgcccagaccaggctcccggcagacctgaccttccaggggctgcccgccgccggggtccgcatcaccaacctcgaaaccacgctcaaggacagccagttggactggactgtcacaggagaaatctatgcgaactga

SEQ ID NO: 335145 - DNA, 792 bp, Pseudomonas aeruginosa
gtggtctgtgtggttttggttcgcaccgccgaccttaccaccggatgcgtccggctcccttttagcagcgaccgtcacgccttcagcgctaccggtcctgcaacctcaattttcatctcatcttccgctaccagttgctggtctacgccggcaaggagtattgccatgactgaatctaacgagctgggcgatccttttgctgttgtacccatggcgctcgaccactggagaaaggacctcgtcgcctccgtccgcgacctggcgttcacccgcagcggccgccagtgctgcgtttggcgcaccgacaccatgctatgggtcatctggctcccgctcgtcaacgctctcgtacagcggcgccgcctcgttcatggggtggaaacccctgagagcttactcaaagagctagtgagcacccatttggtccgtgcgccacgcgcgcagattcttcaaagcagcacctaccttgaacagggcgtgtgggctcggctaacaccggtggttgagatagaggccagcttggtatggccggacttctcagcccacttaccccactcgcccatggcacgactggacgtcagtaatgttcagccagggctcgggccctctggtcggctggaaacgacaactccagcactgcagctcgcagtggttgaggtcgttcatcccagactctcttcgccacgtcatgcagaggcagattggttaactcctccactagtacttgccatagctgatgaagcgttaggcgctgaacatcgtcatacgcccagcatgggtgacgaaacatga

SEQ ID NO: 335146 - DNA, 438 bp, Pseudomonas aeruginosa
atgaacgcaggcaaagaggggatgtcgcagggtgtaaaggcgtacgagcgcacactcacccgcctaatcgagcgatataggaaggacaatggtttggaaaaggaccagccgctggccactgaagatgtagtggtgctccagcagcagtatttgctcaacgtcttgggcactgcacttgcagagaagtacagttggcccctgggtgaggtcgtcgcgatcgatttcgcgctcataagacgctactcctggacgccgccgcaggtgcaggcgctgtctcctgctcataaatggctagccatttgcgatgagctggagccgcttcatgtcccggaagaggcgcgtcgggtgtggcgcgatgagagacaggtgtggggaccagttcccatagatagtaggaaggacgacctcgaggtgtggcgggaagcgtttgcccagtag

SEQ ID NO: 335147 - DNA, 588 bp, Pseudomonas aeruginosa
atgaacgcgggtatccccgaacatatcctcaaaagtgccttggcgtatgcggtcaagcacaccattgctgaggatcgaatttccgaacgtcgagcctggctcacccgcttcggcgtctatgctctttacccggcgatctaccccgccatgctgtcgtttctgcggcaccacgcctctgccgatgcgttgccctcggagcaaaccttgctggagcgcctagtcgagattaaggcgactccgtccccgcgaggttttggcgttcgccagacacggagcctatgcgagtccatcctcaacatcgtcctcgaggtaaagcccgaaaatgtttgggacacagacgagggacttcccgagcagtggcttatcacgacagcgataggccactggtatcaatgggtggcagaccgagtgggtttatcgtccactccagcagatcagcagcgcctgtatttgcataccttgcgtcccaagctgactgcgcctcccgaggaaactccagcttctgcaaatcctgatgtagtgctagccatttattggccggcgacagatttcgaactcgatttggataccaggagtattcagctatga

SEQ ID NO: 335148 - DNA, 1467 bp, Pseudomonas aeruginosa
atggttattgtcgcacaaggtccagacgatcaatacgcatatgaggttccccctatcgatagcgcggccgttgccgggaatatgtttggcgacttaattcaaagagacatatatctacagaaaaacatttattatccagtccgatctatttttgaacaaggaacaaaagaaaagaaggagatcaacaagaaagtatctgatcaagtcgatggcttgctaaagcagatcactcaaggaaaaagggaggccacaaggcaagagcgagtcgatgtcatgtcggcagtcctgcacaagatggaatctgatcttgaaggatacaaaaagacctttaccaaaggcccattcattgactacgaaaagcagtcaagcctctccatctatgaggcctgggtcaagatctgggagaagaactcttgggaagaaagaaagaagtacccttttcagcagcttgttagagatgaactggagcgggcggttgcctactacaaacaagattcactctctgaagcggtaaaagtgctaagacaggagctcaacaagcaaaaagcactaaaggaaaaagaggacctctctcaactggagcgggactacagaacccgaaaggcgaatctcgagatgaaagtacaatccgagcttgatcaagcgggaagtgctttgcctccattggtcagtccaacgccagagcaatggcttgaacgtgccacaagactggttacgcaagcaattgctgataaaaagcagctgcagaccacaaacaatactcttatcaagaattccccaacccctctggaaaagcagaaagccatctacaatggtgagctacttgtggatgagatagccagtctacaggcccgcttagttaagctgaacgccgaaacgacacgacgcaggacagaagcagaacgcaaggcggccgaggaacaagcgttgcaagatgctattaaatttactgccgacttttataaggaagtaactgagaaatttggcgcacgaacatcggagatggcgcgccaactggccgaaggcgccagggggaaaaatatcaggagttcggcggaagcaatcaagtcgtttgaaaagcacaaggatgcgttaaataaaaaacttagccttaaagataggcaagccattgccaaagcctttgattctctagacaagcagatgatggcgaagagccttgagaaatttagcaaaggctttggagttgtaggcaaagctattgacgccgccagcctgtaccaagagttcaagatatctacggaaaccggggactggaaaccattctttgtaaaaattgaaacactagctgctggtgcggccgccagttggcttgtgggtattgcatttgccacggcaacagccactcctataggcattctggggttcgcactggtaatggcagttaccggggcgatgattgacgaagaccttctagaaaaagcaaacaatcttgtaatatccatttaa

SEQ ID NO: 335149 - DNA, 255 bp, Pseudomonas aeruginosa
atgaacctactgttcaccaacctcacccaggaaaccctcgcctacctcgaggaccaactgtccaacaacgacgtcgccggcgacgacgagctcatcgacctgttcatcgaggagctgtcgctgaccttggagcaggcggaagcggctgtcgcgctacgcgatcagtacctctgccaggtcttcctgaacggccaagggccgctgcaccaagacgatgggctgagcttcgaccctcacaccaagagcgttcggtaa

SEQ ID NO: 335150 - DNA, 792 bp, Pseudomonas aeruginosa
atgatcaacatacccggccagttggccattcgaaccatcaacggtcgcaatggcgagttcaacgtgggaaagctctcgacctcgatcggggagttcgtcattaaggacgctctcctggaccagcacatcgaaggcaagtaccgcggtgatttcgccatcaccgagatccgtccctcctactacaccaccggcggccggctggtcgtcgagatccgcgcgaagctcgacagcatgactctggacgacgtggacaacctcagcgacgaggaggcagagcgtctctctggcaatgaggtggatccgctcgacgaagtgcccgcgatccagcaacccactgccgcaccggcggcaccgccgaagtcgccccataaaccgaagcctctgcgccccgctgcacccggggacgacgcgcctttcggtatggaccctccggctcctgcaaagcaggccgccactctggacacagacgcagatgcagaactgttcgggacggtctggccgctaggcgaaatcgtcaagctggacaccacggtcgaccgcaagcgactacgccaacaatgtgtgcgactcggcgcgctgggctatgagctcgacttcaaaaaacaagtgtggacccgcaaagcgtgccctctccatgttggagccaaagccggggtcaatcagtcgctagacgatgactacgagcgccgcacggcagcccggagtgctactacaacctgttccacccaccaggctatcagcgcaatggctgtaagcgctgctgctattggcgttgctctgtcaaccaactga

SEQ ID NO: 335151 - DNA, 240 bp, Pseudomonas aeruginosa
atgatcgactggagccaggtaaagaccgctgaacagcaggcgcaagaacgccggcaggctgagtacgatgccgcaaccgcggcgcgggcaaatgcctaccgcctggagagtgacccgctcaagaccgaggccgagttcgacgctatcaaggccggcgtggaaccggactactctgcctggatcgccaaggtcgaggagatcaaggctaggtatccgcggccggacgctggcggcgtgtag

SEQ ID NO: 335152 - DNA, 1020 bp, Pseudomonas aeruginosa
atgaagcgaattgtagcaattacaatgggtgccttagcactatcttcctgcgacttcagtaaagaaagctggccaacacacagccctacgcaagaacagaaaaacttaggcctctcaaacgcatatcagtatcgaaaacagggcctgaacgcagatcatcgatcacaggtctattcttcgacaggagattatctaaattacgggaagaccgttttccatcgtccaagcaaaaccctgaagcttgacgatcaaggaattcctatggttttccagggcgggaagttcaactactctgctggcacggtagctattgctgcactggctgaacatggacgatctactgaaagtcacgaaaccaaaaagttcttcattctcgcggagaaactattgtcactaatgggtgatgacggcgccttgcgctatgcatacccataccgacactacacctctacccaagcactggcggtaggctggacttccggcatggatcaaggcatggccctaagtgtcttcgccagagcctatgcgattgacaaggacaagaaatggctggacgctggcaataaggttctgaagttcctacagactccatacccatacggcccaaagtcaacacttaaagaccttgaccaatcgttgtcaggccgcgtttttttccttgaatatccggtagagccgaacgtcttcactctgaacggctacatgtttactctcctcgggttgtacgactgggcaaccgaaacgaactcggctgaggccgataagctattcaaggacggtatcgaaacactagaaaaaattctcccatattacgaccttgggacattttccgcgtatgacctaagctatataacgcactctcgccttccgtatcttcaacctcgagcgccgcatatcgcgccacgctaccatgcgatccatattgcacaactcagagcactaagctcagtcaccggagataagttcctgagtgaccgcgctgagaagtggcagggttatgcagaagggaaaacccagtag

SEQ ID NO: 335153 - DNA, 1059 bp, Pseudomonas aeruginosa
atggccggtaagatcaagggacttgacgggctcagagccatttcagtcctatttgtaattatgtctcatgcggaggcatggcaagcattaggcatcactagcggagcagttcgttccgctcttagcgcacaaactggagttaatatattttttgttttatcgggcttcctaatcacttacctactaataaaagagaaagaagcaacgggcaagatagatataatttcattcataaaaagaagagcacttagaatattcccattatattaccttgcaatattttttctaatgtatatgaattataccggaagagcgaacatccctaactgctctttcgtatacgctctaacatatacaataaatttctaccccaaagagtgcgcatactcagcaatgtcgcacttttggtcgttatctgtagaagaacatttctatctattctggccaatcatcttctgccttggcaagagagtcgccatgcttatggcgggtgctgtagcgattgcatgcgtgatcattggaacttcactttatccggacaaccagaattattatatgaatcgctggacattcccagcgatgctgccgatcctggcaggctgcatactcgcatttatctgcactatcccatcgattgtgaccgtagcgaaagacaagacatcatctagcatcttactggtatccatagtttttggcgtagcgactccagccttcattaattcggacgtaatctggctgttttccgtctgcatgcttgtcctttatattttccacaatcaagactctatgctggtaaaagccttggagttcaagccacttgccgttcttggcgttatcagttacggactatacgtctggcagggaatatttacaggaaacggaccatatcgctcaggaggaacattccctcctccggttgacattggcgtgtggctaacattcatcgtagcgccgctgagctacgtattcttcgaaaaaccaataatgcgtcttaagaatcggtactcctggcggaaagacgtttcgagcgagacagccggaataatggaatcaaagtaa

SEQ ID NO: 335154 - DNA, 327 bp, Pseudomonas aeruginosa
gtggtgcccgagagacatcaactgccgcaggtgcgcccgatcgcgaacgatctgcgcgtaagcctcgatattggccacggagggcgtgttgtcagcgagctggccgaggtaggccagcccgccggcttctggaaggtcttcgatcgcttccgacaccgtcacgacgtcaaacggggcgtccttcgcggccaactcgctgatggcggtgaagatcagccgatgttcatgccggaagaagtcctctttatgcaggtgatcgccgacaatgtcccatgccgcgttgtccagcatcaggccaccgagtaccgcttgctctgcctcgactga

SEQ ID NO: 335155 - DNA, 399 bp, Pseudomonas aeruginosa
atgaaggggcttcccgcgcgaggacgctcatcggaaacgcagttcaagaaggggcagaagccccacacatggctcccggtcggcagcacacgggtaagtgccgatggctacctgcaacgaaagatctcggataccggctatcccccccgggactggaagagcatccacatcctgctctgggaagaacacgtcggccccatcccaaccggccattgcgtctgcttcaaggacaacaacaagcagaacgtcgtcatcgacaacctggaactcatcacccgggccgaacgcatgcgccgcaactccatccatcgctatccacctgagctgaagagcgcaatccgcgtcatcagcaagctcaagcgcaccattcaggaggtcgagcatgaagaacaagattga

SEQ ID NO: 335156 - DNA, 915 bp, Pseudomonas aeruginosa
atggatgtttacaagttgaagccagaggaaaccgatgagcgaccaatcgagcgcgaacgtttcgaagaagaaacgcgacgccaggagccttggttctccacctctgaaaatggcacggagggacatttcgctgtctgtcccgcctgcgacaatccagtacaaatcataggtctttatcatttgcccgccaatgtgactcgtccttatgggcgtcattacgctcgttcggttcgagatcttgccgaagcggatgaggaggcgcgagagaactgcccttatttcaaaccaagggaacaccaaaagacagagcgaaaagcctcggtagacggcacgcctctgaaaatactaaaaatactgatcgagcagttcgacagggttgtctacctgctgcggaaagaactgggtgtgaatatctctcaaaacctggctatccggatgctggaacagtacagaagggagaaaggatatctttatactggggcaaccctgaccaatattccctggatatttgcctatatggctgattctcagagtcttttcggacagcttttactcgatgatgaccttgtcaaggcagtctccgctgaagtgccggcagcctcagttgataagtatggccgagtctcctcgaaggtggatgagtcagggagaaaggagtatttcgatctcaatatgtgctttgtgaagcaccggtttcgtaaggacagccttgagggtgagctgaccgaggggatggaaatgctggtttccacagagcggaaaggaaaggctatcgatatatatacgaagtcgattgtatttaaccgccagtatttccaacgtttgattgctttgcccgaggatcatccacatagagacagcggtttggtcgaggcggcgcgtcgggtgctgggtgacttgctgcccgccggatga

SEQ ID NO: 335157 - DNA, 444 bp, Pseudomonas aeruginosa
atgcaacagcagacctggactaacccccttcttcgtctctgcgccggcctggcctgcgcgctaaccctggcagcgtgctccaccagcaaggaggagatgctgccccacggcgaggccaacatgctcgacgtctgggaacaaggtgcaaccagctcgataggcaacagccgtggccggctactcctcgatgccagaaaaacgctgcggcgcccgatcgatccgcagcaggttgcctccgcgaacgaccaggccgactacacccgcacggccagcaacgagatccacagccagttcaaacgactgcccaatcccgacctggtcatgtatgtgttcccgcacctggccggcagcgatcccgccccggtaccgggctataccaccgtgttccccttctaccagcgagtccagtacgccatgccgggcgagcgcacggaggactactga

SEQ ID NO: 335158 - DNA, 729 bp, Pseudomonas aeruginosa
atggctgaaacccatcggcttcagatcggctctctccgcagcgatgtcgccctgacgcttcacacctatcacgccgcccgcatctggacaggccggcagaagtcggatgccaagcacagcatcctcggcctctccggcttctgcgcctacgtgaatcgcatgcaccgcggggcagcactggacgatccgtactccgactggtggctggttcagatcgaagagaaagtcgagagctgccaagccgcgctcaaggccatcgaccagcgcctggatgacgtcatggccaagctgccagcgaccctcgatatctccgagaacttgtccgtcacaccggtcaaggtcccgttgttcatctccaaccctctcggcttcaaggcggtctatctcttgaccaactatgacgagctcgcccgccgaatcctgctggcccagcacgtcggactggtcggtcgccgcgacatggaggtctggctcgacgaaggcgcgtcggtgctgcgcagcctctttggtctggcccagagctaccagttctcgggcgccactcgcgacgacttcgccgcgaacaacgctcgcgccgaagccgcgcggaagatgtacgagaagttcggcgagatcccgcaggacatcctggagggcacccgacgctcgaacttcgctccgccgatcactcggggccgctctgacggtgatgccgatgatgacgctgaccgtgtcgagctcgaggactga

SEQ ID NO: 335159 - DNA, 828 bp, Pseudomonas aeruginosa
atgcttgattggtgtgaaggcgcgaatctcccgctctcgcaggaccaccaggtacacagcgacggactgcacgcgcccggcggtggttggcctgcccatcacgcgccgcaactctggcgtgaccagataccccaccaggcgatcgatgacgcgacggcattcctgcgaggcgaccttcgggaggtccaggcgacgcggcgagctgagttcggcgctgatgcacgacttggtgatttccttgaaggcaacgcgcttgtagttcttgatcccggcagcctggagtatgtgccagccgatgctttcgccttcccgatccgggtcggatgcgacgtagatctccagagctttctgctgcagatccttcagccgtgcgacggctttttccttgcccgagaggatctggtagtgcggtttgaaatcctggcccacgccgacggtgagcatctgcggatcctggccgtgaacggggaggtctctgatgtggccggctgtcgcctcgacctgccaggtcacgtcgggacgaatggaggggagaagggaccgcagctttttcagcttgcccggggcttcaatgattacaaggtgcatcggcggagtctctcagtacagtcggttgaactgtcgcgatcagagagcgggccaacaatgcgaaatggacggtacgctgttgcagttttcgggaggtgctgtagagcgggatcgatcagaagtcgagctgctgttgctgctcctgggcaaaccctttcaaccaggacgcccgcatcgcaggatgactgtaggggcagtcgaacacccgtagccctttccgcgcggcctcagcaccaatag

SEQ ID NO: 335160 - DNA, 1110 bp, Pseudomonas aeruginosa
atgaagcttatccttgatttcgacggacgccttctaaatccaagcaacatgctagaggccctatcaaaagcaggaaagaatacaaccatcagcataagcaacgcgcaagcattaaatatagacactcttctcaaggcaacaacaactgcagaaaacacaaaaaacctctcaacaactttcaacggcgcagagctgactgccaacaaccttcaggaagtcataaacttagcaggatcattaaccagagtatccacaatagccgcacaagccattaatataaacacacttctttccgcaatatctacagcaggcaactcaaagagttttagcgcagaattcaatggagcccaactcagcagcgacaacctacttagagcagtgaatgcggcaggaacaaacactagcataagcgtcaacaccgcacaagcggcaaatataaccgcccttcttcagactattcatgcagcaggtaacacaaaaacattcagcgcagagttcaatggcgctcaacttacttcaaacaacattcaacaagctttagacgccgcaggaacccgaacatccattagcgtcaacaccgctcaggcggttaatataagcaccctgctagccctcatcaactctgccaaagacacgaaaaaatttagcgccgacttcaatggtgcacaactaacagcagacaaccttcagcaagcgatcagcgctgcggcctcgggaaccagtatcagcgtcaacaccgctcaggcggcgaatatatccatccttttacaggccatcaacatcgcgggcaacactaaaaaattcagcgccaactttaatggtgcccaactcacttcaaacaacatccagcaggcgctgcgagcggcaggatcaaacacatcaatcagtatgaactccgcacaatccgccaaccaaagcactctacttgaacttctagacatagcaagttccagcaagcaattccaagccaattacaacggcggcatgtctaatccgagcaacctacaacagatagtttctcgtgcaggcgctagtgcaaccgtgtttatttccgacgcacaaggcctaccaatcgcaaatatccttacccttatatcatctgccggatga

SEQ ID NO: 335161 - DNA, 1080 bp, Pseudomonas aeruginosa
atggggggcttctgggagcagttgcagttcgccttctacagcaagcagttcggccgcaaggaacgcctgcagttctacgaaagcatgtccaccctgctcgaaaacggggtcccgctgaaggacgctgtggcagaggtacacaagatcttcgctcatgagggacagcatccgtttcatccggtggccatcgccagtcgcgaagcgctgatggggctgtccaacggcaagcgtctggccaccgccatggcgctctatctacccgcccaggagcgagcgctgatcgaggccggcgagatgagcggcaacctggttcaggccatgggcgatgccgtctccctggtcgaggcccaggccaggatccgcgccaccatctggcaggcgctgctttacccctcggcgctgtccgccatgatggtgttcctgctgtgcatcgtggcctatcgcatggtccccagcctagccaggctctccgacccagtcacctggaccggcccgctcgccacgctcaacgccattgccagcttcgtcacaggacctggtatctacgttctggtcgccgtcatcaccctcacggtggtggtcatcgtcacgttgccgacctaccgctggaaaggccgggtctggctggaccggacgctgccgccctggtccatctaccgcatgctccagggcaccaccttcctgctgaacatggcggtcatgctcaacgccggcatacgcccctacgacagcctggccagcatgatcaagatctccccgccctggctgaagcagcgcttggaagccgcccgctacggcgtgggcctgggccagaacctgggagtcgcccttcgcagcgccggtcacgatttccccgaccgacaggcaatccagtacctgtgcatcctcgccaaccggggaggcttctccgaagcgctggtcaagttcagccgccgctggcaggagaccagcctcaagcagatcgagctggccgccgggctggtgaagaacttcgccctgatcttcatcggcgcgctgatgatcctggtcctgctcggcgcctaccaggcacagcagctcatccaatccatgaaccactga

SEQ ID NO: 335162 - DNA, 453 bp, Pseudomonas aeruginosa
ttgctgttcgatccggccctgctgaccggcctgatcaaccagagcctgctgcccaagctctgcccccgctgcaagctgcgcttccaagaccaccaagaccaactcgcgcccgacttggtcgaacgcgtccgacgcttgaccgatgtttcccaggtgcacgtcaaggggcctggctgccaggcctgccgtggctccggggtcaacggccgctcgatcgtcgccgaggtggtgctgcccaccctcgccttcatgcgtgtgttcgccaaaggcggcccagccgaggcacgcaactactgggtcaagaccatgcagggcatcaccaagcacgcccacgccatccgccgcatcaacgagggtatgttcgacccgcagatggtcgaggatttcattgggccactcgacttcgatgagcatctgctcgacgacagcttctactcgcaggaggcgtgctga

SEQ ID NO: 335163 - DNA, 1065 bp, Pseudomonas aeruginosa
ttgatcaattggcagcgcgaaatccagcaggtctatccctcggccaccgtggccatccagcaggacaccccagaggcgcagtggatactcgttaactacgagcagttgagccccctcgtcgccaacgcttcgcgcttcgccgtgatggtcatcgacgaggcgcagcggatgaaggaaccgacggcgcaatgcacgcggcacggtttcgacattgccgcccaagtgccgaaccgctacctgcttaccggcacgccggtgctcaaccgcgagaccgagctgcacaccctgctgcgcctctcgggccaccccatcggccaactgccgctgaaagagttctgcgaccgtttcgccggcaacccggagttccgccagagtctgcgggcggagctgggtgactggatgctgcgcaggcgcaaagatgtgctgcccagcctcaagggcaagcagcggcagttgctgaaggtggccctctccaccgaggaacgccagcaatacgacttgctgcgtctcgaagaccgaccggtcttcgcgcgactcggcgcgctgcggcgttacctggaaacggtgaaggttcgcgtggcgatggacctgttgagcgagctcgacgccgaggacaaggtgatcctgttctgcgagttcaagccgaccgtggctgcgctgaaggaactctgcgagcaggccgggcacggctgcgtcacgctggtgggcaatgactcgctcaccaagcggcagaaagcgatcgatcgcttccagcaggatcccgactgccgggtgttcatctgcaccacggcggccgccgggacgggcaacaacctcactgccgcgaactacgtgttcttcctcggtctgccctggactcccggtcagcaggaacaagccgaggaccgcgcgtaccgcaacggccagctccgcatggtggtggtgaagatcccactggtcgagggcacgatcgacgagcagctgtggcaactgctcaacgcgaaacgccaggtagcccaggacctcatcgagccagagcaggttgacggaaaccgtgcgcttttagccgcaagcctaactggataa

SEQ ID NO: 335164 - DNA, 537 bp, Pseudomonas aeruginosa
ttgaatcgagtcgacgagcgcctcgacgccgtggatggacagcacctggtcagcaacgaggacttccgctcaggccagcaggcactgtccaaccgcattgacgccgcgcaggcgttcgccaagcaggcctccgatgccgtcgagaacctggctcagaccaccgcctcggccggcgacctcttggtgctcaaggcaaccgtggagacactggacggttctgtccgcacgcttcaagaaaagcagaccaaggcgccgccgctgatcgtgccagcgcccaaacgccccatacccgccaagcccaagccgaaacccaaaccgatggagcctccgcccttctcgatccttggcgtggagtatcgcgggggcgaacggtttctgtcggttgcacctccgggatccacccagctcagccagatctacctcattcgccaaggcgatgccgtcgccggcacgacctggcgactgaccgaccttgatgatggtaccgcgcacttcgacgtcgccggcgcctcgcgcagcgttcgcatccaaccatag

SEQ ID NO: 335165 - DNA, 954 bp, Pseudomonas aeruginosa
gtgagtgtgaacccgatcgtccaggctcagttcgtcgacctctacctcggtgaaggcttcgccgacgtgaaaggcctggccggctccggcgcgcgccgagtcgaagtgcctcgcgagtgggagtcgcacgcccaggaactgctacagatctgccggcaaacgctggaggagctgcaggatcctgagttcgccatcgtcgtcgacggcgttctgcttcgcgtcaccctcctcgaggacgcgttcagtggcagcgtattcgtgctgcgccggtcgacggcccaagtcagaagcttcgaagacatcggctatccgagcgaagtggtctccgccctgatggatccgcagttgcagggcctggtcctgttctgtggcgatatggcgaccggaaaaacctcctctgccgcctctctgatcctcgcccgactgcaaaccctgggcggggtgggcttcaccgtcgaagatccgcaggaaaccaatctcagcggccagcatggactcggccgctgtatccaggtcaggacctcgcgacgctcgggaggctacagcgaagccctgttgcgcacgctgcgtaccggagccgacctggtgctgattggcgaaatccgcgacgaagacaccgcttatcaggcttgcaaagcttcgctgaacggcaacctggtcatctcgaccatccacgcgaaaaactgcccccaagccatcgaacggctgatcaccctggccaaaccgctcgcatccaatgcttacgatgtggtcgccgagggcattcaggcggtgatctgccaggaactggtaagtgatggcgccgctcgacggctgcacgcggaaccgttgctcttcaccggggtggattccgtcgccatgcgcgacaagattcgccggcagcagattcacctgcttgaggacgacgtgaatcgccaggctcgcagaagcctgtgggagccaacctatgaataa

SEQ ID NO: 335166 - DNA, 618 bp, Pseudomonas aeruginosa
gtggccatccttggccggtgcggctggggggaacacagtggtggattcaggcttcttagtcggagcggggctggttgtgattggcgtcggcgttggcaccgaggcgaccacgacgggcgactcaagcgtgctgactttttccgtggaggagggttgcgctaccgccgctggagttggggcagcgggcttcgcatacagttgctggaccggtttcggcctcggcgccgggggaagttgatagcccgggcgcagtacgaagcagacctgccgcgccacttcgtcgaccttcacctgccaggcaggaccggagaggacttggagggtgttgcgcagggtcatggggccgagcttgtactgagctgccggcagcggccgggtgtagaggatgttcacatgaccggcctctgccgggcacagcgagtaacccgagcggctcatcacgtactgcatggcgtccttgacactcgggttcatgctcgacgggatggtcacgtcgatgatctgtgccatcaggtcgcgctggccagcgtccggctgggtgctgaccagggtgtagcgcccgtagcgcacgacgggctccttctccggttgtacgccattcgggtacaggtccggtga

SEQ ID NO: 335167 - DNA, 657 bp, Pseudomonas aeruginosa
gtggtggatttcgcgacttacgcgcgcgaaggctacgccgcccagctcgggatcgcctacatctcgctgctgaataccgtgaacaacattgccgaacgcgaccagttcaagggccggccaatcgtcaagatcaccgatgaggggcacatcatcaccaagcacccgctgctgctgccctacgccatgaagatcaccaagatgtggcggaaactgggcgcctggttctggctcgccacccagaacatcgacgacatcccggcctccggggctccgatgctgaacatgatcgagtggtggttgtgcctgaacatgccccccgacgaggtagagaagatctccaggttccgcgagctgtcgccggcgcagaagtcgatgatgctctcggcccgcaaggaaagcggcaaattcaccgagggcgtgctcctggccaagggcaaggagtacctcttccgtgtggttcccccgagtctctacctggccctggccatgaccgaaaacgaagaaaagaaccagcgctacaacatcatgcaagccaccggctgcgacgagctcgaggcggccttgcaggtcgcagcggatctcgacaaggcgcgcggcctgccgcccttcccaattaatttcccagaccaaccggcagtggagtgccaggacgaatga

SEQ ID NO: 335168 - DNA, 849 bp, Pseudomonas aeruginosa
gtgcctcgcgagtgggagtcgcacgcccaggaactgctccagctctgcaggcaaacgctggaggagctgcaggatcctgagttcgccatcgtcgtcgacggcgttctgcttcgcgtcaccctcctcgaggacgcgttcagtggcagcgtattcgtgctgcgccggtcgacggcccaagtcagaagcttcgaagacatcggctatccgagcgaagtggtctccgcgctgatggatccgcagctgcagggcctggtcctgttctgcggcgagatggcgacaggcaagaccagctccgccgcctctctgctcctggcccgcctgcaggagctgggcggggtgggctgcgccgtcgaggacccgcaggaaaccaacctcagcgggcaacatggactcggccgctgtatccaggttaggacctcgcgacgctcgggaggctacagcgaagccctgttgcgcacgctgcgtaccggagccgacctggtgctgattggcgaaatccgcgacgaagacaccgcttatcaggcttgcaaagcttcgctgaacggcaacctggtcatctcgaccatccacgcgaaaaactgcccccaagccatcgaacggctgatcaccctggccaaaccgctcgcatccaatgcttacgatgtggtcgccgagggcattcaggcggtgatctgccaggaactggtaagtgatggcgccgctcgacggctgcacgcggaaccgttgctcttcaccagtgtggattccgtcgccatgcgagacaagattcgccggcagcagattcacctgcttgaggacgacgtgaatcgccaggctcgcagaagcctgtgggagccaacctatgaataa

SEQ ID NO: 335169 - DNA, 744 bp, Pseudomonas aeruginosa
ttgatcaatgaagcggtcctgacgcaggtgatcaaccacctgcgcaatgggcagttcaaacgctgcgccgaaatgggcctgaagccagaaattctggctcagctacaacagccgttcgtcatgagtctcctgacgaatacccccgtgtcgtgggtcgaggtgagggtgaacaccgacgtcatggaaaaaatcctggccaccgccgagcgctctcagcaagaggagctgcaaattgagcgtgctctcaaactcggggctaccaccacgatgattcagagcttcttcggtctatcgccggaagacactgcgaccaagcggctgatcatggagatacacccccggcggggccgctggcgtcagctcgacggaacactggaacaccagatctggtatcgctgggagcacttgatgcaagagaaccaggtcagcctggacgacagcttggcgcttctcgacatcgccatgatcttgaccgaggaaatcaacgccggcaccgatcaggacagcccggagttcataagcctcgccgtagtttggtcgctcattcagagctggttgaaagacggactctattcgtctgacaaatcgggtcaggcccaagcaggtcagcccagggctccgacgaccctttatcttgccagcgtcagttcacacctgccccagtctgcatcacaggtggacgctgagacagaacgtcaacaactactgaacctggttcagtcggaaggcgacacagcaccatga

SEQ ID NO: 335170 - DNA, 438 bp, Pseudomonas aeruginosa
gtgccgcgcgaaacgcccatccccgtggttctgacgcgctatgcggcgcagatgctctatgccccgcttcgcacggtggaaccggtggatggcgtcggtcaggtgcgcgtcaagcgacagctcgacctgaccaccctgctccccagcctacccatcacggctaccgccttgggcgcctggcggctggacgactactacgtcacggcggtgaagctgcagaacgccagcgcccagcacctggccctggatcccagggacctgatgggcaatttcgtcgccgcgaccttccagcacccgtacttgggggcccggggcgacgcttccgacactactactgtgtatctggtgactcgcggccgcggccttgccgacgcgctcctgccctcctccatcagccagatcgatcccaaaggaggccgtcgtggcgctgaccggtaa

SEQ ID NO: 335171 - DNA, 198 bp, Pseudomonas aeruginosa
atgcaatacggaaagcgggcactcgcccatcttcgtctcgaactgccgctgcaggttcttgtgtccaacgccggcttttatatcggcacccttgatgaagaaggaccagcctcgcgcgagtcggttgaatattacccctcacgcgaacttgcccaacaggcattagacaacggcacttggacgcaacgggaatattaa

SEQ ID NO: 335172 - DNA, 603 bp, Pseudomonas aeruginosa
gtgagtccggtatcgaccaagatcctgcagactcgccaacggctggccgctctcgagggtgaacatctacctgtcttcgaggaaacagctcttcacgcaatcccggtgcaagtcggcggcctgcacccgatcaccgacctctggtacatcgagcggtcgatcgacacctccgaaatcctgcgacagcacatcgctgatctggctgaagaaatcgctctgcacgtcggcgccccaggcgagatcgtcaggatccagggcggtgtgggttacacgtatcgcgagcccaatgaagaccctgagattactgattcagcgctgcacctcatcacgctgcttcaggccctcagtggccaggtccaggtaatcctggataaggtcgactcgcaaacttgtcgtgatgctctgggtgaattccagttctcagctggcctcgctcagttgctgctgggccaacccaccacaggcgatcagccatccagccaggcaggccgtctcaatgacgaagccctggtgaaactgttccggatcattcgtcttgcccggcgcctggttgaccttgagctgccgccggccacctccgagcaagcagctaccgaccagtga

SEQ ID NO: 335173 - DNA, 528 bp, Pseudomonas aeruginosa
atgaacactgaagcccgctttccgagtatccacgcctcggccgcgttcaccgactcggcggtggttcatgccaatcacgttggggtcaaccccatcgagctggacgccctcagccaagtgatctcgcgcctttcgcgggacgagagcacggtcgcacccagttcgatggagcgagagcttcgtgagctggaggaactggggtacatcgaaatctcgaccacccaggccggaaccctggtggtcactacgcgcgctccggggcaactgctttcagcctacttctggtcggtatggatccctcgccacctgttcagttgctcgctgaaagtgagcctggtgccgcacctctgctgcggcactcaggactcccagcacctcaccgccgtgttccgcattgcaggcagcaaggacgccgcgcgtgagttcctgcatcagttggccaacaactatcccgggcatgagcccgagttgcccgaactggtggctgtacaggtcggtgatgcactcagcaaggaggccgaatcatga

SEQ ID NO: 335174 - DNA, 369 bp, Pseudomonas aeruginosa
gtgctgattggcgaaatccgcgacgaagacaccgcttatcaggcttgcaaagcttcgctgaacggcaacctggtcatctcgaccatccacgcgaaaaactgcccccaagccatcgaacggctgatcaccctggccaaaccgctcgcatccaatgcttacgatgtggtcgccgagggcattcaggcggtgatctgccaggaactggtaagtgatggcgccgctcgacggctgcacgcggaaccgttgctcttcaccagtgtggattccgtcgccatgcgagacaagattcgccggcagcagattcacctgcttgaggacgacgtgaatcgccaggctcgcagaagcctgtgggagccaacctatgaataa

SEQ ID NO: 335175 - DNA, 219 bp, Pseudomonas aeruginosa
atggaacgcttgctcgagagcatttacatcaatgcccggccggctatggagttgaggcttagcctcaccagctccggccgcaagagaattgtaaaggttgtggatggggaggaggtcgaggttctgtcaggtgaagtgcagggcatcctggaggcccaaaagagggatgttggaatcctcgccgatttcttagccaagagtctcttggcgcgacgctag

SEQ ID NO: 335176 - DNA, 369 bp, Pseudomonas aeruginosa; identical to SEQ ID NO: 335174

SEQ ID NO: 335177 - DNA, 219 bp, Pseudomonas aeruginosa
atgccggcgatggcgatcgaacccactgccgccactgtcgccggcgacgaaccggacagcgcggcgaacagcatgcaggcaagcaccgcagcgatcgccaggccgccgcggatatgcccgacgcaggcattggcgaagtcgatcaggcgccgcgccacgccaccggtggtcatgaacgcgccggagagcaggaagaacgggatcgccagcagggtgtag

SEQ ID NO: 335178 - DNA, 1035 bp, Pseudomonas aeruginosa
atgaggacgcacgaggagatatttgagctcgtcagagctggacgccgacagatgaaaggtttgccttccagaaaggtatctaggtcgacttatgaaggttatgtccgcgaatataatcggcttgtcggcgacgaaggcgctgagccagggaagttatggtctgctatctgcagaactagcagtaagtcgacctatcgacgaagggtggccgcagtaatttactgctgcagatctcaactgtcagaggccctgcagaaccaagatgcggctcagcgagcaggagatatgaggagtctgagagagcatgcatcggtaattgatggagtgcttgaagttataaaatttatagagcggcacaaggggagctgccctcttgaaacaatagtgaggcgaaagtcgaaacgatcggacttaagaaaattaccgcatgactggcgtgagcagctgtacaaaagatttgagcatagtaagtacaagttgccatacttggttgaggcagtgtctgggtgtcggccaggtgaacttgagaagggggttaaagtaatttgtaatcaggccatgttgactatacgcatagataacggagtcaaggttactgaggaaaaggggcagccatggcgagaaatcagctatcggattgaccaagattcgcatctgctagtcaaagcgctctacgattcctgcagggaattaggaaatgatacgtgcgccgtggttggcattgataaaagtaccaactggcgagcggcactttcggcgactgggcagagtttatggccaagactgcacttcagaatttgtccgtaccatcttaggaatgcggcggcgagcgatttcaaacgatcagaaatcagcaatgaagaggtgtcggccgccctgggccactgtgtggataagacggggagcctgtatgggcagcatcaggttgggcgaggcggcttggggctgcgtcctgaagtgatcagcgctgcacgtcccgtcctgaggacccgtagccccgtccctgttaagcctggagcggcagccccacgatag

SEQ ID NO: 335179 - DNA, 795 bp, Pseudomonas aeruginosa
atgaaggtgggaacggaagcctacaatattgatcatgagcagacccatgcaagaggcgtattagtaagtgagtctgatcttcataagatgctggccggcccagtaaataaaattataaatgacactcaaggaaagagtgatatccgtgtcctgctctccagcgtcgtaaatactggttttgaaaatgcggcactagaaagtttgctgcaggaaagttttgatgttcctgattggttgatcggtgaggccctggcagagtttttgattgccgaggaacgagagtgcgagtttccctggccatcgtcacgcgatttaaagaatccaaattcaagtgcgactggtgcggatttggtcgggtttcaacgaacaggtgatcccgacactccttataggtttgccttcggcgaggtgaaaacctccacagaggagaaatggccacctcaagtagtttatggcagaggcggtcttcaagagcaaatcgaggatctaaagagctcccagccggtaaagcgagggctcttcttgtatctcggtcatcacgcccaaaatagcacttgggcagacaagtatatcagcgccgccaagagatacttgaaaagcaactattgtgactcgtcgctattcggcgttcttgtgcgtgatgtagaacccaagagccttgatctgaaacagcgtgccatcaattcgtccaaagagaagcccgctgagactcaaatagcattttttgcgatataccttcctttgggagtaattcctagcctccctgacttgcttgcggcgaaggcagccaaatga

SEQ ID NO: 335180 - DNA, 3243 bp, Pseudomonas aeruginosa
atgagcttgcttcctgaaaatttcgatgtagttgataaccattgggcacttctagctctcggggaagctgatcgtgtcgaaggtctagctcaagctgacgagcaattggcaagaatgagtctaaagggagtcttgtcttcaccagaagatagtccaatagatctagctcgtcttgagcggcttgcaacagcctatgaacttgctgctattgaggggctggagtcgctcattcacttggcgcgaaccgaacaaggtatcaagctaaaaatacaagctcaggccggtgcgcatcgggcgttcggaatccttagagttttgccaatcccggtagagtgtgtcgaggcaagaatctttcatgttcttcatgtcgctggcgtggcttattgcggcgatcgttggacggatttacgcagatggttgaatgagaatgaggaagttcagttggtcccttctgtcgcggccactcgctgggaccaaaggctcctttatcgcatttttgatgcttggctgagtttgctcagaaaaagaaactgggacgatttggatcgtatcagccagttgatattaactctgagggaagagcagaaactttacgaagctacatatcttgagggctcaaccgctctaactggtgcaagcctcgcattaagactggtggctctttatcactgggccaaggcaacagagcgtcttgctgagtacatgctccagggtgagcctgcacaaatagcaacagagctcgatcagcactttgaagcggcctgcaaagctgctctcagctctcaggactatcagctggaagtaattctgcggtggttacatggcgccagtcgcataatggtcaatgcctcaatttggtggactgcggaaggggcaaggtcaagaactactagttttgtgaagttagtaacccaaagcaaggggatgtttgagcttcttccgccacagcaagctgcaattcaagagcaaggcctccttaatgccgctagccaagcggtagttatagacatgccaacctctggcggaaagacagcgcttgctcagtttcggatgctgcaggcgctaaatcaatttgagcaagataacggatgggtggcatacgtagctcctaccagagcacttgtctcgcaaataactcgccgattaagagaggactttacgcaaatcggcataagggtagagcctttaactggcgcagttgaaattgactcgtttgaagaggaccttttgcagagtagctcggccttccaagtgttagtgcttacgcctgagaaactccaactcgtaattcgcaataagaaggtcaagcgacctctgtcgctaacagttttggatgaggcgcataatatagaagataaggagcgagggcttcgcattgagcttttgctagccactatcaagcaggagcatccaaagtcaaaatatcttctgatgatgcctttcgtgccaaatgcagatgatctggcgcaatggctgggtgatggtcgcggaacctcaataagcttaagcgcagccgcatggcagcctaatgaacgtatagtcggcatattcaataccgagcaattccaagcagaaggaagcaagcgcggagactggcgcttaacatttgagacgctgaccaccacgcagaattctattaatctccgcgggaagcattacgttgacggagtacgaccactaaaaaggttgaattacagcgaggcgcagggcctcagcatacaagctgctgcaatggcaaaagctttctcttcaagaggaactagtatcgctgtagcgcagaagattcctgatgtatggaatattgcaagaaagctttcctccgaaatggaggcgcttccaaaagtcccggaagaaattgctctggttcagcgctttttgcagtctgagattagtccagactttgagctggtagggatgctcgagaaaggcattgccgtacatcatgctggcttgcctgctgaagcattatcactgattgagtggttgaccgagaaaggtttaatcaaagtactgtgtgctacgacgactatcgcgcaaggattaaatttccctgtttcttcggtattccttgcaactaggaaatatccttatggcattgaaatgtctcatcgttctttctggaatttggcaggaagggccgggcgtgtgcagcatggaagcgttggagttgtgggtatagccgcaggtgatgcgcctaacgaaattagaaagtacgtcagcgatgcaacaggagagctaatttctcgactgatcggcatgcttgacgatattgagtcagagggggatcttttaaatctccagcaggtccttcagcaagatcagtgggcggattttagaagctatattgctcacctttggaatgaaaagcggaatttggatatcgttataagtgaggccgaacagctgcttcggaatacctacggatattctgttcttagaggtagaggtgatcctgaatcgaaacggaaggcagatgcagtccttgaggctacaaaaggatatgtacgagagatcgctaagcatccagagaacgctagtctggctgatgccacaggattctcgcctgaaggtgtaagaacagcattccttgagcttggccagctggaaaataagatccgagcctcagactgggcgccaagcagccttttcgaaggcagtaactctatgttgcccgcgctagtcggtgtcatgatgaaaattcctcagcttaagaaaggccttgaggaaataaaaggaaacggccctggtcacaagaaaatttcggatataactcaggcctgggtggccggaaagtccattgaaagtatcgcaaaacaatattttgatggaaaaactgcaacagacaagatttcaaatgcctgcaaggcgatatatcgagagttggcgaacaatgccacgtggggtatttcggcgctgagtaagatgcctacgtctggtcttgattatgaagctatgtctgacgaagagaagagacagatcaacaatctacctgccatgctttatcacggtgtccggtcagaagaggctgttctcatgcgaatgaactcggcgccgagaagtatcgcggagagcctggggaccgaatttaagaggtcagctgcatcaactggatccgccactcaggctgctgatttcttgaggtcattaagcgagatggactgggataggctccgtcccaagtcggcagctatgagcggttctgattatcgtgaggtatggaggcgcctgtcgggtcagcattaa

SEQ ID NO: 335181 - DNA, 1029 bp, Pseudomonas aeruginosa
atggattacccacatattgagtctgccgcagctcttgaggacttagatcatgattgttctgagcacctggagctacgcttaagaaataaaggggttggaactgcatatgcaaaacagtgtcaattctgtggagaatttcgtggcggcgaaataagcaaggccaaagtaaaaacacagccaccacctagcgaccaaaacttagaaaatgcatttacacgaaaaaggctagagatactttcatcgagggagagaactccatcctctcttacgcccccaggagacagcaagacccttgagcagaaactggccgggctaggagaggcaattgatgagttctgctcaaccaacgaaatagaaatttcaacactgctacccatatatctgatgcgacaacgagatcgccatattaatgaagggtactcctcacgctggcagagcgaagatgaacttcacgactggttcattcgaaatttctcaaaatggttccacatttatcacgaggtgagtgggaccggatttgtaaacagagaaatagagcacattagaatagactttgtaataaaagcaaaagacgaacttatcgagcacggctttactgataagcacataggcattgaggtaaagcatctcaacccaataacagggaaagggttccacggcaagagctcaagaggaattttccaagcgctaagctattggtatagcggcgccagatggaacttaccaaacgccagcagcgtagagctcgccacagtactaatatttagcaacctgtcatttcaagacgagtctgaatatgtcttcaacagcctagactggcattaccggaaggtatggagatcctatctaagcattgcaaatcacgccaacgttggcgagctcgtagttaaactctggaatgacaacttagcctcttggaccatggagtacaacggcgccaaatactattcaatgcacactggacgcggcctagtgaaaggtaacccaaacgtcataagtaagagaagaattggcagtactaaaagatag

SEQ ID NO: 335182 - DNA, 246 bp, Pseudomonas aeruginosa
atgagcacgaccaagaagctgcggctcgggccgctgcccaagaccgaaagcgtcaaactgacctttgcctgcccagccagcttgaaagccgacctcgaccgctacgccgcgctgcacgcgcagacctacggcgaggcggttgatgccatgacgctgatcccgcacatgctggaggcgttcatggcgggggatcggggattcaggaaggacacggcgacccggagcgcgccatcgaagccgacatga

SEQ ID NO: 335183 - DNA, 1380 bp, Pseudomonas aeruginosa
atgaatgacgtgaccatcatcgaccagttcctcaacacctttgccgcgtatatcgactcgggtttcgggctgctgcggggcgaagtggcgttcctcacggccacgctgatcgtcatcgacatgacgatcgccggcctgtattgggccatgagccatgccaccggtcagggcgaggacgtgatcgccaagcttctgcgcaaggtgctgtacgtcggcgccttcgcctacatcatcaataacttcaactggctggccagcatcgtattccgctcgtttgcgggattaggcataaccgccaccggctcggccatcacgatggaaaacttcttgcagccgggccggctggcgaaaaccggcatcgacgccggggcgccgattctggagcagatcggtgagatggcgggctttcccgaagtattcgtaaacctcgaccccatcgtggtgatgttcctcgcgtggctggtcgtggtcttgtgctttttcgtgctggcgatccaactgttcatcacgctgatcgagttcaagctgaccacgctcgccggattcgtgctggtgccattcgcgctctggaacaagaccgcgttcctcgcggaaaaggtcttgggcaacgtggtggcctccggcgtcaaggttctggtgctggccgtgatcgtcggtatcggctcgggcttgttcgctcagttccaagtccatcccgccgagccgtctatcgaccacgcgctggtcatcatgctggcctcgctcaccttgctggcgctcgggatcttcggccccggcatcgccacgggcctcgtgtccggtgcgccgcagctcggcgctggcgcaatggccggtgctgctgtcggcgctgccggcacggccgtcgccatcggcgccgccgcgacgggcgtgggtggcgccgtggctgctggcgcgcgcatggccccggctgccgccaagctggccggtagcggtgcgcgcgccgccacgtcggcggccagcagtgcgaagtcggcgttccaggccggttccgccgccgctggcggcggcgcaaagggcgcgatggcgggcctaggcaacgtcgccaagaccggcgcgcagtccgccggacgcgccgcagcatcccgtgcttccgctgccgggcagcggatggccgctccgttccgtgctggctggaatggctcgacggccgacgctggcgcgtcaaccggtcaagcctccgcaggagaagcccccgcaggcggcgccgctgcacagaagccggaacaacccgcctgggccaagcggctgcatcgccgccagcaactcacccacgccgcgaccaccgccgcgcacacgctgcgcggcggcgacggtggcggctcggggcaaggcccgagcctgcgcggctccgacgactaa

SEQ ID NO: 335184 - DNA, 858 bp, Pseudomonas aeruginosa
atgtccagcaccgggctgccgtcccggcagcggccgttgcaggagcgcgaacagctcgacctgttccgcgccttgcccggcgacatggcgccgcgcgacagccaggatttgatggcctatccgttcttttcgctcgccaagtccaagcgggtcaagcccatcgacttccgtgcgggcaacgtgacgattcgcgtggaaggcacgcaggagcacggcatcgccacgatctgggacgcggacgtgctgatctgggcggcctcgcagatcgtggaggcgaaggacgcgggcctgcggccctcgcgcctgatgcacgccacaccctacgagatcctgcgcttcttcgggcgcggcaagtcgctgcgcgactaccagcgcctcaaggcggccttggatcgcctgcaatcgaccacggtagccacgtccatccgcgagacgaccgggcggcgattgcaccgcttctcctggatcaacgagtggaaggaactggccgacgccagcggcacgccgctgggcatcgagctgatcctgccggactggttctatgcgggcgtgctcgacgccgccctggtgctgaccatcgacccggcgtacttccggcttaccggcggcatcgaacgctggctgtaccgcctggtgcgcaagcatggcgggcggcaggagcacggctggcagttcgacttccgctacctgcaccagaaatccggcagcaccgccaagccctacgacttcgcctgcgacctgcgcgcgctggtcgcgcggcagtcgctgcccggctacgtcctgggcatcgagcggatgccggacaacggcatggagctgctgaccttccggcccgtgccgcagacggcacggggataa

SEQ ID NO: 335185 - DNA, 351 bp, Pseudomonas aeruginosa
atgccccagccactcgccaccgccccggagcgcgcgcaactgctcgccaacggcgaggcccgcgctgctggccaagtcatcgacccggtgcccgtggtacggctgttcacgccggacgcgcatgtgacctggctgttggccgcactcgatcctgccgatggcgacaccgcctggggactcatcgacctgggaatcgggatgccggcgcagggaaccgtcaagctgtccgagctggccggcatcgttgggccgcgccagcagcccgtgatgcgcgacctctatttccgtcccacgcgcacgctgtcggagtacacccgcgcggccgagcgtgacggcgccatcccggactga

SEQ ID NO: 335186 - DNA, 306 bp, Pseudomonas aeruginosa
gtggcggctgggaactcattggcgaaggcgttgaagacagtcaggaaagcgcgtggcttgagccaggaagcgttctccgacgtgtccagccgcacctatatgagtaccctcgaacgcgacctgaaaagccccaccttgaacaagctggccgagctgtgcgaggtgatggagatccacccgctcacgctgctgacgctggcctacgcgggcaatagcccgcacaaggccgacgagctgctggcgcaggtgcgccaagagctggaggcggtgttgagcgaacgcgacgcggcggagccgcgcgcgtga

SEQ ID NO: 335187 - DNA, 705 bp, Pseudomonas aeruginosa
atgagcctagttaacaactgggccccgcggtttatagagctgttctggagcttcgacggtcccgggatagaaaaatacatagccctcgacgaagaccgggttcggatcgatgttgacggtgggcgctacttcgaagccgacacgtggttcggcgcacctttcgacgatgacatccggaatataaaactcggtatcgtcaagctgcgtcctcctctggacctcgattcgatagatctctcgatgttcttcgctgatgcctattgcctagacatcaagtggagcgagtcggatggaatcaagtcattccaggccttggagatgaagacggagagcgtcagggtcgaagtcgaagggcagcattatttccctgctcggtacctgcatgccgagtacgatctcaaggccgactgcttcaggcacttcgatggcgcggtccagctctttacggaagatgagtattttcagaggcgggattctgacttcaacatggtcatgaagaattcagcgcacatcaaggcaaggtcgaccaaggtcttcaagatcaatggcccgctgagaacaaaagactgggtcgagttctgcagtcaatttcttgcgaagaacccccttgccttcgagtacttcaccggtgagtacccgaagcgcctcaccgagataatcgaaaagatcaggaagcgttcgtcgttacctgctggcggatcctaa

SEQ ID NO: 335188 - DNA, 591 bp, Pseudomonas aeruginosa
atgaatgctagtgattacgcaacctacgacgagaaaatccgtcgtcaagccgaggtgctcacctcgctcctcactgcaggtttgcggaccaaacaggacgtcgaaaaagcagtcgttgctctaagagaatttcagattgaagtcgagggtcagatcacctctgcgagacaagacctttctggcattgctgaggaaaccgccacccaggccgcagctttgctgtctgataaattcgttcaggcgaacaaggcagctgaccatgctgctaagcagtaccaaagcgcggcccggatgctaggcctgaagaccttcgcagtacttgtcgtttctctggtagccatcggcgcgacaacatggcttctggttggcccccttctaccgagccaagcagagctcgcgtttcggagcgcacagattgctgagatggagaccaaggcagccaagcttgagcgcagaggtgtcaacctagagtggggcacctgcgaagtggggatcttgaaacgcttaaaaccctgtttcagatcagacgggaagatctacgggccggatgctcagtccaacttctacgctgttccgcatagcgcgctatga

SEQ ID NO: 335189 - DNA, 714 bp, Pseudomonas aeruginosa
atgaagctttacgaaaacatcaccatcggcaatttcctgtttgccctcggctatgccatccgtgacctccagcaaggctcaaaatcagctgcggtaggatcggtcaatttgctccaacaaacgcctgccgatcgactgctagccgacgtgttgttgaatttcggtggtgtggctcgcctcttggaattcaaagccgagggcgcgaggctagacaaggaaatcggtaagcacgaagggctcaagcaggtcattgaagatcaggggctctccgagatttcccgtgaagtgcattggtatgttgagaccaaggccaccgaggattcactaggacttctcagcgttccatatctggatgcatttcctagggaaactgcgagggacggccggctgcacgagctcgtccaatccacggctaaggccattgccttacagaattccagcttcacccccaaggagatccacgactacctcctagcagtcaaaaccgttaacggtactgagagctcggggactggcggcttgctgctttgggctgaacctggaggggtactgaaattcactcctctagaggacatgctcgagctcaacatgacgcatcgggaatgggtaaaggagcagttcgaacgcgccgaagaaaatcaccagctagctcttgataaggccaaagcgaaggagctcgccaaacatcaatcatatggtccgagcctaggatga

SEQ ID NO: 335190 - DNA, 1167 bp, Pseudomonas aeruginosa
atgatcttcactgcctatcagcgtaccgatgccagccccaaaacgaaccgcgagagtaattttgccttcctggatcgatcagcttggccggagatggagcgagtccgtcactacctggagggccttgtaggggaatacccacaggaggagcgagacgagctagtcgcacggctcaaatgcggcgacgacacgcacttcaagtccgcagtgttcgaactcgcgctccacgctttcttgattcgactgggttacgccttgtccccccaccctgagctgccaagtgggtcaaaggcacgccctgatttccatgtcaccacacctactggcgaagagttctatctcgaggctgttctcgcgtcgattagggatgagtctgttcctgcagcagaggcaatgatcggttcaacgctcgatgcactgggtaacgcgaaccaccctagcttcaaggtcctcgttgagtacgacggcattcccgacacccaaccgagtgggaagaaactgctcgccgccacgttgaaatggctggattcgctcgaccccgacagggttcgggctgacgccgaaagccgaggcttggactcagccccaacactcaaatggacacatgaaggttggcaagtgcgcctccgcgcctatccacttaagcctgaggcccgcggtaagtcccgctcattgatcggcatgctcgatggcggcgcagggctcattgatcagtggtcacccattcgggacgccatcaagttcaagggcgcaaagtacggcgacctcgacaagcctctcttggtggctgtgaatttcggctcgttccatctcgacaaaattgacgagatggacgcgctatacgggcaggagcagtacgttctggatactagaaatcccgagaaggaagccagaattactcgtgcttcaaatggagcatggattggcccgtcaggccctcgagccaggcgtgttagcggcgcatggatcttcaacgacctaaccgcatactcgctctcctcacgacgccatacgatctatctcaatccatgggctacgcatccactccccgaagcattgaaagcgatgcctcacgcgatcgttagcggggaccggatgcaaaggcgcgacggcttttcgctcgctgaggtgcttggacttcccacctgctggccggaagacgaatag

SEQ ID NO: 335191 - DNA, 4341 bp, Pseudomonas aeruginosa
atgaaacggaccttcagaaaacttcgcaaacccgagcaattggctaatgatttttctagtggctgggatcaaggatcgcgtgctgaaggtatcgactggggtgagctactaaaatacccccgagtcctcttggtctccgaagcgggggcaggtaagacctacgagtgccagcaacaggctgccgctctgttcgatcgagccgaagctgcttttttccttcccctcgaagctgttgcggcaggtggtattggctctgagctgtatgggcctcacttgctgcgctttcaacaatggcaggcttcatcgtctcaggtcgcctacttctttctggactccatcgatgaacttcagctcgttcataagtccttcagggaggcccttaagcgcttggcccacgatcttgagggggccctcggtagagcaacaattgttgtgacatcgcgaccagtggcgatagaccgccgcgcttttcaagaaattcttcctgtaccgcaacctgcacgcgaagccctcaacggtgagcagtttgttcgcattgcggttcatggctccttggaagggaagcatgatcagcctccgccattcattgaggtcgaacttcttccacttaccaacatgcagattattgaattttcacgcgaccaaggagttttatccccagaggcactgctgtctgccattgacgctagacatgccctcgattttgctcgccggccgcaggatctcattgagctctgtgacgattggcgcgagcacggggagattcgctcccactttgagcaagtcaagaatcacgcactctctcggctcacggcgcgaccagatagaagggagcaagccgacctgtccatcgagaaagcctttcttggtgcgcaacggctcgctttggctgtcatccttggccgacggctaaccatccgttatagcgccggggccgacacagagaactcgggggaggcccccattgatccacgcttattactgtcggactggggggcaaaggagatcatcgcgcttttggagcgccccatatttgcagagggtgggtatgggcgtgttcggttccaccatcgttccgtaatggagtatctggctgcgcgtcagatccacctgctaatcgagtcagggaagctttctggatccgcagcgaagcggctaattttcggcttaacctacaccaataaaaagttgcttaagccatcaatgcgtccggttgctggctggctctcattgcttcgcccagacgtattcgacgaggtattggaggtcgagccaagcacgctgctaactcatggtgacccagagtcgttgactgagttacaacgcgagcgtgccttgcttgcattcgtcgagtgctatggaaagggtcagtggcgcggccttgtagtaccagatctccaggtagccagattggctcaggcagcgctttcagacacgattttgaccgcgtggaacagtggcgtagagaatcccgaagttcgcgaactcttgctaagactgatctcagccggccgactcggaaagtgcgcggatcttgctgcctctattgctctcgactccaattgcagcgaggaggagcgtttcgaagcgcttgttgccctatcgaacctggaagaccagcgattggaagcgctcatcgaagccgtcgtcacgctcgctccaagctggaccgaacgtatagctcgttgggttgggtcgtacctgtatccggaacacgtcagcgacgcgcagttgcttcagttactggtcaatgtccgcggcggctctagatacagtggtgactacgcggcccgcatcgcccgggtcatcgagaaagctgagctgagcactaaccggctcgaagctctactccctggtttgctagcacttacacgcagcaatatcgaggagagagatgaccagcttgttgaccggagcgcacgactagaagcctcagccattctgcgagccctctgcattcgcctactagagcatggtgcctacagctccgaattgatccaggcgtcagtactggtgctgcgggtttcggaaacgggttcagccctgcgaaaaggaagcaccgagcttcgcacgctccttgaagcgcttccatcggccaacaggcggcaagtttttgaagccgacctttcctgcatcgccatgctcgagtcgggaaaagtcgtgcggaatcgattggtacgacttgtctacgacggcgctctctcctatacacgggagaaggattggcagtgggttcttgatgcgctgtcagagcgtgaggctccagcggatctccgcactgtcctacttcagctggccgtgcattttgtacccacatgcagtggtgattcagacttcatcagcatccgaaaagcagcggcagattcgcaagccctgataacggagttgaacgaggctatcgaggccaacaagccaagcgaggccactctccgcatacaggacgagcaacgcaagcgaaaggagcggcaggaaaagaagactttaagcctgcagcaagaatggctcgctttctggagtgaagtcgcaaaacggcctgcattggcactagcgcctggccgcttgcacacgaccatatggaatctttggattgttttgcgcaacaaaggtggaggaagcgaagagggccgatgggatcgtgcattcttggagatgcacttcggacatgaagcgacgagtgccatccgacaagctttgtccgcctattggcggagcatgactccgtcggttcgcagtgagcgcaaagccggagaaaagaacacctatctggtggtctggtcgatcggtttggtggggatctatgcagaggccgaagatccaacttggacatccaggcttaatggtgacgaagccgagttggcagcacggtatgcgctactcgaattgaatgggctgccaagctggttggtagctttggtgaaagaacatgccgtttatgtagaaagcatccttggtggcgaactcgatgatgagctggcagagccgcctggcaacgggcggtggcattcgaccttgctccaggggctgcggtacggccccgcgcagatagccaagctcctccagccgcgactgtctgcctggttaggcgggcctggcgaaaatctgatgcagcttccgcacagtgagtccggcgaaaacaaattggatcaagtggttcgtgttttggccactcacggggatcaatcagtccgtaccgaacttgaagacctagctgccaatcaggttgagactgcaccagatacccctttcctcttcttctggcttccagtgctctgtcgtgccaacgctgcacgcggcactgcgaagttgcttgatctcctgggcgaatatccggtggaacaggacggtatcgccgtccgggcaattgggagccttttcaacgagcgatcgaatgactcaactgattggagttccctaacagctgacttgcttctgaagctgacgatttccatccaccgccatgtcaagcctgaagacgatcttgtgcatgagaacgtctactccccaggtccgcgggactatgccgagaacggacgacgatacgttttcgaagctctcatgcaagcgagtgggcctgatgccatgcgggcgaaattagagctcgcagcgcatccaatatttggccatttgcgagatcggatcgctgcgctagcgcatgagcgcctagcggctgaagttgactctagcgttgccgaaataccagaactggcgaccctcttcgaaggaaaagagttacccccaaaaacggggaccgatatggcgaaactactcgtcgatcgcattgatgatctgcaggagttgatgcttcgggacaccggtcctagagccgcatgggcgatggtgaatgatgaaaattcccttcgcccagccatcgcgcgggaactcgagctggcggcatggggtgcctataccgtcgaccaagaagctgtcactgttgatggaaaagagactgacatccgcctcagatccgtgtccggccatcaggctacgattgagcttaaggtgggcgagaaatctcgctcagcgaggatgctgcgagatactgtcgaaaaacaactggtcaataaatacatggcacacaagatggctaggactggctgcctattggtgacggtatcgaacccgaagaagcgttggcagcatccggagacaaaggcgctgattgataggtttcaacttcaagaactgttagacactgctgcccaagctgcgcaacagaggcttggtggcgatgctcgggtaatggctcgggtccttgatttaactccacgcctaactaccgaagcggaggcggttagcaaggcacccacaagctctaggcgcccatctcctggacgtaagtag

SEQ ID NO: 335192 - DNA, 612 bp, Pseudomonas aeruginosa
atgtacgtttataaggacgaagctaccgctctgctacgtgagtcagccgacagcatggtggcgacaattgagaggcatcgcgacaaactttttgacttggtcaacgagacagattgggcactggttatcaagctgcacgcgacccttgaggccacggtaacgcagcttgttgttgcttataccgctgacgagctcaagccagtagttgaaaggctaccgctgtcagatgctcaggtagggaaggcaaaaatgggggtggatctcggtgttattgaaccgtccatgtacacctttatcaggcgattttcagagctgcggaacgatctggttcacgacaccgcgaacatggaccttgatctgaaagcctatgtagacagcctggatcagaatcagcgcaagcgctggaagaaagcactagtttggactgagggagatgagggaaagcgtgctgaattggaatcggcgatgctcacaaatccgcgtaccactctctacatcatggccttcacattaattttgatcttggccacaaccgccgaggagccgaaagccaagcgccagatacaggagttggctgagaaaactactcgccagctgctctgtccagactag

SEQ ID NO: 335193 - DNA, 663 bp, Pseudomonas aeruginosa
atgccctcgaactcgaaaagtacgtttgaaatcaacaaagctgacatcgagaagctctgggagattcacaaggagatcggcggtgaagggcgtgggcgtaggcgcggcgtcgaggtgctgaaccgttctgtcattatttttgttaccgcgtgctgggagtcatacatcgaggatctagccgtcgaggcatttgacttcttgctggcgcatgcgccaaccgccgccgctattccgaacaaagtcaaaagcctcgcgattaaggacataaagaacgatccgaacccgctgaagctctgggacctagccgataccggttggcaggccatcctcctggcacataagaccgaggtacatgagaagtggctgggtaagttcaacacgccaaagtcagagcaagtcgatgccctctacgaggagatgttgggcctcaacagcctgagcagctactggaaatggaacaagatgaaggccgaccgagccaagaccaagctggacgatttcattactgttcgaggcaacattgctcaccgtatccgtgatgcgcagcctgtcgcaaagaacaccggagcgacgtacctgactcatgtgcgacagatcgtcgaccggtgtgagcaggccgttgcgaatcatttgaaggcgcaaactggggttgcgccttggtaa

SEQ ID NO: 335194 - DNA, 1269 bp, Pseudomonas aeruginosa
atgaacgatcgcttcgaacgcctgctcaagagcaggatcggcctggatgccagctcggtgggcagcgcggtgatcgagcgcgcggtacgccagcgcatgagcggcctcgcgctgcacgacgaggacgaatactggatgcgcctgaacggctcgccgggcgaggtgcaggcgctgatcgaagcggtggtggtgccggagacctggttcttccgctacccggagtcgttcaccaccctcgccaggctggccttcgagcgcctgccgagcctgggcggcggacgcgcgctaaggatcctcagcctgccctgttccaccggcgaggagccgtattccatcgtcatggccttgctcgatgccgggctctccgagtacctgttcgaggtcgacgccctcgacgtcagcgctcgggtgatcgagcgcgccagcctcggggtgtacggcaggaattccttccgcggcgacgaactggggtttcgcgaccgccatttcagcgaggttgccgagggctaccagttggccgagcaggttcgccgcaaggtgcgcttccgctgcggcaatttgctcgatcccgggctactggcgggcgaggcaccctacgatttcgtgttctgtcgcaacctgctgatctatttcgaccgcccgacccagagcgaggtggtcgaggtgctcaagcgcctgttgcggccggacggcgcgatgttcatcggtccggccgaggcgagcctgctcagccagcacggcatgcagccgatcggcgtgccgctgtctttcgtgttccgccggaccagcgaggcgcctcgcggagcgcggcccaaggcggtgagcgacggagcgcgcccggtcgttgccgccgccgtggagcgtgcgagtattcggccttcgccgctgccaccggcgaaaccgcgccagcggctgtccagcctggttccgccagccagcggccagcccctcgccagtcccgtcggcgagttcgacgaaatcgcccgcctggcggatgccggccagcaccgcgaggcgcgcgccgcctgcgagcgccaactggccgcgcgtgggccgtcggccacggtcttctactggctcgggctgctcagcgatgtcgccgggcaggagcaggaagcccaggatttctaccgcaaggccctgtacctggagccgcagcacgccgaggcgctggcgcacctggcggcgctgctcgccgctcgcggcgaccatgccggcgcccggcgcctgcagcaacgtgcggcccgtggagtgaacaaagatggttga

SEQ ID NO: 335195 - DNA, 2310 bp, Pseudomonas aeruginosa
atgaccccggaccagatgagagacgcgtcgctgctcgagctgttccggctcgaggcggaggcccagacccaggtgctcaacgccggcctgatggcgctggagcgcagcccgacccaggccgaccaactggaagcctgcatgcgcgccgcgcactcgctgaaaggcgcggcgcgtatcgtcgggctggacgccggcgtgcgcgtggcgcacgtcatggaggattgcctggtggaggcgcaggacggacgcctgctcctgcaatcggaacatatcgatgcgttgctccagggctgcgacctgttgctgcgtatcggcaccccgccagccggcgacgcaggctgggccgaaggcgccgggcgggaagagatcgacggcctggtgctgcgcctcgaaggcctggtgcgcagcggcctgccgctggcccgcgcggagctgccggcgacgactcccggtctgccggaagcggtccccgaggcgccgccagcggcgtcagcggccgccagcgacgacaacgacgaggagcccgccgggcaggcgggcggcgaacaggccgaggagcgccgcagccgggtcctgcgggtcaccgccgaacgcctggaccggctgctggatatctccagcaagtcgctggtggagttccagcgcatcaagccgctggccgattccctgcaacgcctgcgtcgcctgcagtccagcgccagccgcgcgctcgacgtggtacgcgagacggtccaggaaaccgccctcgacccgcaggcccaggccatgctcggcgaggcgcggcaactgattggcgaatgccagcagatgctggtgcagcacatcgccgatctcgacgagttcgcctggcagggcggccagcgtgcccaggtgctctacgacgcggcgctggcctcgcggatgcggccattcgccgacgtccttagcggccaggcgcggatggttcgcgacctgggccgctcgctgggcaagcaggtgcgcctgctggtcgagggcgaaagcacccaggtcgaccgggatgtcctggaaaaactcgaagcgccgctcacccacctgctgcgcaatgccgtcgatcacggtatcgaggcgccggaaacccgcctcgccgccggcaagccggccgagggcaggatcaccatccgcgcccgccaccacgccggcatgctggtcctggaactgagcgacgacggcggcggcatcgatctgcagcgcctgcgcgagaccgtgctcaatcgccagttcgccaccgccgagaccgtggcgcaactgagcgaggaggaactcctggcgtttctcttcctgcccggcttcagcatgcgcgagcaggtcaccgaggtgtccggtcgcggcgtcggactggatgccgtgcagcacatggtccgccagttgcgcggcggcgtgcgcatggagcaacgccaggggcagggagcgctgtttcacgtcgaggtgccgctgaccctgtccgtggtgcgcagcctggtggtggagatcggcgaggaggcctacgccttcccgctggcgcacatcgagcgcatgtgcgagctggaagcggaggagatcgtccagctcgaaggtcgccagcacttctggtacgagggtcgccatgtcggcctggtctcggctgcgcaactgctgcagcggcccgagagcagccgcaccgaaggggccatcccggtagtggtggtgcgcgaccgcgatgcggtctacggcgtcgccgtggagcgtttcgtcggcgagcgtaccctggtggtgatgcctctcgatccgcgcctgggcaaggtgcgcgacgtttccgccggcgccttgctggacgacggttcgccggtgctgatcctggacgtcgaggacctcctgcattcggtcggcaagctgctcagcagcggccgcctggagcgcatcgatcgcagccggcggcaggccggcggggcgcaacgcaagcgcatcctggtggtcgacgactcgctcacggtgcgtgagctggaacgcaagctcctgctcggccgcggctacgacgtggcagtggcggtggatggcatggacggctggaacgccctgcgctcggagcatttcgacctgctcatcaccgatatcgacatgccgcgcatggacggtatcgaactggtcaccctggtgcgtcgcgacagccgcctgcagtcgctgccggtgatggtggtgtcgtacaaggatcgtgaggaggaccgtcggcgcggtctcgacgccggcgccgactattatctggcgaaggccagttttcacgatgaggccttgctggatgccgtcgtcgtcctgatcggagaagcacagggttga
